United States Patent Application Publication US 2009/0100536 A1 - sequence listing, part 4

SEQ ID NO: 12574 - protein, 376 aa, Saccharum officinarum
  unsure (1)..(376): unsure at all Xaa locations
ALSIAGAVQSQKLAVRAISRLQALPGGDVKLLCDTVVEHVRELTGYDRVMVYRFHEDEHGEVVAESRRDNLEPYLGLHYPATDIPQASRFLFRQNRVRMIANCHATPVRVIQDPGLLQPLCLVGSTLRAPXXXXXXXXXXXXXXXXXVMAVIISSGGDDEQTGRGGISSAMKLWGLVVCHHTSPRCIPLPLRYACEFLMQAFGLQLNMELQLAHQLSEKHILRTQTLLCDMLLRDSPTGIVTQSPSIMDLVKCDGAALYYHGKYYPLGVTPTESQIKDIIEWLTVCHGDSTGLSTDSLADASYLGAAALGDAVCGMAVAYITPSDYLFWFRSHTAKEIKWGGAKHHPEDKDDGQRMHPRSSFKAFLEVVKSRSLPW

SEQ ID NO: 12575 - protein, 382 aa, Sorghum halepense
EPARTEDPALSIAGAVQSQKLAVRAISRLQALPGGDIKLLCDTVVEHVRELTGYDRVMVYRFHEDEHGEVVAESRRDNLEPYLGLHYPATDIPQASRFLFRQNRVRMIADCHATPVRVIQDPGMSQPLCLVGSTLRAPHGCHAQYMANMGSIASLVMAVIISSGGDDEQTGRGGISSAMKLWGLVVCHHTSPRCIPFPLRYACEFLMQAFGLQLNMELQLAHQLSEKHILRTQTLLCDMLLRDSPTGIVTQSPSIMDLVKCDGAALYYHGKYYPLGVTPTESQIKDIIEWLTVCHGDSTGLSTDSLADAGYLGAAALGDAVCGMAVAYITPSDYLFWFRSHTAKEIKWGGAKHHPEDKDDGQRMHPRSSFKAFLEVVKSRSL

SEQ ID NO: 12576 - protein, 376 aa, Tripsacum dactyloides
ALSIAGAVQSQKLAVRAISRLQALPGGDVKLLCDTVVEHVRELTGYDRVMVYRFHEDEHGEVVAESRRDNLEPYLGLHYPATDIPQASRFLFRQNRVRMIADCHATPVRVIQDPGLSQPLCLVGSTLRAPHGCHAQYMANMGSIASLVMAVIISSGGDDEQTGRGGISSAMKLWGLVVCHHTSPRCIPFPLRYACEFLMQAFGLQLNMELQLAHQLSEKHILRTQTLLCDMLLRDSPTGIVTQSPSIMDLVKCDGAALYYHGKYYPLGVTPTESQIKDIIEWLTVCHGDSTGLSTDSLADAGYLGAAALGDAVCGMAVAYITPSDYLFWFRSHTAKEIKWGGAKHHPEDKDDGQRMHPRSSFKAFLEVVKSRSLPW

SEQ ID NO: 12577 - protein, 1131 aa, Zea mays
MSSSRPAHSSSSSSRTRQSSRARILAQTTLDAELNAEYEESGDSFDYSKLVEAQRSTPPEQQGRSGKVIAYLQHIQRGKLIQPFGCLLALDEKSFRVIAFSENAPEMLTTVSHAVPNVDDPPKLGIGTNVRSLFTDPGATALQKALGFADVSLLNPILVQCKTSGKPFYAIVHRATGCLVVDFEPVKPTEFPATAAGALQSYKLAAKAISKIQSLPGGSMEALCNTVVKEVFDLTGYDRVMAYKFHEDEHGEVFAEITKPGIEPYIGLHYPATDIPQAARFLFMKNKVRMICDCRARSVKIIEDEALSIDISLCGSTLRAPHSCHLKYMENMNSIASLVMAVVVNENEEDDEPEPEQPPQQQKKKRLWGLIVCHHESPRYVPFPLRYACEFLAQVFAVHVNKEFELEKQIREKNILRMQTMLSDMLFKESSPLSIVSGSPNIMDLVKCDGAALLYGDKVWRLQTAPTESQIRDIAFWLSEVHGDSTGLSTDSLQDAGYPGAASLGDMICGMAVAKITSKDILFWFRSHTAAEIKWGGAKHDPSDKDDNRRMHPRLSFKAFLEVVKTKSLPWSDYEMDAIHSLQLILRGTLNDASKPAQASGLDNQIGDLKLDGLAELQAVTSEMVRLMETATVPILAVDGNGLVNGWNQKVAELSGLRVDEAIGRHILTLVEDSSVSLVQRMLYLALQGREEKEVRFELKTHGSKRDDGPVILVVNACASRDLHDHVVGVCFVAQDMTVHKLVMDKFTRVEGDYKAIIHNPNPLIPPIFGADQFGWCSEWNAAMTKLTGWHRDEVVDKMLLGEVFNSSNASCLLKSKDAFVRLCIVINSALAGEEAEKASFGFFDRNEKYVECLLSVNRKVNADGVVTGVFCFIHVPSDDLQHALHVQQASEQTAQRKLKAFSYMRHAINKPLSGMLYSRETLKSTGLNEEQMRQVRVGDNCHRQLNKILADLDQDNITDKSSCLDLDMAEFVLQDVVVSAVSQVLIGCQAKGIRVACNLPERSMKQKVYGDGIRLQQIVSDFLFVSVKFSPAGGSVDISSKLTKNSIGENLHLIDFELRIKHRGAGVPAEILSQMYEEDNKEQSEEGFSLAVSRNLLRLMNGDIRHLREAGMSTFILTAELAAAPSAVGR

SEQ ID NO: 12578 - protein, 901 aa, Zea mays
  unsure (1)..(901): unsure at all Xaa locations
XIRHEGYDRVMAYKFHEDEHGEVFAEITKPGIEPYIGLHYPATDIPQAARFLFMKNKVRMICDCRARSVKIIEDEALSIDISLCGSTLRAPHSCHLKYMENMNSIASLVMAVVVNENEEDDEPEPEQPPQQQKKKRLWGLIVCHHESPRYVPFPLRYACEFLAQVFAVHVNKEFELEKQIREKSILRMQTMLSDMLFKESSPLSIVSGSPNIMDLVKCDGAALLYGDKVWRLQTAPTESQIRDIAFWLSEVHGDSTGLSTDSLQDAGYPGAASLGDMICGMAVAKITSKDILFWFRSHTAAEIKWGGAKHDPSDEDDSRRMHPRLSFKAFLEVVKMKSLPWSDYEMDAIHSLQLILRGTLNDALKPAQSSGLDNQIGDLKLDGLAELQAVTSEMVRLMETATVPILAVDGNGLVNGWNQKVADLSGLRVDEAIGRHILTLVEDSSVPIVQRMLYLALQGREEKEVRFELKTHGSKRDDGPVILVVNACASRDMHDHVVGVCFVAQDMTVHKLVMDKFTRVEGDYRAIIHNPNPLIPPIFGADQFGWCSEWNAAMTKLTGWHRDEVIDRMLLGEVFDSSNASCLLKSKDAFVRLCIIINSALAGEEAEKAPIGFFDRDGKYIECLLSVNRKVNADGVVTGVFCFIHVPSDDLQHALHVQQASEQTALRRLKAFSYMRHAIDKPLSGMLYSRETLKGTGLDEEQMRQVRVADNCHRQLNKILADLDQDNITDKSSCLDLDMAEFVLQDVVVSAVSQVLIGCQGKGIRVACNLPERSMKQKVYGDGIRLQQILSDFLFVSVKFSPAGGSVDISSKLTKNSIGENLHLIDFELRIKHQGAGVPAEILSQMYGEDNREQSEEGLSLLVSRNLLRLMNGDIRHLREAGMSTFILTAELAAAPSAAGH

SEQ ID NO: 12579 - protein, 669 aa, Zea mays
  unsure (1)..(669): unsure at all Xaa locations
MSSSRPAHSSSSSSRTRQSSRARILAQTTLDAELNAEYEESGDSFDYSKLVEAQRSTPPEQQGRSGKVIAYLQHIQRGKLIQPFGCLLALDEKSFRVIAFSENAPEMLTTVSHAVPNVXDDPPKLGXIGTNVRSLFTDPGATALQKALGFADVSLLNPILVQCKTSGKPFYAIVHRATGCLVVDFEPVKPTEFPATAAGALQSYKLAAKAISKIQSLPGGSMQALCNTVVKEVFDLTGYDRVMAYKFHEDEHGEVFAEITKPGIEPYIGLHYPATDIPQAARFLFMKNKVRMICDCRARSVKIIEDEALSIDISLCGSTLRAPHSCHLKYMENMNSIASLVMAVVVNENEEDDEPEPEQPPQQQKKKRLWGLIVCHHESPRYVPFPLRYACEFLAQVFAVHVNKEFELEKQIREKSILRMQTMLSDMLFKESSPLSIVSGSPNIMDLVKCDGAALLYGDKVWRLQTAPTESQIRDIAFWLSEVHGDSTGLSTDSLQDAGYPGAASLGDMICGMAVAKITSNDILFWFRSHTAAGIKWGGAKHDPSDKDDNRRMHPRLSFKAFXLEVVKTKSLPWXSDYEMDAIHSLQLIXLEGTLEXMASKPAQASGLDNRIGXDLKLXMGLAEXLQAVAKXEMVRMENSKLXPNLGADGNGSMGWXNQKVAELSGLRV

SEQ ID NO: 12580 - protein, 466 aa, Lilium superbum
SGKPFYAIVHRVTNCLIIDFEPVNHTESPTTAAGALQSYKLAAKAIAKLQSLPGGSVRRLCETVVQEVFELTGYDRVMAYRFHEDDHGEVFTEVTKPGLEPYVGLHYPATDIPQAARFLFMKNKVRMICDCRARPVKIHQDDKLPAEITFCGSTLRAPHSCHLQYMENMNSIASLVMAVVVNDDDEVLDEQGAPSRQQSGRKKLWGLVVCHHLSPRFVPFPLRYACEFLMQVFAIHVNKEFELENQIREKNILKTQTLLCDMLLRDGDPIGIVSQSPNIMDLVKCDGAALLYNNRIWQLGMAPTGSQIHDIAFWLAESHMDSTGLSTDSLLDAGYPGALALGDTVCGMAAARITTKDIVFWFRSHTASEIKWGGEKHDPEEEDDGRRMHPRSSFNAFLQVVKNRSLPWNDYEMDAIHSSQLILRGTLDDNGKSKKGSLDSGMGDMRLDGMVELQAVTNEMVRLIIT

SEQ ID NO: 12581 - protein, 394 aa, Lilium superbum
DLEPVNPDDIPVATAGALKSYKLAAKAISRLQSLPSGNISLLCDAMVREVSELTGYARVMAYKFHEDEHGEVIAECKRPDLEPYIGLHYPATDIPQASRFLFMKDKVRMICDCTAPSVRVIRDRQLLQPPSLCGSTLRAPHGCHAQYMANMGSIASLVMAVTVNEDDDETDSNNQPKARKLWGLVVCHHTSPRFVPYPLRYACEFLLQVFGIQINKEVELAAQAKEKHIFRIQTVLCDMLLRDAPIGIFKKSPNVMDLVKCDGAALYYKNQFWRLGTTPTEAQIKDIVNWLLECHDGTTGLSTDSLTEAGYPDASSLGDEVCGMATISITLKDFIFWFRSHTAKEIKWGGAKHEPTDKDDDGRKMHPRSSFKAFLEIVKLRSLPWEDMEMDAIQ

SEQ ID NO: 12582 - protein, 394 aa, Pariana radiciflora
EPARTEDPAISIAGSVQSQKLAVRAISRLQALPGGDVKLLCDTVVEDIRELTGYDRVMVYRFHEDEHGEVVAESRRADLEPYLGLHYPATDIPQASRFLFRQNRVRMIADCHTAPVRVIQDPALPQPLCLVGSTLRAPHGCHAQYMANMGSIASLVMAVIISSGGDDSHNSSRGGIPSAMKLWGLVVCHHTSPRCIPFPLRYACEFLMQAFGLQLNMELQLAHQLSEKHILRTQTLLCDMLLRDSPTGIVTQSPSIMDLVKCDGAALYYHGKYYPLGVTPTEAQIKDIIEWLTLCHGDSTGLSTDSLADAGYPGAAALGDAVCGMAVAYITPSDYLFWFRSHTGKEIKWGGAKHHPEDKDDGQRMHPRSSFKAFLEVVKSRSLPWENAEMDAIH

SEQ ID NO: 12583 - protein, 394 aa, Pseudosasa japonica
EPARTEDPALSIAGAVQSQKLAVRAISRLQALPGGDVKLLCDTVVEHVRELTGYDRVMVYRFHDDEHGEVVAESRRADLEPYLGLHYPATDIPQASRFLFGQNRVRMIADCRAAPVGVIQDPVLPQPLCLVGSTLRAPHGCHAQYMANMGSIASLVMAVIISSGGDDENNITRGGIPSAMKLWGLVVCHHTSPRCIPFPLRYACEFLMQAFGLQLNMELQLAHQLSEKHILRTQTLLCDMLLRDSPTGMVTQSPSIMDLVKCDGAALYYHGKYFLLDVTPTEAQIKDIIEWLTMCHGDSTGLSTDSLADAGYPGAAALGDAVYGMAVAYITPTDYLFWFRSHTAKEIKWGGAKHHPDDKDDGQRMHPRSSFKAFLEVVKSRSLPWENAEMDAIH

SEQ ID NO: 12584 - protein, 210 aa, Sophora affinis
YDRVMAYKFHEDDHGEVIAEITKPGLEPYLGLHYPATDIPQAARFLFMKNKVRMIVDCHAKHVKVLQDEKLPFDLTLCGSTLRAPHSCHLQYMANMDSIASLVMAVVVNDSDEDGDSSDAVQPQKRKRLWGLVVCHNTTPRFVPFPLRYACEFLAQVFAIHVNKEIELEYQLIEKNILRTQTLLCDMLMRDAPLGIVSQSPNIMDLVKCD

SEQ ID NO: 12585 - protein, 170 aa, Sophora affinis
YDRVMAYKFHEDDHGEVISEVTKPGLEPYLGLHYPATDIPQASRFLFMKNKVRMIVDCRAKHVKVLQDKKIPFDLTLCGSTLRAPHSCHLQYMENMNSIASLVMAVVINDNDEDGDSSDAVQPQKRKRLWGLVVCHNTTPRFVPFPLRYACEFLAQVFAIHVNKELELEY

SEQ ID NO: 12586 - protein, 198 aa, Sophora affinis
YDRVMAYSFHEDDHGEVVSEIRRSDLEPLLPVLHYPATDIPQAARFLFQQNRVRMICDCHAKPVNVIQSEELRQPLCLVNSTLRSPLGCHTQYMANMGSIASLVMAVIVNGNDTTRLWGLLVCHHTSPRYVPFPVRYACEFLMQAFGLQLYMEIQLASQMAEKRLLKTQTLLCDMLLRDAPFGIVTQSPNIMDLVKCD

SEQ ID NO: 12587 - protein, 106 aa, Bouteloua gracilis
QAARFLFMKNKVRMICDCRARSVKIIEDEAASIDISLCGSTLRAPHSCHLQYMENMNSIASLVMAVVVNEDEEDDEVEPEQPSQQQKKKKLWGLVVCHHESPRYVP

SEQ ID NO: 12588 - protein, 102 aa, Bouteloua gracilis
SRFLFMKNKVRMICDCSAKPVKIIQDDSLAQLSSLCGSTLRAPHGCHAQYMANMGSVASLVMSVTVNEDEEDEADNGSDQQPRGRKLWGLVVCHHTSPRFVP

SEQ ID NO: 12589 - protein, 103 aa, Bouteloua gracilis
QASRFLFRQNRVRMIADCHATPVRVIQDPGLSQSLCLVGSTLRAPHECHAQYMANMGSIASLVMAVIISSGGDDEQTSRSGISSAMKLWGLVVCHHTSPRFIP

SEQ ID NO: 12590 - protein, 106 aa, Danthonia unispicata
QAARFLFMKNKVRMICDCRARSVKIIEDEAISTDISLCGSTLRAPHSCHLQYMENMNSIASLVMAVVVNENEEDDEAEPEQPPQQQKKKRLWGLIVCHHESPRYVP

SEQ ID NO: 12591 - protein, 104 aa, Danthonia unispicata
  unsure (1)..(104): unsure at all Xaa locations
QASRFLFMKNKVRMICDCSATPVKIIQDDSLAQPLSLCGSTLRAPHGCHAQYMANMGSIASLVMSVTINEDEEENGDTGSDQQPKGXKLWGLVVCHHTSSRFVP

SEQ ID NO: 12592 - protein, 103 aa, Danthonia unispicata
QASRFLFRQNRVRMIADCHATAVSVIQDPGLQQALCLVGSTLRAPHGCHAQYMANMGSIASLVMAVIISSGSDDEQMAQGGISSAMKLWGLVVCHHTSPRFIP

SEQ ID NO: 12593 - protein, 106 aa, Eragrostis cilianensis
QAARFLFMKNKVRMICDCRARSVKVIKDEAASIDVSLCGSTLRAPHSCHLQYMENMNSIASLVMAVVVNENEEGDEPEPEQPPQQQKKKKLWGLIVCHHESPRYVP

SEQ ID NO: 12594 - protein, 102 aa, Eragrostis cilianensis
SRFLFMKNKVRMICDCSVKPVKIIQDDSLAQPLSLCGSTLRAPHGCHAQYMANMGSVASLVMSVTVNEDEDDDGDTGSDQQPKGRKLWGLVVCHHTSPRFVP

SEQ ID NO: 12595 - protein, 103 aa, Eragrostis cilianensis
QASRFLFRQNRVRMIADCHATPVRVIQDPGLSQPLCLVGSTLRAPHGCHAQYMANMGSIASLVMAVIISSGGDDEQTSRSGISSAMKLWGLVVCHHTSPRFIP

SEQ ID NO: 12596 - protein, 106 aa, Pennisetum setaceum
QAARFLFMKNKVRMICDCRARSVKIIEDEALSIDISLCGSTLRAPHSCHLQYMENMNSIASLVMAVVVNENEEDDEPEPEQPPQQQKKKRLWGLIVCHHESPRYVP

SEQ ID NO: 12597 - protein, 104 aa, Pennisetum setaceum
QASRFLFMKNKVRMICDCSAVPVQIIQDDTLAQPLSLCGSTLRAPHGCHAQYMANMGSVAPLVMSVTINEDDEEDGDTGSDQQPKGRKLWGLVVCHHTSPRFVP

SEQ ID NO: 12598 - protein, 106 aa, Stipa viridula
QAARFLFMKNKVRMICDCRARSIKIIEDETLPFDISLCGSALRAPHSCHLQYMENMNSIASLVMAVVVNENEEDDEVEAEQPAQQQKRKRLWGLLVCHHESPRYVP

SEQ ID NO: 12599 - protein, 104 aa, Stipa viridula
QASRFLFMKNKVRMICDCAATPVKLIQDDNLSQPISLSGSTMRAPHGCHAQYMANMGSVASLVMSITINEDEEEDGDTGSDQQPKGRKLWGLVVCHHTSPRFVP

SEQ ID NO: 12600 - protein, 104 aa, Stipa viridula
QASRFLFRQNRVRMIADCHAAPVRVIQDPAMQQPLCLVGSTLRSPHGCHAQYMANMGSIASLVMAVIISGGGDDEHNMGRGAIPSAMKLWGLVVCHHTSPRCIP

SEQ ID NO: 12601 - protein, 102 aa, Thamnochortus argenteus
QASRFLFMKNKVRMICDCAAPPVKVVQGERLAQPLSLCGSTLRAPHGCHAQYMANMGSIASLVMSVTVNEDDGDDTGNDQQQKGQKLWGLVVCHHTSPRFVP

SEQ ID NO: 12602 - protein, 104 aa, Bambusa sp. Kellogg V6
QASRFLFMKNKVRMICDSSATPVKLIQDDNLAQPVSLCGSTLRAPHGCHAQYMANMGSVASLVMSITINEDEEEDGNTLCDQQPKGRKLWGLVVCHHTSPRFVP

SEQ ID NO: 12603 - protein, 104 aa, Bambusa sp. Kellogg V6
QASRFLFRQNRVRMIADCHAAPVRVIQDPTLPQPLCLVGSTLRAPHGCHAQYMANMGSIASLVMAVIISSGGDDEHNMTRGGVPSAMKLWGLVVCHHTSPRCIP

SEQ ID NO: 12604 - protein, 42 aa, Bambusa sp. Kellogg V6
VVVDNENEEDDEVEAEQPAQQQKRKKLWGLIVCHHESPRYVP

SEQ ID NO: 12605 - protein, 393 aa, Chusquea oxylepis
EPARTEDPALPIAGAVQSQKLAVRAISRLQALPGGDVKLLCDTVVEHVRELTGYDRVMVYRFHDDEHGEVVAESRRADLEPYLGLHYPATDIPQAPRFLFKQNRVRMIADCHAASVRVIQGPALPQPLCLVGSTLRAPHGCHAQYMANMGSIASLVMAVIISSGGDDEHNMTRGGIPSAMKLWGLVVRHHTSARCIPFPLRYACEFLMQAFGLQLNMELQLAHQLSEKHILRTQTLLCDMLLRDSPAGIITQSPSIMDLVKCDGAALYYHGKYYPLGVTPTEAQIKDIIEWLTLCHGDSTGLSTDSLADAGYPGAALGDAVCGMAVAYITPSDYLFWFRSHTAKEIKWGGAKHHPEDKDDGQRMHPRSSFKAFLEVAKSRSLPWENAEMDAIH

SEQ ID NO: 12606 - protein, 198 aa, Selaginella serpens
DEHGEVVAEIRRSDLEPYLGLHYPATDIPQAPRFLFMKNRVRMIADCSATAVRIVQDKDLRQPISLAGSTLRAPHGCHGHYMGNMGSIASLVMAVIINDSTMISSGTAAGRASSSAAPSTWRKLWGLVVCHHTSPRTVPFPLRSACEFLMQVFGLQLNTEVELASQLREKHILRTQTLLCDMLLRDAPIGIVSQSPNI

SEQ ID NO: 12607 - protein, 896 aa, Desulfitobacterium hafniense
MDSRLHLVDNLPALLWSSDRAGNYDYVNQAWLEFTGLTFVEVRGEGWLSCVHPEDSPGVMNVLEHSRRHKAPFEAEYRLRRYDGEYRHCLSRGQPYDDPKGELAGYTGVIIDITERKAAEIMTRENAEKFREIFNRITDCVFIHEVKDDGQIGKIQEVNDMACELIGLTRAEIIDLSREVIKVKSPLTLANEFTQKLLSKNYLVFEGMLLTHQGKEIPVEVKAHYHVLNGRRMLLSIARDISNQKRIHKILLASHNKYRQLFDNITDAVFVYELQKDGYPGLLIEINEKARRLMGYHEETFMFSAGPCIRPSSPQLTLDDVWQSLERTHSASFEGICTNLEGEDIPVEVNCHTFPLNGSKVMLTLLRDITERKQIEQERKRTEAEFQQAKEKAEAANRAKSEFLANMSHEIRTPINGIIGMIDLTLLTSLEKTQRENLKIAKNCAYSLFKIINDILDFSKIEAGKLTVEEIEFNLKEVIEQIIKTHSPEAERKGLDLAYTLSANLPDYYKGDPERIKQVLNNLLSNALKFTERGEVSLAVKRLQGDEDVSDLKFTVMDTGIGIAEEDQLHLFEEFNQVDGSITRKYGGTGLGLAISRKLVEMMGGRIWVESEKGKGSSFGVVLRLKHGDKDTLRFKSTQNNDQSREGSTARSYRILLAEDHIVNSIVITEMLKIQGHRVDIAMDGEEALALYHQNPYDVILMDIQLPRLDGIEVTKRIRASEGAQSRTPIIALTAYALQGDREGFLQAGMDEYIPKPVMMEELIMVLDRVVTKFASGEGQAQQEEVVITDEGVYLKDISSFPESVNKDLELSEMAYDFKKLRIALNNGDSVALEHIAHRIKERCSVIGAHKLKALAFKIELAARRGNPGEAKDYLHDLDSEYNQLSGGMLNENTRS

SEQ ID NO: 12608 - protein, 295 aa, Digitalis lanata
GEVFTEITKPGLEPYVGLHYPATDIPQAARFLFMKNKVRMICDCRAKHVKVVQDEKLPLDLTLCGSTLRAPHTCHLQYMENMDSIASLVMSIVINEGDEEGSEPVQVQNRKRLWGLVVCHNTTPRFVPFPLRYACEFLAQVFSIHVNKELELENQMFEKNILRTQTLLCDMLLRDAPLGIVSQSPNVMDLVKCDGAALLYKDKKYKLGLTPTDFQIRDIVSWLDEYHRDSTGLSTDSLYDAGFPGALSLGGSISGMAAVKISEKDWLFWFRSHTAAEVRWGGAKHEPGEKDDGSR

SEQ ID NO: 12609 - protein, 190 aa, Pilularia globulifera
DEHGEVVAEIRKSDLEPYLGLHYPATDIPQASRFLFMKNRVRMICDCRAIPVKVIQDRELRQPLSLAGSTLRAPHGCHSQYMANMGSIASLVMAVIVNDNEEETSSRSQQPKMRKLWGLVVCHHTTPRAVPFPLRSACEFLMQVFGLQLNMELELSAQMREKHILRTQTLLCDMLLRDAPIGIVSESPNI

SEQ ID NO: 12610 - protein, 392 aa, Eupomatia laurina
PYEVPMTAAGALQSYKLAAKAIARLQALPSGSLEKLIDTVVQEVFELTGYDRAMAYKFHDDDHGEVISEITKPGLEPYLGLHYPATDIPQAARFLFMKNKVRMICDCYAKPVNVYQDEKLAFDLTLCGSTLRAPHSCHLQYMENMGSIASLVMAVVINDGEDEDESTGSGLQPPLLKKKRLWGLVVCHNTTPRFVPFPLRYACEFLMQVFAIHVNKELELENQICEKNILRTQTLLCDMLLRDAPLGIVTQNPNIMDLVKCDGVALLYDNKFWRLGLTPTESQMRDISAWLSEYHMDSTGLSTDSLYDAGYPGALALGDVVCGMAAVRITSKDMLFWFRSHTAAEVRWGGAKHDPNDKDDGRRMHPRSSFKAFLEAVKTRSLPWKDYEMDAI

SEQ ID NO: 12611 - protein, 393 aa, Eupomatia laurina
DLEPVNPADVPVTAAGALKSYKLAAKAISRLQSLPSGNISLLCDVLVRELSELTGYDRVMAYKFHEDEHGEVIAECRRLDLEPYLGLHYPATDIPQASRFLFMKNKVRMICDCSAPPVKVIQDKRLEQPLSLCGSTLRAPHGCHAQYMANMGTIASLVISVTINEDDDETPGEQQQKGRKLWGLVVCHHMSPRFVPFPLRYACEFLIQVFGIQLNKEVELAAQTREKHILRMQTMLCDMLLRDTPIGIVTQSPNVMDLVKCDGAALYYQNQFWLLRTTPTETQIRDIIGWLLEYHGDTTGLSTDSLTEAGYPGAADLGDDVCGMAAVKISSKDFLFWFRSHTAKEIMWGGAKHGPVDKDDDGRKMHPRSSFKAFLEVVKRQSLPWEDMEMDAI

SEQ ID NO: 12612 - protein, 194 aa, Phyllocladus trichomanoides
DDHGEVISEIRRNDLEPYLGLHYPATDIPQASRFLFMKNKIRMICDACASPVRVIEDKRLPRELSMVKSTLRAPHACHAEYMYNMGSIASLVMAVVVNEREEDDDGQQQIQSVQARRRLWGLVVCHHSSPRFVPFHLRYACEFLMQVFGIQLNKEVELTALGMEKQILRTQTLLCDMLLRGDKPMGIVTRRPNI

SEQ ID NO: 12613 - protein, 193 aa, Torreya nucifera
DDHGEVISEIRRSDLEPYLGLHYPATDIPQAARYLFMKNRVRMICDCVAPPVKVVEDKRLPRELSLCGSTLRAPHGCHTDYMSNMGSIASLVMAVVINGKEEEEGDTDRQNQQKKGRRLWGLVVCHHTEPRFVPFPLRYACEFLMQVFGIQLNKEVELAAQLREKQILRTQTMLCDMLLRDAPLGIIRQEPNI

SEQ ID NO: 12614 - protein, 192 aa, Torreya nucifera
DDHGEVISEIRKSELEPYLGLHYPATDIPQASRFLFMKNRVRMICNCCSPPVRVVENKRLPRELNMCGSTLRAPHACHAQYMSNMGSIASLVMAVIINEKEEEQGESDGQQQQKGRRLRGLIVCHHTSPRFVPFPLRYACEFLMQVFGIQLNKEVESAAQLREKHILRTQTLLCDMLLRDAPMGIVTQKPNI

SEQ ID NO: 12615 - protein, 195 aa, Torreya nucifera
DEHGEVVAEIRRSDLEPYLGLHYPATDIPQASRFLFMQNRVRMICDCRATPVKVKQAEELKQPLCLVGSTLRAPHGCHAQYMANMGSIASLVMAVIINGNGIDEDGVSGSGSGSGRSSLKLWGLVVCHHTSPRAVPFPLRSACEFLMQTFGLQINMELQLAAQLIENSILRTQTLLCDMLLRDAPIGIVTQSPSI

SEQ ID NO: 12616 - protein, 185 aa, Brassica rapa subsp. pekinensis
FGFQLNMELQLALQMSEKRVLRTQTLLCDMLLRDSPAGIVTQSPSIMDLVKCDGAAFLYHGNYYPLGVAPTEAQIKDVVEWLLANHADSTGLSTDSLGDAGYPGAAALGDAVCGMAVAYITKRDFLFWFRSHTAKEIKWGGAEHHPEDKDDGQRMHPRSSFKAFLEVVKSRSQPWETAEMDAIHS

SEQ ID NO: 12617 - protein, 1536 aa, Neurospora crassa
METGMDHTQDTTPTAEGHGQLGNSYQTPDQLAANNIKVQDYIDNTALATDLHANDASNSSATADGGSSAITSPTNLSSWSASSDRQLGHGSVQDPEDRVFPIRSVISVDLAATPPVNDDIRARRRISLSEGYATSAGAGNTATPTRPHASTVPTAKSGAIDVESRPTVSQSQSSVSQPDGSSVFSSSSAGTMRHKRRMNAMTGSLSSVQADADRYGKGRPIELVLGDSSEEESDGGADGSGDGGDLGTIGASSSSGRESLDALPETHFAPRFKHIVTNEGHAVITGRDGQLQRCEDEPIHTPGAVQGFGLMVVIQEERDGRFIVRFVSENSKRIIGYTPQELFRMNNFLDIFTDEQSENLLDHIDFIRDEDSDPAINGPEVFSLSIRLPKAKTSVRLWCAIHVHPSRPELTICEFELDDDHDYPLRPPEEDLPDIPEDTLQSNPTTEELTESTAISSKPLRVLRSARRRRGEAGAMQVFDIMSQVQEQLANAPNLEKFLKILVGIVKELTGFHRVMIYQFDSSFNGKVVTELVDPMQTRDLYKGLHFPATDIPSQARELYKLNKVRLLYDRDVESARIVCRTPEDLETPLDMTHSYLRAMSPIHLKYLANMAVRSSMSISINAFGDLWGLVSCHSYGPKGMRVSFPIRKMCRLIGDTASRNIERLSYASRLQARKLINTVPTDKNPSGYIIASSDDLLKLFNADFGMLSIREETKILGKIEQSQEALAMLEYLRLRKFSSVVTSQDIKIDFPDLRYPPGFQVIAGLLYVPLSVGGNDFIVLFRKGQVREVKWAGNPHEKTIQAGSAAYLEPRKSFKVWYETVIGKSREWSEEEVETAAVLCLVYGKFIEVWRQKEAALRSSRLTRLLLANSAHEVRTPLNAIINYLEIALEGSLDQETRDNLARSHSASKSLIYVINDLLDLTKTEEGKDLVKDEVFDLLACIREATEPFRHDAKRKGITYEVIEHPGLPRFVHGDQRRVRQAVANVTANAVKHTSEGSVRVELYVAEVQDNRARIDIVVQDSGQGMSNAQLDALFRELEQVDTDIGSESSDDDNSQSGKALGLGLAVVARILRNMDGQLRLKSEVGKGSRFVIQLPFDLPEEETSRDTVGASSGNTAQLSLGSGTASASAASVTQMQDGEVMLVDRNNGSSWSVNNATGSLASKKSYDDNLSITSKGSGRSALSDADRLIDAIQNPLTLGEPEPESVARQRRNSRGPYYNPSSSLLGSSKGRSVSPGSRKRPDVPTRSVSSPNTKKDLPFEKPTTEVAPGPSEPAPAAQGVQYVTDSRVPIKPVKLPDEMFDKPVVPPQSTSKVLFEIKDAVADKAKAASSAVKEQQSVSSQQPAPPPAPAKEASTTNNKLQVLVAEDDPINVKVLRKRLEKAGYKVTHALNGEDCAAVYEDKPVVFDVVLMDMQMPIVDGLTSTKMIRAFEKTNRDGSGQQLSDIASDHGRVPIFAVSASLVEQEKDTYVDAGFDGWILKPIDFKRLETLLQGITDDKARNDALYVQGQWERGGWFEKKGVGNMGQEQEENHEQ

SEQ ID NO: 12618 - protein, 1022 aa, Neurospora crassa
MSQPIERVFPIRLSILESSAFLRNVSDADDLLSVVPVTQQLSNQHLSPPSSDGSRCEPLPSATDRQANPQDSSSAASSYNYTYPSSFNKGNGGDDSLLSETFEYALLADGSHGVIQKARRAFTTCDEEPIHIPGAIQSYGMLVALKLVDERVAGPSRYLPRICSENSAFVCHYQPSELLSLDSFYQVMPNFQRHLFDVQLRHIRQGYDSTKKEQEPVVFAFSFSDPDGRLIPCWCAAHYLGGDTDLFICEFELQDYSMHPLATPAMSDPGNPIDTLGSDHLDFATACSIQSKVQPAFPNPELISKGFDPSTSSVEVIGMATKIQTQFSEAATVPDLLETIVSIVKEVTRFHRVMVYQFDRDYNGTVVAELMDPKASNDVYRGLHFPASDIPPQARKLYMINKVRVLFDRSQRTSRLIGRDVSDMDVPLDLTHAYLRAMSPVHLKYLSNMGVRSSMSMSLESDGKLWGLIVCHSYGPAATRVPFSIRELSFFVGLAASTCLQKLLNSERLQAHRIIETLRGRGRPDESPQMTVWYFTARTRSEKYIGQGGLRWRVWREKETAINDTRLKRLLLHDASHQALEKHLDDGTKQVLTTSYTASKSLIYVIDDLLSLTGSITGSVPLLDEPFHLPNCLEEVLCPLRRLGQEKGIQLIMIPSTGPTQYVRGDPTSLQRSLSILVANAIQHTTSGQVVVKWYETAMNPENTVIHISITDTGPGFSERELDDMFQEFEQVPDEDFDEATSKPHAVRDNVLRVGVGLAFVARFVKQRNGQLKVKSTKGRGSTFTLEIPFAVSSHCSSIASRRRDASPLPVLTMPGPLTFGAGSSVPSDRSTFGTSRDSKPSPPIIRPGSSTADTSPRDFQTPSPHHYTVIVADDNMINVQILERRLTKLGHRVLVSRDGQECFNLFASNRSTVDFVLMDLNMPVVDGFASIRMIRDQEYSHPTPSRVVQCCGRTPIFAVSGMLRRGQEQQCKEAGFDGWMPKPVDMKRLVRCLAGGLDPNARRMCVYDEKRFELGGWFDAE

SEQ ID NO: 12619 - protein, 190 aa, Conocephalum supradecompositum
DEHGEVVAEIRRSDLEPYLGLHYPATDIPQASRFLFMKNRVRMICDCCAQPVQVVQDKELRQPLSLAGSTLRAPHGCHAQYMGNMGSIASLVMAVIINDNDEEYSSRGYQHKGRKLWGLVVCHHTTPRSVPFPLRSACELLMQVFGLQLNMEVELAAQLREKRILRTQTLLCDMLLRDAPIGIVSQSPNI

SEQ ID NO: 12620 - protein, 171 aa, Callerya australis
PQATRFLFMRNKVRIIVDCRAKHVKVLQDKKIPFDLTFCGSTLRAPHSCHLQYMENMDASASLVLAVVDNDNDEYEDSSDDVQPQKRKRLWGLVVCHHISPRFVPFPLRYACEFLAQVFAIHVSKEIELDYQIIEKNILRTQTLLCDMLMRDAPLGIVSQSPNIMDLVKCD

SEQ ID NO: 12621 - protein, 161 aa, Callerya australis
NKVRMIVDCRAKHVKVLQEQKIPFDLTFCGSTLRAPHSCHLQYMENMNASASLVLAVVDNDNDEYEDSSDDVAGEKRKRLWGLVVCHHISPRFVPFPLRYACEFLAQVFAIHVNKEIELEYQILEKNILRTQTLLCDMLLRDAPLGIVSQSPNIMDLVKCD

SEQ ID NO: 12622 - protein, 170 aa, Callerya megasperma
QATRFLFMKNKVRMIVDCRAKHVKVLQDKKFPFDLTFCGTTLRAPHSCHLQYMENMNAIASLVLAVVVNDNDGYEDSSDDVQPQKRKRLWGLVVCHHITPRFVPFPLRYACEFLAQVFAIHVSKEIELEYQIIEKNILRTQTLLCDMLMRDAPLGIVSQSPNIMDLVKCD

SEQ ID NO: 12623 - protein, 153 aa, Callerya megasperma
CHAKHVKVLQDEKLPFDLTLCGSTLRAPHSCHSQYMANMDSIASLVMAVVVNDSDEDGDSSDAVHPQKRKRLWGLVVCHNTTPRFVPFPLRYACEFLAQVFAIHVNKEIELEYQILEKNILRTQTLLCDMLLRDAPLGIVSQSPNIMDLVKCD

SEQ ID NO: 12624 - protein, 160 aa, Millettia thonningii
KVRMIVDCHAKHVKVLQDEKLPFDLTLCGSTLRAPHSCHLQYMANMDSIASLVMAVVVNDNEEDGESSDAVQPQKRKRLWGLVVCHNTTPRFVPFPLRYACEFLAQVFAIHVNKEIELEFQIIEKNILRTQTLLCDMLMRDAPLGIVSQSPNIMDLVKCD

SEQ ID NO: 12625 - protein, 154 aa, Millettia thonningii
IVDCRAKHVKVLQAKRSIDLTLCGSTLRAPHSCHLQYMENMNCSASLVMAVVVNDNDEDGDNDAVQPQKRKRLWGLVVCHNTTPRFVPFPLRYACEFLAQVFAIHVNKELELEYQIVEKNILRTQTLLCDMLMRDAPLGIVSQRPNIMDLVKCD

SEQ ID NO: 12626 - protein, 151 aa, Millettia thonningii
CRAKHVKVLQDKRSIDLTLCGSTLRAPHSCHLQYMENMNCSASLVMAVVVNDNDEDGDNDAVQPQKRKTLWGLVVCHNTTPRFVPFPLRYACEFLAQVFAIHVNKELELEYQIVEKNILRTQTLLCDMLMRDAPLGIVSQRPNIMDLVKCD

SEQ ID NO: 12627 - protein, 209 aa, Austrosteenisia blackii
DRVMAYKFHEDDHGEVIAEITKPGLEPYLGLHYPATDIPQAARFLFMKNKVRMIVDCHAKHVKVLQDEKLPFDLTLCGSTLRAPHSCHLQYMANMNSIASLVLAVVVNDNEEDGDSSDAVQPQKRKRLWGLVVCHNTTPRFVPFPLRYACEFLAQVFAIHVNKEIELEYQIIEKNILRTQTLLCDMLMRDAPLGIISQSPNIMDLVKCD

SEQ ID NO: 12628 - protein, 205 aa, Austrosteenisia blackii
RTSSMRMIMGKVIAEIKKPGLEPYLGLHYPATDIPQATRFLFMKNKVRQIVDCRAKHVKVLQDKNIPFDLTLCGSTLRAPHSCHLQYMKNMNSSASLVMAVVVNDNNEDGDSSDAFQPQKRKRLWGLVVCHHTTPRFVPFPLRYACEFLAQVFAYLVNKELEIAYQIVEKNILRTQTLLCDMLMRDAPLGIVSQSPNIMDLVKCD

SEQ ID NO: 12629 - protein, 193 aa, Austrosteenisia blackii
MAYKFHEDDHGEVVSEIRRSDLEPYLGLHYPATDIPQASRFLFKQNRVRMICDCHAKPVKVIQSEELRQPLCLVNSTLRSPHGCHTQYMANMGSIASLVMAVTVNGNDTRRLWGLLVCHHTSPRYVPFPVRYACEFLMQAFGLQLYMEIQLASQMAEKRILKTQTLLCDMLLRDAPFGIVSQSPNIMDLVKCD

SEQ ID NO: 12630 - protein, 156 aa, Bolusanthus speciosus
IVDCDAKHVKVLQDEKLPVDLTLCGSTLRAPHSCHLQYMANMDSIASLVMAVVVNDSDEDGDSSDAVQPQKRKRLWGLVVCHNTTPRFVPFPLRYACEFLARVFAIHVNKEIELEYQIIEKNILRTQTLLCDMLMRDAPLGIVSQSPNIMDLVKCD

SEQ ID NO: 12631 - protein, 151 aa, Bolusanthus speciosus
AKHVKVLQDQKNSIDLTLCGSTLRAPHSCHLQYMLNMNSIASLVMAVVVNDSDEDGDSSDAGQPQKRKRLWGLVVCHNTTPRFVPFPLRYACEFLAQVFAIHLNKELELEYQIIEKNILRTQTLLCDMLMRDAPLGIVSQSPNIMDLVKCD

SEQ ID NO: 12632 - protein, 186 aa, Gymnocladus dioica
MAYKFHEDDHGEVIAEITKPGLEPYLGLHYPATDIPQAARFLFMKNKVRMIVDCHARHVKVLQDEKLPFELTLCGSTLRAPHTCHLQYMENMNSIASLVMAVVVNDNDEDVDSSDSIQPQKRKRLWGLVVCHNTTPRFVPFPLRYACEFLAQVFAIHVNKELELENQIVEKKILRTQTLLCDMLMR

SEQ ID NO: 12633 - protein, 184 aa, Gymnocladus dioica
HGEVVSEIRRSDLEPFLGLHYPATDIPQAARFLFKQNRVRMICDCHANPVKVIQSEESRQPLCLVNSTLRSPHQCHAQYMENMGSIASLVMAVIVNGNDTTKLWGLLVCHHTSPRHVPFPLRYACEFLMQAFGLQLYMEMQLASQMAEKRTLKTQTLLCDMLLRDALFSIVTQSPNIMDLVKCD

SEQ ID NO: 12634 - protein, 210 aa, Myrospermum sousanum
YDRVMAYKFHEDDHGEVVAEITKSGLEPYLGLHYPATDIPQAARFLFMKNKVRMIVDCHAKHVKVLQDEKLPFDLTLCGSTLRAPHSCHLQYMANMDSIASLVLAVVVNDSDEDGDSSDAVQPQKRKRLWGLVVCHNTTPRFVPFPLRYACEFLAQVFAIHVNKEFELEYQIIEKNILRTQTLLCDMLMRDAPLGIVSQSPNIMDLVKCD

SEQ ID NO: 12635 - protein, 200 aa, Myrospermum sousanum
RVMAYKFHEDEHGEVVAESKRPDLEPYIGLHYPATDIPQASRFLFKQNRVRMIVDCHASPVGVIQDEGLMQPLCLVGSTLRAPHGCHAQYMANMGSIASLVMAVIINGNDEDTVCSRSSMRLWGLVVCHHTSARCIPFPLRYACEFLMQAFGLQLNMELQLASQSLEKRVLKTQTLLCDMLLRDSPIGIVTQSPNIMDLV

SEQ ID NO: 12636 - protein, 90 aa, Myrospermum sousanum
QAARFLFKQNRVRMICDCYAKPVKVIQSEELRRPLCLVNSTLRSPHGCHTQYMANMGSIASLVMAVTVNGNDTTRLWGLLVCHHTSPRYV

SEQ ID NO: 12637 - protein, 200 aa, Dalbergiella nyasae
EDDHGEVIAEITKPGLEPYLGLHYPATDIPQAARFLFMKNKVRMIVDCHAKHVKVLQDEKLPLDLTLCGSTLRAPHSCHLQYMANMDSIASLVMAVVVNDNEEDGDSSDAVQPQKRKRLWGLVVCHNTTPRFVPFPLRYACEFLAQVFAIHVNKEIELEYQIIEKNILRTQTLLCDMLMRDAPLGIVSQSPNIMDLVKCD

SEQ ID NO: 12638 - protein, 196 aa, Dalbergiella nyasae
DHGEVVAEVKKPGLEPYLGLHYPATDIPQATRFSFMKNKVRMIVDCHAKHVKVLQDKKIPFDLTLCGSTLRAPHSCHLQYMENMNSSASLVMAVVVNDNDEDGDSSDAIQPQKRKRLWGLVVCHHTTPRFVPFPLRYACEFLAQVFAIHVNKELELEYQIVEKNILRTQTLLCDMLMRDAPLGIVSQSPNIMDLVK

SEQ ID NO: 12639 - protein, 187 aa, Dalbergiella nyasae
EDEHGEVVSEIRRSDLEPYLGLHYPATDIPQASRLLFKQNRVRMICDCDAKPVKVIQSEELRQPLCLVNSTLRSPHGCHTQYMANMGSIASLVMAVIINGNDTTRLWGLLVCHHTSPRYVPFPVCYACEFLMQAFGLQLYMEIQLASQMAEKRILKTQTLLCDMLLRDAPFGIVNQSPNIMDLVKCD

SEQ ID NO: 12640 - protein, 176 aa, Dalbergiella nyasae
IGLHYPATDIPQAFRFLFKQNRVRMIVDCHASPVRVVQDEALVQPLCLVGSTLRAPHGCHAQYMANMGSIASLVMAVIINGNDEEGVGGRSSMRLWGLVVCHHTSARCIPFPLRYACEFLMQAFGLQLNMELQLAAQTLEKRVLRTQTLLCDMLLRDSPTGIVTQSPNIMDLVKCD

SEQ ID NO: 12641 - protein, 206 aa, Mundulea sericea
MAYKFHEDDHGEVIAEITKPGLEPYLGLHYPATDIPQASRFLFMKNKVRMIVDCHAKHVKVLQDEKLPFDLTLCGSTLRAPHSCHLQYMANMDSIASLVMAVVVNDNEEDGDSSDAVQPQKRKRLWGLVVCHNTSPRFVPFPLRYACEFLAQVFAIHVNKEIELENQIIEKNILRTQTLLCDMLMRDAPLGIVSQSPNIMDLVKCD

SEQ ID NO: 12642 - protein, 190 aa, Mundulea sericea
  unsure (1)..(190): unsure at all Xaa locations
EVVAESKRPDLEPYIGLHYPATDIPQASRFLFKQNRVRMIVDCHASPVRVVQDEALVQPLCLVGSTLXAPHGCHAQYMANMGSIASLVMAVIINGNDEEGVGGRSSMRLWGLVVCHHTSARCIPFPLRYACEFLMQAFGLQLNMELQLAAQALEKRVLRTQTLLCDMLLRDSPTGIVTQSPNIMDLVKCD

SEQ ID NO: 12643 - protein, 141 aa, Mundulea sericea
MAYKFHEDDHGEVIAEITKPGLEPYLGLHYPATDVPQATRFLFMKNKVRMIVDCRAKHVKVLQDRKVPFDLTLCGSTLRAPHGCHVQYMANMNCSASLVMAVVLNDNDEDGGDSDAVQPQKRRRLWGLVVCHNTTPRFVPF

SEQ ID NO: 12644 - protein, 151 aa, Mundulea sericea
MAYKFHEDDHGEVVSEIRRSDLEPYLGLHYPATDIPQASRFLSKQNRVRMICDCHAKPVKVIQSEELRQPLCLVNSTLRSPHVCHTQYMANMDSIASLVMAIIVNGNDTTRLWGLLVCHHTSPRYVPFPVRYACEFLMQAFGLQLYMEIQL

SEQ ID NO: 12645 - protein, 103 aa, Clianthus formosus
TRSRFLFMKNKVRMIVDCHAKHVKVLQDEKLPFDLTLCGSTLRAPHSCHLQYMANMNSIASLVMAVVVNDSDEDGDSSDAVQPQKKKRLWGLVVCHNTSPRFV

SEQ ID NO: 12646 - protein, 154 aa, Coursetia madrensis
RVMAYKFHEDDHGEVIAEITKPGLEPYLGLHYPATDIPQAARFLFLKNKVRMIVDCHAKHVKVLQDEKLPIDLSLCGSTLRAPHSCHLQYMANMDSIASLVMAVVVNDSDEDGDSSDAVQPQKRKRLWGLVVCHNTTPRFVPFPLRYACEFLAQ

SEQ ID NO: 12647 - protein, 90 aa, Hebestigma cubense
QAARFLFKQNRVRMITDCHAKPVKVIQSEELRQPLCLVNSTLRSPHECHTQYMANMGSIASLVMAVIVNRNDTTRLWGLLVCHHTSPRYV

SEQ ID NO: 12648 - protein, 103 aa, Hybosema robustum
QATRFLFMKNKVRMIVDCHAKHVKVLQDEKLPFDLTLCGSTLRAPHSCHLQYMANMDSIASLVMAVVVNDSDEDGDSSDAVQPQKRKRLWGLVVCHNTTPRFV

SEQ ID NO: 12649 - protein, 103 aa, Hybosema robustum
QATRFLFMKNKVRMIVDCSANHVKVPQDKNIPFDLTFCGSTLRAPHSCHLQYMKNMNASASLVMAIVVNDSDEDGDSSDAVQLQNRRRLWGLVVCHHISPRFV

SEQ ID NO: 12650 - protein, 103 aa, Lennea melanocarpa
QAARFLFMKNKVRMIVDCHAKHVKVLQDEKLPFDLTLCGSTLRAPHSCHLQYMANMDSIASLVMAVVVNDSDEDGDSSDAVQPQKRKRLWGLVVCHNTTPRFV

SEQ ID NO: 12651 - protein, 90 aa, Lennea melanocarpa
QAARFLFKQNRVRMITDCNAKPVKVIQSEELKQPLCLVNSTLRSPHECHTQYMANMGSIASLVMAVIVNENDTTRLWGLLVCHHTSPRYV

SEQ ID NO: 12652 - protein, 103 aa, Poitea carinalis
QAARFLFMKNKVRMIVDCHAKHVKVLQDEKLAFDLTLCGSTLRAPHSCHLQYMANMDSIASLVMAVVVNDSDEDGDSSDAIQPQKRKRLWGLVVCHNTTPRFV

SEQ ID NO: 12653 - protein, 103 aa, Sesbania emerus
QATRFLFMKNKVRIIVDCSAKHVKVIQDKNIPFDLTLCGSTLRAPHSCHLQYMENMKASASLVMAVVVNDSNEDGDSSDAVQPQKRKRLWGLVVCHNTTPRFV

SEQ ID NO: 12654 - protein, 103 aa, Sesbania vesicaria
QATRFLFMKNKVRMIVECCAKHVKVIQDKKNPFDLTLCGSTLRAPHSCHLQYMENMKASASLVMAVVINDSNEDGDSSDAVQPQKRKRLWGLVVCHHITPKFV

SEQ ID NO: 12655 - protein, 190 aa, Gleditsia triacanthos
KFHEDDHGEVVSEIRRSDLEPYLGLHYPATDIPQASRFLFKQNRVRLICDCHANPVRVIQSEELRQPLCLVISTLRSPHGCHTQYMANMGSIASLVMAVIVNGTDTTKLWGLLVCHHTSPRHVPFPLRYACEFLMQAFGLQLYSDMQLASQMAEKRILRTQTLLCDMLLRDSPFGIVTQSPNIMDLVKCD

SEQ ID NO: 12656 - protein, 210 aa, Brownea sp. 'Lavin 6225'
YDRVMAYKFHEDDHGEVIAEITKPDMEPYLGLHYPATDIPQAARFLFMKNKVRIIVDCRAKHVKVLQDEKLPFDLTLCGSTLRDPHSCHLQYMENMNSVASLVMAVVVNDNDEDGDSSDSVQPQKRKRLWGLVVCHNTTPRFVPFPLRYACEFLVQVFAIHVNKELELEYQIVEKNILRTQTLLCDMLMRDAPLGIVSQGPNIMDLVKCD

SEQ ID NO: 12657 - protein, 114 aa, Brownea sp. 'Lavin 6225'
RVMAYKFHEDEHGEVVAESKRPDLEPYYGLHYPSTDIPQASRFLFKQNRVRMIVDCHATPVRVIQDEGLMQPLCLVGSTLRAPHECHAQYMSNMGSVASLAMAVIINGNDEEAV

SEQ ID NO: 12658 - protein, 210 aa, Enterolobium cyclocarpum
YDRVMAYKFHEDDHGEVIAEITKPGLEPYLGLHYPATDIPQAARFLFMKNKVRMIVDCHARHVKVLQDEKLPFELTLCGSTLRAPHTCHLQYMENMNSIASLVMAVVVNDNDEDVDSSDSIQPQKRKRLWGLVVCHNTTPRFVPFPLRYACEFLAQVFAIHVNKELELENQIVEKKILRTQTLLCDMLMRDAPLGIISQSPNIMDLVKCD

SEQ ID NO: 12659 - protein, 208 aa, Enterolobium cyclocarpum
RVMAYKFHEDEHGEVVSEVKKPGLESYMGLHYPATDVPQATRFLFMKNKVRMIVDCRAKHVKVLQDENLPYDLTFCGSTLRAPHSCHVQYMQNMDLVASLVMAVVINDRDEDGDSSDSVQPQKRKRLWGLVVCHNYTPRFVPFPLRYACEFLAQVFAIHVNKEIELEYQIIEKNIMRTQSLLCDMLMRDEPLGIISQSPNIMDLVKCD

SEQ ID NO: 12660 - protein, 193 aa, Enterolobium cyclocarpum
YDRVMAYKFHEDDHGEVVSEIRRSDLEPFFGLHYPATDIPQAARFLFKQNRVRMICDCHANPVKVIQSEESRQPLCLVNSTLRSPHQCHAQYMENMGSIASLVMAVIVNGNDTTKLWGLLVCHHTSPRHVPFPLRYACEFLMQAFGLQLYMEMQLASQMAEKRTLKTQTLLCDMLLRDALFSIVTQSPNIMDL

SEQ ID NO: 12661 - protein, 176 aa, Callerya atropurpurea
YDRVMAYKFHEDDQGEVIAEVTKPGLEPYLGLHYPATDIPQATRFLFMRNKVRMIVDCSAKHVKVHQDKNIPFEGTLCGSTLRAPHSCHLQYMENMNASASLVMAVVVNDDEEDEDSAGDVEPQKRKRLWGLVVCHHITPRFVPFPLRYACEFLAQVFAIHVNKEIELEYQIIEKE

SEQ ID NO: 12662 - protein, 177 aa, Callerya atropurpurea
YPATDIPQAARFLFMKNKVRMIVDCHAKHVKVLQDEKLPFDLTLCGSTLRAPHSCHLQYMANMDSIASLVMAVVVNDSEEDGDSSEAVQPQKRKRLWGLVVCHNTTPRFVPFPLRYACEFLAQVFAIHVNKEIELEYQILEKNILRTQTLLCDMLMRDAPLGIVSQSPNIMDLVKCD

SEQ ID NO: 12663 - protein, 160 aa, Callerya reticulata
KVRMIVDCHAKHVKVLQDEKLPFDLTLCGSTLRAPHSCHLQYMANMDSIASLVMAVVVNDSDEDGDSSDAVHPQKRKRLWGLVVCHNTTPRFVPFPLRYACEFLAQVFAIHVNKEIELEYQILEKNILRTQTLLCDMLMRDAPLGIVSQSPSIMDLVKCD

SEQ ID NO: 12664 - protein, 210 aa, Carmichaelia sp. 'Lavin 6201'
YDRVMAYKFHEDDHGEVIAEVKKPGLEPYLGLHYPATDVPQAARFLFMKNKVRIIVDCSAKRVKVIQDKNIPFDLTLCGSTLRAPHNCHLQYMDNMKASASLVMAVVVNDSNEDGDSSDAVQPQKRKRLWGLVVCHHITPKFVPFPLRYACEFLAQVFAIHVNKEIELEYQVIERNILRTQTLLCDMLMRDAPLGIISQSPNIMDLVKCD

SEQ ID NO: 12665 - protein, 188 aa, Carmichaelia sp. 'Lavin 6201'
YDRVMAYKFHEDDHGEVVSEIRRSDLEPYLGLHYPSTDIPQAARFLFKQNRVRMICDCHAKPVKVIQSEELRQPLCLVNSTLRSPHDCHTQYMANMGSIASLVMAVIVNGNDSTRLWGLLVCHHSSPRYVPFPVRYACEFLMQAFGLQLYMEIQLASQMAEKRILKTQTLLCDMLLRDAPFGIVTQSQ

SEQ ID NO: 12666 - protein, 207 aa, Cyclolobium nutans
VMAYKFHEDDHGEVIAEITKPGLEPYLGLHYPATDIPQAARFLFMKNKVRMIVDCHAKHVKVLQDEKLPFDLTLCGSTLRAPHSCHLQYMANMDSIASLVMAVVVNDSDEDGNSSDAVQPQKRKRLWGLVVCHNTTPRFVPFPLRYACEFLAQVFAIHVNKEIELEYQIIEKNILRTQTLLCDMLMRNAPLGIVSQSPNIMDLVKCD

SEQ ID NO: 12667 - protein, 206 aa, Cyclolobium nutans
MAYKFHEDDHGEVIAEVTKPGLEPYLGLHYPATDIPQATRFLLMKNKVRLIVDCCAKHVKVLQDKKIPFELTLCGSTLRAPHSCHIQYMLNMNSIASLVMAVVVNDSDEDGDSSDAVQPQKRKRLWGLVVCHNTTPRFVPFPLRYACEFLAQVFAIHVNKEIELEYQIIEKNILRTQTLLCDMLMRNAPLGIVSQSPNIMDLVKCD

SEQ ID NO: 12668 - protein, 103 aa, Dalbergia sp. 'Lavin 7141'
QASRFLFMKNKVRMIVDCHAKHVKVLQDEKLPFDLTLCGSTLRAPHSCHSQYMANMDSIASLVMAVIVNDNDEDGDSSDAVQPQKRKRLWGLVVCHNTTPRFV

SEQ ID NO: 12669 - protein, 103 aa, Dalbergia sp. 'Lavin 7141'
QATRFLFMKNRVRMIVDCRAKHVKVLQDLKIPFDLTLCGSTLRAAHSCHLQYMENMNSIASLVMAVVVNDDDDDGDGSDVVQPQKRKRLWGLVVCHNTTPRFV

SEQ ID NO: 12670 - protein, 90 aa, Dalbergia sp. 'Lavin 7141'
QASRFLFRQNRVRMICDCHAKPVKVFQSEELRQPLCLVNSTLRSPHGCHTQYMANMGSIASLVMAIIVNGKHTTRLWGLLVCHHTSPRYV

SEQ ID NO: 12671 - protein, 144 aa, Fordia splendidissima
QDEKLPFDLTLCGSTLRAPHSCHLQYMANMDSIASLVMAVVVNDNEEDGDSSDAVQPQKRKRLWGLVVCHNTTPRFVPFPLRYACEFLAQVFAIHVNKEIELEYQIIEKNILRTQTLLCDMLMRDAPLGIVSQSPNIMDLVKCD

SEQ ID NO: 12672 - protein, 137 aa, Platycyamus regnellii
RVMAYKFHEDDHGEVIAEVKKPGLEPYMGLHYPATDIPQATRFLFMKNKVRMIVDCRAKHVKVLQDKKIGFDLTLCGSTLRAPHSCHLQYMENMNSSASLVMAVVVNDNDEDGDSSDAVQPQKRKRLWGLVVCHHTT

SEQ ID NO: 12673 - protein, 132 aa, Platycyamus regnellii
RVMAYKFHEDDHGEVIAEITKPGLEPYMGLHYPATDIPQAARFLFMKNKVRMIVDCHAKHVKVLQDEKLPFDLTLCGSTLRAPHSCHLQYMANMDSIASLVMAVIVNDNEEDGDSSEAVHPQKRKRLWGLVV

SEQ ID NO: 12674 - protein, 135 aa, Platycyamus regnellii
VKVIQSEELRQPLYLVNSTLRSPHGCHTQYMANMGSIASLVMAVIVNGNDTTRLWGLLVCHHTSPRYVPFPVRYACEFLMQAFGLQLYMEIQLASQMAEKRILKTQTLLCDMLLRDAPCGIVTQSPNIMDLVKCD

SEQ ID NO: 12675 - protein, 195 aa, Poecilanthe falcata
RVMAYKFHEDDHGEVVSEIRRSDLEPYLGLHYPAKDIPQAARFLFKQNRVRMIFDCHAKPVNVIQSEELRQPLCLVNSTLRSPHGCHTQYMANMGSVASLVMAVIVNGNDTTRLWGLLVCHHTSPRYVPFPVRYACEFLMQAFGLQLYMEIQLATQLAEKRILKTQTLLCDMLLRDAPFGIVNQSPNIMDLVKCD

SEQ ID NO: 12676 - protein, 140 aa, Poecilanthe falcata
YRVMAYKFHEDDHGEVIAEITKPGLEPYLGLHYPATDIPQAARFLFMKNKVRMIVDCHAKHVKVVQDEKLPFDLTLCGSTFRAPHSCHLQYMANMDSIASLVMAVIVNDNEEDGDSSEAVQPQKRKRLWGLVVCHNTTPG

SEQ ID NO: 12677 - protein, 103 aa, Tipuana tipu
QASRFLFMKNKVRMIVDCHAKHVKILQNEKLPFDLTLCGSTFRAPHSCHLQYMANMDSIASLVMAVVVNDSEDGDRISDAVQPQKRKRLWGLVVCHNTTPRFV

SEQ ID NO: 12678 - protein, 908 aa, Pantoea agglomerans
MTKYSLRARMMILILAPTLLIGLLLSTFFVVHRYNELQEQLVDAGASIIEPLAVASEYGMTFRSRESVRQLVSLLHRRHSDIVRSITVFDAQNNLFVTSNYHHNFAQLQLPKGVPMPTDLMLTRRGNSLILRTPILSESQYPDQNATDPVPQDNNLGYVAIELDLQSVRLRQYKEVFISTLLLLLCMCIAILFAYRLMRDVTGPIRNMVNTVDRIRRGQLDSRVEGFMLGELHMLKNGINSMAMSLTAYLEEMQQNIDQATSDLRETLEQMEIQNVELDLAKKRAQEAARIKSEFLASMSHELRTPLNGVIGFTRQMLKTEMSVTQTDYLQTIERSANNLLTIINDVLDFSKLEAGKLVLEHIPFSLRETLDEVIVLLAPSAHEKGLELTLDVHNDVPEQVIGDSLRLQQIITNLLGNAIKFTETGNIDIRVELRGQQDHQVELEVQIHDTGIGISERQQSQLFQAFRQADASISRRHGGTGLGLVITQKLVKEMGGDICFHSQLNRGSTFWFHITLELHEGMLSLPSSLPDLRGKTLGYIEANPMAAEATLNMLSVTSLVITHSPTLAQLPKKNYDFLLVGVPIPFRDNLAQHESKLKAALNIAGRVILALPCQSQINAEQLKQQGAIGCLIKPITSNRLFPLLRMEPPQRLLAAPERKRLPLTVMAVDDNPANLKLIGTLLAEQVEKTLLCESGEEALALARDNVLDLILMDIQMPNIDGIRTGELIRQLPHHNSTPIVAVTAHAVSGEREHLLQAGMDDYLAKPIDEAMLTRVLARYYSGEPAAEPLLSLDWPLALRQAANKEDLARDLLQMLLDFLPQVSERVQAVLDGTPDDSILDLIHKLHGSCSYSGVPRLKQLCFYLEQQLRKGVGNEELEPEWLELLDEIELVSQAARSHLESDRPTTS

SEQ ID NO: 12679 - protein, 391 aa, Acorus gramineus
PYEVPMTAAGALQSYKLAAKAIARLQSLPGGSMERLCDTMVREVFELTGYDRVMAYKFHEDDHGEVVAEITKQGLEPYLGLHYPATDIPQAARFLFMKNKVRMICDCRAKPVKVFQDEKLTIDLAFCGSTLRAPHSCHLQYMENMDSIASLVMAVVINDGDDDDDHVGDNNNDNSKKKRLWGLVVCHNTSPRFVPFPLRYACEFLTQVFAIHVHKELELENQMPEKNILRTQTLLCDMILRDAPLGIVSQTPNIMDLVKCDGAALLYKDKIWQLGTTPTERQIRDIAIWLTDYHMDSTGLSTDSLHDAGYPDALALGDVVCGMAAARITSKDILFWFRSPTTSEIQWGGAKHERSDQDDGRRMHPRSSFKAFLEVVKTRSLPWKDYEMDAI

SEQ ID NO: 12680 - protein, 407 aa, Acorus gramineus
ILHRIDVGLVIDLEPVNPSDVPVTAAGALKSYKLAAKAISRLQSLPSGNISLLCDVLVREVSDLTGYDRVMVYKFHEDEHGEVIAEQRKTDLEPYLGLHYPATDIPQASRFLFMKNKVRIICDCFTPPVKVVQDKKLGQPLSLCGSTLRAPHGCHAQYMANMGSIASLVMAVTINDDDDDDGNGNEQQQKGRKLWGLVVCHHTSPRFIPFPLRYACEFLIQVFSIQLNKEVELAAQMREKHILRTQTVLCDMLLRDAPVGIFTQSPNVMDLVMCDGAALYYKNQFWLLGTTPSEVQIKDLVDWLHECHNGSTGLSTDSLMEASYPGASALGNAACGMAAIKIGGTRDYMFWFRSQTAKEIKWGGAKHDPVDNDEEGQKMHPRSSFKAFLEVVKWRSLPWENAEMDAI

SEQ ID NO: 12681 - protein, 160 aa, Butea monosperma
NKVRMIVDCHAKHVKVLQDEKLTFDLTLCGSTLRAPHSCHLQYMSNMDSIASLVMAVVVNDNEEDGDPDAVQPQKRKRLWGLVVCHNTTPRFVPFPLRYACEFLAQVFAIHVNKEIELEYQIIEKNILRTQTLLCDMLMRDAPLGIVSQSPNIMDLVKCD

SEQ ID NO: 12682 - protein, 165 aa, Butea monosperma
LFMKTKVRMIVDCRAKHVKVLQDKKIPFDLTLCGSTLRAAHSCHLQYMENMNSSASLVMAVVVNDNDEHGDSSDAVPPQKRKRLWGLVVCRHTTPRFIPFPLRYACEFLAQVFAIHVNKELELEYQIVEKNILQTQTLLCDMLMRDAPLGIVSQSPNIMDLVKCD

SEQ ID NO: 12683 - protein, 146 aa, Butea monosperma
SRFLFKQNRVRMICDCHAKPVKVIQSEELRQSLCLVNSTLRLPHGCHTQYMANMGSIASLVMAIIVNGNDTTRLWGLLVCHHTSPRYVSFPVRYACEFLMQAFGLQLYMEIQLASQMEEKRILKTQTLLCDMLLRDAPFGIVTQSP

SEQ ID NO: 12684 - protein, 198 aa, Craibia brevicaudata
EDDHGEVIAEITKPGLEQYLGLHYPATDIPQAARFLFMNNKVRMIVDCHAKHVKVLQDEKLLFDLTLCGSTLRAPHSCHLQYMANMDSIASLVMAVVVNDNEEDGDSSDAVQPQKRKRLWGLVVCHNTTPRFVPFPLRYACEFLAQVFAIHVNKEIELEYQIIENNILRTQTLLCDMLMRDAPLGIVSQSPNIMDLVK

SEQ ID NO: 12685 - protein, 170 aa, Craibia brevicaudata
PQATRFLFMKNKVRMIVDSRAKHVKVLQDQKIPFDLTLCGSTLRAPHSCHLQYMENMNSSASLVMAVVVNDNDEDGDSSDAVQPQKRKRLWGLVVCHHTTPRFVPFPLRYACEFLAQVFAIHVNKELELEYQIVEKNILRTQTLLCDMLMRDAPLGIVSQSPNIMDLVKC

SEQ ID NO: 12686 - protein, 204 aa, Derris elliptica
YKFHEDDHGEVIAEITKPGLEPYLGLHYPATDIPQAARFLFMKNKVRMIVDCHAKHMKVLQDEKIPFDLTLCGSTLRAPHSCHLQYMANMDSIASLVMAVVVNDNEEDGDSSDAVQPQKRKRLWGLVVCHNTTPRFVPFPLRYACEFLAQVFAIHVNKEIELEYQIIEKNILRTQTLLCDMLMRDAPLGIVSQSPNIMDLVKCD

SEQ ID NO: 12687 - protein, 145 aa, Derris elliptica
EDDHGEVIAEVKRPGLEPYLGLHYPATDIPQATRFLFMKNKVRMIVDCRAKHVKVLQDKKVPFDLTLCGSTLRAPHSCHLQYMENMNCSASLVMAVVVNDNDEDGDSDAVQPQKRKRLWGLVVCHNTTPRFVPFPLRYACEFLAQ

SEQ ID NO: 12688 - protein, 164 aa, Derris elliptica
  unsure (1)..(164): unsure at all Xaa locations
AYKFHEDDHGEIVSEIRRSDLEPYLGLHYPATDIPQASRFLFKQNRVRMICDCHAKPVKVIQSEELRQPLCLVNSTLRSPHVCHTQYMANMGSIASLVMAIIVNGNDTTRLWGLLVCHHTSRXYVPFPVRYACEFLMQAFGVQLYMEIQMASQMAEKRMLKTQT

SEQ ID NO: 12689 - protein, 210 aa, Pongamia pinnata
YDRVMAYKFHEDDHGEVIAEITKPGLEPYMGLHYPATDIPQAALFLFMKNKYRMIVDCHAKHVKVLQDEKLPFDLTLCGSTLRAPHSCHLQYMANMDSIASLVMAVVVNDNEEDGSSSDAVQPQKRKRLWGLVVCHNTTPRFVPFPLRYACEFLSQVFAIHVNKEIELEYQIIEKNILRTQTLLCDMLMRDAPLGIVSQSPNIMDLVKCD

SEQ ID NO: 12690 - protein, 158 aa, Pongamia pinnata
RVRMIVDCRAKHLKVLQDKKVPFDLTLCGSTLRAPHSCHLQYMENMNCSASLVMAVVVNDNDEDGDSDAVEPQKRKRLWGLVVCHNTTPRFVPFPLRYACEFLAQVFAIHANRELELEYQIVEKNILRTQTLLCDMLMRDAPLGIVTQRPNIMDLVKC

SEQ ID NO: 12691 - protein, 141 aa, Lonchocarpus spectabilis
KIPFDLTLCGSTLRAPHSCHLQYMANMDSIASLVMAVVVNDNEEDGDSSDAVQPQKRKRLWGLVVCHNTTPRFVPFPLRYACEFLAQVFAIHVNKEIELEYQIIEKNILRTQTLLCDMLMRDAPLGIVSQSPNIMDLVKCD

SEQ ID NO: 12692 - protein, 137 aa, Lonchocarpus spectabilis
FDLTLCGSTLRAPHSCHLQYMENMNCSASLVMAVVVNDIDEDGDSVAVQPQKRKRLWGLVVCHNTIPRFVPFPLRYACEFLAQVFAIHVNKELELEYQIVEKNILRTQTLLCDMLMRDAPLGIVTQRPNIMDLVKCD

SEQ ID NO: 12693 - protein, 384 aa, Bunchosia armeniaca
DVPVTAAGALKSYKLAAKAISRLQSLPSGNISLQCDVLVKEVRDLIGYDRVMVYKFHDDEHGEVVSECCRSDLESYLGLHYPATDIPQASRFLFMKNKVRMICDCLAPPVKVIQDERLPQPLSLCGSTLRSPHGCHAQYMENMGTIASLVMSVTINEDDDMMDGDQQQMARTLWGLVVCHHTSPRFVPFPLRYACEFLIQVFGVQINKEVELAAQVREKQILRIQTMLCDMLLRDAPVAIITQSPNVMDLVKCDGAALYYKNKFWLLGVTPTEAQIRDIAEWLLEYHSGNTGLSTDSLMEAGYPGASVLGDAVCGMAAVSITSRDFLFWFRSHTAKEIKWGGAKHDPDDKDDGRKMHPRSSFKAFLEVVKWRSLPWEDIEMDAI

SEQ ID NO: 12694 - protein, 192 aa, Dacrydium cupressinum
DEHGEVISEIRKSDLEPYLGLHYPATDIPQASRFLFMKNRVRMICDCHAPPVRVVEDKRLPRELNLCGSTLRALMGCHAQYMSNMGSIASLVIAVIVNEKDEEEGDSEDNIQQKGRKLWGLVVCHHTSPRFVPFPLRYACEFLVQVFGIQLNKEVELAAQVREKHILRTQTLLCDMLLRDAPTGIVTQKPNI

SEQ ID NO: 12695 - protein, 195 aa, Saxegothaea conspicua
DDHGEVISEIRRNDLEPYLGLHYPATDIPQASRFLFMKNKIRMICDACASPVRVIEDNRLSKDLSLVGSTLRAPHDCHAQYMYNMNSVASLVMAVVVNEREEEERDSDGRLQPQEAIRRLWGLVVCHHSSPRFVPFHLRYACEFLMQVFGIQLNKEVELAAQVREKRILRTQTMLCDMLLRGDVPKGIVTTKPNI

SEQ ID NO: 12696 - protein, 192 aa, Saxegothaea conspicua
DEHGEVISEIRKSDLEPYLGLHYPATDIPQASKFLFMKNRVRMICDYHAPPVGVVEDNRLPRELNLCGSTLSAPHGCHEQYMSNMGSIASFVIIDIVNEKDEEEGDSEGQHQQKGRRLWGLVVCHHSSPRFVPFPLRYACEFLMQVFGIQLNKEVELAAQVREKHILCTQTLLCDMLLRDAPTGIVTQKPNI

SEQ ID NO: 12697 - protein, 181 aa, Chamaecyparis lawsoniana
DDHGEVVAEMRRPDLEPYLGLHYPAADIPQASRFLFLKNRVRMICDCRAPAVKVRHDESLGQVLSLQGSTLRAPFGCHAQYMANMGSIASLVMAVTVSDSEEGGRRLWGLVVCHHTTPRFVPYPLRYACEFLMQVFGIQLNKELELASRLRERHIFRTQTLLCDMLLRDTPVGIVTTTPNI

SEQ ID NO: 12698 - protein, 188 aa, Chamaecyparis lawsoniana
DEHGEVVAEIRRSDLEPYLGLHYPATDIPQASRFLFMQNKVRMISDCRADPVRIIQAEELPQLLCLVGSTLRAPHGCHAQYMANMGSIASLAMAVIVNNGNDEVGSSGRNTGKLWGLVVCHHTSPRAVPFPLRSACEFLMQAFSLQINMEMRLAAQLTENNILRTQTLLCDMLLRDAPYGIVTQSPSI

SEQ ID NO: 12699 - protein, 190 aa, Polypodium vulgare
DEHGEVLAEIRRSDLEPYLGLHYPATDIPQASRFLFMKNRVRMICDCRALPVRVIQDKELRQPLGLAGSTLRAPHGCHSQYMENMGSIASLVMAVVVNDNDEDVSNRSHHPKMRRLWGLVVCHHTTPRAVPFALRSACEFLVQVFGLQLNMELELAAQMREKRILRTQTLLCDMLLRDAPIGIVSESPNI

SEQ ID NO: 12700 - protein, 188 aa, Polypodium vulgare
DEHGEVVAEIRRADLEPYMGLHYPATDIPQAARFLFMKNRVRMICDCTLPPVKIIQDKNLAQPLSLTGSTLRAPHGCHAQYMSNMNSIASLVMAVIVNDSDIDSAGHASQGMKLWGLVVCHHTSPRYVPFPVRSACEFLMQVFSLQLNMEVGMAAQVREKHILRTQTLLCDMLLRDAPIGIVSQSPNI

SEQ ID NO: 12701 - protein, 190 aa, Polypodium vulgare
DEHGEVVAEIRKSDLEPYLGLHYPATDIPQASRFLFMKNRVRMISDCRAIPVKVIQDRGLRQPLGLAGSTLRAPHGCHSQYMANMGSAASLGMAVTVNDNEGESSSRDHQPKQRKLWGLVVCHHTTPRAVSFPLRSACEFLMQVFGLQLNMEVELAAQMREKHILRTQTLLCDMLLRDAPIGIVSESPNI

SEQ ID NO: 12702 - protein, 394 aa, Anisopogon avenaceus
EPARTEDPALSIAGAVQSQKLAVRAISRLQALPGGDVKLLCDTVVEHVRELTGYDRVMVYKFHDDEHGEVLAESRRADLEPYLGLHYPATDIPRASRFLFRQNRVRMIADCHAAPVRVIQDPAMPQPLCLVGSTLRSPHGCHAQYMTNMGSIASLVMAVIISSGGDQDHNIARGAIPSAMKLWGLVVCHHTAPRCIPFPLRYACEFLMQAFGLQLNMELQLAQHLSQNLILTTQTLLCDMLLRDSPTGIVPQSRSIMDLVKCDGAALYYHGKYYPLGVTPTEAQILDIIEWLTVCHGDSTGLSTDSLADAGYPGAASLGDAVCGMAVAYITPSDHLFWFQSHTAKEIKWGGAKHHPEDKDDGQRMHPRSSFKAFLEVVKSRSLPWENAEMDAIH

SEQ ID NO: 12703 - protein, 507 aa, Proteus mirabilis
NSRYQNEDVAICVLVDISARVKMERSLQNMATAAEQANQAKSMFLATVSHELRTPLYGIIGNLELLQSLTQNEETARLLKTMDNSSSLLLKIISDILDFSKIESKQLKIDVKPFNCRQVVSFVISNYLPLIAKKDLAIYCFIEPDVPKIVNNDPVRVQQVISNLLNNSIKFTTTGCITLHLYRDEYYLYFDIHDTGRGINEKMLHQLFEPFFQVSQNTESASEGTGLGLAICEKLINLMDGDISVVSQENVGSRFTVRIPLYGALNSSDGQTKYNLYKESTIRCFISIKNLYLESFVERYLSYVGLHCQLFTEVTQVSENDFIITDHDECLDNSCQFIRIYEHYFEPAKKISENNWLCSTYKLNELIKIILQLPQTKLESDDSENNALMTDHDLQLLTVLIVDDHPINRLLLTDQLKKIGFNTATAEDGCDALAFMQENHVDIILTDVNMPNMNGYQLATTVRELSSTIPIIGVTANAIAEEKQRCIDAGMNDCVSKPVSLTVLKDV

SEQ ID NO: 12704 - protein, 192 aa, Agathis dammara
DDHGEVISEVRKSDLGPYLGLHYPATDIPQASRFLFMKNRVRMICDCCAPPVRVIEDKRLPRELNLCGSTLRAPHGCHAQYMSNMGSISSLVVAVIVNEKEEEEGDSDAQQQQKGRRLWGLVVCHHTSPRFVPFPLRYACEFLMQVFGIQLNKEVELAAQLREKHILRTQTLLCDMLLRDAPMGIITQKPNI

SEQ ID NO: 12705 - protein, 191 aa, Agathis dammara
DDHGEVVAEIRRADLEPYLGLHYPATDIPQASRFLFMKNKVRMICDCRADPVKVIQDKRLAHPLSLSGSTLRAPHSCHAQYMANMGSIASLVMAVTINENENEEEASGSGQKGGRRLWGLVVCHHTSPQFVTFPLRYACEFLMQVFGIQLNKEVELAAQLREKHMLRTQTVLCDMLLRDAPVGIVTQTPNI

SEQ ID NO: 12706 - protein, 190 aa, Agathis dammara
DEHGEVVAEIRRSDLEPYLGLHYPATDIPQASRFLFMQNRVRMICDCRAAPVKVIQAEELKQPLCLVGSTLRAPHGCHAQYMANMGSIASLVMAVVINGNEDEGGGSGSGRGSMKLWGLVVCHHTSPRAVPFPLRYACEFLMQAFGLQLNMELQVAAQLTEKHILRTQTLLCDMLLRDAPIGIVTHSPSI

SEQ ID NO: 12707 - protein, 190 aa, Isoetes velata
DEHGEVVAEIRRSDLEPYLGLHYPATDIPQASRFLFMKNRVRMIYDCSAPPVKIIQDKDLRQPISLAGSTLRAPHGCHSHYMGIMGSIASLVMAVITNDNDEEYGGRGYQQKGRKLWGLVVCHHTSSRAVPFPLRSACEFLMQVFGLQLNMEVELAAQLREKHILRTQTLLCDMLLRDAPIGIVSQSPNI

SEQ ID NO: 12708 - protein, 195 aa, Podocarpus neriifolius
DDHGEVISEIRRNDLEPYLGLHYPATDIPQASRFLFMKNKIRMICDACASPVRVIEDKSLPRELSLVGSTLRAPHECHTQYMYNMNSIASLVMAVVISEREEEERDTDGQQQPQEAVRRLWGLVVCHHTRPRFVSFHLRYACEFLMQVFSIQLNKEVELAAQVREKQILRTQTLLCDMLLRGVAPLGIVTRRPNI

SEQ ID NO: 12709 - protein, 188 aa, Podocarpus neriifolius
DEHGEVVAEIRRADLEPYLGLHYPSTDIPQASRFLFMQNRVRMICDCSATPVKVIQSEELRQPLCLVGSTLRAPHGCHAQYMANMGSIASLVMAVVINGNDEEGEEQVPKSMKLWGLVVCHHTSSRAVSFPLRYACEFLMQAFGLQLNMELQLAAQLTEKHILRTQTLLCDMLLRDAPIGIVTQSPSI

SEQ ID NO: 12710 - protein, 192 aa, Juniperus phoenicea
DDHGEVISEIRRADLEPYLGLHYPATDVPQASRFLFMKNKVRMICDCYANPVEVVEDKRLLRELILCGSSLRRPHGCHAEYMSNMGSIASLVIAVTINAKEEDVDTDAQQQQQKGRRLWGLVVCHHTSPRFVPFPLRYACEFLMQVFAIQLNKEDDLADQLREKHILRTQTLLCDMLLRDAPMGIIREKPNI

SEQ ID NO: 12711 - protein, 188 aa, Juniperus phoenicea
DEHGEVVAEIRRSDLEPYLGLHYPATGIPQASRFLFMQNKVRMISDCRADPVRIIQAEELPQLLCLVGSTLRAPHGCHAQYMDNMGSIASLAMAVIVNNGNDEVGSSGRNTGKLWGLVVCHHTSPRAVPFPLRSACEFLMQTFSLQINMEMQLATQLTENNILRTQTLLCDMLLRDAPIGIVTQSPSI

SEQ ID NO: 12712 - protein, 190 aa, Platycerium angolense
DEHGEVLAEIRRSDLEPYLGLHYPATDIPQASRFLFMKNRVRMICDCRALPVRAIQDKELRQPLSLAGSTLRAAHGCHSQYMANNGIVASLVMAVVVNDNDEDMSNRPQHPKMRRLWGLAVCHHTTPRCSPFALRSACESLMQVFGLQLNMELELAAQMREKHILRTQTLLCVMLLRDAPIGIVSESPNI

SEQ ID NO: 12713 - protein, 149 aa, Chadsia versicolor
HVKVLQDEKLPLDLTLCGSTLRAPHSCHLQYMANMDSIASLVMAVVVNDNEEDGDSSDAVQPQKRKRLWGLVVCHNTSPRFVPFPLRYACEFLAQVFAIHVNKEIELESQIIEKNILRTQTLLCDMLMRDAPLGIVSQSPNIMDLVKCD

SEQ ID NO: 12714 - protein, 158 aa, Chadsia versicolor
VRMIVDCHAKHVNVLQDKKVPFDLTLCGSTLISPHGCHVQYMQNMNCSASLVMAVVLNDNDEDGGDSDAVQPQKRRRLWGLVVCHNTTPRFVPFPLRYACEFLAQVFAIHVNKELEIEYQTVEKNILRTQTLLCDMLMRDAPLGIVTQRPNIMDIVKC

SEQ ID NO: 12715 - protein, 207 aa, Dahlstedtia pinnata
VMAYKFHEDDHGEVIAEITKPGLEPYLGLHYPATDIPQAARFLFMKNKVRMIVDCHAKHVKVLQDEKTPFDLTLCGSTLRAPHSCHLQYMANMDSIASLVMAVVVNDNEEDGDSSDAVQPQKRKRLWGLVVCHNTTPRFVPFPLRYACEFLAQVFAIHVNKEIELEYQIIEKNILRTQTLLCDMLMRDAPLGIVSQSPNIMDLVKCD

SEQ ID NO: 12716 - protein, 133 aa, Dahlstedtia pinnata
LCGSTLRAPHSCHLQYMENMNCSASLVMAVVVNDNDEDGDSDAVQPQKRKRLWGLVVCHNTTPRFVPFPLRYACEFLAQVFAIHVNKELELEYQIVEKNIMRTQTLLCDMLMRDAPLGIVTQRPNIMDLVKCD

SEQ ID NO: 12717 - protein, 102 aa, Lonchocarpus eriocarinalis
QATRFLFMKNKVRMIVDCRAKHVKVLQDKKVPFDLTLCGSTLRAPHSCHLQYMENMNCSASLVMAVVVNDNDEDGDSDAVQPQKRKRLWGLVVCHNTIPRFV

SEQ ID NO: 12718 - protein, 103 aa, Lonchocarpus eriocarinalis
QAARFLFMKNKVRMIVDCHAKHVKVLQDEKIPFDLTLCGSTLRAPHSCHLQYMANMDSIASLVMAVVVNDNKMGIGSSDAVQPQKRKRLWGLVVCHNTTPRFV

SEQ ID NO: 12719 - protein, 90 aa, Lonchocarpus eriocarinalis
HASRFLFKQNRVRMICDCDAKPVKVIQSEELRQPLCLVNSTLRSPHVCHTQYMANMGSTASLVLAIIVNGNDTTRLWGLLVCHHTSPRYV

SEQ ID NO: 12720 - protein, 206 aa, Lonchocarpus phaseolifolius
RVMAYKFHEDDHGRVIAEVKKPGLEPYLGLHYPATDIPQATRFLFMKNKVRMIVDCRAKHVKVLQDKKVPFDLTLCGSTLRAPHSCHLQYMENMNCSASLVMAVVVNDNEEDGDSDAVQPQKRKRLWGLVVCHNSIPRFVPFPLRYACEFLAQVFAIHVNKELELEYQIVEKNILRTQTLLCDMLMRDAPLGIVTQRPNIMDLVKC

SEQ ID NO: 12721 - protein, 207 aa, Millettia dura
VMAYKFHEDDHGEVIAEITKPGLEPYLGLHYPATDIPQAARFLFMKNKVRMIVDCHAKHVKVLQDEKIPFDLTLCGSTLRAPHSCHLQYMANMDSIASLVMAVVVNDNEEDGDSSDAVQPQKRKRLWGLVVCHNTTPRFVPFPLRYACEFLAQVFAIHVNKEIELEYQIIEKNILRTQTLLCDMLMRDAPLGIVSQSPNIMDLVKCD

SEQ ID NO: 12722 - protein, 193 aa, Millettia dura
MAYKFHEDDHGEVVSEIRRSDLEPYLGLHYPATDIPQASRFLFKQNRVRMICDCGAKPVKVIQSEELRQPLCLVNSTLRSPHVCHTQYMANMGSTASLVLAIIVNGNDTTRLWGLLVCHHTSPRYVPFPVRYACEFLMQAFGLQLYMEIQLASQKAEKRMLKTQTLLCDMLLRDAPLGIVTQSPNIMDLVKCD

SEQ ID NO: 12723 - protein, 99 aa, Millettia dura
RFLFMKNKVRMIVDCRAKHVKVLQDKKVPFDLTLCGSTLRAPHSCHLQYMENMNCSASLVMAVVVNDNDEDGDSDAVQPQKRKRLWGLVVCHNNTPRFV

SEQ ID NO: 12724 - protein, 205 aa, Millettia grandis
AYKFHEDDHGEVIAEVKRPGLEPYLGLHYPATDIPQAARFLFMKNKVRMIVDCHAKHVKVFQDEKLPIDLTLCGSTLRAPHSCHLQYMANMDSIASLVMAVVVNDNEEDGDSSDAVQPQKRKRLWGLVVCHNTTPRFVPFPLRYACEFLAQVFAIHVNKEIELEYQIIEKNILRTQTLLCDMLMRDAPLGIVSQSPNIMDLVKCD

SEQ ID NO: 12725 - protein, 203 aa, Millettia grandis
MAYKFHEDDHGEVIAELKKPGLEPYLGLHYPATDIPQATRFLFMKNKVRMIVDCRAKHVKVLQDKKIPFDLTLCGSTLRAPHSCHLQYMENMNSSASLVMAVVVNDNDEDGDSSDAVQPQKRKRLWGLVVCHHTTPRFVPFPLRYACEFLAQVFAIHVNKELELEYQIVEKNILRTQTLLCDMLMRDAPLGIVSQRANIMDLV

SEQ ID NO: 12726 - protein, 186 aa, Millettia grandis
EDDGEVVSEIRRSDLEQCLGLHYPATDIPQASRFLFKQNRVRMICDCHAKPVKVIQSEELRQPLCLVNSTLRSPHVCHTQYMANMGSIASLVMAIIVNGNDTTRLWGLLVCHHTSPRYVPFPVRYACEFLMQAFGLQLYMEIQLASQMAEKKTLKTQTLLCDMLLRDAPFGIVTQSPNIMDLVKCD

SEQ ID NO: 12727 - protein, 201 aa, Millettia richardiana
FPEDDHGEVIAEITKPGLEPYLGLHYPATDIPQAARFLFMKNKVRMIVDCRAKHVNVLQDKKVPFDLTLCGSTLRAPHSCHLQYMENMNCSASLVMAVVVNDNDEDGDSDAVQPQKRKRLWGLVVCHNTTPRFVPFPLRYACEFLAQVFAIHVNKELELEYQIVEKNILRTQTLLCDMLMRDAPLGIVTQRPNIMDLVKCD

SEQ ID NO: 12728 - protein, 191 aa, Millettia richardiana
YKFHEDDHGEVVSEIRRSDLEPYLGLHYPATDIPQASRFLFKQNRVRMICDCHAKPVKVIQSEELRQPLCLVNSTLRSPHVCHTQYMANMGSIASLVMAIIVNGNDKTRLWGLLVCHHTSPRYVPFPVRYACEFLMQAFGLQLYMEIQLASQMAEKRMLKTQTLLCDMLLRDAPLGIVTQSPNIMDLVKCD

SEQ ID NO: 12729 - protein, 139 aa, Millettia richardiana
MAYKFHEDDHGEVIAEITKPGLEPYLGLHYPATDIPQAARFLFMKNKVRMIVDCHAKHVKVLQDEKLPFDLTLCGSTLRAPHSCHLQYMANMDSIASLVMAVVVNDNEEDGDSSDAVQPQKRKRLWGLVVCHNTTPRFV

SEQ ID NO: 12730 - protein, 200 aa, Xeroderris stuhlmannii
HEDDHGEVIAEVKKPGLEPYLGLHYPATDIPQATRFLFMKNKVRMIVDCRAKHVNVLQDKKVPFDLTLCGSTLRAPHSCHLQYMENMNCSASLVMAVVVNDNDEDGDSDAVQPQKRKRLWGLVVCHNTTPRFVPFPLRYACEFLAQVFAIHVNKELELEYQIVEKNILRTQTLLCDMLMRDAPLGIVTQRPNIMDLVKCD

SEQ ID NO: 12731 - protein, 142 aa, Xeroderris stuhlmannii
CDCHAKPVKVIQSEELRQPLCLVNSTLRSPHVCHTQYMANMGSIASLVMAIIVNGNDTTRLWGLLVCHHTSPRYAPFPVRYACEFLMQAFGLQLYMEIQLASQMAEKRMLKTQTLLCDMLLRDAPLGIVTQSPNIMDLVKCD

SEQ ID NO: 12732 - protein, 103 aa, Xeroderris stuhlmannii
QAARFLFMKNKVRIIVDCHAKHVKVLQDEKLPLDLTLCGSTLRAPHSCHLQYMANMDSIASLFMAVVVNDNEEDGDSSDAVQPQKRKRLWGLVVCHNTTPRFV

SEQ ID NO: 12733 - protein, 178 aa, Piscidia piscipula
LHYPATDIPQATRFLFMKNKVRYIVDCRAKHVKVLQDKKVPFDITLCGSTLRAPHSCHLQYMENMNCSASLVMAVVVNDNDEDGDSDAVQPQKRKRLWGLVVCHNTTPTFVPFPLRYACEFLAQVFAIHVNKELELEYQIVEKNILRTQTLLCDMLMRDAPLGIVTQRPNIMDLVKCD

SEQ ID NO: 12734 - protein, 192 aa, Piscidia piscipula
AYKFHEDDHGEVVSEIRRSDLEPYLGLHYPATDIPQASRFLFRQNRVRMICDCHAKPVKVIQSEELRQPLCLVNSTLRSPHVCHTQYMSNMGSIASLVMAIIVNGNDKRRLWGLLVCHHTSLRYVPFPVRYACEFLMQAFGLQLYMEIQLASQMAEKRMLKTQTLLCDMLLRDAPLGIVTQSPNIMDLVKCD

SEQ ID NO: 12735 - protein, 152 aa, Piscidia piscipula
AYKFHEDDHGEVIAEITKPGLEPCLGLHYPATDIPQAARFLFMKNKVRMIVDCHAKHVKVLQDEKLPFDLTLCGSTLRAPHSCHLQYMANMDSIASLVMAVVVNDNEENGDGSDAVQPQKRKRLWGLVVCHNTTPRFVPFPLRYACEFLAQV

SEQ ID NO: 12736 - protein, 207 aa, Pongamiopsis amygdalina
RVMAYKFHEDDHGEVIAEVKKPGLEPYLGLHYPATDIPQATRFLFMKNKVRMIVDCRAKHVNVLQDKKVPFDLTLCGSTLRAPHSCHLQYMENMNCSASLVMAVVVNDNDEDGDSDAVQPQKRKRLWGLVVCHNTTPRFVPFPLRYACEFLAQVFAIHVNKEIELEYQIIEKNILRTQTLLCDMLMRDAPLGIVSQSPNIMDLVKCD

SEQ ID NO: 12737 - protein, 151 aa, Pongamiopsis amygdalina
RVMAYKFHEDDHGEVIAEVKKPGLEPYLGLHYPATDIPQAARFLFMKNKVRMIVDCRAKHVNVLQDKKVPFDLTLCGSTLRAPHSCHLQYMANMDSIASLVMAVVVNDNEEDGDSSDAVQPQKRKRLWGLVVCHNTTPRFVPFPLRYACEF

SEQ ID NO: 12738 - protein, 145 aa, Pongamiopsis amygdalina
VMAYKFHEDDHGEVIAEITKPGLEPYLGLHYPATDIPQAARFLFMKNKVRMIVDCHAKHVKVLQDEKLPFDLTLCGSTLRAPHSCHLQYMANMDSIASLVMAVVVNDNEEDGDSCDAVQPQKRKRLWGLVVCHNTTPRFVPFPLR

SEQ ID NO: 12739 - protein, 124 aa, Pongamiopsis amygdalina
MAYKFHEDDHGEVIAEITKPGLEPYLGLHYPATDIPQAARFLFMKNKVRMIVDCHAKHVKVLQDEKLPLDLTLCGSTLRAPHSCHLQYMANMDSIASLVMAVVVNDNEEDGDSSDAVQPQKRKR

SEQ ID NO: 12740 - protein, 180 aa, Tephrosia villosa
GLHYPATDIPQAARFLFMKNKVQMIVDCHAKHVKVLQDEKLPLDLTLCGSTLRAPHSCHLQYMANMDSIASLVMAIVVNDNEEDGDSSDAVQPQKRKRLWGLVVCHNTSPRFVPFPLRYACEFLAQVFAIHVNKEIELEYQIIEKNILRTQTLLCDMLLRDAPLGIVSQSPNIMDLVKCD

SEQ ID NO: 12741 - protein, 196 aa, Tephrosia villosa
DRVMAYKFHEDDHGEVIAEIRRSDLEPYLGLHYPATDIPQASRFLFKQNRVRMICDCHAKPVKVIQSEELRQSLCLVNSTLRSPHVCHTQYMANMGSIASLVMAIIVNGNDTTRLWGLLVCHHTSPRYVPFPVRYACEFLMQAFGLQLYMEIQLASQMAEKRILKTQTLLCDMLLRDAPLGIVTQSPNIMDLVKCD

SEQ ID NO: 12742 - protein, 393 aa, Miscanthus sinensis
EPARTEDPALSMAGAVQSQKLAVRAISCLQALPGGDVKLLCDTVVEHVRELTGYDRVMVYRFHEDEHGEVVAESRRDNLEPYLGLHYPATDIPQASRFLFRQNRVRMIADCHATPVRVIQDPGLSQPLCLVGSTLRASHGCHAQYMANMGSIASLVMAVIISSGGDDEQTGRGGISSAMKLWGLVVCHHTSPRCIPLPLRYACEFLMQAFGLQLNMELQLAHQVSEKHILRTQTLLCDMLLRDSPTGIVTQSPSIMDLVKCDGAALYYHGKYYPLGVTPTESQIKDIIEWLTVCHGDSTGLSTDSLADAGYLGAAALWDAVCGMAVAYITPSDYLFWFRSHTAKEIKWGGAKHHPKDKDDGQRMHPRSSFKAFLEVVKSRSLPWENAEMDAIH

SEQ ID NO: 12743 - protein, 800 aa, Nostoc punctiforme
MLSVKLFVLHSSLFSYSRYSSFDAPGQQRRIFMEMNLQFPGINLISLKEAPIHISSQIQPHGVLLVLEEPELKILQVSTNTLKVFGIAPENMLHKKLEDLLDPFQIERIKTGLSGENLDFINPTKVWVRKKGDEYVVFDAIFHRNIEGFLILELEPAITQENIPFLSFYHLARASINQLEKTANLRDFCQVIVQEVRKITEFDRVMLYKFDDDGHGSVIAEEKLESLEPYLGLHYPESDIPKPARKLFAANSIRIIPDAYSQPVKLFPVNNPISDRPINLTNSILRSAASCHTEYLHNMGVGASLTISLIKDQKLWGLIACHHQSPKYVSYELRKACEFLGRVIFAEISAREETEDYYHRINLTHLQSILIEYMSQEENFIDGLVKNPQHLLDLASAQGAAVCFAGNCTVVGETPREEDLNFLVQWLKNNVEEEVFYTDSLPQIYPDAESFKNVASGLLAIPIAKRTYVLWFRPEVIQTVNWGGDPNKAFEVSQSEGNVRLCPRKSFELWKETVRLTSLPWKDVEVKAALELRKAIVNIVLRQADELAQLAQDLERSNAELKKFAYVASHDLQEPLNQVVNYVQLLEMRYSEELDEDAQEFISYAVQGVSLMQTLIDDVLAYSKVDMQAIAFQMNDVETALMRGLGNLRQRINETGATITHDPLPTVMADSTQLMQLFQNLIGNAIKFHSDQPPQIHVGAERIEDAWLFSVRDNGIGIDPKFSDRIFVIFQRLHTRDEYTGTGMGLAICKKIVECHRGRIWVESELGQGATFYFTIPVGGRELERRNGRKTQNHLFGRGQ

SEQ ID NO: 12744 - protein, 775 aa, Nostoc punctiforme
MSQPENTTTQATALTNHDRKPIHIPGSIQPHGILLALSTQLEIVQVSNNTQVYLCKAPEDLLGRPLSYLLEPQPVEIVKQCLVKKVGSANAFKVLINTLYGEIYFDAIAHRTEEAVILELEPTDSEFEVSFLNFHSFASEAIAKMQRTSNLGEFLHLVAQEVQKIISFDRVMVYQFDESEAGSVVAEVKREDLSPYLGLHYPATDIPAQARELYTRCFLRFLPDLTAEPVKLVPTENPTTHQHLDLSYCLLRSFDWCCAEYHQNMGVKALLVISLIQEQKLWGLISCHHQTPKYISYEVRKMCEFLGQIVSSELAHKISSSEWDYKVKLKSLQSEFLESISQADNFIDALIKPEIRLLDFVSASGAAVCLDNEINLVGTTPNIDEVRALIEWADTQVTDNLFSTDSLPKLYPEALIFKDTASGLLLLRISKVRRYYILWFRPEVIQTVHWAGNPQESIKAEGDGSYTLSPRKSFEQWQETVRLTSLPWKGCELESAIALSNAIVGIVLSKADELAKINLELERSNQELASFAYAASHDLKEPLRGIYNFSTVLLEDYAQVLDDDGIECLQTVVSLSVRMETLINALLRLSQLGQAHLREQATDLNELLNQVIDVFRASRQDSGLVDIRIPRPLPTIQCDRVLVNEVFSNLLGNAFKYNDKAEQWVEIGYLSQEEGQGVGSRGQGAGGAGEAIIHQSPIPNAPCPIFYIRDNGIGIPQHHLETIFRLFKRLHSQEKYGGGAGAGLAIVKKIVELHNGQIWVESTLGVGSIFYFTLE

SEQ ID NO: 12745 - protein, 139 aa, Nostoc punctiforme
VYQFDESEAGSVVAEVKREDLSPYLGLHYPATDIPAQARELYTRCFLRFLPDLTAEPVKLVPTENPTTHQHLDLSYCLPRSFDWCCAEYHQNMGVKALLVISLIEEQKLWGLISCHHQTPKYISYEVRKMCEFLGQIVS

SEQ ID NO: 12746 - protein, 1204 aa, Nostoc punctiforme
MEFLTNQVSQTQEILLHRIASRIRQSLELQEILSATVAEVRSFLGTDRIKIYQFQADGHGLVIAESIQEDRLPPLLGLNFPADDIPPYARELFVRARQRCIVDLTTQEIGISPLDCPETGKPLEQQDIRYRPVDPCHLEYLTAMGVKSSVVVPIVLKNQETGKDSSPNVMESSQLWGLLVSHHSQARVVTQQELLLIQSVVDQVAIAISQSILLTQVREQARQEAIINKVTEQLHSTPVAQLQTALEETVAAFNGSGGRLYLLPDDEQTAKLYTFGLQPNQLDIGQEQTPSPLTQELSLVDRAWVSPMERNNEVLLLANLREGSDVLRKGRPIEEHRLWQKYLFASICPPENLENPSHKSWSVNWMRAIYALTPPVNELSYDSNLWAIADLYKEPLLRSVAPCFQTTQVRGLLIVPLQHGSTIVGCLTIFRDEVDIETIWAGCVDTDSRQLMPRQSFAAWRELRTGQAQQWSESEIKLAQALGERFATAVKQHRLYEQVQALNANLEQQVRDRTLELQQTNTDLQHSTIELQRSVERQQALARIIANMRQSLDVTTIFRTTTQEVCQLLECDRLSVYRFNADWGGEFVGDYETANPRWGRSIKLGVGMVWDDTYLQETQGGRYRNNETFVVDDIHSQGFTQCHIEILEQFHVQAFMIAPIFVGQELWGLLGAYQHSSTRHWQASEIEFFTQIATQLGVALQQAEYLEQVRAQTRKLALVAEQQQTLASVITKIRESLDLNAIFETTTQELRRVLNCDRVVIFRFYSESNYDGGEVIAEDVAERFLSTLTAKVYDRCLGQEHIEKFCQGYVHAVTDIYNSELNECYVSMLSRFQVRANLVIPMLKQGQLWGLLGIHQCQKSREWQDSEIEFVRQIAAQLGVALQHVVLLNQTQQQAIQLAQALEHLQQTQAHLLHSEKMSSLGLLVAGVAHEINNPVNFISGNLSHLHEYTQSLIKMLNIYQQIYPQPHPEIEKQAILSDLEFIAEDLPKLFSSLKIGAERIGEIVLSLRNFSRLDQAQVKPVDIHEGLDSTLLILQHRLKANSLHLGIEIVKQYASLPLIECFAGQLNQVFMNLLANAIDAVEEPCRQPAKSDKDKHYPRITIKTQLIANDWVQIYIKDNGVGMTKAVQAKLFDPFFTTKPVGQGTGLGLSISYQIVEKHGGKLQCLSQPGEGAQFVIEIPIKQSERELANVLIDKKESDTDNS

SEQ ID NO: 12747 - protein, 910 aa, Nostoc punctiforme
MTSTDKPNGLQQSLEQESLLHRMIKQIRRSLDLQEILTTTVTEVRSFLRADRVKVYRFDTSGSGEVIAESIHNERLPSLLGLRFPVHDIPEAAREMFLLAGQRSIVDVANHKIGLSPLQSTETGKHLQTNIYYRKVDPCHIQYLKAMGVQSSLVVPILDSDPQQSAKPKLWGLLVSHQSKPRKILKREIKVLQQVADQVAIAIAQSNLLTAALTQQKQEATINRVTTLLHKLPTIQLQGAIEEVITAFSGVGGRLYIEQSRELYTWGDQPTLPYELDSSIIEQHPTWQNWMTECQPGNIWATSDLYKEPHLRVLALAFRSTQIRGLMVIPLHYREQFIGVLSIFRAEFETEILWAGRCEQNRRQLLPQLSFEIWREQKKGLAPEWKPEDMTLAQALYDHFSMAIQQQQIYKEVQALNANLELRVQEQTAELEKSLLLTKVIKQITEQIRRTLDLQTTLQTIVSEVRSLLNSDRVVIFQLNSKSVIVEEMNGNWQSVLGVNAPPECFPNEHRDLYSQGRVRAINNVSTDSLSDCHREFLQSLQIQANLTVPINIGIELWGLLIAHECNTPRNWQDVEIDLLQQLGDQAAIAIQQAQLYEQTCKAETEARNKAGELGQTLHKLQETQTRLIQTEKMSGLGQLVAGIAHEINNPVNFIYGNLCHASDYIEQLLEILRLYQLHYPDPHSEISAAIEAVDFEFLVEDLPRIITSMQVGSDRIRSIVLSLRNFSRLDEAENKRVDLHEGIDNTLLILQHQLKGNGKFPGIQVIKDYGNIPKVECYAGQMNQVFMNIFSNAIDALEMGTAEEDKENKPSPVPTIRISTKISADNSRLLIRISDNGPGMIPEIKKRIFDPFYTTKPVGRGTGLGLAISYQIIVEKHGGIMECISEPGIGTEFWIEIPVKPPAKIVYSR

SEQ ID NO: 12748 - protein, 681 aa, Nostoc punctiforme
  unsure (1)..(681): unsure at all Xaa locations
MANRIRQSLNLQEILDATVVELRAFLQTDRTKVYRFDRDGHGHVVAEASAPNRLPSLLGLHYPADDIPPQARALFVKARTRSIVNVSEQRIILNSLPTPTTTAIGDLTVEEVQEQPLEDILSRPVDPCHVDYLTQMGVQSSLVVPIIYQQELWGLLISHHAEPREITSEDLLVVQLLADQVSLAITQASLLSQVQEQQQRDAIVNQIATMLHAPLTPEEILHNVLEQAVKASGSSGGRLYLTSPDEALPAHLYTYGNQPAPSEQEQPHLLENHPLWQEVRKIPAPIGTTLTQKDKPALRVVINLQQEPRLHQLIESFQTTPIRGLIVQPLYYSKEFLGYLTFFRDQISTKNLWPGYEEADERQQRPRQSMAQWQALKEDKAHPWSIEEMELIQSLNIHLSLAVLQNRLYHRERQQRLIVEMHNEALSHARAAAEEVSRLKSNFLASTSHELRTPLASTLNYLKLLKERLYEDEDELREYIDGAYQSTQNLVTIINDVLDIAKIEDGRIALDLETVYLQQLLQEQCFLSGAESRYKAIPLTLDCEIETVFADKIKVRQVMTNLLDNAFKFTDEGQIDVRAVVDSTGTMAQISVHDTGIGIEMENSEQLFSPFVQADGSAQRSYGGTGLGLTICKRLVELMGGKIWLESPGLGQGNTVTFTLPLNEQSQVAGQGSLFEGQAXX

SEQ ID NO: 12749 - protein, 1102 aa, Nostoc punctiforme
MTSNPEQNFLYSQEESLLRRITNRIRRSLELEEIITVTTAEVRSLLKTDRVMIYKFHADGNGQVIAESIYNNRLPSLLGLNFPADDIPLSARELFLKLRVRSVVNVDTQEIGQIHLRDLDNGETISEEIRYRSVDSCHIEYLTAMGVKSSVVAPILYQDQLWGLLVSHNSEARLISEYELEAVQMVVEQLSVAIAQSSLLTQVRKTAERETIINRIATLLHSLPTIVLQPALEAAIAAFNGVGGRLCIRNEAFDYYNGNLTSLTECLIPGNTCIKLFICGQQPVMPEQTIYPLIEQYSIWQEHYKSGKYDVWAISDLYNSPDLRSLQVAFQPTKIRGILTIPLQYRQQLLGYLSIFRNEVDTETLWAGQYDSDQRQLYPRRSFEVWRESKKAQAQKWTVEEIELARDIGKHFASAIQQYELQQQVQVFNENLEKQVKRRTVELQRTAEQEQAVFKVIAEIRESLDTDTIFQTTTKEVCQLIKADRVSVYRFDSNWGGEFVGDFEAASPYWSNESEIGINTVWNDTYLQDTEGGRYRNNETFAVDDIYKMGFAKCHIDNLEQFQIHAFVLAPIFVGQKLWGLLATYQHTGPRQWKASEVNFLSQIAAQMGVALQQAELLTQTRQQTLNLQQAAEQQRVLFEVVAKVRKSLDLDAIFQTTTQEICKSLQADRVAVFQFQADWSGEYIAEFVGDGWVKLVGSNTKTVWQDSYLQETQGGRYRHNETFAVDDIYQVGHSQCHVAVLEQIQARAYAIAPIFIGQQLWGLLAAYQNSAPRHWEASEIKFITQIANQLGVALQQAQLHNQTKEQTEKLTQALHDLKQTQTQLIQTEKMSSLGQLVAGVAHEINNPVNFIYGNINHVNNYAQDLLGILDLYLQNTPNPSPEIRDRTFEIDLEFLIEDLPKTLSSMKIGVDRIRQIVLGLRNFSRLDEAEMKPVDIHEGIDSTLLILQHRLKAKPESPAIKLVKEYSELPLVECYAGPLNQVFMNVLSNAIDALEDYRESPSKPHSSQITICTAIGELEGNIKSVVIRIADNGSGIPEALKARICDPFFTTKPVGKGTGLGLSISYQIVVDKHGGVFKCDSQPGLGTEFWIEIPVSQITKF

SEQ ID NO: 12750 - protein, 996 aa, Nostoc punctiforme
MAVSAWYGGMEAGLLATALSTLTVSYFFLEPVFSLSVASLDNIRRLGLFVLVTTFITLLNSELRTAKQHLQMSLQKLKVSEAKFRRLVESNIIGIIVANMDGAIAEANDAFLRMVGYSQEDLLAGRVRWRDMIPPKYIEANNSAIAELKAKGVCQPFENEYIRKDQNCVPILLGSALLENNSNDIISFVLDLSERKQVELALCQSEERYRAFLEQSSEGIWCIELEVPISPDCPEDEQIQHFYQYVYLAECNNVMAQMYGCSRAEEIINARLGDFLIPSDPHNIAYLRNFIRSNYRLIDAESHEIDKQGNSKYFLNNLVGIVENGLLVRAWGTQRDITERKQAEAALNQQEEQLRLITNAVPVQISYVDIQQLYRFNNKGYEDWFGLPASEIYGKHIREIMGESVYQSILPYVEAVLSGEEVTYETQLPHKDGTHHYINVSYVPQFSEQGKVEGFVALITDITLHKLAEAALKQSEKRLKTLTEKVRIIPWEVNATTGNFTYVGPQTVEILGYPLSDWYIDDFWQKHMHPEDREWAIQYCQESSLSLNNYEFEYRMLAADGRVVWLYDIINVVRDENGPQLLHGFMLDITDRKQAEQEREQLLEREKAARADAESANRMKDEFLATLSHELRTPLNAILGWTQLLRNRKFDEATTARALETIERNTKSLAQLIEDVLDVSRIIRGTLHLSIHRIKLVPLVEAAIDTVRPAAEAKEINIKCKFDPEVGIVVGDTNRLQQVVWNLLSNAVKFTSKGGSVDVQLERIESSVQIRVSDTGVGIAAEFLPHVFERFRQADSSSTRSHGGLGLGLAIVRHLVELHGGTVSVESLGVGQGATFIVNLPMKAVYVEANTAEQPSSLVDVPEANNYLPRLDDLRVLIVDDEADARHLLTTILGQYGAQVIAAASACEALLALQQFRPHILVSDIGMPQQDGYALIRQVRALPTDQGGRIPAVALTAYARAEDRTQALLAGFQLHVPKPVNPSELAVVVANLTGRT

SEQ ID NO: 12751 - protein, 1105 aa, Nostoc punctiforme
MPDAEKSQNQLANEKLLHRQVSKKANYSLLASGEEGMVLQLADGTIQACNATCDRILGLTTEQLVGQNLLDSKWQFLHEDGSPLPNETHPAIAAQKTGKPCLNVVCGFYKPNGQLVWLLLSSQPLFQGGVDTPFAIVTTFLDITEFKQAQLEEKGNCTEDTQQVEEESWLQPEAKSIVPLASVIDVNGSQQLWDSQRLFQQIAGTLPGILYIYDLIEQRNSYVNDEIAQGWGYTPAEIQAMGKDLFTQLLHPEDLARLPTYFERFNSAHPGEVLSFEYRIRHVNGEWRWFCSYDTVHSRTVEGFPKYLLGIAFDITERRHIEISLRQSNERFELAAAAVNCLIYDWEIHRSSVERTQGLTQVLGYTQQEAEPTFEWWQQLIHPDDQQRVNNQFMASMANGNRYSIEYRIRHKDGRYVWVQDQGFAVRDTNGQVVRVVGASADITEQQAILREQQAALRDRQQIETNLRESEERIRLATSAAELGMWFWNITTNELVWTEKCKELFGLGPEVEMSYELFLNCIHPEDRQRLNEAIARCFQEKVEYDIEYRSLWSDGSIHWIAAKGRVFYEADDQPGRMMGTAQDITGRKQIENDLRQRETQLRRLVDSNIIGIMFATPDHITEANEAFLEMVGYTREELLAGKVRRKQMTPPEYHALDEQGIEQLLTVGVCNPFEKEYIRKDGSRIPILIGGALVEKDPPSWICFILDLTPRKQLEQTLRQQTEELKQANQNKDEFLAILSHELRSPLNPILGWSSLLKSRKFDEATTNRALETIERNTQLQIKLIDELLDVSRIIRGKLNLTFATVNLASVIDAALETVRLIAESKSIQIKIQLDPNVGKVSGDYYRLQQVVGNLLSNAVKFTPPNGSVEVSLSSSGELASHSALIQVKDTGQGISPEFLPHVFEYFRQADSSRTRKFGGLGLGLAIVRNLVELHGGTVTAASPGEGQGAIFTVRLPVMKESRGDEETGEGREKLNSLAIAGLRILIVDDDADTREFLHFFLQQNGALTTVAASVTEALAVIVKTIPDVLISDLGMPEMDGYSLIKLLRAMPKEEGGEIPAIALTAYAGESDRNRVLAAGFQKHLAKPVKPTELIISIADLVSQR

SEQ ID NO: 12752 - protein, 192 aa, Cephalotaxus fortunei
DDHGEVISEIRKSDLEPYLGLHYPATDIPQASRFLFMKNRVRMICDCYAPPAKVVEDKRLPRELNLCGSTLRAPHGCHAQYMANMSSIASLVMAVIINEKEEEQGESDGQQQQKGRRLWGLVVRHHTSPRFVPFPLRYACEFLMQVFGIQLNKEVELAAQLKEKHILRTQTLLCDMLLRDAPVGIVTQKPNI

SEQ ID NO: 12753 - protein, 193 aa, Cephalotaxus fortunei
DDHGEVISEIVRSDLEPYLGLHYPATDIPQAARFLFMKNRVRMICDCGAPPVRVVEDKRLPREVSLCGSPLRAPHGCHTGYMTNMGSIASLVMAVVIDEKEEGGGDTNGQHEQKKGRRLWGLVVCHHTTPRFVQFPLRYACEFLMQVFGIQLNKEVDLAVQLREKHILRTQTMLCDMLLRDAPLGIIRQKPNI

SEQ ID NO: 12754 - protein, 1268 aa, Vibrio cholerae
MKSLISVPKFSLRSWLMSLWLPLGLLVIGYFVATSKVDQQQQTQAKRISDAVTVRLNLIAAGVQEKVTLYQYGLRGIRTAVMLLSPEHFDYNDMQAYTQARDYKREFPGARGFGLIIKVEPNQTAAFLDRMAAERPSYNFQIRQLTPHQDSLFVITYIEPEQNNREAVGVDIGSEAMRRKAALDAAFNNDVRLTAPITLVQANERAQQGFLILMPVYKTTTVPQDSRQRLEHLFGWSYATILINDVLNSVAGLENDVFLQISDITEQTPIEFFSQEVKDTYDAALQQKLNLSVFGRQWQLSLTPTNRFINELQLRSGTSLFFEVMAVSTILAFGVYLLQLMLMRRSQLIRHKQELASIAEQTLLKANAELEQQVALRTAEISRVNILQRSILSSAGYAIIATDEEGIITAFNPAAEKLLGYRAEEVLFQQTPSIFHLPAEVEHHAAKLTTELGSNIAVGFETLVAKARLGQTDNARWTYLTKTGEQVQVKLNVSALKDEQGQLAGFLSIAFDLTKQLKYEAELAQAKEQAESANKAKSEFLANMSHEIRTPMNGVLGLLQLVANSTLDQRQADYIEKAYSAAKSLLTLLNDILDFSKIEAGKLELDPHPFSLTDLMQDIGLVFSSSAEQKGLEVLYDVTADVPEHLLGDSFRIKQVLINLVGNAIKFTDKGEILISIRSQSLPEGEINLSFSIKDTGIGITLEQQNALFSGFQQADSSISRRYGGTGLGLAISKRLVNLMGGEIGVESEFGCGSTFSFNVVVRNAEKRAIQNSQTFTRSNEKLSVLIVDDNDSSRIILQGIAVSLGWQAKIASDAQEASLLVKQAHRDSTRYDVVFVDWRMPGKDGLTFARELRELHSSVVSLIVMITAHGKELLDEQNNDYERYLDGFLIKPVTKNMMLQAVKSVVFGDLDLSLPTSPLPHELPLQGISLLLVEDNLTNQLVASELLQQLGATIKIASSGEEALEMLESTAEHFDMVLMDIQMPGMDGYQTTREIRKLPRHQLLPIIAITAHAMSDDIAACLAAGMQDHIAKPFDLNELTTKILSHHKAEKAPHVKQVNKSNLNFDQAALAFCQQHHIELEAAVQRLGYSLTIYVNVLKQFEQDLRQALQQLEDKTLTRRNARLLFHSLKGAAGTLGFSNLAKLTARLEDELREHSDDGYQVDNNVLDILKLTLNTATDLVKLLQVEQQIATAQAPVSRTEQAAQLMTLKQHLNLANMAALPLYQQLAPSLQAQTPELNKELEEALVNLTFEQAVVIVDKMLSQFKE

SEQ ID NO: 12755 - protein, 857 aa, Vibrio cholerae
MNIRPSQIKHKQRIASFITHAVVVVMGVLIVSVLFQSYQISSRLMAQEGQRTSVQTSSLIQSLFDFRLAALRIHQDSTAKNASLINALVSRDSSRLDEFFSSVDELELSNAPDLRFISSHDNILWDDGNASFYGIAQQELNKLIRRVAISGNWHLVQTPSEGKSVHILMRRSSLIEAGTGQVVGYLYVGIVLNDNFALLENIRSGSNSENLVLAVDTTPLVSTLKGNEPYSLDYVVHSAKDAMRDSFIVGQTFLEVESVPTYLCVYSIQTNQNVLTLRDNFYFWMAFALISMIGVSIASRWWLQKRIQREIETLMNYTHKLMDLDTKSEFIGSKIYEFDYFGRTLEQSFRRLANKEKQFEDLFNFALSPTMLWNTSGRLIRMNPSAQIQFLREDAQNHFLFEILERQLLPTITNAAQGNNPSDVTTEVDGRVYRWNLSPIMVEGQIISIITQGQDITTIAEAEKQSQAARREAEESARVRAEFLAKMSHELRTPLNGVLGVSQLLKRTPLNDEQREHVAVLCSSGEHLLAVLNDILDFSRLEQGKFRIQKNEFRLKELVCAIDRIYRPLCNEKGLELVVNSNITTAAIVRSDQIRINQILFNLLNNAIKFTHQGSIRVELQLIEGDPLAQLVIQVVDTGIGIREQDLTVIFEPFMQAESTTTREYGGSGLGLTIVHSLVEMLSGQLHVSSEYGIGTRFEIQLPIELVEKPDAPQQLLPAPDPQPLFDKTLRVLLVEDNHTNAFIAQAFCRKYGLDVSWVTDGLQAIEELKIHDYDLVLMDNQLPYLDGVETTRTIKKVLHLPVVVYACTADGLEETRQAFFHAGAEYVLVKPLKEQTLHKALEHFKHHHGQKNAGLN

SEQ ID NO: 12756 - protein, 859 aa, Vibrio harveyi
MTTTRSNIKKRRSLATLITKIIILVLAPIILGIFIQSYYFSKQIIWQEVDRTKQQTSALIHNIFDSHFAAIQIHHDSNSKSEVIRDFYTDRDTDVLNFFFLSIDQSDPSHTPEFRFLTDHKGIIWDDGNAHFYGVNDLILDSLANRVSFSNNWYYINVMTSIGSRHMLVRRVPILDPSTGEVLGFSFNAVVLDNNFALMEKLKSESNVDNVVLVANSVPLANSLIGDEPYNVADVLQRKSSDKRLDKLLVIETPIVVNAVTTELCLLTVQDNQSVVTLQIQHILAMLASIIGMIMIALMSREWIESKVSAQLESLMSYTRSAREEKGFERFGGSDIEEFDHIGSTLESTFEELEAQKKSFRDLFNFALSPIMVWSEESVLIQMNPAARKELVIEDDHEIMHPVFQGFKEKLTPHLKMAAQGATLTGVNVPIGNKIYRWNLSPIRVDGDISGIIVQGQDITTLIEAEKQSNIARREAEKSAQARADFLAKMSHEIRTPINGILGVAQLLKDSVDTQEQKNQIDVLCHSGEHLLAVLNDILDFSKIEQGKFNIQKHPFSFTDTMRTLENIYRPICTNKGVELVIENELDPNVEIFTDQVRLNQILFNLVSNAVKFTPIGSIRLHAELEQFYGAENSVLVVELTDTGIGIESDKLDQMFEPFVQEESTTTREYGGSGLGLTIVKNLVDMLEGDVQVRSSKGGGTTFVITLPVKDRERVLRPLEVSQRIKPEALFDESLKVLLVEDNHTNAFILQAFCKKYKMQVDWAKDGLDAMELLSDTTYDLILMDNQLPHLGGIETTHEIRQNLRLGTPIYACTADTAKETSDAFMAAGANYVMLKPIKENALHEAFVDFKQRFLVERT

SEQ ID NO: 12757 - protein, 190 aa, Huperzia selago
DEHGEVVAEIRRSDLEPYLGLHYPATDIPQASRFLFMKNRVRMIVDCTAAPVKVIQDKELRQPLSLAGSTLRAPHGCHSQYMSNMGSTASLAMAVIINDNDEERSSAVSVQKGRKLWGLVVCHHSTPRAVPFPLRSACEFLMQAFGLQLNMEVELSAQVKEKHILRTQTPLCDMLLRDAPIGIVSQSPNI

SEQ ID NO: 12758 - protein, 190 aa, Huperzia selago
DEHGEVVAEIRRSDLEPYLGLHYPATDIPQASRFLFMKNRVRMICDFSDPPVNVVQDKDLRQPISLAGSTLRAPHGCHSKYMRNMGSIASLVMAVVINDSEETQNERTQKPKGRKLWGLVVCHHTLPRAVPFPLRSACEFLMQVFGLQINMELELAAQFKEKHILRTQTLLCDMLLQDAPIGIVSQSPNI

SEQ ID NO: 12759 - protein, 192 aa, Larix decidua
DEHREVVAEMRRPDLEPYLGLHYPATDIPQASRFLFMKNRVRMICDCCAPPVKVIQDKRLRQPLSLCGSTLRAPHGCRGQYMVNMGSIASLVMSVTTNENGDDSEDIGQRQPQKGRRLWGLVVCHHTSPRVIPFPLRYACEFLMQVFGIHLNKEVELAAQLREKHILRVQTVLCDMLLRDAPVGIVSQTPNI

SEQ ID NO: 12760 - protein, 191 aa, Larix decidua
DDHGEVISEIRRSDLEPYLGLHYPATGIPQASRFLFMRNGVRMICDCCAPPITVIQDKRLPRDLSFCGSTLRAPHGCHAQYMANMGSIASLVMAVVISEKEEDADSDGQIQQKGRRLWGLVVCHHTSPRYVPFPLRYACEFLMQVFGIHLNKEVELAVQMSEKRILRTQTLLCDMLLRDAPLGIVSQKPNI

SEQ ID NO: 12761 - protein, 423 aa, Smilax rotundifolia
SGKPFYAIVHRVTGCLIIDFEPVTPTEVPMPAAGALQSYKLAAKAIAKLQSLPGGSMEGLCSTVVQEVFELTGYDRVMAYKFHEDDHGEVFAEITKPGLEPYRGLHYPATDIPQAARFLFMKNKVRMISDCRAKPVKVYQDEKLPFDITFCGSTLRAPHSCHLQYMENMNSIASLVMVVVINEGEEDEEQGQQQHNRKRLWGLVVCHHESPRFVPFPLRYACEFLMQVFAIHVNKEFELENQIREKNILRTQTLLCDMLLRDSDPLGIVTQSPNIMDLVKCDGAALLYENEIWQIGLTPTESQIREIAFWFAEFHADSTGLSTDSLYDAGYPGAVALGDTVSGMAAARITSTDILFWFRAHTAAEIRWGGAKHDPSDKDDGKRMHPRSSFNAFLEVVKGRSLPWNNYEIDAIHSLQLILRGTL

SEQ ID NO: 12762 - protein, 394 aa, Smilax rotundifolia
DLEPVNPADVPVTAAGALKSYKLAAKAISRLQSLPSRNISLLCDVLVREVSELTGYDRVMAYKFHEDEHGEVISECRRSDLEPYLGLHYPATDIPQASRFLFMKNKVRMICDCSAASVKVIQDKKLAQPLSLGGSTLRAPHGCHAQYMANMGSIASLVMSVTINEDDEEMDGDQQQKGRKLWGLVVCHHTSPRFVPFPPRYACEFLLQVFGIQLNKEVELAAQAKGKHIFWMQTLLCDMLLRDAPIGIFTQSPNVMDLVKCDGAALYYRKQFWLLGITPTEAQIKDIVAWLLECHDGTTGLSTDSLTEAGYPGSSALGNAICGMAAIKITSKDFIFWFRSHTSKDIRWGGAKHEPADRDDESQKMHPRSSFKAFLEVVKLRSLPWEDMEMDAIQ

SEQ ID NO: 12763 - protein, 396 aa, Hedycarya angustifolia
DLEPVNPADVPVTAAGALKSYKLAAKAISKLQSLPSGNISVLCDVLVREVSELTGYDRVMAYKFHDDEHGEVIAECRRSNLEPYLGLHYPATDIPQASRFLFMKNKVRMICDCSAPPVKVIQDKSLAQPLSLGGSTLRAPHGCHAQYMANMGSIASLVMSVTINEDDDETSSGSEQQQQKGRKLWGLVVCHHTSPRFVPFPLRYACEFLIQVFGIQLNKEVELAAQMREKHILRTQTVLCDMLLLDAPVGIITKTPNVMDLVKCDGAALYYLNQFWLLGTTPTEAQIRDIVSWLQEYHNGSTGLSTDSLMEANYPGAFVLGDAVCGMAAVRITSKDFLFWFRSHTAKEIKWGGAKHNIVDKDDDGRKMHPRSSFKAFLEVVKRRSLPWEDIEMDAI

SEQ ID NO: 12764 - protein, 106 aa, Hedycarya angustifolia
QAARFLFMKNKVRMICDCHAKPVKVYQDEKLPFDLTFCGSTLRAPHSCHLQYMENMSSIASLVMAVVINEGEEEEESPEPTQQQPLQKKKKLWGLVVCHNTTPRFV

SEQ ID NO: 12765 - protein, 394 aa, Zizania aquatica
EPARTEDPALSIAGAVQSQKLAVRAISRLQALPGGDVKLLCETVVEHVRELTGYDRVMVYRFHEDEHGEVVAESRRNDLEPYLGLHYPSTDIPQASRFLFRQNRVRMIADCHSAPVRVIQDPALPQPLCLVGSTLRAPHGCHAQYMANMGSIASLVMAVIISSAGDDEHNMARGGIPSAMKLWGLVVCHHTSPRCIPFPLRYACEFLMQAFGLQLNMELQLAHQLSEKHILRTQTLLCDMLLRDSPTGIVTQSPSIMDLVKCDGAALFYHGKYCRLGVTPTEAQIKDIIEWLTVCHGDSTGLSTDSLADAGYPGAATLGDAVSGMAVAYITPSDYLFWFRSHTAKEIKWGGAKHHPEDKDDGQRMHPRSSFQAFLEVVKSKSLPWENAEMDAIH

SEQ ID NO: 12766 - protein, 554 aa, Asparagus falcatus
PYEVPMTAAGALQSYKLAAKAISRLESLPGGSMEKLCNAVVEEVFELTGYDRAMAYRFHEDDHGEVFSEVTKPGLEPYLGLHYPATDIPQAARFLFMKSKVRMICDCRAKPVRVLQDEKLPFDITFCGSTLRAPHSCHLQYMENMNSIASLVMAVVVNEGGEDEGEGEAGQASSPAQQQQGLRRKRLWGLVVCHNESPRFVPFPLRYACQFLMQVFAIHVNKEFELEHQIREKNILRTQTLLCDILLREAGPLGIVTARSPNVTDLVRCDGAALLYEDKIWRLGRTPTDSEIRDIAYWLVEYHADSTGLSTDSLLEAGYPGAFALGDLVCGLAAARINSRDILFWFRSHTAAEVRWGGAKHDPSDEDDGRRMHPRSSFKAFLEVVKTRSLPWSDYEMDAIHSLQLILRGSFNDVKKSEGLDSRMRSLRVEGMEELQAVTNEMVRLIETATVPILAVDVDGVINGWNLKIAELTGLPVDEAIGKHLLALVEDSSVAQVRRMLLLALQGTEEQNVEFQMKTCGDRGDDGPVILVVNACASRDLNEKVVGVCFVAIT

SEQ ID NO: 12767 - protein, 444 aa, Asparagus falcatus
  unsure (1)..(444): unsure at all Xaa locations
DLEPVNPADVPVTAAGALKSYKLAAKAISRLQSLPSGNISLLCDVLVREISDLTGYDRXMAYKFHDDEHGEVIAECRRSDLEPYIGLHYPATDIPQASRFLFMKSKVRMICDCSAHPVKIIQDKKLAQPLSLCGSTLRAPHGCHAQYMSNMGSVASLVMSVTINEDDDESGSDQKGRKLWGLVVCHHTNPRFVPLPLRYACEFLLQVFGIQLNKEVELAAQAREKHILRTQTVLCDMLLRDAPIGIFTQTPNVMDIVKCDGAALYYKNQIWVLGTTPAEPQIRDISAWLLECHDGSTGLSTDSLMEAGYPGALALGDAVCGMAAIKITDKDFIFWFRSHTAKEIKWGGAKHEPANRDDEGRKLQPRSSFKAFLEVVKWRSLPWEDIEMDSVHSLQLILRESLHNEIAVGESKTLVNSTLDDMKRIQGMDELRAVTNEMVRLIET

SEQ ID NO: 12768 - protein, 465 aa, Spathiphyllum clevelandii
SGKPFYAIMHRIDMGLIIDLEPVNPADVPVTAAGALKSYKLAAKAISRLQSLPSGNISLLCDVLVREVRELTGYGRVMAYKFHEDEHGEVVSECRRPDLEPYLGLHYPATDIPQASRFLFMKNKVRMICDCSAQPIKVIQDKRLAQPLSLCGSTLRAPHGCHAQYMANMGSIGSLVMSVTINEDEDDDSSGEQQQKGRKLWGLVVCHHTSPRFVPFPLRYACEFLMQVFAIQLNKEVELAAQTREKHILRTQTLLCDMLLRDTPVGIFTQSPNVMDLVKCDGAALYYQNQFWLLRVTPTEAQIRDIAAWLIDCHNSTTGLSTDSLSEAGYPSASTLGDAVCGMAAIKITSRDLIFWFRSHTAKEIKWGGAKHDPVDRDDDGRKMHPRSSFKAFLEVVKRRSLPWEDVEMDAIHSLQLILRSSLQDENVRDNSKGIVNVISDDAKKIQGVDELRTVANEMVRLMET

SEQ ID NO: 12769 - protein, 392 aa, Spathiphyllum clevelandii
PYEVPMTAAGALQSYKLAAKAISRLQSLPGGSMQKLTDTVVQEVFELTGYDRVMAYKFHEDDHGEVVSEITKPGLEPYLGLHYPATDIPQAARFLFMKNKVRMICDCHAKPVKVYQDEKLTFDLTFCGSTLRAPHSCHLLYMKNMNSIASLVMAVVVNEGDEEDEPLEHGQQLQQKRKRLWGLVVCHNTTPRFVPFLLRYACEFLMQVFAIHVNKEFELENQIREKNILRTQTLLCDMLLRDAPLGIISRSPNIKDLVKCDGAALLYQNKIWRLGSTPTESHIRDIASWLSEYHMDSTGLSTDSLYDAGYPGALTLGDAVCGMAAARITSKDILFWFRSHTAAEIRWGGAKHDPADEDDGRRMHPRSSFKAFLEVVKTRCLPWKDYEMEAIH

SEQ ID NO: 12770 - protein, 393 aa, Arundinella hirta
EPARTEDPALSIAGAVQSQKLAVRAISRLQALPGGDVKLLCDTVVEHVRELTGYDRVMVYRFHEDEHGEVVAENRRDNLEPYLGLHYPATDIPQASRFLFRQNRVRMIADCHATPVRVIQDPGLSQQLCLVGSTLRAPHGCHAQYMANMGSIASLVMAVIISSGGDDEQTGRGGISSAMKLWGLVVCHHTSPRCIPFPLRYACEFLMQAFGLQLNMELQLAHQLSEKHILRTQTLLCDMLLRDSPTGIVTQSPSIMDLVKCDGAALYYHGKYYPLGVTPTESQIKDIIEWLTVCHGDSTGLSTDSLADAGYLGAVALGDAVCGMTVAYITPSDYLFWFRSHTAKEIKWGGAKHHPEDKDDGQRMHPRSSFKAFLEVVKSRSLPWENAEMDAIH

SEQ ID NO: 12771 - protein, 393 aa, Capillipedium parviflorum
EPARTEDPALSIAGAVQSQKLAVRAISRLQALPGGDVKLLCDTVVEHVRELTGYDRVMVYRFHEGEHGEVVAESRRDNLEPYLGLHYPATDIPQASRFLFRQNRVRMIADCHATPVRVIQDPGLSQPLCLVGSTLRAPHGCHAQYMANMGSIASLVMAVIISSGGDDEQTGRGGISSAMKLWGLVVCHHTSPRCIPFPLRYACEFLMQAFGLQLNMELQLAHQLSEKHILRTQTLLCDMLLRDSPTGIVTQSPSIMDLVKCDGAALYYHGKYYPLGVTPTESQIKDIIEWLTVCHGDSTGLSTDSLADAGYLGAAALGDAVCGMAVAYITPSDYLFWFRSHTAKEIKWGGAKHHPEDKDDGQRMHPRSSFKAFLEVVKSRSLPWENAEMDAIH

SEQ ID NO: 12772 - protein, 376 aa, Chrysopogon fulvus
ALSMAGAVQSQKLAVRAISRLQALPGGDVKLLCDTVVEHVRELTGYDRVMVYRFHEDEHGEVVAESRRDNLEPYLGLHYPSTDIPQASRFLFRQNRVRMIADCHATPVRVIQDPGLSQPLCLVGSTLRAPHGCHAQYMANMGSIASLVMAVIISSGGDDEQTGRGGISSAMKLWGLVVCHHTSPRCIPFPLRYACEFLMQAFGLQLNMELQLAHQLSEKHILRTQTLLCDMLLRDSPTGIVTQSPSIMDLVKCDGAALYYHGKYYPLGVTPTESQIKDIIEWLTVCHGDSTGLSTDSLADAGYLGAAALGDAVCGMAVAYITPSDYLFWFRSHTAKEIKWGGAKHHPEDKDDGQRMHPRSSFKAFLEVVKSRSLPW

SEQ ID NO: 12773 - protein, 376 aa, Chrysopogon gryllus
  unsure (1)..(376): unsure at all Xaa locations
ALSIAGAVQSQKLAVRSISRLQALPGGDVKLLCDTVVEHVRELTGYDRVMVYRFHEDEHGEVVAESRRDNLEPYLGLHYPATDIPQASRFLFRQNRVRMIADCHATPVRVIQDPGLSQPLCLVGSTLRAPHGCHAQYMANMGSIASLVMAVVISSGGDDEQTGRGGISSAMKLWGLVVCHHTSPRCIPFPLRYACEFLTQAFGLHLNMELQLAHQLSEKHILRTQTLVCDMLLRDSPSGXVTQSPSIMDLVKCDGAALYYHGKYYPLGVTPTESQIKDIIEWLTVCHGDSTGLSTDSLADAGYLGAAALGDAVCGMAVAYITPSDYLFWFRSHTAKEIKWGGAKHHPEDKDDGQRMHPRSSFKAFLEVVKSRSLPW

SEQ ID NO: 12774 - protein, 376 aa, Coix aquatica
ALSIAGAVQSQKLAVRAISRLQALPGGDVKLLCDTVVEHVRELTGYDRVMVYRFHEDEHGEVVAESRRDNLEPYLGLHYPATDIPQASRFLFRQNRVRMIADCHATPVRVIQDPGLSQPLCLVGSTLRSPHGCHAQYMANMGSIASLVMAVIISSGGDDEQTSRGGISSAMKLWGLVVCHHTSPRCIPFPLRYACEFLMQAFGLQLNMELQLAHQLSEKHILRTQTLLCDMLLRDSPTGIVTQSPSIMDLVKCDGAALYYHGKYYPLGVTPTESQIKDIIEWLTVCHGDSTGLSTDSLADAGYLGAAALGDAVCGMAVAYITPNDYLFWFRSHTAKEIKWGGAKHHPEDKDDGQRMHPRSSFKAFLEVVKSRSLPW

SEQ ID NO: 12775 - protein, 376 aa, Cymbopogon flexuosus
ALSIAGAVQSQKLAVRAISRLQALPGGDVKLLCDTVVEHVRELTGYDRVMVYRFHEDEHGEVVAESRRDNLEPYLGSHYPATDIPQASRFLFRQNRVRMIADCHATPVRVIQDPGLSQPLCLVGSTLRAPHGCHAQYMANMGSIASLVMAVIISSGGDDEQTGRGGISSAMKLWGLVVCHHTSPRCIPFPLRYACEFLMQAFGLQLNMELQLAHQLSEKHILRTQTLLCDMLLRDSPTGIVTQSPSIMDLVKCDGAALYYHGKYYPLGVTPTESQIKDIIEWLTVCHGDSTGLSTDSLADAGYLGAAALGDAVCGMAVAYITPSDYLFWFRSHTAKEIKWGGAKHHPEDKDDGRRMHPRSSFKAFLEVVKSRSLPW

SEQ ID NO: 12776 - protein, 393 aa, Danthoniopsis dinteri
EPASTEDPALSIAGAVQSQKLAVRAISRLQALPGGDVKLLCDTVVEHVRELTGYDRVMVYRFHEDEHGEVVAESRRDDLEPYIGLHYPATDIPQASRFLFRQNRVRMIADCHATPVKVIQDTGLSQPLCLVGSTLRAPHGCHAQYMANMGSIASLVMAVIISSGGDDEQTARGGISSAMKLLGLVVCHHTSPRFIPFPLRYACEFLMQAFGLQLNMELQLAHQLSEKHILRTQTLLCDMLLRDSPTGIVTQSPSIMDLVKCDGAALYYHGKYYPLGVTPTESQIKDIIEWLTLCHGDSTGLSTDSLADAGYLGAAALGDAVCGMAVAYITPSDYLFWFRSHTAKEIKWGGAKHHPEDKDDGQRMHPRSSFKAFLEVVKSRSLPWENAEMDAIH

SEQ ID NO: 12777 - protein, 333 aa, Dichanthium aristatum
TGYDRVMVYRFHEDEHGEVVAESRRDNLEPYLGLHYPATDIPQASRFLFRQNRVRMIADCHATPVRVIQDPGLSQPLCSVGSTLRAPHGCHAQYMANMGSIASLVMAVIISSGGDDEQTGRGGISSSMKLWGLVVCHHTSPRCIPFPLRYACEFLMQAFGLQLNMELQLAHQLSEKHILRTQTLLCDMLLRDSPTGIVTQSPSIMDLVKCDGAALYYHGKYYPLGVTPTESQIKDIIEWLTVCHGDSTGLSTDSLADAGYLGAAALGDAVCGMAVAYITPSDYLFWFRSHTAKEIKWGGAKHHPEDKDDGQRMHPRSSFKAFLEVVKSRSLPW

SEQ ID NO: 12778 - protein, 394 aa, Eremitis sp. nov. Doell
EPARTEDPALSIAGSVQSQKLAVRAISRLQALPGGDVKLLCDTVVENIRELTGYDRVMGYRFHDDEHGEVVAESRRADLEPYLGLHYPATDIPQASRFLFRQNRVRMIADCHTAPVRVIQDPVLPQPLCLVGSTLRAPHGCHAQYMANMGSIASLVMAVIISSGGDDSHNSSRGGIPSAMKLWGLVVCHHTSPRCIPFPLRYACEFLMQAFGLQLNMELQLAHQLSEKHILRTQTLLCDMLLRDSPTGIVTQSPSIMDLVKCDGAALYYHGKYYPLGVTPTEAQIKDIIEWLTLCHGDSTGLSTDSLADAGYPGAAALGDAVCGMAVAYITPSDYLFWFRSHTAKEIKWGGAKHHPEDKDDGQRMHPRSSFKAFLEVVKSRSLPWESAEMDAIH

SEQ ID NO: 12779 - protein, 394 aa, Glyceria grandis
EPARTEDPALSIAGAVQSQKLAVRAISRLQALPGGDVKLLCETVVEHVRELTGYDRVMVYKFHDDEHGEVLAESRRPDLEPYLGLHYPATDIPQASRFLFRQNRVRMIADCHAAPVRVIQDPAMPQPLCLVGSTLRSPHGCHAQYMANMGSIASLVMAVIISSGGDDEHHMARGNIPSAMKLWGLVVCHHTSPRCIPFPLRYACEFLMQAFGLQLNMELQLAHQLSEKHILRTQTLLCDMLLRDSPTGIVTQSPSIMDLVKCDGAALYYHGKYYPLGVTPTEAQIKDIIEWLTACHGDSTGLSTDSLADAGYSGATVLGDAVCGMAVACITPSDYLFWFRSHTAKEIKWGGAKHHPEDKDDGQRMHPRSSFKAFLEVVKSRSLPWENAEMDAIH

SEQ ID NO: 12780 - protein, 376 aa, Heteropogon contortus
ALSIAGAVQSQKLAVRAISRLQALPGGDVKLLCDTVVEHVRELTGYDRVMVYRFHEDEHGEVVAESRRDNLEPYLGLHYPATDIPQASRFLFRQNRVRMIADCHATPVRVIQDPGLSQPLCLVGSTLRAPHGCHAQYMANMGSIASLVMAVIISSGGEGEQTARGGISSAMKLWGLVVCHHTSPRCIPFPLRYACEFLMQAFGLQLNMELQLAHQLSEKHILRTQTLLCDMLLRDSPTGIVTQSPSIMDLVKCDGAALYYHGKYYPLGVTPTEAQIKDIIEWLTVCHGDSTGLSTDSLADAGYLGAVALGDAVCGMAVAYITPSDYLFWFRSHTAKEIKWGGAKHHPEDKDDGQRMHPRSSFKAFLEVVKSRSLPW

SEQ ID NO: 12781 - protein, 394 aa, Melica cupanii
EPARTEDPALSIAGAVQSQKLAVRAISRLQALPGGDVKLLCDTVVEHVRELTGYDRVMVYKFHDDEHGEVLAESRRADLEPYLGLHYPATDIPQASRFLFRQNRVRMIADCGAAPVTVIQDPAMPQPLCLVGSTLRSPHGCHAQYMANMGSIASLVMAVIISSGGDDDHNMVRGSIPSAMKLWGLVVCHHTSPRCIPFPLRYACEFLMQAFGLELNMELQLAHQMSEKHILRTQTLLCDMLLRDSPTGIVTQSPSIMDLVKCDGAALFYHGKYYPLGVTPTEAQIKDIIEWLTVCHGDSTGLSTDSLADAGYSGATALGDAVCGMAVAYITPSDYLFWFRSHTAKEIKWGGAKHHPEDKDDGQRMHPRPSFKAFLEVVKSRSIPWENAEMDAIH

SEQ ID NO: 12782 - protein, 353 aa, Pennisetum alopecuroides
TGYDRVMVYRFHEDQHGEVVAECRRDNLEPYLGLHYPATDIPQASRFLFRQNRVRMIADCHATPVRVIQYPGLSQPLCLVGSTLRAPHECHAQYMANMGSIASLVMAVIISSGGDDEQTTRGGISSAMKLWGLVVCHHTSPRFIPFPLRYACEFLMQAFGLQLNMELQLAHQLSEKHILRTQTLLCDMLLRDSPTGIVTQSPSIMDLVKCDGAALYYHGKYYPLGVTPTESQIKDIIEWLTVCHGDSTGLSTDSLADAGYHGAAALGDAVCGMAVAYITPSDCLFWFRSHTAKEIKWGGAKHHPEDKDDGQRMHPRSSFKAFLEVVKSRSLPWENAEMDAIHSLQLILRDSFR

SEQ ID NO: 12783 - protein, 332 aa, Schizachyrium scoparium
GYDRVMVYRFHEDEHGEVVAESKRDNLDPYLGLHYPATDIPQASRFLFRQNRVRMIADCHATPVRVIQDPGLSQPLCLVGSTLRAPHGCHAQYMANMGSIASLVMAVIISSGGDDEQTGRGGISSAMKLWGLVVCHHTSPRCIPFPLRYACEFLMQAFGLQLNMELQLAHQLSEKHILRTQTLLCDMLLRDSPTGIVTQSPSIMDLVKCDGAALYYHGKYYPLGITPTESQIKDIIEWLTVCHGDSTGLSTDSLADAGYLGAAALGDAVCGMAVAYITPSDYLFWFRSHTAKEIKWGGAKHHPEDKDDGQRMHPRSSFKAFLEVVKSRSLPW

SEQ ID NO: 12784 - protein, 194 aa, Azolla filiculoides
DEHGEVLAEIRRSDLEPYLGLHYPATDIPQASRFLFMKNRVRLIYDCRAQPVRIIQDKELRQPLSLAGSTLRAPHSCHGQYMANMGTIASLVMAVVVNDNDEETGNRTQRLNPSPKMRRLWGLVVCHHTTPRVVPFALRSACEFLMQVFGLQLNMELELAAQMREKHILRTQTLLCDMLLRDAPIGIVSESPSI

SEQ ID NO: 12785 - protein, 195 aa, Azolla filiculoides
DEHGEVVAEIRKPDMAPYLGLHYPATDIPQASRFLFMKNRLRMVCDSRAVAVRVIQDTQLRQPLSLAGSTLRAPHGCHSQYMENMGSIASLVMAVIVNDKGECGSSNGSNPQPRPRMRKLWGLVVCHHTTMRAVPFPLRSACELLVQVFGLQLNMEAELAAQMRDKHILRTQMLLCDMLLRDAPIGIVSKSDPNI

SEQ ID NO: 12786 - protein, 374 aa, Celastrus orbiculatus
ALSIAGAVQSQKLAVRAISRLQSLPGGDIKLLCDTVVESVRDLTSYDRVMVYKFHEDEHGEVVAESKRPDLEPYFGLHYPSTDIPQASRFLFKQNRVRMIADCRASPVGVIQDDGLMQPLCLVGSTLRAPHGCHAQYMENMGSRSSLAMAVIIHGNDEEVIGGRNATRLWGLVVCHHTSVRCIPFLLRYACEFLMQAFGLQLNMELQLAAQLSEKHVLKTQTLLCDMFLRDSPTGIVTQSLSIMDLVKCDGAALYYQGKYYPIGVTPAEAQIKDIVEWLLTFHGDSTGLSTDSLADAGYPGAALLGDAVCGMAVAYITKRDFLFWFRSHTTKEIKWGGAKHHPEDKDDGQRMHPRSSFKAFLEVVKSRSLPWEN

SEQ ID NO: 12787 - protein, 392 aa, Dicella nucifera
DLEPVNPADVPVTAAGALKSYNLASKAISRLQSLPSGNISLLCDVLVKEVRDLTGYDRVMVYKFHEDEHGDVVSECRRSDLESYLGLHYPATDIPQASRFLFMKNKVRMICDCLAPPVKVIQDERLPQPLSLCGSTLRSPHGCHAQYMTNMGTIASLVMSVTINEEDETMDGDQQQMTRKLWGLVVCHHTSPRFVPFPLRYACEFLIQVFGVQINKEVELAAQVRENHILQIQTMLCDMLLRDAPVAIITQSPNVMDLVKCDGAALYFKNKTWLLGVTPTEKQIRDIAEWLLEYHSGNTGLSTDSLMEAGYPGASVLGDAVCGMAAVSITSRDFLFWFRSHTAKEIKWGGAKHDPDDKDDGRKMHPRSSFKAFLEVVKWRSIPWEDIEMDAI

SEQ ID NO: 12788 - protein, 374 aa, Plagiopteron suaveolens
ALSIAGAVQSQKLAVRAISQLQSLPGGDIKLLCDTVVQSVRDLTGYDRVMVYKFHEDEHGEVIAESKRPDLEPYIGLHYPATDIPQASRFLFKQNRVRIIVDCHASPVSVIQDDGLMQPLCLVGSTLRAPHGCHAQYMDNMGSIASLAMAVIINGNDEDGTGGRNPTRLWGLVVCHHTSARCIPFPLRYACEFLMQAFGLQLNMELQLAAQLLEKHVLKTQTLLCDMLLRESPTGIVTQSPSIMDLVKCDGAALYYQANYYPLGVTPTEAQIKDIVEWLLAFHGDSTGLSTDSLADAGYPGATLLGDAVCGMTVAYITNRDFLFWFRSHTAKEIKWGGAKHHPEDKDDGQRMHPRSSFKAFLEVVKSRSLPWEN

SEQ ID NO: 12789 - protein, 374 aa, Plagiopteron suaveolens
ALSIAGAVQSQKLAVRAISQLQSLPGGDIKLLCDTVVQSVRDLTGYDRVMVYKFHEDEHGEVIAESKRPDLEPYIGLHYPATDIPQASRFLFKQNRVRIIVDCHASPVSVIQDDGLMQPLCLVGSTLRAPHGCHAQYMDNMGSIASLAMAVIINGNDEDGTGGRNPTRLWGLVGWHHPSARCIPFPLRYACEFLMQAFGLQLNMELQLAAQLLEKHVLKTQTLLCDMLLRESPTGIVTQSPSIMDLVKCDGAALYYQANYYPLGVTPTEAQIKDIVEWLLAFHGDSTGLSTDSLADAGYPGATLLGDAVCGMAVAYITNRDFLFWFRSHTAKEIKWGGAKHHPEDKDDGQRMHPRSSFKAFLEEVKSRSLPWEN

SEQ ID NO: 12790 - protein, 554 aa, Pleea tenuifolia
  unsure (1)..(554): unsure at all Xaa locations
DLEPVNPADVPVTAAGALKSYKLAAKAISKLQSLPTGNISLLCDVLVREVSDLTGYDRVVAYKFHEDEHGEVIAECRRSELEPYLGLHYPATDIPRASRFLFMKNKVRMICDCSAAPVKVIQDKRLAQPLSLCGSILRAPHGCHAQYMASMGSVASLVMSVTIIEDDNETGSDQQEKGRKLWGVVVCHHTSPRFIPFPLRYACEFLIQVFCMQLTKEVELADQMREKHILQTQTVLCDMLLRDAPVGIFTQSPNVMDLVKCDGAALYYRNQFWLLGISPREAQIRDIAGWLLEYHDGTTGLSTDSLLDAGYPGASALGDEVCGMAAIRITDKDFLFWFRSHTAKEXTWGGAKHDLVEKDSDGRKMHPRSSFKAFLEVVEGRSLPWEDVEMDAIHSLQLILRDSLQGERASIDSKAIVNAPLDDAKKIQGMDELSLVTNEMIRLIETAAVPILAVDVLGNVNGWNIKAAELTGLVVQQAIGMPLIDLVEGDSIDVAKNMLFLALQGKEERDVEIKLKTFGHQEKNGPKILVVNACCSRDMKEDIVGVCFVAQDVT

SEQ ID NO: 12791 - protein, 467 aa, Tacca chantieri
SGKPFYAIIHRVTACLIVDFEPVKPSELPMTAAGALQSYKLAAKAIARLQSLPGGSMERLCDTVIEEVFELTGYDRVMVYKFHEDDHGEVFREITKPGLEPYQGLHYPATDIPQAARFLFMKNKVRMICDCRAKPVKIYQDDKLPLDLTFCGSTLRAPHSCHLQYMENMNSIASLVMAEVVNEGEEDDENLEPGQTQQQKKKRLWGLVVCHHESPRFVPFPLRYACEFLMQVFAIHVNKEFELENQIREKNILRTQTLLCDMLLRDTTPVGIMNQSPNIMDLVKCDGAALLYQNKVWRLGLTPTEAQIRDIAYWLAEYHMDSTGLSTDSLHDAGYPGALGLADVVCGMAAARITSKDMLFWFRSHIAAEIRWGGAKHDPADKDDGRRMHPRTSFKAFLEAVKMRSLPWKDYEMDAIHSLQLILRGTFSDSRNVNSRASLDARVNDLKLEGMVELQAVTNEMVRLMET

SEQ ID NO: 12792 - protein, 245 aa, Afrostyrax sp. Cheek 5007
ALSIAGAVQSQKLAVRAISQLRSLPGGDIKLLCDTVVESVRELTGYDRVMVYKFHEDEHGEVVAESKRSDLEPYLGLHYPATDIPQASRFLFKQNRVRMIVDCNAMPVPVSQDEGLMQPLCLVGSTLRAPHDCHAQYMANMGSIASLAMAVIINGNDDEAIGGRNSMRLWGLVVCHHTSARCIPFPLRYACEFLMQAFGLQLNMELQLASQLLEKHVLRTQTLLCDMLLRDSPTGIVTQNPSTMD

SEQ ID NO: 12793 - protein, 245 aa, Afrostyrax sp. Cheek 5007
ALSIAGAVQSQKLAVRAISQLQSLPGGDIKLLCDTVVESVREHTGYDRVMVYKFHEDEHGEVVAESKRSDLEPYLGLHYPATDIPQASRFLFKQNRVRMIVDCNAMPVPVSQDEGLMQPLCLVGSTLRAPHDCHAQYMANMGSIASLAMAVIINGNDDEAIGGRNSMRLWGLVVCHHTSARCIPFPLRYACEFLMQAFGLQLNMESQLATQLVEKHVLRTQTLLCDMLLRDSPTGIVTQNPSTMD

SEQ ID NO: 12794 - protein, 918 aa, Salmonella enterica subsp. enterica serovar Typhi
MTNYSLRARMMILILAPTVLIGLLLSIFFVVHRYNDLQRQLEDAGASIIEPLAVSSEYGMNLQNRESIGQLISVLHRRHSDIVRAISVYDDHNRLFVTSNFHLDPSQMQLPAGAPFPRRLSVDRHGDIMILRTPIISESYSPDESAIADAKNTKNMLGYVALELDLKSVRLQQYKEIFISSVMMLFCIGIALIFGWRLMRDVTGPIRNMVNTVDRIRRGQLDSRVEGFMLGELDMLKNGINSMAMSLAAYHEEMQHNIDQATSDLRETLEQMEIQNVELDLAKKRAQEAARIKSEFLANMSHELRTPLNGVIGFTRLTLKTELNPTQRDHLNTIERSANNLLAIINDVLDFSKLEAGKLILESIPFPLRNTLDEVVTLLAHSSHDKGLELTLNIKNDVPENVIGDPLRLQQVITNLVGNAIKFTESGNIDILVEKRALSNTKVQIEVQIRDTGIGIPERDQSRLFQAFRQADASISRRHGGTGLGLVITQKLVNEMGGDISFHSQPNRGSTFWFHINLDLNPNVIIDGPSTACLAGKRLAYIEPNATAAQCTLDLLSDTPVEVIYSPTFSALPLAHYDIMILSVPVTFREPLTMQHERLAKAASMTDFLLLALPCHAQINAEKLKQGGAAACLLKPLTSTRLLPALTEYCQLNHHPEPLLMDTSKITMTVMAVDDNPANLKLIGALLEDKVQHVELCDSGHQAVDRAKQMQFDLILMDIQMPDMDGIRACELIHQLPHQQQTPVIAVTAHAMAGQKEKLLSAGMNDYLAKPIEEEKLHNLLLRYKPGANVAARLMAPEPAEFIFNPNATLDWQLALRQAAGKPDLARDMLQMLIDFLPEVRNKIEEQLVGENPNGLVDLVHKLHGSCGYSGVPRMKNLCQLIEQQLRSGVHEEELEPEFLELLDEMDNVAREAKKILG

SEQ ID NO: 12795 - protein, 376 aa, Apluda mutica
ALSIAGAVQSQKLAVRAISRLQALPGGDVKLLCDTVVEHVRELTGYDRVMVYRFHEDEHGEVVAESRRDNLEPYLGLHYPATDIPQASRFLFRQNRVRMIADCHATPVRVIQDPGLSQPLCLVGSTLRAPHGCHAQYMANMGSIASLVMAVIISSGGDDEQTGRGGISSAMKLWGLVVCHHTSPRCIPFPLRYACEFLMQAFGLQLNMELQLAHQLSEKHILRTQTLLCDMLLRDSPTGIVTQSPSIMDLVKCDGAALYYHGKYYPLGVTPTESQIKDIIEWLTVCLGDSTGLSTDSLADAGYLGAAALGDAVCGMAVAYITPSDYLFWFRSHTAKEIKWGGAKHHPEDKDDGQRMHPRSSFQAFFEVVKSRSLPW

SEQ ID NO: 12796 - protein, 376 aa, Chionachne koenigii
ALSIAGAVQSQKLAVRAISRLQALPGGDVKLLCDTVVEHVRELTGYDRVMVYRFHEDEHGEVVAESRRDNLEPYLGLHYPATDIPQASRFLFRQNRVRMIADCHATPVRVVQDPGLSQPLCLVGSTLRSPHGCHAHYMANMGSIASLVMAVIISSGGDDEHTGRGGISSAMKLWGLVVCHHTSPRCIPFPLRYACEFLMQAFGLQLNMELQLAHQLSEKHILRTQTLLCDMLLRDSPTGIVTQSPSIMDLVKCDGAALYYHGKYYPLGVTPTESQIKDIIEWLTVCHGDSTGLSTDSLADAGYLGAATLGDAVCGMAVAYITPSDYLFWFRSHTAKEIKWGGAKHHPEDKDDVQRMHPRSSFKAFLEVVKSRSLPW

SEQ ID NO: 12797 - protein, 376 aa, Coelorachis selloana
ALSIAGAVQSQKLAVRAISRLQALPGGDVKLLCDTVVEHVRELTGYDRVMVYRFHEDEHGEVVAESRRDNLEPYLGLHYPATDIPQASRFLFRQNRVRMIADCHATPVRVIQDPGLSQPLCLVGSTLRAPHGCHAQYMANMGSIASLVMAVIISSGGDDEQTGRGGISSSMKLWGLVVCHHTSPRCIPFPLRYACEFLMQAFGLQLNMELQLAHQLSEKHILRTQTLLCDMLLRDSPTGIVTQSPSIMDLVKCDGAALYYHGKYYPLGVTPTESQIKDIIEWLTVCHGDSTGLSTDSLADAGYLGAAALGDAVCGMAVAYITPSDYLFWFRSHTAKEIKWGGAKHHPEDKDDGQRMHPRSSFKAFLEVVKSRSLPW

SEQ ID NO: 12798 - protein, 376 aa, Elionurus muticus
ALSIAGAVQSQKLAVRAISRLQALPGGDVKLLCDTVVEHVRELTGYDRVMVYRFHEDEHGEVVAESRRDNLEPYLGLHYPATDIPQAPRFLFRQNRVRMIADCHATSVRVIQDPGLSQPLCLVGSTLRAPHGCHAQYMANMGSIASLVMAVIISSGGDDEQTGRGGISSSMKLWGLVVCHHTSPRCIPFPLRYACEFLMQAFGLQLNMELQLAHQLSEKHILRTQTLLCDMLLRDSPTGIVTQSPSIMDLVKCDGAALYYHGKYYPLGITPTESQIKDIIEWLTVCHGDSTGLSTDSLADAGYLGAAALGDAVCGMAVAYITPSDYLFWFRSHTAKEIKWGGAKHHPEDKDDGQRMHPRSSFKAFLEVVKSRTLPW

SEQ ID NO: 12799 - protein, 376 aa, Ischaemum afrum
  unsure (1)..(376): unsure at all Xaa locations
ALSIAGAVQSQKLAVRAISRLQALPGGDVKLLCDTVVEHVRELTGYDRVMVYRFHEDEHGEVVAESRRDSLEPYLGLHYPATDIPQASRFLFRQNRVRMIADCHATPVRVVQDPGLSQPLCLVGSTLRAPHGCHAQYMANMGSIASLVMAVIISSGGDDEQTGRGGISSAMKLWGLVVCHHTSPRCIPFPLRYACEFLMQAFGLQLNMELQLAHQLSEKHILRTQTLLCDMLLRDSPTGIVTQSPSIMDLVKCDGAALYYXGKYYPLGVTPTESQIKDIIEWLTVCHGDSTGLSTDSLADAGYLGAAALGDAVCGMAVAYITPSDYLFWFRSHTAKEIKWGGAKHHPEDKDDGQRMHPRSSFKAFLEVVKSRSLPW

SEQ ID NO: 12800 - protein, 323 aa, Microstegium nudum
ALSIAGAVQSQKLAVRAISRLQALPGGDVKLLCDTVVEHVRELTGYDRVMVYRFHEDEHGEVVAESRRDNLEPYLGLHYPATDIPQASRFLFRQNRVRMIADCHATPVRVIQDPGLSQPLCLVGSTLRAPHGCHAQYMANMGSIASLVMAVIISSGGDDEQTGRGGISSAMKLWGLVVCHHTSPRCIPFPLRYACEFLMQAFGLQLNMELQLAHQLSEKHILRTQTLLCDMLLRDSPTGIVTQSPSIMDLVKCDGAALYYHGKYYPLGVTPTESQIKDIIEWLTVCHGDSTGLSTDSLADAGYLGAAALGDAVCGMAVAYITP

SEQ ID NO: 12801 - protein, 333 aa, Phacelurus digitatus
TGYDRVMVYRFHEDEHGEVVAESRRDNLEPYLGLHYPATDIPQASRFLFRQNRVRMIADCHATPVRVIQDPGLSQPLCLVGSTLRAPHGCHAQYMANMGSIASLVMAVIISSGGDDEQTGRGGISSAMKLWGLVVCHHTSPRCIPFPLRYACEFLMQAFGLQLNMELQLAHQLSEKHILRTQTLLCDMLLRDSPTGIVTQSPSIMDLVKCDGAALYYHGKYYPLGVTPTESQIKDIIEWLTVCHGDSTGLSTDSLADAGYLGAAALGDAVCGMAVAYITPSGYLFWFRSHTAKEIKWGGAKHHPEDKDDGQRMHPRSSFKAFLEVVKSRSLPW

SEQ ID NO: 12802 - protein, 464 aa, Sarcandra glabra
SGKPFYAIIHRVTASLIIDFEPVKPYEVPMTAAGALQSYKLAAKAIARLQSLPGGSMEKLCDTVVQEVFDLTGYDRVMAYKFHEDDHGEVISAITKPGLEPYLGLHYPATDIPQAARFLFMKNKVRMICDCDAKPVKVFQDEKLVFDLTLCGSTLRAPHSCHLQYMANMNSIASLVMAVVVNEGEEDDSLEPGQQQQRKRKRLWGLIVCHNTTPRFVPFPLRYACEFLMQVFAIHVNKELELESQIQEKNIFRTQTLLCDMLMRDTPLGIVSQNPNVMDLVKCDGAALLYKKKIWRLGLTPSETQIHDISFWLSEYHMDSTGFSTDSLNDAGYPGALAIGDAVCGMAAVWITSKDMLFWFRSHTAAEVRWGGAKHDPDDKDDNRGMHPRSSFKAFLEVVKTRSLPWKDNEMDAIHSLQLILRGTFKDVENSHTKTMIYSQLNDLKLEGMEELQAVTNEMVRLIE

SEQ ID NO: 12803 - protein, 465 aa, Sarcandra glabra
SGKPFYAIMHRIDVGPVIDLEPVNPADVPVTAAGALKSYKLAAKAISRLQSLPSGNISLLCDVLVREVSELMGYDRVMAYKFHEDEHGEVIAECRRSDLEPYLGLHYPATDIPQASRFLFMKNKVRMICDCSAAPVKVIQDKRLGQPMSLCGSALRAPHGCHAQYMANMGSIASLVMSVTINEDDDETESDPQQQQEKPRKLWGLVVCHHTGPRFVPFPLRYACEFLIQVFGIQLNKEVELAAQLREKHMLKTQTVLCDMLLRDAPMRIVTQSPNVMDLVKCDGAALYYRNQFWLLGTTPTEAQIRDIAEWLLDYHDGSTGLSTDSLMEAGYPGASVLGDAVCGMAAVKITSKDFLFWFRSHSAKEIKWGGAKHDPINKDDDGRKMHPRSSFKAFLEVMKQRSLRWEDVEMDAIHSLQLILRGSLQEESENDSKAIVNASLDVAKIQGMDELRFVTNEMVRLIET

SEQ ID NO: 12804 - protein, 394 aa, Buergersiochloa bambusoides
EPARTEDPALSIAGAVQSQKLAVRAISRLQALPGGDVKLLCDTVVEHVRELTGYDRVMVYRFHDDEHGEVVAESRRADLEPYLGLHYPATDIPQASRFLFRQNRVRMIADCHAAPVRVIQDSALPQPLCLVGSTLRGPHGCHAQYMANMGSIASLVMAVIISSGGDDEHNSAQGGIPSAMKLWGLVVCHHTSPRCIPFPLRYACEFLMQAFGLQLNMELQLAHQLSEKHILRTQTLLCDMLLRDSPTGIVTQSPSIMDLVKCDGAALYYHGKYYLLDVTPTEAQIKDIIEWLTLCHGDSTGLSTDSLADAGYPGAAALGDAVCGMAVAYITPSDYLFWFRSHTAKEIKWGGAKHHPEDKDDGQRMHPRSSFKAFLEVVKSRSLPWENAEMDAIH

SEQ ID NO: 12805 - protein, 394 aa, Ammophila arenaria
EPASTEDPAVSIAGAVQSQKLAVRAISRLQALPGGDVNLLCDTVVEHVRELTGYDRVMVYKFHDDEHGEVLAESRRADLEPYLGLHYPATDIPQASRFLFRQNRVRMIADCHAAPVRVIQDPAMPQPLCLVGSTLRSPHGCHAQYMANMGSIASLVMAVIISSGGEDEHSMGRGAVPSAMKLWGLVVCHHTSPRCIPFPLRYACEFLMQAFGLQLNMELQLAHQLSEKHILRTQTLLCDMLLRDSPTGIVTQSPSIMDLVKCDGAALYYHGKYYPLGITPTEAQIKDIIEWLTVCHGETTGLSTDSLADAGYPGATALGDAVCGVAVAYITPSDYLFWFRSHTAKEIKWGGAKHHPEDKDDGQRMHPRSSFKAFLEVVKSRSLPWENAEMDAIH

SEQ ID NO: 12806 - protein, 394 aa, Elymus sp. Kellogg s.n.
EPARTEDPALSIAGAVQSQKLAVRAISRLQALPGGDVKLLCDTVVEHVRELTGYDRVMVYKFHDDEHGEVLSESRRGDLEPYLGLHYPATDIPQASRFLFLQNRVRMIADCHAAAVRVIQDPAMPQPLCLVGSTLRSPHGCHAQYMANMGSIASLVMAVIISSGGEDEHNMTRGVIPSAMKLWGLVVCHHTSPRCIPFPLRYACEFLMQAFGLQLNMELQLAHQLSEKHILRTQTLLCDMLLRDSPTGIVTQTPSIMDLVKCDGAALFYHGKYYPLGVTPTESQIKDIIEWLTVCHGDSTGLSTDSLADAGYPGATALGDAVCGMAVAYITPSDYLFWFRSHTAKEIKWGGAKHHPEDKDDGQRMHPRSSFKAFLEVVKSRSLPWENAEMDAIT

SEQ ID NO: 12807 - protein, 394 aa, Ehrharta erecta
EPARTEDPALSIAGAVQSQKLAVRAISRLQALPGGDVKLLCDTVVEHVRELTGYDRVMVYRFHEDEHGEVVAESRRNDLEPYLGLHYPATDIPQASRFLFRQNRVRMIADCHAAPVRVIQDPGLPQQLCLVGSTLRSPHGCHAQYMANMGSIASLVMAVIISSAGDDENNMARGGIPSAMKLWGLVVCHHTSPRCIPFPLRYACEFLMQAFGLQLNMELQLAHQLSEKHILRTQTLLCDMLLRDSPTGIVTQSPSIMDLVKCDGAALYYHGKYYPLGVTPTESQIKDIIEWLTVCHGDSTGLSTDSLADAGYPGSAALGDAVSGMAVAYITPSDYLFWFRSHTAKEIKWGGAKHHPEDKDDGQRMHPRSSFKAFLEVVKSRSLPWENAEMDAIH

SEQ ID NO: 12808 - protein, 394 aa, Phalaris arundinacea
EPASTEDPALSIAGAVHSQKLAVRAISRLQALPGGDVKLLCGTVVEHVRELTSYDRVMVYKFHDDEHGEVLAESRRADLEPYLGLHYPATDIPQASRFLFRQNRVRMIADCHAAPVRVIQDPAMPQPLCLVGSTLRSPHGCHAQYMANMGSIASLVMAVIISSGGEDEHSMGRGAVPSAMKLWGLVVCHHTSPRCIPFPLRYACEFLMQAFGLQLNMELQLAHQLSEKHILRTQTLLCDMLLRDSPTGIVTQSPSIMDLVKCDGAALYYHGKCYPLGITPTEAQIKDIIEWLTVCHGETTGLSTDSLADAGYPGATALGDAVCGMTVAYITPSDYLFWFRSHTAKEIKWGGAKHHPEDRDDGQRMHPRSSFKAFLEVVKSRSLPWENAEMDAIH

SEQ ID NO: 12809 - protein, 397 aa, Puelia ciliata
TGYDRVMVYRFHDDEHGEVVAESRHADLEPYLGLHYPATDIPQASRFLFRQNRVRMIADCHAAPVRVIQDPALPQPLCLVGSTLRAPHGCHAQYMANMGSIASLVMAVIITSGGDDEHNMARGGISSAMKLWGLVVCHHTSPRCIPFPLRYACEFLMQAFGLQLNMELQLAHQLSEKHILRTQTLLCDMLLRDSPTGIVTQSPSIMDLVKCDGAALYYHGKYYPLGVTPTEAQIKDIIEWLTLCHGDSTGLSTDSLADAGYHGAAALGDAVCGMAVAYITPSDYLFWFRSHTAREIKWGGAKHRPEDKDDGQRMHPRSSFKAFLEVVKSRSLPWEHAEMDAIHSLQLILRDSFRDAAEGTSNSKAIVNGQVQLGELELRGIDELSSVAREMVRLIET

SEQ ID NO: 12810 - protein, 393 aa, Sesleria insularis
EPARTEDPALSIAGAVQSQKLAVRAISRLQALPGGDVKLLCDTVVEHVRELTGYDRVMVYKFHDDEHGEVLAESRRADLEPYLGLHYPATDIPQASRFLFRQNRVRMIADCHAAPVRVIQDPAMPQPLCLVGSTLRSPHGCHAQYMANMGSIASLVMAVIISSGGEDNMSRGGAVPSAMKLWGLVVCHHTSPRCIPFPLRYACEFLMQAFGLQLNMELQLAHQLSEKHILRTQTLLCDMLLRDSPTGIVTQSPSIMDLVKCDGAALYYHGKYYPLGITPTGAQIKDIIEWLKVCHGDSTGLSTDSLADAGYPGATALGDAVCGMAVAYITPSDYLFWFRSHTAKEIKWGGAKHHPEDKDDGQRMHPRSSFKAFLEVVKSRSLPWENAEMDAIH

SEQ ID NO: 12811 - protein, 393 aa, Sporobolus giganteus
EPARTEDPALSVAGAVQSQKLAVRAISRLQALPGGDVKLLCDTVVEHVRELTGYDRVMVYRFHEDEHGEVVAESRRDDLEPYLGLHYPATDIPQASRFLFRQNRVRMIADCHATPVRVIQDPGLSQPLCLVGSTLRAPHGCHAQYMANMGSIASLVMAMIIIVVVMTKQTSRSGISSAMKLWGLVVCHHTSPRFIPFPLRYACEFLMQAFGLQLNMELQLAHQLSEKHILRTQTLLCDLLLRDSPTGIVTQSPSIMDLVKCDGAALYYHGKYYPLGVTPTESQIKDIIEWLTVCHGDSTGLSTDSLADAGYHGAAALGDAVCGMAVAYITPSDYLFWFRSHTAKEIKWGGAKPHPEDKDDGQRMHPRSSFKAFLEVVKSRSLPWENAEMDAIH

SEQ ID NO: 12812 - protein, 752 aa, Cytophaga hutchinsonii
MKIKDIVNRDLVNLQNCDQEPIHIPGSIQPHGFLIAITKETWEIRFCSENVIDFIGLSHKQLLGKKITEIFDDIFFGKVIQCKDYAVGESKLIQGKIEDKEFDFTAHQNEDVIILESEIHIDNTPKNDLFDMSKQFMDYMEDSHTLIRLCELVASGIKKVTDYDRVMIYRFDKDYNGEVIAETKQDKLESFLGLHYPHTDIPVQARELYIKNLLRVIGDVNYKPVPIYTIDDSENQNLDLSCSVLRSVSPIHVQYLHNIGVGATLTISLIHKKKLWGLVACHHYSPKYLHYETKLAAKLQGHFITSQIEIREQNEQYATSQKLHQAVDDLISRKFSADRNSLKDIVIDSNVLQLCKAAGISILIDKKEVYKSGLTPADGDIQKLAEYVKHAIDKEQYATHFITAELPDFKNITASGIAGINYHALDKTSNSCIMWYKPETITEVKWAGDPNKAIEKDKNGLSPRKSFELWGEKVKNQSIPWSQPDLIASSNFANFLQKHLGYIFLAEEEEKQRQMTEILKEVNSELENINWISTHDLQEPLRKIQIITSYVLSVENTLSEASYEKLQKINKSANRMQALISDILRYTKLKASTEILESVDLKNIVTEVIQEVDDALEAKKANIYISDLPEMSGIPFLLAQLFLNLISNSLKFADATRVLSIHIVQEGIIVKEEQEYYKISYTDNGIGFNKDYNELIFKIFSRLHSVAEYPGSGIGLALCKKIMKTHKGFIEAQGIPEKGAIFYLYFPVSKNS

SEQ ID NO: 12813 - protein, 506 aa, Cytophaga hutchinsonii
MSKQNYDSKFCGSLPISFVNQIQDYGFLLVCDPALIVLQVSDNAEAFTRISYQSFIDKNLKELLTADSFQLLQEKLSSKAQKRFTCTLEFYGGVRTSFLTLIHVKEEYILFEFEPSDDTDIKGFREVYQQIHEASAAIQQSQELGESLSIAVKELKTFSGFDKVMIYKFDEDWNGHVLAEAMEPGMESYLGITFPASDIPKQARELYLKNPYRLIPDREYKPSKLYPVINPASSGFVDLGVCNLRGVIKVHLEYLTNMNVKSSMSTRILKDNTLWGLIACHHREKKFLNFDQCSVFEMFSNVVSTRLSALETEQNLTKTTENQALMNSIIEELYSQTMLINAIDNCAALIMQLLDCTGLVHIRESKVKSFGACPSASSIHELVIWLQMKNFTTLYATAALTEAYEDAAAIASVASGLLAFPVIPDKGEYILCFRAEILQRIDWGGNPNEAIRFNEDMKTYHPRHSFEIWKEEIKSTSQPFQEYEMNFAKELQRIFIETRLKEQNRR

SEQ ID NO: 12814 - protein, 1317 aa, Cytophaga hutchinsonii
MEEIEFLKKSLQEEIISRKQLEIELEKNKLEIEKLKKKFSNSHKEILENYIRKEQDLLSNSSRLSSLIVNLDSAILLEDENRKIVLVNQKFCDIFGIPLSPQELIGTDCSNSAQQSKIKFKNPDQFISRIEELLENKKKVLSDELQLIDGKILKRDFIPVYHNNEYLGHLWNYEDLTNYINVKKKIESLSRFPKESPNPILRCSADGMVIYANAAAKPFVSVLSTTKYNSNNNVTYDSLVSNVKASFKTRMLLKNEIRIKDRTYNVSYVPVEHEDYVNIYATDITSTKESEEKIYLLKELLNQLDEFIQVIDKEGNFVFINESSANRFQRTIEEFETLNIKNIVPSFYNNMTWEEQFDFFKQKQNFLLESTHTKPDKTSYPIESSVKYTTVHEKEYIISFSKDISERKRTEQALQDQKQFYEDILNNIPSDIAVFNTNYQYLYVNPAAIKDEETRKWIIGKTDLDYCRYRGKDDSLAIMRRKNHDILHEFKKPIEWEDVFTDKDGNVSYVLRKFHPVLDENDNIKIIIGNGINITEIKQVQEKLAKSEELYRLVIHAANDGIWDWDIASGSLYLSERWKSMLGYTDETLANHISSWEKTMHPDDLSIAKEILQNHFEKRKPYNYTLRYLHVDGSIRWIMCRGFAIRNRKGEPYRMVGSCTDVTDTQIAEEKLKENEEKLQAIFNHSHDAKFLVDPCTNKIIEFNKRTLELFETDKPDTLYTIPLTSLRKYPLTDAELADTQNQFKQLGYWNQEVLYITQKKNEFWGNIVAKTIFINKKEVILVRITDISENKKIEQELIKAKQIAEESTKAKEMFLANMSHEIRTPMNGILGMAELISRTSLDVTQKKHVQLIKNSADNLLIIINDILDIAKIESGKLTIEQIPFDICEVIKSAIQTLTYKAEEKGIDLIIHPIKLDHRVVIGDPFRLTQALLNLINNAIKFTENGSVEISGRIPHSSSTDITFEFTVKDTGIGIPQEKLDSIFEGFTQASPDTSRKYGGTGLGLTISKNLIQMQGGNIWVESVVGKGSKFIFSITYKKGDLLDVSPNNKNKINLYQLHDLKVLLAEDNEVNQYFAKTLMDEIGVKVDVANNGIEAFQFFEQNEYDIILMDIQMPYMGGIETTSKIRSHANKTKAKIPIIALTANALVGDSEKYIEAGMSDYISKPFDRETLFRKLQLHAGSNKNIFQDAKNIHLFQSDTNDAYLPNYSHLEKNFQNNTVFLKKIFTLFIESTPEIVNELKLFSEGKDYEKLQATAHKLKASVDAFKIVALHQTIRNIEKFAANKTNLDEIPDLVKSTDDILKIAQEDITKKLKQIE

SEQ ID NO: 12815 - protein, 1222 aa, Cytophaga hutchinsonii
MSQEHESSFQDPSRDELIQQVKELQIINANQRPEKILQEAFEKINLLVITIDQDGLIVYANEAFLEVIGWEKQRLLGENWKEFLEPGKDKNKEEHIYTLIKKQGFIDQLKRKFLSKEGDYRTIKFNVVIHHPIGNDVHLTTLIGEDITDKKKVIRALKDSNDQLQDLFENANDLIQVFDLDGKIQFVNRAWKDILQYSDEEILKLNFRDIIAKEQVGVTMEHLNNILAGKKDDKFETVFTSKNGRNIQVICSVNVRYEKEKPVSFRGIFHDNTEHMRAERAQNLYYKISTLAINSDRLDSLLDNIHKELRTIIAVNNFHVALYDRDHNYLNFPYYVDENIGPKPISMKRIVGKGLTEYSLFNEEPTFLYEEDINKLSEAGAIELLGPTPKIWLGVPLRLENRTIGVICVKSHSDRNKYKRRHVELLDFISGQIALVIERKRNEEQIIDKTARLNAIFESSSHLIWSVNRKRGLTSFNQNYANAIFRKYQKYPTIYDEGVTKEVLVLSDPEFHDSIDKKYKDAFNGQPQHFEACNTNQNGEIFWRETYLNPIFLPDGRIDEVSGISHDITEKKQWEITIQESEEKFRNIFESFQDIYYRTDLSGYITMISPSGCELSGYTQEEIIGKHISEFFTTPKQQVNLIREVLKTGRVKNYETNVNIKGGESIQSISNIRLIYNNEGKPIGVDGVARDITFLKKASQELYHAKEIAEKSLKVKENFLANMSHEIRTPMNGVIGMIDLLNETPLMEEQRKYVQTIKKSSETLLNILNDILDLSKIEAGKMQLRLAPISIEQTVEKLHALFYQQATLKNIDLLYSIDSNVPKVVLADETRLLQILSNLTSNAIKFTDQGSVRIQISLQSKKDLVNKIRVNISDTGIGIAQDKLNVLFGYFNQVDNSSSKSYGGTGLGLAISKELSKLMNGEIGVQTEANKGSVFWFTFEANESKRLVEAKVETPNAFSSEKTFKDYPKILLVDDNAINLFVASEILRKAGCEIDTAGNGLEAIQKVKENPYRMVLMDIQMPQMDGIEATAEIRKLNLAYTPPIIAMTAYSMKEDKDRFMVNGMDDYIAKPIKAESLISKVKAWLDSNAAKNGHTATQTSDETAVEIPILDLEVFEKLKSLSGAEIIDQIYKEFENESLEQIVDCKNSLAMGDFHNILNKLHTLKGVSGTLGLIELESISRLVESKLKKGDYPELAVDIEKLSEAHNRFIEHYTFILNSNSK

SEQ ID NO: 12816 - protein, 192 aa, Sequoiadendron giganteum
DDHGEVISEIRRSDLEPYLGLHYPATDLPQASRFLFMKNKVRMICDCYATPVKVVEDNRLPRELILCGSTLRAPHGCHAEYMSNMGSIASLAIAVTINAKEEDGDTDGQQQQQKGRRLWGLVVCHHTSPRFVPFPMRYACEFLMQVFAIQLNKEVELADQLREKHILRTQTLLCDMLLRDAPMGIIRQKPNI

SEQ ID NO: 12817 - protein, 1140 aa, Adiantum capillus-veneris
MSSKTMTYSSSAAEPRSSSSSVVGSKHNRRVVVAQTTADAKLHAVFEQAQSEGDTGGSSFDYMRSIEDARGSVLSERVPAQAVTAYLQRMQRGGLIQPFGCMLALEEGSFRVIAYSENAAEMLDLMPQSVPSVGVQVLVLGIGTDARTLFTYASAAALEKASGAVDVSMLNPITVHCRSSSKPFNAIVHRIDVGLVIDFEPVRPADVAVWAAAGALQSHKLAAKAISRLQALPVGDIDLLCDSVVEEVRELTGYDRVMAYKFHEDEHGEVLAEIRRSDLEPYLGLHYPATDIPQASRFLFMKNRVRMICDCRALPVRVIQDKELRQPLSLAGSTLRAPHGCHSQYMANMGSIASLVMAVVVNDNDEDVSNRSQQPKMRRLWGLVVCHHTTPRAVPFALRSACEFLMQVFGLQLNMELELAAQMREKHILRTQTLLCDMLLRDAPIGIVSESPNIMDLVKCDGAALYYGKNFWLLGTTPIEAQIKDLAEWLLDVHRDSTGLSTDSLADAGYPGAAALGDAVCGMAAAKITTRDFLFWFRSHTAKEIKWGGAKHDPEDRDDGRKMHPRSSFKAFLEVVKRRSLPWEDMEMDAIHSLQLILRGSFQDIDDSDTKTMIHARLNDLKLHGMDELSTVANEMVRLIETATAPIFAVDAGGFINGWNAKVAELTGLTVEEAMSRSLVRDVVVNASMETAERVLDLALQGQEEQNVEIKLKTYGDQAIKGPVILIVNACSSRDFTDNVVGVCFVGQDVTGQKVVMDKFTRIQGDYKTIVQNPNPLIPPIFGADEFGYCSEWNPAMEKFSGWKREDVIGKMLIGEVFGSDLACCKLRGQDSMTKFMIILNAAMGGRDSDRFPFGFFDRYGKYAEALLIANKRTDSDGAITGVFCFLHTASPELQQALQVQKRSARTALDRLKEVAYMKQEIRNPLYGIVFTRKLLDNTNLTDEQKQIMETSSLCEKQLQNILDEDNFEKLDQGNVDLDTLEFTMGTVMDAVISQGMIRSREKGLQLIRETHVEIKNTRLFGDQYRLQQVLADFLTTAIRFTSSSDGWVGIKVVPTIKNMKDGLHIVHFEFRVSHPGSGIPEDLVQQMYDRSQEITQEGMGLSVSRKLVKLMNGDVKYTREAGVCYFLVTVELPLVQEDD

SEQ ID NO: 12818 - protein, 1118 aa, Adiantum capillus-veneris
MSSTRHSYSSGGSGKSKHGRRIAQTSADAKLYAAYEESSESGSFDYSQSVSAGKEGISSQLVTAYLQRMQRGGLVQQFGCLIAVEEETFRVLAYGANAPEMLDVATQAVPTMGQYSRLCIGADVRTLLSPASASALDRVIGVVDVSMFNPITVQSRSSGKPFYAILHRNDVGLVIDLEPIRPDDASITGGALQSHKLAAKAIARLQSLPGGDIGLLCDSVVEEVHELTGFDRVMAYKFHEDEHGEVVAEIRRTDLEPYIGLHYPATDIPQAARFLFMKNRVRMICDCRLPPVKLIQDKTLSQPMSLTGSKLRAPHGCHTQYMANMNSISSLVMAVIVNDSDDDSPGHSSQGIKLWGLVVCHHTSPRYVPFPVRSACEFLMQVFSLQLNMEVGMAAQVREKHILRTQTLLCDMLLRDAPIGIVSQSPNIMDLVTCDGAALYYGKKCWLLGTTPTEAQIVDIAAWLLDCHKDSTGLSTDSLAKTGYPEASCLGDAVCGLAAAKITATDFLFWFRSHTAKEVRWGGARHDPEERDDGRRMHPRSSFKAFLEVVKQQSLPWEDVEMDAIHSLQLILRGSFQDIDDSNTKTMIHARLNDLKLQGLDELSTVASEMVRLIETATAPILAVDGQGLINGWNGKVAELTGLSFETAMGKSLAKELVHEESKTIVERVLHLALEGEEEQDIEIHLRTYDQHKQKGVVILIVNTCCSRDVSNNVVGVCFVGQDVTGQKLVLDRFIRIQGDYKAIVQSLNPLIPPIFGADEYGFCSEWNAAMEKLSNWRREEVLGKMLVGEIFGLQMVCCRLQGQDVVTKLMIVLNDAVNGQESEKFPLVFYDRNGRRVEALLIASKRTDADGRITGVFCFLHTASPELLQALIIKRAKEKVDKELSYVKEELKKPLEGLAFTRTVLEGTNLTIEQRQLIKTNAWCERQLRKILEDDLNNIEEGYMDLEMSEFFMGSVIDAVISQGMAASRGKGVQILTEIPNDVKLMCLFGDQARLQQVLADLLFCAINHATTTNEDEKDWVTIKVSRTKTRLDDGVHLMHFEFRISHSGQGISEALVEEMTNKSQKWTPEGLAISISCTLIRLMNGDVKYTTDAGNKCFLVTIQFPLAHRDDATSVR

SEQ ID NO: 12819 - protein, 1117 aa, Adiantum capillus-veneris
MSSTRHSYSSGGSGKSKHGRRIAQTSANAKLYAAYEESSESGSFDYSQSVSAGKEGISSQLVTAYLQRMQRGGLVQQFGCLIAVEEETFRVLHMCEAPEMLDVATQAVPTMGQYSRLCIGADVRTLLSPASASALDRVIGVVDVSMFNPITVQSRSSGKPFYAILHRNDVGLVIDLEPIRPDDASITGGALQSHKLAAKAIARLQSLPGGDIGLLCDSVVEEVHELTGFDRVMAYKFHEDEHGEVVAEIRRTDLEPYIGLHYPATDIPQAARFLFMKNRVRMICDCRLPPVKLIQDKTLSQPMSLTGSTLRAPHGCHTQYMANMNSISSLVMAVIVNDSDDDSAGHSSQGIKLWGLVVCHHTSPRYVPFPVRSACEFLMQVFSLQLNMEVGMAAQVREKHILRTQTLLCDMLLRDAPIGIVSQSPNIMDLVTCDGAALYYGKKCWLLGTTPTEAQIVDIAAWLLDCHKDSTGLSTDSLAKTGYPEASCLGDAVCGLAAAKITATDFLFWFRSHTAKEVRWGGARHDPEERDDGRRMHPRSSFKAFLEVVKQQSLPWEDVEMDAIHSLQLILRGSFQDIDDSNTKTMIHARLNDLKLQGLDELSTVASEMVRLIETATAPILAVDGQGLINGWNGKVAELTGLSFETAMGKSLAKELVHEESKTIVERVLHLALEGEEEQDIEIHLRTYDQHKQKGVVILIVNTCCSRDVSNNVVGVCFVGQDVTGQKLVLDRFIRIQGDYKAIVQSLNPLIPPIFGADEYGFCSEWNAAMEKLSNWRREEVLGKMLVGEIFGLQMVCCRLQGQDVVTKLMIVLNDAVNGQESEKFPLVFYDRNGRRVEALLIASKRTDADGRITGVFCFLHTASPELLQALIIKRAKEKVDKELSYVKEELKKPLEGLAFTRTVLEGTNLTIEQRQLIKTNAWCERQLRKILEDDLNNIEEGYMDLEMSEFFMGSVIDAVISQGMAASRGKGVQILTEIPNDVKLMCLFGDQARLQQVLADLLFCAINHATTTNEDEKDWVTIKVSRTKTRLDDGVHLMHFESRISHSGQGISEALVEEMTNKSQKWTPEGLAISISCTLIRLMNGDVKYTTDAGNKCFLVTIQFPLAHRDDATSVR

SEQ ID NO: 12820 - protein, 973 aa, Adiantum capillus-veneris
MSSKTMTYSSSAAEPRSSSSSVVGSKHNRRVVVAQTTADAKLHAVFEQAQSEGDTGGSSFDYMRSIEDARGSVLSERVPAQAVTAYLQRMQRGGLIQPFGCMLALEEGSFRVIAYSENAAEMLDLMPQSVPSVGVQVLVLGIGTDARTLFTYASAAALEKASGAVDVSMLNPITVHCRSSSKPFNAIVHRIDVGLVIDFEPVRPADVAVWAAAGALQSHKLAAKAISRLQALPVGDIDLLCDSVVEEVRELTGYDRVMAYKFHEDEHGEVLAEIRRSDLEPYLGLHYPATDIPQASRFLFMKNRVRMICDCRALPVRVIQDKELRQPLSLAGSTLRAPHGCHSQYMANMGSIASLVMAVVVNDNDEDVSNRSQQPKMRRLWGLVVCHHTTPRAVPFALRSACEFLMQVFGLQLNMELELAAQMREKHILRTQTLLCDMLLRDAPIGIVSESPNIMDLVKCDGAALYYGKNFWLLGTTPIEAQIKDLAEWLLDVHRDSTGLSTDSLADAGYPGAAALGDAVCGMAAAKITTRDFLFWFRSHTAKEIKWGGAKHDPEDRDDGRKMHPRSSFKAFLEVVKRRSLPWEDMEMDAIHSLQLILRGSFQDIDDSDTKTMIHARLNDLKLHGMDELSTVANEMVRLIETATAPIFAVDAGGFINGWNAKVAELTGLTVEEAMSRSLVRDVVVNASMETAERVLDLALQGQEEQNVEIKLKTYGDQAIKGPVILIVNACSSRDFTDNVVGVCFVGQDVTGQKVVMDKFTRIQGDYKTIVQNPNPLIPPIFGADEFGYCSEWNPAMEKFSGWKREDVIGKMLIGEVFGSDLACCKLRGQDSMTKFMIILNAAMGGRDSDRFPFGFFDRYGKYAEALLIANKRTDSDGAITGVFCFLHTASPELQQALQVQKRSARTALDRLKEVAYMKQEIRNPLYGIVFTRKLLDNTNLTDEQKQIMETSSLCEKQLQNILDEDNFEKLDQ

SEQ ID NO: 12821 - protein, 1142 aa, Mesotaenium caldariorum
MSTSRMSQSSGESTAKTKREVRVAQATADAKLNTAFEASAAVGGSFDYTKSVGASLNAGSEAIPSSAVTAYLQRMQRGGITQTFGCMLMVEEGSFRVRAFSENAGEMLDLVPQAVPSMGQQSLIAVGTDIRTLFTSASVSLLEKAAMATDVSVMNPVSLQSRAAKKPFFAVLHRIDVGLVVDLEPVRPSDPNVSAAGAMQSHKLAAKAISRLQSLPGGDIGLLCDAVVEEVRELTGYDRVMAYKFHEDEHGEVIAEIRRSDLEPYLGLHYPATDIPQAARFLFMKNRVRIICDCSAPPVKVIQDPTMKHPISLAGSTLRGVHGCHAQYMANMGSVASLVMAVIINDNSSEEGATAAGGILHKGRKLWGLVVCHHSSPRYVPFPLRSACEFLMQVFGLQLNMEVELSSQLREKHILRTQTLLCDMLLRDAPMGIVSQSPNITDLVKCDGAALFYHGRAWLLGVTPSEAQVRDIAAWLLDSHKDSTGLSTDSLADAGYPNADSLGVSVCGMAAARITSKDFLFWFRSHAQKEVKWAGAKQEPGDRDREEGEEGGRMHPRSSFQAFLEVVKQRSLPWEDVEMDAIHSLQLILRGSFQDMEGEGGGSQQGNKRMINARLNDLKLQGMDELSTVANEMVRLIETATAPILAVDSLGCVNGWNAKVSELTGLPVSEAMGKSLVKDLVQRESREAVERVLYMALNGEEEQNVEIQLKTWGPQLHSHGGTVILVVNACASRDVSESVVGVCFVGQDVTGEKEVLDKFIRIQGDYTTIVRSRNSLIPPIFGSDEYGCCTEWNPAMEKLTGVRREDVIGRMLMGDVFGSALRLRGSDGLTQFMIVLNRAMDGADTDKFPFTFYDREGKCVDSLLTANKRTDADGAITGVFCFLHTVSLELQQALSVQKAAERVAEAKAKELAYIRQEIQNPLDGIHFARSFIEHTELSEDQKQLMETSATCEKQLRRILDDMDLESIEEGYLELETGEFMMATVMNSVVSQGMVQSSKKGLQLFCDTPPEFKSMCVFGDQVRLQQVLADFLMNAVQFTPASGWVEIKVVPNVRSLPGGITMAHMEFRVTHSGEGLPEDLVHQMFDRADAHSKSQEGLGLSMCRKIVRLMSGEVRYVREPGKSYFLVLLDLPLAQREDAGSAM

SEQ ID NO: 12822 - protein, 577 aa, Mesotaenium caldariorum
VFGLQLNMEVELSSQLREKHILRTQTLLCDMLLRDAPMGIVSQSPNITDLVKCDGAALFYHGRAWLLGVTPSEAQVRDIAAWLLDSHKDSTGLSTDSLADAGYPNADSLGVSVCGMAAARITSKDFLFWFRSHAQKEVKWAGAKQEPGDRDREEGEEGGRMHPRSSFQAFLEVVKQRSLPWEDVEMDAIHSLQLILRGSFQDMEGEGGGSQQGNKRMINARLNDLKLQGMDELSTVANEMVRLIETATAPILAVDSLGCVNGWNAKVSELTGLPVSEAMGKSLVKDLVQRESREAVERVLYMALNGEEEQNVEIQLKTWGPQLHSHGGTVILVVNACASRDVSESVVGVCFVGQDVTGEKEVLDKFIRIQGDYTTIVRSRNSLIPPIFGSDEYGCCTEWNPAMEKLTGVRREDVIGRMLTGDVFGSALRLRGSDGLTQFMIVLNRAMDGADTDKFPFTFYDREGKCVDSLLTANKRTDADGAITGVFCFLHTVSLELQQALSVQKAAERVAEAKAKELAYIRQEIQNPLDGIHFARSFIEHTELSEDQKQLMETSATCEKQLRRILDDMDLESIEEG

SEQ ID NO: 12823 - protein, 1126 aa, Physcomitrella patens
MSTTKLAYSSGSSVKSKHSVRVAQTTADAKLQAVYEESGDSGDSFDYSKSVHASKSTGENVPALAVTAYLQRMQRGGLVQTFGCMLCVDESSFRVIAYSENAPEMLDLMPQAVPSVGQQEVLGIGTDARTLFTPSSAAALEKCAGAVDVTMLNPISVHCRSSGKPFYAILHRIDVGLVIDFEPVRPNDAVVSSAGALQSHKLAAKAISRLQALPGGDIGLLCDTVVEEVRQLSGYDRVMAYKFHEDEHGEVLAEIRRSDLEPYLGLHYPATDIPQASRFLFMKNRVRMIGDCYAPPVKVVQDKDLRQPISLAGSTLRAPHGCHAQYMGNMNSIASLVMAVIVNDPDEDPNSRGGQQRGRKLWGLVVCHHTSPRTVSFPLRSACEFLMLVFGLQLNMEVELAAQLREKHILRTQTLLCDMLLRDAPIGIVSQSPNIMDLVKCDGAALYYGKRFWLLGITPNEVQIKEIADWFLEHHQDSTGLSTDSLADAGYPGAAQLGDAVCGMAAAKITPRDFLFWFRSHTAKEIKWGGAKHDPDEKDDGRKMHPRSSFKAFLEVVKRRSLPWEDIEMDAIHSLQLISRGSFQDIDDSDTKTMIHARLNDLKLQGMDELSTVANEMVRLIETATAPILAVDSSGFINGWNAKVAELTGLPVGEAMGRSLVKDLILEESIDVVQRLLYLALQGEEEQNIEIQLKTFGPQKEKGAVILIVNACSSRDVQDNVVGVCFVGQDVTGQKQVLDKFTRIQGDYKAIVQNPNPLIPPIFGTDEYGYCSEWNPSMEKLTGWKREEVLGKLLVGEIFGMQLMCCRLKGQDAMTKFMIALNSAMDGQDTDRFPFSFFDRQGKYVDALLTVNKRTDAEGSITGVFCFLHTTSVELLQALTVQRATEKVAFAKLKELAYIRQEIKNPLYGIMFTRNLMEDTDLSEDQRQFVETSAVCERQLRKVLDDMDLESIEDGYLELDTNEFVMGTVMDAVVSQGMITSREKGLQLIRETPREIKNMCLFGDQVRLQQVLADFLLNAVKFTPSSGGWVGIKVVPTKKRLGGGIHVMHLEFRVTHSGMGLPEELVHEMFDRGRGMTQEGLGLSMCRKLVKLMNGNVQYIRETGKSYFLVEVELPLAQRDDAGSVR

SEQ ID NO: 12824 - protein, 1130 aa, Physcomitrella patens
MSTPKLAYSSGSSVKSKHSVRVAQTTADAKLQAVYEESGDSGDSFDYSKSVHASKSTGENVSAQAVTAYLQRMQRGGLMQTFGCMLCVEESNFRVIAFSENAPEMLDLMPQAVPSVGQQEVLGIGTDARTLFTPSSAAALEKCAGTVDVTMLNPISVHCRSSGKPFYAILHRIDVGLVIDFEPVRSNDAIVSSAGVLQSHKLAAKAISRLQALPGGDIGLLCDIVVQEVRELSGYDRVMAYKFHEDEHGEVLAEIRRSDLEPYLGLHYPATDIPQASRFLFMKNKVRMIGDCFASPVKVIQDKDLRQPISLAGSTLRAPHGCHAQYMGNMNSIASLVMAVIVNDPDEDPNARGGQQRGRKLWGLVVCHHTSPRTVSFPLRSACEFLMQVFGLQLNMEVELAAQLREKHILRTQTLLCDMLLRDAPIGIVSQSPNIMDLVKCDGAALHYGKRFWLLGITPNDAQIKEIADWLLEHHQDSTGLSTDSLADAGYPGAAQLGDAVCGMAAAKITSKDFLFWFRSHTAKEIKWGGAKHDPDEKDDGRKMHPRSSFKAFLVVVKRRSLPWEDIEMDAIHSLQLILRGSFQDIDDSDTKTMIHARLNDLKLQDMDELSTVANEMVRLIETATAPILAVDSGGFINGWNAKVAELTGLPVEEAMGRSLVKDLILNESIDVVQRLLHLALQGDEEQNIEIQLKTFGPQKEKGAVILIVNACSSRDVQDNVVGVCFVGQDVTGQKQVLDKFTRIQGDYKAIVQNPNPLIPPIFGTDEYGYCSEWNPSMEKLTGWKREEVIGKLLVGEIFGIQLMCCRLKSQDAMTKFMIVLNGAMDGQDTDRFPFSFFDRQGKYVDPLLTVNKRTDAEGSITGVFCFLHTTSVELLQALTVQRSTEKVAFAKLKELAYIRQEIKNPLYGIVFTRNLMEDTDLSVDQRQLVETSAVCERQLRKILDDLDLESIEDGYLELDTTEFEMGTVMDAVVSQGMITSREKGLQLIRETPSEIKNMCLYGDQVRLQQVLADFLLNAVRFTPSSEGWVGIKVVPTKKRLGRGVHVMHVEFRVTHPGLGLPEELVHEMFGRGRGMTQEGLGLSMCRKLVKLMNGTVQYIRETGKSCFLVEVELPLAQRDDAGSVRSTVV

SEQ ID NO: 12825 - protein, 1123 aa, Physcomitrella patens
MSTPKKTYSSTSSAKSKAHSVRVAQTTADAALQAVFEKSGDSGDSFDYSKSVSKSTAESLPSGAVTAYLQRMQRGGLTQSFGCMIAVEGTGFRVIAYSENAPEILDLVPQAVPSVGEMDTLRIGTDVRTLFTASSVASLEKAAEAQEMSLLNPITVNCRRSGKQLYAIAHRIDIGIVIDFEAVKTDDHLVSAAGALQSHKLAAKAITRLQALPGGNIGLLCDTVVEEVRELTGYDRVMAYRFHEDEHGEVVAEIRRADLEPYLGLHYPGTDIPQASRFLFMKNKVRIIADCSAPPVKVIQDPTLRQPVSLAGSTLRSPHGCHAQYMGNMGSIASLVMAVIINDNEEDSHGSVQRGRKLWGLVVCHHTSPRTVPFPLRSACGFLMQVFGLQLNMEVELAAQLREKHILRTQTLLCDMLLRDAPIGIVSQIPNIMDLVKCDGAALYYGKRFWLLGTTPTESQIKDIAEWLLEYHKDSTGLSTDSLADANYPAAHLLGDAVCGMAAAKITAKDFLFWFRSHTAKEIKWGGAKHDPGEKDDGRKMHPRSSFKAFLEVVKRRSLPWEDVEMDAIHSLQLILRGSFQDIDDSDTKTMIHARLNDLKLHDMDELSVVANEMVRLIETATAPILAVDSNGMINGWNAKIAQVTGLPVSEAHGRSLVKDLVTDESVAVVERLLYLALRGEEEQNVEIKLKTFGTQTEKGVVILIVDACSSIHVSENVVGVCFVGQDVTGQKMFMDKFTRIQGDYKTIVQNPHPLIPPIFGADEFGYCFEWNPAMEGLTGWKKDEVVGKLLVGEIFGMQMMCCRMKSQDAMTKFMIALNTAMDGQSTDKFTFSFFDREGKYVDVLLSTNKRTNADGVITGVFCFLQIASSELQQALKVQRATEKVAVAKLKELAYIRQEIKNPLCGITFTRQLLEDTDLSDDQQQFLDTSAVCEQQLQKVLNDMDLESIEDGYLELDTAEFEMGTVMNAVISQGMTTSREKGLQIFRETPREINTMRLLGDQIRLQQVLSDFLLNTVRFTPSPEGWVKIKVVPTRKRLGGSVHVVHLEFRVSHPGAGLPEELVLEMYDRGKGMTQEGLGLNMCRKLVRLMNGDVHYVREAMQCYFVVNVELPMAQRDDASSQM

SEQ ID NO: 12826 - protein, 1122 aa, Physcomitrella patens
MSAPKKTYSSTSSAKSKAHSVRVAQTTADAALHAVFEKSGVSGDNFDYSKSVSKSTAGSLHTGAVTAYLQRMQRGGLTQSFGCMVAVEETGFRVIAYSENAPEFLDLMPQAVPNIGEINTLGIGTDVRTLFTPSSAASLEKAAETQEISLLNPITVYCRSKKPLYAIAHRIDIGIVIDFEAVNMNDVTISADGALQSHKLAAKAITRLQALPGGDIGLLCDTVVEEVRELTGYDRVMAYKFHEDEHGEVVAEIRRTDLEPYLGLHYPATDIPQASRFLFMKNRVRMIGDCSAPPEKIVQDPNLRQPVSLAGSTLRSPHGCHAQYMGNMGSISSIVMAVIINDNEDDSRGSVQRGRKQWGLVVCHHTSPRTVPFPLRSACEFLMQVFGLQLNMEVELAAQLREKHILRTQTLLCDMLLRDAPTGIVSQVPNIMDLVKCDGAALYYGKRFWLLGTTPTESQIKDIAEWLLEYHKDSTGLSTDSLADANYPAAHLLGDAVCGMAAAKITSKDFLFWFRSHTAKEIKWGGAKHDPGEKDDNRKMHPRSPFKAFLEVVKRRSLPWEDVEMDAIHSLQLILRGSFQDIDDSDTKTMIHARLNDLKLHDMDELSIVANEMVRLIETATAPILAVDSNGMINGWNAKIAQETGLPVAEAMGRSLVKDLVMDESLEVVERLLYLALRGEEEQGVEIKLKTFGAQTVKGAVTLIVNACASRDVSENVVGVCFVGQDVTGQKMFMDKFTRIQGDYKTIVQNPHPLIPPIFGADEFGYCFEWNPAMEGLTGWKRDEVIGKLLVGEIFGMQKMCCQMKSQDAMTKFMISLNSAMDGQNTDKFSLSFFDREGRYVDALLSTNKRTNADGAITGVICFLQIASSELQQALRVQQATEKVAIAKLKELAYIRQEIKNPLCGITFTRQLLEDTDLSNDQKQFLDTSAVCEQQLQKVLNDLDLESIEDGYLELDTAEFEMRTVMDAVISQGMTISREKGLQIIRETPREIITMRLFGDQVRLQQVLSDFLLNAVRFTPSSEGWVKIKVVPTRKRLGGNEHVMHLEFRVSHPGAGLPEELVLEMFDKGKGMTQEGLGLNICRKLVRLMNGDVQYVREAMQCYFVLYVELPLAQQDDAASQM

SEQ ID NO: 12827 - protein, 1132 aa, Physcomitrella patens
MSTPKKTYSSTSSAKSKAHSVRVAQTTADAALQAVFEKSGDSGDSFDYSKSVSKSTAESLPSGAVTAYLQRMQRGGLTQSFGCMIAVEGTGFRVIAYSENAPEILDLVPQAVPSVGEMDTLRIGTDVRTLFTASSVASLEKAAEAQEMSLLNPITVNCRRSGKQLYAIAHRIDIGIVIDFEAVKTDDHLVSAAGALQSHKLAAKAITRLQALPGGNIGLLCDTVVEEVRELTGYDRVMAYRFHEDEHGEVVAEIRRADLEPYLGLHYPGTDIPQASRFLFMKNKVRIIADCSAPPVKVIQDPTLRQPVSLAGSTLRSPHGCHAQYMGNMGSIASLVMAVIINDNEEDSHGSVQRGRKLWGLVVCHHTSPRTVPFPLRSACGFLMQVFGLQLNMEVESAAQLREKHILRTQTLLCDMLLRDAPIGIVSQIPNIMDLVKCDGAALYYGKPFWLLGTTPTESQIKDIAEWLLEYHKDSTGLSTDSLADANYPAAHLLGDAVCGMAAAKITAKDFLFWFRSHTAKEIKWGGAKHDPGENHDGRKMHPRSSFKAFLEVVKRRSLPWEDVEMDAIHSLQLILRGSFQDIADSDTKTMIHARLNDLKLHDMDELSVVANEMVRLIETATAPILAVDSNGMINGWNAKIAQVTGLPVSEAHGRSLVKDLVTDESVAVVERLLYLALRGEEEQNVEIKLKTFGTQTEKGVVILIVDACSSIHVSENVVGVCFVGQDVTGQKMFMDKFTRIQGDYKTIVQNPHPLIPPIFGADEFGYCFEWNPAMEGLTGWKKDEVVGKLLVGEIFGMQMMCCRMKSQDAMTKFMIALNTAMDGQSTDKFTFSFFDREGKYVDVLLSTNKRTNADGVITGVFCFLQIASSELQQALKVQRATEKVAVAKLKELAYIVREIKNPLCGLTFTRQLLEDTDLSDDQQQFLDTSAVCEQQLQKSLNDMDLESIEDGYLELDTAEFEMGTVMNAVISQGMTTSREKGLQIFRETPREINTMRLLGDQIRLQQVLSDFLLNTVRFTPSPEGWVKIKVVPTRKRLGGSVHVVHLEFRVSHPGAGLPEELVLEMYDRGKGMTQEGLGLNMCRKLVRLMNGDVHYVREAMQCYFVVNVELPMAQRDDASSQCRSLYSYLLA

SEQ ID NO: 12828 - protein, 1126 aa, Ceratodon purpureus
  unsure (1)..(1126): unsure at all Xaa locations
MASAKMAYSSGSGIKSKHSVRVAQTTSDAKLQAVYEESNDSGDSFDYSKSVAQAAKSTGQQQVPAQAVTAYLQRMQRGGLTQTFGCMLAVEENTFRVIAYSENAPELLDVMPQAVPSLGQQDVLGIGTDARSLFTPSSATALERAAGAADLSLVNPISVHSRASGKPFYAIIHRIDVGIVMGFEPVRPNDVIVSTAGTLHSHKLAAKAIARLQALSGGDIGLLCDTVVEEVRELTGYDRVMAYKFHEDEHGEVLAEIRRSDLEPYLGLHYPSTDIPQASRFLFMKNRVRMIVDCWAPPVKVIQDKDLRQPISLAGSTLRAPHGCHAQYMGNMGSVASVTMAVIXNDQEDDFGGQQTRARRLWGLVVCHHTSARTISFPLRSACEFLMQVFGLQLNMEVELENQKREKHILRTQTMLCDMLLRDAPVGIVSQCPNIMDLVKCDGAALYYGKRFWLLGITPSEEQIEEIANWLLEHHQDSTGLSTDSLADAGYPGANLLGDAVCGMAAARITPTDFLFWFRSHTAKEIKRGGAKHEADDKDDGRKMTPRSSFNAFLEVMKRRSVPWEDIEMDAIHSLQLILRGSFQDIDDSDTKTMIHARLNDLKLQGMDELSTVANEMVRLIETATAPILAVDSNGFINGWNAKVAELTGLPVGDAMGRSLVQDLIVDESVEVVERLLYLALQGDEEQDVEIQLRTFGPQKGKGAVILIVNACSSRDVQDNVVGVCFVGQDVTSQKQVHDKFTRIHGDYKSIVQNPNPLIPPIFGSDELGYCTEWSPSMEKLTGWKRDEVLGKMLVGEVFGTQQICCRLKGQDSVTKFMIVLNNAMDGQDTDKYPFSFYDRQGKFVEALLTANKRTDADGYITGVFCFLHIASPELLQALTVQRATEKVAFAKLKELAYIRQEIKNPLYGIMFTRNLMEDTDLSDEQKQFMDTSAVCERQLRKILDDMDLESIEDGYLELETAESELGSMMDAVVSQGMITSREKGLQLIRETPREINDMSLFGDQVRLQHVLADFLLNAVRLTPSSEGWVGIKVVPTKKRLGGGFHVVHLEFRVAHPGSGLPEELVHEMFDRGRGMTQEGLGLSMCRKLVKLMNGEVKYIRDTGKSYFLVNLELPLTVRDESGMLR

SEQ ID NO: 12829 - protein, 1121 aa, Ceratodon purpureus
MSAPKKTYSSTTSAKSKHSVRVAQTTADAALEAVYEMSGDSGDSFDYSKSVGQSAESVPAGAVTAYLQRMQRGGLIQTFGCMVAVEEPNFCVIAYSENASEFLDLMPQAVPSMGEMDVLGIGTDIRTLFTPSSGAALEKAAATQDISLLNPITVHCRRSGKPLYAIAHRIDIGIVIDFEAVKMNDVSVSAAGALQSHKLAAKAITRLQALPGGDIGLLCDTVVEEVRELTGYDRVMAYKFHEDEHGEVVAEIRRMDLEPYLGLHYPATDIPQASRFLFMKNRVRVIADCCASPVKLIQDPDIKQPVSLAGSTLRAPHGCHAQYMGNMGSIASLVMAVIINDNEEDSRGAIQRGRKLWGLVVCHHTSPRTVPFPLRSACEFLMQVFGMQLNMEVELAAQLREKHILRTQTLLCDMLLRDAPIGIVSQTPNIMDLVKCDGAALYYGKRFWLLGTTPTENQIKDIAEWLLEYHKDSTGLSTDSLADANYPGAHLLGDAVCGMAAAKITAKDFLFWFRSHTAKEVKWGGAKHDPAEKDDGRKMHPRSSFKAFLEVVKRRSLPWEDVEMDAIHSLQLILRGSFQDIDDSDTKTMIHARLNDLKLHGMDELSVVANEMVRLIETATAPILAVDSTGMINGWNAKIAHVTGLPVSEAMGRSLVKDLVLDESVVVVERLLYLASQGEEEQNVEIKLKTFGTQTEKEAVILIVNACSSRDVSDSVVGVCFVGQDVTGQKMFMDKFTRIQGDYKTIVKNPHPLIPPIFGGDEYGYCFEWNPAMEALTGWKHDEVVGKLLVGEIFGMEMMCCRLKSQDSMTKFMISLNNAMDGTNTDKFSFSFCNREGKFVEALLSTNKRTNADGVITGVFCFLQIASSELQQALTVQRATEKVAIAKLKELAYIRQEIKNPLCGITFTRQLLEDTDLSDDQKQFLDTSAVCEQQLQKVLNDMDLESIEDGYLELDTAEFEMGTVMDAVISQGMTTSREKGLQIIRETPREISTMRLFGDQIRLQQVLSDFLINAIRFTPSSEGWVKIKVVPTRKRLGGNVHVMHLEFRVSHPGGGLPDELVLEMYDRAKGMTQEGLGLNMCRKLVRLMNGDVQYVRENAQCYFVVYVELPMAQRDDAASQM

SEQ ID NO: 12830 - protein, 1121 aa, Ceratodon purpureus
MSAPKKTYSSTTSAKSKHSVRVAQTTADAALEAVYEMSGDSGDSFDYSKSVGQSAESVPAGAVTAYLQRMQRGGLIQTFGCMVAVEEPNFCVIAYSENASEFLDLMPQAVPSMGEMDVLGIGTDIRTLFTPSSGAALEKAAATQDISLLNPITVHCRRSGKPLYAIAHRIDIGIVIDFEAVKMNDVSVSAAGALQSHKLAAKAITRLQALPGGDIGLLCDTVVEEVRELTGYDRVMAYKFHEDEHGEVVAEIRRMDLEPYLGLHYPATDIPQASRFLFMKNRVRVIADCCASPVKLIQDPDIKQPVSLAGSTLRAPHGCHAQYMGNMGSIASLVMAVIINDNEEDSRGAIQRGRKLWGLVVCHHTSPRTVPFPLRSACEFLMQVFGMQLNMEVELAAQLREKHILRTQTLLCDMLLRDAPIGIVSQTPNIMDLVKCDGAALYYGKRFWLLGTTPTENQIKDIAEWLLEYHKDSTGLSTDSLADRNYPGAHLLGDAVCGMAAAKITAKDFLFWFRSHTAKEVKWGGAKHDPAEKDDGRKMHPRSSFKAFLEVVKRRSLPWEDVEMDAIHSLQLILRGSFQDIDDSDTKTMIHARLNDLKLHGMDELSVVANEMVRLIETATAPILAVDSTGMINGWNAKIAHVTGLPVSEAMGRSLVKDLVLDESVVVVERLLYLASQGEEEQNVEIKLKTFGTQTEKEAVILIVNACSSRDVSDSVVGVCFVGQDVTGQKMFMDKFTRIQGDYKTIVKNPHPLIPPIFGGDEYGYCFEWNPAMEALTGWKHDELVGKLLVGEIFGMEMMCCRLKSQDSMTKFMISLNNAMDGTNTDKFSFSFCNREGKFVEALLSTNKRTNADGVITGVFCFLQIASSELQQALTVQRATEKVAIAKLKELAYIRQEIKNPLCGITFTRQLLEDTDLSDDQKQFLDTSAVCEQQLQKVLNDMDLESIEDGYLELDTAEFEMGTVMDAVISQGMTTSREKGLQIIRETPREISTMRLFGDQIRLQQVLSDFLINAIRFTPSSEGWVKIKVVPTRKRLGGNVHVMHLEFRVSHPGGGLPDELVLEMYDRGKGMTQEGLGLNMCRKLVRLMNGDVQYVRENAQCYFVVYVELPMAQRDDAASQM

SEQ ID NO: 12831 - protein, 1134 aa, Selaginella martensii
MSTTKLTYSSGSSAKSKHSVRVAQTTADAKLHAVYEESGESGDSFDYSKSINATKSTGETIPAQAVTAYLQRMQRGGLVQPFGCMLAVEEGSFRVIAFSDNAGEMLDLMPQSVPSLGSGQQDVLTIGTDARTLFTAAASALEKAAGAVDLSMLNPIWVQSKTSAKPFYAIVHRIDVGLVMDLEPVKASDTRVGSAAGALQSHKLAAKAISRLQSLPGGDIGLLCDTVVEEVRDVTGYDLVMAYKFHEDEHGEVVAEIRRSDLEPYLGLHYPATDIPQASRFLFMKNRVRMICDCSAPPVKITQDKELRQPISLAGSTLRAPHGCHAQYMGNMGSVASLVMAMIINDNDEPSGGGGGGGQHKGRRLWGLVVCHHTSPRSVPFLRSACEFLMQVFGLQLNMEAAVAAHVREKHILRTQTLLCDMLLRDAPIGIVSQSPNIMDLVKCDGAALYYGKRFWLLGITPSEAQIKDIAEWLLEHHKDSTGLSTDSLADAGYPGAASLGDEVCGMAAAKITAKDFLFWFRSHTAKEVKWGGAKHDPDDKDDGRKMHPRSSFKAFLEVVKRRSLPWEDVEMDAIHSLQLILRGSFQDIDDSDTKTMIHARLNDLKLQGMDELSTVANEMVRLIETATAPILAVDSSGFINGWNAKVADVTGLPVTEAMGRSLAKELVLHESADMVERLLYLALQGDEEQNVELKLKTFGGQKDKEAVILVVNACASRDVSDNVVGVCFVGQDVTGQKVVMDKFTRIQGDYKAIVQNPNPLIPPIFGADEFGYCSEWNPAMEKLSGWRREEVLGKMLVGEIFGIQMMYCRLKGQDAVTKFMIVLNSAADGQDTEKFPFAFFDRQGKYVEALLTATKRADAEGSITGVFCFLHIASAELQQALTVQRATEKVALSKLKELAYIRQEIKNPLYGIMFTRTLMETTDLSEDQKQYVETGAVCEKQIRKILDDMDLESIEDGYLELDTTEFMMGTVMDAVISQGMITSKEKNLQLIRETPKEIKAMFLYGDQVRLQQVLADFLLNAIRFTPSSENWVGIKVATSRKRLGGVVHVMHLEFRITHPGVGLPEELVQEMFDRGRGMTQEGLGLSMCRKLVKLMNGEVEYIREAGKNYFLVSLELPLAQRDDAGSVKFQASS

SEQ ID NO: 12832 - protein, 267 aa, Selaginella martensii
FCFLHIASAELQQALTVQRATEKVALSKLKELGLHPPEIKNPLYGIMFTRTLMETTDLSEDQKQYVETGTVCEKQIRKILDDMDLESIEDGYLELDTTEFMMGTVMDAVISQGMITSKEKNLQLIRETPKEIKAMFLYGDQVRLQQVLADFLLNAIRFTPSSENWVGIKVATSRKRLGGVVHVMHLEFRITHPGVGLPEELVQEMFDRGRGMTQEGLGLSMCRKLVKLMNGEVEYIREAGKNYFLVSLELPLAQRDDAGSVKFQASS

SEQ ID NO: 12833 - protein, 1131 aa, Pinus sylvestris
MASNSRHTQSQSTGSNNRRSSTNTNTTTNKATAMAQYNSDARLLQVFEQSGESGKSFDYTRSIQVHNRAVPEQQITAYLSRIQRGGRIQPFGCVLAVEETTFRIIAYSENEEMLDLGAQSVPSMEKPQQDVLTIGTDVRTLFTAASAHSLEKAAVAQEISLMNPIWVHCKNSRKPFYAIVHRIDVGMVIDLEPLRTGDAFMSAAGAVQSQKLAVRAISRLQSLPCGDVGLLCDTVVENVRELTGYDRVMVYKFHEDEHGEVVAEIRRSDLEPYLGLHYPATDIPQASRFLFMQNRVRMICDCMATPVKVIQSEELMQPLCLVGSTPSAPHGCHAQYMANMGSIRSLLMAVIINGNDDEGGGSGRNSMKLWGLVVCHHTSPRAVPFPLRYACEFLMQALGLQLNMELQLAAQLTEKHILRTQTLLCDMLLRDAPMGIVTQSPSIKDLVKCDGAALYYGGMCWMLGVTPTEAQIKDIADWLLEHHGDSTGLSTDSLADAGYPGAASLGDAVCGMASARITSKDFLFWFRSHTAKEMKWGGAKHHPDDKDDARRMHPRSSFKAFLEVVKRRSLPWDNVEIDAIHSLQLILRCSFRDIDDSGTKTMVHSRLNYLRLQGIDELSSVASEMVRLIETATAPILAVDYNGLVNGWNAKVAELTGLPVGEAMGMSLVQDLVFEQSVERVEKMLHNALRGEEEKNVEMMLKTFGPQKEKEAVILVVNACSSRDFTDNIVGVCFVGQDVTSQKVVMDKFIRIQGDYRSIVQSPNPLIPPIFASDEYACCSEWNAAMEKVTGWTHDEVIGKMLVGEIFGGCCRLKGQDAVTKFTIVLHQCNHGQEIEKFPFAFFDKQGKYVEALLTANKRTDADGRITGSFCFFRIASSELQHALEVQRQQEKKCFARLKELAYIRQEIKNPLYGMMFTRKLLEETDLSDDQKQFVETSAVCERQMQKVMDDMDLESLEDGYMELDTAEFILGTVIDAVVSQGMIVLREKGLQLIREIPGEVKTMRLYGDEVKIQQILADFLLNVLRFTPSPEGWVAIKVFPTLKQLGGGLHVVHLEFRITHPGLGLPAELVQDLFDRSQWATQEGVGLSMCRKLLKLMNGDVRYIRESGICYFLVNVEFPMAQREDAASIK

SEQ ID NO: 12834 - protein, 1151 aa, Populus balsamifera subsp. trichocarpa
MASQSQRQSNQRQHQNQAAQSSGTSNMRQHHHATESVSKAIAQYTVDAQLHAVFEQSGGSGKSFDYSQSVRTTSQSVPEEQITAYLSKIQRGGHIQPFGCMIAVDEGSFRVIAYSENAKEMLGLTPQSVPSLDKQEILSDGTDVRTLFRPSSSAMLEKAFGAREIILLNPIWIHSKNSGKPFYAILHRIDVGIVIDLEPARTEDPALSIAGAVQSQKLAVRSISQLQSLPGGDIKLLCDTVVESVRELTGYDRVMVYKFHEDEHGEVVAENKRADLEPYIGLHYPSTDIPQASRFLFKQNRVRMIVDCHATPVRVIQDEALMQPLCLVGSTLRAPHGCHAQYMANMGSIASLAMAVIINGNEEEAIGGRNSTRLWGLVVCHHTSARCIPFPLRYACEFLMQAFGLQLNMELQLASQLSEKHVLRTQTLLCDMLLRDSPTGIVTQSPSIMDLVKCDGAALYYQGQYYPLGVTPTEAQIKDIVEWLLALHGDSTGLSTDSLADAGYPGAASLGNAVCGMAVAYITKRDFLFWFRSHTAKEIKWGGAKHHPEDKDDGQRMHPRSSFKAFLEVVKSRSLLWENAEMDAIHSLQLILRDSFRDVEATNSKAVVHAQLEDTELQGMDELSSVAREMVRLIETATAPIFAVDVDGCINGWNAKVAELTGLSVDKAMGKSLVHDLVYKEYEETVDKLLHRALRGEEDKNVEIKLRTFGSEHQKKALFVVVNACSSKDYMNNIVGVCFVGQDVTGQKVVMDKYVHIQGDYKAIVHSPNPLIPPIFASDENTCCLEWNTAMEKFTGWSRGEVIGKMLVGEVFGSCCQLKGSDALTKFMIALHNAIGGQDTDKLPFSFFDRNGKYVQALLTANKRVNMEGEIVGAFCFLQIASNELQQALKVQRQQEKKCSARMKELAYICQEIRNPLSGLRFTNSLLENTDLTEDQKQFLETSAACEKQILKITRDVDLESIENGLLELEKAEFLFGSVINAVVSQAMLLLRERNLQLLRDIPEEIKTLVVYGDQARIQQVLADFLLNMVRYAPSSAGWVEIHVCPTLKQISDGHTLVHMEFKYALLNSFACLPPELVQDMFHSSRWVTQEGLGLSMCRKILKLMNGEVQYIRESERCYFLVILEVPMPNKCERYNCKKCCRLGCLVCNVY

SEQ ID NO: 12835 - protein, 1146 aa, Populus balsamifera subsp. trichocarpa
MASQSQRQSNQPVHNQAQSSGTSNMRQHHHATESVSKAIAQYTVDAQLHAVFEQSGGTGRSFDYSKSVRTTNQSVPEQQITAYLSKIQRGGHIQPFGCMIAADEQSFRVIAYSENAKDMLGLTPQSVPSLEKQEILFVGADVRILFRPSSAVLLEKAFGAREITLLNPIWIHSKNSGKPFYAILHRIDVGIVIDLEPARTEDPALSIAGAVQSQKLAVRAISQLQSLPGGDIKLLCDTVVDSVRELTGYDRVMVYKFHEDEHGEVVAENKRVDLEPYIGLHYPSTDIPQASRFLFKQNRVRMIVDCHAIPVRVIQDEALMQPLCLVGSTLRAPHGCHAQYMENMGSIASLAMAVIIYGNDEEAIGGRNSMRLWGLVVCHHTSARCIPFPLRYACEFLMQAFGLQLNMELQLASQLLEKHVLRTQTLLCDMLLRDSPTGIVTQSPSIMDLVKCDGAALYYQGQYYPLGVTPTETQIKDIVEWLLTLHGDPTGLSTDSLADAGYPGAAFLGDAVCGMAVAYIAERDFLFWFRSHTAKEVKWGGAKHHPEDKDDGQRMHPRSSFKAFLEVVKSRSLPWENAEMDAIHSLQLILRDSFRDAEATNSKAVVHTQLKDMELQGMDELSSVAREMVRLIETATAPIFAVDVDGRINGWNAKVAELTGLSVEEAMGKSLVHDLVYKEYEEIVDKLIHRAVKGEEDKNVEIKLRTFCSEHQKKAVFVVVNACSSKDYMDNIVGVCFVGQDITGQKVVMDKYVLIQGDYKAIVHSPNPSIPPIFASDENTCCLEWNTAMEKLTGWSRGEVVGKMLVGEVFGSCCRLKGPDALTKFMIALHNAIGGIDTDKLPFSFFDRNEKNVQTLLTANKRVNMEGDIIGAFCFLQIASPELQQTLKVQKQQEKKSFARMKELAYICQEIKNPLSGIHFTNSLLENTDLTEDQQQFLETSAACEKQILKIIRDIDLESIENGSLELEKAEFLLGSVINAVVSQAMLLLRERNLQLLRDIPEEIKTLAVYGDQARIQQVLADFLLNMVRYAPSSAGWVEIHVCPTLKQISDGHTLVHTEFKYLERVLQTRMLGLQHPLRSFLNFKLTLVMLHREGMVPKIQFQGLSVCQGRLIWLSYPENTTVTLYPLTIWFLLLYRRQSRSITHT

SEQ ID NO: 12836 - protein, 1172 aa, Arabidopsis thaliana
MVSGVGGSGGGRGGGRGGEEEPSSSHTPNNRRGGEQAQSSGTKSLRPRSNTESMSKAIQQYTVDARLHAVFEQSGESGKSFDYSQSLKTTTYGSSVPEQQITAYLSRIQRGGYIQPFGCMIAVDESSFRIIGYSENAREMLGIMPQSVPTLEKPEILAMGTDVRSLFTSSSSILLERAFVAREITLLNPVWIHSKNTGKPFYAILHRIDVGVVIDLEPARTEDPALSIAGAVQSQKLAVRAISQLQALPGGDIKLLCDTVVESVRDLTGYDRVMVYKFHEDEHGEVVAESKRDDLEPYIGLHYPATDIPQASRFLFKQNRVRMIVDCNATPVLVVQDDRLTQSMCLVGSTLRAPHGCHSQYMANMGSIASLAMAVIINGNEDDGSNVASGRSSMRLWGLVVCHHTSSRCIPFPLRYACEFLMQAFGLQLNMELQLALQMSEKRVLRTQTLLCDMLLRDSPAGIVTQSPSIMDLVKCDGAAFLYHGKYYPLGVAPSEVQIKDVVEWLLANHADSTGLSTDSLGDAGYPGAAALGDAVCGMAVAYITKRDFLFWFRSHTAKEIKWGGAKHHPEDKDDGQRMHPRSSFQAFLEVVKSRSQPWETAEMDAIHSLQLILRDSFKESEAAMNSKVVDGVVQPCRDMAGEQGIDELGAVAREMVRLIETATVPIFAVDAGGCINGWNAKIAELTGLSVEEAMGKSLVSDLIYKENEATVNKLLSRALRGDEEKNVEVKLKTFSPELQGKAVFVVVNACSSKDYLNNIVGVCFVGQDVTSQKIVMDKFINIQGDYKAIVHSPNPLIPPIFAADENTCCLEWNMAMEKLTGWSRSEVIGKMIVGEVFGSCCMLKGPDALTKFMIVLHNAIGGQDTDKFPFPFFDRNGKFVQALLTANKRVSLEGKVIGAFCFLQIPSPELQQALAVQRRQDTECFTKAKELAYICQVIKNPLSGMRFANSLLEATDLNEDQKQLLETSVSCEKQISRIVGDMDLESIEDGSFVLKREEFFLGSVINAIVSQAMFLLRDRGLQLIRDIPEEIKSIEVFGDQIRIQQLLAEFLLSIIRYAPSQEWVEIHLSQLSKQMADGFAAIRTEFRMACPGEGLPPELVRDMFHSSRWTSPEGLGLSVCRKILKLMNGEVQYIRESERSYFLIILELPVPRKRPLSTASGSGDMMLMMPY

SEQ ID NO: 12837 - protein, 1164 aa, Arabidopsis thaliana
MVSGGGSKTSGGEAASSGHRRSRHTSAAEQAQSSANKALRSQNQQPQNHGGGTESTNKAIQQYTVDARLHAVFEQSGESGKSFDYSQSLKTAPYDSSVPEQQITAYLSRIQRGGYTQPFGCLIAVEESTFTIIGYSENAREMLGLMSQSVPSIEDKSEVLTIGTDLRSLFKSSSYLLLERAFVAREITLLNPIWIHSNNTGKPFYAILHRVDVGILIDLEPARTEDPALSIAGAVQSQKLAVRAISHLQSLPSGDIKLLCDTVVESVRDLTGYDRVMVYKFHEDEHGEVVAESKRNDLEPYIGLHYPATDIPQASRFLFKQNRVRMIVDCYASPVRVVQDDRLTQFICLVGSTLRAPHGCHAQYMTNMGSIASLAMAVIINGNEEDGNGVNTGGRNSMRLWGLVVCHHTSARCIPFPLRYACEFLMQAFGLQLNMELQLALQVSEKRVLRMQTLLCDMLLRDSPAGIVTQRPSIMDLVKCNGAAFLYQGKYYPLGVTPTDSQINDIVEWLVANHSDSTGLSTDSLGDAGYPRAAALGDAVCGMAVACITKRDFLFWFRSHTEKEIKWGGAKHHPEDKDDGQRMNPRSSFQTFLEVVKSRCQPWETAEMDAIHSLQLILRDSFKESEAMDSKAAAAGAVQPHGDDMVQQGMQEIGAVAREMVRLIETATVPIFAVDIDGCINGWNAKIAELTGLSVEDAMGKSLVRELIYKEYKETVDRLLSCALKGDEGKNVEVKLKTFGSELQGKAMFVVVNACSSKDYLNNIVGVCFVGQDVTGHKIVMDKFINIQGDYKAIIHSPNPLIPPIFAADENTCCLEWNTAMEKLTGWPRSEVIGKLLVREVFGSYCRLKGPDALTKFMIVLHNAIGGQDTDKFPFPFFDRKGEFIQALLTLNKRVSIDGKIIGAFCFLQIPSPELQQALEVQRRQESEYFSRRKELAYIFQVIKNPLSGLRFTNSLLEDMDLNEDQKQLLETSVSCEKQISKIVGDMDVKSIDDGSFLLERTEFFIGNVTNAVVSQVMLVVRERNLQLIRNIPTEVKSMAVYGDQIRLQQVLAEFLLSIVRYAPMEGSVELHLCPTLNQMADGFSAVRLEFRMACAGEGVPPEKVQDMFHSSRWTSPEGLGLSVCRKILKLMNGGVQYIREFERSYFLIVIELPVPLMMMMPSS

SEQ ID NO: 12838 - protein, 1164 aa, Arabidopsis thaliana
MVSGGGSKTSGGEAASSGHRRSRHTSAAEQAQSSANKALRSQNQQPQNHGGGTESTNKAIQQYTVDARLHAVFEQSGESGKSFDYSQSLKTAPYDSSVPEQQITAYLSRIQRGGYTQPFGCLIAVEESTFTIIGYSENAREMLGLMSQSVPSIEDKSEVLTIGTDLRSLFKSSSYLLLERAFVAREITLLNPIWIHSNNTGKPFYAILHRVDVGILIDLEPARTEDPALSIAGAVQSQKLAVRAISHLQSLPSGDIKLLCDTVVESVRDLTGYDRVMVYKFHEDEHGEVVAESKRNDLEPYIGLHYPATDIPQASRFLFKQNRVRMIVDCYASPVRVVQDDRLTQFICLVGSTLRAPHGCHAQYMTNMGSIASLAMAVIINGNEEDGNGVNTGGRNSMRLWGLVVCHHTSARCIPFPLRYACEFFMQAFGLQLNMELQLALQVSEKRVLRMQTLLCDMLLRDSPAGIVTQRPSIMDLVKCNGAAFLYQGKYYPLGVTPTDSQINDIVEWLVANHSDSTGLSTDSLGDAGYPRAAALGDAVCGMAVACITKRDFLFWFRSHTEKEIKWGGAKHHPEDKDDGQRMNPRSSFQTFLEVVKSRCQPWETAEMDAIHSLQLILRDSFKESEAMDSKAAAAGAVQPHGDDMVQQGMQEIGAVAREMVRLIETATVPIFAVDIDGCINGWNAKIAELTGLSVEDAMGKSLVRELIYKEYKETVDRLLSCALKGDEGKNVEVKLKTFGSELQGKAMFVVVNACSSKDYLNNIVGVCFVGQDVTGHKIVMDKFINIQGDYKAIIHSPNPLIPPIFAADENTCCLEWNTAMEKLTGWPRSEVIGKLLVREVFGSYCRLKGPDALTKFMIVLHNAIGGQDTDKFPFPFFDRKGEFIQALLTLNKRVSIDGKIIGAFCFLQIPSPELQQALEVQRRQESEYFSRRKELAYIFQVIKNPLSGLRFTNSLLEDMDLNEDQKQLLETSVSCEKQISKIVGDMDVKSIDDGSFLLERTEFFIGNVTNAVVSQVMLVVRERNLQLIRNIPTEVKSMAVYGDQIRLQQVLAEFLLSIVRYAPMEGSVELHLCPTLNQMADGFSAVRLEFRMACAGEGVPPEKVQDMFHSSRWTSPEGLGLSVCRKILKLMNGGVQYIREFERSYFLIVIELPVPLMMMMPSS

SEQ ID NO: 12839 - protein, 1112 aa, Arabidopsis thaliana
MGFESSSSAASNMKPQPQKSNTAQYSVDAALFADFAQSIYTGKSFNYSKSVISPPNHVPDEHITAYLSNIQRGGLVQPFGCLIAVEEPSFRILGLSDNSSDFLGLLSLPSTSHSGEFDKVKGLIGIDARTLFTPSSGASLSKAASFTEISLLNPVLVHSRTTQKPFYAILHRIDAGIVMDLEPAKSGDPALTLAGAVQSQKLAVRAISRLQSLPGGDIGALCDTVVEDVQRLTGYDRVMVYQFHEDDHGEVVSEIRRSDLEPYLGLHYPATDIPQAARFLFKQNRVRMICDCNATPVKVVQSEELKRPLCLVNSTLRAPHGCHTQYMANMGSVASLALAIVVKGKDSSKLWGLVVGHHCSPRYVPFPLRYACEFLMQAFGLQLQMELQLASQLAEKKAMRTQTLLCDMLLRDTVSAIVTQSPGIMDLVKCDGAALYYKGKCWLVGVTPNESQVKDLVNWLVENHGDDSTGLTTDSLVDAGYPGAISLGDAVCGVAAAEFSSKDYLLWFRSNTASAIKWGGAKHHPKDKDDAGRMHPRSSFTAFLEVAKSRSLPWEISEIDAIHSLRLIMRESFTSSRPVLSGNGVARDANELTSFVCEMVRVIETATAPIFGVDSSGCINGWNKKTAEMTGLLASEAMGKSLADEIVQEESRAALESLLCKALQGEEEKSVMLKLRKFGQNNHPDYSSDVCVLVNSCTSRDYTENIIGVCFVGQDITSEKAITDRFIRLQGDYKTIVQSLNPLIPPIFASDENACCSEWNAAMEKLTGWSKHEVIGKMLPGEVFGVFCKVKCQDSLTKFLISLYQGIAGDNVPESSLVEFFNKEGKYIEASLTANKSTNIEGKVIRCFFFLQIINKESGLSCPELKESAQSLNELTYVRQEIKNPLNGIRFAHKLLESSEISASQRQFLETSDACEKQITTIIESTDLKSIEEGKLQLETEEFRLENILDTIISQVMIILRERNSQLRVEVAEEIKTLPLNGDRVKLQLILADLLRNIVNHAPFPNSWVGISISPGQELSRDNGRYIHLQFRMIHPGKGLPSEMLSDMFETRDGWVTPDGLGLKLSRKLLEQMNGRVSYVREDERCFFQVDLQVKTMLGVESRGTEGSSSIK

SEQ ID NO: 12840 - protein, 1156 aa, Glycine max
MLQQAERRIPPFRRRKSTPHEQRLSHHSSNNNNNIDSMSKAIAQYTEDGVHAVFEQSGESGRSFNYSESIRIASESVPEQQITAYLVKIQRGGFIQPFGSMIAVDEPSFRILGYSDNARDMLGITPQSVPSLDDKNDAAFALGPQSVPSLDDKNDAAFALGTDVRALFTHSSALLLEKAFSAREISLMNPIWIHSRTSGKPFYGILHRIDVGIVIDLEPARTEDPALSIAGAVQSQEALVRAISQLQSLPSADVKLLCDTVVESVRELTGYDRVMVYKFHEDEHGEVVSESKRPDLEPYIGLHYPATDIPQASRFLFKQNRVRMIVDCHASAVRVVQDEALVQPLCLVGSTLGAPHGCHAQYMANMGSIASLVMAVIINGNDEEGVGGRSSMRLWGLVVCHHTSARCIPFPLRYACEFLMQAFGLQLNMELQLAAQSLEKRVLRTQTLLCDMLLRDSPTGIVTQSPSIMDLVKCDGAALYFQGNYYPLGVTPTEAQIRDIIEWLLAFHGDSTGLSTDSLGDAGYPGLPRLGMQFVGWQVAYITEKDFLFWFRSHTAKEIKWGGAKLILRTRMMGQRMHPLSSFKAFLEVVKSRSLPWENAEMDAIHSLQLILRDSFKDAEHRNSKAVVDPHVSEQELQGVDELSSVAREMVRLIETATAPIFAVDVDGHVNGWNAKVSELTGLPVEEAMGKSLVHDLVFKESEETVNKLLSREEDKNVETKMRTFGKEHQNKAAFLVVNACSSKHFTNNVVGVCFVGQNVTGQKIVMHKFINIQGDYKAIVHSPNPLIPPIFASDDNTCCLEWNTAMEKLDPSNENVTVGGVDVIGKMLVGEVFGSCCQLKGSDSITKFMIVLHNALGGQDTDKFPFSFLDRHGKYVQTFLTANKRVNMEGQIIGAFCFLQIMSPELQQALKAQRQQEKEFLGRMKELAYICQGVKKPLSGIRFTNSLLEATSLTNEQKQFLETSVACEKQMLKIIRDVDLESIEDGSLELEKGEFLLGNVINAVVSQVILLLRERNLQLIRDIPEEIKTLAVYGDQLRIQQVLSDFLLNIVRYAPSPDGWVEIHVRPRIKQISDGLTLLHAEFRMVCPGEGLPPELIQDMFNNSRWGTQEGLGLSMSRKILKLMNGEVQYIREAERCYFYVLLELPVTRRSSKKC

SEQ ID NO: 12841 - protein, 1156 aa, Glycine max; identical to SEQ ID NO: 12840

SEQ ID NO: 12842 - protein, 1121 aa, Pisum sativum
  unsure (1)..(1121): unsure at all Xaa locations
SNNNNNRNIKRESLSMRKAIAQYTEDAXLHAVFEKSGDSFDYAQSIRVTAATESVPEQQITAYLAKIQRGGFIQPFGSMIAVDETSFRVLAYSENARDMLGIAPQSVPSMEDDSSSSSFFSLGVDVRSLFSASSSVLLEKAFSAREISLMNPIWIHSRSTGKPFYGILHRIDIGVVIDLEPARSEDPALSIAGAVQSQKLAVRAISQLQALPGGDVKLLCDAVVESVRELTGYDRVMVYKFHEDEHGEVVAESKRVDLEPYIGLHYPATDIPQASRFLFKQNRVRMIVDCNASPVRVFQDEALVQPVCLVGSTLRAPHGCHAQYMANMGSIASLAMAVIINGNDEDGGGIGGAARGSMRLWGLVVCHHTSARCIPFPLRYACEFLMQAFGLQLNMELQLAVQSLEKRVLKTQTLLCDMLLRDSHTGIVTQSPSIMDLVKCDGAALYYQGNYHPLGVTPTESQIRDIIDWLLAFHSDSTGLSTDSLADAGYPGAASLGDAVCGMAVAYITEKDFLFWFRSHTAKEIKWGGAKHHPEDKDDGQKMHPRSSFKAFLEVVKIRSMQWDNAEMDAIHSLQLILRDSFKEAENNDSKAVVHTHMAELELQGVDELSSVAREMVRLIETATAPIFAVDVDGRINGWNAKVSELTGLLVEEAMGKSLVHDLVYKESRETVDKLLSHALKGEEDKNVEIKMKTFGPGNQNKAVFIVVNACSSKDYTNNIVGVCFVGQDITGQKVVMDKFINIQGDYKAIVHSPNPLIPPIFASDDNTCCLEWNNAMEKLSGWSRADVIGKLLVGEVFGSFCQLKGSDAMTKFMIVLHNALGGHDTDKFPLSFLDRHGKYVHTFLTANKRVNMDGQIIGAFCFLQIVNPELQQALTVQRQQDSSSLARMKELAYICQEVKNPLSGIRFTNSLLESTCLTDEQKQLLETSVACEKQMLKIVRDIALESIEDGSLELEKQEFLLENVINAVVSQVMLLLRDRKLQLIRDIPEEIKALAVYGDQLRIQQVLADFLMNVVRYAPSPDGWVEIHVFPRIKQISEGLTLLHAEFRMVCPGEGLPPELIQDMFHNSRWVTQEGLGLSMSRKIIKLMNGEVQYVREAERCYFLVLLELPVTRRSSKAIN

SEQ ID NO: 12843 - protein, 1137 aa, Oryza sativa (indica cultivar-group)
MSSSRSNNRATCSRSSSARSKHSARVVAQTPMDAQLHAEFEGSQRHFDYSSSVGAANRSGATTSNVSAYLQNMQRGRFVQPFGCLLAVHPETFALLAYSENAAEMLDLTPHAVPTIDQREALAVGTDVRTLFRSHSFVALQKAATFGDVNLLNPILVHARTSGKPFYAIMHRIDVGLVIDLEPVNPVDLPVTATGAIKSYKLAARAIARLQSLPSGNLSLLCDVLVREVSELTGYDRVMAYKFHEDEHGEVIAECKRSDLEPYLGLHYPATDIPQASRFLFMKNKVRMICDCSATPVKIIQDDSLTQPISICGSTLRAPHGCHAQYMASMGSVASLVMSVTINEDEDDDGDTGSDQQPKGRKLWGLMVCHHTSPRFVPFPLRYACEFLLQVFGIQINKEVELAAQAKERHILRTQTLLCDMLLRDAPVGIFTQSPNVMDLVKCDGAALYYQNQLWVLGSTPSEAEIKNIVAWLQEYHDGSTGLSTDSLVEAGYPGAAALGDVVCGMAAIKISSKDFIFWFRSHTAKEIKWGGAKHEPIDADDNGRKMHPRSSFKAFLEVVKWRSVPWEDVEMDAIHSLQLILRGSLQDEDANKNNNAKSIVTAPSDDMKKIQGLLELRTVTNEMVRLIETATAPILAVDITGSINGWNNKAAELTGLPVMEAIGKPLVDLVIDDSVEVVKQILNSALQGIEEQNLQIKLKTFNHQENNGPVILMVNACCSRDLSEKVVGVCFVAQDMTGQNIIMDKYTRIQGDYVAIVKNPSELIPPIFMINDLGSCLEWNEAMQKITGIKREDAVDKLLIGEVFTHHEYGCRVKDHGTLTKLSILMNTVISGQDPEKLLFGFFNTDGKYIESLMTATKRTDAEGKITGALCFLHVASPELQHALQVQKMSEQAAMNSFKELTYIRQELRNPLNGMQFTRNLLEPSDLTEEQRKLLASNVLCQEQLKKILHDTDLESIEQCYTEMSTVDFNLEEALNTVLMQAMPQSKEKQISIDRDWPAEVSCMHLCGDNLRLQQVLADFLACTLQFTQPAEGPIVLQVIPRMENIGSGMQIAHLEFRLVHPAPGVPEALIQEMFRHSPGASREGLGLYISQKLVKTMSGTVQYLREAESSSFIVLVEFPVAQLSTKRCKASTSKF

SEQ ID NO: 12844 - protein, 1131 aa, Lycopersicon esculentum
MASGSRTKHSYHNSSQGQAQSSGTSNMNYKDSISKAIAQYTADARLHAVFEQSGESGKSFDYSQSVKTTTQSVPERQITAYLTKIQRGGHIQPFGCMIAVDEASFRIIAYSENACEMLSLTPQSVPSLDKSEILTVGTDVRTLFTPSSSVLLERAFGAREITLLNPIWIHSKNSGKPFYAILHRVDVGIVIDLEPARTEDPALSIAGAVQSQKLAVRAISHLQSLPGGDIKLLCDTVVESVRELTGYDRVMVYKFHEDEHGEVVAESKRSDLEPYIGLHYPATDIPQASRFLFKQNRVRMIVDCHATPVRVTQDESLMQPLCLVGSTLRAPHGCHAQYMANMGSIASLTLAVIINGNDEEAVGGGRNSMRLWGLVVGHHTSVRSIPFPLRYACEFLMQAFGLQLNMELQLASQLSEKHVLRTQTLLCDMLLRDSPPGIVTQSPSIMDLVKCDGAALYYQRKYYPLGVTPTEAQIKDIVEWLLAYHGDSTGLSTDSLADAGYPGAASLGDAVCGMAVAYITSKDFLFWFRSHTAKEIKWGGAKHHPEDKDDGQRMHPRSSFKAFLEVVKSRSSPWENAEMDAIHSLQLILRDSFKDAEASNSKAIVHALGEMELQGIDELSSVAREMVRLIETATAPIFGVDVNGRINGWNEKVVELTGLSAEEAKGKSLVHDLLYKESQESAEKLLYNALRGVEGKNVEIKLRTFGAEQVEKAVFLVVNACSSRDYTNSIVGVSFVGQDVTGEKIVMDKFIHIQGDYKAIVHSPNPLIPPIFASDENTSCSEWNTAMEKLSGWSREEIVGKMLVGEIFGSCCRLKGPDAMTKFMIVLHNAIGGQDTDKFPFSFFDRNGKYVQALLTANKRVNMEGDTIGAFCFIQIASPELQQALRVQRQQEKKCYSQMKELAYICQEVKSPLNGIRFTNSLLEATNLTEYQKQYLETSAACERQMSKIIRDVDLENIEDGSLTLEKEDFFLGSVIDAVVSQVMLLLREKGVQLIRDIPEEIKTLTVHGDQVRIQQVLADFLLNMVRYAPSPDGWVEIQLRPSMMPISDGATVVHIELRIICPGEGLPPELVQDMFHSSRWVTQEGLGLSMCRKMLKLMNGEIQYIRESERCYFMIILDLPMTRKGPKSVG

SEQ ID NO: 12845 - protein, 1121 aa, Lycopersicon esculentum
MASGSGSRGKHDRNHQPKNQSQFSGTSNTNALSKAVAQYTTDARLHAAFEQSGESGKNFDYSQSVRNSTESVTEHQITAYLNKMQRGGHIQPFGCTIAVEEASFCVIAYSENACEMLDIMPQSVPSLEKNEILKIGTDVRTLFSSSSSGLLEGAFGAREITLLNPIWVHSKNSGKPFYAILHRIDVGIVIDLEPARTEDPALSIAGAVQSQKLAVRAISLLQSLPGGDIDLLCDTVVKSVRELTGYDRVMVYKFHDDEHGEVVAESRRSDLEPYIGLHYPATDIPQASRFLFKQNRVRMIVDCTAIPVRVIQDESLMQPLCLVGSTLRAPHGCHPQYMVNMGNVASLTLAVVINGNDDEVVGGRNAMRLWGLVVGHHSSARFIPFPLRYACEFLMQAFGLQLNMELQLASQLAEKRVLRTQTVLCDMLLRDSPTGIVTQNPSIVDLVKCDGAALYYQGRYYPLGITPTAAQIKGIVEWLLTCHVDSTGLSTDSLADAGYPEAASLGAAVCGMAVAYVTSKYFLFWFRSHTASEIKWGGAKHHPEDKDDWQKMHPRSSFKAFLEVVKNRSLPWENAEMDAIHSLQLILRDSFKDASNSKSIVRVQLREEGLQGMDELRSVAREMVRLVETATAPIFAVDVEGRINAWNAKVAELTELSVEEAIGKSLVHDLVHEESQTTAQNLLRKALRGEEDKNIEIKLRTFGAEQLKKTVFVEVNACSNKDYTNNIVGVSFIGQDITAQKVVLDKFVRIQGDYKAIMHSPNPLIPPIFVSDENTCCFEWNTAMEKLSGWNKEEIIGKMLVGEIFGTFCRLKGPDDMTNFMIMLHKAIGGQEIDKFPFSFSDRNGKFVQALLTANKRVNVDGQIIGAFCFLQIASPELQKTLMQRQQEKTSNIHMKELAYICRELKNPLNGIRFTNSLLEATELTENQKQFLETSAACERQMSKIIRDIDLDNIEDGSLELEKGEFFLASVIDAVVSQVMLLLRERGVQLIRDIPDEIKTLRVYGDQVRIQQVFADFLQIMASYAPPREGWVEVHLRPSIKQISDGVTIVHIEFRIVCPGEGLPPELIQDMFHNSLWVTQQGLGLSMCRRILQLMNGQVQYIRESERCFFLIILQLPMLIQ

SEQ ID NO: 12846 - protein, 1137 aa, Lycopersicon esculentum
MESQSSENRRGGGGRTSLNQNKQNNNKDSGLNTSSAASNMKNNASKAALAQYNADAKLMAEFEQSSVSGKSFDYSKSVLFPPHEANEEEITSYLSRIQRGGLVQPFGCMVAIEEPTFKIIGYSENCYDMLGFKPTKMKLGLIGVDARNLFTPSSGDSLAKVMASREISLLNPIWVHSRTTHKPFYAILHRIDVGIVIDLEPANSSDPALLLAGAVQSQKLAVRSISRLQSLPGGDIGVLCDTAVEDVQKLTGYDRVMVYKFHDDNHGEIVSEIRRSDLEPYLGLHYPATDIPQAARFLFKQNRVRMICDCNAQPVKVVQSEELKQPICLVNSTLRSPHECHSKYMANMGSISSLVMAILINSGDSMKLWGLIVCHHTSPRYVPFPLRYACEFFTQAFGLQLNMELQLASQLAEKKTLQMQTLLCDMLLRDVPFGVVTQSPSIMDLVKCDGAALYCGGKCWLLGVTPTEAQVKDIAQWLLVAHKDSTGLSTDCLADAGYPGAALLGDAVCGMATARITSKDFLFWFRSHTAKEVKWGGAKHHPDDKDDGGKMHPRSSFNAFLEVVKSRSLPWEIPEINAIHSLQIIMRESIQENENSSLKTLTTSQQNDADGPSMDELSSVAMEMVRLIETATAPIFGVDPSGLINGWNEKIADLTGLHASEAVGMSLINDITHEDSRGTVEKVLHRALLGEEEKNVEIKLRRFGKDPPGSVIYLVINACTSRDHKNGVVGVSFVAQDVTPEKFIMDKFIQLRGDYEAIVQSLSPLIPPIFASDENACCSEWNAAMERLTGWTKYEVMGRTLPGEVFGGLCRLTGQDALTKFMILFYQAISGHDTKKLPFGFFNRRGEFLEVFLTANKRTDEHGNVCGCFCFLQPMTIDPEASDERQDSKDSLWKYKEYVYVLQQMKNPLNGIQFTHKLLEATGVSDNQKQLLETSEACEKQILSVIDNMDFGGIEDGKVQLNMEEFVLGNVVDAIVSQVMIFLKEKNLQLLHDIPDQIKTLPLYGDQIKLQRVLSDFLLSVVHHAPSPDGWVEIKVLPGLKLIQDGNELIHLQLRMTHPGQGLPAALIDDMSGERNRWTTQEGIALNVAQKLLNVMNGHVRYVRGEDKCYFLIDVELQTLKPTQHGPKLEVTQEIEI

SEQ ID NO: 12847 - protein, 1135 aa, Nicotiana plumbaginifolia
MASGSRTKHSHQSGQGQGQVQAQSSGTSNVNYKDSISKAIAQYTADARLHAVFEQSGESGKSFDYSQSVKTTTQSVVPEQQITAYLTKIQRGGHIQPFGCMIAVDEASFGVIAYSENACEMLSLTPQSVPSLERPEILTVGTDVRTLFTPSSSVLLERAFGAREITLLNPIWIHSKNSGKPFYAILHRVDVGIVIDLEPAKTEDPALSIAGAVQSQKLAVRAISHLQSLPGGDVKILCDTVVESVRELTGYDRVMVYKFHEDEHGEVVAESKRPDLEPYIGLHYPATDIPQASRFLFKQNRVRMIVDCHATPVRVVQDESLMQPLCLVGSTLRAPHGCHAQYMANMGSIASLTLAVIINGNDEEAVGGRSSMRLWGLVVGHHTSARCIPFPLRYACEFLMQAFGLQLNMELQLASQLSEKHVLRTQTLLCDMLLRDSPTGIVTQSPSIMDLVKCDGAALYCQGKYYPLGVTPTEAQIKDIVEWLLTYHGDSTGLSTDSLADAGYPGAALLGDAVCGMAVAYITSKDFLFWFRSHTAKEIKWGGAKHHPEDKDDGQRMHPRSSFKAFLEVVKSRSLPWENAEMDAIHSLQLILRDSFKDAEASNSMAVVHAQLGEMELQGIDELSSVAREMVRLIETATAPIFAVDVDGRINGWNAKVAELTDLSVEEAMGKSLVHDLVHEESQETAENLLFNALRGEEDKNVEMKLRTFGSEQPKKAVFVVVNACSSKDYTNNIVGVCFVGQDVTGQKVVMDKFIHIQGDYKAIVHSPNPLIPPIFVSDENTCCSEWNTAMENLTGWSRGEIIGKMLVGETFGSCCRLKGPDAMTKFMIVLHNAIGGQDTDKFPFSFSDRNGKYVQALLTANKRVNMEGQIIGAFCFIQIASPELQQALRVQRQQDKKCYSQMKELAYLCQEIKSPLNGIRFTNSLLEATDLTEDQKQYLETSTACERQMSKIIRDVDLENIEDGSLTLDKEEFFLGSVIDAVVSQVMLLLRERSVQLIRDIPEEIKTLTVHGDQVRIQQVLADFLLNMVRYAPSPDGWVEIQLQPNMKQISDEVTVVHIEFRIVCPGEGLPPELVQDMFHSNRWVTKEGLGLSMCRKILKLMNGEIQYIRESERCYFLIILDLPMTGRGSKSVG

SEQ ID NO: 12848 - protein, 1132 aa, Nicotiana tabacum
MASGSRTKHSHQSGQGQVQAQSSGTSNVNYKDSISKAIAQYTADARLHAVFEQSGESGKSFDYSQSIKTTTQSVVPEQQITAYLTKIQRGGHIQPFGCMIAVDEASFRVIAYSENACEMLSLTPQSVPSLERPEILTVGTDVRTLFTPSSSVLLERAFGAREITLLNPIWIHSKNSGKPFYAILHRVDVGIVIDLEPARTEDPALSIAGAVQSQKLAVRAISHLQSLPGGDVKLLCDTVVESVRELTGYDRVMVYKFHEDEHGEVVAESKIPDLEPYIGLHYPATDIPQASRFLFKQNRVRMIVDCHATPVRVVQDESLMQPLCLVGSTLRAPHGCHAQYMANMGSIASLTLAVIINGNDEEAVGGRSSMRLWGLVVGHHTSARCIPFPLRYACEFLMQAFGLQLNMELQLASQLSEKHVLRTQTLLCDMLLRDSPTGIVIQSPSIMDLVKCDGAALYCQGKYYPLGVTPTEAQIKDIVEWLLTYHGDSTGLSTDSLADAGYPGAALLGDAVCGMAVAYITSKDFLFWFRSHTAKEIKWGGAKHHPEDKDDGQRMHPRSSFKAFLEVVKSRSLPWENAEMDAIHSLLILRDSFKDAEASNSKAVVHAQLGEMELQGIDELSSVAREMVRLIETATAPIFAVDVEGRINGWNAKVAELTDLSVEEAMGKSLVHDLVHKESQETAEKLLFNALRGEEDKNVEIKLRTFGPEQLKKAVFVVVNACSSKDYTNNIVGVCFVGQDVTGQKVVMDKFIHIQGDYKAIVHSPNPLIPPIFASDENTCCSEWNTAMEKLTGWSRGEIIGKMLVGEIFGSCCRLKGPDAMTKFMIVLHNAIGVQDTDKFPFSFFDRNGKYVQALLTANKRVNMEGQIIGAFCFIQIASPELQQALRVQRQQEKKCYSQMKELAYLCQEIKSPLNGIRFTNSLLEATDLTENQKQYLETSAACERQMSKIIRDVDLENIEDGSLTLEKEEFFLGSVIDAVVSQVMLLLRERSVQLIRDIPEEIKTLTVHGDQVRIQQVLADFLLNMVRYAPSPDGWVEIQLQPNMKQISDEVTVVHIEFRIVCPGEGLPPELVQDMFHSSRWVTKEGLGLSMCRKILKLMNGDIQYIRESERCYFLIILDLPMTRRGSKSLG

SEQ ID NO: 12849 - protein, 1130 aa, Solanum tuberosum
MASGSRTKHSHHSSSQAQSSGTSNVNYKDSISKAIAQYTADARLHAVFEQSGESGKFFDYSQSVKTTTQSVPERQITAYLTKIQRGGHIQPFGCMIAVDEASFRVIAYSENACEMLSLTPQSVPSLEKCEILTIGTDVRTLFTPSSSVLLERAFGAREITLLNPIWIHSKNSGKPFYAILHRVDVGIVIDLEPARTEDPALSIAGAVQSQKLAVRAISHLQSLPGGDIKLLCDTVVESVRELTGYDRVMVYKFHEDEHGEVVAESKRSDLEPYIGLHYPATDIPQASRFLFKQNRVRMIVDCHATPVRVTQDESLMQPLCLVGSTLRAPHGCHAQYMANMGSIASLTLAVIINGNDEEAVGGGRNSMRLWGLVVGHHTSVRSIPFPLRYACEFLMQAFGLQLNMELQLASQLSEKHVLRTQTLLCDMLLRDSPPGIVTQSPSIMDLVKCDGAALYYQGKYYPLGVTPTEAQIKDIVEWLLAYHGDSTGLSTDSLPDAGYPGAASLGDAVCGMAVAYITSKDFLFWFRSHTAKEIKWGGAKHHPEDKDDGQRMHPRSSFKAFLEVVKSRSSPWENAEMDAIHSLQLILRDSFKDAEASNSKAIVHAHLGEMELQGIDELSSVAREMVRLIETATAPIFAVDVEGRINGWNAKVAELTGVSVEEAMGKSLVHDLVYKESQETAEKLLYNALRGEEDKNVEIKLRTFGAEQLEKAVFVVVNACASKDYTNNIVGVCFVGQDVTGEKVVMDKFINIQGDYKAIVHSPNPLIPPIFASDENTCCSEWNTAMEKLTGWSRGEIVGKMLVGEIFGSCCRLKGPDAMTKFMIVLHNAIGGQDTDKFPFSFFDRNGKYVQALLTANKRVNMEGDTIGAFCFIQIASPELQQALRVQRQQEKKCYSQMKELAYICQEIKSPLNGIRFTNSLLEATNLTENQKQYLETSAACERQMSKIIRDIDLENIEDGSLTLEKEDFFLGSVIDAVVSQVMLLLREKGVQLIRDIPEEIKTLTVHGDQVRIQQVLADFLLNMVRYAPSPDGWVEIQLRPSMMPISDGVTVVHIELRIICPGEGLPPELVQDMFHSSRWVTQEGLGLSMCRKMLKLMNGEIQYIRESERCYFLIILDLPMTRKGPKSVG

SEQ ID NO: 12850 - protein, 1129 aa, Solanum tuberosum
MASGSRTKHSHHSSSQAQSSGTSNVNYKDSISKAIAQYTADARLHAVFEQSGESGKFFDYSQSVKTTTQSVPERQITAYLTKIQRGGHIQPFGCMIAVDEASFRVIAYSENACEMLSLTPQSVPSLEKCEILTIGTDVRTLFTPSSSVLLERAFGAREITLLNPIWIHSKNSGKPFYAILHRVDVGIVIDLEPARTEDPALSIAGAVQSQKLRSEGLFLICNHFLVGTLKLLCDTVVESVRELTGYDRVMVYKFHEDEHGEVVAESKRSDLEPYIGLHYPATDIPQASRFLFKQNRVRMIVDCHATPVRVTQDESLMQPLCLVGSTLRAPHGCHAQYMANMGSIASLTLAVIINGNDEEAVGGGRNSMRLWGLVVGHHTSVRSIPFPLRYACEFLMQAFGLQLNMELQLASQLSEKHVLRTQTLLCDMLLRDSPPGIVTQSPSIMDLVKCDGAALYYQGKYYPLGVTPTEAQIKDIVEWLLAYHGDSTGLSTDSLPDAGYPGAASLGDAVCGMAVAYITSKDFLFWFRSHTAKEIKWGGAKHHPEDKDDGQRMHPRSSFKAFLEVVKSRSSPWENAEMDAIHSLQLILRDSFKDAEASNSKAIVHAHLGEMELQGIDELSSVAREMVRLIETATAPIFAVDVEGRINGWNAKVAELTGVSVEEAMGKSLVHDLVYKESQETAEKLLYNALRGEEDKNVEIKLRTFGAEQLEKAVFVVVNACARDYTNNIVGVCFVGQDVTGEKVVMDKFINIQGDYKAIVHSPNPLIPPIFASDENTCCSEWNTAMEKLTGWSRGEIVGKMLVGEIFGSCCRLKGPDAMTKFMIVLHNAIGGQDTDKFPFSFFDRNGKYVQALLTRNKRVNMEGDTIGAFCFIQIASPELQQALRVQRQQEKKCYSQMKELAYICQEIKSPLNGIRFTNSLLEATNLTENQKQYLETSAACERQMSKIIRDIDLENIEDGSLTLEKEDFFLGSVIDAVVSQVMLLLREKGVQLIRDIPEEIKTLTVHGDQVRIQQVLADFLLNMVRYAPSPDGWVEIQLRPSMMPISDGVTVVHIELGLYAPGRLPPELVQDMFHSSRWVTQEGLGLSMCRKMLKLMNGEIQYIRESERCYFLIILDLPMTRKGPKSVG

SEQ ID NO: 12851 - protein, 1178 aa, Sorghum bicolor; identical to SEQ ID NO: 365

SEQ ID NO: 12852 - protein, 1039 aa, Sorghum bicolor
FRLLAFSENAADLLDLSPHHSVPSLDSAAPPPVSLGADARLLFSPSSAVLLERAFAAREISLLNPLWIHSRVSSKPFYAILHRIDVGVVIDLEPARTEDPALSIAGAVQSQKLAVRAISRLQALPGGDIKLLCDTVVEHVRELTGYDRVMVYRFHEDEHGEVVAESRRDNLEPYLGLHYPATDIPQASRFLFRQNRVRMIADCHATPVRVIQDPGMSQPLCLVGSTLRAPHGCHAQYMANMGSIASLVMAVIISSGGDDEQTGRGGISSAMKLWGLVVCHHTSPRCIPFPLRYACEFLMQAFGLQLNMELQLAHQLSEKHILRTQTLLCDMLLRDSPTGIVTQSPSIMDLVKCDGAALYYHGKYYPLGVTPTESQIKDIIEWLTVCHGDSTGLSTDSLADAGYLGAAALGDAVCGMAVAYITPSDYLFWFRSHTAKEIKWGGAKHHPEDKDDGQRMHPRSSFKAFLEVVKSRSLPWENAEMDAIHSLQLILRDSFRDAAEGTSNSKAIVNGQVQLGELELRGINELSSVAREMVRLIETATVPIFAVDTDGCINGWNAKIAELTGLSVEEAMGKSLVNDLIFKESEEIVEKLLSRALRGEEDKNVEIKLKTFGSEQSNGAIFVIVNACSSRDYTQNIVGVCFVGQDVTGQKVVMDKFINIQGDYKAIVHNPNPLIPPIFASDENTSCSEWNTAMEKLTGWSRGEVVGKFLIGEVFGSFCRLKGPDALTKFMVVIHNAIGGQDYEKFPFSFFDKNGKYVQALLTANTRSKMDGKSIGAFCFLQIASAEIQQAFEIQRQQEKKCYARMKELAYICQEIKNPLSGIRFTNSLLQMTDLNDDQRQFLETCSACEEQMSKIVKDATLQSIEDGSLVLEKSEFSFGDVMNAVVSQAMLLLRERDLQLIRDIPDEIKDASAYGDQFRIQQVLADFLLSMVRSAPSENGWVEIQVRPNVKQNSDGTDTELFIFRFTYPGEGLPADIVQDMFSNSQWSTQEGVGLSTCRKILKLMGGEVQYIRESERSFFLIVLELPQPRPAADREIS

SEQ ID NO: 12853 - protein, 1139 aa, Triticum aestivum
MSSSRSNNRPACSRGSSARSKHSERVVAQTPVDARLHAEFEGSQRHFDYSSSVSALNRSGASTSSAVSAYIQNMQRGRYIQPFGCLLAIHPESFALLAYSENAAEILDLTPHAVPTIDQRDALAVGADVRTLFRSQSAVALHKAAVFGEVNLLNPILVHARTSGKPFYAILHRIDVGLVIDLEPVNPADVPVTAAGALKSYKLAAKAISRLQSLPSGNLSLLCDVLVREVSELTGYDRVMAYKFHEDEHGEVIAECRRSDLEPYLGLHYPATDIPQASRFLFMKNKVRMICDCAASPVKLIQDDNLSQPISLCGSTMRAPHGCHAQYMANMGSIASLVMSITINEDDDEDGDTGSDQQPKGRKLWGLVVCHHTSPRFVPFPLRYACEFLLQVFGIQLNKEVELASQAKERHILRTQTLLCDMLLRDAPVGIFTQSPNVMDLVKCDGAALCYQNQIMVLGSTPSEGEIKKIVAWLLECHDGSTGLSTGLTLEAGYPGASALGEVVCGMAAIKISSKGFIFWFRSHTAKEIKWGGAKHEPGDADDNGRRMHPRSSFRAFLEVVKWRSVPWEDVEMDAIHSLQLILRGSLQDEDANDNNARSIVEAPSDDIKKIQGLLELKIVTNEMVRLIETATAPILAVDIVGNINGWNNKVAEITGLPTTEAIGMLLVDLVEGDSVEVVKQMLNSALQGTEEQNLEIKLKTMHQQESKGPVVLMVNACCSRDLSDKVVGVCFVAQDLTGHKMVMDKYTRIQGDYVAIVKNPNELIPPIFMINDLGSCLEWNEAMQKITGIKREDAIDKLVIGELFTLHDYGCRVKDQVTLTKLSILMNTVISGQEPEKLAFGFFNTDGKYMESLLTANKRTDAEGKITGALCFLHVASPELQHALQVQKMSEQAATHSFKELTYIRQELKNPLNGMQFTRKLLEPSDLTEEQRQLFASNVLCQEQLKKILHDNDLEGIEQCYMEMNTVEFNLEEALNTVLMQGMSVSKEKQISLDRDWPVEVSSMYLYGDNLRLQQVLADYLACTLQFTRPAEGPIVLQVIPKKEHIGSGMQIAHLEFRLVHPAPGVPEALIQEMFRHGPGVSREGLGLHISQKLVKTMSGTVQYLREAESSSFIVLVEFPVAQLNSKRSRPSTSKSNF

SEQ ID NO: 12854 - protein, 394 aa, Triticum aestivum
EPARTEDPALSIAGAVQSQKLAVRAISRLQALPGGDVKLLCDTVVEHVRELTGYDRVMVYKFHDDEHGEVLAESRRGDLEPYLGLHYPATDIPQASRFLFRQNRVRMIADCHAAAVRVIQDPAMPQPLCLVGSTLRSPHGCHAQYMANMGSIASLVMAVIISSGGEDEHNMTRGVIPSAMKLWGLVVCHHTSPRCIPFPLRYACEFLMQAFGLQLNMELQLAHQLSEKHILRTQTLLCDMLLRDSPTGIVTQSPSIMDLVKCDGAALFYHGKYYPLGVTPTEAQIKDIIEWLTVCHGDSTGLSTDSLADAGYPGATALGDAVCGMAVAYITPSDYLFWFRSHTAKEIKWGGAKHHPEDKDDGQRMHPRSSFKAFLEVVKSRSLPWENAEMDAIH

SEQ ID NO: 12855 - protein, 394 aa, Triticum aestivum; identical to SEQ ID NO: 12854

SEQ ID NO: 12856 - protein, 236 aa, Triticum aestivum
  unsure (1)..(236): unsure at all Xaa locations
XVGQDITGQKVVMDKFVNIQGDYKAIVHNPNPLIPPIFASDENICCSEWNTAMEKLTGWSRGEVVGKLLVGEVFGNCCRLKGPDALTKFMIVLHNAIGGQDSERSPFSFFDKNGKYVQALLTANTRSKMDGETIGAFCFLQIASPELQQAFEIQRQQEKKCYARMKELAYICQEIKNPLSGIRFTNSLLEMTDLKDDQRQFLETSAACEKQMSKIVKDASLQSIEDGSLVLAPXVF

SEQ ID NO: 12857 - protein, 140 aa, Triticum monococcum
QFTRKLLEPSDLTEEQRQLFASNVLCQEQLKKILHDNDLEGIEQCYMEMNTVEFNLEEALNTVLMQGMSVSKEKQISLDRDWPVEVSSMYLYGDNLRLQQVLADYLACTLQFTRPAEGPIVLQVIPKKEHIGSGMQIAHL

SEQ ID NO: 12858 - protein, 713 aa, Zea mays
  unsure (1)..(713): unsure at all Xaa locations
EPASTEDPALSIAGAVQSQKLAVRAISRLQALPGGDVKLLCDTVVEHVRELTGYDRVMVYRFHEDEHGEVVAESRRDNLEPYLGLHYPATDIPQASRFLFRQNRVRMIADCHATPVRVIQDPGLSQPLCLVGSTLRAPHGCHAQYMANMGSIASLVMAVIISSGGDDEQTGRGGISSAMKLWGLVVCHHTSPRCIPFPLRYACEFLMQAFGLQLNMELXLAHQLSEKHILRTQTLLCDMLLRDSPTGIVTQSPSIMDLVKCDGAALYYHGKYYPLGVTPTESQIKDIIEWLTVFHGDSTGLSTDSLADAGYLGAAALGEAVCGMAVAYITPSDYLFWFRSHTAKEIKWGGAKHHPEDKDDGQRMHPRSSFKAFLEVVKSRSLPWENAEMDAIHSLQLILRDSFRDAAEGTSNSKAIVNGQRHLGVLELRGINELSSVAREMVRLIETATVPIFAVDTDGCINGWNAKIAELTGLSVEEAMGKSLVNDLIFKESEATVEKLLSRALRGEEDKNVEIKLKTFGSEQSKGPIFVVVNACSSRDYTQNIVGVCFVGQDVTGQKVVMDKFVNIQGDYKAIVHNPNPLIPPIFASDENTSCSEWNTAMEKLTGWSRGEVVGKFLIGEVFGNCCRLKGPDALTKFMVIIHNAIGGQDYEKFPFSFFDKNGKYVQALLTANTRSKMDGKSIGAFCFLQIASTEIQQAFEIQRQQEKKCYAR

SEQ ID NO: 12859 - protein, 1126 aa, Marchantia paleacea var. diptera
MSTTKVTYSSGSSAKSKHSVRIVQTTADAKLQAVFEESGESGDSFDYTKSINASKSTGESVPAQAVTAYLQRMQRGGLTQTFGCMLAVEELTFRVLAYSENAPEMLDLMPQAVPCVGQQDVLGIGTDARTLFNSASAVALEKAAGALDVSMFNPISVQCKSSGKPFYAIVHRIDAGLVIDIEPVRPSDPSVSAAGALQSHKLAAKAISRLQSLPGGDIGLLCDTVVEEVRELTGYDRVMAYKFHEDEHGEVVAEIRRSDLEPYLGLHYPATDIPQASRFLFMKNRVRMICDCCAQPVQVIQDKELRQPLSLAGSTLRAPHGCHAQYMGNMGSIASLVMAVIINVNDEEYSSRGYHHKGRKLWGLVVCHHTTPRSVPFPLRSACEFLMQVFGLQLNMEVELAAQLREKRILRTQTLLCDMLLRDAPIGIVSQSPNIMDLVKCDGAALYYGKRYWVLGTTPTELQIKDIADWLLEYHKDSTGLSTDSLADAGYPGAASLGDAVCGMAAARITSKDFLFWFRSHTAKEIKWGGAKHDPDDKDDGRKMHPRSSFKAFLEVVKRRSLPWEDVEMDAIHSLQLILRGSFQDIDDSDTKTMIHARLNDLKLQGMDELSTVANEMVRLIETATAPILAVDSSGFINGWNAKVAELTGLPVSEAMGRSLVKDLALEESVETVERLLYLALQGEEEQNVEIKLQTYGAQKDKGAVILIVNACSSRDVTENVVGVCFVGQDVTGQKVVMDKFTRIQGDYKAIVQNPNPLIPPIFGSDEFGYCSEWNPAMEKLAGWKREEVIGKMLVGEIFGTQMMCCRLKGQDAMTKFMIVLNSAMDGQDSEKFPFAFFDRQGKFVEALLTANKRTDSEGAFTGVFCFLQIASMELLQALTVQRATEKVAFSKLKELAYIRQEIKNPLYGIMFTRNLVEDTNLTEEQKQFIETSALCERQLRRILDDMDLESIEDGYLELDTAEFIMGTVMDAVISQGMITSREKGLQLIWDTPRDTKNLCLFGDQVRLQQVLADFLLNAIRFTPSSEGWVGIKGVSSRHRQGGGVHVVHFEFRVTHPGAGLPEELVQEMFDRGRGMTQEGLGLNMCRKLLKLMSGDVQYIREAGKCYFLVNVELPIAQRDDAGSVK

SEQ ID NO: 12860 - protein, 965 aa, Nostoc sp. PCC 7120
MSELLYTFFISVPYWHPHDWLSGVIKTITAIISLYTAFICVKLIAKAGKFPSQVQLEVTNQKLQQAILNSANYTIISTTPDGIILTFNAAAQRWLGYTAEEVIGKKTPEMIHDKNEVVKVAQELSQELGVTIEPGFEAFVAKARLGQVEEREWTYIRKDGSRFPVLLSVTPLYDAEKNITGFLGIGSDITARKAAEAALRESEYRYATLAQTAPVGIFRNDAFGRCIFANERACNLIGSPLKDILGEGWIQSLHPDDRLRIVREWNQAVQQNLPFKAEYRFRHPNNVINWVIYQAIPERGSNGEVTGYIGTMTDINDRKRAEEELLHLSQALESAVEGISQLDTQGHYIKVNPAYAKITGYKPEEMIGMEWALTVHPDDKEKMMAAYHQMLKNGKVEIEARAMRKDGSAFYKQVVMVKAYNQQQECIGHYCFMKDISDRREVERLKDEFVSVVSHELRTPLTSISGALDLLASGVVPAGSEDAQRMLNIAANNTDRLVRLINDILDIERIESGKIQIAPQACNAADLMTQSVEVMEELAEQAGIQLSMSPLSAHLWADSDRIIQVFTNLISNAIKFSPTGATVWVTAKILEKGELEKSQTPIPLYPQTPIPLYPHTPIILFAVKDQGRGIPADKLESIFERFGQVDASDSRKKGGTGLGLAICRSILQHHGGQIWAESTSGEGSTFSFTLPIFPEEQNKEEEFLHLSHAAPQQPTESISPLILHCDDDLSVRAVVQVILEKQGYRVMTVASGKEAVEKAKVNQPDAIILNLMMPEIDGWETLALLKQQQETKDVPVIILSGVIPDHSKELPHDVSDWIIKPPDVKLLCQALEKATTKQQVIKVLVVEDDPDLAQVLIAMFNRHGISTFYAQTGREAIQISQNIIPDFLVLDLGLPECDGFAVVDWLRQYQRLYHVPLVVYTARDLDESDRQRLKLGQTLFLTKGRINPQEFEQRVITLLNRIICN

SEQ ID NO: 12861 - protein, 1550 aa, Nostoc sp. PCC 7120
MKAQLPDNEVQRIAALLEYKILDTPPEAAFDDITRLASYICGTPIALISLIDQNRQWFKATFGLERRETPRDEAFCAHTILESEAFIVPDATADERFATNPLVISDPKIRFYAGVPLTNPEGYSLGTLCVIDYIPRNLSFEQIEALQILGRQVIKQLELRRNLANLVLVNNQHKQAQKIRHPFFKKIAGGFGLASVFLVLLGLASYQAEIELIHNGNQVQTTQESINNLEQLLSQMKDAETGQRGYILTGKDPYLQTYQTALANIDQKFDELRNATVDPVRQQRLVILKPLITAKITELNQTIKLRQNLGFQAALQVIQSDQGQTLMDDIRKVMREMETENKVRLQQQLQAVKASEQKVIFILAIAIVSGFIILAVVYYLIYCEVIARQSMENILNEERNFISAVLDTVSALVIVLDSQGRIVRFNQACEVITGYSFDEVRGRHFWNLFLLPEDVESSKEFFAKFPADPTVPSVQESENYWVTKDGSRRLIAWSRTILQNHEGSVEYIIGTGIDITERKRADKHLTIQYAITRVLAESTTITEATPQILQAICETLGWNVCEIWMVNQQANFLSFFDLWHHTSLEMQEFRTQSQPITFASGIGLPGRIWASGQPIWLTDIVNDGSFLRNQLAAQVGLRGAFGFPIRSGQKILGVITCFSHQVQPHDPDLAKIMDSIGEQVGQFIHRKQAEEELQRQNLRSQLFTEITLKIRQSLQIEEILQITVKEVQKILQTDRVLIYQLLPDGSGSLIIEAVVAGWAAIKGQNITDFYLQTEYQQQYCLQQYRLRHLEAIANLDLGEIQQSHLELLRKFGVKANLVIPILVKDELCGLLIVHQCATSRQWTSFETHLLRQIADQVGIAVAQAQLLEVETRQRQELEVARSQAELASHAKSAFLANMSHEIRTPMNAVLGMTGLMLETLLNQEQRDFMETIRISGDALLTLINEILDLSKLEAGEMALENLNFNLSTCVEEVLDLLAPQAHSKGLEIAALIYRHVPIQLQGDASRLRQILMNLIGNAIKFTSFGEVVMRVELRSETPTTAIIHFAVTDSGLGITLEDQHKLFTPFTQVDASTTRKYGGTGLGLAICKQLVTLMGGEIGVESQLGKGSKFWFEIPFAKQLQPVSFVEDCGLLNNRRLLVVDDHATNRKIIYHQVSRWGMQVDQADRAVAALSMIVEACQQNKPYDVILIDMQMPEMDGMALGKQIKANSAIPPTPLIMLTSTNQRDEVQQAIKIGFAAYLVKPVKSSRLLDTIMSVLKTPSQLEAEKLEVKSQELEKNNLDHSRNHNFTATQAQNSVSTKTRILLAEDNLVNQKVALKQLQSLGYTADVAANGKEVLQLLKQIPYDLILMDCQMPILDGLEATKEIHRWAESSFASCRRPVIIAMTANAMKEDKQMCLDAGMDDYLSKPVMKEQLATALEYWCQLILNSRQAVEFDLNSLPLDWEHLHQLSENDTEFELHLLQIFVEDVRARLELAKEAIANTDFQQMAQQVHQLKGASTNIGATAMYLAAEKLEQLAQNQERRGSMELITEIEEGVNQIQAFLTRSQIV

SEQ ID NO: 12862 - protein, 873 aa, Rhodopseudomonas palustris
MSGLWQSMTTAWMSRTDRSALLDFWLGGRGAGTLIANTDIDEQEMRRIRAAQINSVTRLTPVTMSINVANAALILFTFWDNDARPQLLAWTAMIVFAAGSAVQSWLRNRFEPRLEASAHAIRRMTLHALLLGLIWGAMPVMVFVKADPGDQLIVACVAAGMISGGAFTLSTVPRAGLAYTWSLAAGSALSLALCDGMAYRITAAFLVLYAVFMSRNLISHGEMFFDNLRAKFELERQTEIISLLLKDFQANASDWLWQTDAHGRLVHVPERFVEVAKLPPSLLIGAPLADVIGMLCPEDGRCAMGVAAKMAQREPMNDLVVHVVIGGTPRLWSLTAKPMFDAAGEFAGYRGVGRDVTERWRAEQAEAENRAKSSFLAMMSHEIRTPMNGVLGLANSLLETKLDPEQQQAVTTIRDSGDDLLRILNDILDLSKLEAGRLEFEQADFSPTTLVESVRAIIEPEVRGKGIELKVDIDPRLPPSLNGDAARIRQVLLNLAANAVKFTEQGSIAIVLTCVKRNDSHATVEWQVTDTGIGISPDRVGSLFTDFAQADVSINRRFGGTGLGLAISRRIVEQMGGDIAVTSREGEGSTFRFSLDLPWSNAWIADHRLDRLGSDDLRTRIAMLGRPLRVLIAEDDSTNQMVVMKMLQEFAAEITVVSDGTDAVQAAGEGEFDVVLMDVRMPNMDGLAATRAIRGKGGALAKLPIIALTANAFPDDVKVCRDAGMNDFLAKPLRKPALVAAVLRALRGASTPVTMPSPPMLVDLDTLAELTAEIGQDQVNEMVALFFAETERRIALFRRFAEHMDRHDLEVEAHSLKGGARTLGFHPIAEIARSIEREAGSISPEALDLFTGQLNKALIELRRQCEGSLKLAS

SEQ ID NO: 12863 - protein, 1261 aa, Synechocystis sp. PCC 6803
MFWQPVSPLNADQLNYQGSYDPKLVLLSVAIAIFTAYMAFLMASSALSLPGRWSRKIALALSGTVMGLGIWAMHFIGMLGFELPCPISYDPLITFISVIPAIAASIYALNFLSFQAPTAKNLMVGAIWFGLGIGTMHYSGMAALELHGNIYYELPLFVLSLVIAVMLAFVALLFRFHSAKIFHTTHGPALGSSALVMGLSTSGMHYTAMTATHFICRPWGEFFIQGIDIQEVAIAVTISITLLTGGVMLFVLREISIQNQQQKILVATESWYRQIIEYAPEGIMVLDAQGNIILANTSIEKLFGYSQTELIGQSIALLGLAELLQQSLHLLQEGEDVGPTCPLDQEEFEILGTRYDGSEFPIEVSLTSLPSLSQREMNIFASVRDISARQEAQQQILRQREHLQSVLDSAPVGVAITVNGITQFANPHIGELVDLKVGDSPQKIYVDLGDRQQMLEELTQFGRSQSRVYKMYNPRGEIRDILATFLATDYEGQKGILGWLADITPIKAAEAEMKRAKELAEEASRIKADFLANMSHEIRTPMNAVIGMTHLALKTDLTPRQREYLHKIRFSGQHLLGVINDILDFSKIEAGKLPMESIDFDLDKVLDNVATLISEKATNKGLELLFDIDRNLPRHFIGDPLRLGQILINYANNAVKFTEQGDITIVVRLQEYRDQDVVLYLAVKDTGIGIKPEHIANLFNSFQQADSSTTRNFGGTGLGLAICKRIAELMGGEVGVESEYGQGSTFWAKVCLQKSNVIPHRLVLSKDLEGKRVLVVDDNDHARLVMKDLLEQMKFVVETVESGPEALNFLAEADRENHPHSIVFIDWQMPNMDGLEVARRLKAMGLNHQPSIFIVTAYGREELFVKAKSLGIDDVLVKPISPSVLFDSLARVLGDPTALAQEMRQSSGIGAEDLALEKLRRIRGARILLVEDNEINQEVAAELLRDVGFNVDVAANGLIALERLNNNAYALVLMDMQMPEMDGIEATIAIRQNPRYAQLPIVAMTANVMQGDRERCLQAGMNDHLGKPIEPEELWNKLLHWIPVDSPLAPETIEESAINTSDPEISIPHIPGLNSDDGLRRVLGKKSLYLKMLHKFVASQSSFLPEITQALGEKDYGFAERLAHTLKGVAGNIGAQELQQEAAELEKAIKEQWPQPEVENLLTNLGDRLDNLIAQLTSNLPPEPATVAITLDQGQLEEICDHLAQLLGEDDAEAADLLQNHGDLLRQAFPDHYSAIAAGINNFDFEAALAALTTARQFSQP

SEQ ID NO: 12864 - protein, 655 aa, Fremyella diplosiphon
MNIAACDLLGLPRQQLKGQALSNFITAEFTRQPKSVGFPSGKSLMGELLVVSAAQTPREMEYTLTPNVLPHCHLLLLRDISQRRESMQAELRQQQQRVELFSEVTLKIRQSLQLKEILHTTVTEVQRILQADRVLIYHVLPDGTGKTISESVLPDYPTLMDLEFPQEVFPQEYQQLYAQGRVRAIADVHDPTAGLAECLVEFVDQFHIKAKLIVPIVQNLNANSQNQLWGLLIAHQCDSVRQWVDFELELMQQLADQISIALSQAQLLGRLEEVVAARTAELQEEINVRMQAEAALRQSEEQLRLITNALPVLIAYVDEQQQYRFNNQAYQDWLGQSPQKIYGSHLRQVWGEDCYQRMEVYVKTALSGQAVNYENDIVLRDGSWRAVDVTYIPHLDDENMVKGFFALSSDISDRKAIERMKDEFISIISHELRTPLTSLHSALKILATGRLGTLSTEGQQMLGIADDSTERLVRLVNNVLDLQRIESGKVIMECQACNAANLMIQAAEAMQAMAQQQEVTLVKQPQDISVWADADYILQALTNLLSNAIKFSSPGGTVWLTVEQEKNSSNNPKEVVFRVRDEGQGIPADQLERIFERFQQVDSSDSRKKGGTGLGLTICRKIIEQHNGRIWAESTPGCGSTFAFTLPTLEYANIQ

SEQ ID NO: 12865 - protein, 424 aa, Adiantum capillus-veneris
DLEPYLGLHYPATDIPQASRFLFMKNRVRMICDCRAIPVKVIQDRELRQPLSLAGSTLRAPHGCHSQYMANMGSAASLVMAVLVNDNEEGSSSRSHKPKPRKLWGLVVCHHTNPRAVAFSLRSACEFLMQVFGLQLNMEVELAAQMREKHILRTQTLLCDMLLRDAPIGIVSESPNIMDLVKCDGAALYYGKKFWLLGTTPTEPQIRDLAEWLLDVHRDSTGLSTDSLADAGYPGAAALGDAVCGMAAAKITSRDFLFWFRSHTAKEIKWGGAKHDPEDRDDGRKMHPRSSFKAFLEVVKRRSLPWEDVEMDAIHSLQLILRGSFQDIDDSDTKTMIHARLNDLKLQGMDELSTVANEMVRLIETATAPIFAVDAGGFINGWNAKIAELTGLSVEEAMNRSLVGDLVVEDSAEIVERLLCLALQ

SEQ ID NO: 12866 - protein, 933 aa, Escherichia coli O157:H7 EDL933
MFRALALVLWLLIAFSSVFYIVNALHQRESEIRQEFNLSSDQAQRFIQRTSDVMKELKYIAENRLSAENGVLSPRGRETQADVPAFEPLFADSDCSAMSNTWRGSLESLAWFMRYWRDNFSAAYDLNRVFLIGSDNLCMANFGLRDMPVERDTALKALHERINKYRNAPQDDSGSNLYWISEGPRPGVGYFYALTPVYLANRLQALLGVEQTIRMENFFLPGTLPMGVTILDENGHTLISLTGPESKIKADPRWMQERSWFGYTEGFRELVLKKNLPPSSLSIVYSVPVDKVLERIRMLILNAILLNVLAGAALFTLARMYERRIFIPAESDALRLEEHEQFNRKIVASAPVGICILRTADGVNILSNELAHTYLNMLTHEDRQRLTQIICGQQVNFVDVLTSNNTNLQISFVHSRYRNENVAICVLVDVSSRVKMEESLQEMAQAAEQASQSKSMFLATVSHELRTPLYGIIGNLDLLQTKELPKGVDRLVTAMNNSSSLLLKIISDILDFSKIESEQLMIEPREFSPREVMNHITANYLPLVVRKQLGLYCFIEPDVPVALNGDPMRLQQVISNLLSNAIKFTDTGCIVLHVRADGDYLSIRVRDTGVGIPAKEVVRLFDPFFQVGTGVQRNFQGTGLGLAICEKLISMMDGDISVDSEPGMGSQFTVRIPLYGAQYPQKKGVEGLSGKRCWLAVRNASLCQFLETSLQRSGIVVTTYEGQEPTPEDVLITDEVVSKKWQGRAVVTFCRRHIGIPLEKAPGEWVHSVAAPHELPALLARIYLIEMESDDPANALPSTDKAVSDNDDMMILVVDDHPINRRLLADQLGSLGYQCKTANDGVDALNVLSKNHIDIVLSDVNMPNMDGYRLTQRIRQLGLTLPVIGVTANALAEEKQRCLESGMDSCLSKPVTLDVIKQTLTVYAERVRKSRES

SEQ ID NO: 12867 - protein, 1209 aa, Xylella fastidiosa Dixon
MRCLKRVRGGLLTALLVFVSLLTATAAVPEMPRFRVLDATSGLPSNVVRAMLQDAAGYLWLATSDGLARYDGTAFKVWRHDPNDPGSLPGDSVLALYIDVQDRIWVLSENAGLAVLDAQRRRFIQIPVGSVAKTDALHTLTGHGDAIWLSDLHASVIRIDSAGALTRYALADVSPTLKDTPVVALTFDANGRLWVGTPDGLLYFEAGRLHLAPPPLDKASIHSIAAVGSRLWVGSTDGVYLQDAEGRWRAPNWGPMFAFGNLLLSVADAGDGEFWLGSERGLWRTRQERPPVQIPLSDMHHGVSTVSSLWRDTSGGLWVPVYGRGLGYLRQDWKRMAVVRPSDGGESSYCNVAPAAYSGGLWQLNRIGELMHLNTSTGELVHTGWQRHELRGVNITTTLEDSRGRLWLANMQNGLSRLDLKNGQWREWAAHGDDAVPLYGPISWIVEMPDSSLWLEALGVLQQRDLESGRVLNQIVPGSHGLDGSRVEQIGLGPDGRLWLAAGSGVYAWESQRRMFVPIPDLTGTRAYSFVPVGGNEVWVHRLRGLEQWRHSSHGWKRVALVGPQHGLPAMESLGMQHDAQGRIWLSTRRGLWRIDNTDELQVRNFGLRDGLGTQEFAEACLWMAPDGVLVGGTTDGYLMLFDTAMPDPAPFVPQLRMETVSVIRAGRRIDFPVDRPFELLPNDRQLIVGARLLSFGDPLSNRYSYWLKGFDTGWIDQGSSGTREFSSLPPADYTLLIQGTDPMGNLSRIHLVTFRVLPPWWRSAWGMSVLTGSGLLLLWGVSWNYHRRLRRRARLQLEQHQREVAERASLAKTQFLATLGHEVRTPMTGVLGMSELLLETPLDTRQHGYATSIQAAGKHLLRLVNDALDLAKIEAGKLSLERRDFDFHALLEQVVAMIRPMVERKGLRFVYRLDPEVPQYVHGDADRLQQILLNLLINATKFTEHGEVVLQVAPGQEQACLGVRIDVVDTGPGLSEEQCQRLFRRFEQVNGASTAARYGGSGLGLAICRELATVMEGEIHVDSELGKGTCFRVLLPLPWVLAVQPAVAVMDMEPSPCSNPLHLLLIEDDPTVAEVIVELLRVRGHRVTHALHGLEALVEVTLTRFDACLCDLDLPGLDGAGLIVQLRAQGQSFPIVVVTARTDADAQRQAFQVGCDAFLRKPVTGEMLEQVLTQVLSAPRQEVDVHTPKKRNGMGRPRISDSIKRDLG

SEQ ID NO: 12868 - protein, 1190 aa, Xylella fastidiosa Ann-1
MRCLKRVRGGLLTALLVFVSLLTATAAVPEMPRFRVLDATSGLPSNVVRAMLQDAAGYLWLATSDGLARYDGTAFKVWRHDPNDPGSLPGDSVLALYIDVQDRIWVLSENAGLAVLDAQRRRFIQIPVGSVAKTDALHTLTGHGDAIWLSDLHASVIRIDSAGALTRYALADVSPTLKDTPVVALTFDANGRLWVGTPDGLLYFEAGRLHLAPPPLDKASIHSIAAVGSRLWVGSTDGVYLQDAEGRWRVPNWGPMFAFGNLLLSVADAGDGEFWLGSERGLWRTRQERPPVQIPLSDMHHGVSTVSSLWRDTSGGLWVPVYGRGLGYLRQDWKRMAVVRPSDSGESAYCNVAPAAYSGGLWQLNRIGELMHLNTSTGELVHTGWQRHELRGVNITTTLEDSRGRLWLANMQNGLSRLDLKNGQWREWAAHGDDAVPLYGPISWIVEMPDSSLWLEALGVLQQRDLESGHVLNQIVPGSHGVDGSRVEQIGLGPDGRLWLAAGSGVYAWESQRRMFVPIPDLTGTRAYSFVPVGGNEVWVHRLRGLEQWRHSSHGWKRIALVGPQHGLPAMESLGMQHDAQGRIWLSTRRGLWRIDNTDELQVRNFGLRDGLGTQEFAEACLWMAPDGVLVGGTTDGYLMLFDTAMPDPAPFVPQLRMETVSVIRAGRRIDLPVDQPFELLPNDRQLIVGARLLSFGDPLSNRYSYWLKGFDTGWIDQGSSGTREFSSLPPADYTLLIQGTDPMGNLSRIHLVTFRVLPPWWRSAWGMSVLTGSGLLLLWGVAWNYHRRLRRRARLQLEQHQREVAERASLAKTQFLATLGHEVRTPMTGVLGMSELLLETPLDTRQHGYATSIQAAGKHLLRLVNDALDLAKIEAGKLSLERRDFDFHALLEQVVAMIRPMVERKGLRFVYRLDPEVPQYVHGDADRLQQILLNLLINATKFTEHGEVVLQVAPGQEQACLGVRIDVADTGPGLSEEQCQRLFRRFEQVNGASTVARYGGSGLGLAICRELATVMEGEIHVDSELGKGTCFRVLLPLPWVLAVQPEVAVMDMEPSPCSNPLHLLLIEDDPTVAEVIVELLRVRGHRVTHALHGLEALVEVTLTRFDVCLCDLDLPGLDGAGLIVQLRAQGQSFPIVVVTARTDADAQRQAFHVGCDAFLRKPVTGEMLEQVLTQVLSAPRQDADVDTPT

SEQ ID NO: 12869 - protein, 1202 aa, Magnetococcus sp. MC-1
MSMHRLLLRQLRRSMGLVDESAVDALLQELDALPAEQISPASVKALHGLKTLLQRVEQTYEHNERDLLLRNRSLHLSSEELSDANERLRRETARQEQLLSTLRQTANHLLEADQKPTLGEDEASLEQLSDLMSRLALERSEFRRHLERQKFALDQHAIVSITDTKGVILYANDRFCQISGYTQDEILGQAHNLVNSGYHDSGFFEVMWRTIARGEVWNGEVCNKAKDGRLYWVSATIVPFLDERGKPIQYIAIRTDITRQKALEEKIEDNRRFLQSISDNIGEGVFALDVQGFCTFLNPEAERLLGWTQDELAGRSFHDTVHYQDAEGMPMNEADCPVHDAVDRGVDYRSDEDVFIHRDGGIFPVNISVVPVREDGVVTGAVGVFQNITESKQIQRQLKQSEERLQIALDASNTGFWDWDPLQDRAYFSDQWLSMVGYQQGDILNNSTGWLDLLHGEDLPHVERELEAHLNGQRKNFEVEFRMRHKQGHWVWILSSGRVIERDEEKRALRMAGIHKDISDRKRVEDELKKAMLDAESANRSKSEFLANMSHEIRTPMNGVVGMMELLSNTELTPEQQSHMRTARNSAESLLTIINDILDFSKIEAGKLELEEIAFDLAELVEDVTALLAQRVDSEKLELLHNAPADLPMQVAGDPTRLRQVLVNLVGNAVKFTPEGEVEVRMTVERQDADTVTVLTEVRDTGIGIDEAVRPRLFRMFTQADGSTTRRFGGTGLGLAISKQLVELMGGEVGFSSVMGQGSTFWFRITFPIVAKAQAVAGGVDSLQGLRALVVDDNATNRNLLGRYLSNWGVTHLECASGKQALEKIADAAKFGLSFDLAILDLLMPGMDGLALAERITQMVQDKQIKPLRMVLLTSAHARREELEQAGVVAALSKPIRQAQLRALLGQVMRGERVVGGLVERISQNNMSATFDAAVLLVEDHPINQQVARGMLAGLGCRVEIANDGHEGVRLFARHRYDLVLMDIQMPGMDGYETTDAIRQMERSERWPRTPIVALTANAMEQDRDRCLAADMDDYLSKPISLDRLKAAMSKWLKTIAKSEEPEEVLGGAVGQPESPLGAVATGGEDDSVVDLRTLAALKSSMAVIEGGFLQILQSYLQSTPKALESIEQGMIDGDAARVRGAAHNLKSTSLSLGAITLGKVAQEIETRGKEVKLDNMAPLLARAKACYALVAARLEAEQANL

SEQ ID NO: 12870 - protein, 927 aa, Magnetococcus sp. MC-1
MSLIEPKILIVDDRPANSMALRVSLSKLDVQIIEAPSGNDALGLMVEHDFALMLLDVNMPGMDGYEVAKIARSWEQTKDIPIIFMTAIHHDDAHRATGYQLGAADYIDKPVDTTILLSKVKVFVDLYRSRQKLLEANRQLRESISLRRGVEEQLRMTQFAIDRLGDMVFLISPQGKIVYVNEKACQKLQYEKEQLLQLSIEQIGCGHIETSWKEHWLKLKSYQTLTFQSHLRTKNSIQFPVEIQSNYVKTSSHEYNYAFIRDITDRVHQEERLRLLSRAVEYGPASIVITDAEGHIQYVNPKFEKITGYGAEEVIGNKPSLLKSGQTEPAIYDALWDSISRGHEWRGELINKRKDGSLYWEMAHISPVLSKTSGKITHFVGIKEDITSLKETEAHLELTQKKAEAASLAKSEFLATMSHEIRTPMNAILGMTELLGETQLSIEQRGFLSVCRSAGENLLQIINDILDISKVESGGLELQHVPFNLRRIVYDAGEVIRFRSHEKGLHQLIFIDESVPEWLLGDPARIRQILINFLGNAIKFTEAGTIATVVSTTAGKGSQVEIVFRVIDTGIGIPESKQSVVFDAFKQLDSSTQRRYGGTGLGLTISKKLADLMGGQLGLKSQEGHGSTFTLSLRLSRSTGPSKSSAQPAPIFAGMHILIWHTHPIKRMNIEETLIRYGATLHHCSEVDPFLRCAQANHAATPIDLLFIHFDHADVDVLSEIKRLRAVSPWEKIPVLIYGRCHDRSLPAKMLQQGVNFLPEPVFPDVLLDELCRITQKSQQPEVDSKPSRASLRVLLVDDSEDNLLLASTFLKSTPHIVQTATNGKQAVERFTQTSPRFDLILMDIQMPEMDGFQATAAIRAWEKAHKKPPCPIIALTAFAMSDDESKCLSAGFTGYVSKPISKARLLEAMEACTAAKAPTQAEGQVD

SEQ ID NO: 12871 - protein, 837 aa, Magnetococcus sp. MC-1
MKRCFLVNSNDTAQSQPADLDTPATEASLYAQCYQNLLNVGQQGLCLLGRDRLIVHTNKTMADWLRVSPEALYQTPFSQWVDLNDREKLEAFFIDVDQDGPSAITLNLVPDLGRNGRSVRVMGAGLSDVGGVAGMGLALVDLSDQRAMLQQLNHELTTYRNIANFTHDWESWFDAQGRVQWINPAVQRVTGYSIAACMEMATYPVDLFHAQDRSTLERLMQEGRAGAVAHDVSLRIKHREGDLRWVSLSLQPMLTNAGEKLGFRTSIRDISERREAEQALEAAKRSAETASKAKSRFLSTMSHEIRTPMTAILGVAELMSGTHLDRVQREHVSIIRRSGDALLELIDDILVISQNEGAQEGEKQVVFDVDHLLESVMDMASYRATEKGIKLLSHVAALVPVRVMGDPVRLRQVLINLVGNAIKFSEKGEVVIQVRPGPRNGPERSDYRFSVSDNGIGIPMEKREAIFDAFSQVDETESRRFGGTGLGLTICRRLVNLMGGQLELLFSEPGVGSTFAFDIPLQPAMEQANPANLEYDHTTLKERRVVVFSRGKNLRTMVQEMLTPEGVHCTAVSNHDELVQLMEVVHDVERDGQGPLCDMLLLDAEKPFANMDVVSYASELKKRKIFRNLHFVILGLDPGQKERFALCQAGINYVSPPLKRRVILKTLAELFVEPGYRHLDDACRNLMHATHKRELKEGGALRILLAEDDPDSSYVIQNFLKDTLCHLEVVTDGQQALQRFQEGMTDPLGAAMEFDLVIMDTQMPVMDGYTAVHRIRSWERIQQRAPVKILAISAHSGQEGRLTSLRNGCDDHLNKPLTQRDLLAHIDALCHRLPKTG

SEQ ID NO: 12872 - protein, 1100 aa, Magnetococcus sp. MC-1
MSCCHAHYGGSRLISKLNMTTKRWIMSRLVKWLLVLVLLPVVADAQQGERPWPVTVAVLQDFPPLYSLDTHGKPQGLAIDLLQQVAQQAQLKITYKVVQNWGQAMQLVRQGEADFVPGIGITEVRRAEFLFSHPMESVPVSCFVRKQNRSIQGLQDLPGYSVGVIAQSAAHTRLSQIPNMRLKLYQSIDEAFFQLLAGELDAFVTSRPVMEKKARKIAPQEMIKVVGEPLMDLKRGYLLSTQNRALLQRIDPIIQHLTRSARYGEIYARWYGTAAPFWSVEQVFWIMSALLVAVLVVGGLYRVFAIARYNRELQRSIAAQQQAEQRLQRSEERFALAMRGSNDGLWDWDIPTDRVTFSPRWLEMLGYQGAPQDADMRHWQAHIHPDDQPRVEQALGRFLSGDQQHYHSEYRMRHKDGHTIAVLSRAFVLRDATGRAIRMVGTHADITALKEQARRLRESETRFRAYFEQSVVGMVMASLDRHFIDANHAFCHMLGYSRGELLKMNFPQITYPDDLERDLVQFEQLRSGQVSAFEMEKRYLHRDGHPVWGLLSATTVKDELGQASYLIAQVQNIDTQKKALEQLRQSESMMRGYFELGLIGMATTTAQHGWVQINQRLCEILGYPEMALRQKSWAEITHPQDRQADEVAIERLRKGLSEGYALEKRFIRQDGAFIYASISAGCLRKEGGEIGHFLTLVQDITARKRMELALQEQKEQAEAANRAKSTFLAVMSHEIRTPMNAILGMAELLRESDLTSRQHWCVETLNRSGESLLSLINDILDLSKIEAERLTLEHVVFDLVQLVGDVCSLFGYEAQSKGLALKHHIAPTLPRYVVGDPIRLRQIMMNLVGNAVKFTKQGHVSVELNPLADGRLSFVIRDTGIGVSVEQQRNIFKPFTQADSSITREHGGTGLGLTICMRLVALMGGEMQLESTLGEGSCFHFELELPAAPPGAESVVGTPRTLADVASALRLESAAHHNDPILVVDDAEDNRMLVNVFLKKTRYTLVMAENGLEAVNAFKQQPFALVLMDIQMPLMDGYEATRQIRQWEQQKGSGRTPIIALTAHALSEESQQILEAGCDIHLTKPIRKSKLLEVLAEVLA

SEQ ID NO: 12873 - protein, 1128 aa, Magnetococcus sp. MC-1
MDFYAHFFMSPAQRGVAVYEGIYDPLLVTLSVLIAVFAAYTAFQLSSRLRDSENAKVLLAWRAGGALALGMGIWAMHFVGMLAFRLECGVAYDLWITFISILPGFGAAWLALGVLGRATLSWPLLVSRGVVMGAGIGTLHYTGMAALQMDAILRYDPWLFMLSVVVAILLAVVALSVKSFLQYRTALGPGHLSSLIGGVIMGGSISGMHYTAMEAAYFIPQGETGVAVYNSPLPLAISVAVATLTLLLIALGSALASRRIAHSRRWMNSILQNMSQGFVMMDLQGRILEANPALLSWVALSPSQVQGEPFQKLLSVQDHQPLQLALQQLLEGQPVRCALSLCCLDAPPIPVQMHGNTHRDEEGQIMGIYAILTDIRAEQAAAKALRDARDAAEQASQAKGEFLANMSHEIRTPMNAILGMTHLCLQTDLNERQRHFLEKVYAAGSALLRILNDILDFSKIEAGSLEIEKTSLKMDEVLASLADLMSIRADEKKIELLFHRDANLPEILVGDPLRLGQVLINLVGNALKFTEQGEVVVRIEVIQSAERQVKVRFSVKDTGIGLTNEQMSNIFQSFKQADSSTTRRYGGTGLGLAISHRLVQLMGGVLKVESTPGQGSCFSFTLDLGVTQPTSLLSRLQLPSGLQVLVVDDNVLSQHILHDILQGFGCQVQVASSGEEALLLLAQLEGPFDFILMDWQMPGLNGIETAQRIYQKFAKVEMPTIIMVTAHGREEVMQKAREAKLDGFLMKPVNPSMLLEVILQLQRKRHGTGPLLESRSEQKNFRIEVPNLQGKHILLAEDNDLNVEVVQEMLSPSGVTLSCVSNGLRAVEAVQKRSYDLVLMDLQMPVMDGREATKQILGLGLDQPPPIIALTANALSGDRERCMALGMVDHIAKPLVPELFYATIKRHLGDVTTRVVRSVAPAPELPSGAPPGVDLEQAWLGLNRNTLLLNKLLHGVCDQWPEQMRLLEGWLADPQSHHLAINQAHGLRGLASQLRMEKVATLAGRLEQGLKQGEANMEACLAPLQQAVMVVVNWLKENLDTPPPEPPRRDATALDMDKAALKTQVAEIMIHLDQDLAEGLRQLREVLNRMPSGEPEALLREALNHAEGFDVPEAKAALMALQAMLQKG

SEQ ID NO: 12874 - protein, 969 aa, Magnetococcus sp. MC-1
MSVHSHDDVGHFDRKLAVSFGAVVLLVMLTVSAVSWYAFDAIMKDQEARLARIIGSVVGEAVGRVSFSGKHHTRLLVKDLIAKNPQFSHIGVINLEDQIIAHSNDQLNDRPMLWPQGMSLQKALTEPNQVYHFSLFGRPTVRELFLPYHSGFNNRLAGIIHIGIRQDATTRALKSGFLSLLSMIALLTMGAMILVHRLSKRYSRPVKRLANQMAALLEHAPMLIAIQKGQQQPHVTSRLWHQFYRTHPLPDQPPLHPLLPTKQEDLTKINSSAQELNVTLDGHEYHFLFTRFILSEELQEHAQPQICTIALDISDHKLVERQLSESENRFHSLVSNLPGAVYRCNLDSAWSMLFISDGIERISGYPKESFIHNLERSFASIIHKDDLIMVEQKVFEGVNLNRSYHMEYRIIHQDGATRWVYEEGRAHFGKHGQALWLDGVIFDITDRKQMEHTLHQNRTRLQAAVVASRAGTFYYTIENDQNSWDARMLEIYGLEASQFDNNYAAWVRCIHPEDQHSTEQAFFRALSASYHTQTYDIEHRIVRPDGSIHHLRTQAWIQRDSQGKAEQVSGLVFDITEQKEVETTLRLAREQAESANRAKSDFLAAMSHEIRTPMNAVIGMGEVLLETKLDQEQRHYIETLQHAGEALLDLINAILDLSKIESGRMELVEQDFDLHKMVVETCQLFQVQCRKQGIELNLNWEESNPTYIHGDQARIRQILFNLIGNAVKFTDEGSVTVEIRSIEQEKTLLFKITDSGIGIPADKQETIFQKFSQADSSLSRRHGGSGLGLTICRHLVEHMKGRIWVDSEEGQGSCFSFTLPCRPTAPKAEIISNPHDAQQKQSKKARILLVEDSKDNQILIRTYLKREPHSLVVAWDGEEALTRFNEDGPFDLIFMDMQMPIMDGYAATAHIRALEQARHLTATPIVALTAHALQGDEQRSLQAGCNAHLTKPIRKAHLLAAIRDHANPS

SEQ ID NO: 12875 - protein, 1691 aa, Magnetococcus sp. MC-1
MVDSNDKLVNILLVEDSKSFAALLQGQIQKRLGFRVVWADSLAQTRQHLEQAKHPFLLAILDLHLPDGPHGEVVDLVLQHNLPAIVLTGDKQVEMRTQLFKKGVLDYFVKDNRSVIDAVIHSVLRVARNRHLTMMVVDDSRSARAVLGQFLQRYGFQVRLAQDGAEAWALLQETPVDLVVTDYEMPNLNGVALTAKLRSRYSRDEMGIMGLSSAGQSELAVDFIKAGANDYINKPYEPEELISRVYQMAESVERYGELNQMVARHKAVLDNAQDAIITTDQQGDVLSYNPAAERLFGYPRQNVMGVSLTERLIPESLQNKQAPSLTNAMHGALEMVPNKGRLEAIGKRIDGELIDLQVALSAMPQQGGELHYTAFIQDITDKKQLLKSLEETLSAAESASKAKSAFIANMSHEIRTPMNAVLGFTDLALRGDLSPKVRDYLEKTKNASHSLMGIINDILDFSKMDVGRLELDPVKFDLHFLLERLADLFSKQAADHAVDLVFLAPLNFNQVLYGDAMRLEQIFINLIRNAVKFTKNGFITVRAQPELLEGHRVRLTCSVSDSGIGIDPEQLPHLFAPFVQADSSTTRRFGGTGLGLSIVKRLVSLMDGSVWAESEPGKGSQFHFEILVDLYAEDRRNRSLLPDVLWGERVLVVDDNPDSREHLQALLSALSLSPSLCATPAQARALLLSEQGGPQPFRYLLVDWGLPGKDGVVAVIEMRAMLKAELPEGLHPRIILLSAFGQDEIKNQAERAGVDYCLDKPISRDRLVTALSGGWHDQEQHKDRRKVQQLAAESEIGRLVGGAYLLLVEDNPINQQVAAELLERVGLVVDIAENGQQALDRLARFEYDLVLMDLHMPVMDGSEAMQRIRAQEAWRSLPVLALSTGTGEEEQLDLQDLGFQGFLHKPIRPERLYGALKRWITRPTLDASWRIVARGDEVPLLRGVDPEIGINRLAGNQELYVVLLSRFFQLYAEVLPSMQQQLQRGQWAVLGRQIHGLRNRAAALGAVELAKAVVALELAMADGHEAMIEAAFQSFSHRLEQVLQGIASHQVEQKGVALSSNLLHDDLPELVVDLHQVGPLLDQLAGRLKYHSIDAAALLQALGELLKETPLATAYWTVCKQVDRYNFYEALQSFLLIAKALKYPIIDQNVRCPASVKERILIVDDQPDNVDVLKDILEDYERMAALSGPEALMLAQCDPAPDMVLLDIMMPEMNGYEVCRRLKAMEATQEIPVIFVSAKKEVVDEAEGFLIGGVDYITKPYHGEVVRRRIHSQLELKRHRERLEKQVRMRTAELELATREAELRKDEAEAGNRAKSEFLAIMSHEIRTPLNAILGTHELLSESALSSEQQRLMEISRNAGELLLNLVNETLDLAKIEAGKLDLEYTIFDLPRLVEEITQIKRVAAEHKGVRLESEMALEVPRFVMGDPDRLRQILVNLLSNAIKFTNSGTVSLQMSRGVADRTFFKVSDTGVGIAAHSMEKIFHPFTQADTSTTRKFGGTGLGLTICKHLCEAMGGDIQVESQVGVGSTFSVNLPLPRAESSMDEPSAPEEVIVEQVQAPLRILAVDDAEDNRKLVQAFLAKSGHHLDLCEDGAQALDRFKREHYDLVLMDLLMPVLDGYGATRKIRQWEQQQHRLPTPIIALTALSVRRDLDKALACGCDFYLTKPFRKHQLLDAIYRIHGMLAGSIHQG

SEQ ID NO: 12876 - protein, 707 aa, Magnetococcus sp. MC-1
MEELLSSMLDYPELRYAMVVDVNGKVLSHSDKSKAGKFLADPLSLKLIDAPNTLQVLLQSKQVIDVAMPILTNQQLVGWARVSLSQNKSGQELLHVTYKGFLYTLFAIVVGIVFAYFMARGLTKDLYHLLHVANTTRLGQLNHRVQIKRHDEIGLLSNGFNQMLGVLEQEEQQLRLIQQSLTQSNQALRQSEEKFRRLVESLSSEYFLYSHNTEGVFEYVSPSIRTVLGYDPQEFMTHYATYFTENPINMQAVNHTEASIRGEQQASYVIEIFNKQGQAVRLDVLEYPIFDKDGRVIAVEGLAHDVTERHRAEFELLTAKEQAEAANRTKSEFLAMMSHEIRTPMNSILGMAELLSESPLTPEQQGYLKIQRRAGHGLLELINDILDLSKLEAGRIELYIQPFNLPELLQSVVDLLENLARERGLALRLERMEEIPTLCQGDRARLRQIMVNLVGNAIKFTHDGSVKISVEKSSDDATNLLFHVIDSGIGIAEKDQSSVFQRFTQIDSSNSRFYGGSGLGLAITHHLVELMGGKIWLKSALGEGSCFTFTLPLPPVQIDEPALAATHDEEAPMVATESCCATKPLRILLAEDSPDNELLIRIFLRDSPHSLCCVKNGLEAYQQVQKENFDLILMDIQMPVMGGDEAIIKIRAWEQSQQCDPTIIIALTAHAMSEHQKHYLTLGFDAFLSKPINKKTLLNALAQYGQS

SEQ ID NO: 12877 - protein, 1070 aa, Magnetococcus sp. MC-1
MPMGGGMGIQRRVLGLIAFFLLVAFSAVEVRSYYQLKAYAEESLRTQAEIVQGLLMSIRRVYHHAFLDSHIPLSSDTVPLLPAHAINRISKEFPTWFKGGVSFNNVSDKPRNEQQRAKGIEQQAMAHFRQNPEEKRWFTQYQEENGEAYYHYATPIWIEPYCMQCHGAKEKAPAAIQKMYSTGFDYKIGDLRGVVSIKLPAAHINRLVKQQFLENSLIHLLIFGSAFFAISFFLRRDVGQPLEAISHAVRKFGQTRELPKFEEQPGEFQILLHTLTDMASTVVLRESEVQERQLQIELLLDSAGEGIYAIDTQGICIQCNPAAVALLGYASSTELVGRDIHTLCHRADEQGTHMPHSDCPGCKVIASGEPVHLAQEYLQRQDGSVFPVEMRIHPMHQGGRVVGAVVLFDDISRRLDAEQKLRLSERHFRTLVQALPGTFYKCAPDPLCTMYSLGDNIAELTGYAADSFIENHERSFSSVVHAEDWPRVREALDQALAQGVVYHLEYRVNHTDGKPRWVMDRGQAVYDEAGRAEVLYGVLLDMTERKQYEQRLESARQQADAGNRAKSEFLAVMSHEIRTPLNAIMGMGDLLGETALSPVQRHYLSISQHAGETLVELIEDILDLSRIEVGELELEPAPFEVEALVEEVCEVVTSSAHDKGLILLMRIDPLLPPVLIGDKKRLRQILFNLLFNAVKFTKHGEVMLDIRHDAARSAAGAVLLQVRDTGVGMAEEMIERVFEPFTQGDSTITRQYGGSGLGLTICKRLVSKMGGDIQLESALGRGTTATVQLVLPVGRHGMVAAVRQQVPLHGANLLLVDDNANNREIYTELLQQEGARVVGCATGETAMQQVSEANFDLAVLDFHMPSEDGLTLAGRIQEMVPNMPLLMLSSDQQPAAAARANSMGVTFLLKPVKRQLLRQTIAQLMQSGKGVKDAPVLGQGVESGPQKGLKILLAEDVPENALLIEAYLEETGHQISVVGDGQQAFERFQEEPFDLVLMDLQMPVMNGLQATRHIRAWEQAQGVKRTPILALTAHAMKEDESKSLEAGCDGHLTKPIRKQVFLQKLQGFLG

SEQ ID NO: 12878 - protein, 636 aa, Vigna radiata
MMESCDCIDTQYPPDELLVKYQYISDVLIALAYFSIPVELIYFVQKSAFFPYRWVLMQFGAFIVLCGATHFINLWTFSPHSKAVAVVMTIAKVSCAIVSCATALMLVHIIPDLLSVKTRELFLKNKAEELDREMGLILTQEETGRHVRMLTHEIRSTLDRHTILKTTLVELGRTLGLEECALWMPSRNGLNLQLSHTLTYHVQVGSTVQTNNPIVNEVFNSPRAMRIPPTCPLARIRPLVGRYVPPEVVAVRVPLLNLSNFQINDWPDISAKNYAIMVLILPTDSVRRWRDHELELVDVVADQVAVALSHAAILEESMRARDQLMEQNVALDLARREAEMAIHARNDFLAVMNHEMRTPMHAIIALSSLLLETELTPEQRVMIETVLKSSNVLATLINDVLDLSRLEDGSLELEMGKFNLHGVLGEIVELIKPIASVKKLPITLILAPDLPTHAIGDEKRLTQTLLNVVGNAVKFTKEGYVSIRASVAKPESLQDWRPPEFYPTSSDGHFYIRVQVKDSGCGIPPQDIPHLFTKFAQSRSGPARPSSGAGLGLAICKRFVNLMGGHIWIESEGPGKGSTATFIVKLGICGNPDPSDHQATTRSQAYSGSGGLARFKPFIKDEDDSGFSTRRNQRSF

SEQ ID NO: 12879 - protein, 1197 aa, Xylella fastidiosa 9a5c
MRGALLTALLVLVSLLTATAAVPEMPRFRVLDATSGLPSNVVRAMLQDAAGYLWLATSDGLARYDGTAFKVWRHDPNDSGSLPGDSVLALYIDVQDRIWVLSENAGLAVLDAQRRRFIQVPVGSVAKTDALHTLTGHGDAIWLSDLHASVIRIDSAGALTRYALADVSPTLKDTPVVALTFDANGRLWVGTPDGLLYFEAGRLHLAPPPLDKASIHSIAAVGSRLWVGSTDGVYLQDAEGRWRAPNWGPMFASGNLLLSVADAGDGEFWLGSERGLWRTRQERPPVQIPLSDMHHGVSTVSSLWRDTSGGLWVPVYGRGLGYLRQDWKRMAVVRPSDGGESAYCNVAPAAYSGGLWQLNRIGELMHLNTSTGELVHTGWQRHELRGMNITTTLEDSRGRLWLANMQNGLSRLDLKNGQWREWAAHEDDAVPLYGPISWIVEMPDSSLWLEALGVLQQRDLESGRVLNQIVPGSHGLDGSRVEQIGLGPDGRLWLAAGSGVYAWESQRRMFVPISDLTGTRAYSFVPVGGNEVWVHRLRGLEQWRHSSHGWKRVALVGPQHGLPAMESLGMQHDAQGRIWLSTRRGLWRIDNTDELQVRNFGLRDGLGTQEFAEACLWMAPDGVLVGGTTDGYLMLFDTAMPDPAPFVPQLRMETVSVIRAGRRIDLPVDQPFELLPNDRQLIVGARLLSFGDPLSNRYSYWLKGFDTGWIDQGSSGTREFSSLPPADYTLLIQGTDPMGNLSRIHLVTFRVLPPWWRSAWGMSVLTGSGLLLLWGVAWNYHRRLRRRACLQLEQHQREVAERASLAKTQFLATLGHEVRTPMTGVLGMSELLLETPLDTRQHGYATSIQAAGKHLLRLVNDALDLAKIEAGKLSLERRDFDFHALLEQVVAMIRPMVERKGLRFVYRLDPEVPQYVHGDTDRLQQILLNLLINATKFTEHGEVVLQVAPGQEQACLGVRIDVADTGPGLSEEQCQRLFRRFEQVNGASTAARYGGSGLGLAICRELATVMEGEIHVDSELGKGTCFRVLLPLPWVLAVQHAVAVMDAEPSPCSNPLHLLLIEDDPTVAEVIVELLRVRGHRVTHALHGLEALVEVTLTRFDACLCDLDLPGLDGAGLIVQLRAQGQFFPIVVVTARTDADAQRQALQVGCDAFLRKPVTGEMLEQVLTQVLSAPRQEADVDTPKKGMEWEGPGSVTR

SEQ ID NO: 12880 - protein, 1190 aa, Xylella fastidiosa Temecula1
MRCLKRVRGGLLTALLVFVSLLTATAAVPEMPRFRVLDATSGLPSNVVRAMLQDAAGYLWLATSDGLARYDGTAFKVWRHDPNDPGSLPGDSVLALYIDVQDRIWVLSENAGLAVLDAQRRRFIQIPVGSVAKTDALHTLTGHGDAIWLSDLHASVIRIDSAGALTRYALADVSPTLKDTPVVALTFDANGRLWVGTPDGLLYFEAGRLHLAPPPLDKTSIHSIAAVGSRLWVGSTDGVYLQDAEGRWRAPNWGPMFAFGNLLLSVADAGDGEFWLGSERGLWRTRQERPPVQIPLSDMHHGVSTVSSLWRDTSGGLWVPVYGRGLGYLRQDWKRMAVVRPSDGGESAYCNVAPAAYSGGLWQLNRIGELMHLNTSTGELVHTGWQRHELRGVNITATLEDSRGRLWLANMQNGLSRLDLKNGQWREWAAHGDDAVPLYGPISWIVEMPDSSLWLEALGVLQQRDLESGRVLNQIVPGSHGLDGSRVEQIGLGPDGRLWLAAGSGVYAWESQRRMFVPIPDLTGTRAYSFVPVGGNEVWVHRLRGLEQWRHSSHGWKRVALVGPQHGLPAMESLGMQHDAQGRIWLSTRRGLWRIDNTDELQVRNFGLRDGLGTQEFAEACLWMAPDGVLVGGTTDGYLMLFDTAMPDPAPFVPQLRMETVSVIRAGHRIDLPVDQPFELLPNDRQLIVGARLLSFGDPLSNRYSYWLKGFDTGWIDQGSSGTREFSSLPPADYTLLIQGTDPMGNLSRIHLVTFRVLPPWWRSAWGMSVLTGSGLLLLWGVAWNYHRRLRRRARLQLEQHQREVAERASLAKTQFLATLGHEVRTPMTGVLGMSELLLETPLDTRQHGYATSIQAAGKHLLRLVNDALDLAKIEAGKLSLERRDFDFHALLEQVVAMIRPMVERKGLRFVYRLDPEVPQYVHGDADRLQQILLNLLINATKFTEHGEVVLQVAPGQEQACLGVRIDVADTGPGLSEEQCQRLFRRFEQVNGASTAARYGGSGLGLAICRELATVMEGEIHVDSELGKGTCFRVLLPLPWVLAVQPAVAVMDMEPSPCSNPLHLLLIEDDPTVAEVIVELLRARGHRVTHALHGLEALVEVTLTRFDACLCDLDLPGLDGAGLIVQLRAQGQSFPIVVVTARTDADAQRQAFHVGCDAFLRKPVTGEMLEQVLTQVLSAPRQDADVDTPT

SEQ ID NO: 12881 - protein, 241 aa, Magnetospirillum magnetotacticum
MMRSEGILNTGEKGLATAIKLTGEACSREPIHAPGTIQPHGVILALSIPSFGILAVSENLKDACPSVDGEAVAEWLPPAVMDGIRELIRSESHHEVTVMAELPDLGWREIHCFRGDDVIFVEFEVDCPESPVPQASILALKSAHVLGQFQSARSLTELGNALVWAVRDATGFERVLLYQFDDEGHGDVIAESLDETWEQSLMGLHFPASDIPSQARRLYLHVTARWVPVRDCDPVAIVPNF

SEQ ID NO: 12882 - protein, 1456 aa, Methanosarcina acetivorans C2A
MEEKLRTSGIDIIGDIPWGTHFCQFYQTKEDLMDVLVPYLKAGLENNEFCMWVTSQPLDVKDAKEALRRAVPDLDTYLEKGQIEIIPYTHWYVQEGSFDSERVLNGWIEKLNKALANGYDGLRLTGNTFWLEKKDWNDFVDYEEEVDRVIGNYRMIALCTYCLEKCNSTEIVDVVINHQFALIKREEKWEQIESSKRKRAEETALQAAKDWKYTFDAVPDLIAILDTEYRIVRANRAMAAKLGVTPEECVGLTCYHAIHGTDEPPSFCPHRQLLKDELEHTTEVCEDCLGGCFLVSVSPLYDSKGNLIGSVHVARDITERKQTEETLFEAYENIQVQSEELHAQAEELQAQNEELHAQAEELMKTNEALIESKKRFELLSEANAFLLSSKEPETTILTIAENVMRYLKCDVFFNYVFDRENGKLHLNACGGISAEAAKEIEWLDKGVAICGCVARDGCRIVAEDVQYNWDKRADLVRSMGIQAYACHPLHVGETTIGTLSFGTKSRKDFKEDELALMKTVADQVSVAIERKRAEEALSEAYENLQVQSEELQAQSEELNEAYELLRKSEKRFRTLAENSPDVIARFDRQNRHLYVNPAATEPYGRSPEEIIGKTNSELGMDPELVTFWEGHYQTVFASGKTEKMEFHYISPSGKEYYFSTRIVPEFVDGEVTSVLAISRDITDIKEAEIELKEARDNLKKLVEKRTLKLRKAYKLLKESEKGLAEAQKMSHLGNWNWNIVSNKLFWSDEIYRIFGFRPQEFCATYDSFLSYVHPEDRVLVDDAVKEAFNGKTYSIDHRIIRADGKERIVHEQGEVVFDRENVPVQMKGTVQDVTERKLAEKTLELASKYNRSLIEASLDPLVTIGADGKITDVNSSTETITGYSRDELIGTDFSDYFTEPEKAKEGYRHVFQKGLVRDYPLEVLHRDRHITHVLYNASVYRDEIGEVIGVFAAARDITELKKAEEKIKTLVSAVESSDDAVITMSLDGMITSWNKGAERVYGYPAEEILGKKMSVLEPANLKGEIKQLIERIKQGEGINHYETVRLKKDSTLVDISVALSPVFDDSGKIIALSAIARDITERKKAEEALRLSNIYNRSLLEASLDPLVTIGPDGKITDVNKATEQITGYSRGELIGTDFTNYFTEPEKAKEGYQQVFRKGAVLDYALEIQHRNGSVTPVLYNASIYRDESGQVIGVFAAARDVTELKKAEKILELKLEELARSKADLEQFAYVSSHDLQEPLRMIASYLQLLQRRYQGELDERADKYIYFAVDGASRMQSLINDLLEFSRVTTKAREFEPTDCESILNYVLSDLEVSIKENEATVSYDSLPEIMADGTQLTQVFQNLISNAIKFRSKEAPKIHVSAEKEDDKWRFSVQDNGIGINPKYSEKIFEVFKRLHKREEYPGTGIGLSICKKIIERHGGDIWVKSEPGRGSTFYFTLPASFEKIALNKIKE

SEQ ID NO: 12883 - protein, 820 aa, Leptospira interrogans serovar lai str. 56601
MRFLLLYIIFLFHYSLMAESLSPVSGKISQLQKDSSLSFFVYYFSSDSDENFRERIFAKDSSLSFQNIPAEVFSLGFTSNTVWFYIPLKNDTEKDYRGEFEIFNSYLEEVDIFYRYGSKDSIHEILAGTSRVYEKSFPALNFYLRPGEEIQIVCKIKSGTPMRIPIVLESEENFNFTKLFRAILFGLTLGFGIAMGLYNFSLYMFFRTRSYLYYFIMILFSTVYLASWDGLISPLFKPNYGRYYLPFILVLFYTSALFLFLFSMEFLYPEKKERYVKIIIFLYVVVNLLLIPLSIFYPTHLNRISYYLGLVNNLIIVYFCIVRIRGGFKSAKNFLIIHLVFPVAGILTNLSTFGAISIDYLSLHLLKLAFISQSVLFSVMLVQRIKELEFRLKDGLQSEIHKNIVLLKKEIQQRRETEWELIQAKEVAEKASKVKSNFLANMSHEIRTPMNGVLGMVQLLGTTKLNDEQKEYVEVLSVSAKSLLQIINDILDFSKIEAGKVILEREVFSIRSVLDEIHDLLYPLAKQKEINFRLEGKLEIQEYVYGDPLRLRQILWNLAGNGIKFTSRGEVVLKVTQKNISKSSVSIEFTVMDSGIGIPLEKQKQVFEAFSQNDTSTARKFGGSGLGLSITKQLVELQGGVLKLESKDGEGSKFTFTIDYDIPSALEIEKILEAEKTKDLEKSFQDVVAKSTRILVAEDNETNCLLIERALKKLGYDPTVVHNGREVIERMQLEAFDIILMDIHMPEVDGIEATKWIRSKNQNSEFPIIIALTADAIESSKEKYISKGMNDCLTKPLDLPILKSTLDLWSNRVDVSHWKL

SEQ ID NO: 12884 - protein, 1194 aa, Xanthomonas campestris pv. campestris str. ATCC 33913
MRLFPSVLHWVVALLLLGLCVTVSPALATRAPVMPVPNQVTVADGLPSDVIGELAEDKQGYLWLASDDGLARFDGRNYRIWRMEEGLTGNAIWTICVDQDNRVWMGFENGGAGFLEAKTRTFKPLENAQFPELRQITVWSLAQTPNGDIWLGTAANGLYRRRPDGSMQQFLNVPGDSASLPADAVNALRVAPNGTLWIATPGGLVRWDGKQFTRVALPGSSQTVGRLRLERDGNTLWVTDGAGELFRLDAEGRFSPHPWQNMPANQRVYNVLLRDRRGRYWLDTNAGMALSETGTDVVRVPIYSFTAHSLVNRNWIDSYEDREGGLWFAALEGGLWHLLPHWDTFAVLAHRPKEPHSLANTSVLATVASASGGVWLVGSKGVLERLDPATGRLQTHLEHIDPLHPPDSVFEDTRGVVWIGVEGTLVRYDPRTRQVKRLPIRADVAPDAEGAADRPLWMAEDGQGQLWVSVLEYGLQLRDAQGSLVRTIVNGTHGLEPLTILDIGTGPDGQVWLSNNAGLRRWDPRADRFVPVPGAPSQATYVFRFAEGGVVWLGVVGEIRRYLWDGTQLKLLDTIGKDQEFPMVAPNGLVVHAGGVAWVSSQRGLIRIDPGSKLVRVYGVHDGLPNPLMINRTLVQATGGQIVGAAPDGVVVFDPTAMHPNTRRPPLLIERVGVRRGERGLDITGQEPLTILDDDRDLHIVARMPTFTHPDSSSYRFRLSGYDPDWIDVGPSGERLFSRLPPGDYTLEVQGRTADGIWSASQTLTFQVLPPWWRSPWGLVLLTLLALCVVVAVVLLYRRRLRRLNAWQLAVHKQELAEQASLAKTRFLATLGHEVRTPMTGVLGMSELLLKTQLDHKQRSYTESIRRAGSHLLRLVNDALDLARIESGRLELDLQPFSVRQLVAEVEALMAPLAQERGLRFSLEVGLLGDITASGDPTRIRQILLNLLSNAIKFTERGVVGLKLSTLGSYQGLRFEVADTGPGINADQKARLFQRFEQGDGAKTTSRYGGSGLGLAICQELAMAMGGHIEVISRLGAGTRFVVDLPLRWVASNAVLAGEVARDSANVAPLRILLVEDEPTIAEVIVGLLRAQGHSVVHAPHGLAALTEAADNAFDLALLDLDLPGLDGFALARQLRVFGYDMPLIAVTARSDEAAEPTAQQAGFDSFLRKPLTGDMLADTIAEALRRVRPREEL

SEQ ID NO: 12885 - protein, 1584 aa, Methanosarcina mazei Goe1
MDTKMKQFPTNISNPVLSVGMDGTVLYSNEAGEPLLHEWGVRVGEKLPSSIGYIAQRVISRNNPEKIEVKVGKSVYLIVFHPLSMQECVNISGFDISGQKEFEEKPLESKEKYQDLFNLIEQAVQIGEIVFDENGRSIDNIILDVNLAYEKHSGLRREQVIGRGFKEIFPIVEQRWLDRYGEVVRTGMGMHFEEYNASLDRWFEVFASPMGSNRFIAVFSDITRHKQTEEDLLRSEQHYRLLHETMLQGVVYQDASGKIISMNPAAERILGKTPAEFLGSSSVGEEYLTIREDGSMFPGLEHPAMVSLRTGQKVQGVVMGVYNPRENFYRWININAVPIFRTGEDRPFQVYTLFDDITERKQEEHRIRRYNRILKGINRIFSNVVQAKTEEEVGNACLSVALEVTGSEFGFINEMGTDGLLHDVAKSELGWERCFMYDKTGHRRPPSFFAVHGLYGSVINNEKGFFTNDPPSHPDSIGIPDGHPPLTSFLGVQLVQDGKTIGLIAVANREGGYSSEQQEDLEAIAPAVVQALQRKKAEEALRLSNIYNRSLIESSLDPLVTIGRDGKITDVNCATEQVTGYPRNDLIKTDFSDYFTEPENARAGYKQVFTDGEVRDYPLEIQHKDGHITPVLYNASVYRDENGEVIGVFAAARDITERKRAEHQLSNELARATGLYELYTRSSNLSDRELYDFALNQAVKITDSTIGFFHLVSEDEKEIILTTWNQEALKSCMAGSEGHYPIEKAGNWVDCVRLKRPVVYNDFPSSPNQKGLPAGHATVNRFMSVPVTENGKVRVIFGVGNKVDEYDDRDVMQLQLVANELHKIMKLRRIENEVRESEAFLRDIMENVSDAIFVKDREARMILANTAFYRLMDKPPEEVLGKTVDDFHPPEIARKLVEDDKRVMEVGKGTTLEERIFTSYGWRILQTVKAPYYDGQGNIIGLIGAARDITERKKAEEALKKAYDNLDILVKERTAELEKAYTSLKESEKGLAEAQRMAHIGNWEWDIVNGGVYWSDELYQIFGRNPQESGATYHELLNYIHPDDRDFVDSAIKKGLNEKPSGIDYRVLLANGEERNVHAESEVIFDENDVPVRAKGIVQDITERKKSEEKIRNLANIVESSSDAIGTISLEGVITSWNKGAEQVYGYSAEEILGKTESILTLPHLSEETKKLTDRVIKGERINNYETSRLRKDGTIINVSLTLSPVFDASGKLTAVSVIARDITERKRVEEKLREIEEKYRNIVETANEGILIIDDEAIITYANKKMADMLGYTLEEGLGRPVWDFADEESKTILKQSLEKRRQGINGSYELKLICKDGSSLWALINAKSIFDKDGKFMGTVSMLTDITKRKKAEEALERMDKARIKEIHHRIKNNLQIISSLLDLQAEKFEDENVIESFREGQNRVISMSLIHEELYKGEGTDTLDFSAYFKKLAENLFKTYNLSSKNISLSMDLEEDTFFDMDTAVPLGIIVNELVSNSLKHAFNEDEEGKIRIKLCREEKNSEMGMSLFSLTVSDDGKGLPDDMELKCVESLGLQLVNILVDQLDGELQLKREQGTEFTIKFKVIEKDNPAHAGLKSQKNG

SEQ ID NO: 12886 - protein, 901 aa, Methanosarcina mazei Goe1
MKTDLEQFPAKNPNPVLSVANNCTVLYSNKAGEPLLHEWGVVVGEKLPSYLRDLVKSVITLNRPEKMELKIEKKVYLVAFHPSSEEKCVNIYGFDITDQKELEERLRIKEKQNDILYRIGKVALEFESLQIFLDESVKLIANILEVEYCKILELMPDGNFLLRAGSGWKHGLVGKAIIGGEKESQAGYTLFSGMPVVVEDFAGESRFKKPEILRMHEVNSGVSVTIGSIGKIFGVLGVHSRKKRKFTSDDTYFLSSVAFLIAQVIERKKAEEALKEAHDSLEETVTERTSELEKSYISLKESESRLAEAQRMAHIGSWDWNLITGEVCWSDELYHIFGRSPQESGATYDEFLSYVHPDDRDRVDNALKKGLNGESVAGNYRIILGDGEERIVRTEAEVVFDEKNNPVQVKGTVQDITEIKKVEEQLKILANIVESSNDAIGTISLDGNITGWNQEAENVYGYSVGEVLGKPVSIVTPPHLDKETIKLIEEIMHGKKVQHYETLRLRKDGTTIYVSITLSPVFDSYGKLIAISFISRDITERKKIEEKLRESEEKYRNIVETANEGISIVDAEERITFVNKKIEDMFGYSSEELIGGSMWDLLSDESKTIIKQMLEKGWKNVNESFEIKFIHKDGYPVWTYTNSKSLFDKDGKFFGTMNLHTDITKRKEAEEALRNFEIARKKEIHHRIKNNLQVICSLLDLQAEKFRSRESAEDTEVLNAFIESQNRVMSIALIHEELHEGRGTDTLNFSPYLEKLVENLFQTYILENVNTSLDIKLEENIFFDMDTAIPLGIIVNELVSNSLKYAFSGRDYGEIQIKLYREDSAEHENKEQRVIKESYGGTNVILIVSDNGIGIPEDFNLEDSSSLGLQLVKILVDQLEGQIELNRDSGTEFTIRFTVQI

SEQ ID NO: 12887 - protein, 1353 aa, Thermosynechococcus elongatus BP-1
MPAAPLPANEPERQRALEQYQVLDTPPEPIFDEITNLAAAICETPIALISLVDRQRQWFKSKVGIDACETPRNVAFCAHVILQDQLVIVPDARLDPRFADNPFVTGPPYIRFYAGMPLVTPQGYGIGTLCVVDYQPRQLNPVQQQTLRTLARQVINELEIRHHLEVTQQQLAYIQQMSSLQEAVFNSSNHAIIATRTDGIITLMNRAAQQWLGYPASELVGKATPERFHDPQEMERYAQILSAQLGEPIPAGFETLVARARRGLADEQEWTFVRRDGSCFPVSLSVTPMHDRQGQLIGFLESAVDITDKKQIEAALRLRERAIIASTNGIVITDYRQPDNPVIYVNPAFERMTGYRATEVIGKNCRFLQGSDRHQPGATAIRNAIKKGQSCRVVLRNYRKNGQLFWNELAISPIYNEFGEITHYIGIQSDVTERQRAQLFLQQQVKRTLLLNRITEEIRQQIEREHICRTAVQQVGVTLNVSRCLLFVYQENAPTPMELVAEYCGPGVPSVNECDLDLTQMRAPFLASVFASDEVFSCDDVQNDDRLAPLHAYCEALRVKSALIVRTAYRNQANGLLILHQCDRQRRWTDAIQSLLKSVAAQVGIGLAQVQLLEQETRQRQQLQQQMQRALLLNQITEQIRQSLDTETVFATTVTQIGQAFGVNRCLIHRYDPGPPPHIPDVAEYLQPGYASMRGISIPVENNPHALAVLSGDTAVVSNDVTQDPLLANAMHLCHQFQIQSMLAIRTSYKGVPNGIIGLHQCDRQRQWTPEEIELLEAVAAQVGIAIAQAELLRHEQQQRQLLAQQNQELEQARLQAELANRAKSEFLATMSHEIRTPMNAVLGFTNLLLDTPLNEQQRDFLQTLHQAGEALLTIINDILDFSKIESGKLVLEQQPFDVRECVEDVLSLLASKAQEKELELLYTCTPETPAQIKGDVTRLRQILVNLVGNGIKFTHEGQVAVHVGVLKREGKDFLQFQVQDTGIGIPRDRLDRLFKPFSQVDASTTREYGGTGLGLVISKRLCELMGGDMSVESTEGQGTTFTFTILAEGQKPYVPPKVHPALEGKRVLVIDDNAASRENLCTLLHNWGMVPIGYSDPRLVLEAAPPWDLAVIDLNMPQMTGLQLAERLQSEPNFNQQPMILLTPLSWLETASRKELITAHVPKPIRPLTLRQTLIRTLSSESATQPALTKTGIDLNLGNRFPLRILLAEDNAVNQKVALHILKRMGYRADVAANGLEVLEALQQRPYDVILMDVQMPKMDGLETTERICAQWPPSQRPWIIAMTANALAGDRERCFAAGMDDYISKPIKIEALAAALNRCRCLNPKSTYPQLCDQINIDSDQGHQSATESMT

SEQ ID NO: 12888 - protein, 1035 aa, Thermosynechococcus elongatus BP-1
MRIFMFRFPLLSFIQLFLPTTAVIAALLTPLYVGQRQALFKDFRVGQEGKLEEIQLTIANDIDDAVTDPKGLGSFHLWHELIDSPSQGELAEEVQELVDQWHRLKEHYDQLYVLDTRGRIRFQWTSTPQSDPPSTVKAINSYWPILRELTPDQVFVSPVEVTATKSSGLPFPVLYIGVPLYHQSAPKGVLVVRYQLNHLFNNLLSRCNIQMGWCLVADDQGYWLLGEDIREQWGFDFPERRQFTVRHQYPLLWQQMQHQLRGGLFGPDGLFVFQSFSLLQENWISAERSAHSSRRQSNVRWWLIGFLPSSALEQYLDHLNRDFLVSFTALCILAAVAVLLITRDRQRKRSLQKLLETSNARFRSVSEMAPVGIFTLDAQGQPTFLNQRLLQLLQVHNLEEAQQQWIERLHPEDRDRVLKAWAACQQKRVPFHERFRIVHNDSSSHWINARIIPLQESSATDSFVGTWEDISQMMQQQELLEVARQAAEEASRAKSEFLATMSHEIRTPMNAIIGLTGLLLDTPLNPQQQEFVNTIRLSGDALLGVINDILDFSKIESGKLELESYPFNLRTCVEEVLDLLASRAAEREVELAAHIDSGVPCAVIGDMGRLRQVLVNLIGNAIKFTQKGNVTLYVKAKPMPMSQYEFMPSYYSYLFAIQDTGIGISAAGMNRLFKPFSQVDASTTRQYGGTGLGLVICQRLVERMGGQIWVESKKTGESLVVGGTPLAVYESIPIAESGSVFYFTARFLLNPNPAPEPTDDTCYLENRRVLIVDDNATNRQILALQIKKWKMQPLVAESGPSALALLQQQGWVDLAILDLQMPEMDGVTLARQIRAAYGELPLILLTSLGNTLTESEKALFSSLISKPVKQSTLYNALNSLFCEKQKTVSPKPAAAPSFEHLKAELPPLRILVAEDNKVNQMVALRILEKLGYRGDIAANGLEVLDAVQRQPYDVILMDMQMPEMDGITATREVTQLFQGLKKPRPRIIAMTANAMESDRQLCLDAGMDDYVSKPIRLEELVRALRQCQPLQTPTT

SEQ ID NO: 12889 - protein, 765 aa, Microbulbifer degradans 2-40
MLLLFQRVRNLPLTAKAYITIVIAAAVAVAWVSAVEWSIATNKHQQHIATATKNARQQLNQAIQTGNQLVLEHCLTNLVAQSIIKRATLIGPSSRQEKTSLNYATSEGFSTLREPLDAGWVLEMQVSTGMTAFLERLVIDLVGILLITGALLLYVRLALVSKLLQLNFAARTLNLENLNRSLLPKKSRQPQKRAADSQDELDSLLQALERIRLSMLEDREQRRTVELALMREKEEKIETRRLVQEAEAANRAKSQFIATMSHEIRTPMNGVIGMVEMLRDTTLDDSQRHYLGIIERSGDSLMNIINDILDYSKIEAGKMSLEHMQFDLEELLEDCVQMFSASTDKRNIELICSISPNTPKQLMGDPTRLKQVLVNLIGNAFKFTSEGHIYVEARQVNASDADLPMIHFSVEDSGIGIESNQQEKLFDAFCQADGSTTRKFGGTGLGLTICKQLAEMMGGEIGVYSREKAGSTFWFSAVFTHVEKAINEQPPQSLAGKKLLVVNQSKIVEKVIASHAADWNIACRIVHSGEKALEVISGQHHYDFIILSQDLQDMPGLDVADKVRTLAAYSSTPIFLVTKVRKSQLPEDRLHTITALLPYPLSIHKIENLLQTKPTHTVVEEQKTNTQATTVSEGPLHVLVAEDNPVNRMVIEGLLAKFDIAPKFAEDGLQALNAVTESPTPYDLIIMDCEMPEMDGFEATRSIRTWESNNNQPATTIIALTAHVEAEHRQRVFDSGMNYYLSKPVTMEKLSEALTTAGLAPQIAS

SEQ ID NO: 12890 - protein, 789 aa, Pseudomonas fluorescens PfO-1
MPHANALLEKLANSSQRLNKGLLILGALALLLLGISYLGVQRMVEEQRDTLQFHFARLMENVREQEAFLGDISRAGASGEYLPVTVASPMVQKLLPEEGPNIYQGRGLPFSLPFSVKIDPQRIAPDQYPKVFALGSYLAAYYSAFWAASHYQSPQVILLNGPDNFDIAVPATGRLRGAGPTQVGRFVKLMTQMNMQRHSQTSEQVLWAPYPFEQDNDGTPSLLAYVRMNLSKPTLRIEGANTWVVLGSLLKLSQVNNIERLMEWSIYDNFTLITPNGTVLIGALKPNQMLDDGANLTRDGLVFKLTSAGDQRWTAIYVISVQSFLDYALWPLLCLLALVLALLGSGRALNRWYTDRVILPAQSAHASIAESEAFCRAVIDTAPTGLCVISRRNHQVLLENQLAQQWHDSGELISLLDQQAATGHGHAELEIDSRHLHVAFVATRYQGQDAWLCALHDVTRHVEDSAALEVARQAADSANQAKSRFLATISHEIRTPLYGVLGTLELLGLTALAPRQQEYLETIQRSSASLFKLISDVLDVSKIEAGQMNLELQPFCPLELTEDVVRSYGAFARGKGLQLYACIDAALPDHLLGDAQRIRQILNNLLSNAIKFTDNGRVVVRVRVLQNSGGQARVQWQVSDSGVGISQAQQQQLFDPFYQVNEADSHAGAGLGLAICKWLCELMHGQLNVVSEPGLGSCFNLQLMLECASDSLADCPAFGADSPAVYVRAPVAELAQHLMAWLNRFGLDCRLVTNELPPPSALLVDLAPLASATAFAGQRIVAMPLPQPV

SEQ ID NO: 12891 - protein, 1118 aa, Desulfovibrio desulfuricans G20
MHTRHAQQPAGHTAPRNFRHAHYHGLVPDLSQHRKNSACRPRSATAGTMKINLSISSIRLRVILVTLLVALVPVCTMTVAGLLVSMQQTASALSLQSRTALDKVSAAISRTTREAENVSRLVAGFNTLQGNPEPDSLRDMLFSRQHFWDKGFVEVFDAQGRILARSVPLRTANRQWMTPPEDPLVMQGILLHTASDIVRTPAGLAARAVAPVYRPSSLQAIGAVVTTFPLDRSMLQHIKEQTQADITLHYPDLRVESTLHDASKLPVTHDWDNTYDVMRNAEGPAQYEAQIAGSTYALSSIPLRNNAGVTQAVLSVALNRNMLRQYLHDAVQTLVLTLVLALVMAAGLGMWTAEKLTRPLHEMVQAIRRMAGGNLSVRVTEGGSDELGELAQSFNKMAGRLEEQRAHLLDALHEHEETTLRLANANKGLEYANRELLSAREEYRKIFEGSVQGIYQTTLEGRFIKANRALARMLGYGSAEELIGTVTDIGSQLYVNPADRQRLKSLLSTRSSLSDFETRFYRRDGSQVPVSISVRLVYDENDLPQYLEGALTDITERERRREAEQQREAAEAASKAKSEFLARMSHEVRTPLNAVVGMADLLWESDLTPDQRLYVDIFRKSGQTLLALLNDILDYSRLEAGRLTLERLPFSLRDTLTMTVNMHAAQAESRQLSLSLHVDETLPDNYCGDSLRLRQILGNLLSNSIKFTREGSVEVHVGPAPGQQELTAGEPVMVRICVRDTGIGIPENVQQTIFESFTQADSSITRQFGGTGLGLSICRMLTTMMGGRIWLESTQGQGTAVYVEMRLDLHDRSAAETQPEECAMPVQAAPLRILCVEDSANNRLLFRMYLKNTGHEVDEAENGEEGLRLFMLNSYDIIFMDLEMPVMDGYMATTAIRDYEQRHRMPAVPVVALTAHALEDFKQRCLAMGFTDYLTKPFRKQQLLAMLERNTGAPAPQYQADGAKRPAPEEHTAGQNAEKLAEQTAEEQAARKQTSGKQPPAAAQHTTEHMTDRQADKSATTVTTDRQAEQTSGQPPAGAAGDTATTGQSGEGTAAADAAQEVTMLENQRTGHTVIPQTGRQQTDRQQTEGTSDNDDTEPHREARKTQREPSQSPAHKT

SEQ ID NO: 12892 - protein, 925 aa, Pseudomonas aeruginosa PAO1
MFKDLGIKGRVLLLTLLPTSLLAMVLGGYFTWVQLSDMRAQLIERGQLIAEQLAPLAATALARKDTAVLNRIANEALDQPDVRAVTFLDARQERLAHAGPSMLTVAPAGDASHLSMSTELDTTHFLLPVLGRHHSLSGATEPDDERVLGWVELELSHHGTLLRGYRSLFTSLLLIAAGLGVTALLALRMSRAINAPLELISQGVAQLKEGRMETRLPPMGSNELDELASGINRMAETLQSAQEEMQHNIDQATEDVRQNLETIEIQNIELDLARKEALEASRIKSEFLANMSHEIRTPLNGILGFTNLLQKSELSPRQQDYLTTIQKSAESLLGIINEILDFSKIEAGKLVLENLPFNLRDLIQDALTMLAPAAHEKQLELVSLVYRDTPIQLQGDPQRLKQILTNLVGNAIKFTQGGTVAVRAMLEDESDDRAQLRISVQDTGIGLSEEDQQALFKAFSQADNSLSRQAGGTGLGLVISKRLIEQMGGEIGVDSTPGEGAEFWISLSLPKSRDDNEEPGASWAAGQRVALLEPQELTRRSLHHQLTDFGLEVSEFADLDSLQESLRNPPPGQLPISLAVLGVSAAIHPPEELSQSFWEFERLGCKTLVLCPTTEQAQYHATLPDEQVEAKPACTRKLQRKLQELLQVRPTRSDKPHAMVSGRPPRLLCVDDNPANLLLVQTLLSDLGAQVTAVDSGYAALEVVQRERFDLVFMDVQMPGMDGRQATEAIRRWEAEREVSPVPVIALTAHALSNEKRALLQAGMDDYLTKPIDEQQLAQVVLKWTGLSLGQSLASMSRAPQLGQLSVLDPEEGLRLAAGKADLAADMLAMLLASLAADRQAIRQARDNDDRTALLERVHRLHGATRYCGVPQLRAACQTSETLLKQNDPAAAAALDELDKAIEALADTASATTHLSSTSLDSSEL

SEQ ID NO: 12893 - protein, 1072 aa, Vibrio vulnificus CMCP6
MTESISLTLTNNESSRFLIRQRLLSILQAFGYDACRCDIHMLRLGEFVRITLADIQRFTLSFELDDDSLKVILASSELDPQTCSFPACVHTFQREKAIGVSIPSLIPLSDEILNQLTQFLAKPSRDELMSELKAKNQELAVHQAGLEKEIELRTADLKASEELSRTIIDGAPSSVAIVDESLSISLWNSTAQNVYGYSSEEATGENILTLLNMSLPDALSHVLSAPLALQNQPDVEGGFFEVETTTKEGHMVPIDLGVSIFELNGACHAALFLRDVTSRKAVEKELNDAKAKAEEAVEVKSMFLANMSHEIRTPMNAIIGMSHLALKTDLTPKQHDYVSKIHSSATLLLGIINDILDFSKIEAGKLSIETTEFYLDDVFHNVSMVTGQKAFEKGLELIFDLPRETPRCLLGDPLRLGQIIINLVNNSVKFTEKGEITVSVHHIRNVEDLVELEFRISDTGIGMTDKQMKSLFTAFTQADGSTTRKYGGTGLGLSICRRLVELMGGQIRVESEAGKGSHFIFNVLVKADPANSSAPSIVPQSLEKIRILVVDDNEHALEIMQEMLSTLPGKVALANSGQQAVDCIRKASEQREKFDLIFMDWNMPEMDGIETSRLIRESFASEYQPQIVIVTAYDKEDVLDATNDLDIAGFLSKPVGQSYLFDLLVELFGRDRNPTTQIRKKELPTHDSKNDLKGLKVLLTEDNEINQQIAVELMEGNGLLVTVANNGQEALEHLEAMEKGESHFDIVFMDLQMPVMDGYEASHRIRANSSYDTIPLIAMTAHAMVEERERCLNLGMNDHISKPIDPEILFNTIRKWCPRTLNEKDESPVDVEQSQTQQLDSSIESAATPKSTERAAAEKRTLETLESLDYKNGLLRVAGNQTLYRRLLSQLMDKEISAPERLTIALDKQDTEQAIIIAHSLKGSASNLGAIRLSDIASRLEMAIQHGKERAEIDKLNKELDGYLEHFFQDLALALGRPKPSSDKRLELKDEELMIIHTLDSLLDSLDAYAIEFLDEHYVLLNTLLKSEDFEACCRCVNDCDFESASKSLRKAVSIYPLDLGKLSGEKNGRES

SEQ ID NO: 12894 - protein, 1320 aa, Vibrio vulnificus CMCP6
MLLFLAMGICSIAMLSVTQKVAELRTQSRDYQQDLYRFYRLSQELKQSSDHLTKFARAYVVTGDDYWEALFNKVLDIRDGKLPLPAGNEYEYWDLAASSAEYVPPFTSETGVPLLQRLRDSGISATEFLELKSALMLSDNLVNLEREAFLAVKGFKLEPDGKEFYTGKPDLPYAQSLLYGKVYFEEKAKIMKAIGSAHQAIVHRIEGNIEQTDTQELQYQYVYRVLVAILLASIVVSFTLLWRLYISPLSKLLRTVVNQVKAQDYAFTITQTAYAELQKFIDSLNVVFHHISEQLSQNTLVKDFNIVLRTSQSTQSLCHEVTQFLLHQFPVQQVSIAIYRDDKLIRIAGAGYDDTISREISDQSSTQLSVLLSDKPYSMKSLQGKYTTHVNGGVLELNEIYYFPLCVNKQPVALLELGTVDTLTPLQYQWLSQMLDDLSVSIQLSQNVELQRKAEQKVLEQSQLNQEILNATPNPMYCLSAQGKYLTVNAKFSELTGLAMHEIVGRTPIEVFSQQDASHHFTQVHQELSQEQCSKNYELSLLDSQGGCRDMLVCEASFNNSQGRVSGIVGILLDLTERKQMESELRDAKDTADAMSRAKGDFLANMSHEIRTPMNAILGMAHLALNTELDPSQRKYLTRINESAKNLLGIINDILDFSKIEAGKLSVESIDFSLDEVFENLTNVISFKAQEKGIEFLLDIDPRVPVGLVGDPLRLGQVLVNLCGNAVKFTEKGEILVSVMPESQSSDDVTLRFSVKDTGIGIDKEKIADLFNAFSQADTSITREFGGTGLGLSISKQLVELMGGQLSVSSAVGMGSTFTFTIHCGLQEAKMRDIAKPISGLAGKRALIVDDNDSARNILMTLLSAMQFDAKAVSNGFEALDELRQGAFDMVFVDWNMPGMNGLELLQTAHQERLLAETKNFLVTAYGREISMDENSSKLVDSLIVKPVNPSNLLDAIMDSYGIEHVTRSSTTVTFEKPVFDGQTLLLVEDNEVNQEVAIGLLNGTNLNIITADNGKLAIEALEHHPIDLVLMDMQMPVMDGITATKAIRERAEWATLPIVAMTANAMQSDVERCHEAGMNDHVAKPINVHNLYQVLSQYLSASNAASHTSSSHSTSSSQSTPDRTASADEDDLPTLSGINLKEAIFNTGGNKESYLSILSRFLEMQLEELPMFKEVVEKEDWDMAARMAHTLKGAAANLGVTPLAQLAIKMEKSIDHRSKTVIGELELAGVALDKLHAQLSEWQKRHVNVSEQECEEAAELYKRLVELVEQYDVAAVDVIKQAKDCDVWTDEQKQQLINAIESFEFEQAKEMLAAFPKPE

SEQ ID NO: 12895 - protein, 642 aa, Vibrio vulnificus CMCP6
MNGKRQIGIDKQLMIAVILLSLAFTLVSTGFNVYWDYKQELKKRQAELNWVEQSYLQSLTESLWVEDRQHLESQVQGMMTLPFIDAIDIANENEVIVKTGDVGHSKRVLERRWPMEYQLADNHYLLANLTVRSNLDEVYQGLWRKFALLLVGESIKTFLLMVGVIYIALSLIVKPISLLSRAVSDFKDGETPSRLRLPARAFDDEISLLAEKYNSSVERLRSNYAELKSAKEQAEVANVKKSEFLATMSHEIRTPMNGIIGVASLLKEMELSSEQKQYVEMINHSSESLLDIINDILDFSKIEAGKMAISLEPFCLSDLVEQMCAIYTLKAHAKNLQFVVELAEDVPHTMSGDSKHLKQVLNNLLGNAVKFTERGYVKLVVAKELDAQHIPHIRFQVFDSGIGIAKEKQELVFERFQQADGSTTRKYGGTGLGLAICRRLVSLMGGELELKSEVGLGSCFEFSVPCVDGEGVFAKDRKDNVRHLQELGVTEVDSEPSSAHQSSQVAALPRALLVEDTFINQKVAKLMLEKIGLAVDIAEDGEQALVLCQQQQYGIIFMDCQMPVLDGFETTEILRASDGWTRDVPIIALTANVVVEDKQRCFDVGMNDFLAKPVTQQRMSDMVKRYLPFDDSSTGSHRHQQP

SEQ ID NO: 12896 - protein, 928 aa, Vibrio vulnificus CMCP6
MTRYGLRARVITLTLAPTLIIGLLLSSFFSFNRYQDLERQVITTGNSIIEPIAIASEPHLLSESREAVRRLVSYAHRKNSNLVRSIAVFDSKHELFVTSNFHPNFESLTYPKDQPIPLLGNAEIRSDTMILRVPVLSEGHYLSDLAEPGEATRAIGYIAVELDLSSLRLQQYQEVFSAFLVLILGLGLASVFASRLMQDVTQPITHMKNVVDRIRRGQLDVRIEGKMHGELDSLKNGINAMAISLSEYHVEMQHSIDQATSDLRETLEQLEIQNVELDIAKKRAQEAARVKSEFLANMSHELRTPLNGVIGFTRQMLKTQLTNSQTDYLQTIEKSANNLLNIINDILDFSKLEAGKLALENIPFDFRESLEEVISLQATSAHEKGLEITLKIDPRIPEGVVGDPLRIQQVLTNLVGNSIKFTERGNIDVSVEMRAQSGDSIDLQFMVKDTGIGISERQQAQLFQAFSQADASISRRYGGTGLGLVITQKLVSQMGGEISLTSRLHQGSTFWFTLRLHSTQMPMSDSIEAEYLQGKELLLVEPNMQAAAVTQQVLTQEGINVTYRSLLPDNAKGYDFVLLSLAVNQVYELETIENWLSRALHISANTILAIPSTELALADQLTERFGIQCLTKPLGRRKLLQSLAAKQTLQPLLPAPENAQAERSSLSVLAVDDNPANLKLITALLAERVVSVTSCSSGQDAVDIATSRQFDLIFMDIQMPKMDGVTACKLIKQTELNANTPVIAVTAHAMSGERDRLLKAGMDDYLTKPIEEHILQQVLIHWNPNTCDSQVEKISPSYIATEESSVQQNIARSSDIIIDWQAALKQSANKEDLAKDMLRMLVEFIPEVESVVELALEQEDYPRDELIHVIHKLHGSSSYCGVPRLKALCATIEQSLRSDADLMDVEPELFELQDEMLKVSTTAQLYLA

SEQ ID NO: 12897 - protein, 632 aa, Vibrio parahaemolyticus RIMD 2210633
MDVKERTQRRFSIGNQLMLAVLTLSLIFTLVISAISLYRDFQEELSHLDTDLKQVESSYLSSFSASLWVEDRELLLTQALGAMRLPSVDYLRIATKDEVIIELGTEITQDVVERRWPMQFSVGEKTFELAELTVQSDLSAVYQDLWQQFFFLLTTEAIKILLLMVGVLWVAFRLLVNPLQLLSGAVSDFSGGNAPSTVTLPKRWCFDEVSLLAQKYNRSVQKVREHQAELEAERDKAEVANRKKSEFLATMSHEIRTPMNGIIGVASLLSDTKLDPQQKEFVEIIDNSSQSLMTIIDDILDFSKVEAGKVELASETYHFRQLLDDVISLHTVKAQQKNLQLLSDIDPKLPAEVQGDEGRLKQVLNNLLSNAVKFTERGHVKLLVSLHEQNNDIAQVRFRVVDSGIGIAKEHQQAVFERFQQADGSTTRKYGGTGLGLAICAQLVHIMGGDIKLTSELGLGSCFDFTIPLTVVSGLPTYTDPLNVLDFPRTEANEATNKNPDKPWVLIVEDTEVNQRVVRIMLEQLGLKVSVASHGEEAFQLCREHAFDLIFMDCQMPVMDGFIATEQIRDMNEWGAHVPIIALTANVVKEDQQRCFEAGMNEFVAKPVTKARLQQIFEQYLPKALKNIATPK

SEQ ID NO: 12898 - protein, 1303 aa, Ceratodon purpureus
MSATKKTYSSTTSAKSKHSVRVAQTTADAALEAVYEMSGDSGDSFDYSKSVGQSAESVPAGAVTAYLQRMQREGLIQNFGCMVAVEEPNFCVIAYSENASEFLDLIPQAVPSMGEMDVLGIGTDIRTLFTPSSSAALEKAAATQDISLLNPITVHCRRSGKPLYAIAHRIDIGIVIDFEAVKMIDVPVSAAAGALQSHKLAARAITRLQALPGGDIELLCDTIVEEVRELTGYDRVMAFKFHEDEHGEVVAEIRRMDLEPYMGLHYPATDIPQASRFLLMKNRVRLIADCYASPVKLIQDPDIRQPVSLAGSTLRAPHGCHAQYMGNMGSIASLVMAVIINDNEEYSRGAIQRGRKLWGLVVCQHTSPRTVPFPLRSVCEFLMQVFGMQLNLHVELAAQLREKHILRTQTLLCDMLLRDAPIGIVSQTPNIMDLVKCDGAALYYGKRVWLLGTTPTENQIKEIADWLLEHHNDSTGLSTDSLADANYPGAHLLGDAVCGMAAAKITAKDFLFWFRSHTATEVKWGGAKHDPDEKDDGRKMHPRSSFKAFLEVVNKRSPPWEDVEMDAIHSLQLILRGSFRDIADSDTKTMIHARLNDLKLQGVEERNALANEMSRVLETAAAPILAVDSRGMINAWNAKIAQVTGLPVEEAMHCSLTKDLVLDESVVVVERLLSLALQGEEEQNVEIKLKTFGTQTTERAVILIVNACCSRDASDFVVGVFFVGQDVTEQRMFMDRFTRIQGGEKTTVQDPHPLMRPSFDGDEFGRTFKRNSALGGLKDHATGSVERLDLYLRRAEECMEVMETIPSPKFNNKQCQYLAGKLKAVLQSASLFLRISHHEHHELGASIDMGRHVEIFKLLLALAKEIESFIQGCCKDEWIKAAMTLTNVSEYVSSMGFNLELCKIAFCKSCAASGSLTLDQIEVICKDEAEVVKRNASIDVDTLFAKVIYDLTEKTLSSDQNDLAIYLLQRLKRAKPILPSFSSRPSWWNFYDDWSFSEKFFQWIQITGSLGSGSSATVEKAVWLGTPVAKKTFYGRNNEDFKREVEILAELCHPNITSMFCSPLYRRKCSIIMELMDGDLLALMQRRLDRNEDHDSPPFSILEVVDIILQTSEGMNYLHEKGIIHRDLKSMNILVKSVKVTKSEIGYVHVKVADFGLSKTKDSSTRYSNQTWNRGTNRWMAPEVINLGYESTEGEISFDGKVPKYPLKSDVYSFGMVCYEVLTGDVPFPEEKNPNNVKRMVLEGVRPDLPAHCPIELKALITDCWNQDPLKRPSFAVICQKLKYLKYLLMTGKLSSHSYLTSK

SEQ ID NO: 12899 - protein, 1307 aa, Ceratodon purpureus
MSATKKTYSSTTSAKSKHSVRVAQTTADAALEAVYEMSGDSGDSFDYSKSVGQSAESVPAGAVTAYLQRMQREGLIQNFGCMVAVEEPNFCVIAYSENASEFLDLIPQAVPSMGEMDVLGIGTDIRTLFTPSSSAALEKAAATQDISLLNPITVHCRRSGKPLYAIAHRIDIGIVIDFEAVKMIDVPVSAAAGALQSHKLAARAITRLQALPGGDIELLCDTIVEEVRELTGYDRVMAFKFHEDEHGEVVAEIRRMDLEPYMGLHYPATDIPQASRFLLMKNRVRLIADCYASPVKLIQDPDIRQPVSLAGSTLRAPHGCHAQYMGNMGSIASLVMAVIINDNEEYSRGAIQRGRKLWGLVVCQHTSPRTVPFPLRSVCEFLMQVFGMQLNLHVELAAQLREKHILRTQTLLCDMLLRDAPIGIVSQTPNIMDLVKCDGAALYYGKRVWLLGTTPTENQIKEIADWLLEHHNDSTGLSTDSLADANYPGAHLLGDAVCGMAAAKITAKDFLFWFRSHTATEVKWGGAKHDPDEKDDGRKMHPRSSFKAFLEVVNKRSPPWEDVEMDAIHSLQLILRGSFRDIADSDTKTMIHARLNDLKLQGVEERNALANEMSRVLETAAAPILAVDSRGMINAWNAKIAQVTGLPVEEAMHCSLTKDLVLDESVVVVERLLSLALQGEEEQNVEIKLKTFGTQTTERAVILIVNACCSRDASDFVVGVFFVGQDVTEQRMFMDRFTRIQGGEKTTVQDPHPLMRPSFDGDEFGRTFKRNSALGGLKDHATGSVERLDLYLRRAEECMEVMETIPSPKFNNKQCQYLAGKLKAVLQSASLFLRISHHEHHELGASIDMGRHVEIFKLLLALAKEIESFIQGCCKDEWIKAAMTLTNVSEYVSSMGFNLELCKIAFCKSCAASGSLTLDQIEVICKDEAEVVKRNASIDVDTLFAKVIYDLTEKTLSSDQNDLAIYLLQRLKRAKPILPSFSSRPSWWNFYDDWSFSEKFFQWIQITGSLGSGSSATVEKAVWLGTPVAKKTFYGRNNEDFKREVEILAELCHPNITSMFCSPLYRRKCSIIMELMDGDLLALMQRRLDRNEDHDSPPFSILEVVDIILQTSEGMNYLHEKGIIHRDLKSMNILVKSVKVTKSEIGYVHVKVADFGLSKTKDSSTRYSNQTWNRGTNRWMAPEVINLGYESTEGEISFDGKVPKYPLKSDVYSFGMVCYEVLTGDVPFPEEKNPNNVKRMVLEGVRPDLPAHCPIELKALITDCWNQDPLKRPSFAVICQKLKYLKYLLMTGFSSYQDSYPSTEEPS

SEQ ID NO: 12900 - protein, 1299 aa, Ceratodon purpureus
SSTTSAKSKHSVRVAQTTADAALEAVYEMSGDSGDSFDYSKSVGQSAESVPAGAVTAYLQRMQRGGLIQNFGCMVAVEEPNFCVIAYSENASEFLDLIPQAVPSMGEMDVLGIGTDIRTLFTPSSSAALEKAAATQDISLLNPITVHCRRSGKPLYAIAHRIDIGIVIDFEAVKMIDVPVSAAAGALQSHKLAARAITRLQALPGGDIELLCDTIVEEVRELTGYDRVMAFKFHEDEHGEVVAEIRRMDLEPYMGLHYPATDIPQASRFLLMKNRVRLIADCYASPVKLIQDLDIRQPVSLAGSTLRAPHGCHAQYMGNMGSIASLVMAVIINDNEEYSRGAIQRGRKLWGLVVCQHTSPRTVPFPLRSVCEFLMQVFGMQLNLHVELGAQLREKHILRTQTLLCDMLLRDAPIGIVSQTPNIMDLVKCDGAALYYGKRVWLLGTTPTENQIKEIADWLLEHHNDSTGLSTDSLADANYPGAHLLGDAVCGMAAAKITAKDFLFWFRSHTATEVKWGGAKHDPDEKDDGRKMHPRSSFKAFLEVVNKRSPPWEDVEMDAIHSLQLILRGSFRDIADSDTKTMIHARLNDLKLQGVEERNALANEMSRVLETAAAPILAVDSRGMINAWNAKIAQVTGLPVEEAMHCSLTKDLVLDESVVVVERLLSLALQGEEEQNVEIKLKTFGTQTTERAVILIVNACCSRDASDTVVGVFFVGQDVTEQRMFMDRFTRIQGGEKTTVQDPHPLMRPSFDGDEFGRTFKRNSALGGLKDHATGSVERLDLYLRRAEECMEVMETIPSPKFNNKQCQYLAGKLKAVLQSASLFLRISHHEHHELGASIDMGRHVEIFKLLLALAKEIESFIQGCCKDEWIKAAMTLTNVSEYVSSMGFNLELCKIAFCKSCAASGSLTLDQIEVICKDEAEVVKRNATIDVDTLFAKVIYDLTEKTLSSDQNDLAIYLLQRLKRAKPILPSFSSRPSWWNFYDDWSFSEKFFQWIQITGSLGSGSSATVEKAVWLGTPVAKKTFYGRDNEDFKREVEILAELCHPNITSMFCSPLYRRKCSIIMELMDGDLLALMQRRLDGNEDHDSPPFSTLEVVDIILQTGEGMNYLHEKGIIHRDLKSMNILVKSVKVTKSEIGYVHVKVADFGLSKTKDSSTRYSNQTWNRGTNRWMAPEVINLGYESTEGEISFDGKVPKYPLKSDVYSFGMVCYEVLTGDVPFPEEKNPNNVKRMVLEGVRPDLPAHCPIELKALITDCWNQDPLKRPSFAVICQKLKYLKYLLMTGFSSYQDSYPSTEELS

SEQ ID NO: 12901 - protein, 577 aa, Ceratodon purpureus
MSAPKKTYSSTTSAKSKHSVRVAQTTADAALEAVYEMSGDSGDSFDYSKSVGQSAESVPAGAVTAYLQRMQRGGLIQTFGCMVAVEEPNFCVIAYSENASEFLDLMPQAVPSMGEMDVLGIGTDIRTLFTPSSGAALEKAAATQDISLLNPITVHCRRSGKPLYAIAHRIDIGIVIDFEAVKMNDVSVSAAGALQSHKLAAKAITRLQALPGGDIGLLCDTVVEEVRELTGYDRVMAYKFHEDEHGEVVAEIRRMDLEPYLGLHYPATDIPQASRFLFMKNRVRVIADCCASPVKLIQDPDIKQPVSLAGSTLRAPHGCHAQYMGNMGSIASLVMAVIINDNEEDSRGAIQRGRKLWGLVVCHHTSPRTVPFPLRSACEFLMQVFGMQLNMEVELAAQLREKHILRTQTLLCDMLLRDAPIGIVSQTPNIMDLVKCDGAALYYGKRFWLLGTTPTENQIKDIAEWLLEYHKDSTGLSTDSLADANYPGAHLLGDAVCGMAAAKITAKDFLFWFRSHTAKEVKWGGAKHDPAEKDDGRKMHPRSSFKAFLEVVKRRSLPWEDVEMDAIHSLQLILRGS

SEQ ID NO: 12902 - protein, 1254 aa, Azotobacter vinelandii
MKIPRRKPSHRLAAAYIALGGLFYGLSSLPANAAERLDIMHWWVSSGERASIEVLRERIRAQGLEWREQAVAGSGTARYINELRKRVAGGRPPSASQMIGFDIQEWARAGHLESLDEAAARNEWDEVVPFGIQALSKYQGHWYAAPINTHSTNWLWMNQRLLEKLGSPPAPDTWDDLVLLLERARTAGMLPLAVGREAWEHTLLFESVAVSTGGAEFYRRAFVELDAEALPLPLAIRIFERMRVLSRFVDPGFRRRRWDQATDLVRKGEALLQVQGTWVDGEFALHGMQPGRDFQCFRFPDTQGVVLFNSDQYVLLKNGPGSQAARRILLDTLMDPDFQAAVNRRSGAIPARVDVPKDGFDACGQRAIDDMRGANMRRTMMGSIAMGQRQPARRQDRHLQRGEPPSRRRTRRRPGGRSAAAGAFRRTLMSVLTPFANLRLTTKILLLVGLLGSIALAISIYSMANMRSVDRGYRGLIERQAQSALLLSDAALLLSDSSKLVYAVLTEQEEHKMRAVNGVVSGLQKEFDATLARIRPLIPGRAAALDAIAAQAPAVFEHARAIVEAAARWRGDRALRIIHEGFEPALRALQADMEALRGASIAEFGHASVELNRTTNRTIVAAAIAVVGGLLLVLALSGYLSITQISRPIAALTRIMERLTDRRYDDAIPGTGRRDEVGTMAQALQVFKDSMQRADRLSIEVAKSEQARLLSEQIAREKTAFLALMSHEIRTPLNAMLGMTQLALKSELSPPQRMRIETILRAGRHLLSIINDILDLSKIDSGKLVLEKTDFELEHLLADVVGMLADKAADKGLPLHVRVADGAPRMLVGDPMRISQILLNYLDNAIKFTQRGEIALEIEVRPDGTEYWLLTGSVRDTGIGMDAQQVANLFQAFRQADASITRRFGGTGLGLAICRRLAESMDGSTGASSTPGAGSTFWFSARLGRSALSEPAPLSMVRPEENAGPDGPAPAAPSCAPGQDARALHGRRVLLVDDNALNRTVATGLLESGGLLVDAVDDGQAALDTLRAAPDGRYAAVLMDMQMPVMDGLTATRLLRTEPRFAGLPILAMTANATREDIAATVQAGMNAHIAKPIDEGALWDILLHWISREAVEAGSERNIPAPTAAETDDAPPMEIFTPAPLRELRQRLAPARFEALLAMFEEDCRARCLRIGEAAWAGHVDALRQEAHDLVSTAGSFGLLALLALGLELRRAAQAHDMRATRHVAARIERATGEGLRALRATFPPPRPADAER

SEQ ID NO: 12903 - protein, 1969 aa, Dictyostelium discoideum
MEKSEQTNSFESSNNNNNNIDSNINNNLENNNNKNNNNNNNNNNNNNNNNNNIENSIDKNNKEDNSLVGVNSHRKHRTRLKSKKGNKHETKKEIDYKDLLIKLPHNAVSNFNSLENESSDNLTPPPPINSSPLPLPLSLPLPLSLPLPLPLPLPLPLPLPPNKENIEINMEDIIIPENKIKNKNNNNNIDINNNNNNNNEKQTSIIEMEDLDKLKQPKINEGSTGKKGKSHFFSFLQRGDKTNSSILKSSEQPTHKKTKTNINTPPDYPIHYFGHHKRFSSSSDEGSDNSKSQHSSVNTPTLSRHNIDSLPESQQSQKQSQQQSQQPQQQNKTKQIQQTILNNNNDNLNEVTPIKKSSLPTLEVSPIQSNIINNQTTEKHNSGGFTALTSASAMNHQNQRRYREHHQINHQQQQQQHHRHYHHHINSGGSSGSSDKFDYVSATGLSTKNGFNPKSLDVDHFPISDKRNNINIQAPSTPVQSRNYPLFTTQSPKNANSASKSKNKLKNLKRKIASSITGNNPSGISSSAFNHSFSSWNNNNSVYTGGNSGGGSGGGGSGGGGGGGGGGGGIGTPSSFLDDNNNLNNGENFKNSNSYNNNNGSNRSISHDEWLRQFYHKHLERYEKTKAVDYLIIKPWNFISWILRPSRIANYQSKILYRRAYILNFLNLVLFVVYLLSTILSSNEWFIFAPGILLSVIYFFLGKINNKMYLIAFLTISTAVAINITSIIYDLTHTRPTDKLIFSWDLLVMIMVPLLFPSIVYSIVILISVAVTYIGLGIYVQSSHNFYLLDAYDSFGELLRSIIIVFVILMFYTILSSVDLKEIERKESRIQSLFRISNEALVVHKDGLITDANPAFESMFQIKLQDLLYPIQSGIWEFLPALEGMFEPGASKLFDNPDMGVIETTGIDSSGRTFQVEVRTNKATYDGEPVDVISIIDITGRKQLMEADYALRKAEAANEAKVIFLTTVSHELRTPINGVLASADILERTTLDSTQKEFLNCIKLSGNYLLDLINDILDYSKIEAGKMEIIKYDFSILKMLDNSIRIVSKNIYEKGLDLFIFIDPNVPVIVNGDQRRIKQILLNFLSNSIKFTNHGQIIIRVKLVTDDSTHSLIKFDVEDSGIGIKTEHLNPLFASFSQIDSGNSRKYRGTGLGLSISKRLCKMMGGDVKVKSEFGVGSTFSFTIPCGIPNTTTRFSLQSLGSAIYMGEDIQGINKPIGKKKYGASGVVGIVIDSNKYTRKSISQYFAILKISCVDFENKKEFENYLSTLATVDQTTNPQVYLVITSIIDINQLTTNGLPRDRIYHWILMESPNEERKLPLEFENRFVKPAQFADIVRCLYKIDSINFFIEQMAGSPYKASKDLQSGGSSNESGDGGRSLSGGGGGVGSNGNGNGGGGLDSNISPSELSSSEHQLISTPLSDVNEFEDINLINQSLSGLGPSAKVLNSTYFNGLSQSSKIYNNNNRNGVGIGNHHHDHYYQHRHHHSLPPEEIDYDESPFLFLNKPIRKVYHSQPSTPVTNGIALMDSSSKCPSIPSSSSASASALSPNSRHSNELGNGKTTQSFVFSPTSRKFSLNDSFNPSISTIVLPQVSYSPSMQGGNFPINMESVYKKIESHNNNFKRSESKPSTPTFLSNQPSPATSNSPQLLQSPTTSTTGSINLSPHRSPNIRLPLEVRSGSLSSLKPLREDEELESISDDHTSHLKGSSHSINQQIPSTIQQQQQQQQQQQQQQQQQQQQQQQQQQQQQQQQQQQQQKPQQQQQKPTTTTTTTSTQLPQNIEKTTTTTTTSTTKPTATSSSSSSSKTTKTQQQQHHPTTTTTTKSEKIEKTAAATTSEKIEKILLVEDNFVNVKIFSKLLKDSGYIFDVAHNGVEAVECVKKGAYDLILMDCQMPEMDGFEATTAIRELEKSNLIESPPSKKHSHVVIVALTANSGYKDKQKCLSVGMNDFLQKPIKTSDILIQMIKNHLN

SEQ ID NO: 12904 - protein, 1171 aa, Oryza sativa; identical to SEQ ID NO: 364

SEQ ID NO: 12905 - protein, 1171 aa, Oryza sativa; identical to SEQ ID NO: 364

SEQ ID NO: 12906 - protein, 1171 aa, Oryza sativa; identical to SEQ ID NO: 364

SEQ ID NO: 12907 - protein, 1298 aa, Neurospora crassa
MTDGPTLAAIAALVKSLAVDPATTQTSGLRPSTHVRLPGPYTREKGDLERELSALVVRIEQLETAAIAASPPAMPDTPNAPTDALFSNGTLSPSSETPDARYPAPLPRNGFIDEALEGLREHVDDQSKLLDSQRQELAGVNAQLIEQKQLQEKALAIIEQERVATLERELWKHQKANEAFQKALREIGEIVTAVARGDLSKKVRMNSVEMDPEITTFKRTINTMMDQLQVFSSEVSRVAREVGTEGILGGQAQIEGVDGTWKELTDNVNVMAQNLTDQVREIASVTTAVAHGDLTKKIERPAKGEILQLQQTINTMVDQLRTFASEVTRVARDVGTEGILGGQADVEGVQGMWNELTVNVNAMANNLTTQVRDIIKVTTAVAKGDLTQKVQAECRGEIFELKKTINSMVDQLQQFAREVTKIAREVGTEGRLGGQATVHDVQGTWRDLTENVNGMAMNLTTQVREIAKVTTAVAKGDLTKKIGVEVQGEILDLKNTINTMVDRLGTFAFEVSKVAREVGTDGTLGGQAQVDNVEGKWKDLTENVNTMASNLTSQVRGISTVTQAIANGDMSRKIEVEAKGEILILKETINNMVDRLSIFCNEVQRVAKDVGVDGIMGGQADVAGLKGRWKEITTDVNTMANNLTAQVRAFGDITNAATDGDFTKLVEVEASGEMDELKKKINQMVYNLRDSIQRNTQAREAAELANKTKSEFLANMSHEIRTPMNGIIGMTQLTLDTDLTQYQREMLNIVNSLANSLLTIIDDILDLSKIEARRMVIEEIPYTLRGTVFNALKTLAVKANEKFLDLTYRVDHSVPDHVVGDSFRLRQIILNLVGNAIKFTEHGEVSLTIQKASSVQCSTEEYAIEFVVSDTGIGIPADKLDLIFDTFQQADGSMTRKFGGTGLGLSISKRLVNLMGGDVWVKSEYGKGSKFFFTCVVRLANDDISLIAKQLNPYKSHQVLFIDKGRTGHGPEIAKMLHGLGLVPIVVDSERNPALEKARAAGQAPYDVIIVDSIEDARRLRSVDDFKYLPIVLLAPVVHVSLKSCLDLGITSYMTTPCQLIDLGNGMVPALENRATPSLADNTKSFEILLAEDNTVNQRLAVKILEKYHHVVTVVGNGEEAVEAVKRKKFDVILMDVQMPIMGGFEATAKIREYERSLGSQRTPIIALTAHAMMGDREKCIQAQMDEYLSKPLQQNHLIQTILKCATLGGQLLEKNRERELTRAADAVTGGRRDNGMYSASQAAQHAALRPPLATRGLTAADSLVSGLESPSIVTADKEDPLSRARASLSEPNIHKAS

SEQ ID NO: 12908 - protein, 1298 aa, Neurospora crassa
MTDGPTLAAIAALVKSLAVDPATTQTSGLRPSTHVRLPGPYTREKGDLERELSALVVRIEQLETAAIAASPPAMPDTPNAPTDALFSNGTLSPSSETPDARYPAPLPRNGFIDEALEGLREHVDDQSKLLDSQRQELAGVNAQLIEQKQLQEKALAIIEQERVATLERELWKHQKANEAFQKALREIGEIVTAVARGDLSKKVRMNSVEMDPEITTFKRTINTMMDQLQVFSSEVSRVAREVGTEGILGGQAQIEGVDGTWKELTDNVNVMAQNLTDQVREIASVTTAVAHGDLTKKIERPAKGEILQLQQTINTMVDQLRTFASEVTRVARDVGTEGILGGQADVEGVQGMWNELTVNVNAMANNLTTQVRDIIKVTTAVAKGDLTQKVQAECRGEIFELKKTINSMVDQLQQFAREVTKIAREVGTEGRLGGQATVHDVQGTWRDLTENVNGMAMNLTTQVREIAKVTTAVAKGDLTKKIGVEVQGEILDLKNTINTMVDRLGTFAFEVSKVAREVGTDGTLGGQAQVDNVEGKWKDLTENVNTMASNLTSQVRGISTVTQAIANGDMSRKIEVEAKGEILILKETINNMVDRLSIFCNEVQRVAKDVGVDGIMGGQADVAGLKGRWKEITTDVNTMANNLTAQVRAFGDITNAATDGDFTKLVEVEASGEMDELKKKINQMVYNLRDSIQRNTQAREAAELANKTKSEFLANMSHEIRTPMNGIIGMTQLTLDTDLTQYQREMLNIVNSLANSLLTIIDDILDLSKIEARRMVIEEIPYTLRGTVFNALKTLAVKETEKFLDLTYRVDHSVPDHVVGDSFRLRQIILNLVGNAIKFTEHGEVSLTIQKASSVQCSTEEYAIEFVVSDTGIGIPADKLDLIFDTFQQADGSMTRKFGGTGLGLSISKRLVNLMGGDVWVKSEYGKGSKFFFTCVVRLANDDISLIAKQLNPYKSHQVLFIDKGRTGHGPEIAKMLHGLGLVPIVVDSERNPALEKARAAGQAPYDVIIVDSIEDARRLRSVDDFKYLPIVLLAPVVHVSLKSCLDLGITSYMTTPCQLIDLGNGMVPALENRATPSLADNTKSFEILLAEDNTVNQRLAVKILEKYHHVVTVVGNGEEAVEAVKRKKFDVILMDVQMPIMGGFEATAKIREYERSLGSQRTPIIALTAHAMMGDREKCIQAQMDEYLSKPLQQNHLIQTILKCATLGGQLLEKNRERELTRAADAVTGGRRDNGMYSASQAAQHAALRPPLATRGLTAADSLVSGLESPSIVTADKEDPLSRARASLSEPNIHKAS

SEQ ID NO: 12909 - protein, 1281 aa, Neurospora crassa
MTDGPTLAAIAALVKSLAVDPATTQTSGLRPSTHVRLPGPYTREKGDLERELSALVVRIEQLETAAIAASPPAMPDTPNAPTDALFSNGTLSPSSETPDARYPAPLPRNGFIDEALEGLREHVDDQSKLLDSQRQELAGVNAQLIEQKQLQEKALAIIEQERVATLERELWKHQKANEAFQKALREIGEIVTAVARGDLSKKVRMNSVEMDPEITTFKRTINTMMDQLQVFSSEVSRVAREVGTEGILGGQAQIEGVDGTWKELTDNVNVMAQNLTDQVREIASVTTAVAHGDLTKKIERPAKGEILQLQQTINTMVDQLRTFASEVTRVARDVGTEGILGGQADVEGVQGMWNELTVNVNAMANNLTTQVRDIIKVTTAVAKGDLTQKVQAECRGEIFELKKTINSMVDQLQQFAREVTKIAREVGTEGRLGGQATVHDVQGTWRDLTENVNGMAMNLTTQVREIAKVTTAVAKGDLTKKIGVEVQGEILDLKNTINTMVDRLGTFAFEVSKVAREVGTDGTLGGQAQVDNVEGKWKDLTENVNTMASNLTSQVRGISTVTQAIANGDMSRKIEVEAKGEILILKETINNMVDRLSIFCNEVQRVAKDVGVDGIMGGQADVAGLKGRWKEITTDVNTMANNLTAQVRAFGDITNAATDGDFTKLVEVEASGEMDELKKKINQMVYNLRDSIQRNTQAREAAELANKTKSEFLANMSHEIRTPMNGIIGMTQLTLDTDLTQYQREMLNIVNSLANSLLTIIDDILDLSKIEARRMVIEEIPYTLRGTVFNALKTLAVKETEKFLDLTYRVDHSVPDHVVGDSFRLRQIILNLVGNAIKFTEHGEVSLTIQKASSVQCSTEEYAIEFVVSDTGIGIPADKLDLIFDTFQQADGSMTRKFGGTGLGLSISKRLVNLMGGDVWVKSEYGKGSKFFFTCVVRLANDDISLIAKQLNPYKSHQVLFIDKGRTGHGPEIAKMLHGLGLVPIVVDSERNPALEKARAAGQAPYDVIIVDSIEDARRLRSVDDFKYLPIVLLAPVVHVSLKSCLDLGITSYMTTPCQLIDLGNGMVPALENRATPSLADNTKSFEILLAEDNTVNQRLAVKILEKYHHVVTVVGNGEEAVEAVKRKKFDVILMDVQMPIMGGFEATAKIREYERSLGSQRTPIIALTAHAMMGDREKCIQAQMDEYLSKPLQQNHLIQTILKCATLGGQLLEKNRERELTRAADAVTGGRRDNGMYSASQAAQHAALRPPLATRGLTAADSLVSGLESPSIVTADKEDP

SEQ ID NO: 12910 - protein, 1559 aa, Nostoc punctiforme
MKAPLPDNEIQRIESLLEYKILDTHSEAAFDDLTHLASYICGTPIALISLIDSDRQWFKSKVGMEALETPRDLAFCAHAILQPEVFVVPDATQDERFATNPLVTSDPDIRFYAGVPLTNPEGYALGTLCVIDRVPRNLSPEQVEALRIIGRQVIKQLEMRRNLASLVLVTHTRKQAHKRRKQFFKTVAGGFGLASAILVLIGVISYQNTRILIDASNQVQKTQGKINKLEELLSEMKDAETGQRGYILTGQESYLEPYQAVVVNIDQKIVELKDLIADQPSQQNQFAALESLIAAKFAILKQTIYLRQNQGFEAALQVIQTNHGKYIMDDIRKVIHEIENEDKRLLQQQSQAAKASANNTVLTLAIAICLGFITLAIVYYFIYREVKERKLTEETLNQERNFISAVLDTASALVIVLDTQGQIVRFNQACEQTTGYSFDEVRGRHFWNLFLIPEQVEPVKAVFEQLRTGEAPKEYENYWVAKDGSLRLISWANAILQDHEGCVEYIVATGIDISDAYDELRLRKRAEQHLKAQYSTTRVLAESTTISEAMPQILQGICESLEWDLSEIWMVNQRVNLLSLLNSWYKMSSEMQEFEILSQQIIFAPGIGLPGRVWVSSEPVWIVDVVKDKDFIRSQMAVQAELHGAFGFPIHSGKKILGVITCFSHEIQQPDPDLAKVMNSIGEQVGQFIERKQAEEELQRQNLRSQLFTEITLKIRQSLKIQEILQVSVTEVQKILHSDRVLIYQPLTDGSGSTVVEAVVSGWLTIKEKKLTDSYFQAEYTQQYYLQQYRQKRNLELADLDIVEIQKRHIELLQQFGVKSNLVIPILVKEELCGLLIVHQCGSSRQWSSFETHLLRQIADQVGIALAQAQMLYAETQQRRELEVARHQAELASKTKSAFLANMSHEIRTPMNAVLGMTGLMLETPLNSEQQDFIETIRISGDALLSLINEILDLSKLEAGEMALETLDFDLSTCLEEVLELLAPSAHNKGLEIAALIYPNVPTQLQGDAGRLRQILMNLISNAIKFTSNGEVVVRAELRSLSSTTATIYFAITDTGLGITFEDQCRLFTPFTQVDASNTRKYGGTGLGLAICKQLVSLMGGEIGVESRLGKGSKFWFEVTFAQQLYPISSESERELLINRRLLVVDDNATNRKIIHHQATRWGMLVDQAASATIALKAIEETAKQKNLYDIAVIDMHMPEVDGMTLGEQIKANSAIAGLPLIMLTSTNQRDEIQRALKIGFAAYLVKPVKPSRLLDTIMTILGTQIKEETEVRSQEFKLKDYENNSNDHSSSSRLLARDFHKLRILLAEDNLVNQKVALKQLQSLGYSADVAGNGKEVLQLLEKIPYDLILMDCQMPVLDGLETTKEIHRWQESSFVSSRRPVVIAMTANAMKEDQQMCLDAGMDDYLSKPVIKEKLAAALQRWGSVIFQAKEIYVLEQKKGSKTDVGSVDLPIDWERLHQLSENNPEFELELLEIFVEDMQPRLEIIKIAIADNDYEQLALQTHQIKGASANVGATTMHLAAQKLEQLAHNQERRGTTHLISELEDFVKCIQEFLITR

SEQ ID NO: 12911 - protein, 927 aa, Vibrio cholerae
MTQRYGLRARVMTLTLAPTLIIGLLLSALFSFNRYHDLETQVINSGASIIEPLAIASEDALRMQSRESVRRIISYAHRKNSKLVRSIAVFDANHELFVTSNFHPNFEKLMYPKDKPIPFLSSSVIDENTLILRTPIISERTVLDNGDANPATPVMGYIAIELDLSSLRLQQYQEIFSAGLVLVIGILLSGVFASRLMYDVTRPITHMKNMVDRIRRGHLDVRIEGKMHGELDTLKKGINAMAVSLSEYHVEMQHSIDQATSDLRETLEQLEIQNVELDIAKKRAQEAARVKSEFLANMSHELRTPLNGVIGFTRQMLKTQLTNSQADYLQTIEKSANNLLTIINDILDFSKLEAGKLALENIPFEFQEVLEEVVNLQATSAHEKGLEITLKIDPKIPRGVVGDPLRIQQVLTNLVGNSIKFTERGNIDVSVEMRALRDDVIDLQFMVRDTGIGISERQQAQLFQAFSQADASISRRYGGTGLGLVITQKLVSHMGGEISLTSRLHQGSTFWFTLRLHTTELPLNDGYNADSLNHRHLLLIEPNMQAAAIVQQTLVQSGLEVTYRSAIPEEQHVYDYVLLNLAPSKETNPTLVELWVQRALAMTHNVIVGVPSTELALADQLMQRYPVKCISKPLSRKKLLQTLAAQQPQLANTSLPKPQADKLPLCVMAVDDNPANLKLITALLQERVEYVVSCTSGQEAIEQAQSRQFDIILMDIQMPHMDGVTACKAIKQLKGYRDTPVIAVTAHAMAGERDRLLKAGMDDYLTKPIEEHILQQVLVHWSPHTRSKQVAKVTPPDGAAVISNALPSSPPAEEAIIDWPVALRQSANKEDLAKEMLGMLVDYLREVETVVNTALEDEEYPASDLLHHIHKLHGSCSYSGVPRLRKICASLEQALRNGASIDELEPELFELQDEMAKVLEASRDYLN

SEQ ID NO: 12912 - protein, 918 aa, Salmonella typhimurium LT2
MTNYSLRARMMILILAPTVLIGLLLSIFFVVHRYNDLQRQLEDAGASIIEPLAVSSEYGMNLQNRESIGQLISVLHRRHSDIVRAISVYDDHNRLFVTSNFHLDPSQMQLPAGAPFPRRLSVDRHGDIMILRTPIISESYSPDESAIADAKNTKNMLGYVALELDLKSVRLQQYKEIFISSVMMLFCIGIALIFGWRLMRDVTGPIRNMVNTVDRIRRGQLDSRVEGFMLGELDMLKNGINSMAMSLAAYHEEMQHNIDQATSDLRETLEQMEIQNVELDLAKKRAQEAARIKSEFLANMSHELRTPLNGVIGFTRLTLKTELNPTQRDHLNTIERSANNLLAIINDVLDFSKLEAGKLILESIPFPLRNTLDEVVTLLAHSSHDKGLELTLNIKNDVPDNVIGDPLRLQQVITNLVGNAIKFTESGNIDILVEKRALSNTKVQIEVQIRDTGIGIPERDQSRLFQAFRQADASISRRHGGTGLGLVITQKLVNEMGGDISFHSQPNRGSTFWFHINLDLNPNVIIDGPSTACLAGKRLAYVEPNATAAQCTLDLLSDTPVEVVYSPTFSALPLAHYDIMILSVPVTFREPLTMQHERLAKAASMTDFLLLALPCHAQINAEKLKQGGAAACLLKPLTSTRLLPALTEYCQLNHHPEPLLMDTSKITMTVMAVDDNPANLKLIGALLEDKVQHVELCDSGHQAVDRAKQMQFDLILMDIQMPDMDGIRACELIHQLPHQQQTPVIAVTAHAMAGQKEKLLSAGMNDYLAKPIEEEKLHNLLLRYKPGANVAARLMAPEPAEFIFNPNATLDWQLALRQAAGKPDLARDMLQMLIDFLPEVRNKIEEQLVGENPNGLVDLVHKLHGSCGYSGVPRMKNLCQLIEQQLRSGVHEEELEPEFLELLDEMDNVAREAKKILG

SEQ ID NO: 12913 - protein, 1136 aa, Picea abies
MSTTRPRAATHSASSGSVSRSSKHSARVITQTPVDAKLQAEFEGSVHSFDYTKSIDISGDSSSVPSETVKAYLQRLQKEMLIQPFGCVLAVEEGSCAVVGYSENAPEMLDVVGGAHAVPSIGGQQQEGGGGGGGLLRIGMDARTLFKPASAAALQKAATFADMHLVNPIFVRCNRSGKPFYAILNRIDAGLVIDFEPVMPSDVPVSAAGALQSYKLAAKAISRLQSLPGGDIRLLCDTVVQEVRELTGYDRVMAYRFHEDEHGEVVAEMRRPDLEPYLGLHYPATDIPQASRFLFMKNRVRMICDCCAPPVNVIQDKRLRQPLSLCGSTLRAPHGCHAQYMANMGSIASLVMSVTTNENGDDSEGGGQQQPQNRRKLWGLVVCHHTSPRVIPFPLRYACEFLMQVFGIQLNKEVELAAQLREKHILRVQPVLCDMLLRDAPVGIVSQTPNIMDLVKCDGAALLYGKRLWLLGTTPTEAQILDIADWLLEHHRDSTGLSTDSLAEAGYPGAASLGDAVCGIAAARITSKDFLFWFRSHTAKEIIWGGAKHDPNDKDDGRRMHPRSSFKAFLEVVKRRSLPWEDVEMDAIHSLQLILRDSFHDIDDSDSKTMIHARLNDLRLQGIDELSAVTNEMVRLIETATVPILAIDSNGLVNGWNTKAAELTGLLADEVIGRPLIDLVQHDSVEIVKKMLYLALQGEEEQNVEIKLKTFGIQEEKGPVVLIVNACSSRDLEENVVGVCFVAQDVTWQRIAMDKFTHLQGDYRAIVQNPNPLIPPIFGADEYGYCSEWNPAMEKLTGWKREEVIGKMLVGEVFGIHRMSCQLKGQDGLTKLRIVLNNAMAGKETEKFPFSFFDRHGKNTEALLSANKRTDAEGIITGVFCFLHVTSTELQQALQVQRMAEQAAMDRLKELAYIRQEIRNPLYGIIFTRKLMESTDLSEEQKQIVQTSALCQRQLVKVLDDADLESIEDGYLELDTIEFTLGTVLDAVVSQGMILSREKGLQLIRDSPEEIKTMCLYGDQLRLQQILSNFLINALRFSTSEGWVGNKVVPTKRHLGSGVNVMHMEFRITHSGQGIPEELIKEMFVHNQDMFQEGLGLYMCQQLVKIMNGDVQYLREAGRSSFIINVEFPLAQTDKQ

SEQ ID NO: 12914 - protein, 314 aa, Picea abies
YLGLHYPATDIPQASRFLFMKNRVRMICDCCAPPVNVIQDKRLRQPLSLCGSTLRAPHGCHAQYMANMGSIASLVMSVTTNENGDDSEGGGQQQPQNRRKLWGLVVCHHTSPRVIPFPLRYACEFLMQVFGIQLNKEVELAAQLREKHILRVQPVLCDMLLRDAPVGIVSQTPNIMDLVKCDGAALLYGKRLWLLGTTPTEAQKLDIADWLLEHHRDSTGLSTDSLAEAGYPGAASPGDAVCGIAAARITSKDFLFWFRSHTAKEIIWGGAKHDPNDKDDGRRMHPRSSFKAFLEVVKRRSLPWEDVEMDAIHS

SEQ ID NO: 12915 - protein, 1111 aa, Arabidopsis thaliana
MSSNTSRSCSTRSRQNSRVSSQVLVDAKLHGNFEESERLFDYSASINLNMPSSSCEIPSSAVSTYLQKIQRGMLIQPFGCLIVVDEKNLKVIAFSENTQEMLGLIPHTVPSMEQREALTIGTDVKSLFLSPGCSALEKAVDFGEISILNPITLHCRSSSKPFYAILHRIEEGLVIDLEPVSPDEVPVTAAGALRSYKLAAKSISRLQALPSGNMLLLCDALVKEVSELTGYDRVMVYKFHEDGHGEVIAECCREDMEPYLGLHYSATDIPQASRFLFMRNKVRMICDCSAVPVKVVQDKSLSQPISLSGSTLRAPHGCHAQYMSNMGSVASLVMSVTINGSDSDEMNRDLQTGRHLWGLVVCHHASPRFVPFPLRYACEFLTQVFGVQINKEAESAVLLKEKRILQTQSVLCDMLFRNAPIGIVTQSPNIMDLVKCDGAALYYRDNLWSLGVTPTETQIRDLIDWVLKSHGGNTGFTTESLMESGYPDASVLGESICGMAAVYISEKDFLFWFRSSTAKQIKWGGARHDPNDRDGKRMHPRSSFKAFMEIVRWKSVPWDDMEMDAINSLQLIIKGSLQEEHSKTVVDVPLVDNRVQKVDELCVIVNEMVRLIDTAAVPIFAVDASGVINGWNSKAAEVTGLAVEQAIGKPVSDLVEDDSVETVKNMLALALEGSEERGAEIRIRAFGPKRKSSPVELVVNTCCSRDMTNNVLGVCFIGQDVTGQKTLTENYSRVKGDYARIMWSPSTLIPPIFITNENGVCSEWNNAMQKLSGIKREEVVNKILLGEVFTTDDYGCCLKDHDTLTKLRIGFNAVISGQKNIEKLLFGFYHRDGSFIEALLSANKRTDIEGKVTGVLCFLQVPSPELQYALQVQQISEHAIACALNKLAYLRHEVKDPEKAISFLQDLLHSSGLSEDQKRLLRTSVLCREQLAKVISDSDIEGIEEGYVELDCSEFGLQESLEAVVKQVMELSIERKVQISCDYPQEVSSMRLYGDNLRLQQILSETLLSSIRFTPALRGLCVSFKVIARIEAIGKRMKRVELEFRIIHPAPGLPEDLVREMFQPLRKGTSREGLGLHITQKLVKLMERGTLRYLRESEMSAFVILTEFPLI

SEQ ID NO: 12916 - protein, 1111 aa, Arabidopsis thaliana
MSSNTSRSYSTRSRQNSRVSSQVLVDAKLHGNFEESERLFDYSASINLNMPSSSCEIPSSAVSTYLQKIQRGMLIQPFGCLIVVDEKNLKVIAFSENTQEMLGLIPHTVPSMEQREALTIGTDVKSLFLSPGCSALQKAVDFGEISILNPITLHCRSSSKPFYAILHRIEEGLVIDLEPVSPDEVPVTAAGALRSYKLAAKSISRLQALPSGNMLLLCDALVKEVSELTSYDRVMVYKFHEDGHGEVIAECCREDMEPYLGLHYSATDIPQASRFLFMRNKVRMICDCSAVPVKVVQDKSLSQPISLSGSTLRAPHGCHAQYMSNMGSVASLVMSVTINGSDSDEMNRDLQTGRHLWGLVVCHHASPRFVPFPLRYACEFLTQVFGVQINKEAESAVLLKEKRILQTQSVLCDMLFRNAPIGIVTQSPNIMDLVKCDGAALYYRDKLWSLGVTPTETQIRDLIDWVLKSHGGNTGFTTESLMESGYPDASVLGESICGMAAVYITEKDFLFWFRSSTAKQIKWGGARHDPNDRDGKRMHPRSSFKAFMEIVRWKSVPWDDMEMDAINSLQLIIKGSLQEEHSKTVVDVPLVDNRVQKVDELCVIVNEMVRLIDTAAVPIFAVDASGVINGWNSKAAEVTGLAVEQAIGKPVSDLVEDDSVETVKNMLALALEGSEERGAEIRIRAFGPKRKSSPVELVVNTCCSRDMTNNVLGVCFIGQDVTGQKKLTENYSRVQGDYARIMWSPSTLIPPIFMTNENGVCSEWNNAMQKLSGIKREEVVNKILLGEVFTTDDYGCCLKDHDTLTKLRIGFNAVISGQKNIKKLLFGFYHRDGSFIEALLSANKRTDIEGKVTGVLCFLQVPSPELQYALQVQQISEHAIACALNKLAYLRHEVKDPEKAISFLQDLLHSSGLSEDQKRLLRTSVLCREQLAKVISDSDIEGIEEGYVELDCSEFGLQESLEAVVKQVMELSIERKVQISCDYPQEVSSMRLYGDNLRLQQILSETLLSSIRFTPAWKGLCVSFKVIARIEAIGKRMKRVELEFRIIHPAPGLPEDLVREMFQPLRKGTSREGLGLHITQKLVKLMERGTLRYLRESEMSAFVILTEFPLI

SEQ ID NO: 12917 - protein, 1118 aa, Lycopersicon esculentum
MSSSSTTNKTNCSRGSSARSRRSARVIAQTPVDAKLHVEFEESEQQFDYSSSVNLSNSTSNVPSSTVSDYLQKMQRGSLIQPFGCMIAIDAQNFAVIAYSENAPEMLDLTPHAVPSIEQQEALTFGTDVRKLFRSSGASALEKAVSFGELSLLNPILVHCKNSGKPFYAILHRIEVGLVIDLEPVDPHEVPVTTAGAIKSYKLAAKAIRKLQSLPSGDISLLCDVLVREVSHLTGYDRVMVYKFHEDEHGEVVAECRTPELEPYLGLHYPATDIPQASRFLFMKNKVRMICDCLAPPIRVIQDPRLAQSLSLGGSTLRAPHGCHAQYMTNMGTVASMAMSVMINEQDDELDSDQQVGRKLWGLVVCHHTCPRFLSFPLRYASEFLLQVFSVQVNKEVEMAAQLKEKQILQIQTVLCDMLLRDAPMGIVTQSPNVMDLVKCDGAALYYRNKLWLHGVTPAESQIRDIAEWLNESHGDSTGLNTDSLMEAGFPGASVLGDAVCGMAAVKITSKDFLFWFRSHTAKEIKWGGAKHLPGDKDDGRKMHPRSSFKAFLEVVKRRSLPWEDVEMDAIHSLQLILRGSLQDEAADCSKMIVNVPAVDTIIDRVDTLHINDMVRLVETASMPVLAVDTSGRINGWNSKVSELTGLPVENVIGVPLVDLVIGGTTNTIKRVLSLALQGKEEKNVEIKLRTLGPQEKVGSISIVVNACCSRDFKQNIVGVCFTGKDVTGLKLIKDKYSRVQGDYVGIIHSPSPLIPPIFVMDEQGRCVEWNDAMHKLTGSKREEVIDQMLLGEVFTVNSFGCRVKDQDTLTQLTILLNRVIAGGEGEKLFFGLFNKQDKYIEALISANKKVDDDGRVTGVLCFLHVPSPELQYAMHVQKLSEQAAKNSLKKLAYVRLELKNPLNGINCIQNLLKSSDLSKDQRQLLKTSTMCQKQLAKIIDDTDIESIEECYTEMNSCEFNLGEVVTVVINQVMILSQERKVQVTWDSPVEVSQLYLIGDNLRLQQVLSDFLTTAILFTPFEDSSVHFRVIPRKERIGTKMYIMHLEFRITHPSPGIPDDLIQHMFHYSRSISREGFGLYISQKLVKIMDGTVQYLREADRSSFIILVEFPLMEKKNN

SEQ ID NO: 12918 - protein, 1135 aa, Sorghum bicolor; identical to SEQ ID NO: 367

SEQ ID NO: 12919 - protein, 1135 aa, Zea mays
MSLPSNNRRTCSRSSSARSKHSARVVAQTPVDAQLHAEFEGSQRHFDYSSSVGAANRPSASTSTVSTYLQNMQRGRYIQPFGCLLAVHPDTFALLAYSENAPEMLDLTPHAVPTIDQRDALGIGVDVRTLFRSQSSIALHKAAAFGEVNLLNPILVHARTSGKPFYAILHRIDVGLVIDLEPVNPADVPVTAAGALKSYKLAAKAISRLQSLPSGNLSLLCDVLVREVSELTGYDRVMAYKFYEDEHGEVISECRRSDLEPYLGLHYPATDIPQASRFLFMKNKVRMICDCCATPVKVIQDDSLAQPLSLCGSTLRASHGCHAQYMANMGSVASLAMSVTINEDEEEDGDTGSDQQPKGRKLWGLVVCHHTSPRFVPFPLRYACEFLLQVFGIQLNKEVELAAQAKERHILRTQTLLCDMLLRDAPVGIFTRSPNVMDLVKCDGAALYYQNQLLVLGSTPSESEIKSIATWLQDNHDGSTGLSTDSLVEAGYPGAVALREVVCGMAAIKISSKDFIFWFRSHTTKEIKWGGAKHEPVDADDDGRRMHPRSSFKAFLEVVKWRSVPWEDVEMDAIHSLQLILRGSLPDEDANRNNVRSIVKAPSDDMKKIQGLLELRTVTNEMVRLIETATAPVLAVDIAGNINGWNNKAAELTGLPVMEAIGRPLIDLVVTDSIEVVKQILDSALQGIEEQNMEIKLKTFHEHECNGPVILKVNSCCSRDLSEKVIGVCFVAQDLTRQKMIMDKYTRIQGDYVAIVKNPTELIPPIFMINDLGSCLEWNKAMQKITGIKREDAINKLLIGEVFTLHDYGCRVKDHATLTKLSILMNAVISGQDPEKLFFGFFDTDGKYIESLLTVNKRTDAEGKITGALCFLHVASPELQHALQVQKMSEQAATNSFKELTYIRQELRNPLNGMQFTCNLLKPSELTEEQRQLLSSNVLCQDQLKKILHDTDLESIEQCYMEMNTVEFNLEQALNTVLMQGIPLGKEKQISIERNWPVEVSCMYLYGDNLRLQQILADYLACALQFTQTAEGPIVLQVMSKKENIGSGMQIAHLEFRIVHPAPGVPEALIQEMFQHNPGVSREGLGLYISQKLVKTMSGTVQYLREADTSSFIILMEFPVAQLSSKRSKPSTSKF

SEQ ID NO: 12920 - protein, 1014 aa, Synechocystis sp. PCC 6803
MSPSQPHPPIATFEPESFLILVVDDVKENIYVISELLEGEGYSTTFVTSGPEALQRVTQAQPDLILLDLMMPGMDGLEVCDRLKQDPQTRDIPVIFLTASNEKQDLLQAFAKGAVDYVTKPFSPPELLARVKTHLELKQTRDNLHHTLLEQARTAEALACTSTRLGILVQNMQAGVLMTDAQGTIVVVNPEFARLFNLGFPADLLLGKNLTAIAPRINGLISHGQGVTHNFLAIESPEPLLKVELALEDGRFFERDYVPIMLGDSSQGHFWLYRDISQRKQVEMIQGQSLEMERRMRQQLAEQNQELVAATTAAEAANRSKSEFLATMSHEIRTPMNAIIGMTGLLLDTDLTTQQKYFAQTIRNSGETLLTLINDILDFSKIEAGKLDLEVYPFDLGQCLEEALDVVVPSARQKSLTLIRRFLTPIPPNLQGDVTRLRQILVNLLSNAVKFTEAGQVKVTVEVVDHDAAKGEYQICFAVQDTGIGIAPNQQQALFQAFSQGNSSITRRFGGTGLGLAICVRLTALMGGTIWAESNGCVVGNPPELWQIGQPTIEGSTFYFTVNLTVLPSCAYSVHNLRHSLFIGRSVLVADYDEGRGTRMRNLLASWRLQAEQITFSSPAKLGEDLKSRLTQKNYGALILHCPYPEGRGKQFTDFDLGKITTWAPTEQDIPVLVATDIYLSPGERYSGDKPPVQAWIKSPINPDELENTLVDVLGQTEPPTLVSTEAISGPLFPYSSSNLTILLAEDNLINQQVAKLLLKKLGYPVDVVNNGQEALSALAKGDYDVVLMDVEMPEMDGLTATEHIRRSQGRSERPWIIAVTAYSMEGDRERCLASGMNDYVSKPIRLEALQQALQVAATALQSTSQDRMATVSCVSAFEAKPSPSSPCPEDPAGTTLPPIDQDIICSLRDLDRENGQLILREIIDIYCQTAPELLQRIKLAIANQDWGNLSSAAHTLGSSSANLGAVLLAQQAKTLENLTRQRDSRAMDPGHFPTLAASYERVQGELKTMLDRL

SEQ ID NO: 12921 - protein, 939 aa, Marinomonas mediterranea
MLALNSVSLRSKLFFAIYTPCLILSIIASFAFTLSRFDTIDRNFKEGVEKSVSQMTVSAEHALSHSDEGMLNDTLRTLLKHDHINTVQLYNAEEKLITELGKTSEGNTLPFTNANESDENPHFFATIAPIKHPVTRLEHQSNTNFITSSYSVPQVSGWLKVEASKEASIVSKYRYLSATLGTFFIFNLLAIFALLNVTASLLRPIEKISDTVNKITQGHFGATKGLNLPTQYSTVVSDLNDISSRLENHRAEILSNVDQATEDIRRNMDSLEEKSAQLHIANKEATESNRLKSQFLANISHEIRTPLNAIMGYIQILQKDQLDKQQRLYMDTIAQSTTNLLTIISDILDFSKIEAGKLSLDLTDINIRDIVDEVYQILSSANLVNASKELDLIPEFDLDVPTWVIGDPVRIRQVLTNLIGNAIKFTHEGSVRTTVKILEKSNSSLKLSFQIIDTGVGIPENKLDNLFKPFSQVDTSTTRKFGGTGLGLVITKKLVKQMGGNVEVSSEHGIGSNFRFTIVLKPSQKEQKVEDPISKSLLVFEPSLNYRNYLKTYLNHVGANCTFTSSLEQTVTLLNSQTSLDAVLLNIDSHTEKLEEIQELVAYITQQFRLPCILLTKRPHDISKSSILHTLCSEILMTPISHNRLNKSLRSLEEPKLLSEDRLYADETTTTELTTELELEAVEPPEETSPLSGIQILAVDDTQINLQLLGHWLEPHGLQVDLAYSGKQAIEMAKETQYDLILMDIQMPEMDGMEATQRLRKLTNYVHTPIVALTAHALGSEQKQIVSSGMNAYLTKPVNEDILLETITQWCQSKKSYQDLADEKVVALFDIDKALSIANGKSVIAKDMFDMLLNTLEADKKLILHHFEEKDLAKLIHVVHRLHGGSKYTGAIELSKHAGFLETHLKELQFDDVEGVLEDFTDSIDALIDIAPLIKWPQE

SEQ ID NO: 12922 - protein, 1788 aa, Magnetococcus sp. MC-1
MSHRWMIWASLWLWLALLGTATAAEGVMLNEAERAWLAEHPVVRVGMDPAFAPYSFIEDGRYQGIVPEMLQALAAETGLVFETVAGLSWSEILAGAKARHLDLVASLVQTPERDRFLQYTQIYLPTPLVVMARNDDSSMSSAADLVGKRVALVRDYATSAKLLQEHPESIPYMVESVAQGLLAVSVGQADAFVGAIGVSDYTARQKGLSNLKVVAPYGGLQYGQRFGVRKDWPLLVSILEKGLASMTEKQKIALFDRWLPVQNQLHPAPVAKIPVKLQLAPHEQAWLSNHPKIRIGVMRGWPPIDFADAQGRPQGIGTDTVHLLDEMLGGGVLEIVSDTWPTLYQQVIDKKLDGLMGITPTEARRPFFEFTAPYMTIPHAIFARSDAPYATGLKSLQGKTVVVEKHFFVADLLRHTFPSIKILERRDTREALYAVSKGDAYAYVGNRAVATYIIDQEIISNVQEMGIVRLSRSDNAIGVRKDWPILRDVLQKGLSQITMAQKREMAAKWVKGSVQAPLELPLTKGEQRWLSEHPQVRLGVRENWAPYDYQDRAGFQQGIAADYVALLDRYLTVTMKMQHIRDDSEWVRIKDTLDVLTTLTPQSAKSTGMLPTSSYLRLPLVMMMRRASPLVEGIEDLKGRTISVVQGVVDTYALAKRYPWVMWRNMATTEQALQALAQGEVTAHLDTIPAVRVATERLALDSLQVVTPTDLQLQLSFGVRPDWPELVSIINKVMQAVPPAEKRVIVQSWMRPRTQTAMDWIYLWKVVGTLLLLAAVVLGVVLVWNRRLSQEIEQRKRVEEELSKLYRAVEQTPVSVVITDLEGRVEYVNPTFCHNSGFAEDEVLGRTNGLIPSDHTSGAEYQALWQQITAGGEWSGEFLNRTKSGGLVWERVSISAVRSADGQITHYLGIKEDISQMKEDQERLAHAKESADLANRAKSSFLANMSHEIRTPINAIVGMCHLAQRMTVEPKLRDYLGHIQVAADTLLGIINDILDVSKIEAGKLHFEDIPFKLDELISRVMRLQGLKAQDKNVELVIDLEPQVPQTVVGDPLRISQILTNLVNNAVKFTEQGEVVLSVKLQGVFDGRVTLYFEVRDSGIGMEDAQLQRLFTPFQQGDDSMTRRYGGTGLGLSICQNLVKMMGGHLQVESRLSEGSRFYFTVSLPIHQAPALERVDQTSLNLRVLVVDDNQTVREVLQRMLKSFGYWVDLAAEGPTGVALVESALQQGQPYDLILMDWHMPQMDGLQASEQIRHLQGVRAQRTPVMIMAAAYGQEDSHTAVSEPGFAGFLEKPTTPANLFGAIMIGLHGAPQEAPSGDAGWGYTVPDLSGYRVLLVEDHPINQALAREMLSLAKLQVITADHGQHALDLLQEASVDLIFMDIQMPVMDGFSATQAIRADPRWQHIPIIAMTAHAMADDRQKCLDGGMNDHLGKPIDPPLLFAKITQWLGPQQRGRASHDAARSGRAPVLMGRRILMALGGGSLGDEIEQMLQQSGALVEQLATGREDLNRWQPEVVLVDRQGYESLSSSPLPRCYTVLVEHEGHATVERPVWADDWLLVPVEGLTLMATLQHALRDQCAGTTEGGADADAVVLPQEDRHFYLRWALAQGAGNRVLLRRLLQLFVEDHARDLELLGAMIARGAMAEVAALAHRLAGVAGGMGAMKLYALAKRMERHGEQARPLAISRLYPLLAEEMEAVLERLQTLGGAAVESPSQAQGALLDRGEMLEKLVELKRLIDGGQTDAVERAEELQGGVLEERFKKDLDQVKHLLQDYEFEAASKHLDAAILK

SEQ ID NO: 12923 - protein, 803 aa, Magnetococcus sp. MC-1
MGASRFVQAINPTGAIPRQPSMRATHPKPKILIVDDKPANLMALRRLLKNTHAELIEAESGNEALGLMLEHELALMLLDVDMPGMDGFEVSRMASGLDRTSNVPIILITAAYKDYSHRIKGYQAGAIDYIEKPIDDRILNAKVAIFLNLYNAHRESEQLRQDLTLNQERLELALEGANEGLWDWNILSNQVYYSPRWITMLGYATNEVNQDFSTWKTLIHPDDFESALACLERHFTTPEEPYRAEFRMRTKQGGWCWILARGKVVARTADGQPHRMVGAHQDISQRKQLEADLLAAKTEAEQANQAKSRFLANMSHEIRTPMNTILGMGEILLNAPNLTPKQHRYLSISQRAGDTLLGLINDILDLSKIEAGELHLEHTLFALHDELKSLITMLRPMARDKGLSMQCVIDPQLPTHVHGDPQRFRQIVLNLLSNALKFTDQGSITLHAKPIETGRLQFTVSDTGIGMPEQVITKIFRPFVQAEANTTRRFGGTGLGLSICRQLVTMMHGEIYANSQVGEGSQFIFEIELPAANSETVKQERLSPPTKQNIPMRLLLVDDMEDNRLLVKAFLEGTPHQIVEAEDGLDALEKSQQSQFDLILMDGMMPKMDGLEATRRIRARESEHNLTPVTIVALTANAMPQDVADSLAAGSDYHMAKPIRRAKLLQLLASIANERRLFSHEEVKQTTTLTSVETIAADILDALANDVGSGYRQSILRFYSTLPARVAQLTAHIGSEADSVLIEAQGLQQDASYFGAHKLAHLCTQIAQMARTKQPREMIASLCPLLQQALQTIERRLTNEGYF

SEQ ID NO: 12924 - protein, 1220 aa, Magnetococcus sp. MC-1
MAVVQRLKRDVKQLETMLGVYESPGIDEALTPLKRMLALNQAYVENFKSHRALLNNFLDYFPNAWSESLAQLRMQQGDAVLHPLLDEVMAAFITMAHGTPLRDRAGVHALLEQVMASALTLDTRQRRGIITMVRYAQAILHYEDDLKEILQGIEQTDLNAQLGVLEERYMQLYSQHQQKSSHYRLLLFMGTLLLAGLVVWSFLRQRRNGLSLEAAIKQLAFQKFAMDQHAIVSIADATGNITYVNEKFCLVSGYAESELLGNNHRVLSSGHHGATFFQEMWHTIEQGNVWHGELKNRAKEGGFFWVASTIVPFLDSQGKPYQYISIRTDITQRKRVEEQHEKQKIFLQGITDAMGEGLFAVDREGACIFINKQAERMLGWSAEEIHLKKMQGLIHASTRIADAYQWPALRSMDEAAPARSEDEHFINRSGQMFPVSMVAVPLEEGERIVGSVVVFQDISVRKQQEQVLQGAVRAADQANRAKSDFLANMSHEIRTPMNAILGMSHLAIRTSNDPRQRAYLQKIHGAAQSLLHIINDILDFAKVEAGKMEMEMVPFNLDEVLDTLATLTSVKADEKGLALIFRRHLDLPQRVVGDALRLNQILLNLTGNAVKFTEQGSVVVNVEKVQQQGDQIVLRFSVQDTGIGMDESQIQQLFVAFEQADSSITRRYGGRGLGLAICKQLVNLMAGELSVQSTPEVGSCFTFTVPFTVVQEQVVDAIVPQGIRGRVVLLADGSALARRVVAEMLKHMGCDVLEAEQVEQLLTALQAKIGPDMVLLDSSMVDAQGAHAYAAIRQADAGGACPVLVMHTHGDREQVLAWMAKDKQLGHVQKPLTPSRLLEGMVQLLVDEGRVTGLSGETDVIARYKPLLTGANILLVEDNGVNQEVAFELLSMVGVEVTVADNGSQALSFLEQASFDLVLMDIQMPVMDGYAATQAIRQNMSLTLPIIAMTATVMEADQARALAVGMNGHVSKPIEPHKLYEMLLRWLPSKGEPSRAVARLRLPGDETEPDVTLPEQLPGINIPLGVQRLVGNKSLYLTLLQRFYQDQKEIMVQIREGLARKDFNTCMMQAHTLKGVAVSLGALPLAACAGVLETACKQRDERATTQALIPLAQSLSEVMAGLQPLTVEAQTALPERPVGGDSRTAQLYSLLQALVEPLEMRQPKACQPIVAQLQESSLPGSYETPITMLLSHIQRYRMKEAEQLVQTLLQRLAGECTDES

SEQ ID NO: 12925 - protein, 1390 aa, Magnetococcus sp. MC-1
MSMSGKIITLVCVIAILAAGSVGYATMERLQKELTLHAQQQVRHTTQQVSHKLEQGIALLMADVRTLAADPALLDLAELARGVPHEHGDVHAHKQRMAQIFTNLLQQRADYQQIRLIGLDEDGRELIRIKRQPDNTLTQVAPADLQTQGQRSYFKRTIILPKNQVYLSEINLSRENQVIVSPHMPVIRASMPLFDHLGETFGLLVINLDLSRLLADLQHQTPGQSMHLFNHHGYLLASSPPQAELQNFGFEFNQPPLMLTLYPVLAQQLNHSAESAFTLVAQDAPSGTHELLGVQTLYHNPNRPDQRLVITVSMPYQKIFTTLYSSRDESLLIGGGMLLMALLLAVLLTRSLTHPLRAMIRAVEDTAHDQGRHALPVGVGGEMGILAKAFAQMLQRTAEQNAAQADHRANQLLEATDVGVFGIDDQGLVSFINPAAERMLGYSREALLGKNIHSMVHHAYADGTPYPEHACRMSAALREQREYHVTDEVLWKQDGSPFYVTYSSIPLWQGDQRSGAVITFWDTTEQRQDEQKLIAAQQEAELIAAEERALEALFKLTLQESATTHYLEEVLEALIHSVPWLKLKPVGGLFLTDESAPQPQLKLVVNHNLDPELKQRCAKVPFGTCLCGLAAQSGTLQFASCMDHRHVITFEGITAHGHYNVPIMDGAQVLGVMVLYLAHGHEQKERETAFLARAGHIISMGLMRRRAAKELSCAKQRAERANHAKSDFLATMSHEIRNPMNAIIALSHLALEQSHDQRQRDYLSKIHTAGQSLLRIINDILDFSKIEAGKLEIEQTDFQLDDVLSNLATLTAVKAQEKQIELIFDKAPALPHALRGDPLRLSQILLNVVGNAIKFTEQGEVEMSITRHTQRGELLELCFTVRDTGIGMNEAQIAELFRPYQQAESSTSRRFGGSGLGLSISHQLVTLMNGTIQVSSTPGVGSQFVITLPFAVLPDRPESLVIPKLLTGQVVVASANQRMCDVVAENLGRFGLTCASVGAMSTLHQWLENNPLPRFMVLDADMLPVSMAQDLELLLNPMLHRFVEGGVLMLHGYQTQQAVMDLAAKDARVGAVQKPVTSSSLYDGAVQLLGVGSLSDAQHAPVQSNASPTTWPQLTGRHMLVAEDNAINQQIIQELLSKVGVNVTLVNNGFEAVEKANPLHHDAILMDLHMPLMDGFEATTQIRQRFGNTLPIFAMTASSTPEDQKQVQQSGMNGHLTKPIDPVLLYTNLSQWLGEQPPKPPSVSSPQPAQPQPADSLQSVPGQPGQRSPAGPPNIPGINYTLGLQQLGGDAELYHQILLAFEQDQRETSAKLIQLLEAGDLAALEPLVHTLKGLLGSVGAERLRARVIALETSLKMAQPKENIAALIQTMQAELAPMLAAIAQLHIKAGR

SEQ ID NO: 12926 - protein, 917 aa, Pseudomonas putida KT2440
MLDRLGIRSRVLLLALLPAGLMALVLGSYFTWLQQNDLRTQLLQRGKMIAEQLAPLAAPAMARLAPAQLERIAAQTLEQADVRAVAFLAPDRTRLAHAGPSMLNLPPSGGTGTQLLQRSGNDATRYLMPVFGHHRDLATDAVPAEAERLLGWVEIELSHDGTLLRGYRNLFTSLLLILACLALSGLLALRMSRTINDPIERIKHAVNQLKDGHLEERLPTMGSHELDELAHGINRMAETLQNAHEELQHSIDQATEDVRQNLETIEIQNIELDMARKEALEASRIKSEFLANMSHEIRTPLNGILGFTHLLQKSEMTPRQLDYLNTIEKSADNLLGIINEILDFSKIEAGKLVLDSIPFNLRDLIQDTLTILAPAAHAKQLELLSLIYRDTPASLVGDPLRLKQILTNLVSNAIKFTREGTIVVRAMLEDEHEDCAQLRISVQDTGIGLSPQDVRTLFQAFSQADNSLARQPGGTGLGLVISKRLIEQMGGEIGVDSTPGEGSQFWISLNLPKAHDDAEALPPQPLLGRRAAIVDGHELARQALEHQLEDCGLSVSLFASYDQLLQGVQAASQAGLPFEFAVLGANLGNLSPEQLGHYHQQLERYHCQCVVLCPTTEQALYHPYLPNGHGQLLSKPTCTRKLRRLLLELVQPRRPLAEGSNPNGQRRPKILCVDDNAANLLLVKTLLEDLGAEVLAVNNGYAAVQAVQEELFDLVLMDVQMPGMDGRACTEQIRLWENTQSGNPLPIVALTAHAMANEKRALLHSGMDDYLTKPISERQLAQVVMKWTGLSLGTPQQAQAELLTNGDELKVLDPEEGLRLAAGKADLAADMLSMLLASLDTDREAIRAARAADDRNGLIEQVHRLNGASRYCGVPQLRAACQRSETLLKQDNPQAQQALDELDSAISRLAAQARLSA

SEQ ID NO: 12927 - protein, 228 aa, Magnetospirillum magnetotacticum
MIDRDCVPVPLVADRSAGNAPIDLTFAQNRTLSPIHLEYQRNLGVDGSMSISIMVENRLWGLMIGHHRRPHYVAPETRAAATVLTDGFAMRVQEIEGKALWSEQQRHLDIQGQLVRGLTRSDDFVNSLTQGNPTLLDLFGAVGAGIVSDDVVCLVGTTPSAEAVQALAGWLRESLGPNERTFVTDTLVMHHAPAAAYTEMASGLLAAFVGHSRQHLLMWFSRSASTGR

SEQ ID NO: 12928 - protein, 1447 aa, Methanosarcina acetivorans C2A
MITSKSVAADELESRLKGRIAELEKSNGELRARLLEYKHSEEAMSKSEEKLGYISPQGKEYRFNTRIVPEFVDGEVASVLAISHDITDIKEAKTRLKETRDNLEELVEDRTTQLEKAYRSLKESEKDLAEAQKIAHPGNRNWNIVTDELYWSDEIYRIFGCTPQEFGATYDTFLSYMHPEDQDYVNYVNNAVNGALNGKPYSTDHRIALAGGEEWIVHEQGEVIFGKGKLRTSGIDIIGDIPWGTHFCQFYQTKEDLMDVLVPYLKAGLENNEFCMWVTSQPLDMKDAKEALRRAVPDLDTYLGKGQIEIIPYTHWYVQEGSFDSERVLNGWIEKLNKALANGYDGLRLTGNTFWLEKKDWNDFVDYEEEVDRVIGNYRMIALCTYCLEKCNSTEIVDVVINHQFALIKREEKWEQIESSKRKRAEETALQAAKDWKYTFDAVPDLIAIIDTEYKVVRANRAMAAKLGVTPEECVGLTCYRAIHGTNEPPSFCPHRQLLKDGIEHTTEVCEDCLGGYFLVSTSPLHDSEGKLIGSVHVAHDISERKQAEEALIRSENEFRTLAENSPDLIARFDRQNRHLYINPVSVEIYDHPQEKVIGKTHSELGRDPEQIKFWEEHHEKVFAIGKPETMEFEYTSPQGKKYYFNTRIVPEFVDGEVTSVLAISRDIADIKEAEIRLKETLDNLEELVEDRTTQLEKAYRSLKESEKGLAEAQKIAHLGNWNWNIVTDELYWSDEIYRIFGCTPQEFVATYDTFLSYVHPDDSESVENAVKGALDGKPYSIDHRIILAGGEERIVHEQGEVIFGEGNVPFRMNGVVQDITERKKVEKALELANAYNRSLIEASLDPLVTIGPDGKITDVNKATELVTGHLRSELIGTDFSDYFTEPEKAKEGYKQVFREGLVRDYALEIQHRDGHITPVLYNASVYRDKDWEVIGIFAAARDVTEYKRAEKALKLANAYNRSLIEASIDPLVTIGPDGKITDVNNSTESITGYSRNELIGTDFLDYFTEPEKAREGYQHVFQNGLVRNYPLEILHKCGHLTPVLYNASVYRDETGKVIGVFAAARDITELKKAEEKIQTLANVVESSNDAIITESLDGIITSWNKGAEQVYGYLAEEVMGKNMSILESDNLKGEIKQLVDRVKQGKKVQNHETLRLKKDGTILNISVTLSPVFDVSGKLVAISNIAGDITEKKISENLLHEKQMAEIANRTKNDFLANMSHELRTPLNSIIGFSDMLYEQAYGELNRKQLRAIGNISSSGKHLLNLINGILDLSKIEANKMELNYREFDLATKLELIRNVLYPVADKKNIDIEIDMDTELTKICADEEKFTRIMYNLVDNAIKFSYENSLVKIGARKNGNLVEITVTDAGIGIKAEDQHKLFKPFSQVNSFPSKKFQGTGLGLSLVKQIVNLHGGYVWFRSEQGEGSTFAFAIPIASKMKVLACYH

SEQ ID NO: 12929 - protein, 929 aa, Shigella flexneri 2a str. 301
MALVLWLLIAFSSVFYIVNALHQRESEIRQEFNLSSDQAQRFIQRTSDVMKELKYIAENRLSAENGVLSPRGRETQADVPAFEPLFADSDCSAMSNTWRGSLESLAWFMRYWRDNFSAAYDLNRVFLIGSDNLCMANFGLRDMPVERDTALKALHERINKYRNAPQDDSGSNLYWISEGPRPCVGYFYALTPVYLANRLQALLGVEQTIRMENFFLPGTLPMGVTILDENGHTLISLTGPESKIKGDPRWMQERSWFGYTEGFRELVLKKNLPPSSLSIVYSVPVDKVLERIRMLILNAILLNVLAGAALFTLARMYERRIFIPAESDALRLEEHEQFNRKIVASAPVGICILRTADGVNILSNELAHTYLNMLTHEDRQRLTQIICGQQVNFVDVLTSNNTNLQISFVHSRYRNENVAICVLVDVSSRVKMEESLQEMAQAAEQASQSKSMFLATVSHELRTPLYGIIGNLDLLQTKELPKGVDRLVTAMNNSSSLLLKIISDILDFSKIESEQLKIEPREFSPREVMNHITANYLPLVVRKQLGLYCFIEPDVPVALNGDPMRLQQVISNLLSNAIKFTDTGCIVLHVRADGDYLSIRVRDTGVGIPAKEVVRLFDPFFQVGTGVQRNFQGTGLGLAICEKLISMMDGDISVDSEPGMGSQFTVRIPLYGAQYPHNKGVKGLSGKRCCLTVPNASLCQFLETSLQRSGIVVTTYEGQEPTPEDVLITDEVVSKKWQGRAVVTFCRRHIGIPLEKAPGEWVHSVAAPHELPALLARIYLIEMESDDPANALPSTDKAVSDNDDMMILVVDDHPINRRLLADQLGSLGYQCKTANDGVDALNVLSKNHIDIVLSDVNMPNMDGYRLTQRIRQLGLTLPVIGVTANALAEEKQRCLESGMDSCLSKPVTLDVIKQTLTVYAERVRKSRDS

SEQ ID NO: 12930 - protein, 949 aa, Shigella flexneri 2a str. 2457T
MKYLASFRTTLKASRYMFRALALVLWLLIAFSSVFYIVNALHQRESEIRQEFNLSSDQAQRFIQRTSDVMKELKYIAENRLSAENGVLSPRGRETQADVPAFEPLFADSDCSAMSNTWRGSLESLAWFMRYWRDNFSAAYDLNRVFLIGSDNLCMANFGLRDMPVERDTALKALHERINKYRNAPQDDSGSNLYWISEGPRPCVGYFYALTPVYLANRLQALLGVEQTIRMENFFLPGTLPMGVTILDENGHTLISLTGPESKIKGDPRWMQERSWFGYTEGFRELVLKKNLPPSSLSIVYSVPVDKVLERIRMLILNAILLNVLAGAALFTLARMYERRIFIPAESDALRLEEHEQFNRKIVASAPVGICILRTADGVNILSNELAHTYLNMLTHEDRQRLTQIICGQQVNFVDVLTSNNTNLQISFVHSRYRNENVAICVLVDVSSRVKMEESLQEMAQAAEQASQSKSMFLATVSHELRTPLYGIIGNLDLLQTKELPKGVDRLVTAMNNSSSLLLKIISDILDFSKIESEQLKIEPREFSPREVMNHITANYLPLVVRKQLGLYCFIEPDVPVALNGDPMRLQQVISNLLSNAIKFTDTGCIVLHVRADGDYLSIRVRDTGVGIPAKEVVRLFDPFFQVGTGVQRNFQGTGLGLAICEKLISMMDGDISVDSEPGMGSQFTVRIPLYGAQYPQKKGVEGLSGKRCWLAVRNASLCQFLETSLQRSGIVVTTYEGQEPTPEDVLITDEVVSKKWQGRAVVTFCRRHIGIPLEKAPGEWVHSVAAPHELPALLARIYLIEMESDDPANALPSTDKAVSDNDDMMILVVDDHPINRRLLADQLGSLGYQCKTANDGVDALNVLSKNHIDIVLSDVNMPNMDGYRLTQRIRQLGLTLPVIGVTANALAEEKQRCLESGMDSCLSKPVTLDVIKQTLTVYAERVRKSRDS

SEQ ID NO: 12931 - protein, 949 aa, Escherichia coli CFT073
MKYLASFRTTLKASRYMFRALALVLWLLIAFSSVFYIVNALHQRESEIRQEFNLSSDQAQRFIQRTSDVMKELKYIAENRLSAENGVLSPRGRETQTDVPAFEPLFADSDCSAMSNTWRGSLESLAWFMRYWRDNFSAAYDLNRVFLIGSDNLCMANFGLRDMPVERDTALKALHERINKYRNAPQDDSGSNLYWISEGPRPGVGYFYALTPVYLANRLQALLGVEQTIRMENFFLPGTLPMGVTILDENGHTLISLTGPESKIKGDPRWMQERSWFGYTEGFRELVLKKNLPPSSLSIVYSVPVDKVLERIRMLILNAILLNVLAGAALFTLARMYERRIFIPAESDALRLEEHEQFNRKIVASAPVGICILRTADGVNILSNELAHTYLNMLTHEDRQRLTQIICGQQVNFVDVLTSNNTNLQISFVHSRYRNENVAICVLVDVSSRVKMEESLQEMAQAAEQASQSKSMFLATVSHELRTPLYGIIGNLDLLQTKELPKGVDRLVTAMNNSSSLLLKIISDILDFSKIESEQLKIEPREFSPREVMNHITANYLPLVVRKQLGLYCFIEPDVPVALNGDPMRLQQVISNLLSNAIKFTDTGCIVLHVRADGDYLSIRVRDTGVGIPAKEVVRLFDPFFQVGTGVQRNFQGTGLGLAICEKLISMMDGDISVDSEPGMGSQFTVRIPLYGAQYPQKKGVEGLSGKRCWLAVRNASLCQFLETSLQRSGIVVTTYEGQEPTPEDVLITDEVVNKKWQGRAVVTFCRRHIGIPLEKAPGEWVHSVAAPHELPALLARIYLIEMESDDPANALPSTDKAVSDNDDMMILVVDDHPINRRLLADQLGSLGYQCKTANDGVDALNVLNKNHIDIVLSDVNMPNMDGYRLTQRIRQLGLTLPVIGVTANALAEEKQRCLESGMDSCLSKPVTLDVIKQTLTVYAERVRKSRES

SEQ ID NO: 12932 - protein, 932 aa, Clostridium thermocellum ATCC 27405
MPSDELDFCAFFDIEEHLYWQGDAMKSKRMIKQSTLSAIILAIFFFIAVMLIWSILYMNSCIRAEQNAERRRTEFKQLGIDLADASDYLTDEARKFAVTRKIVHLERYWEEINVTRTRDKVISRLQELDSPKEELELLAKAKKYSDALVETERRSMRLVLEALGVDESDMVPEVASFKLSEGDQRLSREDKLLKAIEIMYDARYDSDKKNIMDPIAKFQRIMNQRLESELEAARRGTAGATVLQIILAFVIILAIAVLIRILFTQVTYPIRDYILKLKDFSFDDEEFRLVPKGTVELNMLAENFNELYRSFHNELVRRKKAEETMKAARDEADKANRAKSEFLASMSHEIRTPINSIIGYQYLLKNSVLSPKQREYVENIGLAAKNLLAIINQILDFSKIEAGRMVLEEVDFNIDDVLNELMIIVGMEAKRKGIELRIKVDEDVPRFLKGDITRLKQVVMNLVSNGIKFTHEGYISIRVELVEKNEENACIKFSVTDTGIGISDEQKKLLFQAFTQGDASTSRKYGGTGLGLAICKRLVELMKGEINVESEVGKGSTFSFSLRLKIASCNENRNGKSKSVDTEEQYKNVKILLVEDSSVNLQMTKEILENMGIDTDTAQSGEEAVKKAESNEYELILMDIRMPGMDGYEATRRIRKLERGSMPIVALTADAVEGVAQKAKEAGMNGYLTKPLEPEKLLEVIRSMTNGGGKFKEEKSKSCAKAAEAENPYYEHKYETLDFDGAVNRLGGKRDKYIGILKSFVELHKDDGVKIRELAASGKRDELRRFLHSLKGSAANIGALRLKDLLARLEESCIPQNCEKNAKWMNDLEKEFERLIEEIMQYIRAFDSYKGSSPENHENNNVREDLEMLCKLLLTGDSEAKSFFEEKLAYLGNVLRPEDYHDLKKKISCYEFQKALAIVDKLKQDFSGKLTK

SEQ ID NO: 12933 - protein, 917 aa, Pseudomonas syringae pv. syringae B728a
MLTKLGIKGRVLLLTILPASLMAAMLGGYFTWMQLSELQSQLLQRGEMIAQDLAPLAANALGRKDKVLLSRIATQTLEQTDVRAVSFLDTDRTVLAHAGPTMISPSPIGSGSQLLSSTGTDATRYLLPVFGSQRHLTSPIIPAEADTLLGWVELEISHNGTLLRGYRSLFASLLLILTGLAFTATLAVRMSRTINGPMSQIKQAVSQLKDGNLETRLPPLGSRELDELASGINRMAATLQNAQEELQLSIDQATEDVRQNLETIEIQNIELDLARKEALEASRIKSEFLANMSHEIRTPLNGILGFTHLLQKSELTPRQFDYLGTIEKSADNLLSIINEILDFSKIEAGKLVLDNIPFNLRDLLQDTLTILAPAAHAKQLELVSLVYRDTPLALSGDPLRLRQILTNLVSNAIKFTREGTIVARAMLEDETEEHAQLRISVQDTGIGLSSQDVRALFQAFSQADNSLSRQPGGTGLGLVISKRLIEQMGGEIGVDSTPGEGSEFWISLKLPKAREDKEESLNIPLGGLRAAVLEHHDLARQALEHQLEDCGLQTIVFNNLENLLNGVTAAHETPAAIDLAVLGVTALEISPERLRQHIWDLENLNCKVMVLCPTTEHALFQLAVHDVYTQLQAKPACTRKLQKALSELIAPRAVRADIGPPLSSRAPRVLCVDDNPANLLLVQTLLEDMGAEVVAVEGGYAAVNAVQQEAFDLVLMDVQMPGMDGRQATEAIRAWEAERNQSSLPIVALTAHAMANEKRSLLQSGMDDYLTKPISERQLAQVVLKWTGLALRNPAPERQNEALEVHVGPLVLDHEEGLRLAAGKADLAADMLAMLLASLDADREAIRVARANQDVHALIERIHRLHGATRYCGVPQLRSACQRAETLLKQNAPHTEEALNDLDKAIIRLEAEARVMA

SEQ ID NO: 12934 - protein, 1060 aa, Pseudomonas fluorescens PfO-1
MYQPQDQLSQIISRQNATSRQASFQNSECRPGRSDTFIDGTQNVTLAPHRAHFALGVADRLEFAANLADVHIKAAIVGRITALKNVLIKEGLAQHFLVVAIEGFQQAVFAAGQAGGLVEVEHLALLVVETQPADRHHRSDGRRATIEGDPAQDRFNAHMQLSHAEGFGQIVVGAKAEPADTVGLGTEGRHQQHRGGMALTQLGQDIQSVEPRQQNVHQHHIERLAPGDTQAFAAVLAPGDLKAAAAQMFMDIGTEDGVVFDGKNAGLANGDRSHDYLQIILSWAIIQDCPAPGNPSLTCRTDDRSPSEGRRHHFSQDCPQANRYTAPIPRAGRTCESTISGMQEKGVLKKLGIKGRVLLLTLLPTSLMALVLGGYFTWTQQSDLQTQLMQRGEMIAEQLAPLVAPAMGHGDAELLERIATQSLEQPDVRAVTFLAPDRSPLAHAGPTMLNQAPSGDSAHLLRRSGNDATRYLLPVFGKHRNLAGELIPQESDRLLGWVELELSHNGMLLRGYRSLFASLLLIGAGLAGAALLALRMGRTINRPLSQIKQAVAQLKDGHLETRLPPLGSQELDELASGINRMAGTLQNAREELQHSVDQATEDVRQNLETIEIQNIELDLARKEALEASRIKSEFLANMSHEIRTPLNGILGFTHLLQKSELTPRQLDYLGTIEKSADSLLGIINEILDFSKIEAGKLVLDHIPFNLRDLLQDTLTILAPAAHAKQLELVSLVYRDTPLSLVGDPLRLKQILTNLVSNAIKFTREGTIVARAMLEEENDDSVQLRISIQDTGIGLSNQDVRALFQAFSQADNSLSRQPGGTGLGLVISKRLIEQMGGEIGVDSTPGEGSEFWISLNLPKTRDDAEDLPAAPLLGRRVAVLENHELARQALQHQLEDCGLDVTPFNTLESLTNGVTGAHQTDQAIDLAVLGITSNDMPPERLNQHIWDLEHLGCRVLVLCPTTELTLYHLSVPNPHSQLQSKPACTRKLRRALSDMVNPRQSRSEPGEPLSSRAPKVLCVDDNPANLLLVQTLLEDMGAKVLAVESGYAAVKAVQSESFDLV

SEQ ID NO: 12935 - protein, 620 aa, Desulfovibrio desulfuricans G20
MNSINHSYAGGKYGMPRGMACPCIHEEQRLLKNKASGLSGEFRPASCPVAYVWCRTLLSDFKQKAETHMASRQEMTESGAIAACGEGADSRSLEAEILRLRQREKELLHERQMLKDILKAIPDMLTVHDRDGNVMFSNCKPNEDCWQHHGGTKHGLRCYQCHFHGDRNCEDCYIPDVFDSGEQRVVEMYNPDMKSFRSITVFPVRDGQGDVTMVAEYVRDVTATRNLERELRVAKEAAEAADRAKSEFLASMSHEIRTPMNGVLGMLDLAMTTSLDEEQREYLEAVQNSAEALLSLINDILDFSKIEAGMVELDQQVFRLSKRLSSLHTMFVHRAAERNLEFAINISPDVPDGLSGDPLRLRQIVVNLLDNAFKFTDQGQVVLSVEVLERGAENVLLQFSVQDTGPGILERHQERIFDSFAQADASFTRRHQGSGLGLAICKRLTGLMGGDIKVRSTPGEGSTFVFSARFGVAVLDEEPVRVRSRTAEPAPVRGRILVAEDHPMNLMFIEKFLKKQGYESVSVTDGSEVVPALTRSRFDLVLMDIAMPAMDGMEATRAVRAATGMKTPSDVPIIAMTAHAMKGDREQFLEAGMDDYIGKPINSDNLRSMIIRHLQARRKS

SEQ ID NO: 12936 - protein, 651 aa, Pseudomonas aeruginosa PAO1
MSQRHGWDIRTRMLAISLGPALLLTLLLTAYFTYSRLQDLRQELTHTGQLIADQLAPAAEYGVIAGNTPVLQKLLQATLDTPHVRFIEVRDRNDNILVYVEQLSGALQNAAPIDIFHSTIQRQRIALASDPLLDGASEGDGQSGEDYLGRVVVGMSNDAFSQRQQEILLKAALLAAFALILTFLVARRLAQRLSAPISTMGQAVEAIQSGDYKTSLPILDDGEIGDLARHINNLASGLDRASREQEQAIGQLISAREEAEQANRAKSDFLAMMSHELRTPMNGVLGMLQLLETTEQTREQAEYTALATESTEHLLKVINDILDFSRIERGALELECIPFNLLELVQGSALVFQHSAQQRGLALELQIQAGLENIEVCGDPTRIRQILVNLLGNALKFTEEGAIHLSLEWQALDHDVLWLTCAVHDSGIGISPERLEHMFDAFQQADSSISRRYGGTGLGLAIARTLAERMGGTLQAESKEGSGSTFTLEIPLPFQQSPAHRQQAAGDAAPVAAGQEILLVEDNPVNQTVIEAMLRSLGYRVTLVADGIQAVRSAERQRYDAILMDCRLPVLDGYSATREIRAQENGRRVPIIALTANALQGDRENCLQAGMNDYLAKPFKRAELQRILQRWIGSQPELPVTSNETGRGEPE

SEQ ID NO: 12937 - protein, 957 aa, Yersinia pestis CO92
MLFHHGIRLKYLSSFRTTLKISRYLFRVLAVMLWSLGALLTTFYILNVLNEKKADIRQEYNNNFGLAQNYIRHSAEIIRDIKYMAENRLDKNASDTDATSGMVMNKKAVPQYYPLNSDSGCTTASTSNQASVNTLSNLIWYWKENFTAAYDLNRVFFIGTDTLCMVDFDIRNAPSLQENLLKSLYEHTLKYRDTKNQDKDSNIYWVVPGARPDIGVLYVLSPVYLGNRLEAMIGFEQSVRLEDFISSRTLPIRVTLLNQDNEPVLQMASGDRYPAILDDYPDSPSYFGYADDYKDLILKKALPPSPLSIAYLLPVKTIIEAFKLLIFNALLLNVLSAVVIFTLAWLFERKMFHPAEDNALRLEEHEQFNRKIVASAPVGISILRISDGTNILSNELAHNYISLLTNEDRERITRIICERQANFVDVMTSNNNNLQISFVHSRYRNEDVAICVLVDVSARVKMEESLQEMATAAEQASQSKSMFLATVSHELRTPLYGIIGNLDLLQTKELPQGVDRLVTAMNNSSGLLLKIISDILDFSKIESEQLKIEPSEFSTVEVITHITANYLPLVVKKRLGLYCFIEPDVPRLIEGDPVRLQQVISNLLNNAIKFTDTGCIILQVRVRDCYLEFRVRDTGVGIDSREINQLFDPFFQVGTGVQRHFQGTGLGLAICEKLVNLMDGDVEVISELGMGSIFAIRIPLYHHQNTVLSANDRWQGKVLWLDIRNARLESYLLDLLGYFGATIRRYCGEQTQPEDVLICDYPSQLSPPLLAWIQLSIEHIGLPQETRPAYWSLSTSTLLEIVPLLDWILRGQQPVDNSSLQLHAPKTNQDNNADLQILVVDDHPINRRLLADQLTTLGYRVITANDGLDALVALNTNTVDMVLTDVNMPNMDGYRLTERLRQLNHNFPIIGVTANALAEGKQRCIEAGMDNCLSKPVTLDTLRQMLLYYSDQVRRSR

SEQ ID NO: 12938 - protein, 773 aa, Vibrio vulnificus CMCP6
MVEPPVRSNIERNLDLRTELLASQIKSPFNRAVGVLNSLVGVAQSQQKGTNQPQILGRIIASSDQVIASGGVWPEPQQIDGSLRYVSLFFNKGEDGRIEQIHSYNNPESSGYHTESWYLSVVNLPENSVAWSNVYTDPYTQVQMITASQPYFIDGEFAGVATVDISLETLFDFVKGHTEKYQLGVSISDPGGKLLLEHAFHLTRDRYISEIEVADIGWRVRVINSQLTVSDEVFGQVMRVEAGILPFLLICVLVGYYTLNRYVIKPIISIAKKVDVSKTGGIIDIHYDSEDEIKHLIETINEKTVYLEAEKVKAQASTNAKTAFLATLSHEIRTPMNGVLGTAQILLKTPLNEEQRKHLKTLYDSGDHMMTLLNEILDYSKIEQGHMEFDNNPFPFDSIIGSVNSVYYTLCAEKGLQFKVYTTVPTGRWYCADKARLRQVLFNLLNNAVKFTARGLVEVYFEEHTREQANYLSIKVKDTGIGIPESAQKRIFRPFEQAESSTTRRFGGTGLGLAIVKQIAEQMGGSVAVSSQVGLGTCFTVELALECTSPETESPEPRYKLNYQGLRALIVEDNRTNAIIIETFLRNKGFSCERVENGEQAIACVTQHPFDLILMDNHMPVMDGIEAITAIRAMDSPCRHTLIFGCTADVFKETRERMLGVGADHIIAKPIVEAELDDALFQHAKLLYQFRAEDVQAQVEEQSIESLLVGFYIAIENGELTQAHNAISQIRGQHKDAIEPALAQSLARIEQQLSENKQPDQEEINLLTVLLAD

SEQ ID NO: 12939 - protein, 917 aa, Pseudomonas syringae pv. tomato str. DC3000
MLTKLGIKGRELLLTILPASLMAAMLGGYFTWMQLSELQSQLLLRGEMIAQDLAPLSASALGRKDKVLLSRIATQTLEQPDVRAVSFLDVDRSPLAHAGPTMISPTPIGNSSQLLNSTGTDATRYLLPVFGNQRHLTSPIIPAEADTLMGWVDVEISHNGTLLRGYRSLFASLLLIFTGLAITAVVAVRLSRTINGPMSQIKQAVSQLKDGNLETRLPPLGSRELDELASGINRMAATLQNAQEELQMSIDQATEDVRQNLETIEIQNIELDLARKEALEASRIKSEFLANMSHEIRTPLNGILGFTHLLQKSELTPRQFDYLATIEKSADNLLSIINEILDFSKIEAGKLVLDNIPFNLRDLLQDTLTILAPAAHAKHLELVSLVYRDTPLALSGDPLRLRQILTNLVSNAIKFTREGTIVARAMLEDETEEHAQLRISVQDTGIGLSSQDVRALFQAFSQADNSLSRQPGGTGLGLVISKRLIEQMGGEIGVDSTPGEGSEFWISLKLPKAREDKEESLNLPLEGLRAAVLEHHDLARQALEHQLEDCGLHTVVFTNLENLLNGVTAAHETPAAIDLAVLGVTTLEISPERLRQHIWDLENLNCKVMVLCPTTEYALFQLAVHDVYTQLQAKPACTRKLQKALSELIAPRAIRADIAPPLSSRAPRVLCVDDNPANLLLVQTLLEDMGAEVMAVEGGYAAVNAVQQEAFDLVLMDVQMPGMDGRQATEAIRAWEAERGQSSLPIVALTAHAMANEKRSLLQSGMDDYLTKPISERQLAQVVLKWSGLALRNPAPERQNESLEAHVGPLVLDPEEGLRLAAGKADLAADMLAMLLASLDADREAIRVARASQDVQALIERIHRLHGATRYCGVPQLRTACQRAETLLKQDAPHTGDALDDLDKAIVRLETEARVTA

SEQ ID NO: 12940 - protein, 566 aa, Vibrio parahaemolyticus RIMD 2210633
MTGNSSLERKLKREIASRKAAELLLEQKSYELYESTQKLSVALKKLELRSESDLRKFEFEEKIDATLIRFGRTFLSSTFDETMIASFLEQLTSNSVITASYLYLDPVQLTSLRRHHFGHLDLKSDKPIARTPNWQNEALHLPIIIDERVVGELIFSVSLEQIEQAFISKQMELVSDLVHGVISRHLSLEREVELRKRAEESEKATKEFVAMINHELRTPLNGVLGSADLLSKTQLGEDQRQYLGNLIQSGDLLRVIINDLLDFSKMNAGMMEIIDKVFAWDDLEKAITGVFAAKAAEKRIHFSIDKKLGIPEFLIGDLERITQILVNLIGNAIKFTHLGGVVLRVEWVNGTAFFEVEDTGIGIPLAAQSSLFDPFVQVDRSAKRSFEGSGLGLAICKNLVDLMQGEISFESEERKGTTFKVSIPLKEGQAQGAASGELAVVERSDLAGRSILVVDDIRMNQVIVTQMLKKLDITPDLKANGLEALEAVKNKDYELIFMDCRMPEMDGYEATAHLRQKGFDRPIIALTAGTTIEERQKCIDSGMDDILTKPYTATDIEQIMCKWLEQ

SEQ ID NO: 12941 - protein, 917 aa, Pseudomonas fluorescens
MLKKLGIKGRVLLLTLLPTSLMALVLGGYFTWMQLSDLQTQLLQRGEMIAEQLASLVAPAMGNHNTQMLERIATQALEQQDVRAVSLLAPDRSLLAHAGPSMLNPPPAGNSSHMMQRSGSDATRYQLPVFGRHRNLAGDLIPDESDRLLGWVELDLSHSGMLLRGYRNLFASLLLIPAGLAVTALLAVRMGRTINNPLTQIKQAVAQLKDGNLETRLPPLGSQELDELASGINRMASTLQNAQEELQHSIDQATEDVRQNLETIEIQNIELDLARKEALEASRIKSEFLANMSHEIRTPLNGILGFTHLLQKSELTPRQLDYLGTIEKSADSLLGIINEILDFSKIEAGKLVLDSIPFNLRDLLQDTLTILAPAAHAKQLELVSLVYRDTPLSLVGDPLRLKQILTNLVSNAIKFTREGTIVARAMLEEEHEDSVQLRISIQDTGIGLSNQDVRALFQAFSQADNSLSRQPGGTGLGLVISKRLIEQMGGEIGVDSTPGEGSEFWISLNLPKTRDDAEDLPGPPLLGRRVAVLENHELARQALQHQLEDCGLEVTPFNTLEALTNGITGVHQSEQAIDLAVLGITTNDMSPERLSQHIWDLEHLGCKVLVLCPTTEQTLFHLSVPNPHSQLQAKPACTRKLRRALSDLVTPRRARSEPEETLSSRAPRVLCVDDNPANLLLIQTLLEDMGAKVLAVDNGYAALNAIQTEPFDLVMMDVQMPGMDGRKSTEAIRQWESERHGTPLPIVALTAHAMANEKRALLQSGMDDYLTKPISERQLAQVVLKWTGLALRNQGPERASERPELGLELQVLDQDEGLRLAAGKADLAADMLAMLLASLDADREAIKAARAANDQNALIERVHRLHGATRYCGVPQLRAACQRSETLLKQEDAKAFAALDELDHAIGRLAAEARTNA

SEQ ID NO: 12942 - protein, 917 aa, Pseudomonas fluorescens
MLKKLGIKGRVLLLTLLPTSLMALVLGGYFTWMQLSDLQTQLLQRGEMIAEQLASLVAPAMGNHNTQMLERIATQALEQQDVRAVSLLAPDRSLLAHAGPSMLNPPPAGNSSHMMQRSGSDATRYQLPVFGRHRNLAGDLIPDESDRLLGWVELELSHSGMLLRGYRSLFASLLLIAAGLAGTALLAVRMGRTINNPLTQIKQAVAQLKDGNLETRLPPLGSQELDELASGINRMASTLQNAQEELQHSIDQATEDVRQNLETIEIQNIELDLARKEALEASRIKSEFLANMSHEIRTPLNGILGFTHLLQKSELTPRQLDYLGTIEKSADSLLGIINEILDFSKIEAGKLVLDSIPFNLRDLLQDTLTILAPAAHAKQLELVSLVYRDTPLSLVGDPLRLKQILTNLVSNAIKFTREGTIVARAMLEEEHEDSVQLRISIQDTGIGLSNQDVRALFQAFSQADNSLSRQPGGTGLGLVISKRLIEQMGGEIGVDSTPGEGSEFWISLNLPKTRDDAEDLPGPPLLGRRVAVLENHELARQALQHQLEDCGLEVTPFNTLEALTNGITGVHQSEQAIDLAVLGITTNDMSPERLSQHIWDLEHLGCKVLVLCPTTEQTLFHLSVPNPHSQLQAKPACTRKLRRALSDLVTPRRARSEPEETLSSRAPRVLCVDDNPANLLLIQTLLEDMGAKVLAVDNGYAALNAIQTEPFDLVMMDVQMPGMDGRQSTEAIRQWESERHGTPLPIVALTAHAMANEKRALLQSGMDDYLTKPISERQLAQVVLKWTGLALRNQGPERASERPELGLELQVLDQDEGLRLAAGKADLAADMLAMLLASLDADREAIKAARAANDQNALIERVHRLHGATRYCGVPQLRAACQRSETLLKQEDAKAFAALDELDHAIGRLAAEARTNA

SEQ ID NO: 12943 - protein, 929 aa, Pseudomonas syringae
YRRTDTCCRRKSVLTKLGIKGRVLLLTILPASLMAAMLGGYFTWMQLSELQSQLLQRGEMIAQDLAPLAANALGRKDKVLLSRIATQTLEQTDVRAVSFLDTDRTVLAHAGPTMISPSPIGSGSQLLSSTGTDATRYLLPVFGSQRHLTSPIIPAEADTLLGWVELEISHNGTLLRGYRSLFASLLLILTGLAFTATLAVRMSRTINGPMSQIKQAVSQLKDGNLETRLPPLGSRELDELASGINRMAATLQNAQEELQLSIDQATEDVRQNLETIEIQNIELDLARKEALEASRIKSEFLANMSHEIRTPLNGILGFTHLLQKSELTPRQFDYLGTIEKSADNLLSIINEILDFSKIEAGKLVLDNIPFNLRDLLQDTLTILAPAAHAKQLELVSLVYRDTPLALSGDPLRLRQILTNLVSNAIKFTREGTIVARAMLEDETEEHAQLRISVQDTGIGLSSQDVRALFQAFSQADNSLSRQPGGTGLGLVISKRLIEQMGGEIGVDSTPGEGSEFWISLKLPKAREDKEESLNIPLGGLRAAVLEHHDLARQALEHQLEDCGLQTIVFNNLENLLNGVTAAHETPAAIDLAVLGVTALEISPERLRQHIWDLENLNCKVMVLCPTTEHALFQLAVHDVYTQLQAKPACTRKLQKALSELIAPRAVRADIGPPLSSRAPRVLCVDDNPANLLLVQTLLEDMGAEVVAVEGGYAAVNAVQQEAFDLVLMDVQMPGMDGRQATEAIRAWEAERNQSSLPIVALTAHAMANEKRSLLQSGMDDYLTKPISERQLAQVVLKWTGLALRNPAPERQNEALEVHVGPLVLDHEEGLRLAAGKADLAADMLAMLLASLDADREAIRVARANQDVHALIERIHRLHGATRYCGVPQLRSACQRAETLLKQNAPHTEEALNDLDKAIIRLEAEARVMA

SEQ ID NO: 12944 - protein, 907 aa, Pseudomonas syringae pv. syringae
MLLLTILPASLMAAMLGGYFTWMQLSELQSQLLQRGEMIAQDLAPLAANALGRKDKVLLSRIATQTLEQTDVRAVSFLDTDRTVLAHAGPTMISPSPIGSGSQLLSSTGTDATRYLLPVFGSQRHLTSPIIPAEADTLLGWVELEISHNGTLLRGYRSLFASLLLILTGLAFTATLAVRMSRTINGPMSQIKQAVSQLKDGNLETRLPPLGSRELDELASGINRMAATLQNAQEELQLSIDQATEDVRQNLETIEIQNIELDLARKEALEASRIKSEFLANMSHEIRTPLNGILGFTHLLQKSELTPRQFDYLGTIEKSADNLLSIINEILDFSKIEAGKLVLDNIPFNLRDLLQDTLTILAPAAHAKQLELVSLVYRDTPLALSGDPLRLRQILTNLVSNAIKFTREGTIVARAMLEDETEEHAQLRISVQDTGIGLSSQDVRALFQAFSQADNSLSRQPGGTGLGLVISKRLIEQMGGEIGVDSTPGEGSEFWISLKLPKAREDKEESLNIPLGGLRAAVLEHHDLARQALEHQLEDCGLQTIVFNNLENLLNGVTAAHETPAAIDLAVLGVTALEISPERLRQHIWDLENLNCKVMVLCPTTEHALFQLAVHDVYTQLQAKPACTRKLQKALSELIAPRAVRADIGPPLSSRAPRVLCVDDNPANLLLVQTLLEDMGAEVVAVEGGYAAVNAVQQEAFDLVLMDVQMPGMDGRQATEAIRAWEAERNQSSLPIVALTAHAMANEKRSLLQSGMDDYLTKPISERQLAQVVLKWTGLALRNPAPERQNEALEVHVGPLVLDHEEGLRLAAGKADLAADMLAMLLASLDADREAIRVARANQDVHALIERIHRLHGATRYCGVPQLRSACQRAETLLKQNAPHTEEALNDLDKAIIRLEAEARVMA

SEQ ID NO: 12945 - protein, 896 aa, Pseudomonas viridiflava
MAAVLGGYFTWMQLYELQSQLLQRGEMIAQDLAPLSANALGRKDKILLTRIATQTLEQSDVRAVSFLDTDRSVLAHAGPTMISPSPIGSSTQLLNSSGNDATRYLLPVFGHQRHLTSPIIPAEADTLLGWVELEISHNGTLLRGYRSLFASLLLIFTGLAFTAILAVRMSRTINGPLSQIKQAVSQLKDGNLETRLPPLGSRELDELASGINRMAATLQNAQEELQMSIDQATEDVRQNLETIEIQNIELDLARKEALEASRIKSEFLANMSHEIRTPLNGILGFTHLLQKSELTPRQYDYLGTIEKSADNLLSIINEILDFSKIEAGKLVLDNIPFNLRDLLQDTLTILAPAAHAKQLELVSLVYRDTPLALSGDPLRLRQILTNLVSNAIKFTRQGTIVARAMLEDETEEHAQLRISVQDTGIGLSSQDVRALFQAFSQADNSISRQPGGTGLGLVISKRLIEQMGGEIGVDSTPGEGSEFWISLNLPKAREDREETANQALEGLRAAVLEHHDLARQALEHQLEDCGLQTVVFTNLENLLNGVTAAHETPQAIDLVVLGVTALEISPERLRQHIWDLENLNCKVMVLCPTTEHALFQMSVHDVYTQLQAKPACNRKLQKALSELVAPRAVRTDVALPLSSRAPRVLCVDDNPANLLLVQTLLEDMGAEVVAVDGGYAAVSAVQQEAFDLVLMDVQMPGMDGCQATEAIRAWETERNQTSLPIVALTAHAMANEKRSLLQSGMDDYLTKPISERQLAQVVLKWTGLALRNPIPERQTESSNAHVGPLVLDHEEGLRLAAGKPDLAADMLAMLLASLDADREAIRAARANDDIQGLIERVHRLHGATRYCGVPQLRTACQRAETLLKQNAPHTEDALDDLDKAITRLEAEARVTA

SEQ ID NO: 12946 - protein, 917 aa, Pseudomonas chlororaphis
MLKKLGIKGRVLLLTLLPTSLMALVLGGYFTWMQQSDLQTQLLQRGEMIAEQLAPLVAPALAHKNIALLERIATQSLEQQDVRAVTFLAPDRTPLAHAGPSMLNQAPTGNGSQMLQRTGSDATRYLLPVFGRHRNLAGDLIPDESDRLLGWVELELSHNSMLLRGYRSLFASLLLIIAGLICTGLLALRMGRTINNPLSQIKHAVTQLKDGNLETRLPLLGSQELDELASGINRMAGTLQNAQEELQHSIDQATEDVRQNLETIEIQNIELDLARKEALEASRIKSEFLANMSHEIRTPLNGILGFTHLLQKSELTPRQLDYLGTIEKSADSLLGIINEILDFSKIEAGKLVLDSIPFNLRDLLQDTLTILAPAAHAKQLELVSLVYRDTPLSLVGDPLRLKQILTNLVSNAIKFTREGTIVARAMLEEEHEDSVQLRISIQDTGIGLSNQDVRALFQAFSQADNSLSRQPGGTGLGLVISKRLIEQMGGEIGVDSTPGEGSEFWISLRLPKTRDDAEDLPAPPLLGRRIAVLENHELARQALQHQLEDCGLEVTPFNTLEALTNGVTGVHQTEQAIDLAVLGITSNDMPPERLNQHIWDLEHLGCKVLVLCPTTEQTLFHLSVPNPHSQLQAKPACTRKLRRALADLVNPKVVRNEPSEPIASRPPRVLCVDDNPANLLLVQTLLEDMGAKVLAVDSGYAAVKAVQNESFDLVMMDVQMPGMDGRQSTEAIRQWESERNCTPLPVIALTAHAMANEKRALLQSGMDDYLTKPISERQLAQVVLKWTGLALRNQGPERTGEPSGNGLELQVLDHDEGLRLAAGKADLAADMLAMLLASLEADREAIRAARAANDHNALIERVHRLHGATRYCGVPQLRAACQRSETLLKQEDVKAFAALDELERAINRLATEARINA

SEQ ID NO: 12947 - protein, 917 aa, Pseudomonas chlororaphis
MLKKLGIKGRVLLLTLLPTSLMALVLGGYFTWMQQSDLQTQLLQRGEMIAEQLAPLVAPALAHQNTALLERIATQSLEQQDVRAVSFLAPDRTPLAHAGPSMLNQAPTGNGSQMLQRTGSDATRYLLPVVGRHRNLAGDLIPDESDRLLGWVELELSHNSMLLRGYRSLFASLLLITAGLICTGLLALRMGRTINNPLSQIKQAVTQLKDGNLETRLPLLGSQELDELASGINRMAGTLQNAQEELQHSIDQATEDVRQNLETIEIQNIELDLARKEALEASRIKSEFLANMSHEIRTPLNGILGFTHLLQKSELTPRQLDYLGTIEKSADSLLGIINEILDFSKIEAGKLVLDSIPFNLRDLLQDTLTILAPAAHAKQLELVSLVYRDTPLSLVGDPLRLKQILTNLVSNAIKFTREGTIVARAMLEEEHEDSVQLRISIQDTGIGLSNQDVRALFQAFSQADNSLSRQPGGTGLGLVISKRLIEQMGGEIGVDSTPGEGSEFWISLRLPKTRDDAEDLPAPPLLGRRVAVLENHELARQALQHQLEDCGLEVTPFNTLEALTNGVTGVHQTEQAIDLAVLGITTNDMPPERLNQHIWDLEHLGCKVLVLCPTTEQTLFHLSVPNPHSQLQAKPACTRKLRRALADLVNPKAVRSEPSEPIASRPPRVLCVDDNPANLLLVQTLLEDMGAKVLAVDSGYAAVKAVQNESFDLVMMDVQMPGMDGRQSTEAIRQWESERNCTPLPVIALTAHAMANEKRALLQSGMDDYLTKPISERQLAQVVLKWTGLALRNQGPERTGEPSGNGHELQVLDHDEGLRLAAGKADLAADMLAMLLASLEADREAIRAARAANDHNALIERVHRLHGATRYCGVPQLRAACQRSETLLKQEDIKAFAALDELERAINRLATEARINA

SEQ ID NO: 12948 - protein, 917 aa, Pseudomonas chlororaphis
MLKKLGIKGRVLLLTLLPTSLMALVLGGYFTWMQQSDLQTQLLQRGEMIAEQLAPLVAPALAHQNTALLERIATQSLEQQDVRAVTFLAPDRTPLAHAGPSMLNQAPTGNGSQMLQRTGSDATRYLLPVFGRHRNLAGDLIPDESDRLLGWVELELSHNSMLLRGYRSLFASLMLITAGLICTGLLALRMGRTINNPLSQIKQAVTQLKDGNLETRLPLLGSQELDELASGINRMAGTLQNAQEELQHSIDQATEDVRQNLETIEIQNIELDLARKEALEASRIKSEFLANMSHEIRTPLNGILGFTHLLQKSELTPRQLDYLGTIEKSADSLLGIINEILDFSKIEAGKLVLDSIPFNLRDLLQDTLTILAPAAHAKQLELVSLVYRDTPLSLVGDPLRLKQILTNLVSNAIKFTREGTIVARAMLEEEHEDSVQLRISIQDTGIGLSNQDVRALFQAFSQADNSLSRQPGGTGLGLVISKRLIEQMGGEIGVDSTPGEGSEFWISLRLPKTRDDAEDLPAPPLLGRRVAVLENHELARQALQHQLEDCGLEVTPFNTLEALTNGVTGVHQTEQAIDLAVLGITTNDMPPERLNQHIWDLEHLGCKVLVLCPTTEQTLFHLSVPNPHSQLQAKPACTRKLRRALADLVNPKAVRSEPSEPIASRPPRVLCVDDNPANLLLVQTLLEDMGAKVLAVDSGYAAVKAVQNESFDLVMMDVQMPGMDGRQSTEAIRQWESERNCTPLPVIALTAHAMANEKRALLQSGMDDYLTKPISERQLAQVVLKWTGLALRNQGPERTGEPSGNGLELQVLDHDEGLRLAAGKADLAADMLAMLLASLEADREAIRAARAANDHNALIERVHRLHGATRYCGVPQLRAACQRSETLLKQEDIKAFAALDELERAINRLATEARINA

SEQ ID NO: 12949 - protein, 917 aa, Pseudomonas chlororaphis
MLKKLGIKGRVLLLTLLPTSLMALVLGGYFTWMQQSDLQTQLLQRGEMIAEQLAPLVAPALAHQNTALLERIATQSLEQQDVRAVSFLAPDRTPLAHAGPSMLNQAPTGNGSQMLQRTGSDATRYLLPVFGRHRNLAGDLIPDESDRLLGWVELELSHNSMLLRGYRSLFASLLLITAGLICTGLLALRMGRTINNPLSQIKQAVTQLKDGNLETRLPLLGSQELDELASGINRMAGTLQNAQEELQHSIDQATEDVRQNLETIEIQNIELDLARKEALEASRIKSEFLANMSHEIRTPLNGILGFTHLLQKSELTPRQLDYLGTIEKSADSLLGIINEILDFSKIEAGKLVLDSIPFNLRDLLQDTLTILAPAAHAKQLELVSLVYRDTPLSLVGDPLRLKQILTNLVSNAIKFTREGTIVARAMLEEEHEDSVQLRISIHDTGIGLSNQDVRALFQAFSQADNSLSRQPGGTGLGLVISKRLIEQMGGEIGVDSTPGEGSEFWISLRLPKTRDDAEDLPAPPLLGRRVAVLENHELARQALQHQLEDCGLEVTPFNTLEALTNGVTGVHQTEQAIDLAVLGITTNDMPPERLNQHIWDLEHLGCKVLVLCPTTEQTLFHLSVPNPHSQLQAKPACTRKLRRALADLVNPKAVRSEPSEPIASRPPRVLCVDDNPANLLLVQTLLEDMGAKVLAVDSGYAAVKAVQNESFDLVMMDVQMPGMDGRQSTEAIRQWESERNCTPLPVIALTGHAMANEKRALLQSGMDDYLTKPISERQLAQVVLKWTGLALRNQGPERTGEPSGNGHELQVLDHDEGLRLAAGKADLAADMLAMLLASLEADREAIRAARAANDHNALIERVHRLHGATRYCGVPQLRAACQRSETLLKQEDIKAFAALDELERAINRLATEARINA

SEQ ID NO: 12950 - protein, 570 aa, Malus x domestica
RTLALEECALWMPTRTGLELQLSYTLRQQNPVGYTVPIHLPVVNQVFSSNCAVKISPNSPVARLRQLAGKHIPGEVVAVRVPLLHLSNFQINDWPELSTKRYALMVLMLPSDSARQWHVHELELVEVVADQVAVALSHAAILEESMRARDLLMEQNIALDLARREAETAIRARNDFLAVMNHEMRTPMHAIIALSSLLQETELTAEQRLMVETILRSSNLLATLINDVLDLSRLEDGSLQLEIATFNLHSVFREVHNMIKPVASIKRLSVTLNIAADLPMYAIGDEKRLMQTILNVVGNAVKFSKEGSISITAFVAKSESLRDFRAPDFFPVQSDNHFYLRVQVKDSGSGINPQDIPKLFTKFAQTQALATRNSGGSGLGLAICKRFVNLMEGHIWIESEGLGKGCTATFIVKLEFPERSNESKLPFAPKLQANHVQTNFPGLKVLVMDDNGVSRSVTKGLLAHLGCDVTAVSLIDELLHVISQEHKVVFMDVSMPGIDGYELAVRIHEKFTKRHERPVLVALTGSIDKTTKENCMRVGVDGVILKPVSVDKMRSVLSELLEHRVLFEAM

SEQ ID NO: 12951 - protein, 1391 aa, Mesorhizobium loti
MAEADEAIGARGKRGPDKPVHRGDAPPCADRDSPDALRQLLEAGSDWIWETDAELRFSWLSPTYQAATGIDPADVLGRFRFDFLNQDLKGSRSAAAHLEDLQARRPFRDFVYELKAGGADCRWVLTSGFPRFDNEGKFAGYRGIGRNVTTLAGAFETVEQNPLSGSDPDRHLADLERTMDAMHMGVVLLDAKLDTLIVNKAYRDLSSIPDGAVTVGAPFSRLMELNRRNGIYGDIDEQQWQRYLASRIEEIRAGSVAPREFVHASGRTMMFSVTALSGGKRLLTYYEVTELKRRDAEIESANAKIAETFVNLRTMVDEMPIGVLVLDADMRAEVINSAFYDFWRIDPGRAGIGSAFRELMEASRAIDPYGADELAWQRHTTEREAEIRAGVAGSKQLPHNDGRTLVASLAPLPGGKRLISYVDVTDMKGRETEAQDARKHLASVLESLPAGVIIYDRDDKFVFANRKLQDTLPALKPFWQPGCSFREALEFGQSIGYFRSSGDAGIDRLYEVEPEHWLDSMLARYRLPNSSYERLNADGRWYQVYDMRTDDGTFIGVRVDITDIKSREAALRDSMRQIDLFRHVMDELPVAAFIKAQDLSIEFVNKAWCALTGIAKEDVIGRTDRELFGTQDAEGYSHDDTQVVVTGKGIEVEEPVTHRDGTVRQLMTRKSRLVATDGSVHLVGSSTDITDVKAREKALEESMRENEVFRSLIDNVPVSIYAKRSDLRQFYVNKGWCDLTGLSREDAIGKTDIEIFGEDGEAFVAGDLAVLRTGETQEVEETVRLADGSVRHQFARKGAMIASDGSLYLIGSTTDITELKMREAELSEARQRAVLADRAKSEFLANMSHEIRTPMNGVLGMAELLAKSNLDPKQKTFTDIIVKSGNALLTIINDILDFSKIDAGQMVLDPAPFNLAEAIEDVATLVSTRAKEKDLELIVRVEPRLESLFVGDVGRIRQIVTNLLGNAVKFTDEGHVLVDVTGERVPTGTRLTISVTDTGIGIPEEKLKLVFEKFSQVDTSSTRRHEGTGLGLAITSRLVELMGGTIGVESAEGKGSTFWFTVTLPRAGQQNGQRIMPVDVTGARVLIVDDNAVNRAILTEQMTSWTFDSCAAESGAEGLKVLIAAAAYGVPVDCVVLDYQMPEMSGAEMARIVRNTGGLADTPIIMLTSVDQSLANTSYRDLGIDAQLIKPARSSVLLETLVATIQRHRHATDSHAVQPLAAERPDVPQPPPLALSEQRAQLQPPPVRPRLPATGGDGHRLDILVAEDNEVNQMVFTQILGETGYGFEIVGNGRKALDAFGKLNPCMILMDVSMPEMSGLEATAAIRQLEQQTGTHVPIVGVTAHALKGDRERCLEAGMDDYLPKPISPRALLEKVERWLGAGRQVQRNAG

SEQ ID NO: 12952 - protein, 1213 aa, Dictyostelium discoideum
MIELNNHSKINKNENNTNTRNNSSNNNNNNNNINKTNTNKYFEYNQNSIIYSSIPNSFLSHHPNSVGSQCLSLNSFLPPKPPILLSIFNSDTIGNNNNNNYSSSSSRNNSSGCSSSNNNNNNNNNNNNNNNNNNNNNNNNCNIEQYKNNQKQPKQQQQQKDQTIATQHRISLSSSSSSSSLSSSSSSSSVKQSFQIVKRLFGSLSEYMFPQKDEILYETDPYYLYQDDTQSNDSNEFYDDTDIGSDIDEANLTNTYNIQNCNKTLYNKQQQQAHFVNMNKNVNSNNGTGNSNQSNNVNKNQQNNNNNNNNNSHNNNNGNQNSSSSSSNSGASGSGGNGNNNNNNNNNNNNNNNNNNNSNSNSNNNSKSNNNNKKEGKDGATMNGSHPLIPFRKKPAQVPSPCFRMNSPNSDNDQYLDQLALENSSKKSLVAYNTDNLDQWKHFHLNENFDILQNDLFDIQQQQQQQQQQDNTLQYSSPINKRQEQEQQHIPFQFTTEQQQQLQQQQQQHLQNKTKQHPILLQRQQQQKQKQQQQQQIQQEQIGNNNSNNNNNINNNNNINNNYNNVNDLMNKFEIDQKQHDSQQNLVEEKRTPSFHEHNIIFNSFNFICSIVLDGSNIKSTEKYKAKLIIGFCFTILSFIPSWIIFFWVSGINKPAVMAIIAMPMSISSLVILKRTGSIHYPCHILCFTLCFALTINSYYTGGHQSTIRLLMSPVPPISALVLGRKASIQWSLMVLSIYLLFFVANLYGHEYVQGIPSIIIRSHMNFIIDVTIIIMTLIFTLCYQYFIDEAHRETKLKNAQLTIAKDAAIEAYQARQEFLATMSHEIRTPLNGLIGMATLLRDSHNLPPEEKTMAKAVKSCGDILLRLVNDILDLSKLEANQMGLEHIPFRMRELTQQICHVLSGQANEKNIHLSCEVSDKIPSILLGDSGRILQILMNLTGNALKFTQSGYVKIIIDLIEEESELVSLKKGEYNISFRVKDTGIGVPVESHQKIFEAFVQADPSDSRKYGGSGLGLYLCAKLVRLMKGEIGVYNNPDCDGSTFWFILPLEEGTDQSMQQMNNGARHKAFPQDCVKVLIAEDNIINQRVAVKFLEKIGIKAEVAGNGNEVLEILERQHYDLIFMDFQMPILDGLRCSKTIREFEQNHKWNRICPSIFICGLTANTMSTDKKRCFDHGMNHFISKPFQLEQLRSAIEMAIEHKQRNLMNLNIRN

SEQ ID NO: 12953 - protein, 1137 aa, Oryza sativa; identical to SEQ ID NO: 12843

SEQ ID NO: 12954 - protein, 1137 aa, Oryza sativa; identical to SEQ ID NO: 366

SEQ ID NO: 12955 - protein, 1137 aa, Oryza sativa; identical to SEQ ID NO: 366

SEQ ID NO: 12956 - protein, 1139 aa, Oryza sativa
  unsure (1)..(1139): unsure at all Xaa locations
MPMATVRRDIELSLIYADSRRKHLPRVEKDGLLREEEEPEFPASRSPTPRTNPRLASPSSSPSPPRLAASXVVNMQRGRFVQPFGCLLAVHPETFALLAYSENAAEMLDLTPHAVPTIDQREALAVGTDVRTLFRSHSFVALQKAATFGDVNLLNPILVHARTSGKPFYAIMHRIDVGLVIDLEPVNPVDLPVTATGAIKSYKLAARAIARLQSLPSGNLSLLCDVLVREVSELTGYDRVMAYKFHEDEHGEVIAECKRSDLEPYLGLHYPATDIPQASRFLFMKNKVRMICDCSATPVKIIQDDSLTQPISICGSTLRAPHGCHAQYMASMGSVASLVMSVTINEDEDDDGDTGSDQQPKGRKLWGLMVCHHTSPRFVPFPLRYACEFLLQVFGIQINKEVELAAQAKERHILRTQTLLCDMLLRDAPVGIFTQSPNVMDLVKCDGAALYYQNQLWVLGSTPSEAEIKNIVAWLQEYHDGSTGLSTDSLVEAGYPGAAALGDVVCGMAAIKISSKDFIFWFRSHTAKEIKWGGAKHEPIDADDNGRKMHPRSSFKAFLEVVKWRSVPWEDVEMDAIHSLQLILRGSLQDEDANKNNNAKSIVTAPSDDMKKIQGLLELRTVTNEMVRLIETATAPILAVDITGSINGWNNKAAELTGLPVMEAIGKPLVDLVIDDSVEVVKQILNSALQGIEEQNLQIKLKTFNHQENNGPVILMVNACCSRDLSEKVVGVCFVAQDMTGQNIIMDKYTRIQGDYVAIVKNPSELIPPIFMINDLGSCLEWNEAMQKITGIKREDAVDKLLIGEVFTHHEYGCRVKDHGTLTKLSILMNTVISGQDPEKLLFGFFNTDGKYIESLMTATKRTDAEGKITGALCFLHVASPELQHALQVQKMSEQAAMNSFKELTYIRQELRNPLNGMQFTRNLLEPSDLTEEQRKLLASNVLCQEQLKKILHDTDLESIEQCYTEMSTVDFNLEEALNTVLMQAMPQSKEKQISIDRDWPAEVSCMHLCGDNLRLQQVLADFLACMLQFTQPAEGPIVLQVIPRMENIGSGMQIAHLEFRLVHPAPGVPEALIQEMFRHSPGASREGLGLYISQKLVKTMSGTVQYLRESESSSFIVLVEFPVAQLSTKRCKASTSKF

SEQ ID NO: 12957 - protein, 1049 aa, Oryza sativa
  unsure (1)..(1049): unsure at all Xaa locations
MSSSRSNNRATCSRSSSARSKHSARVVAXTPMDAQLHAEFEGNVSAYLQNMQRGRFVQPFGCLLAVHPETFALLAYSENAAEMLDLTPHAVPTIDQREALAVGTDVRTLFRSHSFVALQKAATFGDVNLLNPILVHARTSGKPFYAIMHRIDVGLVIDLEPVNPVDLPVTATGAIKSYKLAARAIARLQSLPSGNLSLLCDVLVREVSELTGYDRVMAYKFHEDEHGEVIAECKRSDLEPYLGLHYPATDIPQASRFLFMKNKVRMICDCSATPVKIIQDDSLTQPISICGSTLRAPHGCHAQYMASMGSVASLVMSVTINEDEDDDGDTGSDQQPKGRKLWGLMINKEVELAAQAKERHILRTQTLLCDMLLRDAPVGIFTQSPNEYHDGSTGLSTDSLVEAGYPGAAALGDVVCGMAAIKISSKDFIFWFRSHTAKEIKWGGAKHEPIDADDNGRKMHPRSSFKAFLEVVKWRSVPWEDVEMDAIHSLQLILRGSLQDEDANKNNNAKSIVTAPSDDMKKIQGLLELRTVTNEMVRLIETATAPILAVDITGSINGWNNKAAELTGLPVMEAIGKPLVDLVIDDSVEVVKQILNSALQGIEEQNLQIKLKTFNHQENNGPVILMVNACCSRDLSEKVVGVCFVAQDMTGQNIIMDKYTRIQGDYVAIVKNPSELIPPIFMINDLGSCLEWNEAMQKITGIKREDAVDKLLIGEVFTHHEYGCRVKDHGTLTKLSILMNTVISGQDPEKLLFGFFNTDGKYIESLMTATKRTDAEGKITGALCFLHVASPELQHALQVQKMSEQAAMNSFKELTYIRQELRNPLNGMQFTRNLLEPSDLTEEQRKLLASNVLCQEQLKKILHDTDLESIEQCYTEMSTVDFNLEEALNTVLMQAMPQSKEKQISIDRDWPAEVSCMHLCGDNLRLQQVLADFLACMLQFTQPAEGPIVLQVIPRMENIGSGMQIAHLEFRLVHPAPGVPEALIQEMFRHSPGASREGLGLYISQKLVKTMSGTVQYLRESESSSFIVLVEFPVAQLSTKRCKASTSKF

SEQ ID NO: 12958 - protein, 2476 aa, Neurospora crassa
MESVAIPPQDDQQQLDPPARIFERLRQIAGFAWDETKPPYHSTYDNWHVFGTRFVSPFSTTGTPAPASPAPYPNTSPSSLAKLAPGHRAAPQDRPNVSASHSDAGSDRSTISLPTVAHHATDAPVVEELVVARISYHVLREERAYHITKSLVSTVDPNAEHISRPIDLIRLNPLPGDRGTIVVAIYAYSGENYLFKVLDMGPAFFYAKKHNDRWEAHREEHPVLEEPISLQHFLDFAIGAAQCLEMLHHSQSIVHGEIRPDAFHYNLELNRIKITSLGSGLRSFEHGLTSTGWSTLSKEVGARHKLQYISPEQTGRMPAEPDTRTDIYSLGVLFWSLLTQQPVFQGDTPLDIVQGVLGRRIPNVSQIRMDVPDAIGRIIQKCISKNVSDRYFSASGLRHDLVKVQELLGSGDSQSLRDFQVGSRDVSSSFRLPTIMIGRDRERSELVKVIERVSKSHGMNHKGGVNWGSDGSVLSNDVVDNAEVSSEGASSADGLNRQSGSWALALTPDPRNRVSLPPSALGTSSVTTSGETTSSGTSTGTSTISGGNRQSRQWDKPAFETSSLNENVSSDASRGSGLLSEPTSTISRQLGSKFRKQRQGNCEVVIIEGTGGLGKSYLVQSILADARRRGYCATAKFETARRTAFGPLLQLLSSLFRQVWGERNTETPFHQALKHHVRPVWPTLHKVLGLPEFLLGPPDNTPQRSNSTSSQSGQPALKRRGSSPELGGNNMYRHSSKVSSATQTSQEFLRAGASTQTSRLTNTFLDVLRMFTHYKFICFCLDDLHFADDESQELISQIIGARMKMVIIITYRPEEIGPEKVLQILSPPKSEELPRGAGAPIMTKIKLTPLSEDDIIHFVSSTLCLPKEDVTPLALVIQSKTAGNPFYMREMLNAGYRKKCIWYDYMAGEWKYDLDKLFDQFQGEQNYDVLDTAFITRRLSELPPASRSILAWAALLGQTFSFDLICRLMTGEFHFEEDKDKRQQEEDCSYIIPADESVAGLEAAIQACIIVPSDRDDHFRFVHDRYIQAAAALQECNARKMHFAIAQTLLKYHANDRTYRDNAASHICECVDIICQQVSRRRSYRALLSRCAQEASVSGARPTAAKFYGNAVALLQPDPWNDDAGDSSYEETLQLYIQAAECYLYMGLHAAANDLLQTILAKARTAVDKAPAWVLQSRIFAQRGNSEQALDSLRLCLKALGVGFDDNPSFEKCDAQFERLSVRIQTMDRSELVNPPKTEDLTLASLGAVLTETVSAGWWSNCLYFYQLALSMMELHLEKGSFPQSGMAFLFLGTIALSRFNMVQFTVDLAGIFLELLEKYRDPYSMARGYMIYANFVGHVQFPLGAIANQLEASVEFAAAMGDRISAILSFGLAAQLKFFASENISDLEAFCQYGCEEVPNWHLDTRGGVILIAIRQVCRALQGKTQVTDPYEVMSDEQHKASTYKSWLTAKASGDRTLMFYESIEIIPLFLYGHYERAIEIGEVCCKNSKMIWSARNTKLAQWFYALSLAAVILREQQDPRRMAEDEEKFQSRVEETIEKIDELNKGLKDWQAVNNVNYLAWSKLLDAQIAEIRGQYGDAIQQYEEALDHAAEYNFLFEEALGNYLMASVFIRHKGRRSARSTLRDSIALYRQLGATGIADLIETGHSILLHGPMRNPRTADAGVQTDFTGDAASVQYRTVEEEGLEDGEETAQAAVAALKGERMTAWRGSMQPEAGVGLPALDMIDLHAILVSSQVISSVLRVDELLKTMCDVILQTCSGSATLAALVVYEDEKQKDNSPLCVAASGDPDKGAEAHIPGIPLSGTDLVAENVILYCSRFREVVFLRDLVSDERFGNVSESWLRRNPNSKAVIAIPILHGSENPLLGVLYLEGVPGSFTDRNVTVLQLLVNQIGISYSNALAMKAVEKVSAENVSMVALQKRALAKAVEAETKARNAEAEAIRNVKLAEEAAKAKSIFLANVSHELRTPLNGVIGNSELLRDSNLNKEQLEMADSIRVSADLLLTVINDILDFSRMEADKMKLYIIAFNPEEMVREVVRAASYSNKEKTSKKNVKIVHDINLPPMLIYGDPIRLHQVLGNLIGNSLKFTEHGSITIGAKVDSETTEKATLTFWVKDTGIGISPQQLDKLFLPFSQADESTARKYGGSGLGLSICKSLIESTMKGKIRLDSEENVGTTVWFTVTFDKAKPEVMAGDTQSTSPVQMEPPRDRQPRPLPGAVENGDISSDQVPRPYIDLTHIPRNQLRICIAEDNSINAKIAMQYMHKLGYPNVDTYDNGLKAVEGLREKARQGNPYHIILMDVQMPVLDGYEATKMLRNDPIDSVRNVLVIAMTASAIQGDREKCLAAGMNDYLAKPVRGELLKRKLDTYLGASASMSFSTQRFLERRFAQRPGSPQPINPGSSSTKKDVDTPLSSPVPPPLADNTAASASTVKIGVGSAAASLREVAASNRRKQQQQQQQQQEVGQAFVLSIFVLQ

SEQ ID NO: 12959 - protein, 508 aa, Escherichia coli
ILNAILLNVLAGAALFTLARMYERRIFIPAESDALRLEEHEQFNRKIVASAPVGICILRTADGVNILSNELAHTYLNMLTHEDRQRLTQIICGQQVNFVDVLTSNNTNLQISFVHSRYRNENVAICVLVDVSSRVKMEESLQEMAQAAEQASQSKSMFLATVSHELRTPLYGIIGNLDLLQTKELPKGVDRLVTAMNNSSSLLLKIISDILDFSKIESEQLKIEPREFSPREVMNHITANYLPLVVRKQLGLYCFIEPDVPVALNGDPMRLQQVISNLLSNAIKFTDTGCIVLHVRADGDYLSIRVRDTGVGIPAKEVVRLFDPFFQVGTGVQRNFQGTGLGLAICEKLISMMDGDISVDSEPGMGSQFTVRIPLYGAQYPQKKGVEGLSGKRCWLAVRNASLCQFLETSLQRSGIVVTTYEGQEPTPEDVLITDEVVSKKWQGRAVVTFCRRHIGIPLEKAPGEWVHSVAAPHELPALLARIYLIEMESDDLDWPPESPDNQYHLNK

SEQ ID NO: 12960 - protein, 807 aa, Escherichia coli
MFRALALVLWLLIAFSSVFYIVNALHQRESEIRQEFNLSSDQAQRFIQRTSDVMKELKYIAENRLSAENGVLSPRGRETQADVPAFEPLFADSDCSAMSNTWRGSLESLAWFMRYWRDNFSAAYDLNRVFLIGSDNLCMANFGLRDMPVERDTALKALHERINKYRNAPQDDSGSNLYWISEGPRPGVGYFYALTPVYLANRLQALLGVEQTIRMENFFLPGTLPMGVTILDENGHTLISLTGPESKIKGDPRWMQERSWFGYTEGFRELVLKKNLPPSSLSIVYSVPVDKVLERIRMLILNAILLNVLAGAALFTLARMYERRIFIPAESDALRLEEHEQFNRKIVASAPVGICILRTADGVNILSNELAHTYLNMLTHEDRQRLTQIICGQQVNFVDVLTSNNTNLQISFVHSRYRNENVAICVLVDVSSRVKMEESLQEMAQAAEQASQSKSMFLATVSHELRTPLYGIIGNLDLLQTKELPKGVDRLVTAMNNSSSLLLKIISDILDFSKIESEQLKIEPREFSPREVMNHITANYLPLVVRKQLGLYCFIEPDVPVALNGDPMRLQQVISNLLSNAIKFTDTGCIVLHVRADGDYLSIRVRDTGVGIPAKEVVRLFDPFFQVGTGVQRNFQGTGLGLAICEKLISMMDGDISVDSEPGMGSQFTVRIPLYGAQYPQKKGVEGLSGKRCWLAVRNASLCQFLETSLQRSGIVVTTYEGQEPTPEDVLITDEVVSKKWQGRAVVTFCRRHIGIPLEKAPGEWVHSVAAPHELPALLARIYLIEMESDDLDWPPESPDNQYHLNK

SEQ ID NO: 12961 - protein, 949 aa, Escherichia coli
MKYLASFRTTLKASRYMFRALALVLWLLIAFSSVFYIVNALHQRESEIRQEFNLSSDQAQRFIQRTSDVMKELKYIAENRLSAENGVLSPRGRETQADVPAFEPLFADSDCSAMSNTWRGSLESLAWFMRYWRDNFSAAYDLNRVFLIGSDNLCMANFGLRDMPVERDTALKALHERINKYRNAPQDDSGSNLYWISEGPRPGVGYFYALTPVYLANRLQALLGVEQTIRMENFFLPGTLPMGVTILDENGHTLISLTGPESKIKGDPRWMQERSWFGYTEGFRELVLKKNLPPSSLSIVYSVPVDKVLERIRMLILNAILLNVLAGAALFTLARMYERRIFIPAESDALRLEEHEQFNRKIVASAPVGICILRTADGVNILSNELAHTYLNMLTHEDRQRLTQIICGQQVNFVDVLTSNNTNLQISFVHSRYRNENVAICVLVDVSSRVKMEESLQEMAQAAEQASQSKSMFLATVSHELRTPLYGIIGNLDLLQTKELPKGVDRLVTAMNNSSSLLLKIISDILDFSKIESEQLKIEPREFSPREVMNHITANYLPLVVRKQLGLYCFIEPDVPVALNGDPMRLQQVISNLLSNAIKFTDTGCIVLHVRADGDYLSIRVRDTGVGIPAKEVVRLFDPFFQVGTGVQRNFQGTGLGLAICEKLISMMDGDISVDSEPGMGSQFTVRIPLYGAQYPQKKGVEGLSGKRCWLAVRNASLCQFLETSLQRSGIVVTTYEGQEPTPEDVLITDEVVSKKWQGRAVVTFCRRHIGIPLEKAPGEWVHSVAAPHELPALLARIYLIEMESDDPANALPSTDKAVSDNDDMMILVVDDHPINRRLLADQLGSLGYQCKTANDGVDALNVLSKNHIDIVLSDVNMPNMDGYRLTQRIRQLGLTLPVIGVTANALAEEKQRCLESGMDSCLSKPVTLDVIKQTLTLYAERVRKSRDS

SEQ ID NO: 12962 - protein, 933 aa, Escherichia coli
MFRALALVLWLLIAFSSVFYIVNALHQRESEIRQEFNLSSDQAQRFIQRTSDVMKELKYIAENRLSAENGVLSPRGRETQADVPAFEPLFADSDCSAMSNTWRGSLESLAWFIGYWRDNFSAAYDLNRVFLIGSDNLCMANFGLRDMPVERDTALKALHERINKYRNAPQDDSGSNLYWISEGPRPGVGYFYALTPVYLANRLQALLGVEQTIRMENFFLPGTLPMGVTILDENGHTLISLTGPESKIKGDPRWMQERSWFGYTEGFRELVLKKNLPPSSLSIVYSVPVDKVLERIRMLILNAILLNVLAGAALFTLARMYERRIFIPAESDALRLEEHEQFNRKIVASAPVGICILRTADGVNILSNELAHTYLNMLTHEDRQRLTQIICGQQVNFVDVLTSNNTNLQISFVHSRYRNENVAICVLVDVSSRVKMEESLQEMAQAAEQASQSKSMFLATVSHELRTPLYGIIGNLDLLQTKELPKGVDRLVTAMNNSSSLLLKIISDILDFSKIESEQLKIEPREFSPREVMNHITANYLPLVVRKQLGLYCFIEPDVPVALNGDPMRLQQVISNLLSNAIKFTDTGCIVLHVRADGDYLSIRVRDTGVGIPAKEVVRLFDPFFQVGTGVQRNFQGTGLGLAICEKLISMMDGDISVDSEPGMGSQFTVRIPLYGAQYPQKKGVEGLSGKRCWLAVRNASLCQFLETSLQRSGIVVTTYEGQEPTPEDVLITDEVVSKKWQGRAVVTFCRRHIGIPLEKAPGEWVHSVAAPHELPALLARIYLIEMESDDPANALPSTDKAVSDNDDMMILVVDDHPINRRLLADQLGSLGYQCKTANDGVDALNVLSKNHIDIVLSDVNMPNMDGYRLTQRIRQLGLTLPVIGVTANALAEEKQRCLESGMDSCLSKPVTLDVIKQSLTLYAERVRKSRDS

SEQ ID NO: 12963 - protein, 933 aa, Escherichia coli
MFRALALVLWLLIAFSSVFYIVNALHQRESEIRQEFNLSSDQAQRFIQRTSDVMKELKYIAENRLSAENGVLSPRGRETQADVPAFEPLFADSDCSAMSNTWRGSLESLAWFIGYWRDNFSAAYDLNRVFLIGSDNLCMANFGLRDMPVERDTALKALHERINKYRNAPQDDSGSNLYWISEGPRPGVGYFYALTPVYLANRLQALLGVEQTIRMENFFLPGTLPMGVTILDENGHTLISLTGPESKIKGDPRWMQERSWFGYTEGFRELVLKKNLPPSSLSIVYSVPVDKVLERIRMVILNAILLNVLAGAALFTLARMYERRIFIPAESDALRLEEHEQFNRKIVASAPVGICILRTADGVNILSNELAHTYLNMLTHEDRQRLTQIICGQQVNFVDVLTSNNTNLQISFVHSRYRNENVAICVLVDVSSRVKMEESLQEMAQAAEQASQSKSMFLATVSHELRTPLYGIIGNLDLLQTKELPKGVDRLVTAMNNSSSLLLKIISDILDFSKIESEQLKIEPREFSPREVMNHITANYLPLVVRKQLGLYCFIEPDVPVALNGDPMRLQQVISNLLSNAIKFTDTGCIVLHVRADGDYLSIRVRDTGVGIPAKEVVRLFDPFFQVGTGVQRNFQGTGLGLAICEKLISMMDGDISVDSEPGMGSQFTVRIPLYGAQYPQKKGVEGLSGKRCWLAVRNASLCQFLETSLQRSGIVVTTYEGQEPTPEDVLITDEVVSKKWQGRAVVTFCRRHIGIPLEEAPGEWVHSVAAPHELPALLARIYLIEMESDDPANALPSTDKAVSDNDDMMILVVDDHPINRRLLADQLGSLGYQCKTANDGVDALNVLSKNHIDIVLSDVNMPNMDGYRLTQRTRQLGLTLPVIGVTANALAEEKQRCLESGMDSCLSKPVTLDVIKQTLTVYAERVRKSRES

SEQ ID NO: 12964 - protein, 629 aa, Nostoc punctiforme
MMQTFFNYPFQSNGFIPHGHCYLWQTGLVWLHIISDATIALAYYSIPFLLIYFISKRKDVPFNGVFLLFGAFIIACGTGHLMDIWTLWYPDYWIAGGLKALTAIISIYTAFALFYLMPQALALPSPDQLEAINRILSTEIVERKRIEKELRQAEEVAQNSSQAKSEFLANMSHELRTPLNGILGYTQILQRTESLSEKGRKGLSVIYQCGSHLLTLINDVLDLSKIEARKLELYPVDFYLPAFIDSVTEICRIRAEQKVIAFNIEIDPNLPTGIHGDEKRLRQVLINLLSNAMKFTHQGSVTFKTQVINQESNANGKTNYKIRFEVVDTGTGITPEQAEKIFQPFEQVGSQKRQSEGTGLGLAISQKIVLLMGGQIKVQSEFGKGSTFWFEANLSESKDWAKVSRVVEQGTIIAYQGKRRTILIADDKWENRSVIVNLLEPVGFTVVEASNGQEAWVQSLAHKPDMIITDLVMPILDGFELIRRLRQSGAFKEIPIVASSASVFAVDQHKSIDVGADAFLPKPVEAENLLEMLRQFLQLEWIFDAKVDAIKKNSQDSSNQHNEMIHPSKDVLQELLELSQDGDIQNILELAEKLSASDEKLNMFSQQLMQLASNFQLKRLETFIEKYIN

SEQ ID NO: 12965 - protein, 736 aa, Vibrio cholerae
MVMAIRSSLKKKSILALTIYLAFFLAIVGTLSYWGLEVPFRKELKNNLALRAELLATQIREPLNNSIGVLQSLTSIGKSAADKEEQERMLRSLFSVVGGVIISGGLWPEPNLSATDPSLRYDSLFFNKATDGQVDQLSSWNNPKAGGYDRESWYLAAEREAEGLYFWSPVYVDPYTRVEMITVSTPYYRNGQFAGVATVDLSLESLIQFVAATAEQYNLGVNLKDAFGVEVVSHNFRTYDNALVSYYSFGEFNWQIEVVNANQHVDEIIFDLIINIEKGLMPILLLCVMVGYFLISHYWIRPIVLIAKKVSESREGEIIDIRYKSQDEIRHLIDTFNQKTIYLEAEKVKAQASTKAKSAFLATLSHEIRTPMNGVLGTAQILLKDELTSKQRQHLTSLYESGEHMMSLLNEILDYSKIEQGKFELDHSAFPLKSIIGSIKSIYSSLCVEKGLKFQLNSEITDGRWYYGDKARLRQIIFNLLSNAVKFTEAGFVAIGLSEESCDEENYLIIKVQDTGIGIAQESLGRIFRPFEQAESHTTRRFGGTGLGLAIVKQIAELMNGTVLVQSEVGQGSCFKVRVKLAITEPVTEDVKPTKAKTYPGLRVLIVEDNRTNIMILEAFMRNKGFECHSVMDGVQAITALQESSFDLVLMDNHMPLKDGIQATREIRQLPLPQAKILLFGCTADVFKDTRDKMLSAGADDIIAKPIAEHELDMALEQHSERLYQFHREPSLPSVE

SEQ ID NO: 12966 - protein, 933 aa, Escherichia coli K12
MFRALALVLWLLIAFSSVFYIVNALHQRESEIRQEFNLSSDQAQRFIQRTSDVMKELKYIAENRLSAENGVLSPRGRETQADVPAFEPLFADSDCSAMSNTWRGSLESLAWFMRYWRDNFSAAYDLNRVFLIGSDNLCMANFGLRDMPVERDTALKALHERINKYRNAPQDDSGSNLYWISEGPRPGVGYFYALTPVYLANRLQALLGVEQTIRMENFFLPGTLPMGVTILDENGHTLISLTGPESKIKGDPRWMQERSWFGYTEGFRELVLKKNLPPSSLSIVYSVPVDKVLERIRMLILNAILLNVLAGAALFTLARMYERRIFIPAESDALRLEEHEQFNRKIVASAPVGICILRTADGVNILSNELAHTYLNMLTHEDRQRLTQIICGQQVNFVDVLTSNNTNLQISFVHSRYRNENVAICVLVDVSSRVKMEESLQEMAQAAEQASQSKSMFLATVSHELRTPLYGIIGNLDLLQTKELPKGVDRLVTAMNNSSSLLLKIISDILDFSKIESEQLKIEPREFSPREVMNHITANYLPLVVRKQLGLYCFIEPDVPVALNGDPMRLQQVISNLLSNAIKFTDTGCIVLHVRADGDYLSIRVRDTGVGIPAKEVVRLFDPFFQVGTGVQRNFQGTGLGLAICEKLISMMDGDISVDSEPGMGSQFTVRIPLYGAQYPQKKGVEGLSGKRCWLAVRNASLCQFLETSLQRSGIVVTTYEGQEPTPEDVLITDEVVSKKWQGRAVVTFCRRHIGIPLEKAPGEWVHSVAAPHELPALLARIYLIEMESDDPANALPSTDKAVSDNDDMMILVVDDHPINRRLLADQLGSLGYQCKTANDGVDALNVLSKNHIDIVLSDVNMPNMDGYRLTQRIRQLGLTLPVIGVTANALAEEKQRCLESGMDSCLSKPVTLDVIKQTLTLYAERVRKSRDS

SEQ ID NO: 12967 - protein, 948 aa, Salmonella enterica subsp. enterica serovar Typhi
MKYLASFRTTLKVSRYLFRALALLIWLLIAFVSVFYIVNALHQRESEIRQEFNLSSDQAQRFIQRTSDVMKELKYIAENRLTAENGVMSSRARDDKMVVPDFEPLFADSDCAAMGSAWRGSLESLAWFMRYWRDNFSAAYDLNRVFLIGSDNLCMANFGLREMPVERDDALKALHERIMKYRNAPQEESGNNLFWISQGARQGVGYFYALTPVYLANRLQALLGVEQSIRMENFFTPGSLPMGVTIIDENGHSLISLTGPDGIIKAEPRWMQERSWFGYTPGFRELVLKKSLPPSSLSIVYSVPVDLVLERIRILILNAILLNVLVGAGLFTLARMYERRIFIPAESDAQRLEEHEQFNRKIVASAPVGICILRTIDGVNILSNELAHTYLNMLTHEDRQRLTQIICGQQVNFVDVLTSNNTNLQISFVHSRYRNENVAICVLVDVSTRVKMEESLQEMAQAAEQASQSKSMFLATVSHELRTPLYGIIGNLDLLQTKELPKGVDRLVTAMNNSSSLLLKIISDILDFSKIESEQLKIEPREFSPREVMNHITANYLPLVVRKQLGLYCFIEPDVPVSLNGDPMRLQQVISNLLSNAIKFTDIGCIVLHVRCDGDYLSIRVRDTGVGIPAKEVVRLFDPFFQVGTGVQRNFQGTGLGLAICEKLISMMDGDISVDSEPGMGSQFTLRIPLYGAQYPVKKSVEGLAGTCCWLAVRNTSLCQFIETSLARSGVHTQRYEGQEPAADDILIVDDALEHTWQGRAAVVFCRRHIGIPLERAPGEWVHSVASVHELPALLARIYSIELDSEALSSALPTTDKTADSNDDMMILVVDDHPINRRLLADQLGSLGYQCKTANDGVDALNVLSKNAIDIVLSDVNMPNMDGYRLTQRIRQLGLTLPVVGVTANALAEEKQRCLESGMDSCLSKPVTLDALKQTLAVYAERVRKTRA

SEQ ID NO: 12968 - protein, 856 aa, Cytophaga hutchinsonii
MNLSIRTLNIIFSISLLLLASAFIYSYLNIQGLRSANHWVNHTNKVIISLESIYSDIKNAESGVRGYALTKDASYLEQQDQSRTNIKNQLILLDSLLADNPEQHIYIDTLQKTVNDRFFLFNGLINLTNNNADQAEVLPLMQKGKASTEHIYNLVKKMKNNEGILLLQRNEKAEALDKTTPITIVFSGIFGFMVLVISYYFILADLKQRRKIANEVKIKNTLLEYAQQITQMGTFEYNVFTNTLFWSNEMYNIFELDRSVIPEINFIDSLIKEESEITHNRRKKNFQPGASYSDELKIRTVNGNEKVLISNGYVVNEENGLVVHGAIIDITPLKKAELTAREQQELMRVAKEKAESASQFKTRFLSNMSHEIRTPINAILGFTAILSKQELTEQQKKLLKNISISGELLLKLIGNILDISKIEEGKVIIESKSFHLKESIRSVLSPFQHSASEKGLQFHLIIDKSIPDYLLGDFPRISQVLVNLIGNALKFTSHGNITVSVLLTKKQDGLSFVEFVINDTGIGIQANKQDEIFESFTQANESISVKYGGSGLGLSIVQEVVHLMGGNIQVQSPAHYNERGKGYGSKFFFTLPFKLGEKGADPQAKKTAVQPFPRVLHILVADDNEMNRTLATYTLQSLGCTFEIVENGLQAIQKAAANTYDIILMDMQMPVCDGLQATRQIRLNKNTTPIVGLTANVFQEDINRCLDAGMDGHLGKPYTEEDLYHIIDKWVFKNEKNIAASVPSFSNYEFIEKLSKNDPVIFREMLEMFLNQNAQLLKIIHTAINAEDLETLSFNVHQYKSCARMLNIEKQISLIKQIEEKIEARVSLETIRTDIMQLIETGALVSKEIEQKLLIV

SEQ ID NO: 12969 - protein, 948 aa, Salmonella typhimurium LT2
MKYLASFRTTLKVSRYLFRALALLIWLLIAFVSVFYIVNALHQRESEIRQEFNLSSDQAQRFIQRTSDVMKELKYIAENRLTAENGVMSSRARDDKMVVPDFEPLFADSDCAAMGSAWRGSLESLAWFMRYWRDNFSAAYDLNRVFLIGSDNLCMANFGLREMPVERDDALKALHERIMKYRNAPQEESGNNLFWISQGARQGVGYFYALTPVYLANRLQALLGVEQSIRMENFFTPGSLPMGVTIIDENGHSLISLTGPDGIIKAEPRWMQERSWFGYTPGFRELVLKKSLPPSSLSIVYSVPVDLVLERIRILILNAILLNVLVGAGLFTLARMYERRIFIPAESDAQRLEEHEQFNRKIVASAPVGICILRTIDGVNILSNELAHTYLNMLTHEDRQRLTQIICGQQVNFVDVLTSNNTNLQISFVHSRYRNENVAICVLVDVSTRVKMEESLQEMAQAAEQASQSKSMFLATVSHELRTPLYGIIGNLDLLQTKELPKGVERLVTAMNNSSSLLLKIISDILDFSKIESEQLKIEPREFSPREVMNHITANYLPLVVRKQLGLYCFIEPDVPVSLNGDPMRLQQVISNLLSNAIKFTDIGCIVLHVRCDGDYLSIRVRDTGVGIPAKEVVRLFDPFFQVGTGVQRNFQGTGLGLAICEKLISMMDGDISVDSEPGMGSQFTLRIPLYGAQYPVKKSVEGLAGTCCWLAVRNTSLCQFIETSLARSGVHTQRYEGQEPAADDILIVDDALEHTWQGRAAVVFCRRHIGIPLERAPGEWVHSVASVHELPALLARIYSIELDSEALSSALPTTDKTADSNDDMMILVVDDHPINRRLLADQLGSLGYQCKTANDGVDALNVLSKNAIDIVLSDVNMPNMDGYRLTQRIRQLGLTLPVVGVTANALAEEKQRCLESGMDSCLSKPVTLDVLKQTLAVYAERVRKTRA

SEQ ID NO: 12970 - protein, 211 aa, Fritillaria liliacea
PAFAPVPVARDEPAAKPAKAKAPKEKKASVAKKPALHPTYLEMISEAIASLKERTGSSQYAIAKFVEDKHKSHLPANFKKLLLVQLRKLTAAGKLTKVKNSYKISAKPTPAAKPKSAAVKPKSTASKLKSAAKKVKKAAVKPKPKSAAVKPKAPAVNMKSKPAALKPNTVTKSKTVALKGKTAGRPAKAAKTSVKAAPGKKAAPVALKKAK

SEQ ID NO: 12971 - protein, 214 aa, Fritillaria liliacea
PAFAPVPVARDEPVAKPAKVTKAKAPKEKKASIAKKPALHPTYLEMISEAIASLKERTGSSQYAIAKFVEDKHKSHLPANFKKLLLVQLRKLTAAGKLTKVKNSYKISAKPTAAVKPRSAAVKPKSAVAKLKSAAKKVKKAAVKPKPKSAAVKPKAPAVKPKSKPAALKPNTVTKSKTVALKGKTAGRPAKAAKTSVKAAPGKKAAPVALKKAK

SEQ ID NO: 12972 - protein, 214 aa, Fritillaria liliacea
PAFAPVPVARDEPVAKPAKVTKAKAPKEKKASIAKKPALHPTYLEMISEAIASLKERTGSSQYAIAKFVEDKHKSHLPANFKKLLLVQLRKLTAAGKLTKVKNSYKISAKPTAAVKPRSAAVKPKSAVAKLKSAVKKVKKAAVKPKPKSAAVKPKAPAVKPKSKPAALKPNTVTKSKTVALKGKTAGRPAKAAKTSVKAAPGKKAAPVALKKAK

SEQ ID NO: 12973 - protein, 211 aa, Fritillaria liliacea
  unsure (1)..(211): unsure at all Xaa locations
PAFAPVPVARDEPAAKPAKAKAPKEKKASVAKKPALHPTYLEMISEAIASLKERTGSSQYAIAKFVEDKHKSHLPANFKKLLLVQLRKLTAAGKLTKVKNSYKISAKPTPAAKPKSAAVKPKSTXSKLKSAAKKVKKAAVKPKPKSAAVKPKAPAVNMKSKPAALKPNTVTKSKTVALKGKTAGRPAKAAKTSVKAAPGKKAAPVALKKAK

SEQ ID NO: 12974 - protein, 214 aa, Fritillaria liliacea
PAFAPVPVARDEPVAKPAKVTKAKAPKEKKASIAKKPALHPTYLEMISGAIASLKERTGSSQYAIAKFVEDKHKSHLPANFKKLLLVQLRKLTAAGKLTKVKTSYKISAKPTAAVKPRSAAVKPKSAVAKLKSAAKKVKKAAVKPKPKSAAVKPKAPAVKPKSKPAALKPNTVTKSKTVALKGKTAGRPAKAAKTSVKAAPGKKAAPVALKKAK

SEQ ID NO: 12975 - protein, 199 aa, Fritillaria liliacea
PAFAPVPVARDEPAAKPAKAKAPKEKKASVAKKPALHPTYLEMISEAIASLKERTGSSQYAIAKFVEDKHKSHLPANFKKLLLVQLRKLTAAGKLTKVKNSYKISAKPTPAAKPKSAAVKPKSTASKLKSAAKKVKKAAVKPKPKSAAVKPKAPAVNMKSKPAALKPNTVTKSKTVALKGKTAGRPAKAAKTSVKAAPG

SEQ ID NO: 12976 - protein, 170 aa, Fritillaria liliacea
EMISEAIASLKERTGSSQYAIAKFVEDKHKSHLPANFKKLLLVQLRKLTAAGKLTKVKNSYKISAKPTPAAKPKSAAVKPKSTASKLKSAAKKVKKAAVKPKPKSAAVKPKAPAVNMKSKPAALKPNTVTKSKTVALKGKTAGRPAKAAKTSVKAAPGKKAAPVALKKAK

SEQ ID NO: 12977 - protein, 170 aa, Fritillaria liliacea
EMISEAIASLKERTGSSQYAIAKFVEDKHKSHLPANFKKLLLVQLRKLTAAGKLTKVKNSYKISAKPTPAAKPKSAAVKPKSTASKLKSAAKKVKKAAVKPKPKSAAVNPKAPAVNMKSKPAALKPNTVTKSKTVALKGKTAGRPAKAAKTSVKAAPGKKAAPVALKKAK

SEQ ID NO: 12978 - protein, 158 aa, Fritillaria liliacea
EMISEAIASLKERTGSSQYAIAKFVEDKHKSHLPANFKKLLLVQLRKLTAAGKLTKVKNSYKISAKPTAAVKPRSAAVKPKSAVAKLKSAAKKVKKAAVKPKPKSAAVKPKAPAVKPKSKPAALKPNTVTKSKTVALKGKTAGRPAKAAKTSVKAAPG

SEQ ID NO: 12979 - protein, 158 aa, Fritillaria liliacea
EMISEAIASLKERTGSSQYAIAKFVEDKHKSHLPANFKKLLLVQLRKLTAAGKLTKVKNSYKISAKPTPAAKPKSAAVKPKSTASKLKSAAKKVKKAAVKPKPKSAAVKPKAPAVNMKSKPAALKPNTVTKSKTVALKGKTAGRPAKAAKTSVKAAPG

SEQ ID NO: 12980 - protein, 170 aa, Fritillaria liliacea
EMISEAIASLKERTGSSQYAIAKFVEDKHKSHLPANFKKLLLVQLRKLTAAGKLTKVKNSYKISAKPTPAAKPKSAAVKPKSTASKLKSAAKKVKKAAVKPKPKSAAVKLKAPAVNMKSKPAALKPNTVTKSKTVALKGKTAGRPAKAAKTSVKAAPGKKVAPVALKKAK

SEQ ID NO: 12981 - protein, 158 aa, Fritillaria liliacea
EMISEAIAPLKERTGSSQYAIAKFVEDKHKSHLPANFKKLLLVQLRKLTAAGKLTKVKNSYKISAKPTPAAKPKSAAVKPKSTASKLKSAAKKVKKAAVKPKPKSAAVKPKAPAVNMKSKPAALKPNTVAKSKTVALKGKTAGRPAKAAKTSVKAAPG

SEQ ID NO: 12982 - protein, 249 aa, Anopheles gambiae str. PEST
MADSAATEVPAAAAAAPAATAKSPKKPKAAAGPKKPKQPAAHPPVNEMLLAAVKALNERNGSSLQAIKKYVAANYKADVTKLATFLKKALKTAVANGKLVQTKGTGASGSFKLSAAAKKPAVEKKKKAAAPKKSASAADKKKKTAAKKPAGEKKAAAKKTTKKADGAAAKKPKAAAAKKPKAADGAKKAAKKPAAPKQKSTKPSKAAAAKPKAPKPKKAAAPAKKAAAPKKAAAPKKAAAPKKAAAAKK

SEQ ID NO: 12983 - protein, 249 aa, Anopheles gambiae str. PEST
MADSAATEVPAAAAAAPAATAKSPKKPKAAAGPKKPKQPAAHPPVNEMLLAAVKALNERNGSSLQAIKKYVAANYKADVTKLATFLKKALKTAVANGKLVQTKGTGASGSFKLSAAAKKPAVEKKKKAAAPKKSASAADKKKKTAAKKPAGEKKAAAKKTTKKADGAAAKKPKAAAAKKPKAADGAKKAAKKPAAPKQKSTKPSKAAAAKPKAPKPKKAAAPAKKAAAPKKAAAPKKAAGPKKAAAAKK

SEQ ID NO: 12984 - protein, 295 aa, Pisum sativum subsp. abyssinicum
SEEPTTVAVEQPIVEEPEAVDTLPPVVNESEEPTAKPKKAPKEPKAKKAPAKPRTHPTYEEMVKEAIVALKERNGSSQYAIAKFIEEKHKQLPSNFKKLLLVQIKKLVASGKLVKVKASYKLPAKSSAAKPAKKPAAAKSKAKPKAKAATKSKAKPAAKAKPAAKAKPAAKAKPAAKAKPAAKAKPAAKAKPAAKPVKTAAAKPAAKAKPAAKPKAAAKAKPAAKAKPAAKAKPAAKPAKAARTSTRTSPAAAAAAPKPAAKKAAPVKKTPVKAAAKAKTAKSPAKKAAAKRGKK

SEQ ID NO: 12985 - protein, 232 aa, Chlamydomonas reinhardtii
MADVAAPAPAKSPAAKKAAKAKKVATHPPYITMVSEAILALKERDGSSIPAIKKWIDAKYGKDIHDKNYPKTLSLTLKTFVKSGKLIKVKNSFKLSEEVKKAAKKAATPKKAAAPKKEGAVKKTKAPKKEGEKKPKSAKKAEKKPKKEGEKKKAAKPAKAEKKPKAAKPAKKTPTKKAAAKPKAEKKPKAAAKPKAEKKPKAAKPKAEKKAKAAKPAAKKSAEKKPKAAKKA

SEQ ID NO: 12986 - protein, 241 aa, Volvox carteri
MASDAPEVKAPKAKTQKKPKTAPTHPPYIQMVTDAILSLKERDGSSLPALKKFIEAKYGKDIHDKKFPKTLSLALKTFVKNGKLVKVKNSYKLSDAQKSKAKAAAKPKAAPKKAAAPKKAAAPKKAKAPKKEGEKKAVKPKSEKKAAKPKTEKKPKAAKKPKAAKKPAAKKPAAKKPAAKKATPKKAAAPKKAAAPKKAKAATPKKAKAATPKKAKAAAKPKAAAKPKAAAKPKAKAAKKA

SEQ ID NO: 12987 - protein, 316 aa, Myxococcus xanthus
MPEGSASLQLAVGDRVVYPNQGVCRVSAIDVKEVAGQKLTFVTMRREEDGAVVMVPEGKVLAIGVRKVASAEDVEAIFTFLRSDSDKADLDWKQRARTNLDRMTQGGIMGLAEVVKGLQVLSELRPLPTKERELYDNARHLLVTEVAAALGTAEVNAEDAIDIVLFPPGRERPKRTAAEFQREEGDLDLDSDLLGLDSDLDLPSDEEPSEPSEEESSEEGESEEAASSEESAPKKRGRPPKAKTEAPEGAEPPAPKKRGRPPKPKPEATAEGAEPPAPKKRGRPPKPKPPEVEGAAPAAPKKRGRPPKVKPPEGES

SEQ ID NO: 12988 - protein, 202 aa, Chaetopterus variopedatus
MADSAPATAAPATPTKAKKAAAPKKPKVPAAHPPVAQMVNAAIAALKDRKGSSLAAIKKYIAANYKCNIDRCTPFIRKYLKQAVAAGKLVQTKGTGAAGSFKLSAAAKAEKPKKPAKKPAAKKATKPKAAAKPKKPKTPKKKAAAKPKKEKKEKKAKTPKKAKAAVKKTPKKAAAKPKTVKKAAKPKTPKKAAKKPAAKKSK

SEQ ID NO: 12989 - protein, 177 aa, Oikopleura dioica
MPASPKKTTKVVAKKADRPSYNVMVAAAIVALKERSGSSRQAIEKYIIANYDGVDKESHFLKKALKSGVEKGTLVQTKGIGASGSFKIKKAEKPAAKPKVEKLAAKKPAAKKPAAKKPAAKKPAAKKTTATKKPVAKKVVKKTVVKKTATKKAASPKKKVVAKKPVVKKAAKKTGKK

SEQ ID NO: 12990 - protein, 204 aa, Arabidopsis thaliana
MAFDLHHGSASDTHSSELPSFSLPPYPQMIMEAIESLNDKNGCNKTTIAKHIESTQQTLPPSHTTLLSYHLNQMKKTGQLIMVKNNYMKPDPDAPPKRGRGRPPKQKTQAESDAAAAAVVAATVVSTDPPRSRGRPPKPKDPSEPPQEKVITGSGRPRGRPPKRPRTDSETVAAPEPAAQATGERRGRGRPPKVKPTVVAPVGC

SEQ ID NO: 12991 - protein, 204 aa, Arabidopsis thaliana
MAFDLHHGSASDTHSSELPSFSLPPYPQMIMEAIESLNDKNGCNKTTIAKHIESTQQTLPPSHMTLLSYHLNQMKKTGQLIMVKNNYMKPDPDAPPKRGRGRPPKQKTQAESDAAAAAVVAATVVSTDPPRSRGRPPKPKDPSEPPQEKVITGSGRPRGRPPKRPRTDSETVAAPEPAAQATGERRGRGRPPKVKPTVVAPVGC

SEQ ID NO: 12992 - protein, 176 aa, Arabidopsis thaliana
MIMEAIESLNDKNGCNKTTIAKHIESTQQTLPPSHMTLLSYHLNQMKKTGQLIMVKNNYMKPDPDAPPKRGRGRPPKQKTQAESDAAAAAVVAATVVSTDPPRSRGRPPKPKDPSEPPQEKVITGSGRPRGRPPKRPRTDSETVAAPEPAAQATGERRGRGRPPKVKPTVVAPVGC

SEQ ID NO: 12993 - protein, 203 aa, Brassica napus
MATETELEPQQSPMAEEQQPSPFSLPPYPQMIMEAIEASNDANGCNKTAIAKHIESTQTSLPPSHMTLLSYHLNQMKQSGQIAMVKNNYMKPDPQAPPKRGRGRPPKAKPQGESSHVAVPAPSVSSPRPRGRPPKAKGPSSEVETKVAAPSGSGRPRGRPPKKQKTESEAVKADVEPAEAPAGERRGRGRPPKAKPAMVPVGC

SEQ ID NO: 12994 - protein, 178 aa, Canavalia gladiata
MATEEVNKPPSLPPYPEMVMKALDALNEPSGSNKSAISKYIESTYGELPDGHATLLAHHLNKMKDSGELVFLKNNYMKPDPNAPPKRGRGRPPKPKVPLPPGTVLSPPRPRGRPPKDPNAPPKSPKTKVSTGSGRPRGRPKKIARSPAAVAPTPVPSGRPRGRPPKVKPQLTEVSVES

SEQ ID NO: 12995 - protein, 178 aa, Canavalia gladiata
MATEEVNKPPSLPPYTEMITKALDSLNEPNGSNKSAISKYIESTCGELPDGHSTLLAHHLNKMKESGELVFLKNNYMKPDPTSPPKRGRGRPPKPKVPLPPGTVLSPPRPRGRPPKDPNAPTKSPKAKVSTGSGRPRGRPKKIARSAAVVAPTPGPSGRPRGRPPKVKPQLTEVSVES

SEQ ID NO: 12996 - protein, 188 aa, Cicer arietinum
MSTTAAQPKSKKTASTKKPLSHPTYAEMITEAIVSLKERTGSSQHAITKFIEEKHKDLSPTFRKLILLHLKKSVAAGKLVKVKGSFKLAPAKSSVAKPKAATAPAATKKAKAVTKPAAKAATKPKAKAVAKPKSSGKAQSCNEAENGAKPKAKTVKTTPVKKAVAKTTKKVPVKKPKSVKTPVKKAKK

SEQ ID NO: 12997 - protein, 176 aa, Glycine max
MATEEVNKPQSLPPYPEMIVKALEALNEPNGSNKSAISKYIETTYGELPDATVLGSHLNKMKDSGELSFKQNNYMKADPNAPPKRGRGRPPKPKAPLPPGTVVSPPRPRGRPPKDPNAPPKSPKAKATPGSGRPRGRPKKVPRSPAVAAPTAVSSGRPRGRPPKVKPQLTEVSVES

SEQ ID NO: 12998 - protein, 176 aa, Glycine max; identical to SEQ ID NO: 12997

SEQ ID NO: 12999 - protein, 176 aa, Glycine max
MATEEVNKPQSLPPYPEMIVKTLEALNEPNGSNKSAISKYIETTYGELPDATVLGSHLNKMKDSGELSFKQNNYMKADPNAPPKRGRGRPPKPKTPLPPGTVVSPPRPRGRPPKDPNAPPKSPKAKATPGSGRPRGRPKKVPRSPAVAAPTAVSSGRPRGRPPKVKPQLTEVSVES

SEQ ID NO: 13000 - protein, 176 aa, Glycine max; identical to SEQ ID NO: 12999

SEQ ID NO: 13001 - protein, 176 aa, Glycine max
MATEEVNKPQSLPPYPEMIVKALEALNEADGSNKSAISKYIETTYGELPDETVLGSHLNKMKESGELAFKQNNYMKADPNAPPKRGRGRPPKPKVPLPPGTVVSPPRPRGRPPKDPNAPPKSPKAKATPATGRPRGRPKKVARSPAVPSPTAVSTGRPRGRPPKVKPQLTEVSVES

SEQ ID NO: 13002 - protein, 177 aa, Glycine max
  unsure (1)..(177): unsure at all Xaa locations
MATEVINKPPSLPPYPEMIREAIEALNEENGSNKSSISKYIESTYGGLPQAHKVLLNVHLAKMRESGVLVFWKNNYTKRDPNAPPRRGRGRPPKPKEPLPPGTVLSPPRPRGRPSKDPNDLQKPLKASVVGSGRPRGRPRKMALSQASKAKPVTSNGRPRGRPPKVKAVFTEISVXL

SEQ ID NO: 13003 - protein, 177 aa, Glycine max
  unsure (1)..(177): unsure at all Xaa locations
MATEEVNKLQSLPPYPEMIVKALEALNEADGSSKSAISKYIETTYGELPDETVLGSHLNKMKESGELAFKQNNYMKADPNAPPKRGRGRPPKPKVPLPPGTVVXSPPRPRGRPPKDPNAPPKSPKAKATPATGRPRGRPKKVARSPAVPSPTAVSTGRPRGRPPKVKPQLTEVSVES

SEQ ID NO: 13004 - protein, 152 aa, Glycine max
ALNEADGSNKSAISKYIETTYGELPDETVLGSHLNKMKESGELAFKQNNYMKADPNAPPKRGRGRPPKPKVPLPPGTVVSPPRPRGRPPKDPNAPPKSPKAKATPATGRPRGRPKKVARSPAVPSPTAVSTGRPRGRPPKVKPQLTEVSVES

SEQ ID NO: 13005 - protein, 298 aa, Lathyrus aphaca
SEEPTTVAVEQPIVEEPEAVDTVPPVVNEAEEPTAKPKKAPKAPKEPKAKKAPAKPRTHPTYEEMVKEAIVALKEKSGSSQYAIAKFIEEKHKQLPSNFKKLLLVQLKKLVASGKLVKVKASYKLPAKSTAAKPAKKPAGSKPKAKPKAKAATKSKAKPAAKAKPAAKAKPAAKAKPAAKAKPAAKAKPAAKAKPAAKPAKAVAAKPAAKAKPAAKPKAAAKAKPAAKAKPAAKAKPAAKPAKAARTSTRTSPAAKAPAPKVAVKKAAPVKKTPVKAAAKAKTAKSPAKKAAAKRGKK

SEQ ID NO: 13006 - protein, 295 aa, Lathyrus sativus
SEEPTTVAVEQPIVEEPAAVDTLPPVVNEAEEPAAKPKKAPKEPKAKKAPAKPRTHPTYEEMVKEAIVALKEKSGSSQYAIAKFIEEKHKQLPSNFKKLLLVQIKKLVASGKLVKVKASYKLPAKSTAAKPAKKPAASKSKAKPKAKAATKSKAKPAAKAKPAAKAKPAAKAKPAAKAKPAAKAKPAAKAKPAAKPAKTVAAKPAAKAKPAAKPKAAAKAKPAAKAKPAAKAKPAAKPAKAARTSTRTSPAAKAAAPKPAVKKAAPVKKTPVKAAAKAKTAKSPAKKAAAKRGKK

SEQ ID NO: 13007 - protein, 306 aa, Lathyrus sativus
SEEPTTVAVEQPIVEEPAAVEQPIVEEPAAVDTLPPVVNEAEEPAAKPKKAPKEPKAKKAPAKPRTHPTYEEMVKEAIVALKEKSGSSQYAIAKFIEEKHKQLPSNFKKLLLVQIKKLVASGKLVKVKASYKLPAKSTAAKPAKKPAASKSKAKPKAKAATKSKAKPAAKAKPAAKAKPAAKAKPAAKAKPAAKAKPAAKAKPAAKPAKTVAAKPAAKAKPAAKPKAAAKAKPAAKAKPAAKAKPAAKPAKAARTSTRTSPAAKAAAPKPAVKKAAPVKKTPVKAAAKAKTAKSPAKKAAAKRGKK

SEQ ID NO: 13008 - protein, 293 aa, Lens culinaris
SEEPTTVAVEQPIAEEQAAVDTLPPVVNESEEPTAKPKKAAKEPKAKKAPAKPRTHPTYEEMVKDAIVSLKEKNGSSQYAIAKFIEEKQKQLPSNFKKLLLVQIKKLVASGKLVKVKASYKLPAKSSAPKPAKKPAASKPKAKPKAKPAAKSKAKPAAKAKPAAKAKPAAKAKPAAKAKPAAKAKPAAKAKPAAKTAAVAKAKPAAKAKPAAKAKPAAKAKPAAKAKPAAKAKPAAKPAKAARTSTRTSPGTRAAAPKPAAKKAAPAKKAPVKAAAKTAKSPAKKAAAKRGKK

SEQ ID NO: 13009 - protein, 293 aa, Lens culinaris
SEEPTTVAVEQPIVEEQAAVDTLPPVVNESEEPTAKPKKAAKEPKAKKAPAKPRTHPTYEEMVKDAIVSLKEKNGSSQYAIAKFIEEKQKQLPSNFKKLLLVQIKKLVASGKLVKVKASYKLPAKSSAPKPAKKPAASKPKAKPKAKPAAKSKAKPAAKAKPAAKAKPAAKAKPAAKAKPAAKSMPAAKAKPAAKTAAVAKAKPAAKAKPAAKAKPAAKAKPAAKAKPAAKAKPAAKPAKAARTSTRTSPGTRAAAPKPAAKKAAPAKKAPVKAAAKTAKSPAKKAAAKRGKK

SEQ ID NO: 13010 - protein, 281 aa, Lens culinaris
SEEPTTVAVEQPIVEEQAAVDTLPPVVNESEEPTAKPKKAAKEPKAKKAPAKPRTHPTYEEMVKDAIVSLKEKNGSSQYAIAKFIEEKQKQLPSNFKKLLLVQIKKLVASGKLVKVKASYKLPAKSSAPKPAKKPAASKPKAKPKAKPAAKSKAKPAAKAKPAAKAKPAAKAKPAAKAKPAAKAKPAAKAKPAAKAKPAAKAKPAAKAKPAAKAKPAAKAKPAAKPAKAARTSTRTSPGTRAAAPKPAAKKAAPAKKAPVKAAAKTAKSPAKKAAAKRGKK

SEQ ID NO: 13011 - protein, 197 aa, Pisum sativum
MATREVNKPLSLPPYPELILKAIDSLNEPNGSNKSAISNYIESVYGELPEGHSVVLLYHLNQMKESGDLVFAKNNYLRPDPNAPPKRGRGRPPKAKDPLASPPSGAVSTPRPRGRPPKDPNAPPKTPKASGSGRPRGRPKKIARTEDVDASTPSPVSVAAVNVDVVVPCVAAVPTSSGRPRGRPPKVKPQLTQVSVS

SEQ ID NO: 13012 - protein, 229 aa, Euphorbia esula
MADTPVSAPVVPEVTERKSKRGTKAAAVKVPKEKKKVIAAKKPKSKGTSSHPSFFEMISDAISTLKERTGSSQYAINKFVEDKHKQLPSNFRKLLLFHLKKLVASGKLVKVKNSFKLPSARAAPAPALAKKPTIPKPKVAAKPKTAKIGAKPKAKAKVAAKTKATTKTVAKKIPAAKPKAKTAGKPKTVAAKPAKVAKTAAVASPGKKKAVPVKKVKTVKSPAGKRTRK

SEQ ID NO: 13013 - protein, 302 aa, Apium graveolens
MAAVEDPIVPMEGVEEEVPVTVTEAPEEAAPPAEDPAPKKGKELKPKKAAAPRKPRSAPAHPPYLEMITDAITSLKERTGSSQQAIQKFLEAKHKDLPAVFRKMLSNNLKKLVAAGKLVKVKASYKLPSAKSSAPAKKKPAAAPAKKKAAAAPAKKKTAAAPKKKAAAAPKKKAPVAKAKPAAKPKAKAVVKPKAKAAVKPKAKPAAKPAAKAKPAAKAKPAAKPKAKAKPAKVARTSTRTTPGKKAPAKPAAAPVKKATPVKKATATPVKKAAPVKKAAPAKGKSVKTPVKRTSARKAGKK

SEQ ID NO: 13014 - protein, 287 aa, Lycopersicon esculentum
MATEEPVIVNEVVEEQAAPETVKDEANPPAKSGKAKKETKAKKPAAPRKRSATPTHPPYFEMIKDAIVTLKERTGSSQHAITKFIEEKQKSLPSNFKKLLLTQLKKFVASEKLVKVKNSYKLPSGSKPAAAAVPAKKKPAAAKSKPAAKPKAAVKPKAKPAAKAKPAAKAKPAAKAKPAAKAKPAAKAKPAAKAKPVAKAKPKAAAAAKPKAAVKPKAAPAKTKAAVKPNLKAKTTTAKVAKTATRTTPSRKAAPKATPAKKEPVKKAPAKNVKSPAKKATPKRGRK

SEQ ID NO: 13015 - protein, 271 aa, Lycopersicon esculentum
MATEEPVVAIEPVNEPMVVAEPATEENPPAETDEPKKEKEIKAKKSSAPRKRNPPTHPSYFEMIKEAIVTLKDKTGSSQYAITKFIEDKQKNLPSNFRKMLLAQLKKLVASGKLVKVKSSYKLPAPKAAAPALAKKKSIAKPKAAQAKKATKAKPKPKPKVAAPKAKTATKSKAKPKPVVAAKAKPAAKPKAVVAKPKAAVKPKAPVKAKAAVKPKAANEKPAKVARTSTRSTPSRKAAPKPAVKKAPVKSVKSKTVKSPAKKASARKAKK

SEQ ID NO: 13016 - protein, 279 aa, Nicotiana tabacum
MATEEPVVATEIVTEPAVVEAEPAKEDNPPAVESDEPKKEKETKAKKPAAPRKRNPPTHPSYFEMIKDAIVTLKDKTGSSQHAITKFIEDKQKNLPSNFRKLLLVQLKKLVASGKLVKVKSSYKLPAARSAAPKAAATAPVKKKPAAKPKATKAKPKPKPKTVAPKAKTATKPKAKPKPKAKLVAKAKPAVKPKAAAVAKPKAAEKPKTPVKTKAAAKPKEKPAKVARTATRSTPSRKAAPKPVAKKAPVKKAAPAAKSVKAKTAKSPAKRASARKGRK

SEQ ID NO: 13017 - protein, 282 aa, Nicotiana tabacum
MATEEPLVVTEIVTEAVVVEAEPAKEENSPAAEPDEPKKEKEIEAKKPAAPRKRNPPTHPSYFEMIKDAIVTLKDKTGSSQHAITKFIEDKQKNLPSNFRKLLLVQLKKLVASGKLVKVKSSYKLPAARSAAPKAAATAPAKKKPGAKPKATKAKPKPKPKTVAPKAKTATKPKAKQRQVKAKLVAKAKPAVKPKAAAVAMPKAAEKPKTPVKTKAAAKPKAKEKPAKVARTATRSTPSRKAAPKPVAKKVPVKKAAPAAKSVKAKTAKSPAKRASARKGRK

SEQ ID NO: 13018 - protein, 546 aa, Nicotiana tabacum
MDPSMDLPTTTESPTFNSAQVVNHAPTPTPPQPPPPAPSFSPTHPPYAEMITAAITALKERDGSSRIAIAKYIDRVYTNLPPNHSALLTHHLKRLKNSGYLAMVKHSYMLAGPPGSAPPPPSADADSNGVGTDVSSLSKRKPGRPPKLKPEAQPHAQPQVQAQVQFQDQFQAQLQAQLQAQLQAQQQQAAQFQPQFQLIQQQPQYLPQQQFQPDPLLQPQQQFQTQPQTQAYATPEGHNYAGLGAESVFVSLGLADGPVGVQNPAVGLAPAPGAEESTAKRRPGRPRKDGSTVVKPVEPKLPDQSGGSKRRPGRPPKSVTVNAAPGSAMGSGRRGRPRKNSVPGRRGRPRKNAAVAAANGGANVANIPSVGANVTNVPAGGVPGAITTPKRRGRPPRSSGPPAATVGVTDVPIAAAFDTENLPNAVGGGGVTNNGALPPLGKRRGRPPKSYGAAAAAPTVKRPRKLSGKPLGRPRKNVTSPAVSDPKLVVAYEELKGKLEHMQSRIKEAANALKPCLNAESPAIALAALQELEELAAAGGNPVQQN

SEQ ID NO: 13019 - protein, 170 aa, Avena sativa
MSTEEVAKSLLLPPYPEMILEAIESLNDKVGSNKSAISKYIEGKYGDMPPTHGSLLTAHLARMKETGELLFLKNNYFRTDAPDAPPKRGRGRPPKVKDPNAPPPPPKPSSGRPRGRPAKAKDPEAEAANPPKKPKAAPAPTPAPAADGSTPAKRGRGRPPKVRPAEPTAA

SEQ ID NO: 13020 - protein, 189 aa, Triticum aestivum
MANDGSPKSGDIPPYPEMIIAAIEALGDKNGSSKSAISSYIEEKYEGLPSAHASLLTANLASMKEAGKLAFVKNNYLKADAPSATPAKRGRGRPPKDPNAPPKPKAAPKDPNTPKRGRGRPPKAKDPMADAVKEAVAKATTGMPRGRGRPPGPSSAKKAKVATEAASPAPAAGSAPAKRGRGRPRKVAV

SEQ ID NO: 13021 - protein, 189 aa, Triticum aestivum
MANGGSPKSGDIPPYPEMILAAIEALGDKNGSSKSAISSYIEEKYEGLPSAHASLLTANLASMKEAGKLAFAKNNYLKADAPSATPAKRGRGRPPKDPNAPPKPKAAPKDPNTPKRGRGRPPKAKDSMADAVKEAVAKATTGMPRGRGRPPGPSSAKKAKVTTEAASPAPASGSAPAKRGRGRPRKVAA

SEQ ID NO: 13022 - protein, 164 aa, Triticum aestivum
MADEQVAKPASLPPYPEMILAAIAALNDKNGSNKSAISKHIEGKYGDLPKEHAALLTAHLVRMKESGQLLFLKNNYFRTDAPDAPPKRGRGRPRKPIDPNAPPKRGKPASPRPRGRPLKPKDPEAEAANPPKKAKTAPAPAVDGSAKRGRGRPPKARPAEPAAA

SEQ ID NO: 13023 - protein, 151 aa, Triticum aestivum
  unsure (1)..(151): unsure at all Xaa locations
IRSIPIQLSPLARSRRRPPLGKKNSPPPSPFPLPVPIAALNDKNGSNKSAISKYIEGKYGDLPKEHGALLTAHLVRMKESGQLFFLKNNYFRTDAPDAPPKRGRGRPRKPIDPNAPPPPPKSASPRPRGRPAKPKDPEAEAANPPKKAKNX

SEQ ID NO: 13024 - protein, 149 aa, Triticum aestivum
MANDGSPKSGDIPPYPEMILAAIEALGDKNGSSKSAISSYIEEKYEGLPSAHASLLTANLASMKEAGKLAFVKNNYLKADAPSATPAKRGREGSPCVLDVPPELMVAPTDSLSPTRGRGRPQKKKARGRCEACVLMPSGLCISLWLRRW

SEQ ID NO: 13025 - protein, 231 aa, Lilium longiflorum
MATTVAIETPAFTPVAVDPPAAKPAKAKKAKVPKEKKASVAKPALHPTYLEMISEAIASLKERTGSSQIAISKFVENKHKAHLPANFKKLLLVQLRKLTAAGKLTKVKNSYKISAKPTTATKPKKTSAKSTTVAKPKSAAAKPKSTAAKVKKAAVKPKPKSAAVKPKAEPAAPKPKAVSKPKAVAPKPKTAGPAKKAKTSAKPSPSKKAAPVASKKAKPVKKATAPKKAKK

SEQ ID NO: 13026 - protein, 213 aa, Ascobolus immersus
MAAATASAAATPAKKAAPKKPAAAPEHPSYKEMLTKAITELKERNGSSRQAIKKFIQSNFKVKDNFDVQFNQALRRGVEKGEFVQPKGPSGTVKLAKKEKAAAAPKKPAAKKAAAPKKDAAPKKAAAPKKAAAPKSAAAKKKLLDAKKAAAKKPAAKKAAAPKKVAAPVEKPAPVKTTTTKSGRVTKASTTSKPAPKKKAAAPKKAATPAKSS

SEQ ID NO: 13027 - protein, 236 aa, Fritillaria agrestis
MSAAVAIETPAFAPVPVARDEPVAKPGKVTKAKAPKEKKASVAKKPALHPTYLEMISEAIASLKERTGSSQYAIAKFVEDKHKSHLPANFKKLLLVQLQKLTAAGKLTKVKNSYKISAKPTPAAKPKSAAVKPKSAATKLKSAAKKVKKAAVKPKPKSAAVKPKAPAVNMKSKPAALKPNTVTKSKTVALKGKTAGRPAKAAKTSVKAAPGKKAAPVALKKAKAGKKVTTPKKAKK

SEQ ID NO: 13028 - protein, 245 aa, Pinus pinaster
MASTDPPADTVPAEPVANEDVKAAEEKPVKAPKEKKVKTPKEKKPKAAKGSKPPPAHPPYFQMISEAIVALKERGGSSPYAIAKFLSEKYKSDLPPVFKKKLNVQLRNLTNSGKLTKVKGSYKLAEKEKKADAPKPKTEKKPAAKKPKAPAAKAPAKAPSKASKPAAPKKAEKPVAPKKAAAPKKAAKPAAPKAAAPKAKKPAAAAKPAAPKRSSTRTAAKPAAPKAAKKPTPKKAGGAAKKAKK

SEQ ID NO: 13029 - protein, 669 aa, Arabidopsis thaliana
MEQGGGGGGNEVVEEASPISSRPPANNLEELMRFSAAADDGGLGGGGGGGGGGSASSSSGNRWPREETLALLRIRSDMDSTFRDATLKAPLWEHVSRKLLELGYKRSSKKCKEKFENVQKYYKRTKETRGGRHDGKAYKFFSQLEALNTTPPSSSLDVTPLSVANPILMPSSSSSPFPVFSQPQPQTQTQPPQTHNVSFTPTPPPLPLPSMGPIFTGVTFSSHSSSTASGMGSDDDDDDMDVDQANIAGSSSRKRKRGNRGGGGKMMELFEGLVRQVMQKQAAMQRSFLEALEKREQERLDREEAWKRQEMARLAREHEVMSQERAASASRDAAIISLIQKITGHTIQLPPSLSSQPPPPYQPPPAVTKRVAEPPLSTAQSQSQQPIMAIPQQQILPPPPPSHPHAHQPEQKQQQQPQQEMVMSSEQSSLPSSSRWPKAEILALINLRSGMEPRYQDNVPKGLLWEEISTSMKRMGYNRNAKRCKEKWENINKYYKKVKESNKKRPQDAKTCPYFHRLDLLYRNKVLGSGGGSSTSGLPQDQKQSPVTAMKPPQEGLVNVQQTHGSASTEEEEPIEESPQGTEKPEDLVMRELIQQQQQLQQQESMIGEYEKIEESHNYNNMEEEEDQEMDEEELDEDEKSAAFEIAFQSPANRGGNGHTEPPFLTMVQ

SEQ ID NO: 13030 - protein, 594 aa, Arabidopsis thaliana
MEQGGGGGGNEVVEEASPISSRPPANNLEELMRFSAAADDGGLGGGGGGGGGGSASSSSGNRWPREETLALLRIRSDMDSTFRDATLKAPLWEHVSRKLLELGYKRSSKKCKEKFENVQKYYKRTKETRGGRHDGKAYKFFSQLEALNTTPPSSSLDVTPLSVANPILMPSSSSSPFPVFSQPQPQTQTQPPQTHNVSFTPTPPPLPLPSMGPIFTGVTFSSHSSSTASGMGSDDDDDDMDVDQANIAGSSSRKRKRGNRGGGGKMMELFEGLVRQVMQKQAAMQRSFLEALEKREQERLDREEAWKRQEMARLAREHEVMSQERAASASRDAAIISLIQKITGHTIQLPPSLSSQPPPPYQPPPAVTKRVAEPPLSTAQSQSQQPIMAIPQQQILPPPPPSHPHAHQPEQKQQQQPQQEMVMSSEQSSLPSSSRWPKAEILALINLRSGMEPRYQDNVPKGLLWEEISTSMKRMGYNRNAKRCKEKWENINKYYKKVKESNKKRPQDAKTCPYFHRLDLLYRNKVLGSGGGSSTSGLPQDQKQSPVTAMKPPQEGLVNVQQTHGSASTEEEEPIEESPQGTEKVQTLLFLVKM

SEQ ID NO: 13031 - protein, 594 aa, Arabidopsis thaliana
MEQGGGGGGNEVVEEASPISSRPPANNLEELMRFSAAADDGGLGGGGGGGGGGSASSSSGNRWPREETLVLLRIRSDMDSTFRDATLKAPLWEHVSRKLLELGYKRSSKKCKEKFENVQKYYKRTKETRGGRHDGKAYKFFSQLEALNTTPPSSSLDVTPLSVANPILMPSSSSSPFPVFSQPQPQTQTQPPQTHNVSFTPTPPPLPLPSMGPIFTGVTFSSHSSSTASGMGSDDDDDDMDVDQANIAGSSSRKRKRGNRGGGGKMMELFEGLVRQVMQKQAAMQRSFLEALEKREQERLDREEAWKRQEMARLAREHEVMSQERAASASRDAAIISLIQKITGHTIQLPPSLSSQPPPPYQPPPAVTKRVAEPPLSTAQSQSQQPIMAIPQQQILPPPPPSHPHAHQPEQKQQQQPQQEMVMSSEQSSLPSSSRWPKAEILALINLRSGMEPRYQDNVPKGLLWEEISTSMKRMGYNRNAKRCKEKWENINKYYKKVKESNKKRPQDAKTCPYFHRLDLLYRNKVLGSGGGSSTSGLPQDQKQSPVTAMKPPQEGLVNVQQTHGSASTEEEEPIEESPQGTEKVQTLLFLVKM

SEQ ID NO: 13032 - protein, 730 aa, Arabidopsis thaliana
MEQGGGGGGNEVVEEASPISSRPPANNLEELMRFSAAADDGGLGGGGGGGGGGSASSSSGNRWPREETLALLRIRSDMDSTFRDATLKAPLWEHVSRSWFMSFWDVFDFENPKTLFTSKKKKKKSDRTVTIKIFQLITTTKNKIKLENLNYFHVFGNRKLLELGYKRSSKKCKEKFENVQKYYKRTKETRGGRHDGKAYKFFSQLEALNTTPPSSSLDVTPLSVANPILMPSSSSSPFPVFSQPQPQTQTQPPQTHNVSFTPTPPPLPLPSMGPIFTGVTFSSHSSSTASGMGSDDDDDDMDVDQANIAGSSSRKRKRGNRGGGGKMMELFEGLVRQVMQKQAAMQRSFLEALEKREQERLDREEAWKRQEMARLAREHEVMSQERAASASRDAAIISLIQKITGHTIQLPPSLSSQPPPPYQPPPAVTKRVAEPPLSTAQSQSQQPIMAIPQQQILPPPPPSHPHAHQPEQKQQQQPQQEMVMSSEQSSLPSSSRWPKAEILALINLRSGMEPRYQDNVPKGLLWEEISTSMKRMGYNRNAKRCKEKWENINKYYKKVKESNKKRPQDAKTCPYFHRLDLLYRNKVLGSGGGSSTSGLPQDQKQSPVTAMKPPQEGLVNVQQTHGSASTEEEEPIEESPQGTEKPEDLVMRELIQQQQQLQQQESMIGEYEKIEESHNYNNMEEEEDQEMDEEELDEDEKSAAFEIAFQSPANRGGNGHTEPPFLTMVQ

SEQ ID NO: 13033 - protein, 603 aa, Arabidopsis thaliana
MMQLGGGTPTTTAAATTVTTATAPPPQSNNNDSAATEAAAAAVGAFEVSEEMHDRGFGGNRWPRQETLALLKIRSDMGIAFRDASVKGPLWEEVSRKMAEHGYIRNAKKCKEKFENVYKYHKRTKEGRTGKSEGKTYRFFDQLEALESQSTTSLHHHQQQTPLRPQQNNNNNNNNNNNSSIFSTPPPVTTVMPTLPSSSIPPYTQQINVPSFPNISGDFLSDNSTSSSSSYSTSSDMEMGGGTATTRKKRKRKWKVFFERLMKQVVDKQEELQRKFLEAVEKREHERLVREESWRVQEIARINREHEILAQERSMSAAKDAAVMAFLQKLSEKQPNQPQPQPQPQQVRPSMQLNNNNQQQPPQRSPPPQPPAPLPQPIQAVVSTLDTTKTDNGGDQNMTPAASASSSRWPKVEIEALIKLRTNLDSKYQENGPKGPLWEEISAGMRRLGFNRNSKRCKEKWENINKYFKKVKESNKKRPEDSKTCPYFHQLDALYRERNKFHSNNNIAASSSSSGLVKPDNSVPLMVQPEQQWPPAVTTATTTPAAAQPDQQSQPSEQNFDDEEGTDEEYDDEDEEEENEEEEGGEFELVPSNNNNNKTTNNL

SEQ ID NO: 13034 - protein, 575 aa, Arabidopsis thaliana
MSGNSEGLLESSGGGVGGSVEEEKDMKMEETGEGAGSGGNRWPRPETLALLRIRSEMDKAFRDSTLKAPLWEEISRKMMELGYKRSSKKCKEKFENVYKYHKRTKEGRTGKSEGKTYRFFEELEAFETLSSYQPEPESQPAKSSAVITNAPATSSLIPWISSSNPSTEKSSSPLKHHHQVSVQPITTNPTFLAKQPSSTTPFPFYSSNNTTTVSQPPISNDLMNNVSSLNLFSSSTSSSTASDEEEDHHQVKSSRKKRKYWKGLFTKLTKELMEKQEKMQKRFLETLEYREKERISREEAWRVQEIGRINREHETLIHERSNAAAKDAAIISFLHKISGGQPQQPQQHNHKPSQRKQYQSDHSITFESKEPRAVLLDTTIKMGNYDNNHSVSPSSSRWPKTEVEALIRIRKNLEANYQENGTKGPLWEEISAGMRRLGYNRSAKRCKEKWENINKYFKKVKESNKKRPLDSKTCPYFHQLEALYNERNKSGAMPLPLPLMVTPQRQLLLSQETQTEFETDQREKVGDKEDEEEGESEEDEYDEEEEGEGDNETSEFEIVLNKTSSPMDINNNLFT

SEQ ID NO: 13035 - protein, 575 aa, Arabidopsis thaliana
MSGNSEGLLESSGGGVGGSVEEEKDMKMEETGEGAGSGGNRWPRPETLALLRIRSEMDKAFRDSTLKAPLWEEISRKMMELGYKRSSKKCKEKFENVYKYHKRTKEGRTGKSEGKTYRFFEELEAFETLSSYQPEPESQPAKSSAVITNAPATSSLIPWISSSNPSTEKSSSPLKHHHQVSVQPITTNPTFLAKQPSSTTPFPFYSSNNTTTVSQPPISNDLMNNVSSLNLFSSSTSSSTASDEEEDHHQVKSSRKKRKYWKGLFTKLTKELMEKQEKMQKRFLETLEYREKERISREEAWRVQEIGRINREHETLIHERSNAAAKDAAIISFLHKISGGQPQHPQQHNHKPSQRKQYQSDHSITFESKEPRAVLLDTTIKMGNYDNNHSVSPSSSRWPKTEVEALIRIRKNLEANYQENGTKGPLWEEISAGMRRLGYNRSAKRCKEKWENINKYFKKVKESNKKRPLDSKTCPYFHQLEALYNERNKSGAMPLPLPLMVTPQRLLLLSQETLTEFETDQREKVGDKEDEEEGESEEDEYDEEEEGEGDNETSEFEIVLNKTSSPMDINNNLFT

SEQ ID NO: 13036 - protein, 548 aa, Arabidopsis thaliana
MEETGEGAGSGGNRWPRPETLALLRIRSEMDKAFRDSTLKAPLWEEISRKMMELGYKRSSKKCKEKFENVYKYHKRTKEGRTGKSEGKTYRFFEELEAFETLSSYQPEPESQPAKSSAVITNAPATSSLIPWISSSNPSTEKSSSPLKHHHQVSVQPITTNPTFLAKQPSSTTPFPFYSSNNTTTVSQPPISNDLMNNVSSLNLFSSSTSSSTASDEEEDHHQVKSSRKKRKYWKGLFTKLTKELMEKQEKMQKRFLETLEYREKERISREEAWRVQEIGRINREHETLIHERSNAAAKDAAIISFLHKISGGQPQQPQQHNHKPSQRKQYQSDHSITFESKEPRAVLLDTTIKMGNYDNNHSVSPSSSRWPKTEVEALIRIRKNLEANYQENGTKGPLWEEISAGMRRLGYNRSAKRCKEKWENINKYFKKVKESNKKRPLDSKTCPYFHQLEALYNERNKSGAMPLPLPLMVTPQRQLLLSQETQTEFETDQREKVGDKEDEEEGESEEDEYDEEEEGEGDNETSEFEIVLNKTSSPMDINNNLFT

SEQ ID NO: 13037 - protein, 433 aa, Arabidopsis thaliana
EETLVLLRIRSDMDSTFRDATLKAPLWEHVSRKLLELGYKRSSKKCKEKFENVQKYYKRTKETRGGRHDGKAYKFFSQLEALNTTPPSSSLDVTPLSVANPILMPSSSSSPFPVFSQPQPQTQTQPPQTHNVSFTPTPPPLPLPSMGPIFTGVTFSSHSSSTASGMGSDDDDDDMDVDQANIAGSSSRKRKRGNRGGGGKMMELFEGLVRQVMQKQAAMQRSFLEALEKREQERLDREEAWKRQEMARLAREHEVMSQERAASASRDAAIISLIQKITGHTIQLPPSLSSQPPPPYQPPPAVTKRVAEPPLSTAQSQSQQPIMAIPQQQILPPPPPSHPHAHQPEQKQQQQPQQEMVMSSEQSSLPSSSRWPKAEILALINLRSGMEPRYQDNVPKGLLWEEISTSMKRMGYNRNAKRCKEKWENINKYYKKV

SEQ ID NO: 13038 - protein, 474 aa, Arabidopsis thaliana
MEQGGGGGGNEVVEEASPISSRPPANNLEELMRFSAAADDGGLGGGGGGGGGGSASSSSGNRWPREETLVLLRIRSDMDSTFRDATLKAPLWEHVSRKLLELGYKRSSKKCKEKFENVQKYYKRTKETRGGRHDGKAYKFFSQLEALNTTPPSSSLDVTPLSVANPILMPSSSSSPFPVFSQPQPQTQTQPPQTHNVSFTPTPPPLPLPSMGPIFTGVTFSSHSSSTASGMGSDDDDDDMDVDQANIAGSSSRKRKRGNRGGGGKMMELFEGLVRQVMQKQAAMQRSFLEALEKREQERLDREEAWKRQEMARLAREHEVMSQERAASASRDAAIISLIQKITGHTIQLPPSLSSQPPPPYQPPPAVTKRVAEPPLSTAQSQSQQPIMAIPQQQILPPPPPSHPHAHQPEQKQQQQPQQEMVMSSEQSSLPSSSRWPKAEILALINLRSGMEPRYQDNVPKGLLWEEISCKKLL

SEQ ID NO: 13039 - protein, 338 aa, Arabidopsis thaliana
MEQGGGGGGNEVVEEASPISSRPPANNLEELMRFSAAADDGGLGGGGGGGGGGSASSSSGNRWPREETLALLRIRSDMDSTFRDATLKAPLWEHVSRKLLELGYKRSSKKCKEKFENVQKYYKRTKETRGGRHDGKAYKFFSQLEALNTTPPSHPHAHQPEQKQQQQPQQEMVMSSEQSSLPSSSRWPKAEILALINLRSGMEPRYQDNVPKGLLWEEISTSMKRMGYNRNAKRCKEKWENINKYYKKVKESNKKRPQDAKTCPYFHRLDLLYRNKVLGSGGGSSTSGLPQDQKQSPVTAMKPPQEGLVNVQQTHGSASTEEEEPIEESPQGTEKKTL

SEQ ID NO: 13040 - protein, 500 aa, Glycine max
  unsure (1)..(500): unsure at all Xaa locations
MDVAFRDASVKGPLWEEVSRKLAELGYHRNAKKCKEKFENVYKYHKRTKEGRSGKSEGKTYRFFDQLQALENNPSIHAMQSPTPTPSKPPQTTALLATPVSIVVTTTTTPSTLVSNNATVPSTNTPPLPQAILNITPPSTLNITTPSFPSSNPTTYFPTQTPNPTTNNNPPNTITPASFPNFSADLLSNSSFSSTSSEETTTMGGGGMRRKRKRKWKDFFERLMKEVIEKQEGLQRRFLEAIEKREQERVVREEAWRMQEMQRINREREILAQERSIAAAKDAAVMTFLQKIAEHQQQEINLEPALNNNNNSITVVPQQPVPQTTTTPTPTPQQAQTTIVPEAPQPQQQIVVSNVENNKADNNGENLTMGASSSRWPKMEVQALINLRTSLETKYQENGPKGPLWEEISALMRKMGYNRNAKRCKKKCXNINKYFKKVKESSKKRPEDSKTCPYFHQLEALYREKNKREGQMKPDSMMAPLMVQPEQQWPPQTHVXCRQK

SEQ ID NO: 13041 - protein, 620 aa, Glycine max
  unsure (1)..(620): unsure at all Xaa locations
ARGCNCIGTQHLYSYMQLGDSSVLEISSHTQPEMAVTAAVLPPEEVAHDXAATTVVVVVVNSGEGNEGNNKMSFGGNRWPRQETLALLKIRSDMDTVFRDSSLKGPLWEEVSRKLAELGYQRSAKKCKEKFENVYKYNKRTKENKSGKSHGKAYKFFDQLQALENQFTVSYPPKPQPTSTLTTTNTLTSDHGNKVISYTTTTTTTTTTSTTDPRDSSPPQTNNNNNSVTHSLPNMNTSFSTTTASTSSSTASDEDLEERYRRKRKWKDYFRRLTRKVLLKQEEMQKKFLEAMDQRERERVAQQDNWRMQEMARINREHEILVQERSTAAAKDATVIALLQKMYGQQNPTQQVEVEPPPQQKQTIPQSLPPILMPNNNFEVKKINNGHSVTSTTTGTVATATTTTTSPVNSSSSRWPKAEVHALIRIRTSLETKYQENGPKAPLWEDISIAMQRLGYNRSAKRCKEKWENINKYFKRVRESSKERREDSKTCPYFHELEALYKEKSKSSKNPFGIFQNMKPNEMMLMMTEPLMVQPEQQWRPPPQSLEEGVGMENASEEYHENEENGGDDDDNIEEDGDSVEDAGPNPCEIATNNXTCFSGHRXSRQDKEFSEWRKIYVCA

SEQ ID NO: 13042 - protein, 640 aa, Glycine max
  unsure (1)..(640): unsure at all Xaa locations
MQLGDSSVLEISSHTQPEMAVTAAVSEEVAHDGSDNSGDGGGGEMIGMDLDASEGNEGNNKMSFGGNRWPRQETLALLKIRSDMDTVFRDSSLKGPLWEEVSRKLAELGYQRSAKKCKEKFENVYKYNKRTKDNKSGKSHGKTYKFFDQLQALENQFTTXSLTRQNHNLLLLWQQQTHXHCQQGQVIMVTKPPPXTTTTSTTNPRDSSRPQTNNNNNSVTHSLPNMNTSFSTTTASTSSSTASDEDLEERYRRKRKWKDYFRRLTRKVLLKQEEMQKKFLEAMDQRERERVAQQDNWRMQEMARINREHEILVQERSTAAAKDATVIALLQKMYGQQNPTQQVEVEPPPQQKQTIPQSLPPILMPNNNFEVKKINNGHSVTSTTTGTVATAATTTTTSPVNSSSSRWPKAEVHALIRIRTSLETKYQENGPKAPLWEDISIAMQRLGYNRSAKRCKEKWENINKYFKRVRESSKERREDSKTCPYFHELEALYKEKSKSSKNPFGIFQNMKPNEMMLMMTEPLMVQPEQQWRPPPQSLEEGVGMENASEEYHENEENGGDDDDNIEEDGDSVEDEXEQTRVRLRQIIKRASVDTVEVDKIRNFLNGEKLSVWLNLLLLISEKIVLYFFYHFFRLQIVIIS

SEQ ID NO: 13043 - protein, 593 aa, Glycine max
  unsure (1)..(593): unsure at all Xaa locations
GSCNCIGKQHLYSYMQLGDSSVLEISSHTEPEMAVVSPPEEAPHXXAATTVVVVVVANSGEGNEGNKMSFGGNRWPRQETLALLKIRLDMDAVFRDSSLKGPLWEEVSRKLAELGYQRSAKKCKEKFENVYKYNKRTKENKSGKSHGKAYKFFDQLQALENQFTVSYPPKPQPTSTLTTTNTLTSDHGNKVISYTNTTTTTTTTSTTDPRDSSPPQTNNNNTHSLPNMNAPFLTTTTSTSSSTASDEDLEERYRRKRKWKDYFRRLTRKVLLKQEEMQKKFLEAMDQRERERVAQQDNWRMQEMARINREHEILVQERSTASAKDAAVIALLQKMYGQQNPTQHVEVEPPQQQKQTMPQSQPPILMPNNNFEVKKMNNGHSATSTTTTTTSPVSSSSSSRWPKAEVHDLIRLRTSLEIKYQENGPKAXPLWEDISIAMQRLGYNRSAKRCKEKWENINKYFKKVRESSKERREDSKTCPYFHELEALYKEKGKSQNPFGMFQNMTPNETMMMXXPLMVQPEQQWRPPPQSLEEGIGKDNASEEYNQEKEEEVEENGGDXXDDNIEEDGDSVEDAGPNPCEIATNNXTCFSGHR

SEQ ID NO: 13044 - protein, 410 aa, Glycine max
  unsure (1)..(410): unsure at all Xaa locations
MLGDSAVLGAGGGGGGGRGGGVESGASADAVAATVTVTHDVATTTGGGGGRRKRKRKWKDFFERLMKEVIEKQEELQKKFLEAIEKREDDRIAREEAWRVQEMKRINREREILAQERSIAAAKDAAVMSFLQKIAEQQNXSVKYRPTSTSYNNHNLIQPQPPLQQQVTQPTPPVVVTQPVVLPVVSQVTNMEIVXSRYNSNNNNNGENXXLAPSSSRWPKVEVQALIKLRTSMDEKYQENGPKGPLWEEISASMKKLGYNRNAKRCKEKWENINKYFKKVKESNKRRPEDSKTCPYFHQLDALYRQKHRGEESPAAVEAKPESAVAPLMVQPEQQWPPQQQQQDRDITMEDMENEDDEYEEEREGEEELEDDEDEEDEEGGGGGGNYEIVANKTSGGGGASAASVGASTE

SEQ ID NO: 13045 - protein, 455 aa, Glycine max
  unsure (1)..(455): unsure at all Xaa locations
MPLPLPPVSNNNNNTTVPSTTSLPMPQSILNITPPSTLNITIPSFPPSNPTTYFPTQTPNPTSNNNNNPPSTITPPSFPNFPADLLSNSSSSSTSSEETPTTEARGRKRKRKWKDFFERLMKEVIEKQEELQRRFLEAIEKREQERVVREEAWRMQEMQRINREREILAQERSIAAAKDAAVMTFLQKIAEHQQQETINLEPALNNNSITVVPQQPVPQATPTSTPTPQQAQTTTVPEAPQQQQQIVVSNVEINKADNNGENLMMEASSSRWPKVEVQALINLRTSLETKYQESGPKGPLWEEISALMRKMGYNRNAKRCKEKWENINKYFKKVKESNKKRPEDSKTCPYFHQLEALYREKNKGEGQMKPESMMAPLMVQPEQQWPPQTTLVVPPEVTMGDTQXMTPMDRQYHEENEDDEDDKEIGDEDEDEDDEGGDNYEIVASKPATADASGE

SEQ ID NO: 13046 - protein, 355 aa, Glycine max
EETTTMGGGGMRRKRKRKWKDFFERLMKEVIEKQEGLQRRFLEAIEKREQERVVREEAWRMQEMQRINREREILAQERSIAAAKDAAVMTFLQKIAEHQQQEINLEPALNNNNNSITVVPQQPVPQTTTTPTPTPQQAQTTIVPEAPQPQQQIVVSNVENNKADNNGENLTMGASSSRWPKMEVQALINLRTSLETKYQENGPKGPLWEEISALMRKMGYNRNAKRCKEKWENINKYFKKVKESSKKRPEDSKTCPYFHQLEALYREKNKREGQMKPDSMMAPLMVQPEQQWPPQTHVVPPEVTMGDAQNDPMDRRHEEVEEDEADKEIGDEDEDEDDEGSDNYEIVASKPASGE

SEQ ID NO: 13047 - protein, 397 aa, Glycine max
  unsure (1)..(397): unsure at all Xaa locations
RGSSPSVATCPYYPPLSDLFSFFPEASVRSSCFLFSAAASSSSAPSDGALGAMLRKDTSWKDDSRGLPRRGXAKRDKRGKEKWENIDKSEKQEVARQEAWRIQDMARINREHELLVQERSTAAAKNAAVIAFLQQLSGQHQNSTATQASHNXXPQQPPPQKVTIVQPPPQQAPQPQAPLVLSNSDNMEIQKMNNGHSVVTATSSSRWPKTEVHALIRLRTSLETKYQENGPKAPLWEDISAGMLRLGYNRSAKRCKEKWENINKYFKKVKESNKQRREDSKTCPYFNELEALYKEKSKTQNPFGASFHNMKPHEMMEPLMVQPEQQWRPPSXVRTRCSEGDNNNERKEREEEEEDEEEEEEEEEDENEEGDLESVEDEGGNRYEIATNKLSSVDTVE

SEQ ID NO: 13048 - protein, 288 aa, Glycine max
  unsure (1)..(288): unsure at all Xaa locations
RLERTTKPXGQALTNINLVQPQPQLQPQPPVQQQVTPPNIVPAPMQQPLPVIVTQPVVLPVVSQVTNMEIMKADNNNNNNNNNNCENFLAPSSSRWPKVEVQALIKLRTSMDEKYQENGPKGPLWEEISASMKKLGYNRNAKRCKEKWENINKYFKKVKESNKRRPEDSKTCPYFHQLDALYRQKHRGEESPAAVEAKPESAVAPLMVQPEQQWPPQQQQQDRDITMEDMENEDDEYEEEREGEEELEDDEDEEDEEGGGGGGNYEIVANKTSGGGGASAASVGASTE

SEQ ID NO: 13049 - protein, 291 aa, Glycine max
  unsure (1)..(291): unsure at all Xaa locations
QERSIAAAKDAAVMSFLQKIAEQQNXSVKRXPTSTSYNHNXQLQPQPPVQQQVTPPNIVPAPMQQPLPVIVTQPVVLPVVSQVTNMEIMKADNNNNNNNMPPSSSRWPKVEVQALIKLRTSMDEKYQENGPKGPLWEEISASMKKLGYNRNAKRCKEKWENINKDFRKGKEXSSMRRPEDSMTCPYFHQLDALYRQKHKAEERAKAESAGAPLMVQPEQQWPPQQXXDDRDITMEDMENEXXDEYEEEREGEEEEEEDEEDEEGGGGNYEIVANKTSGGGGAAASVGASTE

SEQ ID NO: 13050 - protein, 269 aa, Glycine max
  unsure (1)..(269): unsure at all Xaa locations
GSSGSSGSSGSRKNLKEFTTLFALFIFLIFLLLSAAVSNCCGAVLAKRERERDPKETMLGDSALLGGGGGEGGACGGGSNNSGDDERGRIEEGERSFGGNRWPRQETLALLRIRSDMDVAFRDASVKGPLWEEVSRKMAELGYHRSSKKCKEKFENVYKYHKRTKEGRSGKQDGKTYRFFDQLQALENHSPTPHSPNPSSKPLQSAPSRVVATTTASSMSLPIPTPTTTVPMQPILSNTXTXXSSVPNITVPSTTIXPITIPQPILTTP

SEQ ID NO: 13051 - protein, 162 aa, Glycine max
MLGDSAVLGTGGGGSGDAVAAAPPAASGGAHDGGVDGGDGGGGGSNSGDDRVEEGERSFGGNRWPKQETLALLKIRSDMDVAFRDASVKGPLWEEVSRKLAELGYHRNAKKCKEKFENVYKYHKRTKEGRSGKSEGKTYRFFDQLQALENNPAIHGKQSPTP

SEQ ID NO: 13052 - protein, 256 aa, Glycine max
APPVVGGGAAASGGAHEGGANGGGGSNSGDDRVEEGDKSFGGNRWPRQETLALLKIRSDMDVAFRDASVKGPLWEEVSRKLAELGYHRNAKKCKEKFENVYKYHKRTKEGRSGKSEGKTYRFFDQLQALENNPSIHAMQSPTPTPSKPPQTTALLATPVSIVVTTTTTPSTLVSNNATVPSTNTPPLPQAILNITPPSTLNITTPSFPSSNPTTYFPTQTPNPTTNNNPPNTITPASFPNFSADLLSNSSFSSTSS

SEQ ID NO: 13053 - protein, 284 aa, Glycine max
  unsure (1)..(284): unsure at all Xaa locations
MELIGDTTTVMETSSGEAVAAHDGGEVIMMDANSGEEENNNKGEEGEEEEEGDNKINSNNNSFGGNRWPRQETLALLKIRSDMDAVFRDSSLKGPLWEEVARKLSELGYHRSAKKCKEKFENVYKYHKRTKESRSGKHEGKTYKFFDQLQALENQFTVSYSPKPQPTPTRPSDTTAISYVTTTVPSTNPTTPSPQPPTHATTTTPGTSPTVATNPKNPPQSNNNSNIPNYSLLNMNNLFSTTSTSSSTASDPQQKLVPISFNNHXSTTSTTTTTTSSTTTDDVK

SEQ ID NO: 13054 - protein, 682 aa, Pisum sativum
MLGDSAVLGTGGGGGSSGDAAGASASGGAYHDGGDTVGGGGGSISGDDERGGGSRNEEGGDRNFGGNRWPRQETIALLKIRSEMDVTFRDASVKGPLWDEVSRKMADLGYHRNSKKCKEKFENVYKYHKRTKEGRGGKSEGKTYRFFDQLQALENNPSIQSPRTQTQLNISTLPPTTPSSSSSLPISTTSTTLTTTNPLLLPPSLLNSTSPITIHTPSITTTAAATTVPLTTTITPPIPMSLPQVQNTVSQSNPTYFPPIPSTTTATNPTNTNNPLPQITITPPPSSFPNTSTDFFSNSSSSSTSSEETMTMEGGGNRRKRKRKWKDFFERLMKEVVEKQEELHKRFLEAIEKRELERGAREEAWRLQEMQRINREREILAQERSIAAAKDAAVMAFLQKIADQQQEQQQNIVVPVALNTNIVPQQQQALQEPTSTPTPAPASTPTPAPTPVPAPALTSAPAPMQTPTPMPLPMPIQSQQQVQTPTSAVQVQQTAPVISQALPLAQPQQAQVQVQQQATNMDIVKSDNNGESLMQASSSRWPKTEVEALIRLRTTLDMKYQENGPKGPLWEEISGLMKNLGYNRNAKRCKEKWENINKYFKKVKESNKKRPEDSKTCPYFHQLDALYREKNKGEGSSASRPEGTMMAPLMVRPEQQWPPQPQPPPVTRADVTMEDAENDRPP

SEQ ID NO: 13055 - protein, 725 aa, Oryza sativa (japonica cultivar-group)
MPPFSAAGGEGAPSPISSRPPPPEQAAAAAAEEQLNGSSLEHDGVLGGEEGDRGGSSAGNRWPRQETLALLKIRSEMDAAFREAALKGPLWEEVSRKLAEMGYKRSAKKCREKFENVDKYYKRTKDGRAGRGDGKTYRFFTELEALHGAAAATARPPPVSLAPAPVAVAPPATPAGLSALRVHASPPPPPVKQHAAPPPPVMDVAACVMTMDDVSFSSGSDTEETAEEGGKRKRRGGGGIGGGGGGGKAMRMFEGLMRQVMERQEAMQQRLLEAIERRDQERMIREEAWRRQEVARLAREQDALAQERAIAASRDAAVISFIQRVTGQSIAAVPPPPLQPTPVASAAPPPPPQHHHQQTPPPIQVQPHHIMPMTPQPQLQPPQPQSKEANTVVRAAPPPQEQHDTAASGGGGGASSSRWPKAEVHALIQLRTELETRYQDSGPKGPLWEDISAGMRRLGYSRSSKRCKEKWENINKYFKKVKESNKKRPEDSKTCPYYHQLDALYRTKAANAAAAASASPAPATTTVLAPVPLSQTPPHVDHGGSNGNGNGWASANNGGGGSSSGGMQTKASNNGTATAGGLPVVSVAGGNGNGNGVAATTDNKGSKQVPVAKETAGQRQPQPLAMNHNYGNDRMADDMDSDSMDDDDDDDEFDDDENDDDIGGGKMQVQYETSSHFQRPQLQNQNVVVGRPNASGGGGGGAPTTPAGPPPPAATSGTSFLACVQ

SEQ ID NO: 13056 - protein, 392 aa, Nicotiana tabacum
QSPSKYYLFLSYMSDKLPTSINLYEEQESMDQHSNHMIIEVATPNAHLQQPQQILLPGISGGDTTSSGGEDNNNNVKLAPKKRAETWVQEETRALISLRRELDSLFNTSKSNKHLWDQISLKMREKGFDRSPTMCTDKWRNLLKEFKKAKHNQEPNGSAKMSYHKEIEEILKARNKNYKNPTLKVDTFMQFSQKGLDDTSITFGPVEENGRPTLNLERQLDHDGHPLAITAADAVTASGSPWNWRETPGNGEQSNSAEGRVISVKWGDYTKRIGIDGTADAIKQAIKSAFRLRTERAFWLEDEQNIVRALDRDMPLGSYSLHVDEGLTIKVCMYEEADHSSVHTEDKTFYTANDFRDFLSHRGWTCLREYNGYRHVDMLDELCPGAVYRGVN

SEQ ID NO: 13057 - protein, 380 aa, Nicotiana tabacum
MSDKLPTSINLYEEQESMDQHSNHMIIEVATPNAHLQQPQQILLPGISGGDTTSSGGEDNNNNVKLAPKKRAETWVQEETRALISLRRELDSLFNTSKSNKHLWDQISLKMREKGFDRSPTMCTDKWRNLLKEFKKAKHNQEPNGSAKMSYHKEIEEILKARNKNYKNPTLKVDTFMQFSQKGLDDTSITFGPVEENGRPTLNLERQLDHDGHPLAITAADAVTASGSPWNWRETPGNGEQSNSAEGRVISVKWGDYTKRIGIDGTADAIKQAIKSAFRLRTERAFWLEDEQNIVRALDRDMPLGSYSLHVDEGLTIKVCMYEEADHSSVHTEDKTFYTANDFRDFLSHRGWTCLREYNGYRHVDMLDELCPGAVYRGVN

SEQ ID NO: 13058 - protein, 148 aa, Triticum aestivum
  unsure (1)..(148): unsure at all Xaa locations
FRXLSXFDLRKLAELGYKRSAKKCKEKFENVHKYYKRTKEGRAGRQDGKSYRFFQELEALHAATAAAQHQQQEHLPLVVSAAPPPQMHAXXSAPQPMSAMPPPPGPMQPAPISSAAPAPVVEPPHPLPVSLQGLSFPSXSXSESDDDX

SEQ ID NO: 13059 - protein, 584 aa, Zea mays
  unsure (1)..(584): unsure at all Xaa locations
FFRHFHRPAVARPXXAPVSPTPQQQLPASGAAPPLHAFPAPVSAPPPLSSIPLLTGPMQPAPISSAAPAPAPVDLPWAPATQQQGYSFSSMSDSESDDEPRDDDMTAETGGNQDRLGKRKRGDGGXAAAATRXCLSSRGSCSRSSTGRRKCSGRPWRPWRSGRRTHGXREEAWRPEAVARLNREAXEQRAQERAAAASXRDAAIIAFLQRISGQSVQPPRTAVVVPMPAPVSVHTTPPTQPYRQQQQPPPPSPPPQSKPISAAPLQQQPPQQQPKDTSQQDAGTPRSLPPASSQSLELVPVAATEHHVDSGLGGGDGGAASSSRWPKTEVHALIQLRMDLDMRYQETGPKGPLWEDISSGMRRLGYNRSSKRCKEKWENINKYYKKVKESNKKRPEDSKTCPYFHQLEAIYNRKHLSSLTTAATSSTAAAAAAPRPAYPDQLNPSRQEIEGKNINDDKRNNGGSGGGTQVPTSNGETATTTTTTPVAFDADTGMKKPEDIVRELNEHPRREFTTEDETDSDDMGDEYTDDGEEGEDDGKMQYRIQFQRPNPGGTNTAPAPAAATTAAPAVPTSAPTSTFLAMVQ

SEQ ID NO: 13060 - protein, 528 aa, Zea mays
  unsure (1)..(528): unsure at all Xaa locations
XKLAGLGYHRSAKKCKEKFENVDKYYRRTKDARAGRQDGKSYRFFSQLEALHASAPPPPPPPSGMTTVQASPHQPMEMAWTAGPTVLGPAAVAGLPDLSFSSMSESDSEYDSDDDSGAGEEGLSGGECDREMMAXSSRGXXSSSRRSKTPCSACSWRRWSGARQTHGXREEAWRRQEVARMNREREQLARERAAAASRDAALIAFLQRVGGGQGEPARLPPHGAGVVPAPPMPDCAPPSPSARXRRPXSLQQLVPAPPKAVEAGXGGSTASRWPKEEVEALIQMRNEKEEQYHDAGAKGPLWDDVAAAMRALGHDRGARRRTENXENINEDGKKVNGRNKSRREDSKPLLVVHQLDLIERLGHHSGAGDAGRRGAPCARETXGHLRRDDEAVHGQXQDSHAARVPGGTGAVRGRAHGARGGVTAPEGXPARTKRAGGNVDDTDVQHQQRFSADETDSDDEDMYMARNYTVYTEEGNDEDKMKXYKMGVQEPGAAGNVLAPPPPAAAAATAAAPTRSAAPTSSTFLAVE

SEQ ID NO: 13061 - protein, 186 aa, Zea mays
  unsure (1)..(186): unsure at all Xaa locations
LACLQHTDCPSSTSFGPLSLLISRKLADLGYKRSAKKCKEKFENVHKYYKRTKEGRTGRQDGKSYRFFDELEALHAAAPQPQPPLQKQQQQLPPASTTAPPLHAFATPVSAPPPISSMPPPTGPMQPAPISSAAPAVQVQAIVELPDQPLNLLQGFSFSSMSESESEDDDMTAETGGSQDHLGKRX

SEQ ID NO: 13062 - protein, 286 aa, Zea mays
  unsure (1)..(286): unsure at all Xaa locations
XPLVPVPPKAVEALARAGGEGGGSTQSRWPKEEAEALIQMRNEKGEKYHDAGAKGPLWEDIAAAMRGIGYSRSAKRCKEKWENINKYYKKVKESNKRRPEDSKTCPYFHQLDAMYRNKHRSGTGGRTAPRTNMASAVAVAATVQDNPSKRELEGKSSNDADNRKNDEQGNVLTSPASGDTAPGGAAKNKTAEGNVDDTDVQHQHQQRFSADETDSDDDMDMARNYTVYTEEGNNEDKMKYKMGVQERDVIGSSGNVLAPPPSPAAVAATAAAPTSSAAPTSSTFLA

SEQ ID NO: 13063 - protein, 254 aa, Zea mays
  unsure (1)..(254): unsure at all Xaa locations
XLGTSRPAGKTIRRXRRATRSGPRTPRPAHTSTSSRPSXQQKAPPQSHNRGGSSGASSNRWPREETQALIRIRSEMDATFRDATLKGPLWEDVSGKLADLGYKRSAKKCKEKFENVHKYYKRTKEGRAGRQDGKSYRFFDELEALHAAAPQPPPPLLPPPSTAPQLHALAAPVSPPPPVAGIQPPPLHAFPAPVSXAAAAPRPAYPDQLNPSRQEIEGKNINDDKRDNDSDDDXVDQVEARRCRPAMARQRRRR

SEQ ID NO: 13064 - protein, 179 aa, Zea mays
  unsure (1)..(179): unsure at all Xaa locations
LQATTVSCFHGSSFWEKKERKLADLGYKRSAKKCKEKFENVHKYYKRTKEGRAGRQDGKSYRFFEELEALHAAAPQPPPPVSPTPQQQLPASSAAPPLHAFPAPVSAPPPLSSMPLLTGPMQPAPISSAAPAPAPVELGAHQPLNLQGFSFSSMSDSESDDESEDDDMTAETGGNLQGX

SEQ ID NO: 13065 - protein, 260 aa, Zea mays
  unsure (1)..(260): unsure at all Xaa locations
SFCRKLAGLGYHRSAKKCKEKFENVDKYYRRTKDARAGRQGGKYYSFLSHLEALHASAPPLPPPPSGMTTVQAGPHQPMEXXAWTAGPTVLGPAAVAGLPDLSFSSMSESDSEYDSDDDDDDSXCGGGGPQRGRVRQGDDGHXSRGXXSSSRRSKTPCSACSWRRWSGARQTHGXREEAWRRQEVARMNREREQLARERAAAASRDAALIAFLQRVGGGQGEPARLPPHGAGVVPPPPMPDCAPPSPRRHAAAASLQQGX

SEQ ID NO: 13066 - protein, 269 aa, Zea mays
QCIISFTSPLIPLLRGAGGVARSRAAAATTALAGSRTAPQLHALAAPVSPTPQQQLPASSAAPPLHAFPAPVSAPPPLSSIPLLTGPMQPAPISSAAPAPAPVDLLGAHQPHNLQGFSFSSMSDAGAVDEPPADDTTAETGGNQDRLGKRKRGDGGGSGSNKMMSFFEGLMQQVVDRQEEMQRPFLETMEKREAERTAREEAWRRQEVARLNREQEQLAQERAAAASRDAAIIAFLQRISGQSVQPPTAFVVPMPAPVSVHTTPPKQPY

SEQ ID NO: 13067 - protein, 199 aa, Zea mays
  unsure (1)..(199): unsure at all Xaa locations
SXSPGSAPPRPPATPRXSRSSSASAVVRGSPCGSLHTAPAXQCRARAAKAGLRPSVAPARRGCHLELVPAQLKAVEAXGVGGXGEGGGSTSSRWPKEEVEALIQVRNEKDEQYHDAGAKGPLWEDIAAGMRRIGYNRSAKRCKEKWENINKYYKKVKESNKRRPEDSKTCPYFHQLDAMYRNKHRSGTGGRTAPRTNMA

SEQ ID NO: 13068 - protein, 370 aa, Drosophila melanogaster
MAQVQLNAGNGQAPSNGNNVEDNEPYQISDDDLDDLDDDCLLEEADTSGAGNSVGRGPYERAWTTEATRALIHIRGPMEGSFTEGRQKRTALWLHCTRQLQRLGFRYSAAKVQKKWHNILITYNKNLNKKYVSGYVHWEFFEEMFKYLQGKKADFDMQLPQQTSNAPQAPHSANGQNPNPGIPQQPLQLQPTPVSLKPGTPQMQLQLPPQTAAKDSQPYITPVDQVLLQAQMNLDSKSNDEFDEDSNSMSEVVRQPKMEYDGDQVAEAERTNDSSQHLEVNGKLYDLARPMGSHQASGIPDDIWWKDYFERKLEVEREKIELQRSLQREQVQIQKMSLVQQERIERMKIDAINSLTGTLQKLVEAKCRRA

SEQ ID NO: 13069 - protein, 370 aa, Drosophila melanogaster
MAQVQLNAGNGQAPSNGNNVEDNEPYQISDDDLDDLDDDCLLEEADTSGAGNNVGRGPYERAWTTEATRALIHIRGPMEGSFTEGRQKRTALWLHCTRQLQRLGFRYSAAKVQKKWHNILITYNKNLNKKYVSGYVHWEFFEEMFKYLQGKKADFDMQLPQQTSNAPQAPHSANGQNPNPGIPQQPLQLQPTPVSLKPGTPQMQVQLPPQTAAKDSQPYITPVDQVLLQAQMNLDSKSNDEFDEDSNSMSEVVRQPKMEYDGDQVAEAERTNDSSQHLEVNGKLYDLARPMGSHQASGIPDDIWWKDYFERKLEVEREKIELQRSLQREQVQIQKMSLVQQERIERMKIDAINSLTGTLQKLVEAKCRRA

SEQ ID NO: 13070 - protein, 295 aa, Mus musculus
MSTEPKRKFGVVVVGVGRAGSVRIRDLKDPHSSAFLNLIGYVSRRELGSLDNVRQISLEDALRSQEVDVAYICTESSSHEDYIRQFLQAGKHVLVEYPMALSFAAAQELWELAAQKGRVLHEEHIELLMEEFEFLKREVAGKELLKGSLRFTASPLEEEKFGFPAFSGISRLTWLVSLFGELSLISATMENRKEDQYMKMTVQLETQNKSPLSWIEEKGPGLKRNRHISIHFKSGSLEEVPNVGVNKNIFLKDQDIFIQKLLGQVSAEDLAAEKKRILHCLELASDIQRLCHRKQ

SEQ ID NO: 13071 - protein, 303 aa, Mus musculus
MSTEPKRKFGVVVVGVGRAGSVRIRDLKDPHSSAFLNLIGYVSRRELGSLDNVRQISLEDALRSQEVDVAYICTESSSHEDYIRQFLQAGKHVLVEYPMALSFAAAQELWELAAQKGRVLHEEHIELLMEEFEFLKREVAGKELLKGSLRFTASPLEEEKFGFPAFSGISRLTWLVSLFGELSLISATMENRKEDQYMKMTVQLETQNKSPLSWIEEKGPGLKRNRHISIHFKSGSLEEVPNVGVNKNIFLKDQDIFIQKLLGQVSAEDLAAEKKRILHCLELASDIQRLCHRKQWGGSFRYL

SEQ ID NO: 13072 - protein, 294 aa, Rattus norvegicus
MITNSGKFGVVVVGVGRAGSVRLRDLKDPRSAAFLNLIGFVSRRELGSLDEVRQISLEDALRSQEIDVAYICSESSSHEDYIRQFLQAGKHVLVEYPMTLSFAAAQELWELAAQKGRVLHEEHVELLMEEFEFLRREVLGKELLKGSLRFTASPLEEERFGFPAFSGISRLTWLVSLFGELSLISATLEERKEDQYMKMTVQLETQNKGLLSWIEEKGPGLKRNRYVNFQFTSGSLEEVPSVGVNKNIFLKDQDIFVQKLLDQVSAEDLAAEKKRIMHCLGLASDIQKLCHQKK

SEQ ID NO: 13073 - protein, 295 aa, Rattus norvegicus
MDAEPKRKFGVVVVGVGRAGSVRLRDLKDPRSAAFLNLIGFVSRRELGSLDEVRQISLEDALRSQEIDVAYICSESSSHEDYIRQFLQAGKHVLVEYPMTLSFAAAQELWELAAQKGRVLHEEHVELLMEEFEFLRREVLGKELLKGSLRFTASPLEEERFGFPAFSGISRLTWLVSLFGELSLISATLEERKEDQYMKMTVQLETQNKGLLSWIEEKGPGLKRNRYVNFQFTSGSLEEVPSVGVNKNIFLKDQDIFVQKLLDQVSAEDLAAEKKRIMHCLGLASDIQKLCHQKK

SEQ ID NO: 13074 - protein, 322 aa, Nostoc sp. PCC 7120
MGIVGTGYAAKLRAEAFLEDERSHLVAIAGSKLERTQTFAQAYQAEVITGWQQLVEREDIDLVVICTINRDHGAIARAALTAGKHVIVEYPLSVDLTEAEELIALAKTQQKLLHVEHIELLGGLHQALKQNLDKVGHLFYVRYSTINPQNPAPRKWTYNHAMFGFPLIGALSRLHRLTDLFGKVFTVNCHQRYWEIEPEYYQTCFCMTQLCFTSGLLAQVIYGKGESLWQPERKFEVHGDNGALIFDGDTGFFIQSGESTPVELGTRRGLFAKDTSMVLDHIFDGAPLYVTPEESLYTLRVADAAQRAAQMGITIFLTDKLN

SEQ ID NO: 13075 - protein, 347 aa, Streptococcus pneumoniae
MVKYGVVGAGYFGAELARYMQKNDGAEITLLYDPDNAEAIAEELGAKVASSLDELVSSDEVDCVIVATPNNLHKEPVIKAAQHGKNVFCEKPIALSYQDCREMVDACKENNVTFMAGHIMNFFNGVHHAKELINQGVIGDVLYCHTARNGWEEQQLSVSWKKIREKSGGHLYHHIHELDCVQFLMGGMPETVTMTGGNVAHEGEHFGDEDDMIFVNMEFSNKRFALLEWGSAYRWGEHYVLIQGSKGAIRLDLFNCKGTLKLDGQESYFLIHESQEEDDDRTRIYHSTEMDGAIAYGKPGKRTPLWLSSVIDKEMRYLHEIMEGAPVSEEFAKLLTGEAALEAIATA

SEQ ID NO: 13076 - protein, 359 aa, Escherichia coli O157:H7 EDL933
MSNSHHTSMRGNDMSDNIRVGLIGYGYASKTFHAPLIAGTPGLELAVISSSDETKVKADWPTVTVVSEPKHLFNDPNIDLIVIPTPNDTHFPLAKAALEAGKHVVVDKPFTVTLSQARELDALAKSLGRVLSVFHNRRWDSDFLTLKGLLAEGVLGEVAYFESHFDRFRPQVRDRWREQGGPGSGIWYDLAPHLLDQAITLFGLPVSMTVDLAQLRPGAQSTDYFHAILSYPQRRVILHGTMLAAAESARYIVHGSRGSYVKYGLDPQEERLKNGERLPQEDWGYDMRDGVLTRVEGEERVEETLLTVPGNYPAYYAAIRDALNGDGENPVPASQAIQVMELIELGIESAKHRATLCLA

SEQ ID NO: 13077 - protein, 366 aa, Agrobacterium tumefaciens str. C58 (U. Washington)
MKKVGIGIIGCGNISSAYLKAMASFPILDIRGLADMNEEVAKARAAEFGLQATSVDALLSDPSVEIIVNLTIPKAHVEVGLRALDAGKHAYSEKPLGINFTEGKRLADAAKAKGLRIGSAPDTFLGGGHQTARRLIDEGVLGQPVGGTATFMCPGHERWHPNPAFYYEVGGGPMLDMGPYYITDLVNLFGPVAKVAGFAIAPRNERLITSEPKNGEKIPVHVATHVSGVLAFENGAVVQVGMSFDVAGHKHVPLEIYGTEGTLIVPDPNHFGGEVQLLKKGGQFEPQALSSPYADGNYRSIGVADMAHAIRENRPHRANGDLALHVLEVMEAFQTASDSGTTVSITTKVERPAPLETSLVDGQLGK

SEQ ID NO: 13078 - protein, 352 aa, Xanthomonas campestris pv. campestris str. ATCC 33913
MPKPFNLAVVGYGYVGRTFHAPLIASTPGLQLHSVVSSKPQQPQADFREVRVLPDLEAALADPALDAVVIATPNQTHAPMALQALAAGKHVLVDKPFALDAAQARTVVDAAAEAGKIVSVFQNRRWDADFLTVRRLIEDGQLGEVVEFHSHFDRYRPQVRDRWRESDIPGAGLWYDLGPHLLDQALQLFGMPQAISADLQRQRTQARSDDYFNVVLRYPRLRVILHAGSLVADGSLRFAVHGTRGSYLKHGADTQEDQLRAGRRPGTAGWGMDPLPGTLTRVDDEGRVHTHQPDGVPGDYRHCYAAFRDAMAGTAPPPVSAADAVRLMELLELAQRGAALGQVLWLEGNSSD

SEQ ID NO: 13079 - protein, 359 aa, Escherichia coli CFT073
MSNSHHTSMRGNDMSDNIRVGLIGYGYASKTFHAPLIAGTPGLELAVISSSDETKVKADWPTVTVVSEPKHLFNDPNIDLIVIPTPNDTHFPLAKAALEAGKHVVVDKPFTVTLSQARELDALAKSLGRVLSVFHNRRWDSDFLTLKGLLAEGVLGEIAYVESHFDRFRPQVRDRWREQGGPGSGIWYDLAPHLLDQAITLFGLPVSMTVDLAQLRPGAQSTDYFHAILSYPQRRVILHGTMLAAAESARYIVHGSRGSYVKYGLDPQEERLKNGERLPQEDWGYDMRDGVLTRVEGEERVEETLLTVPGNYPAYYAAIRDALNGDGENPVPASQAIQVMELIELGIESAKHRATLCLA

SEQ ID NO: 13080 - protein, 335 aa, Trichodesmium erythraeum IMS101
MTQINISSSFCSIPIRVGIVGTGYAAKARAETLKADERSLLVTVAGHTPEKTEAFSQTFQVESAASWQQLVERKDLDLVIISTINRDHGAIALAALENNKHIIVEYPLSLDPTEAESLITLAKKKNKLLHVEHIELLGGLHNTIKESLSKIGKIFYARYVTINSKQPASQKWTYRYSLFGFPFVGALSRFHRFTDLFGQVDTVNCQSQFWYTEVDLYKACLCTAQLRFNNNVIGEVVYGKGETFWHSENTFTLYGEKGKLIFTPQQGQLLQGEKIQTIEVGARRGLFAKDTKMVIEYLLQGTPLYITPEASLYTLKVANLSQKSSHNSGKATKFK

SEQ ID NO: 13081 - protein, 378 aa, Brucella suis 1330
MNIAIIGTGFVADYYMTTLRNYPELSLRGVYDRSPERLKAFVAHYNVPAYESYEALLADPDVQIVVNLTTPESHFAVSHAALCAGKHVYSEKPLAMDFDDAKALLELARQSGLTLAAAPANGLSDAHKLVSSLIKTIGTPRLVYAEMEDGPVFRDKWSTWRSQSGAPWPGLHEFEIGCTLEHAGYALSWLVSLFGPVESVSAFSAITFPDKGPGTEHLHMAPDFSVGCLVFKSGLVARLTSGLAMPKDRSLTVVADKGSIVVDDLWDNRSAVRLERVEEKRRFFARLFANLERRLGKFLSWKPGVGRKIAYPKTGKYALPSFPSQIDFMRGVADQARSISSGEKAFFSGDVALHITEIALALNNAGQGAAVYRMKSSF

SEQ ID NO: 13082 - protein, 333 aa, Brucella suis 1330
MAKWGLIGASTIAKEWVIGTIRATGGEVVSVYSTNAARGKTYADENGIARSVTSLDALLADAEIDAVYISTTNELHRDQAIAAAQAGKHILCEKPLALTIGDAHEMLKAARAAGVVAGTNHHLRNAASHRAMRDAVAEGRIGKVLGARVFHAVYLPPHLQGWRIERPDAGGGVVLDITVHDADTLRFVLGENPVEAVAFSQQGGLSGEGLEDGVMGVLRFPSGAIAQFHDAFTAKYAETGFGVHGSEGSLIARNVMTQKPVGTVILRDKDGEHELPLDHKNLYETALQAFHDAIAGRGQPSATLEDGIWSLATGLAVLEAAKTGKATAVHSGL

SEQ ID NO: 13083 - protein, 349 aa, Yersinia pestis CO92
MADKIKVGLLGYGYASKTFHAPLIMGTPGLELAGVSSSDASKVHADWPAIPVVSDPQMLFNDPSIDLIVIPTPNDTHFPLAQSALAAGKHVVVDKPFTVTLSQANALKEHADDAGLLLSVFHNRRWDSDFLTLKTLLAEGSLGNVVYFESHFDRYRPEIRQRWREQAGAGGGIWYDLGPHLLDQALQLFGLPETLNVDLGMLRPGSQSVDYFHAVLSYPGQRVVLHSTVLAAAETARYIVHGTQGSYIKFGVDPQEDRLKAGERLPQADWGYDMRDGIVTLSHDNVLTEKPLLTLPGNYPAYYAGIRDAIWGTAPNPVPATEAIKVMELIELGIASDQQKKALPIIAKN

SEQ ID NO: 13084 - protein, 324 aa, Brucella melitensis 16M
MNIAIIGTGFVADYYMTTLRNYPELSLRGVYDRSPERLKAFVAHYNVPAYESYEALLADPDVQIVVNLTTPESHFAVSHAALCAGKHVYSEKPLAMDFDDAKALLELARQSGLTLAAAPANGLSDAHKLVSSLIKTIGTPRLVYAEMEDGPVFRDKWSTWRSQSGAPWPGLHEFEIGCTLEHAGYALSWLVSLFGPVESVSAFSAITFPDKGPGTEHLHMAPDFSVGCLVFKSGLVARLTSGLAMPKDRSLTVVADKGSIVVDDLWDNRSAVRLERVEEKRRFFARLFANLERRLGKFLSWKPGVGRKIAYPKTGKYALPSFPS

SEQ ID NO: 13085 - protein, 333 aa, Brucella melitensis 16M
MAKWGLIGASTIAKEWVIGAIRATGGEVVSVYSTNAARGKTYADENGIARSVTSLDALLADPEIDAVYISTTNELHGDQAIAAAQAGKHILCEKPLALTIGDAHEMLKAARAAGVVAGTNHHLRNAASHRAMRDAVAEGRIGKVLGARVFHAVYLPPHLQGWRIERPDAGGGVVLDITVHDADTLRFVLGENPVEAVAFSQQGGLSGEGLEDGVMGVLRFPSGAIAQFHDAFTAKYAETGFGVHGGEGSLIARNVMTQKPVGTVILRDKDGEHELPLDHKNLYETALQAFHDAIAGRGQPSATLEDGIWSLATGLAVLEAAKTGKATAVHSGL

SEQ ID NO: 13086 - protein, 397 aa, Comamonas testosteroni
MRIGVVGLGKAFMLMLPTFLMDRRVQLVAASDTDPLSLRQFKADFPAAAVHGDIESLCKNPDVEVVYIGTPHQFHAVHAEIALNAGKHVLVEKPMAVTLEDCCRMNACAQRAGKYLIVGHSHSFDHPISRAKELIDSGRYGRVRFIHSMNYTDFLYRPRRAEELNTDLGGGVVFNQASHQLDVIRLLAQGRVVDVSSYLGRWDAARRTEGAYSALIKFDNGVAANVTYSGYAHYNSDEVMGWVNELGEKQPERRLFPTRLRLDEVLNKGSEAAYKNEMSYGRGWSAHGLPKMARNHQHFGHLVISCEGADIVPKAEKIEVFANGEYHCENFSMPDFPRQEVMDELFDAISGTRPPVHTGEWAMETLDLCIALLEGGKPELIGMRATAVACAGRSSGR

SEQ ID NO: 13087 - protein, 383 aa, Ralstonia solanacearum
MSLSAPSPSVLRVALVGYGYAGKLFHAALIGAVPGLRLHVVGSNRPEAVLADLPDALVCPPEAAAVHPEADLVVIAAPNDRHAALAEAALRAGKHVVVDKPFTVTLAEARHLARVARETGRLLSVFQNRRWDSDFLALRAALASGAIGEAMHVEAHFDRYRPQVRARWREQAGQGTGIWFDLGPHLVDQALVLLGLPELVSASFACQRPGAETADWAHVVLHYGERRAILHASMLVAGGAPRWIVHGTRGSFIKQGMDRQEAQLLAGMAPGAAGWGSDHDAARLIDGASAAVTEIAAPAGDQRAYYAAVRDAIGGAAPNPVPPVQAVAVMAVLEAALAAAETGAAAVPDLTDSERADWADWADWADWADWAAACPRAATAPAG

SEQ ID NO: 13088 - protein, 329 aa, Streptomyces galilaeus
MPKDTPRPVLRIGVLGCADIAVRRILPAIVEHPSVRLVALASRDGARAERLAARFGCAAVTGYKALLDREDINAVYVPLPPGMHHEWVTEALTAGKHVLVEKPLSTTYAQSVDLVAMAGRLGLALTENFMFLHHSQHEAVRAMTGEIGELRVFTSSFGVPPPHPSSFRHDARLGGGALLDVGVYPLRAAQLHLAGELDVLGACLRVDEATGVDVAGSALLSTATGVTAQLDFGFQHAYRSVYALWGSRGRLSVPRAFTPPREHRPVVRIEQQDRLTEVTLPADHQVGNALDAFASAVHSETVRASLGEALLRQALLVEQVRKAARVVSG

SEQ ID NO: 13089 - protein, 330 aa, Amycolatopsis mediterranei
MAPLRIGIMGCASIAVRKVLPAMAASPRTEITAIASRNPGKAAEIAHAYGCRAVEGYSALLDLDEVEAVYIPLPNAAHAGWIELALTAGKHVLAEKPLTTSVSRTCELIAAAGAAGLVLMENVMFLHHSQHTAVRDRLAGGAIGELRAFHAAFAVPARPAGDIRHRAELGGGALLDTGVYPVRAAMSFLGSEVDVVSAVLTRRHGRPVDSAGQALLCTADGVSASATFGIDHAYRSGYELWGSEGRIVLDHAFTPPADHLPVVRLERRSGVDEIPLPPDDQVANTLTAFAAAVRSGRLPDNDDVARQAVLVDDIRTKARLYVDHAPEPVG

SEQ ID NO: 13090 - protein, 377 aa, Sinorhizobium meliloti
MTKELGVGIIGCGNISTTYFKLAPLFRGIRIAACADINPAAAEARGAEFDVTAQSIDALLANPEVDIVVNLTIPEAHFPVSKAILEAGKHVYSEKPLVLSLEQGEELRKIATGKGLTVGCAPDTFLGGAHQLARAYIDAGKIGQVTSGTCHVMSPGMEMWHPNPDFFFLPGGGPVLDLGPYYIANLINLIGPVKRVAALSSMASTTRTITSEPRNGEVIPVKTPTNIHALLEFRNGATITLSASWDVWAHRHANMELYGTEGSLFVPDPNFFGGTVEASGRNKDIQPLEMWEHPFAVNNWDHPLGPIANYRTAGLADMADAILKGRDARCSLERTLHGVDVMVSILKSGEEGSFVTLSTTCTQPAALGIEEARALLR

SEQ ID NO: 13091 - protein, 333 aa, Sinorhizobium meliloti
MIRWGLIGASTIAREWVIGAIRAAGGEVVSVMSSSAERGEAYAAENGIAKAVTSVDDLVGDPDVDAVYISTTNELHHGQALAAIRAGKHVLCEKPLAMNLNDGCEMVLKACEAGVVLGTNHHLRNAATHRAMREAIAAGRIGRPIAARVFHAVYLPPHLQGWRLDKPEAGGGVILDITVHDADTLRFVLNDDPIEAVAISHSAGMGKEGLEDGVMGVLRFRSGVIAQFHDAFTTKFAETGLEVHGTAGSLIGRNVMTQRPVGTVVLRNEEGESELPLDHRNLYETAIAAFHSAIGGNGRPSASGEDGVWSLATGLAVVKAAATGGAVEIETGL

SEQ ID NO: 13092 - protein, 366 aa, Sinorhizobium meliloti
MEKLGIGIIGCGNISSAYLKAMAAFPILDIRGIADLNRSLAEERAAEFKVEARNVADLLADPSIELIVNLTVPKAHVTVAMQALEAGKHTYSEKPLATDFADGHKLVAMAREKGLRIGAAPDTFLGGSHQTARAIVDSGVLGTPVGGTATFMCPGHERWHPNPDFYYDVGGGPMLDMGPYYITDLVNLLGPVSKVAGFATAARKERTITSEARNGERIPVRVPTHVAGIMAFENGAVVQIGMSFDVAGHRHVPLELYGTEGTLIVPDPNHFGGQIELLKKGGAFEQTATSEPYADGNYRSIGVADMAHAIRSGRPHRANGDLALHVLEVMEAFHKAADTGTTVSISTKTERPAPLSESLVDGRIGR

SEQ ID NO: 13093 - protein, 346 aa, Escherichia coli
MSDNIRVGLIGYGYASKTFHAPLIAGTPGQELAVISSSDETKVKADWPTVTVVSEPKHLFNDPNIDLIVIPTPNDTHFPLAKAALEAGKHVVVDKPFTVTLSQARELDALAKSLGRVLSVFHNRRWDSDFLTLKGLLAEGVLGEVAYFESHFDRFRPQVRDRWREQGGPGSGIWYDLAPHLLDQAITLFGLPVSMTVDLAQLRPGAQSTDYFHAILSYPQRRVILHGTMLAAAESARYIVHGSRGSYVKYGLDPQEERLKNGERLPQEDWGYDMRDGVLTRVEGEERVEETLLTVPGNYPAYYAAIRDALNGDGENPVPASQAIQVMELIELGIESAKHRATLCLA

SEQ ID NO: 13094 - protein, 333 aa, Nostoc punctiforme
MIVYNSGAALEKARVRVGLVGTGYAAKFRAEALLHDERSQLIAVVGHTAEKTEAFVREYQIKALSSWQELVEREDVDLVVICTVNRDHGAIARAALTNGKHVIIEYPLSLDVVEADELIALAKAQKKLLHVEHLELLGGLHQALKQNLAKIGEVFYARYSTINPQNPAPRKWTYNHELFGFPLIGALSRLHRLIDLFGTVFTVNCHQRYWEIEPEYYQTCFCTSELCFNSGLLAQVVYGKGESIWQSERKFEVHGEKGGLVFDGDTGIFIQPEETTPIEVGPRRGLFAKDTAMVLDHLFDGTPLYVTPEQSLYTLKVADAAQRAAQTGFTMFM

SEQ ID NO: 13095 - protein, 321 aa, Streptomyces cyanogenus
MKTVRIGVLGCADIARRRMLPAMAAEPGITIAAVASRDSARAGELAGRFGARPVTGYAELLERDDIDAVYVPLPAALHARWTEAALRRGKHVLAEKPLTTSLAESRRLIALAQESGLALMENVMFIHHSQHDAVRKLVWDGVIGELRAFHAAFAIPRLPDDDIRYVPELGGGALWDTGVYPVRAALHFLGDNLQVLGAMLTQEPGRRVDTAGSALLRTPEGVGVQLTFGLDHGYRSAYEIWGSQGRITVERAFTPPADHRPLIRVERRGVEEISLSPDDQVAATLRAFTAAVRDGAARDSVCVRQAELLHELRERALPSRP

SEQ ID NO: 13096 - protein, 359 aa, Escherichia coli K12
MSNSHHTSMRGNDMSDNIRVGLIGYGYASKTFHAPLIAGTPGQELAVISSSDETKVKADWPTVTVVSEPKHLFNDPNIDLIVIPTPNDTHFPLAKAALEAGKHVVVDKPFTVTLSQARELDALAKSLGRVLSVFHNRRWDSDFLTLKGLLAEGVLGEVAYFESHFDRFRPQVRDRWREQGGPGSGIWYDLAPHLLDQAITLFGLPVSMTVDLAQLRPGAQSTDYFHAILSYPQRRVILHGTMLAAAESARYIVHGSRGSYVKYGLDPQEERLKNGERLPQEDWGYDMRDGVLTRVEGEERVEETLLTVPGNYPAYYAAIRDALNGDGENPVPASQAIQVMELIELGIESAKHRATLCLA

SEQ ID NO: 13097 - protein, 371 aa, Salmonella enterica subsp. enterica serovar Typhi
MMVRTLLRLVARWCGIAISKTGGSEMNDKIRVGLIGYGYASKTFHAPLIMGTPGLELAAVSSSDETKVKADWPAVSVVSEPRHLFNDPHIDLIVIPTPNDTHFPLAKAALEAGKHVVVDKPFTVTLSQARELDALARSTGRVLSVFHNRRWDSDFLTLKALLADGVLGEVSLFESHFDRFRPQVRDRWREQGGPGSGIWYDLAPHLLDQAIQLFGLPVSMTVDLAQLRPGAQSTDYFHAILSYPQRRVILHGTMLAAAESARYIVHGSRGSYVKYGLDPQEERLKNGERLPQEDWGYDMRDGVLTLVEGETRKEENWLTLPGNYPAYYAAIRDALNGNGENPVPASQAIQIMELIELGMESAKHRATLCLA

SEQ ID NO: 13098 - protein, 367 aa, Salmonella enterica subsp. enterica serovar Typhi
MTKYGVIGTGYFGAELARFMSKVEGAKITAIYDPVNAAPIAKELNCVATSTMEALCTHPDVDCVIIASPNYLHKAPVIAAAKAGKHVFCEKPIALNYQDCKDMVDACKEAGVTFMAGHVMNFFHGVRHAKALIKAGEIGEVTQVHTKRNGFEDVQDEISWKKIRAKSGGHLYHHIHELDCTLFIMDETPSLVSMAAGNVAHKGEKFGDEDDVVLITLEFESGRFATLQWGSSFHYPEHYVLIEGTTGAILIDMQNTAGYLIKAGKKTHFLVHESQAEDDDRRNGNISSEMDGAIAYGKPGKRTPMWLSSIMKLEMQYLHDVINGLEPGEEFAKLLTGEAATNAIATADAATLSSNEGRKVKLTEILG

SEQ ID NO: 13099 - protein, 296 aa, Homo sapiens
MNAEPERKFGVVVVGVGRAGSVRMRDLRNPHPSSAFLNLIGFVSRRELGSIDGVQQISLEDALSSQEVEVAYICSESSSHEDYIRQFLNAGKHVLVEYPMTLSLAAAQELWELAEQKGKVLHEEHVELLMEEFAFLKKEVVGKDLLKGSLLFTSDPLEEDRFGFPAFSGISRLTWLVSLFGELSLVSATLEERKEDQYMKMTVCLETEKKSPLSWIEEKGPGLKRNRYLSFHFKSGSLENVPNVGVNKNIFLKDQNIFVQKLLGQFSEKELAAEKKRILHCLGLAEEIQKYCCSRK

SEQ ID NO: 13100 - protein, 296 aa, Homo sapiens
MNAEPERKFGVVVVGVGRAGSVRMRDLRNPHPSSAFLNLIGFVSRRELGSIDGVQQISLEDALSSQEVEVAYICSESSSHEDYIRQFLNAGKHVLVEYPMTLSLAAAQELWELAEQKGKVLHEEHVELLMEEFAFLKKEVVGKDLLKGSLLFTAGPLEEERFGFPAFSGISRLTWLVSLFGELSLVSATLEERKEDQYMKMTVCLETEKKSPLSWIEEKGPGLKRNRYLSFHFKSGSLENVPNVGVNKNIFLKDQNIFVQKLLGQFSEKELAAEKKRILHCLGLAEEIQKYCCSRK

SEQ ID NO: 13101 - protein, 296 aa, Homo sapiens
MNTEPERKFGVVVVGVGRAGSVRMRDLRNPHPSSAFLNLIGFVSRRELGSIDGVQQISLEDALSSQEVEVAYICSESSSHEDYIRQFLNAGKHVLVEYPMTLSLAAAQELWELAEQKGKVLHEEHVELLMEEFAFLKKEVVGKDLLKGSLLFTAGPLEEERFGFPAFSGISRLTWLVSLFGELSLVSATLEERKEDQYMKMTVCLETEKKSPLSWIEEKGPGLKRNRYLSFHFKSGSLENVPNVGVNKNIFLKDQNIFVQKLLGQFSEKELAAEKKRILHCLGLAEEIQKYCCSRK

SEQ ID NO: 13102 - protein, 296 aa, Homo sapiens [sequence omitted]

SEQ ID NO: 13103 - protein, 296 aa, Homo sapiens
MNTEPERKFGVVVVGVGRAGSVRMRDLRNPHPSSAFLNLIGFVSRRELGSIDGVQQISLEDALSSQEVEVAYICSESSSHEDYIRQFLNAGKHVLVEYPMTLSLAAAQELWELAEQKGKVSHEEHVELLMEEFAFLKKEVVGKDLLKGSLLFTAGPLEEERFGFPAFSGISRLTWLVSLFGELSLVSATLEERKEDQYMKMTVCLETEKKSPLSWIEEKGPGLKRNRYLSFHFKSGSLENVPNVGVNKNIFLKDQNIFVQKLLGQFSEKELAAEKKRILHCLGLAEEIQKYCCSRK

SEQ ID NO: 13104 - protein, 371 aa, Salmonella typhimurium LT2
MMVRTLLRLIARWCGIAISKTGGSEMNDKIRVGLIGYGYASKTFHAPLIMGTPGLELAAVSSSDETKVKADWPAVSVVSEPRHLFNDPHIDLIVIPTPNDTHFPLAKRALEAGKHVVVDKPFTVTLSQARELDALARSTGRVLSVFHNRRWDSDFLTLKALLADGVLGEVSLFESHFDRFRPQVRDRWREQGGPGSGIWYDLAPHLLDQAIQLFGLPVSMTVDLAQLRPGAQSTDYFHAILSYPQRRVILHGTMLAAAESARYIVHGSRGSYVKYGLDPQEERLKNGERLPQEDWGYDMRDGVLTLVEGETRKEENWLTLPGNYPAYYAAIRDALNGNGENPVPASQAIQIMELIELGMESAKHRATLCLA

SEQ ID NO: 13105 - protein, 368 aa, Salmonella typhimurium LT2
MMTKYGVVGTGYFGAELARFMSKVEGAKITAIYDPVNAAPIAKELNCVATATMEALCSHPDVDCVIIASPNYLHKAPVIAAAKAGKHVFCEKPIALNYQDCKDMVDACKEAGVTFMAGHVMNFFHGVRHAKALIKAGEIGEVTQVHTKRNGFEDVQDEISWKKIRAKSGGHLYHHIHELDCTLFIMDETPSLVSMAAGNVAHKGEKFGDEDDVVLITLEFESGRFATLQWGSSFHYPEHYVLIEGTTGAILIDMQNTAGYLIKAGKKTHFLVHESQAEDDDRRNGNISSEMDGAIAYGKPGKRTPMWLSSIMKLEMQYLHDVINGLEPGEEFAKLLTGEAATNAIATADAATLSSNEGRKVKLTEILG

SEQ ID NO: 13106 - protein, 1131 aa, Sorghum bicolor; identical to SEQ ID NO: 363

SEQ ID NO: 13107 - protein, 328 aa, Triticum aestivum
  unsure (1)..(328): unsure at all Xaa locations
WSEQPAQQQKKKXLWGLIVCHHESPRYVPFPLRYACEFLAQVFAVHVNKEFEVQKQLXREKSILRMQTILSDMLFKEASPLTIVSGAPNIMDLIKCDGAALLYGGKVWRLGTAPTESQIRDLALWLSEVHMDSTGLSTESLHDAGYPGASALGDTVCGMAVAKINSSDILFWFRSPTAKEIRWGGAKNDPSDMDDSRRMHPRLSFKAFLEVVKMKSLAWTDSEMDAIHSLQLILRGAVDGVVKPTGKASLDEQIGDLKLDGLAELQAVTSEMVRLMETATVPILAVDGNGLVNGWNQKAAELTGLRVDDAIGRHILTLVEESSVSVVQ

SEQ ID NO: 13108 - protein, 137 aa, Streptomyces coelicolor A3(2)
MTQRSLVLLKPDAVRRGLTGEIISRIERKAGWQITALELRTLDTETLEQHYGEHKGKPFYEPLVEFMASGPVVAMVVEGERVIEGVRALAGPTDPIAAAPGSIRGDYGVIVRENLIHASDSEESAERELKIFFPGRV

SEQ ID NO: 13109 - protein, 137 aa, Streptomyces coelicolor A3(2)
MTQRSLVLLKPEAVRRGLTGEIISRIERKAGWQITALELRTLDTETLEQHYGEHKGKPFYEPLVEFMASGPVVAMVVEGERVIEGVRALAGPTDPIAAAPGSIRGDYGVIVRENLIHASDSEESAERELKIFFPGRV

SEQ ID NO: 13110 - protein, 166 aa, Mus musculus
QSQPAVKPCHLKGTMANSERTFIAIKPDGVQRGLVGEIIKRFEQKGFRLVGLKFLQASEDLLKEHYTDLKDRPFFTGLVKYMHSGPVVAMVWEGLNVVKTGRVMLGETNPADSKPGTIRGDFCIQVGRNIIHGSDSVKSAEKEISLWFQPEELVEYKSCAQNWIYE

SEQ ID NO: 13111 - protein, 152 aa, Mus musculus
MANSERTFIAIKPDGVQRGLVGEIIKRFEQKGFRLVGLKFLQASEDLLKEHYTDLKDRPFFTGLVKYMHSGPVVAMVWEGLNVVKTGRVMLGETNPADSKPGTIRGDFCIQVGRNIIHGSDSVKSAEKEISLWFQPEELVEYKSCAQNWIYE

SEQ ID NO: 13112 - protein, 176 aa, Mus musculus
RGSRARFGCWRLQPEFKPKQLEGTMANCERTFIAIKPDGVQRGLVGEIIKRFEQKGFRLVGLKFMQASEDLLKEHYVDLKDRPFFAGLVKYMHSGPVVAMVWEGLNVVKTGRVMLGETNPADSKPGTIRGDFCIQVGRNIIHGSDSVESAEKEIGLWFHPEELVDYTSCAQNWIYE

SEQ ID NO: 13113 - protein, 152 aa, Mus musculus
MANLERTFIAIKPDGVQRGLVGEIIKRFEQKGFRLVAMKFLRASEEHLKQHYIDLKDRPFFPGLVKYMNSGPVVAMVWEGLNVVKTGRVMLGETNPADSKPGTIRGDFCIQVGRNIIHGSDSVESAEKEIHLWFKPEELIDYKSCAHDWVYE

SEQ ID NO: 13114 - protein, 169 aa, Mus musculus
MICLVLTIFANLFPSAYSGVNERTFLAVKPDGVQRRLVGEIVRRFERKGFKLVALKLVQASEELLREHYVELREKPFYSRLVKYMSSGPVVAMVWQGLDVVHASRALIGATDPGDAMPGTIRGDFCVEVGKNVIHGSDSVESAHREIALWFREAELLCWEDSAGHWLYE

SEQ ID NO: 13115 - protein, 169 aa, Mus musculus
MICLVLTIFANLFPSAYSGVNERTFLAVKPDGVQRRLVGEIVRRFERKGFKLVALKLVQASEELLREHYVELREKPFYSRLVKYMSSGPVVAMVWQGLDVVHASRALIGATDPGDAMPGTIRGDFCMEVGKNVIHGSDSVESAHREIALWFREAELLCWEDSAGHWLYE

SEQ ID NO: 13116 - protein, 167 aa, Mus musculus
GLVLTIFANLFPSAYSGVNERTFLAVKPDGVQRRLVGEIVRRFERKGFKLVALKLVQASEELLREHYVELREKPFYSRLVKYMSSGPVVAMVWQGLDVVHASRALIGATDPGDAMPGTIRGDFCMEVGKNEIHGSDSVESAHREIALWFREAELLCWEDSAGHWLYE

SEQ ID NO: 13117 - protein, 152 aa, Mus musculus
MANLERTFIAIKPDGVQSGLVGEIIKRFEQKGFHLVAMKFLRASEEHLKQHYIDLKDRPFFPGLVKYMNSGPVVAMVWEGLNVVKTGRVMLGETNPADSKPGTIRGDFCIQVGRNIIHGSDSVESAEKEIHLWFKPEELIDYKSCAHDWVYK

SEQ ID NO: 13118 - protein, 169 aa, Mus musculus
MICLVLTIFANLFPSAYSGVNERTFLAVKPDGVQRRLVGEIVRRFERKGFKLVALKLVQASEELLREHYVELREKPFYSRLVKYMSSGPVVAMVWQWLDVVHASRALIGATDPGDAMPGTIRGDFCMEVGKNVIHGSDSVESAHREIALWFREAELLCWEDSAGHWLYE

SEQ ID NO: 13119 - protein, 152 aa, Mus musculus
MANLECTFIAIKPDGVQRGLVGEIIKRFEQKGFHLVAMKFLQASEEHLKQHYIDLKVRPFFPGLVKYMNSGPVVAMVWEGLNVVKTGRVMLGETNPADSKPGTIRGDFCIQVGRNIIHGSDSVESAEKEMHLWFKPEELMDYKSCAHDWVYE

SEQ ID NO: 13120 - protein, 197 aa, Mus musculus
GGVQCGASREQWAAFSGRVAALRALLCGPRFQCLLVRPSSGGPPWPQERTLVAVKPDGVQRRLVGTVIQRFERRGFKLVGMKMLQAPESILAEHYRDLQRKPFYPALISYMSSGPVVAMVWEGPNVVHISRAMIGHTDSTEAAPGTIRGDFSVHISRNVIHASDSVDGAQREIELWFQSSELLNWADGGHHSSCYPA

SEQ ID NO: 13121 - protein, 186 aa, Mus musculus
MGSLFGRVAALRALLCGPRFQCLLVRPSSGGPPWPQERTLVAVKPDGVQRRLVGTVIQRFERRGFKLVGMKMLQAPESILAEHYRDLQRKPFYPALISYMSSGPVVAMVWEGPNVVHISRAMIGHTDSTEAAPGTIRGDFSVHISRNVIHASDSVDGAQREIELWFQSSELLNWADGGHHSSCYPA

SEQ ID NO: 13122 - protein, 167 aa, Mus musculus
MICLVLTIFANLFPSAYSGVNERTFLAVKPDGVQRRLVGEIVRRFERKGFKLVALKLVQASEELLREHYVELREKPFYSRLVKYMSSGPVVAMVRLDVVHASRALIGATDPGDAMPGTIRGDFCVEVGKNVIHGSDSVESAHREIALWFREAELLCWEDSAGHWLYE

SEQ ID NO: 13123 - protein, 365 aa, Mus musculus
MANLERTFIAIKPDGVQRGLVGEIIKRFEQKGFRLVAMKFLRASEEHLKQHYIDLKDRPFFPGLVKYMNSGPVVAMVWEGLNVVKTGRVMLGETNPADSKPGTIRGDFCIQVGRTRAEFGTRPPPRAGLRSRESGAPSAGGWERAERGRGAAARPAIGPPPRRIGPLYGMWLVTFLLLLDSLHKARPEDVGTSLYFVNDSLQHVTFSSSVGVVVPCPAAGSPSAALRWYLATGDDIYDVPHIRHVHANGTLQLFPFSPSAFNSFIHDNDYFCTAENAAGKIRSPNIRIKAVFREPYTVRVEDQRSMRGNVAVFKCLIPSSVQEYVSVVSWEKDTVSITPENRFFITSHGGLYISDVQKEDALSTY

SEQ ID NO: 13124 - protein, 192 aa, Mus musculus
MAYKKEKQRDVKSKGPLTGKKREGHQLTCQLSCTLASLKHTFIAIKFDGVQHGLVGGIIKRFKEKRFCLMAVKFLWASEEHLKQRYVDWKDHPFFPGPLKHLNSGHIGAMVWEGLNLVKRGRVMLRETNPAYSKPGTIRGESCIQGGRNITCGSDSVESLWFKSEELVDYKSRAHDWGYEQTWINRNPFWHY

SEQ ID NO: 13125 - protein, 122 aa, Mus musculus
MKPDGVQRGLVGEIIKGFEQKGFCLVAMKFLWVSKEHLKHHYIDLKDYPFFPGLEKYMNSGPVVAMGWEGLYVVKTGQEMLGEKNPVDSKPGTFVGISAFMLAAIQWRVLRKRWVYGLSPKS

SEQ ID NO: 13126 - protein, 152 aa, Rattus norvegicus
MANSERTFIAIKPDGVQRGLVGEIIKRFEQKGFRLVGLKFIQASEDLLKEHYIDLKDRPFFSGLVKYMHSGPVVAMVWEGLNVVKTGRVMLGETNPADSKPGTIRGDFCIQVGRNIIHGSDSVESAEKEISLWFQPEELVDYKSCAQNWIYE

SEQ ID NO: 13127 - protein, 152 aa, Rattus norvegicus
MANLERTFIAIKPDGVQRGLVGEIIKRFEQKGFRLVAMKFLRASEEHLKQHYIDLKDRPFFPGLVKYMNSGPVVAMVWEGLNVVKTGRVMLGETNPADSKPGTIRGDFCIQVGRNIIHGSDSVESAEKEIGLWFKPEELIDYKSCAHDWVYE

SEQ ID NO: 13128 - protein, 152 aa, Rattus norvegicus
MANLERTFIAIKPDGVQRGLVGEIIKRFEQKGFRLVAMKFLRASEEHLKQHYIDLKDRPFFPGLVKYMNSGPVVAMVWEGLNVVKTGRWMLGETNPADSKPGTIRGDFCIQVGRNIIHGSDSVESAEKEIGLWFKPEELIDYKSCAHDWVYE

SEQ ID NO: 13129 - protein, 169 aa, Rattus norvegicus
MICLVLTIFANLFPSAYSGVNERTFLAVKPDGVQRRLVGEIVRRFERKGFKLVALKLVQASEELLREHYVELRERPFYSRLVKYMGSGPVVAMVWQGLDVVRASRALIGATDPGDATPGTIRGDFCVEVGKNVIHGSDSVESAQREIALWFREDELLCWEDSAGHWLYE

SEQ ID NO: 13130 - protein, 185 aa, Rattus norvegicus
MGCLFDRAALRALLCGPRFQCLLVRPSSGGPPWPQERTLVAVKPDGVQRRLVGTVIHRFERRGFKLVGMKMLQAPESILAEHYRDLQRKPFYPALISYMSSGPVVAMVWEGHNVVHISRAMIGHTDSTEAAPGTIRGDFSVHISRNVIHASDSVDGAQREIELWFQSSELLNWADGGHHSSCYPA

SEQ ID NO: 13131 - protein, 173 aa, Rattus norvegicus
MAPSRGNFWHDLQTYILHSTQLTPCPGLMVQPDGVQWRLVGEIIKQFEQKGKGCCLVGLKFMQASEDLLKEHYIDLNDSPVFTGLVMYMHSGPVVAMVWEGLKVVKTGRVMLGETNPADSKPGTIRGDFCIQVGRNIIHGSDSVKNAGKEISLWFQPKELVDYKSCVQNLIYE

SEQ ID NO: 13132 - protein, 153 aa, Cavia porcellus
MASSERTFIAIKPDGVQRGLVGDIIKRFEQKGFRLVALKLIQASEDLLKEHYVDLKDRPFFPGLVQYMHSGPVVAMVWEGLNVVKTGRVMLGETNPADSKPGTIRGDFCIQVGRNIIHGSGDSVESAEKEIALWFQPEELVDYRSCAQDWIYE

SEQ ID NO: 13133 - protein, 149 aa, Nostoc sp. PCC 7120
MERTFLAIKPDGVQRGLVGEIIRRFETKGFTLVGLKFLQVSKELAEQHYGVHRERPFFPSLVEFITSGPVVAMVWEGDGVIASARKIIGATNPLTAEPGTIRGDFGINIGRNLIHGSDAPETAQKEVSLWFTDAELVNWQPHLTPWLHE

SEQ ID NO: 13134 - protein, 117 aa, Nostoc sp. PCC 7120
MGLKFLQVSKELAEQHYGVHRERPFFPSLVEFITSGPVVAMVWEGDGVIASARKIIGATNPLTAEPGTIRGDFGINIGRNLIHGSDAPETAQKEVSLWFTDAELVNWQPHLTPWLHE

SEQ ID NO: 13135 - protein, 189 aa, Rhodobacter sphaeroides
MSEMRSMGRVMDRPARAVNAAGRPLCPFCRDGTHGKARAQSYTLPRRAFMAIERTLSIIKPDATRRNLTGKINAKFEEAGLRIVAQKRIHLSLAQAQKFYGVHKDRPFFGELTEFMASEPVVVQVLEGEGAIAKNREVMGATNPANADAGTIRKEFALSVGENSVHGSDAPETAAEEIAFFFSGLELVG

SEQ ID NO: 13136 - protein, 153 aa, Choristoneura parallela
MAEPRERTFLMIKPDGVQRGIVGTIIERFEKKGFKLVGLKFMWPSEELLQKHYADLASRPFFPGLVKYMSSGPAVPMVWEGLNAVKTGRQMLGATNPADSLPGTIRGDLCIEVGRNIIHGSDSVESANKEIALWFSEKELVGWTPAAEKWVYE

SEQ ID NO: 13137 - protein, 140 aa, Rhodopseudomonas palustris
MAIERTFSILKPDATERNITGAINALIEKAGLRIVAQKRIRMTRDQAETFYAVHKERPFFGELVDFMISGPVVVQVLEGEGAIAKYRDVMGATDPSKAADGTIRKLHAKSIGENSVHGSDAAETAKIEIAQFFSGNEIVG

SEQ ID NO: 13138 - protein, 296 aa, Rhodospirillum rubrum
MGGGLVKQGATADAVGQGFDVQHGAILNTDAPPRVSIERDAPPRVFLRKSDAPARILAAEPSTGPRPRLVPRKALWARAAGNGRGQRLRTKRGGLLPSLLRGRKRPLRWPARRGRRSLFSSHRGPKHEPSGRRKGRRAVIKIEHPFPTDPQQRDTKMAIERTLSIIKPDATRRNLTGAINARFEEAGLRIVGQKRLRLTTAQAEGFYEVHKERSFFGSLVEFMTSGPVVVQVLEGENAVLKNREVMGATNPANAAEHTIRKDFAESIEANSVHGSDSAENAAHEIAYFFAQTEIVA

SEQ ID NO: 13139 - protein, 151 aa, Chloroflexus aurantiacus
MERALLILKPDAVQRGLIGAIISRFEQRGLKFQGLKLMQVDEALARRHYAEHEGKSFFNGLVSYITSAPVVVAVVAGKPGTVELVRAMVGATNPAKAAPGTIRGDFGVDIGRNLIHASDSPESGERETAIFFQPHELIGEWNRALDNWIYE

SEQ ID NO: 13140 - protein, 148 aa, Sulfolobus tokodaii
MMSIQRTFVMIKPDGVRRNLIGEIISRFEKRGLKIIGLKMVKIDRPTAERLYEEHKGKSFFEELISYITSGPVVCMVIEGDEAVSVVRKMIGNTDPKEAPPGTIRGDYALSKAENVIHASDSEEKAKREMSIFFKEEELVTPLAQVHM

SEQ ID NO: 13141 - protein, 149 aa, Synechocystis sp. PCC 6803
MERTFIMIKPDGVQRQLIGEIVGRFEKKGFKLVAMKVMTVSQELAEKHYEALNDKPFFSGLVNFICSSPVVAMVWEGNSIVSTSRQMIGATDPHAAAPGTIRGDYGVSVGRNIIHGSDAIETAKREISLWFKDEEVNEWDATLNPWLYE

SEQ ID NO: 13142 - protein, 144 aa, Chlamydophila pneumoniae CWL029
MEQTLSIIKPDSVSKAHIGEILSIFEQSGLRIAAMKMMHLSQTEAEGFYFVHRERPFFQELVDFMVSGPVVVLVLEGANAVSRNRELMGATNPAEAASGTIRAKFGESIGVNAVHGSDTLENAAVEIAYFFSKIEVVNASKPLV

SEQ ID NO: 13143 - protein, 139 aa, Thermoanaerobacter tengcongensis
MIFMEVTLAIVKPDGVKRGLIGEILKRYENKGLRLKAAKVVTPSIELLEKHYEEHKGKPFFKPLIEYMSSGPVFAMVLEGENAVKLVRMINGATKVEDALPGTIRGDFASSTTYNVVHGSDSVESAKREIALWFPELIL

SEQ ID NO: 13144 - protein, 141 aa, Ralstonia metallidurans
MAIERTLSIIKPDAVAKNVIGQIYARFEAAGLKVVAAKMVHLSRGEAEQFYAVHKARPFFKDLVDFMVSGPVMIQALEGESAIAKNRDLMGATDPKKAEKGTIRADFADSIDANAVHGSDAPETAAVEVAFFFPGMNVYSR

SEQ ID NO: 13145 - protein, 141 aa, Neisseria meningitidis MC58
MAIERTISIIKPDAVGKNVIGKIYSRFEENGLKIVAAKMKQLTLKEAQEFYAVHKDRPFYAGLVEFMTGGPVMIQVLEGENAVLKNRELMGATNPSEAAEGTIRADFATSVSINAVHGSDSVENAALEIAYFFSQTEICPR

SEQ ID NO: 13146 - protein, 191 aa, Deinococcus radiodurans
MAHLGHGTAGRFAEREHERRLACTPGCGGYWVGGYRAGGQRFVSQSTAILTSGMERTFAMIKPDGVRRGLTPEILARIHNKGYRVVGLKQMMMPRETAEQHYGEHRERPFFGELVDFITGGPVVAIALEGENAIAGWRAMMGATNPANAAPGTIRADFATSTGENVTHGSDSPESAERELALFFGDGELLS

SEQ ID NO: 13147 - protein, 138 aa, Deinococcus radiodurans
MERTFAMIKPDGVRRGLTPEILARIHNKGYRVVGLKQMMMPRETAEQHYGEHRERPFFGELVDFITGGPVVAIALEGENAIAGWRAMMGATNPANAAPGTIRADFATSTGENVTHGSDSPESAERELALFFGDGELLS

SEQ ID NO: 13148 - protein, 141 aa, Burkholderia fungorum
MAIERTLSIIKPDAVAKNVIGQIYTRFENAGLKIVASRMVHLSRADAEKFYAVHAARPFFKDLVDFMISGPVVVQALEGENAILKHRDLMGATDPKKAEKGTIRADFADSIDANAVHGSDAPETAAVEIAFFFPQVNVYSR

SEQ ID NO: 13149 - protein, 111 aa, Enterococcus faecium
MKFETMTPELAKEHYQHLTERSFFDELIDYMTSGPVVYLVLVGEEVIDIVRKMVGATKAADAVPGTIRGDYALPGTENIIHASDSRDAAVKEIARFFPPFDINKPSEKAAK

SEQ ID NO: 13150 - protein, 183 aa, Pyrobaculum aerophilum
MPVEKTLLILKPDAVARGLVGEIISRFEKAGLKIVALKMVKASPEEIERFYPSSEEWLRSAGQKLLKAYQELGIDPRAKIGTDDPVEVGRIIKRSLVKYMTSGPIVVMVLKGNRAVEIVRKLVGPTSPHSAPPGTIRGDYSIDSPDLAAEEGRVVFNLVHASDSPSEAEREIRFWFREEEVLE

SEQ ID NO: 13151 - protein, 167 aa, Borrelia burgdorferi
MLLQKTLCIVKPDGVRRGLIGDVVSRFERVGLKMVAAKMLIVDESLAKKHYLYDDIVFRHSEAVWNSLIKFISNSPVFTFVVEGVESIEVVRKLCGATEPKLAIPGTIRGDFSYHSFKYSNEKGFSIYNVIHASANEADAMREIPIWFKDNEILNYKRDDECEHYYC

SEQ ID NO: 13152 - protein, 148 aa, Bacillus subtilis
MEKTFIMVKPDGVQRQLIGDILSRFERKGLQLAGAKLMRVTEQMAEKHYAEHQGKPFFGELVEFITSGPVFAMVWEGENVIEVTRQLIGKTNPKEALPGTIRGDYGMFVGKNIIHGSDSLESAEREINIFFKNEELVSYQQLMAGWIY

SEQ ID NO: 13153 - protein, 143 aa, Escherichia coli O157:H7 EDL933
MAIERTFSIIKPNAVAKNVIGNIFARFEAAGFKIVGTKMLHLTVEQARGFYAEHDGKPFFDGLVEFMTSGPIVVSVLEGENAVQRHRDLLGATNPANALAGTLRADYADSLTENGTHGSDSVESAAREIAYFFGEGEVCPRTR

SEQ ID NO: 13154 - protein, 167 aa, Magnetococcus sp. MC-1
MPHNLITHMLPCLFMLAVFFHQEFTMTIERTFSIIKPDAVAKNVVGEIQSRFEKAGLRIIASKMIRLTPEIAGKFYEVHKARPFYNDLCSYMSSGPVVVQVLEGDGAVLKNRDIMGATNPKDAAPGTIRADFAESIDANAVHGSDAPETAAQEIAFFFSGTELCDRP

SEQ ID NO: 13155 - protein, 149 aa, Staphylococcus aureus subsp. aureus Mu50
MERTFLMIKPDAVQRNLIGEVISRIERKGLKLVGGKLMQVPMELAETHYGEHQGKPFYNDLISFITSAPVFAMVVEGEDAVNVSRHIIGSTNPSEASPGSIRGDLGLTVGRNIIHGSDSLESAEREINLWFNENEITSYASPRDAWLYE

SEQ ID NO: 13156 - protein, 149 aa, Treponema pallidum
MAFETTFVMLKPGVLQRRLVGEVLSRFERKGLVLTALRLLCVDTATAELHYAEHREKPFYPSLIAYITSAPVVALAFKGENAISLVRTLCGSTRVEHAQPGTIRGDFALRTTTNIVHASDSPESAARELALYFSAQDFVEWRDGNYDFF

SEQ ID NO: 13157 - protein, 141 aa, Pseudomonas putida KT2440
MAVQRTFSIIKPDAVAKNVIGKITTRFEEAGLKIVASKMKQLSKAEAEGFYAEHSERGFFGDLVAFMTSGPVVVQVLEGENAIAKNRELMGATNPKEAAAGTIRADFAESIDANAVHGSDSEAAAAREIAYFFAATEVTTR

SEQ ID NO: 13158 - protein, 141 aa, Xylella fastidiosa 9a5c
MVLERTLSIIKPDAVAKNVIGDIYSRFEKAGLKVVAAKYKQLSRREAEGFYAVHRDRPFFNALVEFMISGPVMIQVLESENAVARHRELLGATNPKDAALGTIRADFAESIEANAAHGSDSVENAAIEVAYFFAATEIILR

SEQ ID NO: 13159 - protein, 41 aa, Beta vulgaris
VVAMVWEGKGVVLTGRKIIGATNPLASEPGTIRGDFAIDIG

SEQ ID NO: 13160 - protein, 153 aa, Emericella nidulans
MTSEQTFIAIKPDGVQRGLVGPIISRFENRGFKLAAMKLTSPSRSLLEQHYSDLKEKPFFPGLVTYMLSGPIVAMVWEGKDVVKTGRTILGATNPLASAPGTIRGDFAIDVGRNVCHGSDSVESAKKEIGLWFTPEEIQNYKLNAFGWIYEKE

SEQ ID NO: 13161 - protein, 147 aa, Listeria innocua
MEQTYVMVKPDGVERGLIGEIVAKIEKKGIKLVAGKLMQIDRTLAEQHYAEHIGKPFFEDLIGFITSGPVFAMVLEGDDVIKTARRMMGKTNPLEADPGTIRAEYAIHTNRNVIHGSDSPESAKREIQLFFEPHEILSYEKAVDTWI

SEQ ID NO: 13162 - protein, 147 aa, Listeria monocytogenes EGD-e
MEQTYVMVKPDGVERGLIGEIVTRIEKKGLKIVAGKLMQIDRELAEKHYAEHIGKSFFEDLIGFITSGPVFAMVLEGDDAIATARRMMGKTNPLEADPGTIRADYAIHTNRNVIHGSDSPESAQREIQLFFAPDEILSYQKAVDTWI

SEQ ID NO: 13163 - protein, 137 aa, Streptococcus pneumoniae TIGR4
MEQTFFIIKPDGVKRGLVGEVLKRIEQRGFTIEKLEFRSQVSEELIDQHYQDLVGQSFYPPIREFMTSGPVLVGVISGPKVIETWRTMMGATRPEEALPGTIRGDFAKAAGENEIIQNVVHGSDSEESAKREIALWF

SEQ ID NO: 13164 - protein, 159 aa, Staphylococcus epidermidis ATCC 12228
MKHMHRGTHEVERTFLMIKPDAVQRNLIGEIISRIEKKGLKLVGGKFMQVPMELAEKHYSEHEGKPFYDKLISFITSAPVFAMVVEGENAVAVSRKIIGSTNPSEAAPGTIRGDYGLNLGRNIIHGSDSTESAQREVKLWFTSSEIADYKEPREDWLYE

SEQ ID NO: 13165 - protein, 136 aa, Mycobacterium leprae
MTERTLVLIKPDAVERQLIGEIISRIERKGLTIAALELRQVGEELASQHYAEHESKPFFGSLLEFITSGPVMAAIVEGPRAVAAVRQLTGGTDPVEKAAPGTIRGDLALETQFNLVHGSDSTASAQREIALWFPGI

SEQ ID NO: 13166 - protein, 139 aa, Mycobacterium smegmatis
MTERTLVLIKPDGVKRQLVGEILSRIERKGLTLAALELKNVSDDLARQHYAEHADKPFFGSLLEFITSGPLVAAIVEGPRAVAAFRQIAGGTDPVEKAVPGTIRGDFALITQDNLVHGSDSPESAAREIALWFPGEATA

SEQ ID NO: 13167 - protein, 195 aa, Pyrobaculum aerophilum str. IM2
MHAINIAFFALIMPVEKTLLILKPDAVARGLVGEIISRFEKAGLKIVALKMVKASPEEIERFYPSSEEWLRSAGQKLLKAYQELGIDPRAKIGTDDPVEVGRIIKRSLVKYMTSGPIVVMVLKGNRAVEIVRKLVGPTSPHSAPPGTIRGDYSIDSPDLAAEEGRVVFNLVHASDSPSEAEREIRFWFREEEVLE

SEQ ID NO: 13168 - protein, 173 aa, Anopheles gambiae str. PEST
VRAFRMIASLLAFFSLFSSAMAANKERTFIMIKPDGVQRGLVGQIMQRFEAKGFKLVAMKFMWPSKELLEKHYADLSARPFFPGLVTYMSSGPVVPMVWEGLNAVKTGRKMLGATNPADSEPGTIRGDLCVQVGRNIIHGSDAVESANKEIALWFKDEELVSWTPATEGWVYE

SEQ ID NO: 13169 - protein, 140 aa, Agrobacterium tumefaciens str. C58 (Cereon)
MAIERTFSMIKPDATKRNLTGAITKVFEDNGLRIVASKRVWMSKREAEGFYAVHKERPFFGELVEGMTSGPTIVQVLEGENAILKNREIMGATNPAQAAEGTIRKSFALSIGENSVHGSDAPETAAQEIAYWFAETEIVG

SEQ ID NO: 13170 - protein, 141 aa, Xylella fastidiosa Temecula1
MVLERTLSIIKPDAVAKNVIGDIYSRFEKAGLKIVAAKYKQLSRREAEGFYAVHRDRPFFNALVEFMISGPVMIQVLESENAVARHRELLGATNPKDAAPGTIRADFAESIEANAAHGSDSVENAAIEVAYFFAATEIILR

SEQ ID NO: 13171 - protein, 151 aa, Giardia lamblia ATCC 50803
MARERTFLMVKPDGVQRGLVGEIISRFERRGFKLVAMKFFVPSKNLVEEHYKEHAARPFFAGLCKFLSSGPVCAMVWEGANVVSISRTMMGVTKPAESAPGTIRGDFGIDVGRNIIHGSANLDDAAREIALWFKPEEVASWSCSLESHIYE

SEQ ID NO: 13172 - protein, 161 aa, Pyrococcus furiosus DSM 3638
MNEVERTLVIIKPDAVVRGLIGEIISRFEKKGLKIVGMKMIWIDRELAEKHYEEHKGKPFFEALIDYITKAPVVVMVVEGRYAVEVVRKMAGATDPKDAAPGTIRGDYGLDIGDAIYNVIHASDSKESAEREISLYFKPEEIYEYCKAADWFYREKKQAKC

SEQ ID NO: 13173 - protein, 151 aa, Methanothermobacter thermautotrophicus str. Delta H
MMEKSFVMLKPDAVKRRLAGRIIARFEDRGLKIVAFKMLQIPEDLAMEHYQEHREKPFFRDLVDYITSAPVIAMVIEGKDCISLIRKMVGATNPAEADLGTIRGDFALETGRNIIHASDSPESAEREIKLFFDESEICSYEMPDREMIYEE

SEQ ID NO: 13174 - protein, 140 aa, Magnetospirillum magnetotacticum
MAIERTLSIIKPDATRRNLTGKINARFEEAGLRFVAQKRVQLTKAQAQQFYSVHAERSFFGELVDFMISGPVVVQVLEGEGAVARNREIMGATNPANAAPGTIRADFAESVEANSVHGSDSAENAAIEIAYFFAGSEIVG

SEQ ID NO: 13175 - protein, 105 aa, Magnetospirillum magnetotacticum
MRLLDATPELLAAHYAEHEGKPFFQPLVDFMLSGKILAVVAEGQGVVPGFRSLAGATNPTEALPGTIRGDLGRDWGLKVQQNLVHGSDSPESAAREIALWFPELG

SEQ ID NO: 13176 - protein, 151 aa, Methanosarcina acetivorans C2A
MNMEQTYVMVKPDGVQRGLVGEVISRIEKRGLKILALRMNVIAEATAKEHYGEHAARPFFPSLIEFITSGPSVSMVVAGKDAIKVMRAINGATNPVDAAPGTIRGDFALDVGRNVVHASDSPEAAAREIAIHFKDSEIGKYSRVDEVCLYE

SEQ ID NO: 13177 - protein, 137 aa, Leptospira interrogans serovar lai str. 56601
MSRTFIMIKPDGVKNKHVGNILSRIEKEGFKILGLKYLKLSLEDAKQFYKVHSARPFYNDLCNYMSSGPIVAAALERDNAVLHWREVIGATDPKEAAAGTIRALYAESKEANAVHGSDSDDNAALEISFFFKGNELF

SEQ ID NO: 13178 - protein, 154 aa, Methanopyrus kandleri AV19
MAEVQREFVMIKPDGVVRGLVGEVIRRLERKGLKIVALEMRQLDRETAEKLYEEHRDKPFFEDLIEYVTSGPVVVMIVEGRKAVKVVRNIIGATDPAEAAPGTVRGDFALDIGRNVVHASDSPESAEREIEIVFGKDLSTIDYERCDEEWLYES

SEQ ID NO: 13179 - protein, 141 aa, Xanthomonas campestris pv. campestris str. ATCC 33913
MALERTLSIIKPDAVAKNVIGEIYSRFEKAGLKVVAAKYKQLSRREAEGFYAVHRERPFFNALVEFMISGPVMIQALEGENAVAAHRDLLGATNPKDAAPGTIRADFADSIDANAAHGSDSVENAANEVAYFFAATEVVSR

SEQ ID NO: 13180 - protein, 139 aa, Caulobacter crescentus CB15
MTERTFSIIKPDATRRNLTGAINAVIEAAGLRIVAQRRVKLTEAQAKKFYEVHAERPFYGELVGQMTAEPVVVQVLQGDNAVLKYREVMGATNPENADEGTIRKLFALSIGENSVHGSDSLENAGIEIAQFFTEDEIVG

SEQ ID NO: 13181 - protein, 148 aa, Bacillus anthracis str. A2012
MEKTFLMVKPDGVQRAFIGEIVARFEKKGFQLVGAKLMQVTPEIAGQHYAEHTEKPFFGELVDFITSGPVFAMVWQGEGVVDTARNMMGKTRPHEAAPGTIRGDFGVTVAKNIIHGSDSLESAEREIGIFFKEEELVDYSKLMNEWIY

SEQ ID NO: 13182 - protein, 137 aa, Campylobacter jejuni subsp. jejuni NCTC 11168
MEKTLSIIKPDAVKKGVIGKILDRFESNGLRIAAMKKVQLSKEQAENFYAVHKERPFFKDLVEFMISGPVVVSILEGEGAVLKNRDLMGATNPKEAKAGTIRADFAESIDANAVHGSDSLENAKIEIEFFFKPNEIC

SEQ ID NO: 13183 - protein, 160 aa, Methanosarcina mazei Goe1
MPVSSNTEGVHMEQTYVMVKPDGVQRGLVGEVISRIEKRGLKIVALRMNVIAEATAKEHYGEHAARPFFPSLIEFITSGPSVSMVVAGKDAIKVMRAINGATNPVDAAPGTIRGDFALDVGRNVVHASDSPEAAAREIAIHFKDSEIANYSRVDEVCLYE

SEQ ID NO: 13184 - protein, 140 aa, Chlorobium tepidum TLS
MERTLTILKPDCVRKQLIGAVTNMIERAGFRIVAMKKTRLTKETAGAFYAVHKERPFYGELVEFMSSGPCVPMILEKENAVADFRTLIGATDPAQADEGTIRKLYADSKGENIIHGSDSAENAAIESAFFFAAEEVVRVD

SEQ ID NO: 13185 - protein, 143 aa, Clostridium perfringens str. 13
MRLEKSLVLIKPDAVERNLIGKILEVYEGAGLKIKAMEMKQINKEFAEKHYEEHRDKQFFNSLIKYITRSPLVALILEGEDAINKIRSLNGATNPEKAEFGTIRRRFALSGTENSVHASDSIESAEKEIKLWFPKVFYEEICG

SEQ ID NO: 13186 - protein, 141 aa, Halomonas sp. #593
MATERTLSIIKPDAVAKNVIGEIESRFEKAGLKIVAAKMLQLSQEQAEGFYAEHKERPFFGDLVGFMTSGPVVVQVLEGENAIAANRDLMGATNPKEAEAGTIRADYAQSIDANAVHGSDSPESAAREIAYFFEESEICSR

SEQ ID NO: 13187 - protein, 152 aa, Corynebacterium efficiens YS-314
MTSLRQDRGRSVDSASMTERTLILIKPDGVTNGHVGEIIARIERKGLKLAALDLRVADRETAEKHYEEHADKPFFGELVEFITSAPLIAGIVEGERAIDAWRQLAGGTDPVSKATPGTIRGDFALTVGENVVHGSDSPESAEREISIWFPNL

SEQ ID NO: 13188 - protein, 149 aa, Staphylococcus aureus subsp. aureus MW2
MERTFLMIKPDAVQRNLIGEVISRIERKGLKLVGGKLMQVPMELAETHYGEHQGKPFYNDLISFITSAPVFAMVVEGEDAVNVSRHIIGSTNPSEASPGSIRGDLGLTVGRNIIHGSDSLDSAEREINLWFNENEITSYASPRDAWLYE

SEQ ID NO: 13189 - protein, 136 aa, Corynebacterium glutamicum ATCC 13032
MTERTLILIKPDGVTNGHVGEIIARIERKGLKLAALDLRVADRETAEKHYEEHADKPFFGELVEFITSAPLIAGIVEGERAIDAWRQLAGGTDPVAKATPGTIRGDFALTVGENVVHGSDSPESAEREISIWFPNL

SEQ ID NO: 13190 - protein, 150 aa, Thermosynechococcus elongatus BP-1
MERTFLAIKPDGVQRGLVGTIIQRFEQKGYTLVGLKLMRVSRELAEQHYGEHKDKPFFPGLVNFITSGPVVAMVWEGRGVIANARKLIGATNPLNAEPGTLRGDFAVDVGRNVIHGSDSPENAEREINLWFQTQELVPWEPALTSWVYEM

SEQ ID NO: 13191 - protein, 143 aa, Escherichia coli CFT073
MAIERTFSIIKPNAVAKNVIGSIFARFEAAGFKIVGTKMLHLTVEQARGFYAEHDGKPFFDGLVEFMTSGPIVVSVLEGENAVQRHRDLLGATNPANALAGTLRADYADSLTENGTHGSDSVESAAREIAYFFGEGEVCPRTR

SEQ ID NO: 13192 - protein, 156 aa, Thermobifida fusca
MRCSWTGSTVHSQRRLKEKSTVERTLVLIKPDGVRRNIIGEVISRIERKGLKIVAMELRTLDEETAKAHYEEHVEKPFFSSLVEFITGGPLVAMVVEGNRAIEAFRSLAGATDPVLAAPGTIRGDYGLDVQANIVHGSDSTYSAEREIKLFFPDLA

SEQ ID NO: 13193 - protein, 137 aa, Leuconostoc mesenteroides subsp. mesenteroides ATCC 8293
MVERTFMMIKPDGVSRGKIGEIIQRIEHKGYAIKAMKMVQPTPELLAKHYAEHVGKSFYPSLVQYMTLGPVIAMIGEGTNIVSGWRTIMGTTNPTLAAPGTIRGDLGREWEGEAVMNIVHGSDSVEAAEYEIKLWFA

SEQ ID NO: 13194 - protein, 141 aa, Microbulbifer degradans 2-40
MAIERTLSIVKPDAVEKNIIGKVISRFEKAGLKIVAAKMMHLTEEKARGFYAEHEGRPFFAGLVEFMTSGPVVVQVLEGENAIALNRELMGATNPAEAAEGTLRKDFADSVGRNAVYGSDSPASAEREINYFFDASEICPR

SEQ ID NO: 13195 - protein, 112 aa, Trichodesmium erythraeum IMS101
MTVTKELAEKHYDVHKERPFFSSLIEFIKSGPLVAMVWEGEGVVASARKIIGATNPLTAEPGTIRGDYGISLGRNLIHGSDAIETAQTEINLWFKEEELVSWKPTLTSWIVE

SEQ ID NO: 13196 - protein, 136 aa, Tropheryma whipplei str. Twist
MEQTLVIIKPDGIRRGLIGQVLSRIEAKGYQIVDIRMLVPDRQSVEEHYLEHRDRHFYLPLVDFMTSGPIVLVRAEGHGVVDALRTLVGVSDPTLALPGTIRGDFGRNWGLGVIQNIVHASDSVKSAKRELDIWFP

SEQ ID NO: 13197 - protein, 140 aa, Brucella suis 1330
MAIERTFSMIKPDATRRNLTGAIIAKLEEAGLRVVASKRVWMSRREAEGFYAVHKDRPFFGELVEFMSSGPTVVQVLEGENAIAKNREVMGATNPANADEGTIRKTFALSIGENSVHGSDAPETAAEEIAYWFSGTEIVG

SEQ ID NO: 13198 - protein, 145 aa, Haemophilus somnus 129PT
MERPMTLEQTLAIIKPDAVERNLIGNIISRLEDKGFQIIAMKMLHLNQEQAEGFYTEHSDKAFFAELIRYMTSAPIVVLVLQKENAVKDYRTFMGTTNPEIAENGTLRYEFAINQTQNSVHGSDSLENAQREIAYFFAEAEIYAR

SEQ ID NO: 13199 - protein, 141 aa, Pseudomonas syringae pv. syringae B728a
MAVQRTFSIIKPDAVAKNVIGEITTRFEKAGLRVVASKLKQLSKAEAEGFYAEHSARGFFGDLVAFMISGPVVVQVLEGENAIALNRELMGATNPKEAAAGTIRADFADSIDANAVHGSDSEAAAAREISYFFAATEVTAR

SEQ ID NO: 13200 - protein, 141 aa, Pseudomonas fluorescens PfO-1
MAVQRTFSIIKPDAVAKNVIGKITTRFEDAGLRVVASKLKQLSKAEAEGFYAEHSARGFFGELVAFMTSGPVVVQVLEGENAIARNRELMGATNPKEAAPGTIRADFAESIDANAVHGSDSEAAAAREIAYFFAATEVTTR

SEQ ID NO: 13201 - protein, 160 aa, Desulfovibrio desulfuricans G20
MRTACLMHTHHTNTLHRRNEHMAERTFAIIKPDATRRNLEGPILSVIQQNGLRVVAMKKMRLTREQAEGFYHVHKERPFFASLTDFMTSGPIVAMVLEGDNAVARWRELMGATNPENAAEGTIRRQFAEGLEANSVHGSDAAETAAFEMGYFFNAMEITG

SEQ ID NO: 13202 - protein, 138 aa, Streptococcus agalactiae 2603V/R
MEQTFFMIKPDGVKRGFIGEVISRIERRGFSIDRLEVRYADADILKRHYAELTDRPFFPTLVDYMTSGPVIIGVISGEEVISTWRTMMGSTNPKDALPGTIRGDFAQAPSPNQATCNIVHGSDSPESATREIAIWFNN

SEQ ID NO: 13203 - protein, 143 aa, Pseudomonas aeruginosa PAO1
MALQRTLSIIKPDAVSKNVIGEILTRFEKAGLRVVAAKMVQLSEREAGGFYAEHKERPFFKDLVSFMTSGPVVVQVLEGEDAIAKNRELMGATDPKKADAGTIRADFAVSIDENAVHGSDSEASAAREIAYFFAATEVCERIR

SEQ ID NO: 13204 - protein, 138 aa, Streptococcus agalactiae NEM316
MEQTFFMIKPDGVKRGFIGEVISRIERRGFSIDRLEVRHADADILKRHYAELTDRPFFPTLVDYMTSGPVIIEVISGEEVISTWRTMMGSTNPKDALPGTIRGDFAQAPSPNQATCNIVHGSDSPESATREIAIWFNN

SEQ ID NO: 13205 - protein, 143 aa, Shewanella oneidensis MR-1
MAIERTFSIIKPDAVAKNHIGAIYNRFETAGLKIVAAKMLHLTKEQAEGFYAEHSERGFFGALVAFMTSGPIMVQVLEGENAVLAHREILGATNPAQAAPGTIRADFAQSIDENAAHGSDSLASAEREIAYFFSAEELCPRTR

SEQ ID NO: 13206 - protein, 142 aa, Yersinia pestis CO92
MALERTFSIIKPNAVANNDIGAIYARFERAGFKIIAAKMLHLTKEQAEGFYAEHKGRPFFDGLVEFMTSGPIMVQVLEGENAVQRHRDIMGATNPDNALAGTLRADFSDSFTANAVHGSDAVESAQREIAYFFAADEIFPRS

SEQ ID NO: 13207 - protein, 141 aa, Vibrio vulnificus CMCP6
MALERTFSIIKPDAVERNLIGEIYHRIEKAGLRIIAAKMVHLNDEQASGFYAEHEGKEFFPALKEFMTSGPIMVQVLEGENAIARYRELMGKTNPEEAACGTIRADYALSMRHNSVHGSDSPASAAREIAFFFPESEICPR

SEQ ID NO: 13208 - protein, 136 aa, Tropheryma whipplei TW08/27
MEQTLVIIKPDGIRRGLIGQVLSRIEAKGYQIVDIRMLVPDRQSVEEHYLEHRDRHFYLPLVDFMTSGPIVLVRAEGHGVVDALRTLVGVSDPTLALPGTIRGDFGRNWGLDVIQNIVHASDSVKSAKRELDIWFP

SEQ ID NO: 13209 - protein, 140 aa, Methanocaldococcus jannaschii
MKERTFVALKPDAVKRKLIGKIIERFENKGFEIVAMKMIKLDREMAEKYYEEHKGKEFYERLINFMTSGRMIVMVVEGENAISVVRKMIGKTNPAEAEPGTIRGDFALTTPDNIIHASDSKESAEREIKLFFKEDEIFDK

SEQ ID NO: 13210 - protein, 154 aa, Lactobacillus plantarum WCFS1
MANSEKTLVLVKPDGVSEGHIGEVITRLERKGYQIAALKVIKATAEQLQQHYSEKVGKPYFKEIETYMMEGPLVAIIVSGTGVVKAVHRLAGSTRPAEAQPGTIRGDFSHEYPDGILRNVIHTSDSRENAHHEIAIWFPELAVKARKADNKVKA

SEQ ID NO: 13211 - protein, 151 aa, Methanosarcina barkeri
MHMEQTYVMVKPDGVQRGLVGEIISRIEKRGLKIVALRMNVISEATAKEHYSEHAAKPFFPGLVGFITSGPSVSMVVEGKDAIRVMRAINGATNPVDAAPGTVRGDFALDVGRNVVHASDSPEAAAREIAIHFKDSEIGNYSRIDEVCLYE

SEQ ID NO: 13212 - protein, 149 aa, Methanosarcina mazei
MEQTYVMVKPDGVQRGLVGEVISRIEKRGLKIVALRMNVIAEATAKEHYGEHAARPFFPSLIEFITSGPSVSMVVAGKDAIKVMRAINGATNPVDAAPGTIRGDFALDVGRNVVHASDSPEAAAREIAIHFKDSEIANYSRVDEVCLYE

SEQ ID NO: 13213 - protein, 148 aa, Oceanobacillus iheyensis HTE831
MEKTFLMVKPDGVQRELIGEIVKRFETKGYKLAGAKLMQVSNQLAETHYSEHKERPFFGELVDFITSGPVFAMVWEGENVIATARKMMGKTNPLEADPSTIRGDFGISVGKNIIHGSDSAESAEREITLFFTENEIVSYEKQANNWIY

SEQ ID NO: 13214 - protein, 141 aa, Vibrio parahaemolyticus RIMD 2210633
MALERTFSIVKPDAVERNLIGEIYNRIEKAGLRIIAAKMVHLTEEQASGFYAEHEGKEFFQPLKEFMTSGPIMVQVLEGENAIARYRELMGKTNPEEAAAGTLRADYALSMRHNSVHGSDSPESAAREIEFFFPESEICPR

SEQ ID NO: 13215 - protein, 149 aa, Bacillus subtilis subsp. subtilis str. 168
MMEKTFIMVKPDGVQRQLIGDILSRFERKGLQLAGAKLMRVTEQMAEKHYAEHQGKPFFGELVEFITSGPVFAMVWEGENVIEVTRQLIGKTNPKEALPGTIRGDYGMFVGKNIIHGSDSLESAEREINIFFKNEELVSYQQLMAGWIY

SEQ ID NO: 13216 - protein, 151 aa, Archaeoglobus fulgidus DSM 4304
MERTFVMVKPDGVQRGLVGEVIGRLERKGLKIVAMKMLWIAREMAENHYAEHREKPFFSALVDYITSGPVVAMVVEGKNAIKVVRTLVGATNPAEAAPGTIRGDFGLDVGRNVVHASDSPQSAEREISLFFSDDEIVNWEKADEDWIYEER

SEQ ID NO: 13217 - protein, 169 aa, Borrelia burgdorferi B31
MSMLLQKTLCIVKPDGVRRGLIGDVVSRFERVGLKMVAAKMLIVDESLAKKHYLYDDIVFRHSEAVWNSLIKFISNSPVFTFVVEGVESIEVVRKLCGATEPKLAIPGTIRGDFSYHSFKYSNEKGFSIYNVIHASANEADAMREIPIWFKDNEILNYKRDDECEHYYC

SEQ ID NO: 13218 - protein, 140 aa, Bradyrhizobium japonicum USDA 110
MAIERTFSIIKPDATARNLTGAVNAVIEKAGLRIVAQKRIRMTKEQAETFYAVHKARPFFGELVEFMTSGPVVVQVLEGENAVAKYRDAMGATDPSKAAEGTIRKLYAKSIGENSAHGSDAPETAAIEIAQFFSGNEIVG

SEQ ID NO: 13219 - protein, 140 aa, Brucella melitensis 16M
MAIERTFSMIKPDATRRNLTGAIIAKLEEAGLRVVASKRVWMSRREAEGFYAVHKDRPFFGELVEFMSSGPTVVQVLEGENAIAKNREVMGATNPANADEGTIRKAFALSIGENSVHGSDAPETAAEEIAYWFSGTEIVG

SEQ ID NO: 13220 - protein, 133 aa, Enterococcus faecalis V583
MKETSLVIIKPDGVERKLVGKIIQRFEDKGIDLLHLKFERLTVETVKEHYEHLKDELFFPELLAYMTSGPVVVMVVVGDNVVKKVRKLVGATNPLDAESGTLRADYGLSVTKNLIHASDSVQSAKIEMQRFFG

SEQ ID NO: 13221 - protein, 154 aa, Bacteroides thetaiotaomicron VPI-5482
MIEKTLVILKPCTLQRGLVGEITHLFERKGLRLAGMKMMQLTDELLSEHYAHLSSKPFFQRVKDSMMATPVIVCCYEGVDAIQAVRTLAGPTNGRLAAPGTIRGDYSMSFQENIVHTSDSPETAAIELTRFFKPEEIFDYKQATFDYLYANDEY

SEQ ID NO: 13222 - protein, 148 aa, Bacillus cereus ATCC 14579
MEKTFLMVKPDGVQRAFIGEIVARFEKKGFQLVGAKLMQVTPEIAGQHYAEHKEKPFFGELVDFITSGPVFAMVWQGEGVVDTARNMMGKTRPHEAAPGTIRGDFGVTVAKNIIHGSDSLESAEREIAIFFKEEELVDYSKLMNEWIY

SEQ ID NO: 13223 - protein, 144 aa, Coxiella burnetii RSA 493
MAIERTLSIIKPDAVAKNVIGQIYSRFEKAGLKIIAAKMCHLSKPQAEKFYAVHKDRPFYPDLVKFMTQGPVMIQVLEGENAIVKNREIMGATNPKEALPGTIRADFADSIDANAVHGSDGPETAKEEIAFFFKPDESFNSIGV

SEQ ID NO: 13224 - protein, 137 aa, Streptomyces avermitilis MA-4680
MSQRTLVLLKPDAVRRGLTGEIISRIERKAGWAITALELRTLDQDTLEQHYGEHKGKPFYEPLVEFMASGPVVALVVEGERVIEGVRALAGPTDPIAAAPGSIRGDYGVIVRENLIHASDSEESAERELKIFFPGRV

SEQ ID NO: 13225 - protein, 141 aa, Chlamydophila caviae GPIC
MEQTLSIIKPDSVGKAHIGEIVAIFEKSGFRIAAMKMVHLSVKEAEGFYAVHKSRPFFQELVDFMISGPVVVMVLEGDNAVVRNREIMGATNPQEAAQGTIRAQFGESIGINAVHGSDSLENAAIEINYFFSKIEIVNSAK

SEQ ID NO: 13226 - protein, 138 aa, Sulfolobus solfataricus
MVAQRTFVMIKPDGVKRGLIGEIISRFEKRGLKIVSLKMVKMSRDTAEKLYEEHKGKSFFEELVNYVTSGPVVCMVIEGDDVVQVIRRMIGNTDPKEAPPGTIRGDYALSKSENVIHASDSIEKAQREMSLFFDKSDL

SEQ ID NO: 13227 - protein, 148 aa, Thermoplasma acidophilum
MTERTLVLLKPDAVKRRLIGRIISRLEDKGLKVVALKFMQMTKDQAENHYSVHRSKPFFKDLVTYITSGPIVAMVLEGPKAIEVVRILAGSTDGSKAQPGTIRGDFSMGIEKNIIHASDSPEAYSHEMPIFFNESEIVEWSYGDEIIY

SEQ ID NO: 13228 - protein, 137 aa, Thermus thermophilus
MERTFVMIKPDGVRRGLVGEILARFERKGFRIAALKLMQISQELAERHYAEHREKPFFPGLVRFITSGPVVAMVLEGPGVVAEVRKMMGATHPKDALPGTIRGDFATTIDENVIHGSATLEDAQREIALFFRPEELL

SEQ ID NO: 13229 - protein, 141 aa, Heliobacillus mobilis
MERTYLMIKPDAVQRGLIGEIVSRFEKKGFKLVAMKFLRLTKEMAEKHYAEHVGKPFFAGLVEYIISGPVVAMCWEGKDVVTVSREMMGATNPAKAAPGTIRGTFAVDLPLALRRRVLRRFLEPENPGSEKTDAILEQLQQ

SEQ ID NO: 13230 - protein, 137 aa, Geobacter metallireducens
MERTFAIIKPDAVERNIVGKVLEKIEAAGFRIVGMKKIQLSKKEAEGFYYVHSERPFFGDLCSFMSRSPVVVLALERENAIAKWREVMGATNPANADAGTIRKEFGLSIEENTVHGSDSPESAAFEIPYFFSQLELL

SEQ ID NO: 13231 - protein, 150 aa, Pseudomonas aeruginosa
MALQRTFSIIKPDAVSKNVIGEILTRFEKAGLRVVASKMVQLSEREAGGFYAEHKERPFFKDLVSFMTSGPVVVQVMEGEDAILRNRELMGATDPKKADAGTIRADFAVSIDENAVHGSDSEASAAREIAYFFSSTEVCEALPDSANERG

SEQ ID NO: 13232 - protein, 143 aa, Pseudomonas aeruginosa
MALQRTLSIIKPDAVSKNVIGEILTRFEKAGLRVVAAKMVQLSEREAGGFYAEHKARPFFKDLVSFMTSGPVVVQVLEGEDAIAKNRELMGATDPKKADAGTIRADFAVSIDENAVHGSDSEASAAREIVYFFADTEVCERIR

SEQ ID NO: 13233 - protein, 162 aa, Pyrococcus abyssi
MVSMCENEKERTLVIIKPDAVIRGLIGEIISRFEKRGLKIVGMKMIWISKELAEKHYAEHREKPFFKSLVEYITRTPVVVMVVEGRCAIEVVRKMAGATDPKNAEPGTIRGDFALEVSDAICNVVHASDSKESAEREIKLYFRDDEIFDYPRAEDWFYRKGI

SEQ ID NO: 13234 - protein, 159 aa, Pyrococcus abyssi
MCENEKERTLVIIKPDAVIRGLIGEIISRFEKRGLKIVGMKMIWISKELAEKHYAEHREKPFFKSLVEYITRTPVVVMVVEGRCAIEVVRKMAGATDPKNAEPGTIRGDFALEVSDAICNVVHASDSKESAEREIKLYFRDDEIFDYPRAEDWFYRKGI

SEQ ID NO: 13235 - protein, 221 aa, Dunaliella tertiolecta
MFRNSAVSALRLGAIAFRRVDPTKVPNAMCRAYTQQNTGNSSSSAGKWAWTAGILGAGLLSSNHAFAAGPSTKERSFIAIKPDGVHRGMISNIISRFEQKGYKLVGIKVIVPGMDLAKAHYAEHEGKPFFNKLTSFLTSGPVVAMVWEGKEVIKYGRTMIGATNPLASAPGTIRGDFCVDMGRNMIHGSDGPESAQREIALWFQPSEIAEYESATQSWVYE

SEQ ID NO: 13236 - protein, 141 aa, Ralstonia solanacearum
MAIERTLSIIKPDAVAKNVIGQIYARFEGAGLKVVAAKMIHLSRAEAEQFYAVHKERPFFKDLVDFMISGPVMVQALEGESAIVKNRDLMGATDPKKAEKGTIRADFADSIDANAVHGSDAAETAAVEVAFFFPGLNIYSR

SEQ ID NO: 13237 - protein, 145 aa, Myxococcus xanthus
MAIERTLSIIKPDGLEKGVIGKIISRFEEKGLKPVAIRLQHLSQAQAEGFYAVHKARPFFKDLVQFMISGPVVLMVLEGENAVLANRDIMGATNPAQAAEGTIRKDFATSIDKNTVHGSDSLENAKIEIAYFFRETEIHSYPYQK

SEQ ID NO: 13238 - protein, 144 aa, Myxococcus xanthus
AIERTLSIIKPDGLEKGVIGKIISRFEEKGLKPVAIRLQHLSQAQAEGFYAVHKARPFFKDLVQFMISGPVVLMVLEGENAVLANRDIMGATNPAQAAEGTIRKDFATSIDKNTVHGSDSLENAKIEIAYFFRETEIHSYPYQK

SEQ ID NO: 13239 - protein, 143 aa, Azotobacter vinelandii
MAVERTLSIIKPDAVAKNVIGEILTRFEKAGLSVVAAKMVQLSEREAGGFYAEHKERPFFKDLVSFMTSGPVVVQVLEGEGAIAKNRELMGATDPKKAEPGTIRADFAVSIDENAVHGSDSEASAAREIAYFFAATEVCARIR

SEQ ID NO: 13240 - protein, 233 aa, Spinacia oleracea
MEAMSGLSSPCNCISSLPHSSSTTTRHQNLLFRRNNHHQQKLAAFHSQSHLFSTKCPLISHSLPRKKSFKPHIFLPHLVASMEQVEETYIMIKPDGVQRGLVGEIISRFEKKGFKLIGLKMYPCPKELAEEHYKDLKAKSFYQKLIDYITSGPVVCMAWEGVGVVASSRKLIGATDPLQAEPGTIRGDLAVQTGRNVVHGSDSPDNGKREIGLWFKEGEICQWTPAQAPWLRE

SEQ ID NO: 13241 - protein, 132 aa, Rickettsia sibirica
MIKPDAIKRNKIGQVNTYLENAGLKIVAQKMKFLTKYEAACFYDEHRARPFFNSLVEYITSGAVVLQVLKGEDAITLNRTVMGATNPAEAEAGTIRKDLGESIEANSIHGSDSENSAKREIEFFFNKSEIIE

SEQ ID NO: 13242 - protein, 140 aa, Rhodovulum sulfidophilum
MAIQRTFSIIKPDATKRNLTGAINAKLEAAGLRIVAQKRIHLSKAQAAVFYAVHKERPFYDELCEFMASEPIVVQVLEGEDAIAKNREVMGATNPAEAAEGTIRKEFALSIGENSVHGSDAEDTAKEEIAYFFSGLELVG

SEQ ID NO: 13243 - protein, 149 aa, Plasmodium falciparum 3D7
MEKSFIMIKPDGVQRGLVGTIIKRFEKKGYKLIAIKMLNPTEEILKEHYKELSDQPFFKNLVAYISKGPVVAMVWEGVDMVKQGRKLIGETNPLTSNTGTIRGDFCLEVSKNVIHGSDSVASANKEINIWFKAEELTQWKHHMKEWICS

SEQ ID NO: 13244 - protein, 142 aa, Wigglesworthia glossinidia endosymbiont of Glossina brevipalpis
MKIEQTLSIIKPNIISNNFIGNIINRLEQAKLYIIASKMIKLSWKEAVSFYIEHKNKSFFSDLINFMISHPIIVQILEGENAIKRNREIMGNTNPKIALAGTLRSDFSNDIIKNGVHGSDSEESADREIKFFFKKDRIFSRI

SEQ ID NO: 13245 - protein, 231 aa, Arabidopsis thaliana
MVGATVVSKWTPLCVASPPERNSASLNPHCSPARVNFRTALAAFRPQFRLFSRNSASRRRLRASSSAESGIFLPHLVASMEDVEETYIMVKPDGIQRGLVGEIISRFEKKGFKLIGLKMFQCPKELAEEHYKDLSAKSFFPNLIEYITSGPVVCMAWEGVGVVASARKLIGKTDPLQAEPGTIRGDLAVQTGRNIVHGSDSPENGKREIGLWFKEGELCKWDSALATWLRE

SEQ ID NO: 13246 - protein, 152 aa, Arabidopsis thaliana
MEDVEETYIMVKPDGIQRGLVGEIISRFEKKGFKLIGLKMFQCPKELAEEHYKDLSAKSFFPNLIEYITSGPVVCMAWEGVGVVASARKLIGKTDPLQAEPGTIRGDLAVQTGRNIVHGSDSPENGKREIGLWFKEGELCKWDSALATWLRE

SEQ ID NO: 13247 - protein, 231 aa, Arabidopsis thaliana
MVGATVVSKWTPLCVASPPERNSASLNPHCSPARVNFRTALAAFRPQFRLFSRNSASRRRLRASSSAESGIFLPHLVASMEDVEETYIMVKPDGIQRGLVGEIISRFEKKGFKLIGLKMFQCPKELAEEHYKELSAKSFFLTLIEYITSGPVVCMAWEGVGVVASARKLIGKTDPLQAEPGTIRGDLAVQTGRNIVHGSDSPENGKREIGLWFKEGELCKWDSALATWLRE

SEQ ID NO: 13248 - protein, 230 aa, Brassica rapa
MVGTRVVGQWTLCVASPRLTPAICSSTSSPTTVNLRAELAAFRPQFRLFSRTSPSRRRLRASTSSAESGIFLPHLVASMEQVEETYIMVKPDGIQRGLVGEIISRFEKKGFKLIGLKMFQCPRELAEEHYKDLSSKSFFSSLIEYITSGPVVCMAWEGVGVVASARKMIGKTDPLQAEPGTIRGDLAVQTGRNIVHGSDSPENGKREIALWFKEGELCEWDSVLAKWLRE

SEQ ID NO: 13249 - protein, 140 aa, Mesorhizobium loti
MALERTFSMIKPDATRRNLTGAITKMLEDAGLRVIASRRVWMSRREAEGFYAVHKDRPFFGELVEFMSSAPTIVQVLEGENAIARNREVMGATNPANAAEGTIRKVHALSIGENSVHGSDAPETAAQEIKYWFSDTEIVG

SEQ ID NO: 13250 - protein, 140 aa, Sinorhizobium meliloti
MAIERTFSMIKPDATKRNLTGAITKMLEDAGLRVVASKRVWMSRREAEGFYAVHKERPFFGELVEFMSSGPTVVQVLEGENAIAKNREVMGATNPANAAEGTIRKVHALSIGENSVHGSDAPETAAEEIAYWFSGTEIVG

SEQ ID NO: 13251 - protein, 230 aa, Pisum sativum
MEAMAVFSGSNLFATSSLLLTTNSKTRYSQLRTTQNLSAFSSKSHLFSPSSTSSSYPKTFRTRSSTESGIFLPRLITSLEQVDQAYIMVKPDGVQRGLVGEIISRFEKKGFKLTGLKLFQCSKELAEEHYKHLNQKSFFPKLIEYITSGPVVSMAWEGVGVVPSARKLIGATDPLQAEPGTIRGDFAVQTGRNIIHGSDSPENGEREIALWFKEGELCEWTPVQEPWLRE

SEQ ID NO: 13252 - protein, 144 aa, Lycopersicon esculentum
FIMIKPDGVQRGLVGEIISRFEKKGFSLKGLKLITVDRAFAEKHYADLSAKPFFNGLVEYIVSGPVVAMVWEGKGVVATGRKIIGATNPLESAAGTIRGDFAIDIGRNVIHGSDAVESARKEIALWFPEGIAEWQSSLHSCIYE

SEQ ID NO: 13253 - protein, 142 aa, Lycopersicon esculentum
MIKPDGVQRGLVGEIISRFEKKGFSLKGLKLITVDRAFAEKHYADLSAKPFFNGLVEYIVSGPVVAMVWEGKGVVATGRKIIGATNPLESAAGTIRGDFAIDIGRNVIHGSDAVESARKEIALWFPEGIAEWQSSLHSCIYE

SEQ ID NO: 13254 - protein, 154 aa, Dictyostelium discoideum
STNKVNKERTFLAVKPDGVARGLVGEIIARYEKKGFVLVGLKQLVPTKDLAESHYAEHKERPFFGGLVSFITSGPVVAMVFEGKGVVASARLMIGVTNPLASAPGSIRGDFGVDVGRNIIHGSDSVESANREIALWFKPEELLTEVKPNPNLYE

SEQ ID NO: 13255 - protein, 155 aa, Dictyostelium discoideum
MSTNKVNKERTFLAVKPDGVARGLVGEIIARYEKKGFVLVGLKQLVPTKDLAESHYAEHKERPFFGGLVSFITSGPVVAMVFEGKGVVASARLMIGVTNPLASAPGSIRGDFGVDVGRNIIHGSDSVESANREIALWFKPEELLTEVKPNPNLYE

SEQ ID NO: 13256 - protein, 155 aa, Dictyostelium discoideum
MSTNKVNKERTFLAVAPDGVARGLVGEIIARYEKKGFVLVGLKQLVPTKDLAESHYAEHKERPFFGGLVSFITSGPVVAMVFEGKGVVASARLMIGVTNPLASAPGSIRGDFGVDVGRNIIHGSDSVESANREIALWFKPEELLTEVKPNPNLYE

SEQ ID NO: 13257 - protein, 155 aa, Dictyostelium discoideum
MSTNKVNKERTFLAVKPDGVARGLVGEIIARYEKKGFVLVGLKQLVPTKDLAESHYAEHKERPFFGGLVSFITSGPVVAMVFEGKGVVASARLMIGVTNPLASAPGSIRGDFGVDVGRAIIHGSDSVESANREIALWFKPEELLTEVKPNPNLYE

SEQ ID NO: 13258 - protein, 150 aa, Dictyostelium discoideum
VNKERTFLAVKPDGVARGLVGEIIARYEKKGFVLVGLKQLVPTKDLAESHYAEHKERPFFGGLVSFITSGPVVAMVFEGKGVVASARLMIGVTNSLASAPGSIRGDFGVDVGRNIIHGSDSVESANREIALWFKPEELLTEVKPNPNLYE

SEQ ID NO: 13259 - protein, 150 aa, Dictyostelium discoideum
VNKERTFLAVKPDGVARGLVGEIIARYEKKGFVLVGLKQLVPTKDLAESHYAEHKERPFFGGLVSFITSGPVVAMVFEGKGVVASARLMIGVTNPLASAGGSIRGDFGVDVGRNIIHGSDSVESANREIALWFKPEELLTEVKPNPNLYE

SEQ ID NO: 13260 - protein, 155 aa, Dictyostelium discoideum
MSTNKVNKERTFLAVKPDGVARGLVGEIIARYEKKGFVLVGLKQLVPTKDLAESHYAEHKERPFFGGLVSFITSGPVVAMVFEGKGVVASARLMIGVTNPLASAPGSIRGDFGVDVGRNIIAGSDSVESANREIALWFKPEELLTEVKPNPNLYE

SEQ ID NO: 13261 - protein, 155 aa, Dictyostelium discoideum
MSTNKVNKERTFLAVKPDGVARGLVGEIIARYEKKGFVLVGLKQLVPTKDLAESHYAEHKERPFFGGLVSFITSGPVVAMVFEGKGVVASARLMIGVTNPLASAPGSIRGDFGVDVGRNIIGGSDSVESANREIALWFKPEELLTEVKPNPNLYE

SEQ ID NO: 13262 - protein, 155 aa, Dictyostelium discoideum
MSTNKVNKERTFLAVKPDGVARGLVGEIIARYEKKGFVLVGLKQLVPTKDLAESHYAEHKERPFFGGLVSFITSGPVVAMVFEGKGVVASARLMIGVTNPLASAPGSIRGDFGVDVGRNIICGSDSVESANREIALWFKPEELLTEVKPNPNLYE

SEQ ID NO: 13263 - protein, 155 aa, Dictyostelium discoideum
MSTNKVNKERTFLAVKPDGVARGLVGEIIARYEKKGFVLVGLKQLVPTKDLAESHYAEHKERPWFGGLVSFITSGPVVAMVFEGKGVVASARLMIGVTNPLASAPGSIRGDFGVDVGRSIIGGSDSVESANREIALWFKPEELLTEVKPNPNLYE

SEQ ID NO: 13264 - protein, 220 aa, Dictyostelium discoideum
MFSRFARAFPKILASGASQRTFATVQKAFGNPTSKKLIVGSSLLIGSAFATTSFVACENKSVPLVGLPGTNQERSFIAIKPDGTQRRLIGEIIARFEKKGFKLVGIKILVPTPEHAAKHYEDLNKKPFFNGLVKFFSSGAVVAMVFEGKDVVRTGRVLIGATVPSQSAPGTIRFDLCIETGRNIIHGSDSNESAAHEIALWFKEDEIANWVSTNPVYEKM

SEQ ID NO: 13265 - protein, 220 aa, Dictyostelium discoideum
MFSRFARAFPKILASGASQRTFATVQKAFGNPTSKKLIVGSSLLIGSAFATTSFVACENKSVPLVGLPGTNQERSFIAIKWNSTQRRLIGEIIARFEKKGFKLVGIKILVPTPEHAAKHYEDLNKKPFFNGLVKFFSSGAVVAMVFEGKDVVRTGRVLIGATVPSQSAPGTIRFDLCIETGRNIIHGSDSNESAAHEIALWFKEDEIANWVSTNPVYEKM

SEQ ID NO: 13266 - protein, 150 aa, Lolium perenne
MAEQTFIMIKPDGVQRGLIGEIISRFEKKGFYLKGLKLQNVEKSFAEQHYADLSSKPFFGGLVEYIVSGPVVAMVWEGKSVVATGRKIIGATNPLASEPGTIRGDFAVDIGRNVIHGSDSVENARKEIALWFPEGLAGWTSSQHNWIYEA

SEQ ID NO: 13267 - protein, 152 aa, Oryza sativa
ASSVEQSYIMIKPDGVQRGLVGEIISRFEKKGFVLKGLKLFQCPKDLAQEHYKDLKEKPFFPGLIEYITSGPVVCMAWEGNGVVASARKLIGATNPLQAEPGTIRGDLAVQTGRNVVHGSDSPDNGKREIALWFKEGELCEWESVLTPWLVE

SEQ ID NO: 13268 - protein, 247 aa, Oryza sativa
MVEQSYIMIKPDGVQRGLVGEIISRFEKKGFVLKGLKLFQCPKDLAQEHYKDLKEKPFFPGLIEYITSGPVVCMAWEGNGVVASARKLIGATNPLQAEPGTIRGDLAVQTGRNVVHGSDSPDNGKREIALWFKEGELCEWESVLTPWLVELGKRKPASVEASIRLTLQPSARTPLIPSRHQPGHWLIYFQAHAREQELQARHYGFGLSIGSECIRYLPLRKLIWDEIDGLLMVVATGTYFDCEVTVI

SEQ ID NO: 13269 - protein, 254 aa, Oryza sativa
  unsure (1)..(254): unsure at all Xaa locations
LEPRAPGLGSALPNPKRGGCLGRSRARADVGGGAATGRGAMAVLAGPSRPAPPLLPAIPPAVPRRPAALSFAPAAPPGARXXAARXAPRGAGGRPGGASPPPAASSXSSVEQSYIMIKPDGVQRGLVGEIISRFEKSGFVLKGLKLFQCPKDLAQXEHYKDLKEKPFFPGLIEYITSGPVVCMAWEGNGVVASARKLIXGATNPLQAQPGTIRGXHLAVLAAARVVLGAASPLHATREIALWFTEGELCEWESX

SEQ ID NO: 13270 - protein, 149 aa, Saccharum officinarum
MESTFIMIKPDGVQRGLIGEIISRFEKKGFYLKALKLVNVERSFAEKHYADLSSKPFFQGLVDYIISGPVVAMVWEGKSVVTTGRKIIGATNPLVSEPGTIRGDFAVDIGRNVIHGSDSIESANKEIALWFPEGLADWQSSQHPWIYEK

SEQ ID NO: 13271 - protein, 232 aa, Triticum aestivum
MDAMAALARTGPSLAAAGHRSSATFRPSASLSSFASASSRKLSSFASASSRNRGRVGLSTAGWNRRATRVARATPNRIVASSEVEQTYIMIKPDGVQRGLVGEIISRFEKKGFLLKGLKLFQCPKDLAQEHYKDLKERPFFPNLIDYITSGPVVCMAWEGDGVVASARKLIGATNPLQAEPGTIRGDLAVQTGRNVVHGSDSPDNGKREIGLWFKEGELAQWESVQTPWLIE

SEQ ID NO: 13272 - protein, 260 aa, Triticum aestivum
  unsure (1)..(260): unsure at all Xaa locations
IFSPNPKVRVLPCRVCTELRRRWTXMAAPPERGLPSPPPXHRSSATFRPSASLSSFASASSXGTAAASGXARRGATGGQPGXLAPHRIVASSEVEQTYIMIKPDGVQRGLVGEIISRFEKKGFLLKGLKLFQCPKDLAQEHYKDLKERPFFPNLIDYITSGPVVCMAWEGDGVVASARKLIGATNPLQAEPGTIRGDLAVQTGRNVVHGSDSPDNGKREIGKWXKEGELAQWXSVQTPWLXEVIFAYHCKNHDPYLFGQL

SEQ ID NO: 13273 - protein, 118 aa, Musa acuminata
IFQGLKMVSVERSFAEKHYADLSAKPFFAGLVEYIISGPVVAMVWAGKNVVVTGRKIIGATNPADSAPGTIRGDLAIEIGRNVIHGSDSIESASKEIALWFPEGVAEWQSNLHPWIYE

SEQ ID NO: 13274 - protein, 494 aa, Cloning vector pZEO-SG4
MARSKYIVIEGLEGAGKTTARNVVVETLEQLGIRDMVFTREPGGTQLAEKLRSLVLDIKSVGDEVITDKAEVLMFYAARVQLVETVIKPALANGTWVIGDRHDLSTQAYQGGGRGIDQHMLATLRDAVLGDFRPDLTLYLDVTPEVGLKRARARGELDRIEQESFDFFNRTRARYLELAAQDKSIHTIDATQPLEAVMDAIRTTVTHWVKELDALISGANGVMAKLTSAVPVLTARDVAGAVEFWTDRLGFSRDFVEDDFAGVVRDDVTLFISAVQDQVVPDNTLAWVWVRGLDELYAEWSEVVSTNFRDASGPAMTEIGEQPWGREFALRDPAGNCVHFVAEEQDQGPGCMAIERTFSIIKPNAVAKNVIGNIFARFEAAGFKIVGTKMLHLTVEQARGFYAEHDGKPFFDGLVEFMTSGPIVVSVLEGENAVQRHRDLLGATNPANALAGTLRADYADSLTENGTHGSDSVESAAREIAYFFGEGEVCPRTR

SEQ ID NO: 13275 - protein, 155 aa, Entodinium caudatum
PRLERTFIMIKPDGVQRGLIGPILERFERRGYKLIALKLFTPSKALLEEHYGEHKGKPFFEPLVNYMLMGPVVCMIWEGLDIVKTGRKMLGATKPLNSEPGTIRGDYSIETGRNIVHGSDSVESAEREIKLWFKPEEIQNYKRDCDKWIYEKPFA

SEQ ID NO: 13276 - protein, 156 aa, Entodinium caudatum
DPRLERTFIMIKPDGVQRGLIGPILERFERRGYKLIALKLFTPSKALLEEHYGEHKGKPFFEPLVNYMLMGPVVCMIWEGLDIVKTGRKMLGATKPLNSEPGTIRGDYSIETGRNIVHGSDSVESAEREIKLWFKPEEIQNYKRDCDKWIYEKPFA

SEQ ID NO: 13277 - protein, 144 aa, Entodinium caudatum
TRRCPKRTYWPILERFERRGYKLIALKLFTPSKALLEEHYGEHKGKPFFEPLVNYMLMGPVVCMIWEGLDIVKTGRKMLGATKPLNSEPGTIRGDYSIETGRNIVHGSDSVESAEREIKLWFKPEEIQNYKRDCDKWIYEKPFA

SEQ ID NO: 13278 - protein, 177 aa, Novosphingobium aromaticivorans
MTFPFGPPCVDPPTLHRSTNRARGARNQIPTYRKERPMAVTRTFSIIKPDATRRNLTGAVTKMLEEAGLRVVASKRIHMSREQAEGFYAVHKERPFFGELVEFMISGPVVVQVLEGEDAVKRNRDIMGATNPKDAAPGTIRKELAESIEANSVHGSDSEENAAIEIAYFFKPEEIVG

SEQ ID NO: 13279 - protein, 151 aa, Schizosaccharomyces pombe
MSTEQTFIAVKPDAVQRGLIGYIISKFELKGYKLRALKFLVPSRDLVEEHYAEHKGKPFYEKLVGFMASGPVCAMIWEGKQAVKTGRLMLGASNPLDSAPGTIRGDYGIDLGRNVCHGSDSIESANREIKLWFQPSEIQVYDRTIEPWIYE

SEQ ID NO: 13280 - protein, 153 aa, Saccharomyces cerevisiae
MSSQTERTFIAVKPDGVQRGLVSQILSRFEKKGYKLVAIKLVKADDKLLEQHYAEHVGKPFFPKMVSFMKSGPILATVWEGKDVVRQGRTILGATNPLGSAPGTIRGDFGIDLGRNVCHGSDSVDSAEREINLWFKKEELVDWESNQAKWIYE

SEQ ID NO: 13281 - protein, 149 aa, Desulfitobacterium hafniense
MEKTFIMLKPDAVQRGLVGQIIARFEAKGCKLVGMKLMSVDQALAEQHYAEHKGKSFFEPTVQYIMSSPVVAMVWEGKNVVALARELMGATNPANANPGSIRGSFGMDISRNVIHGSDSVASAEREIALYFRPEELCDYRKAGEEWLSE

SEQ ID NO: 13282 - protein, 147 aa, Thermoplasma volcanium
MDRTLVLLKPDAVKRRLVGKIIERFEEKGLKIVAMKFMQMTKDQAKTHYSVHQNKPFFNDLVNYITSGPIVAMILEGAHAIEIVRLMSGATDGSKAQPGTIRGDYSMGIEKNIIHASDSLEAYNHEMPIFFSDNEIIEWAYGDEVIY

SEQ ID NO: 13283 - protein, 152 aa, Neurospora crassa
MSNQEQTFIAVKPDGVQRGLVGNIISRFENRGFKLVAMKLTQPGQAHLEKHYEDLNTKPFFAGLIKYMNSGPICAMVWEGKDAVKTGRTILGATNPLASAPGTIRGDFALDMGRNVCHGSDSVENAKKEIALWFKPEELNQWNHHSAAWIFE

SEQ ID NO: 13284 - protein, 154 aa, Neurospora crassa
MSNQEQTFIAVKPDGVQRGLVGNIISRFENRGFKLVAMKLTQPGQVHLELEKHYEDLNTKPFFAGLIKYMNSGPICAMVWEGKDAVKTGRTILGATNPLASAPGTIRGDFALDMGRNVCHGSDSVENAKKEIALWFKPEELNQWNHHSAAWIFE

SEQ ID NO: 13285 - protein, 160 aa, Pyrococcus horikoshii
MFQMSETERTLVIIKPDAVVRGLIGEIISRFEKKGLKIVGMKMIWIDRELAEKHYEEHREKPFFKALIDYITKTPVVVMVLEGRYAVEVVRKMAGATDPKDAAPGTIRGDFGLEVSDAICNVIHASDSKESAEREISLFFKPEELFEYPRAADWFYKKGI

SEQ ID NO: 13286 - protein, 157 aa, Pyrococcus horikoshii
MSETERTLVIIKPDAVVRGLIGEIISRFEKKGLKIVGMKMIWIDRELAEKHYEEHREKPFFKALIDYITKTPVVVMVLEGRYAVEVVRKMAGATDPKDAAPGTIRGDFGLEVSDAICNVIHASDSKESAEREISLFFKPEELFEYPRAADWFYKKGI

SEQ ID NO: 13287 - protein, 141 aa, Aeropyrum pernix
MAVQRTLLVVKPDGVERGLIGEVVSRVERKGLKIVAMKMMRLTREKAEEFYSVHRDKPFFGELVEFITSGPVVAMVVEGDEAVSVVRLMIGSTDGRKAAPGTIRGDFSLDIMKNIVHASDSPESFEREFRVLFSESEIVEW

SEQ ID NO: 13288 - protein, 151 aa, Leishmania major
MSSERTFIAVKPDGVQRGLVGEIIARFERKGYKLVALKILQPTTEQAQGHYKDLCSKPFFPALVKYFSSGPIVCMVWEGKNVVKSGRVLLGATNPADSQPGTIRGDFAVDVGRNVCHGSDSVESAEREIAFWFKADEIASWTSHSVSQIYE

SEQ ID NO: 13289 - protein, 151 aa, Leishmania infantum
MSSERTFIAVKPDGVQRGLVGEIIARFERKGYKLVALKILQPTTEQAQGHYKDLSSKPFFPALVKYFSSGPIVCMVWEGKNVVKSGRVLLGATNPADSQPGTIRGDFAVDVGRNVCHGSDSVESAEREIAFWFKADEIASWTSHSVSQIYE

SEQ ID NO: 13290 - protein, 153 aa, Trypanosoma brucei
MPSERTFIAVKPDGVQRNLVGEIIKRFENKGYKLVGLKLLQPTEEQAKQHYIDLASKPFYSGLVSYFSSGPIVGMVWEGLGVVKGGRVLLGATNPADSLPGTIRGDFAVDVGRNVCHGSDSVESAKREIAFWFKAEELVSWTSHSVKQIYGRA

SEQ ID NO: 13291 - protein, 147 aa, Encephalitozoon cuniculi
MERTFIMIKPDAIKRRLISRIIQRFEEKGLYLAASKCVIPKREVLETHYSHLSSMPFFSEMVEDMMSGMVLAMVWVGKDAVSIGRKLIGETNPQAASVGTIRGDYGVSTGKNIIHGSDCVENAEKEIKLWIGDDVQPVSFFDKEWIY

SEQ ID NO: 13292 - protein, 151 aa, Hydra vulgaris
MSTERTFIMVKPDGVVRGLTAKVIKRFEEKGYKLVAMKFMKASEELLNQHYADLKEKKFFPTLIKHIASGPVVPMVWEGKDACRTGRILLGETNPLDSKPGTLRGDYSIDLGRNIVHGSDSVESANKEIALWFTESELVEWSSPLHSSVYE

SEQ ID NO: 13293 - protein, 157 aa, Schistosoma japonicum
HLFVRATNMERTFIMVKPDGVQRGLVGEIIQRFERRGYKLIAVKMIHASEQLLQTHYEALKSLPFFTNLVAYMSSGPVVPMVFEGRKAVENGRTMLGATRPEASCPGSIRGDFCQDVGRNVVHGSDSVESANREINLWFSPQELCRYEQGINTWIHE

SEQ ID NO: 13294 - protein, 149 aa, Schistosoma japonicum
MERTFIMVKPDGVQRGLVGEIIQRFERRGYKLIAVKMIHASEQLLQTHYEALKSLPFFTNLVAYMSSGPVVPMVFEGRKAVENGRTMLGATRPEASCPGSIRGDFCQDVGRNVVHGSDSVESANREINLWFSPQELCRYEQGINTWIHE

SEQ ID NO: 13295 - protein, 153 aa, Caenorhabditis elegans
MSNTERTFIAIKPDGVHRGLVGKIIARFEERGYKLVALKQMTASKAHLEVHYQDLKDKPFFPSLIEYMSSGPVVAMVWQGLDVVKQGRSMLGATNPLASAPGTIRGDFCIQTGRNICHGSDAVDSANREIAHWFKQEEINDYASPFINSWVYE

SEQ ID NO: 13296 - protein, 118 aa, Caenorhabditis elegans
MNHHLLSQAHLDKEKLVILVKEDEKMNSMHKDKPFFPLLIDYMSSGPVVAMLWEGCDVVKRARVILGEELEVGEFRSIFYDLVVRDTHKGCHCSDSVASANREYVLWFEEFKEGTRFD

SEQ ID NO: 13297 - protein, 153 aa, Brugia malayi
MSNTKERTFICIKPDAVQRGLIGKIFERFEQRGYKLVAMKMLKATKSHLEIHYQELQGKPFFNDLVGYMSSGPVIAMVWEGLDVVKQARQMLGATNPLNSMPGTIRGDFSIQTGRNIVHGSDSLPSAEREITHWFKPEELCEWSSATATWVYE

SEQ ID NO: 13298 - protein, 149 aa, Nostoc punctiforme
MERTFLAIKPDGVQRGLVGEIIRRFETKGFTLVGLKFLKVSKELAEQHYGVHRERPFFGSLVEFITSSPVVAMVWEGDGVVASARKIIGATNPLTSEPGTIRGDFGINIGRNLIHGSDAPETAQQEIALWFKDEELVNWQPHITPWLHE

SEQ ID NO: 13299 - protein, 161 aa, Halobacterium sp. NRC-1
MTDHDERTFVMVKPDGVQRGLIGDIVTRLETKGLKMVGGKFMRIDEELAHEHYAEHEDKPFFDGLVSFITSGPVFAMVWEGADATRQVRQLMGATDAQDAAPGTIRGDYGNDLGHNLIHGSDHEDEGANEREIALFFDDDELVDWDRDASAWVYEDLADHD

SEQ ID NO: 13300 - protein, 142 aa, Vibrio cholerae
MALERTFSIIKPDAVKRNLIGEIYHRIEKAGLQIIAAKMVHLSEEQASGFYAEHEGKPFFEPLKEFMTSGPIMVQVLEGENAIARYRELMGKTNPEEAACGTLRADYALSMRYNSVHGSDSPASAAREIEFFFPESEICPRP

SEQ ID NO: 13301 - protein, 141 aa, Haemophilus influenzae Rd
MMTERTFSIIKPDVVKRNLIGAILTRFEQNGFKIIASKMVRLTREQAEGFYAEHQGKEFFVPLVEYMMSSPIVVSVLEKENAVKDYRTLIGTTNPETAAEGTIRKDFALSQRENSVHGSDSIESANREIAYFFTNSEIFER

SEQ ID NO: 13302 - protein, 235 aa, Pinus pinaster
MSSRLFRCSCPNCQDSCCFFSEIFSFTRRKGNSCSASSCRGKVSSLVSLSSHGDYQSAYRQWISGALALPAAVYMLQDPSAEAAELERTFIAIKPDGVQRGLISEIVSRFERKGYKLVAIKLVVPSKQFAEQHYEDLKERPFFNGLCEFLSSGPVLAMVWEGQGVIKYGRKLIGATDPQNSEPGTIRGDLAIIVGRNIIHGSDGPETAKNEINLWFKPEELVNYAHNSEKWLYGK

SEQ ID NO: 13303 - protein, 153 aa, Drosophila melanogaster
MAANKERTFIMVKPDGVQRGLVGKIIERFEQKGFKLVALKFTWASKELLEKHYADLSARPFFPGLVNYMNSGPVVPMVWEGLNVVKTGRQMLGATNPADSLPGTIRGDFCIQVGRNIIHGSDAVESAEKEIALWFNEKELVTWTPAAKDWIYE

SEQ ID NO: 13304 - protein, 149 aa, Plasmodium yoelii yoelii
MEKSFIMIKPDGVQRGLVGVIIKRFERKGYKLIGLKMLNPTEEILKEHYKELSDQPFFKKLVDYINKGPVVAMVWEGMDIVKQGRKLIGETNPLNSNVGTIRGDFCLEVSRNVIHGSDSVASANREINIWFKAEELIQWKNHSNDWVYA

SEQ ID NO: 13305 - protein, 139 aa, Pasteurella multocida
MAVERTLSLIKPDAVKRHLIGAILSRFEQAGFRVVAAKMLHLTQAQAEGFYAEHQDKAFFPELVAYMISAPVLALVLEKENAVKDYRTLIGATNPAVAAEGTIRRDFAIDGRHNSVHGSDSLDSAKREIAYFFVESEIF

SEQ ID NO: 13306 - protein, 149 aa, Scyliorhinus torazame
MERTLIAVKSDGVQRGLIGEIIKRFEHRGFKLIGLKMVKPTEDLAKHHYIDLKDKPFYAGLCKFTSAGPFVAMCWEGQNIVKMGRDMMGETNPADSKPGTIRGDLCVQVGRNIIHGSDSLETAKKEVALWFKPEELIEWKSCAEVYTYE

SEQ ID NO: 13307 - protein, 837 aa, Anthocidaris crassispina
MPAKKEQIQLQKEILNQEMWDELLSLEGLTVIDVYQKWCGPCAAVLSLFKRLRNEIGDDLLRFAVAEADSIETLERYRGKCEPCFLRYGSGQLVNVVRGVNAPALLKNVERELKQEHKVLEEGVERVVIKDPLLAAFEAEEQQAAQAEELEKKRLEEEARIKEIKELGDAGEVSVRPVSQGTVDTLMHGRQDGPQTEPVPKEVTVVLIKPDAVANGHVDSIIAKIEEHGFEILTTEDKTLTEDEAREFYKQHEEEEHFEVLVTFMASGPSKILVLTRGDTGEGVVSEVRNLLGPKDIEVAKEEAPDSLRAQFGTDKKMNAMHGADSKETAAREMAFLLPNFSVPIVPGTGPPPTIEKTLALIRPSALKDHKDEMLQKIQEAGFEVCLQKMVQLTEDQAKEFYKEQEGTPHFEDLIREMTSGEVLALGLAKESAIQSWREFIGPTTIDEAKEKAPDSLRAQYSIPDTQVNVVHGSDSVDTAEKELGFFFPKQTTLAVIKPDAAGEHKEAIIEKIKEAGFNISLQRDVELNKELASKLYLEHEGKEFYENLIDHMSSGLSMVMVLSREDAVDGWRTLMGPTDPDYAREHAPESLRALLGKDVLQNAVHGSSNPEEAKTRIERLFPDVEVLPGGEVKDSVASISMEQSQVKGEGEEGGEEQTEQPAGEGEEQQAEQPAAESGEQQAEGGEPATETATEGGEQQAEQPPAEGGEKPAEEETQQTQEGETPAADEAQAEQTQEGETPAADEAQAEQTQEGEEQKPAEEEAAPATEETAAEQAPAAEETQQTQEGEEKKEETEQTQDAPAAGGGEEAVATEGGGEGDAKPEGGEEKTEEQTAS

SEQ ID NO: 13308 - protein, 653 aa, Ciona intestinalis
MAKRKEVILQETLNTQEAWEVAMNSGKLYVVDAHQKWCGPCTAIVGMLKRIKNELGDDLLRFATAQVDVIDTLEQYRGKCEPNFLFYGGGELVAAVRGCNAPLVQETIQETLKNEHKILSGEMERKVFRDVYSDTPDQEEEEEDEEEEEGGVVSKQITVALIKPDVVQNGQVDEILQKISEAGIEVLADEERMLTVEEARDFYKNKEEEEYFDQLIDYVTSGPCRVLVLTKGESGEGVVTLWRDIIGPFDAAVAKEENPDSLRAIYGTDATSNALHGSSSTEEAVRELGFFFPDFKPPTYRSAKSAASRASGRRSKTPSQKPRLQRTLAIIRPDALQAHKDSILQKIDEAGFKIAMQKEMVLTREQAESFYSEHKDTDYFEPLVKQMTCGPVLALCLAHDDAVDHWRSMLGPKVVADAVEEQPDSLRAQFRVEEAEVNMLHGSDSAEAAEEELSKIFHVEQTLAVIKPDAIDEKEQIMGKLKEAGFMISCQKDMNLSKEIASEIYKSKEGSEYYDHLIDHMTSGPTLMMVLSAENAVEKLRDIMGPTDPEVAKESHPESLRAMFAKSILENAIHSPSTNESAQEKIRIVFGDAQFDWDVNDMQAEEGEVNETSGEQPTDEQSGETEKTEEDGEHEGAQSDQQQAVSEAMEKEE

SEQ ID NO: 13309 - protein, 118 aa, Branchiostoma lanceolatum
GVQRGLVGEVIKRFEQKGFKLVAMKFTQASEEHMKTHYKDLEKLKFYPTLCKYMSSNPVVPMVWEGLGAVKTGRVMLGETDPAKSLPGTIRGDLSVHIGRNLVHGSDSVESAKKEIAL

SEQ ID NO: 13310 - protein, 118 aa, Petromyzon marinus
GVQRRLMGDIVKRFEGKGLKLVAMKFLKPPVALLQQHYIDLKDKAFYSSLVQFMNSGPVLAMVWEGNGVVRTCRRMLGETDPADSAPGTIRGDFCIDIGRNVIHGSDSEESAQKEISL

SEQ ID NO: 13311 - protein, 116 aa, Myxine glutinosa
QRGLVGETVRRFEQKGFKLVAMKMVQASTAHLEEHYKDLKEKPFYSGLCTYMASGPVVAMVWEGSGVVAMGRMLLGETKPQDSLPGTLRGDFCITVGRNIVHGSDSVESAKREIAL

SEQ ID NO: 13312 - protein, 151 aa, Ginglymostoma cirratum
GNKERTFIAVKPDGVQRCIVGEVIKRFEQKGFKLVAMKFLQAPKDLLEKHYCELSDKPFYPKLIKYMSSGPVVAMVWEGLNVVKTGRVMLGETNPADSKPGTIRGDFCIQVGRNIIHGSDSVESAKKEISLWFKREELVEYQNCAQDWIYE

SEQ ID NO: 13313 - protein, 140 aa, Rickettsia conorii
MTIQYTFSMIKPDAIKRNKIGQVNTYLENAGLKIVAQKMKFLTKYEAACFYDEHRARPFFNSLVEYITSGAVVLQVLKGEDAITLNRTVMGATNPAEAEAGTIRKDLGESIEANSIHGSDSENSAKREIEFFFNKSEIIE

SEQ ID NO: 13314 - protein, 140 aa, Rickettsia prowazekii
MTIQYTFSMIKPDVIKRNKIGQVNTYLENAGLKIVAQKMKFLTKYEAECFYDEHRARSFFNSLVEYITSGAVVLQVLKGEDAITLNRTIMGATNPAEAKEGTIRKDLGESIEANSIHGSDSENSAKREIKFFFSKSEIIE

SEQ ID NO: 13315 - protein, 153 aa, Danio rerio
MSAKTERTFIAAKPDGVQRGLMGEIIKRFEQKGFRLVAMKFLQASEDLLKQHYIDLKDRPFYPGLVKYMSSGPVLAMVWEGLNVVKTGRVMLGETNPADSKPGTIRGDFCIEVGRNIIHGSDSVDSANTEISLWFKPEELVSFKSCAQQWIYE

SEQ ID NO: 13316 - protein, 153 aa, Danio rerio
MSAKTERTFIAVKPDGVQRGLMGEIIKRFEQKGFRLVAMKFLQASEDLLKQHYIDLKDRPFYPGLVKYMSSGPVLAIVWEGLNVVKTGRVMLGETNPADSKPGTIRGDFCIEVGRNIIHGSDSVDSANTEISLWFKPEELVSFKHCAQQWIYE

SEQ ID NO: 13317 - protein, 169 aa, Danio rerio
MIILCLTIFANIFKPGWTGANERTFLAVKPDGVQRRLVGEIIRRFERKGFKLVGMKLLQASEAQLRQHYWELREKPFYNGLVKYMSSGPIVAMVWQGLDVVKTARKMLGETNPADSLPGTIRGDYCVEVGRNVIHGSDSVESAAREISLWFEDHELFCYEECGQHWIYA

SEQ ID NO: 13318 - protein, 190 aa, Danio rerio
MAVRFGLRVHAARAVTRNPSRALGIGAARSLSSDSDFSGVNERTLVAVKPDGVQRRLIGEVIKRFEQRGFRLVGLKMLQAPDKLLAQHYVSLQKKPFYSSLLYYMTSGPIVAMVWEGHNVVKTSRMMVGDTDPAAAAPGTIRGDFSVHISRNVVHASDSVEGAQREISLWFHRSELVDWEGCDHKNIYHL

SEQ ID NO: 13319 - protein, 148 aa, Danio rerio
MAGKTEPTFIAVKPDGVQRGLMGEIIKRFEQKGFRLVAAKFVQASEDLAKQHYIDLKDQPFYAGLVKYTSSGPLLAMVWEGLNVIKTGRVMLGETDPFASKPGTIRGDFCIEVGRNLTHGSDSVKSAPPEVSLWFNPENLVSYGSWPR

SEQ ID NO: 13320 - protein, 153 aa, Ictalurus punctatus
MAAKAERTFIAIKPDGVQRGLIGDIIKRFEQKGFRLVALKFLQASEDLLKQHYIDLKDRPFYPGLVKYMSSGPVVAMVWEGLNVVKTGRVMLGETNPADSKPGTIRGDFCIEVGRNIIHGSDSVESANKEISLWFKPEELVSFKSCAFNWIYE

SEQ ID NO: 13321 - protein, 151 aa, Oncorhynchus mykiss
MSNEERTFIAIKPDGVQRRLVGDIIKRFELKGFKLVGMKFIQAPESLLKKHYADLKDRPFFPGLVSYMASGPVVAMVWEGLNVVKTGRVMLGETNPADSKPGTIRGDYCIQVGRNIIHGSDSVESANKEINLWFKPEELCSYTSCSSSWLY

SEQ ID NO: 13322 - protein, 151 aa, Salmo salar
MSNEERTFIAIKPDGVQRRLVGDIIKRFELKGFKMVGMKFIKAPESLLKEHYADLKDRPFFPGLVSYMTSGPVVAMVWEGFNVVKTGRVMLGETNPADSKPGTIRGDFCIQVGRNIIHGSDSVESANTEINLWFKPEELCSYTSCSSQWLY

SEQ ID NO: 13323 - protein, 152 aa, Oreochromis mossambicus
MAELKERTFIAIKPDGVQRGIIGEVIKRFEMKGFKLVGMKMLHASEDLLMEHYVDLKDRPFFPTLINYMRSGPVVAMVWEDKGVVKTGRVMLGETNPADSKPGTIRGDFCIDVSKNIIHGSDSVESANKEISLWFKDDELVNYSSCAFSWLY

SEQ ID NO: 13324 - protein, 141 aa, Chlamydia trachomatis
MEQTLSIIKPDSVGKAHIGEIIAIFEKSGLRIAAMKMVHLSVKEAEGFYVVHKERPFFQELVDFMISGPVVVMVLQGENAVDRNRELMGATNPKEAAEGSIRALFGESIGVNAVHGSDSLENAAIEVSYFFAKTEIVNSVA

SEQ ID NO: 13325 - protein, 149 aa, Gillichthys mirabilis
MERTFIAVKPDGVQRGLCGDIIHRFEKRGFQLVAAKFIQATEDFMKQHYLDLKDMPFYGGLCKYMSSGPVFAMVWEGENIVKLGRMMLGETNPADSKPGSIRGDLCINIGRNIIHGSDTLENAKREVALWFKPEEFVTYTSCFKPFLYE

SEQ ID NO: 13326 - protein, 136 aa, Mycobacterium tuberculosis H37Rv
MTERTLVLIKPDGIERQLIGEIISRIERKGLTIAALQLRTVSAELASQHYAEHEGKPFFGSLLEFITSGPVVAAIVEGTRAIAAVRQLAGGTDPVQAAAPGTIRGDFALETQFNLVHGSDSAESAQREIALWFPGA

SEQ ID NO: 13327 - protein, 154 aa, Xenopus laevis
MAANKERTFIAIKPDGVQRGLMGDIIKRFEQKGFRLVAMKFLQASQDLLRQHYIDLKDRPFYPGLVEYMNSGPVLAMVWEGLNVVKTGRVMLGETNPADSKPGTIRGDLCIQVGRNIIHGSDSVDSANKEIALWFKDEELVEYKSCAYEWVYEN

SEQ ID NO: 13328 - protein, 154 aa, Xenopus laevis
MAANKERTFIAIKPDGVQRGLIGDIIKRFEQKGFRLVAMKFQQASQDLLRQHYIDLKDRPFYPGLVEYMSSGPVLAMVWEGLNVVKTGRVMLGETNPADSKPGTIRGDFCIQVGRNIIHGSDSVESANKEIALWFKDEELVENKSCAYEWVYEN

SEQ ID NO: 13329 - protein, 154 aa, Xenopus laevis
MAANKERTFIAIKPDGVQRGLMGDIIKRFEQKGFRLVAMKFQQASQDLLRQHYIDLKDRPFYPGLVEYMSSGPVLAMVWEGLNVVKTGRVMLGETNPADSKPGTIRGDFCIQVGRNIIHGSDSVESANKEIALWFKDEELVENKSCAYEWVYEN

SEQ ID NO: 13330 - protein, 141 aa, Chlamydia muridarum
MEQTLSIIKPDSVGKAHIGEIVSIFEKAGLRIAAMKMVHLSVKEAEGFYAVHKERPFFQELVDFMISGPVVVMVLQGENAVARNRELMGATNPKEAAEGSIRALFGESIGVNAVHGSDSLENAAIEVSYFFAKTEIVNALA

SEQ ID NO: 13331 - protein, 137 aa, Helicobacter pylori 26695
MKQRTLSIIKPDALKKKVVGKIIDRFESNGLEVVAMKRLHLSVKDAENFYAIHRERPFFKDLIEFMVSGPVVVMVLEGKDAVAKNRDLMGATDPKLAQKGTIRADFAESIDANAVHGSDSLENAHNEIAFFFAARDL

SEQ ID NO: 13332 - protein, 137 aa, Helicobacter pylori J99
MKQRTLSIIKPDALKKKVVGKIIDRFESNGLEVVAMKRLHLSVKDAENFYAIHRERPFFKDLIEFMVSGPVVVMVLEGKDAVAKNRELMGATDPKLAQKGTIRADFAESIDANAVHGSDSLENAHNEIAFFFAAREF

SEQ ID NO: 13333 - protein, 147 aa, Bacillus halodurans
MERTYLMIKPDGVQRNLIGEIVSRFEKKGFTLIGAKLMTVTKEQAETHYAEHKERPFFGELVDFITSGPVFAMVWEGENVIATARKMMGATNPADAEPGTIRGDFGVQVAMNVIHGSDSPESAKREIDIFFDSSELNEYDKVVNRWV

SEQ ID NO: 13334 - protein, 153 aa, Columba livia
MAANCERTFIAIKPDGVQRGLVGEIIKRFEQKGFRLVGMKFVHASEELLKQHYIDLKDRPFYPGLVKYMNSGPIVAMVWEGLNVVKTGRVMLGETNPADSKPGTIRGDFCIQVGRNIIHGSDSVESAQKEINLWFKPAELIDFKSCAHDWIYE

SEQ ID NO: 13335 - protein, 181 aa, Columba livia
MFRGGTHRLRGQPGLSLPHGPRCYGSAPPELQEKTLVLVKPDAVQRRLVGNVIQRFERRGFKLVAMKLLQADQGLLDKHYQQLRQKPFYPALLAYMTSGPLVAMVWEGYNVVRSTRAMVGDTDSAVAAAGTIRGDFSMHVSRNVVHASDSVETAQREIGFWFQRNELVAWESGDRDYTWGP

SEQ ID NO: 13336 - protein, 153 aa, Gallus gallus
MAANCERTFIAIKPDGVQRGLVGEIIKRFEQKGFRLVAMKFVHASEDLLKQHYIDLKDRPFYPGLVKYMNSGPVVAMVWEGLNVVKTGRVMLGETNPADSKPGTIRGDFCIQVGRNIIHGSDSVESAQKEISLWFKPAELIDYRSCAHDWVYE

SEQ ID NO: 13337 - protein, 157 aa, Gallus gallus
GSAPPELREQTLVLVKPDAVQRRLVGDVIGRFERRGFKLVAMKLLQADRGLLDRHYQHLQQKSFYPALLAYMTSGPLVAMVWEGYNVVRSTRAMVGDTDSAQAAAGTIRGDLSMHVSRNVVHASDSVETALREIGFWFQRDELVAWESGDSQYTYGP

SEQ ID NO: 13338 - protein, 143 aa, Salmonella enterica subsp. enterica serovar Typhi
MAIERTFSIIKPNAVAKNVIGSIFARFEAAGFKIVGTKMLHLTVEQARGFYAEHDGKPFFDGLVEFMTSGPIVVSVLESENAVQRHRDLLGATNPANALAGTLRADYADSLTENGTHGSDSLESAQREIAFFFGEGEVCPRTR

SEQ ID NO: 13339 - protein, 145 aa, Nitrosomonas europaea
MRYLMAVERTLSIIKPDAVAKNVIGQIYARFEAAGLKVVAARMAHLSRVEAENFYAIHRERPFFKDLVEFMISGPVMIQVLEGENAIARNRELMGATDPRKAEKGTIRADFAESIDANAVHGSDAPETAVVEIACFFPSLEIHSR

SEQ ID NO: 13340 - protein, 180 aa, Homo sapiens
CCEPRGSRARFGCWRLQPEFKPKQLEGTMANCERTFIAIKPDGVQRGLVGEIIKRFEQKGFRLVGLKFMQASEDLLKEHYVDLKDRPFFAGLVKYMHSGPVVAMVWEGLNVVKTGRVMLGETNPADSKPGTIRGDFCIQVGRNIIHGSDSVESAEKEIGLWFHPEELVDYTSCAQNWIYE

SEQ ID NO: 13341 - protein, 152 aa, Homo sapiens
MANCERTFIAIKPDGVQRGLVGEIIKRFEQKGFRLVGLKFMQASEDLLKEHYVDLKDRPFFAGLVKYMHSGPVVAMVWEGLNVVKTGRVMLGETNPADSKPGTIRGDFCIQVGRNIIHGSDSVESAEKEIGLWFHPEELVDYTSCAQNWIYE

SEQ ID NO: 13342 - protein, 177 aa, Homo sapiens
MVLLSTLGIVFQGEGPPISSCDTGTMANCERTFIAIKPDGVQRGLVGEIIKRFEQKGFRLVGLKFMQASEDLLKEHYVDLKDRPFFAGLVKYMHSGPVVAMVWEGLNVVKTGRVMLGETNPADSKPGTIRGDFCIQVGRNIIHGSDSVESAEKEIGLWFHPEELVDYTSCAQNWIYE

SEQ ID NO: 13343 - protein, 153 aa, Homo sapiens
CTGAHERTFLAVKPDGVQRRLVGEIVRRFERKGFKLVALKLVQASEELLREHYAELRERPFYGRLVKYMASGPVVAMVWQGLDVVRTSRALIGATNPADAPPGTIRGDFCIEVGKNLIHGSDSVESARREIALWFRADELLCWEDSAGHWLYE

SEQ ID NO: 13344 - protein, 169 aa, Homo sapiens
MICLVLTIFANLFPAACTGAHERTFLAVKPDGVQRRLVGEIVRRFERKGFKLVALKLVQASEELLREHYAELRERPFYGRLVKYMASGPVVAMVWQGLDVVRTSRALIGATNPADAPPGTIRGDFCIEVGKNLIHGSDSVESARREIALWFRADELLCWEDSAGHWLYE

SEQ ID NO: 13345 - protein, 152 aa, Homo sapiens
MANLERTFIAIKPDGVQRGLVGEIIKRFEQKGFRLVAMKFLRASEEHLKQHYIDLKDRPFFPGLVKYMNSGPVVAMVWEGLNVVKTGRVMLGETNPADSKPGTIRGDFCIQVGRNIIHGSDSVKSAEKEISLWFKPEELVDYKSCAHDWVYE

SEQ ID NO: 13346 - protein, 151 aa, Homo sapiens
ANLERTFIAIKPDGVQRGLVGEIIKRFEQKGFRLVAMKFLRASEEHLKQHYIDLKDRPFFPGLVKYMNSGPVVAMVWEGLNVVKTGRVMLGETNPADSKPGTIRGDFCIQVGRNIIHGSDSVKSAEKEISLWFKPEELVDYKSCAHDWVYE

SEQ ID NO: 13347 - protein, 168 aa, Homo sapiens
MICLVLTIFANLFPAACTGAHERTFLAVKPDGVQRRLVGEIVRRFERKGFKLVALKLVQSSEELLREHYAELRERPFYGRLVKYMASGPVVAMVWQGLDVVRTSRALIGATNPADAPPGTIRGDFCIEVGNLIHGSDSVESARREIALWFRADELLCWEDSAGHWLYE

SEQ ID NO: 13348 - protein, 162 aa, Homo sapiens
MGSSHHHHHHSSGLVPRGSHMGTRERTLVAVKPDGVQRRLVGDVIQRFERRGFTLVGMKMLQAPESVLAEHYQDLRRKPFYPALIRYMSSGPVVAMVWEGYNVVRASRAMIGHTDSAEAAPGTIRGDFSVHISRNVIHASDSVEGAQREIQLWFQSSELVSW

SEQ ID NO: 13349 - protein, 187 aa, Homo sapiens
MGGLFWRSALRGLRCGPRAPGPSLLVRHGSGGPSWTRERTLVAVKPDGVQRRLVGDVIQRFERRGFTLVGMKMLQAPESVLAEHYQDLRRKPFYPALIRYMSSGPVVAMVWEGYNVVRASRAMIGHTDSAEAAPGTIRGDFSVHISRNVIHASDSVEGAQREIQLWFQSSELVSWADGGQHSSIHPA

SEQ ID NO: 13350 - protein, 152 aa, Homo sapiens
MANLERTFITIRPDSMQCGLVGKIIKRFEQKGFRLVAMKFLPASEEHLKQHYIDLKDRPFFPGLVKYMNSGPVVAMVWEGLNVVKTGRVMLGETNPADSKPGTIRGDFCIQVGRNIIHGSDSVKSAEKEISLRFKPEELVDYKSCAHDWVYE

SEQ ID NO: 13351 - protein, 137 aa, Homo sapiens
MQCGLVGKIIKRFEQKGFRLVAMKFLPASEEHLKQHYIDLKDRPFFPGLVKYMNSGPVVAMVWEGLNVVKTGRVMLGETNPADSKPGTIRGDFCIQVGRNIIHGSDSVKSAEKEISLRFKPEELVDYKSCAHDWVYE

SEQ ID NO: 13352 - protein, 102 aa, Ferroplasma acidarmanus
MKVSDDKARQHYSVHSMKPFFEGLVSYLTSGPIVALILEGDNAIISCRNLAGATDGSAAAAGTIRGDFSLNIEENIVHASDSPESFNHEYKIFFNENEIMDY

SEQ ID NO: 13353 - protein, 152 aa, Bos taurus
MANSERTFIAIKPDGVQRGLMGEIIKRFEQKGFRLVAMKFMRASEDLLKEHYIDLKDRPFFAGLVKYMHSGPVVAMVWEGLNVVKTGRVMLGETNPADSKPGTIRGDFCIQVGRNIIHGSDSVESAEKEIALWFRPEELVNYKSCAQNWIYE

SEQ ID NO: 13354 - protein, 151 aa, Bos taurus
ANSERTFIAIKPDGVQRGLMGEIIKRFEQKGFRLVAMKFMRASEDLLKEHYIDLKDRPFFAGLVKYMHSGPVVAMVWEGLNVVKTGRVMLGETNPADSKPGTIRGDFCIQVGRNIIHGSDSVESAEKEIALWFRPEELVNYKSCAQNWIYE

SEQ ID NO: 13355 - protein, 152 aa, Bos taurus
MANSERTFIAIKPDGVQRGLIGEIIKRFEQKGFRLVAMKFMRASEDLLKEHYIDLKDRPFFAGLVKYMHSGPVVAMVWEGLNVVKTGRVMLGETNPADSKPGTIRGDFCIQVGRNIIHGSDSVESAEKEIALWFHPEELVNYKSCAQNWIYE

SEQ ID NO: 13356 - protein, 151 aa, Synechococcus sp. PCC 7942
MSVERTFIAIKPDGVQRGLVGTIIGRFEQKGFKLVGLKQLKPSRELAEQHYAVHRERPFFNGLVEFITSGPIVAIVLEGEGVVAAARKLIGATNPLTAEPGTIRGDFGVNIGRNIIHGSDAIETAQQEIALWFSPAELSDWTPTIQPWLYE

SEQ ID NO: 13357 - protein, 235 aa, Spinacia oleracea
MRSQIYRSATKAARSFLSSSKNASSRFLPEGRTVAATAAVSLRVKAPYLASFGGANASGTWMSTALAIPAAAYLLQDQEACAAEFERTFIAIKPDGVQRGLISEIVARFERKGFKLVAIKVVIPSKDFAQKHYHDLSERPFFNGLCDFLSSGPVVAMVWEGEGVIKYGRKLIGATDPQKSEPGTIRGDLAVVVGRNIIHGSDGPETAKDEIKLWFKPEELVNYTHNAEKWIYGDN

SEQ ID NO: 13358 - protein, 153 aa, Spinacia oleracea
AEFERTFIAIKPDGVQRGLISEIVARFERKGFSLVAIKVVIPSRPFAQKHYADLKDKPFYVGLVAYWSSGPVVAMVWEGEGVIKYGRKLIGATDPQKSEPGTIRGDLAVVNGRNIIHGSDGPETAKDEIKLWFKPEELVNYTHNAEKWIYGDN

SEQ ID NO: 13359 - protein, 237 aa, Arabidopsis thaliana
MSSQICRSASRAARSLLSSAKNARFFSEGRAIGAATVVHATGKVPQYASNFGKSGSGFVSNSWITRLLALPAAAFMLQDQEALAAEMERTFIAIKPDGVQRGLISEIITRFERKGYKLVGIKVMVPSKGFAQKHYHDLKERPFFNGLCNFLSSGPVVAMVWEGEGVIRYGRKLIGATDPQKSEPGTIRGDLAVVVGRNIIHGSDGPETAKDEISLWFKPEELVSYTSNAEKWIYGQN

SEQ ID NO: 13360 - protein, 237 aa, Arabidopsis thaliana
MSSQICRSASRAARSLLSSAKNARFFSEGRAIGAASVVHATGKVPQYASNFGKSGSGFVSNSWITGLLALPAAAFMLQDQEALAAEMERTFIAIKPDGVQRGLISEIITRFERKGYKLVGIKVMVPSKGFAQKHYHDLKERPFFNGLCNFLSSGPVVAMVWEGEGVIRYGRKLIGATDPQKSEPGTIRGDLAVVVGRNIIHGSDGPETAKDEISLWFKPEELVSYTSNAEKWIYGQN

SEQ ID NO: 13361 - protein, 238 aa, Arabidopsis thaliana
MSSQICRSASKAAKSLLSSAKNARFFSEGRAIGAAAAVSASGKIPLYASNFARSSGSGVASKSWITGLLALPAAAYMIQDQEVLAAEMERTFIAIKPDGVQRGLISEIISRFERKGFKLVGIKVIVPSKDFAQKHYHDLKERPFFNGLCDFLSSGPVIAMVWEGDGVIRYGRKLIGATDPQKSEPGTIRGDLAVTVGRNIIHGSDGPETAKDEISLWFKPQELVSYTSNSEKWLYGDN

SEQ ID NO: 13362 - protein, 235 aa, Brassica rapa
MSSQICRSASKAARSLLSSAKNARFFSEGRAIGAAAAVTASGKMPLYASNFARSSGSSKSWITGLLALPAAAFMVQDQKVFAAEMERTFIAIKPDGVQRGLISEIISRFERKGFKLVGIKVVVPSKDFAQKHYHDLKERPFFNGLCDFLSSGPVIAMVWEGEGVIRYGRKLIGATDPQKFEPGTIRGDLAVVVGRNIIHGSDGPETAKDEINLWFKPQELVSYTNNAEKWIYGDN

SEQ ID NO: 13363 - protein, 194 aa, Brassica rapa
KIPLYASNFARSSSGSSKSWITGLLALPAAAYMVQEQEVLAAEMERTFIAIKPDGVQRGLISEIVARFERKGFKLVGIKVVVPSKDFAQKHYHDLKERPFFNGLCDFLSSGPVIAMVWEGEGVIRYGRKLIGATDPQKSEPGTIRGDLAVVVGRNIIHGSDGPETAKDEINLWFKPQELVSYTNNAEKWIYGDN

SEQ ID NO: 13364 - protein, 237 aa, Glycine max
  unsure (1)..(237): unsure at all Xaa locations
MASQVCKSASRAARSLLSSRFHSQGRALGAAAAVSLSSKVPLFXYGKNGSGNGSASSSSSSSWISGALALPAAAYMFQDQEVQAAELERTFIAIKPDGVQRGLISEIISRFERKGYKLVGIKVVIPKKEFAQRHYHDLKERPFFDGLCDFLSSGPVIAMVWEGQGVISYGRKLIGATDPQKSEPGTIRGDLAVVVGRNIIHGSDGPETAKDEIKLWFKPEELVSFTSNAEKWIYGAN

SEQ ID NO: 13365 - protein, 200 aa, Glycine max
  unsure (1)..(200): unsure at all Xaa locations
XXFSVSVLPPPYRLCLSAIHSRKWRSGGLLKSTTARNMAGSSSSSTSLTRTXALVDAPDMVQRGLISEIISRFERKGYKLVGIKVVIPKKEFAQRHYHDLKERPFFDGLCDFLSSGPVIAMVWEGQGVISNGXQKLIGAPGSQFSGPGTIRGDLAVVVGRNIIHGSDGPETAKDEIKLWFKPEELVSFTSNAEKWVYGVN

SEQ ID NO: 13366 - protein, 233 aa, Pisum sativum
MASHLCKSASRAARSLLSASFHSQGRAVAAAAAVASIRKVPVFAPNYRRTGSGNGPSSWIAGALALPAAAYMLQDQEVHAAELERTFIAIKPDGVQRGLISEIISRFERKGFKLVGIKVLIPTKQFAQQHYHDLKERPFFNGLCDFLSSGPVIAMVWEGEGVITYGRKLIGATDPQKSAPGTIRGDLAVVVGRNIIHGSDGPETAKDEIKLWFKPEELVSFTSNSEKWIYGDN

SEQ ID NO: 13367 - protein, 148 aa, Capsicum annuum
MEQTFIMIKPDGVQRGLVGEIIGRFEKKGFSLKGLKLITVDRAFAEKHYADLSAKPFFNGLVEYIVSGPVVSMVWEGKGVLTTGRKIIGATNPLESAPGTIRGDYAIDIGRNVIHGSDAVESARKEIALWFPEGVAEWQSSLHCWIYE

SEQ ID NO: 13368 - protein, 148 aa, Helianthus annuus
MEQTFIMIKPDGVQRGLVGEIIGRFEKKGFTLKGLKLLTVDQAFAEKHYADLSAKPFFNGLVEYIISGPVVAMVWEGKNVVTTGRKIIGATNPAESPPGTIRGDFAIDIGRNVIHGSDAVESAKKEIGLWFPEGVANWSSSLHPWIYE

SEQ ID NO: 13369 - protein, 271 aa, Oryza sativa
YKTGGLVGWGYNPIQSNQITSIDAATQQQQRNPSQATMSKLCQSACKAAKSLLSATAAASFLAEGRNAALATLTNLGRKTLPTAYAYSYHHNSSAAAAGWLAAIPAAVYMLQDQEAHAAEMERTFIAIKPDGVQRGLISEILSRFERKGFKLVAIKLVVPSKEFAQKHYHDLKDRPFFNGLCDFLSSGPVLAMVWEGEGVIKYGRKLIGATDPQKSEPGTIRGDLAVVVGRNIIHGSDGPETAKAEIGLWFEPRELVSYTSNEEKWIYGVN

SEQ ID NO: 13370 - protein, 152 aa, Prochlorococcus marinus subsp. pastoris str. CCMP1378
MIKERTFLAIKPDGVQRGYVSDIIGRFEKKGFKLVGLKQLIPTKQLAQDHYGVHRERPFFKDLVEFISSGPVVAMIWEGEGVILSARKLIGATKPLEAEPGTIRGDLAIDIGRNIIHGSDGEETAKFEINLWFNQDEICDWETSDSEWRAEN

SEQ ID NO: 13371 - protein, 50 aa, Ceratitis capitata
TIRGDFCIQVGRNIIHGSDAVESANKEIALWFNEKELVSWQPAAESWVYG

SEQ ID NO: 13372 - protein, 152 aa, Prochlorococcus marinus str. MIT 9313
MAMERTFVAIKPDGVQRGLVGEILGRFERKGFKLVGLKQVTPSRDLAGEHYGVHRERPFFAGLVDFITSGPVIAMVWEGDGVIASARKLIGATKPLDAEPGTIRGDLAVNIGRNVIHGSDGPDTAQFEINLWFSAEELNAWTPSDQSWRIES

SEQ ID NO: 13373 - protein, 166 aa, SYNECHOCOCCUS SP. WH 8102
MASTDDGGAFHSYQSMAERTFIAIKPDGVQRGLVGEILGRFERKGFKLVGLKQITPSRALAEQHYGVHKERPFFAGLVDFITSGPVVAMVWEGDGVIASARKLIGATKPLEAEPGTIRGDLAVNIGRNVIHGSDAPETAEFEIGLWFDAAELNDWTPSDQTWRVEA

SEQ ID NO: 13374 - protein, 133 aa, Rattus norvegicus
MANLERTFIAIKPDGVQRSLFLRASGEHLKQHYIDLKDRPFFLGLVKYMNSGPVVAMVWEGLNVVKTGRVMLGETNPADLKPGTIHGDFCIQVVRNIIPGSDSVESAEKEIGLWFKPEELIDYKSCAHDRVYQ

SEQ ID NO: 13375 - protein, 148 aa, Spinacia oleracea
MEQTFIMIKPDGVQRGLVGEIISRFEKKGFSLKALKFVNVDRPFAEKHYADLSAKPFFNGLVEYIVSGPVVAMVWEGKGVVATGRKLIGATNPLASEPGTIRGDFAIDIGRNVIHGSDAVDSATKEIALWFPDGVVHWQSSLHSWIYE

SEQ ID NO: 13376 - protein, 169 aa, Arabidopsis thaliana
MCGLYINLFCLLRITSNKKTMEQTFIMIKPDGVQRGLIGEVICRFEKKGFTLKGLKLISVERSFAEKHYEDLSSKSFFSGLVDYIVSGPVVAMIWEGKNVVLTGRKIIGATNPAASEPGTIRGDFAIDIGRNVIHGSDSVESARKEIALWFPDGPVNWQSSVHPWVYET

SEQ ID NO: 13377 - protein, 149 aa, Arabidopsis thaliana
MEQTFIMIKPDGVQRGLIGEVICRFEKKGFTLKGLKLISVERSFAEKHYEDLSSKSFFSGLVDYIVSGPVVAMIWEGKNVVLTGRKIIGATNPAASEPGTIRGDFAIDIGRNVIHGSDSVESARKEIALWFPDGPVNWQSSVHPWVYET

SEQ ID NO: 13378 - protein, 147 aa, Arabidopsis thaliana
QTFIMIKPDGVQRGLIGEVICRFEKKGFTLKGLKLISVERSFAEKHYEDLSSKSFFSGLVDYIVSGPVVAMIWEGKNVVLTGRKIIGATNPAASEPGTIRGDFAIDIGRNVIHGSDSVESARKEIALWFPDGPVNWQSSVHPWVYET

SEQ ID NO: 13379 - protein, 143 aa, Arabidopsis thaliana
MIKPDGVQRGLIGEVICRFEKKGFTLKGLKLISVERSFAEKHYEDLSSKSFFSGLVDYIVSGPVVAMIWEGKNVVLTGRKIIGATNPAASEPGTIRGDFAIDIGRNVIHGSDSVESARKEIALWFPDGPVNWQSSVHPWVYET

SEQ ID NO: 13380 - protein, 148 aa, Arabidopsis thaliana
MEQTFIMIKPDGVQRGLVSVKSSAGLRRRVSLCLKLISVERSFAEKHYEDLSSKSFFSGLVDYIVSGPVVAMIWEGKNVVLTGRKIIGATNPAASEPGTIRGDFAIDIGRNVIHGSDSVESARKEIALWFPDGPVNWQSSVHPWVYET

SEQ ID NO: 13381 - protein, 148 aa, Brassica rapa
MEQTFIMIKPDGVQRGLVGEIICRFEKKGFTLKGLKLITVDRPFAEKHYQDLSAKPFFSSLVDYIISGPVVAMIWEGKNVVLTGRKIIGATNPAASEPGTIRGDYAIDIGRNVIHGSDSVESANKEAALWFPDGPVNWQSSLHSWIYE

SEQ ID NO: 13382 - protein, 140 aa, Glycine max
  unsure (1)..(140): unsure at all Xaa locations
MESTFIMIKPDGVQRGLIGEIISRFEKKGFYLKALKLVNVERSFAEKHYADLASKPFFQGLVDYIISGPVVAMVWEGKSVVTTGRKIXGATNPLASEPGTIRGDFAVDIGRNVIHGSDSXESANKEIALWFPEGPADWQS

SEQ ID NO: 13383 - protein, 149 aa, Pisum sativum
MAEQTFIMIKPDGVQRGLVGEIISRFEKKGFYLKGLKFVNVERAFAEKHYADLSAKPFFSGLVDYIISGPVVAMIWEGKNVVTTGRKIIGATNPAQSEPGTIRGDFAIDIGRNVIHGSDAVESANKEIALWFPEGAANWQSSLHSWIYE

SEQ ID NO: 13384 - protein, 149 aa, Pisum sativum
MAEQTFIMIKPDGVQRGLVGEIISRFEKKGFYLKGLKFVNVERAFAEKHYADLSAKPFFSGLVDYIISGPVVAMIWEGKNVVTTGRKIIGATNPAQSEPGTIRGDFAIDIGRNVIHGSDAVESANKEIALWFPEGAANWESSLHSWIYE

SEQ ID NO: 13385 - protein, 148 aa, Flaveria bidentis
MEHTFIMIKPDGVQRGLVGEIIGRFEKKGFSLKGLKLLTVDQAFAEKHYADLSAKPFFNGLVEYIISGPVVAMVWEGKNVVTTGRKIIGATNPAESAPGTIRGDFAIDIGRNVIHGSDAVESAKKEIALWFPEGVANWSSSLHPWIYE

SEQ ID NO: 13386 - protein, 148 aa, Flaveria bidentis
MEQTFIMIKPDGVQSGLVGEIIGRFEKKGFSLKGLKLLTVDRAFAEKHYADLSSKPFFNGLVEYIVSGPVVAMVWEGKNVVTTGREIIGATNPAESAPGTIRGDFAIDIGRNVIHGSDAVESARKVIGLWFPEGVANWSSSLHPWIYE

SEQ ID NO: 13387 - protein, 157 aa, Oryza sativa
  unsure (1)..(157): unsure at all Xaa locations
MALEQTFIMIKPDGVQRGLIGXEVIGRFEKKGFYLKAMKLINVEKSFAEKXHYXADLSSKPFFGGLVEYIVSGPXVVAMVWEGKQVVSTGRKLVGATNPLAAEPGXPSRGDFAXVDIGRNVIHGSDSVENARKEIALWFPEGIAEWRSNQHPWIYEV

SEQ ID NO: 13388 - protein, 149 aa, Oryza sativa
MEQSFIMIKPDGVQRGLIGDIISRFEKKGFYLRGMKFMNVERSFAQQHYADLSDKPFFPGLVEYIISGPVVAMVWEGKDVVATGRRIIGATRPWEAAPGTIRADYAVEVGRNVIHGSDSVDNGKKEIALWFPEGLAEWRSNLHPWIYES

SEQ ID NO: 13389 - protein, 149 aa, Oryza sativa; identical to SEQ ID NO: 13388

SEQ ID NO: 13390 - protein, 115 aa, Rattus norvegicus
MKFLPASEDHRKQHYFELKDCPFFLGLVKYMNSGPVVAMVWEGLNVVKTGRVMMGETNPAESKPGAISGDFCIQVGRNIVPGSDSAESAEKEIGLWFKPEELIDYKSCAHNWVYE

SEQ ID NO: 13391 - protein, 157 aa, Oryza sativa
  unsure (1)..(157): unsure at all Xaa locations
ISILRFILKNKYKCFLFWNGGNIRVRDDGAYELLFELQXXPGMKFMNVERSFAQQHYADLSDKPFFPGLVEYIISGPVVAMVWEGKGCVATGRRIIGATRPWEAAPGTIRADYAVEVGRNVIHGSDSVDNGKKEIALWFPEGLAEWRSNLHPWIYES

SEQ ID NO: 13392 - protein, 152 aa, Triticum aestivum
  unsure (1)..(152): unsure at all Xaa locations
MAEQTFIMIKPDGVQRGLIGDIISRFEKKGFYLKGMKFMNVERSFAQQHYADLSDKPFFXXGLVEYIISGPVVAWCXEGEGXVVLTGRRIIGATRPWEAAPGTIRGDYAVEVGRNVIHGSDSVENGKKEIALWFPEGVAEWKSNLHPWIYES

SEQ ID NO: 13393 - protein, 149 aa, Triticum aestivum
MEQTFIMIKPDGVQRGLIGDIISRFEKKGYYLKGMKFMNVEKSFAQQHYADLSAQPFFAKLVDYIISGPVVAMVWEGKDVVLTGPGIIGATRPWEAAPGTIRGDHAVEVSRNVIHGSDSGENGKKEIALWFPGGLAEWKSNLHPWIYEN

SEQ ID NO: 13394 - protein, 211 aa, Mus musculus
MVVSMPLPQIYVEKTLALIKPDVVDKEEEIQDIILGSGFTIIQRRKLHLSPEHCSNFYVEQYGKMFFPNLTAYMSSGPLVAMILARHKAISYWKELMGPSNSLVAKETHPDSLRAIYGTDELRNALHGSNDFAASEREIRFMFPAVIIEPIPIGQAAKDYINLYVAPTLLQGLTELCKEKPPDPYLWLADWLMKNNPNKPKLCHFPVTEEP

SEQ ID NO: 13395 - protein, 277 aa, Mus musculus
MRACQQGRSSSLVSPYMAPKNQSERFAFIAEWYDPNASLLRRYELLFYPTDGSVEMHDVKNRRTFLKRTKYEDLRLEDLFIGNKVNVFSRQLVLIDYGDQYTARQLGSRKEKTLALIKPDAVSKAGEIIEMINKSGFTITKLRMMTLTRKEAADFHVDHHSRPFYNELIQFITSGPVIAMEILRDDAICEWKRLLGPANSGLSRTDAPGSIRALFGTDGVRNAAHGPDTFASAAREMELFFPSSGGCGPANTAKFTNCTCCIIKPHAISEDLFIHYM

SEQ ID NO: 13396 - protein, 395 aa, Mus musculus
MRACQQGRSSSLVSPYMAPKNQSERFAFIAEWYDPNASLLRRYELLFYPVDGSVEMHDVKNRRTFLKRTKYEDLRLEDLFIGNKVNVFSRQLVLIDYGDQYTARQLGSRKEKTLALIKPDAVSKAGEIIEMINKSGFTITKLRMMTLTRKEAADFHVDHHSRPFYNELIQFITSGPVIAMEILRDDAICEWKRLLGPANSGLSRTDAPGSIRALFGTDGVRNAAHGPDTFASAAREMELFFPSSGGCGPANTAKFTNCTCCIIKPHAISEGMLGKNLIAIRDACFGMSAIQMFNLDRANVEEFYEVYKGVVSEYNDMVTELCSGPCVAIEIQQSNPTKTFREFCGPADPEIARHLRPETLRAIFGKTKVQNAVHCTDLPEDGLLEVQYFFKILDN

SEQ ID NO: 13397 - protein, 189 aa, Mus musculus
MTSILRSPQALQLTLALIKPDAVAHPLILEAVHQQILSNKFLIVRTRELQWKLEDCRRFYREHEGRFFYQRLVEFMTSGPIRAYILAHKDAIQLWRTLMGPTRVFRARYIAPDSIRGSLGLTDTRNTTHGSDSVVSASREIAAFFPDFSEQRWYEEEEPQLRCGPVHYSPEEGIHCAAETGGHKQPNKT

SEQ ID NO: 13398 - protein, 189 aa, Mus musculus
MTSILRSPQALQLTLALIKPDAVAHPLILEAVHQQILSNKFLIVRTRELQWKLEDCRRFYREHEGRFFYQRLVEFMTSGPIRAYILAHKDAIQLWRTLMGPTRVFRARYIAPDSIRGSLGLTDTRNTTHGSDSVVSASREIAAFFPDFSEQRWYEEEEPQLRCGPVHYSPEEGIHCAAGTGGHKQPNKA

SEQ ID NO: 13399 - protein, 395 aa, Mus musculus
MRACQQGRSSSLVSPYMAPKNQSERFAFIAEWYDPNASLLRRYELLFYPTDGSVEMHDVKNRRTFLKRTKYEDLRLEDLFIGNKVNVFSRQLVLIDYGDQYTARQLGSRKEKTLALIKPDAVSKAGEIIEMINKSGFTITKLRMMTLTRKEAADFHVDHHSRPFYNELIQFITSGPVIAMEILRDDAICEWKRLLGPANSGLSRTDAPGSIRALFGTDGVRNAAHSPDTFASAAREMELFFPSSGGCGPANTAKFTNCTCCIIKPHAISEGMLGKILIAIRDACFGMSAIQMFNLDRVNVEEFYEVYKGVVSEYNDMVTELCSGPCVAIEIQQSNPTKTFREFCGPADPEIARHLRPETLRAIFGKTKVQNAVHCTDLPEDGLLEVQYFFKILDN

SEQ ID NO: 13400 - protein, 395 aa, Rattus norvegicus
MKAGQQGRSCGLISPYLAPKNQSERFAFIAEWYDPNASLLRRYELLYYPVDGSVEMHDVKNRRTFLKRTKYEDLRVEDLFIGNKVNVFSRQLVLIDYGDQYTARQLGSRKEKTLALIKPDAVSKAGEIIEMINKSGFTITKLRMMTLSRKEAADFHVDHHSRPFYNELIQFITSGPVIAMEILRDDAICEWKRLLGPANSGIARSEAPGSVRALFGTDGIRNAAHGSDTFESAAREMELFFPSSGGCGPTNTAKFTNCTCCIIKPHAISEGMLGKILIAIRDACFEISAIQMFNMDRANVEEFYEVYKGVLSDYNDMVTELYSGPCVAIEIQQSNPTKTFREFCGPSDPEIARHLRPETLRANFGKTKVQNAVHCTDLPEDGLLEVQYFFKILDN

SEQ ID NO: 13401 - protein, 175 aa, Rattus norvegicus
QLTLALIKPDAVAHPLILEAVHQQILSNKFLIVRMRELLWKPEDCRRFYREHEGRFFYQRLVEFMTSGPIRAYILAHKDAIQLWRTLMGPTRVFRARHIAPDSIRGSLGLTDTRNTTHGSDSVVSASREIAAFFPDFSEQRWYEEEEPQLRCGPVHYSPEEGIHCAAETGGPKPA

SEQ ID NO: 13402 - protein, 142 aa, Aquifex aeolicus VF5
MAVERTLIIVKPDAMEKGALGKILDRFIQEGFQIKALKMFRFTPEKAGEFYYVHRERPFFQELVEFMSSGPVVAAVLEGEDAIKRVREIIGPTDSEEARKVAPNSIRAQFGTDKGKNAIHASDSPESAQYEICFIFSGLEIV

SEQ ID NO: 13403 - protein, 162 aa, Arabidopsis thaliana
MIKPDGVSGNYTEEIKTIVVEAGFNIVKEMLTQLDKETASAFYEEHSSRSFFPHLVTYMTSGPVLVMVLEKRNAVSDWRDLIGPTDAEKAKISHPHSIRALCGKNSQKNCVHGSDSTSSAEREIKFFFKDVVSGLFSSPPILLLKLLPLSSIQVLSVMTYDH

SEQ ID NO: 13404 - protein, 133 aa, Glycine max
  unsure (1)..(133): unsure at all Xaa locations
MVRTLAMIKPDGLSGKYTEAIKEVILDSGFHIVKETEVQLDAERASVFYAEHSQRSFFDSLVKYITSGPVLAMVLERPDAVAQWRTVIGPTDAKKANTSHPNSIRAMCGLDSEKNCVHGSDSPESADREISFX

SEQ ID NO: 13405 - protein, 216 aa, Glycine max
  unsure (1)..(216): unsure at all Xaa locations
AAATYCTSLVLPRVRPSVGFTGILVLLVFLSACCCSSSTHGSLATAKTFAIIKPDGLLGNYTDDITRTIVEYGFSIFPAKIVQLDAGTVKSFYAEHSXSKSFFSSLIKYMPSGPVLIMVLEKDNAIADWRALMGPPDASKAKITLPPSIRAKCGLDMEKNCVHGSDSPKSAQREISFFFKELSAEFLLKLIVVFSKENGRKGISTPSLTCXCGCRA

SEQ ID NO: 13406 - protein, 397 aa, Glycine max
  unsure (1)..(397): unsure at all Xaa locations
RVSYVGPPPKKTVLNXFYEMTTAEDRFVFLVEWYDAAASLVRTYNLTYYPKDKTIEMFDLKNKKLFLKRCEYPGVSLNDLYLGSIVTVYSRQLKIVDYADTFTRKNFETTRERTFGMIKPDCYQHIGKIIDIIEHSGFVIGNIKMARMTLNDAEEFYAEHKGKPFYPELTNFICSDFVVGMELVAEGAIAKWRKLIGPTNCQVARVEAPGSLRALFGTEGVRNACHGSDAPTSAQRELDFFFGDKCKLKPTAFLNNCTCCVIKPHIVSEAKVGKVIDHILSEGFEVSALQMFFIDKATSEEFLEIYKGVLPEFSGIANHLTTGPCIALEVRQENAVESFREICGXPHDPEVARTLXRKNSIRAIYGFDRIKNAVHCTDLSEDGPLEVEYFFTILNHK

SEQ ID NO: 13407 - protein, 232 aa, Nicotiana tabacum
MGCLSVVGASPCVSSSALSSPTSRLSCAPSCKLILNPIKKNHHLAAFQPAVHLFASNQSRSHASKRNHTTRIFLPHLVASMEEVEETYIMIKPDGVQRGLVGEIISRFEKKGFKLTGLKLFHCPKELAEEHYKDLQSKPFFPKLIDYITSGPVVCMAWEGVGVVASARKLIGATNPLNAEPGTIRGDLAVQTGRNVVHGSDSPDNGKREIALWFGEGELCSWTPVQEPWLIE

SEQ ID NO: 13408 - protein, 202 aa, Oryza sativa
  unsure (1)..(202): unsure at all Xaa locations
MLELRXIERERTLAMIKPDGLSGNYTERIKEVILESGFDIVKEAVVQLDAERASLFYAXHSGRSFFDSLVKYMTSGPVLVMILERPDAISHWRVLIGPTDARKAKISNPNSIRAMCGVDSEKNCVHGSDSPQSAAREISFFFGDVRSDTVEHDXAVVLXRIXPVYMRHVVRQIILQFICSHTVPNTWLDDGIWIQWKYLNIR

SEQ ID NO: 13409 - protein, 186 aa, Oryza sativa
MGGATSPAAPCLSVCLLPLLFLFLHGCWSCVAIERERTLAMIKPDGLSGNYTERIKEVILESGFDIVKEAVVQLDAERASLFYAEHSGRSFFDSLVKYMTRYLCRKTCVFCSLLKSSQSQAIVNRFDSEAKISNPNSIRAMCGVDSEKNCVHGSDSPQSAAREISFFFGDVRSDTFLLSALQLKKK

SEQ ID NO: 13410 - protein, 215 aa, Triticum aestivum
  unsure (1)..(215): unsure at all Xaa locations
MAGAASSVAPVLVICLLSLALFLHRCRSCEAVERERTLAMIKPDGLSGNFKEKIKEAILGSGFDIIEEAVVHLDAERASLFYAEHADRSFFNSLVKYMTSGPVCAMVLESPDAISRWRNLIGPTDARKAKTSHPDSIRAMCGLDXEKNCVHGSDXPQXAAREISFFFRDDKXEALEHDELXIIGMYPQKADNFXSLICPFQLLVDENVCTSHMLI

SEQ ID NO: 13411 - protein, 132 aa, Triticum aestivum
  unsure (1)..(132): unsure at all Xaa locations
IRTRQRSFFDSLVKYITSGPVLAMVLERPDAIAQWRALIGPTDARKAKTSHPNSIRAMCGLDSEKNCVHGSDSPESAAREISFFFGEEADSVTVEHDELXTLHWYESSQQTEFWFVFKLLRVLVDEYFRFIS

SEQ ID NO: 13412 - protein, 151 aa, Drosophila melanogaster
MEITLALIKPHVLRNTYAMQQIRALISQNFTILDQKEVCITKELSERFYAEHKGKFFYHRLTSFMNSGPSYALILQSETCIQKWRSLLGPTKVFRAVYSDPNCIRALYGISDTRNACHGSDSEASALREISILFPEFDAAVGSRQAKREEA

SEQ ID NO: 13413 - protein, 374 aa, Danio rerio
MEERFAFLAEWYDPSAALLRRYQLLYYPKDGSVEMFDMKNQRTFLRRTKLDELQPEDLFVGNRVNIFSRQLNLISYGDQYTANKLGSKKERTLAMIKPDAVSKVGDIIQMIYDANLIVTKAKMTKLTWKQAADFYMEHQSKSFFNNLVQFVSSGPVIAMELMGDEAVSTWRKVLGPTDSGVAQKEAAHSLRGQFGTDGTKNAGHGSDSLASAARELEYFFPSTAGHGLSNTAKYSDCTCCIIKPHAISEALTGKILKSIIENGFEISALQMFNMDRANAEEFLEVYKGVVAEYTKMVDELCSGPCMALEIHATDAPRTFREFCGPADPEIARHLRPKTLRALYGKNKLQNGVHCTDLPEDGILEVQYFFKILDG

SEQ ID NO: 13414 - protein, 374 aa, Danio rerio
MEERFAFLAEWYDPSAALLRRYQLLYYPKDGSVEMFDMKNQRTFLRRTKLEELQPEDLFVGNRVNIFSRQLNLISYGDQYTANKLCSKKERTLAMIKPDAVSKVGDIIQMIYDANLIVTKAKMTKLTWKQAADFYMEHQSKSFFNNLVQFVSSGPVIAMELMGDEAVSTWRKVLGPTDSGVAQKEAAHSLRGQFGTDGTKNAGHGSDSLASAARELEYFFPSTAGHGLSNTAKYSDCTCCIIKPHAISEALAGKILKSIIENGFEISALQMFNMDRANAEEFLEVYKGVVAEYPKMVDELCSGPCMALEIHAPDAPRTLREFCGPADPEIARPLRPKTFRALYGKNKLQNGVPCTDLPEGGILEVQYFFKILDG

SEQ ID NO: 13415 - protein, 175 aa, Danio rerio
MRCVKALQLTLAVIKPDAMAHPLILEALHQKILENFIIIRKTDLIWRTADSEMFYAEHQGRSSFKRLVEFMSTGQMRAYILAREDAITHWRTMMGPTKVFRARFSSPETLRGKYGLTDTRNTTHGSDSIESAKREISFFFPEFSAEEWMMKEEPHFRLGHTEYNEESQIHTVKHT

SEQ ID NO: 13416 - protein, 212 aa, Homo sapiens
MEISMPPPQIYVEKTLAIIKPDIVDKEEEIQDIILRSGFTIVQRRKLRLSPEQCSNFYVEKYGKMFFPNLTAYMSSGPLVAMILARHKAISYWLELLGPNNSLVAKETHPDSLRAIYGTDDLRNALHGSNDFAAAEREIRFMFPEVIVEPIPIGQAAKDYLNLHIMPTLLEGLTELCKQKPADPLIWLADWLLKNNPNKPKLCHHPIVEEPY

SEQ ID NO: 13417 - protein, 376 aa, Homo sapiens
MNHSERFVFIAEWYDPNASLLRRYELLFYPGDGSVEMHDVKNHRTFLKRTKYDNLHLEDLFIGNKVNVFSRQLVLIDYGDQYTARQLGSRKEKTLALIKPDAISKAGEIIEIINKAGFTITKLKMMMLSRKEALDFHVDHQSRPFFNELIQFITTGPIIAMEILRDDAICEWKRLLGPANSGVARTDASESIRALFGTDGIRNAAHGPDSFASAAREMELFFPSSGGCGPANTAKFTNCTCCIVKPHAVSEGLLGKILMAIRDAGFEISAMQMFNMDRVNVEEFYEVYKGVVTEYHDMVTEMYSGPCVAMEIQQNNATKTFREFCGPADPEIARHLRPGTLRAIFGKTKIQNAVHCTDLPEDGLLEVQYFFKILDN

SEQ ID NO: 13418 - protein, 186 aa, Homo sapiens
MASILRSPQALQLTLALIKPDAVAHPLILEAVHQQILSNKFLIVRMRELLWRKEDCQRFYREHEGRFFYQRLVEFMASGPIRAYILAHKDAIQLWRTLMGPTRVFRARHVAPDSIRGSFGLTDTRNTTHGSDSVVSASREIAAFFPDFSEQRWYEEEEPQLRCGPVCYSPEGGVHYVAGTGGLGPA

SEQ ID NO: 13419 - protein, 194 aa, Homo sapiens
MTQNLGSEMASILRSPQALQLTLALIKPDAVAHPLILEAVHQQILSNKFLIVRMRELLWRKEDCQRFYREHEGRFFYQRLVEFMASGPIRAYILAHKDAIQLWRTLMGPTRVFRARHVAPDSIRGSFGLTDTRNTTHGSDSVVSASREIAAFFPDFSEQRWYEEEEPQLRCGPVCYSPEGGVHYVAGTGGLGPA

SEQ ID NO: 13420 - protein, 588 aa, Homo sapiens
MASKKREVQLQTVINNQSLWDEMLQNKGLTVIDVYQAWCGPCRAMQPLFRKLKNELNEDEILHFAVAEADNIVTLQPFRDKCEPVFLFSVNGKIIEKIQGANAPLVNKKVINLIDEERKIAAGEMARPQYPEIPLVDSDSEVSEESPCESVQELYSIAIIKPDAVISKKVLEIKRKITKAGFIIEAEHKTVLTEEQVVNFYSRIADQRDFEEFVSFMTSGLSYILVVSQGSKHNPPSEETEPQTDTEPNERSEDQPEVEAQVTPGMMKNKQDSLQEYLERQHLAQLCDIEEDAANVAKFMDAFFPDFKKMKSMKLEKTLALLRPNLFHERKDDVLRIIKDEDFKILEQRQVVLSEKEAQALCKEYENEDYFNKLIENMTSGPSLALVLLRDNGLQYWKQLLGPRTVEEAIEYFPESLCAQFAMDSLPVNQLYGSDSLETAEREIQHFFPLQSTLGLIKPHATSEQREQILKIVKEAGFDLTQVKKMFLTPEQTEKIYPKVTGKDFYKDLLEMLSVGPSMVMILTKWNAVAEWRRLMGPTDPEEAKLLSPDSIRAQFGISKLKNIVHGASNAYEAKEVVNRLFEDPEEN

SEQ ID NO: 13421 - protein, 263 aa, Homo sapiens
MLSSKGLTVVDVYQGWCGPCKPVVSLFQKMRIEVGLDLLHFALAEADRLDVLEKYRGKCEPTFLFYAIKDEALSDEDECVSHGKNNGEDEDMVSSERTCTLAIIKPDAVAHGKTDEIIMKIQEAGFEILTNEERTMTEAEVRLFYQHKAGEEAFEKLVHHMCSGPSHLLILTRTEGFEDVVTTWRTVMGPRDPNVARREQPESLRAQYGTEMPFNAVHGSRDREDADRELALLFPSLKFSDKDTEAPQGESSTQPRLKITDLD

SEQ ID NO: 13422 - protein, 588 aa, Homo sapiens
MASKKREVQLQTVINNQSLWDEMLQNKGLTVIDVYQAWCGPCRAMQPLFRKLKNELNEDEILHFAVAEADNIVTLQPFRDKCEPVFLFSVNGKIIEKIQGANAPLVNKKVINLIDEERKIAAGEMARPQYPEIPLVDSDSEVSEESPCESVQELYSIAIIKPDAVISKKVLEIKRKITKAGFIIEAEHKTVLTEEQVVNFYSRIADQCDFEEFVSFMTSGLSYILVVSQGSKHNPPSEETEPQTDTEPNERSEDQPEVEAQVTPGMMKNKQDSLQEYLERQHLAQLCDIEEDAANVAKFMDAFFPDFKKMKSMKLEKTLALLRPNLFHERKDDVLRIIKDEDFKILEQRQVVLSEKEAQALCKEYENEDYFNKLIENMTSGPSLALVLLRDNGLQYWKQLLGPRTVEEAIEYFPESLCAQFAMDSLPVNQLYGSDSLETAEREIQHFFPLQSTLGLIKPHATSEQREQILKIVKEAGFDLTQVKKMFLTPEQIEKIYPKVTGKDFYKDLLEMLSVGPSMVMILTKWNAVAEWRRLMGPTDPEEAKLLSPDSIRAQFGISKLKNIVHGASNAYEAKEVVNRLFEDPEEN

SEQ ID NO: 13423 - protein, 330 aa, Homo sapiens
MGSRKKEIALQVNISTQELWEEMLSSKGLTVVDVYQGWCGPCKPVVSLFQKMRIEVGLDLLHFALAEADRLDVLEKYRGKCEPTFLFYAGGELVAVVRGANAPLLQKTILDQLEAEKKVLAEGRERKVIKDEALSDEDECVSHGKNNGEDEDMVSSERTCTLAIIKPDAVAHGKTDEIIMKIQEAGFEILTNEERTMTEAEVRLFYQHKAGEEAFEKLVHHMCSGPSHLLILTRTEGFEDVVTTWRTVMGPRDPNVARREQPESLRAQYGTEMPFNAVHGSRDREDADRELALLFPSLKFSDKDTEAPQGGEAEATAGPTEALCFPEDVD

SEQ ID NO: 13424 - protein, 139 aa, Cytophaga hutchinsonii
MGGNRTFSMIKPDAVKDGHSGSILKMIEGAGFRIVAIKLTYLSAERAGEFYAVHTGKPFYDSLKSIMSESPIIALILEKENAVEDFRKLIGATNPANADAGTIRKLFAKSLERNAVHGSDSDENAQIEGSFFFSALEKF

SEQ ID NO: 13425 - protein, 608 aa, Mus musculus
MESSRSLLGCLASATAAPPGDDATGAGAEEEEDEEEAAAELGSHAALPYWTAVFEYEAAGEDELTLRLGDVVEVLSKDSQVSGDEGWWTGQLNQRVGIFPSNYVTPRSAFSSRCQPGAEDPSCYPPIQLLEIDFAELTLEEIIGIGGFGKVYRAFWAGDEVAVKAARHDPDEDISKTIENVRQEAKLFAMLKHPNIIALRGVCLKEPNLCLVMEFARGGPLNRVLSGKRIPPDILVNWAVQIARGMNYLHDEAIVPIIHRDLKSSNILILQKVENGDLSNKILKITDFGLAREWHRTTKMSAAGTYAWMAPEVIRASMFSKGSDVWSYGVLLWELLTGEVPFRGIDGLAVAYGVAMNKLALPIPSTCPEPFAKLMEDCWNPDPHSRPSFTSILDQLTTIEESGFFEMPKDSFHCLQDDWKHEIQEMFDQLRAKEKELRTWEEELTRAALQQKNQEELLRRREQELAEREIDILERELNIIIHQLCQEKPRVKKRKGKFRKSRLKLKDGNRISLPSDFQHKFTVQASPTMDKRKSLISNRSSPPASPTIIPRLRAIQLTPGESSKTWGRSSVVPKEEGEEEEKRAPKKKGRTWGPGTLGQKELTSGDEG

SEQ ID NO: 13426 - protein, 1077 aa, Mus musculus
MESSRSLLGCLASATAAPPGDDATGAGAEEEEDEEEAAAELGSHAALPYWTAVFEYEAAGEDELTLRLGDVVEVLSKDSQVSGDEGWWTGQLNQRVGIFPSNYVTPRSAFSSRCQPGAEDPSCYPPIQLLEIDFAELTLEEIIGIGGFGKVYRAFWAGDEVAVKAARHDPDEDISQTIENVRQEAKLFAMLKHPNIIALRGVCLKEPNLCLVMEFARGGPLNRVLSGKRIPPDILVNWAVQIARGMNYLHDEAIVPIIHRDLKSSNILILQKVENGDLSNKILKITDFGLAREWHRTTKMSAAGTYAWMAPEVIRASMFSKGSDVWSYGVLLWELLTGEVPFRGIDGLAVAYGVAMNKLALPIPSTCPEPFAKLMEDCWNPDPHSRPSFTSILDQLTTIEESGFFEMPKDSFHCLQDDWKHEIQEMFDQLRAKEKELRTWEEELTRAALQQKNQEELLRRREQELAEREIDILERELNIIIHQLCQEKPRVKKRKGKFRKSRLKLKDGNRISLPSDFQHKFTVQASPTMDKRKSLISNRSSPPASPTIIPRLRAIQLTPGESSKTWGRSSVVPKEEGEEEEKRAPKKKGRTWGPGTLGQKELTSGDEGLKSLVDGYKQWSSSAPNLGKGPRSSPALPGFTSLMEIEDEDSEGPGSGENHQQHSPNQSYLCIPFPRGEDGDGPSSDGVHEEPTPVNSATSTPQLTPTNSLKRGGTHHRRCEVALLGCGAVLAATGLGFDLLEAGKCQLLPPEEPEPPAREEKKRREGLFQRASRPRRSTSPPSRKLFKKEEPMTLLGDPSASLTLLSLSSISECNSTRSLLRSDSDEIVVYEMPVSPVEAPPLTQCTHNPLVNVRVERFKRDPNQSLTPTHVTLTAPTQPSGHRRTPSDGALKPTAAPAVLGSRSPSSNGMSPSPGTGMLKTPSPSRDPGEFPRLPDPNVVFPPTPRRWNTQRDSTLERPKTLEFLPRPRPSANRQRLDPWWFVSPSHARSASPANSSSTETPSNLDSCFASSSSTVEERPGLPALLPLQAGPLLPAERTLLDLDAEGQSQDSTVPLCRAELNAHGPSPYEIQQEFWS

SEQ ID NO: 13427 - protein, 289 aa, Mus musculus
MSSLGASFVQIKFDDLQFFENCGGGSFGSVYRAKWISQDKEVAVKKLLKIEKEAEILSVLSHRNIIQFYGVILEPPNYGIVTEYASLGSLYDYINSNRSEEMDMEHIMTWATDVAKGMHYLHMEAPVKVIHRDLKSRNVVIAADGVLKICDFGASRFHNHTTHMSLVGTFQWMAPEVIQSLPVSETCDTYSYGVVLWEMLTREVPFKGLEGLQVAWLVVEKNERLTIPSSCPRSFAELLHQCWEADAKKRPSFKQIISILESMSNDTNLPDQCNSFLHNKAEWRWVAPA

SEQ ID NO: 13428 - protein, 802 aa, Mus musculus
MSSLGASFVQIKFDDLQFFENCGGGSFGSVYRAKWISQDKEVAVKKLLKIEKEAEILSVLSHRNIIQFYGVILEPPNYGIVTEYASLGSLYDYINSNRSEEMDMEHIMTWATDVAKGMHYLHMEAPVKVIHRDLKSRNVVIAADGVLKICDFGASRFHNHTTHMSLVGTFPWMAPEVIQSLPVSETCDTYSYGVVLWEMLTREVPFKGLEGLQVAWLVVEKNERLTIPSSCPRSFAELLHQCWEADAKKRPSFKQIISILESMSNDTNLPDQCNSFLHNKAEWRCEIEATLERLKKLERDLSFKEQELKERERRLKMWEQKLTEQSNTPLLPSFEIGAWTEDDVYFWVQQLVRKGESSVEMSGYASLFKENNITGKRLLLLEEEDLKDMGIVSKGHIIHFKSAIEKLTHDYLNLFHFPPLIKDSGGEPEENEEKIVNLELVFGFHLKPGTGPQDCKWKMYMEMDGDEVAITYIKDVTFNTSLPDAEILKMTKPPFVMEKWIVGIAEDQTVECTVTYENDVRTPKLTKHVHSIQWDRTKPQDEVKAVQLAIQTLFSSSEGNPGSRSDSSADCQWLDTLRMRQIASHTSLQRSQSNPILGSPFFPYFANQDSYAAAVRRTQTPVKYQQITPSINPSRSSSPTQYGLSRNFSSLNLSSRDSGFSSLNDSSSERGRYSDRSRNKYYRGSVSLNSSPKGRYGGKSQHSTPSRERYSGKFYRLPQSALNTHQSPDFKRSPNDHDRRVPRTIPGMPLHPETASKAGEEESRVSEGGWTKVEYRKKTHRQLSAKTSKERTRGNYRGRRNF

SEQ ID NO: 13429 - protein, 454 aa, Mus musculus
MSSLGASFVQIKFDDLQFFENCGGGSFGSVYRAKWISQDKEVAVKKLLKIEKEAEILSVLSHRNIIQFYGVILEPPNYGIVTEYASLGSLYDYINSNRSEEMDMEHIMTWATDVAKGMHYLHMEAPVKVIHRDLKSRNVVIAADGVLKICDFGASRFHNHTTHMSLVGTFPWMAPEVIQSLPVSETCDTYSYGVVLWEMLTREVPFKGLEGLQVAWLVVEKNERLTIPSSCPRSFAELLHQCWEADAKKRPSFKQIISILESMSNDTNLPDQCNSFLHNKAEWRCEIEATLERLKKLERDLSFKEQELKERERRLKMWEQKLTEQSNTPLLLPLSARMSEESYFESKTEESNSAEMSCQITAASNGEGHGMNPGLQAMMLMGFGDVFSMNKAGAVLHSGMQINMQAKQNSSKTTCKRRGKKVNMALGFSDFDLSEGDDDDHDGDDAENDVDNSE

SEQ ID NO: 13430 - protein, 888 aa, Mus musculus
MACLHETRTPSPSFGGFVSTLSEASMRKLDPDTSDCTPEKDLTPTQCVLRDVVPLGGQGGGGPSPSPGGEPPPEPFANSVLQLHEQDTGGPGGATGSPESRASRVRADEVRLQCQSGSGFLEGLFGCLRPVWTMIGKAYSTEHKQQQEDLWEVPFEEILDLQWVGSGAQGAVFLGRFHGEEVAVKKVRDLKETDIKHLRKLKHPNIITFKGVCTQAPSYCILMEFCAQGQLYEVLRAGRPVTPSLLVDWSMGIAGGMNYLHLHKIIHRDLKSPNMLITYDDVVKISDFGTSKELSDKSTKMSFAGTVAWMAPEVIRNEPVSEKVDIWSFGVVLWELLTGEIPYKDVDSSAIIWGVGSNSLHLPVPSSCPDGFKILLRQCWNSKPRNRPSFRQILLHLDIASADVLSTPQETYFKSQAEWREEVKLHFEKIKSEGTCLHRLEEELVMRRREELRHALDIREHYERKLERANNLYMELNALMLQLELKERELLRREQALERRCPGLLKSHPSRGLLHGNTMEKLIKKRNVPQKLSPHSKRPDILKTESLLPKLDAALSGVGLPGCPKGPPSPGRSRRGKTRHRKASAKGSCGDLPGLRAALPPHEPGGLGSPGGLGVGPSAWDACPPALRGLHHDLLLRKMSSSSPDLLSAALGARGRGATGGARDPGSPPPPQGDTPPSEGSAPGSTSPDSPGGAKGEPPPPVGPGEGVGLLGTGREGTAGRGGNRAGSQHLTPAALLYRAAVTRSQKRGISSEEEEGEVDSEVELPPSQRWPQGPNMRQSLSTFSSENPSDVEEGTASEPSPSGTPEVGSTNTDERPDERSDDMCSQGSEIPLDLPTSEVVPEREASSLPMQHQDGQGPNPEDSDCDSTELDNSNSIDALRPPASLPP

SEQ ID NO: 13431 - protein, 888 aa, Mus musculus
MACLHETRTPSPSFGGFVSTLSEASMRKLDPDTSDCTPEKDLTPTQCVLRDVVPLGGQGGGGPSPSPGGEPPPEPFANSVLQLHEQDTGGPGGATGSPESRASRVRADEVRLQCQSGSGFLEGLFGCLRPVWTMIGKAYSTEHKQQQEDLWEVPFEEILDLQWVGSGAQGAVFLGRFHGEEVAVKKVRDLKETDIKHLRKLKHPNIITFKGVCTQAPCYCILMEFCAQGQLYEVLRAGRPVTPSLLVDWSMGIAGGMNYLHLHKIIHRDLKSPNMLITYDDVVKISDFGTSKELSDKSTKMSFAGTVAWMAPEVIRNEPVSEKVDIWSFGVVLWELLTGEIPYKDVDSSAIIWGVGSNSLHLPVPSSCPDGFKILLRQCWNSKPRNRPSFRQILLHLDIASADVLSTPQETYFKSQAEWREEVKLHFEKIKSEGTCLHRLEEELVMRRREELRHALDIREHYERKLERANNLYMELNALMLQLELKERELLRREQALERRCPGLLKSHPSRGLLHGNTMEKLIKKRNVPQKLSPHSKRPDILKTESLLPKLDAALSGVGLPGCPKGPPSPGRSRRGKTRHRKASAKGSCGDLPGLRAALPPHEPGGLGSPGGLGVGPSAWDACPPALRGLHHDLLLRKMSSSSPDLLSAALGARGRGATGGARDPGSPPPPQGDTPPSEGSAPGSTSPDSPGGAKGEPPPPVGPGEGVGLLGTGREGTAGRGGNRAGSQHLTPAALLYRAAVTRSQKRGISSEEEEGEVDSEVELPPSQRWPQGPNMRQSLSTFSSENPSDVEEGTASEPSPSGTPEVGSTNTDERPDERSDDMCSQGSEIPLDLPTSEVVPEREASSLPMQHQDGQGPNPEDSDCDSTELDNSNSIDALRPPASLPP

SEQ ID NO: 13432 - protein, 888 aa, Mus musculus
MACLHETRTPSPSFGGFVSTLSEASMRKLDPDTSDCTPEKDLTPTQCVLRDVVPLGGQGGGGPSPSPGGEPPPEPFANSVLQLHEQDTGGPGGATGSPESRASRVRADEVRLQCQSGSGFLEGLFGCLRPVWTMIGKAYSTEHKQQQEDLWEVPFEEILDLQWVGSGAQGAVFLGRFHGEEVAVKKVRDLKETDIKHLRKLKHPNIITFKGVCTQAPCYCILMEFCAQGQLYEVLRAGRPVTPSLLVDWSMGIAGGMNYLHLHKIIHRDLKSPNMLITYDDVVKISDFGTSKELSDKSTKMSFAGTVAWMAPEVIRNEPVSEKVDIWSFGVVLWELLTGEIPYKDVDSSAIIWGVGSNSLHLPVPSSCPDGFKILLRQCWNSKPRNRPSFRKILLHLDIASADVLSTPQETYFKSQAEWREEVKLHFEKIKSEGTCLHRLEEELVMRRREELRHALDIREHYERKLERANNLYMELNALMLQLELKERELLRREQALERRCPGLLKSHPSRGLLHGNTMEKLIKKRNVPQKLSPHSKRPDILKTESLLPKLDAALSGVGLPGCPKGPPSPGRSRRGKTRHRKASAKGSCGDLPGLRAALPPHEPGGLGSPGGLGVGPSAWDACPPALRGLHHDLLLRKMSSSSPDLLSAALGARGRGATGGARDPGSPPPPQGDTPPSEGSAPGSTSPDSPGGAKGEPPPPVGPGEGVGLLGTGREGTAGRGGNRAGSQHLTPAALLYRAAVTRSQKRGISSEEEEGEVDSEVELPPSQRWPQGPNMRQSLSTFSSENPSDVEEGTASEPSPSGTPEVGSTNTDERPDERSDDMCSQGSEIPLDLPTSEVVPEREASSLPMQHQDGQGPNPEDSDCDSTELDNSNSIDALRPPASLPP

SEQ ID NO: 13433 - protein, 511 aa, Mus sp.
MRSLASCSELSHWVLDPLAGTLRGSRPKQVSPRLFGAWHPAPAAARMPTQRWAPGTQCMTKCENSRPKPGELAFRKGDMVTILEACEDKSWYRAKHHGSGQEGLLAAAALRQREALSTDPKLSLMPWFHGKISGQEAIQQLQPPEDGLFLVRESARHPGDYVLCVSFGRDVIHYRVLHRDGHLTIDEAVCFCNLMDMVEHYTKDKGAICTKLVKPRRKQGAKSAEEELAKAGWLLDLQHLTLGAQIGEGEFGAVLQGEYLGQKVAVKNIKCDVTAQAFLDETAVMTKLQHRNLVRLLGVILHHGLYIVMEHVSKGNLVNFLRTRGRALVSTSQLLQFALHVAEGMEYLESKKLVHRDLAARNILVSEDLVAKVSDFGLAKAERKGLDSSRLPVKWTAPEALKNGRFSSKSDVWSFGVLLWEVFSYGRAPYPKMSLKEVSEAVEKGYRMEPPDGCPGSVHTLMGSCWEAEPARRPPFRKIVEKLGRDVRSVGVSAAGGQEAEGSAPTRSQDP

SEQ ID NO: 13434 - protein, 1122 aa, Mus sp.
MDSLAGLVLCGVSLLLYGVVEGAMDLILINSLPLVSDAETSLTCIASGWHPHEPITIGRDFEALMNQHQDPLEVTQDVTREWAKKVVWKREKASKINGAYFCEGRVRGQAIRIRTMKMRQQASFLPATLTMTVDRGDNVNISFKKVLIKEEDAVIYKNGSFIHSVPRHEVPDILEVHLPHAQPQDAGVYSARYIGGNLFTSAFTRLIVRRCEAQKWGPDCSRPCTTCKNNGVCHEDTGECICPPGFMGRTCEKACEPHTFGRTCKERCSGPEGCKSYVFCLPDPYGCSCATGWRGLQCNEACPSGYYGPDCKLRCHCTNEEICDRFQGCLCSQGWQGLQCEKEGRPRMTPQIEDLPDHIEVNSGKFNPICKASGWPLPTSEEMTLVKPDGTVLQPNDFNYTDRFSVAIFTVNRVLPPDSGVWVCSVNTVAGMVEKPFNISVKVLPEPLHAPNVIDTGHNFAIINISSEPYFGDGPIKSKKLFYKPVNQAWKYIEVTNEIFTLNYLEPRTDYELCVQLARPGEGGEGHPGPVRRFTTASIGLPPPRGLSLLPKSQTALNLTWQPIFTNSEDEFYVEVERRSLQTTSDQQNIKVPGNLTSVLLSNLVPREQYTVRARVNTKAQGEWSEELRAWTLSDILPPQPENIKISNITDSTAMVSWTIVDGYSISSIIIRYKVQGKNEDQHIDVKIKNATVTQYQLKGLEPETTYHVDIFAENNIGSSNPAFSHELRTLPHSPGSADLGGGKMLLIAILGSAGMTCITVLLAFLIMLQLKRANVQRRMAQAFQNREEPAVQFNSGTLALNRKAKNNPDPTIYPVLDWNDIKFQDVIGEGNFGQVLKARIKKDGLRMDAAIKRMKEYASKDDHRDFAGELEVLCKLGHHPNIINLLGACEHRGYLYLAIEYAPHGNLLDFLRKSRVLETDPAFAIANSTASTLSSQQLLHFAADVARGMDYLSQKQFIHRDLAARNILVGENYIAKIADFGLSRGQEVYVKKTMGRLPVRWMAIESLNYSVYTTNSDVWSYGVLLWEIVSLGGTPYCGMTCAELYEKLPQGYRLEKPLNCDDEVYDLMRQCWREKPYERPSFAQILVSLNRMLEERKTYVNTTLYEKFTYAGIDCSAEEAA

SEQ ID NO: 13435 - protein, 994 aa, Mus sp.
MGARVPVLPGLDGSFCWLLLLPLLAAVEETLMDSTTATAELGWMVHPPSGWEEVSGYDENMNTIRTYQVCNVFESSQNNWLRTKFIRRRGAHRIHVEMKFSVRDCSSIPSVPGSCKETFNLYYYEADFDLATKTFPNWMENPWVKVDTIAADESFSQVDLGGRVMKINTEVRSFGPVSRNGFYLAFQDYGGCMSLIAVRVFYRKCPRIIQNGAIFQETLSGAESTSLVAARGSCIANAEEVDVPIKLYCNGDGEWLVPIGRCMCKAGFEAVENGTVCRGCPSGTFKANQGDEACTHCPINSRTTSEGATNCVCRNGYYRADLDPLDMPCTTIPSAPQAVISSVNETSLMLEWTPPRDSGGREDLVYNIICKSCGSGRGACTRCGDNVQYAPRQLGLTEPRIYISDLLAHTQYTFEIQAVNGVTDQSPFSPQFASVNITTNQAAPSAVSIMHQVSRTVDSITLSWSQPDQPNGVILDYELQYYEKELSEYNATAIKSPTNTVTVQGLKAGAIYVFQVRARTVAGYGRYSGKMYFQTMTEAEYQTSIKEKLPLIVGSSAAGLVFLIAVVVIAIVCNRRGFERADSEYTDKLQHYTSGHMTPGMKIYIDPFTYEDPNEAVREFAKEIDISCVKIEQVIGAGEFGEVCSGHLKLPGKREIFVAIKTLKSGYTEKQRRDFLSEASIMGQFDHPNVIHLEGVVTKSTPVMIITEFMENGSLDSFLRQNDGQFTVIQLVGMLRGIAAGMKYLADMNYVHRDLAARNILVNSNLVCKVSDFGLSRFLEDDTSDPTYTSALGGKIPIRWTAPEAIQYRKFTSASDVWSYGIVMWEVMSYGERPYWDMTNQDVINAIEQDYRLPPPMDCPSALHQLMLDCWQKDRNHRPKFGQIVNTLDKMIRNPNSLKAMAPLSSGINLPLLDRTIPDYTSFNTVDEWLEAIKMGQYKESFANAGFTSFDVVSQMMMEDILRVGVTLAGHQKKILNSIQVMRAQMNQIQSVEV

SEQ ID NO: 13436 - protein, 1018 aa, Rattus norvegicus
MEEEEGAAAREWGATPAGPVWTAVFDYEAVGDEELTLRRGDRVQVLSQDCAVSGDEGWWTGQLPSGRVGVFPSNYVAPAAPAAPTDLQLPQEIPFHELQLEEIIGVGGFGKVYRALWRGEEVAVKAARLDPERDPAVTAEQVRQEARLFGALQHPNIIALRGACLSPPNLCLVMEYARGGALSRVLAGRRVPPHVLVNWAVQVARGMNYLHNDAPVPIIHRDLKSINILILEAIENHNLADTVLKITDFGLAREWHKTTKMSAAGTYAWMAPEVIRLSLFSKSSDVWSFGVLLWELLTGEVPYREIDALAVAYGVAMNKLTLPIPSTCPEPFARLLEECWDPDPHGRPDFGSILKQLEVIEQSALFQMPLESFHSLQEDWKLEIQHMFDDLRTKEKELRSREEELLRAAQEQRFQEEQLRRREQELAEREMDIVERELHLLMSQLSQEKPRVRKRKGNFKRSRLLKLREGSSHISLPSGTSQFPERPRETSWGRGFEHKITVQASPTLDKRKGSDGASPPASPSIIPRLRAIRCEYTRPSQSVGTPQLSAGIPGAQQGQQLRVCVPLSEGTAKTQLGRRTARFQPRGQLGTAKRDVTPVDCGSSGGSGTWSRSGPPKKEELVGGKKKGRTWGPSSTLQKERAGGEERLKALGEGSKQWSSSAPNLGKSPKHTPMAPGFASLNEMEEFAEADEGNNVPPSPYSTPSYLKVPLPAEASPCAQPPWEPPAATPSRPGHGARRRCDLALLGCATLLSAVGLGADVAEARAGDGEEQRGWLDGLFFPRPGRFPRGLSPTGRPGGRREETAPGFGLAPSATLVSLSSVSDCNSTRSLLRSDSDEAAPTAPSPPPSLLPPSPSTNPLVDVELESFKKDPRQSLTPTHVTAAHAVSRGHRRTPSDGALRQREPPELTNHGPRDPLDFPRLPDPQALFPTRRRPLEFPGRPTTLTFAPRPRPAASRPRLDPWKLVSFGRTLSISPPSRPDTPESPGPLSVQPTLLDMDMEGQSQDNTVPLCGAYGSH

SEQ ID NO: 13437 - protein, 888 aa, Rattus norvegicus
MACLHETRTPSPSFGGFVSTLSEASMRKLDPDTSDCTPEKDLTPTQCVLRDVVPLGGQGGGGPSPSPGGEPPPEPFANSVLQLHEQDTGGPGGATGSPESRASRVRADEVRLQCQSGSGFLEGLFGCLRPVWTMIGKAYSTEHKQQQEDLWEVPFEEILDLQWVGSGAQGAVFLGRFHGEEVAVKKVRDLKETDIKHLRKLKHPNIITFKGVCTQAPCYCILMEFCAQGQLYEVLRAGRPVTPSLLVDWSMGIAGGMNYIHLHKIIHRDLKSPNMLITYDDVVKISDFGTSKELSDKSTKMSFAGTVAWMAPEVIRNEPVSEKVDIWSFGVVLWELLTGEIPYKDVDSSAIIWGVGSNSLHLPVPSSCPDGFKILLRQCWNSKPRNRPSFRQILLHLDIASADVLSTPQETYFKSQAEWREEVKLHFEKIKSEGTCLHRLEEELVMRRRGEFRHALDIREHYERKLERANNLYMELNALMLQLELTERELLRRAQALERRCPGLLKSHPSRGLLHGNTMEKLIKKRNVPQKLSPHSKRPDILKTESLLPKLDAALSGVGLPGCPKGPPSPGRSRRGKTRHRKASAKGSCGDLPVLRAALPPHEPGGLGSPGGLGVGPTAWDACPPALRGLHHDLLLRKMSSSSPDLLSAALGARGRGATGGARDPGSPPPPQADTPPSEGSAPGSTSPDSPGGAKGEPPPPVGPGEGVGLLGTGREGTTGRGGSRAGYQHLTPAALLYRAAVTRSQKRGISSEEEEGEVDSEVELPPSQRWPQGPNMRQSLSTFSSENPSDVEEGTASEPSPSGTPEVGSTNTDERPDERSDDMCSQGSEIPLDLPTSEVVPERETSSLPMQHQDDQGPNPEDSDCDSTELDNSNSIDALPPPASLPP

SEQ ID NO: 13438 - protein, 888 aa, Rattus norvegicus
MACLHETRTPSPSFGGFVSTLSEASMRKLDPDTSDCTPEKDLTPTQCVLRDVVPLGGQGGGGPSPSPGGEPPPEPFANSVLQLHEQDTGGPGGATGSPESRASRVRADEVRLQCQSGSGFLEGLFGCLRPVWTMIGKAYSTEHKQQQEDLWEVPFEEILDLQWVGSGAQGAVFLGRFHGEEVAVKKVRDLKETDIKHLRKLKHPNIITFKGVCTQAPCYCILMEFCAQGQLYEVLRAGRPVTPSLLVDWSMGIAGGMNYLHLHKIIHRDLKSPNMLITYDDVVKISDFGTSKELSDKSTKMSFAGTVAWMAPEVIRNEPVSEKVDIWSFGVVLWELLTGEIPYKDVDSSAIIWGVGSNSLHLPVPSSCPDGFKILLRQCWNRKPRNRPSFRQILLHLDIASADVLSTPQETYFKSQAEWREEVKLHFEKIKSEGTCLHRLEEELVMRRREELRHALDIREHYERKLERANNLYMELNALMLQLELKERELLRREQALERRCPGLLKSHTSRSLLHGNTMEKLIKKRNVPQKLSPHSKRPDILKTESLLPKLDAALSGVGLPGCPKAPPSPGRSRRGKTRHRKASAKGSCGDLPGLRAALPPHEPGGLGSPGGLGVGPTAWDASPPALRGLHHDLLLRKMSSSSPDLLSAALGARGRGATGGARDPGSPPPPQGDTPPSEGSAPGSTSPDSPGGAKGEPPPPVGPGEGVGLLGTGREGTTGRGGSRAGYQHLTPAALLYRAAVTRSQKRGISSEEEEGEVDSEVELPPSQRWPQGPNMRQSLSTFSSENPSDVEEGTASEPSPSGTPEVGSTNTDERPDERSDDMCSQGSEIPLDLPTSEVVPERETSSLPMQHQDDQGPNPEDSDCDSTELDNSNSIDALPPPASLPP

SEQ ID NO: 13439 - protein, 548 aa, Rattus norvegicus
MANPQEHLSCSSLPHLPLTENKISGGRNELAAMGNHPSPKFPEDSQERVVAIQSELTEITGSPVSTTVLTSVSEDSRSQFENSVLQLREQDESEVTVSPGNSNTVDGENTNGPEDIKIQFSRSGSGSGGFLEGLFGCLRPVWNIIGKAYSTDYKLQQQDTWEVPFEEISELQWLGSGAQGAVFLGKFRAEEVAIKKVREQNETDIKHLRKLKHPNIIAFKGVCTQAPCYCIIMEYCAHGQLYEVLRAGRKITPRLLVDWSTGIASGMNYLHLHKIIHRDLKSPNVLVTHTDAVKISDFGTSKELSDKSTKMSFAGTVAWMAPEVIRNEPVSEKVDIWSFGVVLWELLTGEIPYKDVDSSAIIWGVGSNSLHLPVPSTCPDGFKILMKQTWQSKPRNRPSFRQTLMHLDIASADVLATPQETYFKSQAEWREEVKKHFEKIKSEGTCIHRLDEELIRRRREELRHALDIREHYERKLERANNLYMELSAIMLQLEMREKELLKREQAVEKKYPGTYKRHPVRPIIHPNAMEKLMKRKVVSHKAGVQTKR

SEQ ID NO: 13440 - protein, 602 aa, Rattus norvegicus
MAAVLQQVLERPELNKLPKSTQNKLEKFLAEQQSEIDCLKGRHEKFKVESEQQYFEIEKRLSQSQERLVNETRECQNLRLELEKLNNQVKVLTEKNKELETAQDRNLGIQSQFTRAKEELEAEKRDLIRTNERLSQEVEYLTEDVKRLNEKLKESNTTKGELQLKLDELQASDVTVKYREKRLEQEKELLHNQNSWLNTELKTKTDELLALGREKGNEILELKCTLENKKEEDAIRSHSESASPSALSSSPNNLSPTGWSQPKTPVPAQRERAPGSGTQEKNKIRPRGQRDSSYYWEIEASEVMLSTRIGSGSFGTVYKGKWHGDVAVKILKVVDPTPEQLQAFRNEVAVLRKTRHVNILLFMGYMTKDNLAIVTQWCEGSSLYKHLHVQETKFQMFQLIDIARQTAQGMDYLHAKNIIHRDMKSNNIFLHEGLTVKIGDFGLATVKSRWSGSQQVEQPTGSVLWMAPEVIRMQDNNPFSFQSDVYSYGIVLYELMTGELPYSHINNRDQIIFMVGRGYASPDLSRLYKNCPKAMKRLVADCVKKVKEERPLFPQILSSIELLQHSLPKINRSASEPSLHRAAHTEDINACTLTTSPRLPVF

SEQ ID NO: 13441 - protein, 648 aa, Rattus norvegicus
MEHIQGAWKTISNGFGLKDAVFDGSSCISPTIVQQFGYQRRASDDGKLTDSSKTSNTIRVFLPNKQRTVVNVRNGMSLHDCLMKALKVRGLQPECCAVFRLLQEHKGKKARLDWNTDAASLIGEELQVDFLDHVPLTTHNFARKTFLKLAFCDICQKFLLNGFRCQTCGYKFHEHCSTKVPTMCVDWSNIRQLLLFPNSTASDSGVPAPPSFTMRRMRESVSRMPASSQHRYSTPHAFTFNTSSPSSEGSLSQRQRSTSTPNVHMVSTTLPVDSRMIEDAIRSHSESASPSALSSSPNNLSPTGWSQPKTPVPAQRERAPGSGTQEKNKIRPRGQRDSSYYWEIEASEVMLSTRIGSGSFGTVYKGKWHGDVAVKILKVVDPTPEQLQAFRNEVAVLRKTRHVNILLFMGYMTKDNLAIVTQWCEGSSLYKHLHVQETKFQMFQLIDIARQTAQGMDYLHAKNIIHRDMKSNNIFLHEGLTVKIGDFGLATVKSRWSGSQQVEQPTGSVLWMAPEVIRMQDNNPFSFQSDVYSYGIVLYELMTGELPYSHINNRDQIIFMVGRGYASPDLSRLYKNCPKAMKRLVADCVKKVKEERPLFPQILSSIELLQHSLPKINRSASEPSLHRAAHTEDINACTLTTSPRLPVF

SEQ ID NO: 13442 - protein, 623 aa, Rattus norvegicus
MSTASAASSSSSSSASEMIEAPSQVLNFEEIDYKEIEVEEVVGRGAFGVVCKAKWRAKDVAIKQIESESERKAFIVELRQLSRVNHPNIVKLYGACLNPVCLVMEYAEGGSLYNVLHGAEPLPYYTAAHAMSWCLQCSQGVAYLHSMQPKALIHRDLKPPNLLLVAGGTVLKICDFGTACDIQTHMTNNKGSAAWMAPEVFEGSNYSEKCDVFSWGIILWEVITRRKPFDEIGGPAFRIMWAVHNGTRPPLIKNLPKPIESLMTRCWSKDPSQRPSMEEIVKIMTHLMRGLLCTEGILNRDLLLLQYFPGADEPLQYPCQYSDEGQSNSATSTGSFMDIASTNTSNKSDTNMEQVPATNDTIKRLESKLLKNQAKQQSDSGRLSLGASRGSSVESLPPTSEGKRMSADMSEIEARIVATTAYTKPKRGHRKTASFGNILDVPEIVISGNGQPRRRSIQDLTVTGTEPGQVSSRSSSPSVRMITTSGPTSEKPARSLPWTPDDSTDTNGSDNSIPMAYLTLDHQLQPLAPCPNSKESMAVFEQHCKMAQEYMKVQTEIALLLQRKQELVAELDQDEKDQQNTSRLVQEHKKLLDENKSLSTYYQQCKKQLEVIRSQQQKRQGTS

SEQ ID NO: 13443 - protein, 604 aa, Rattus norvegicus
MEPPRGPPASGAEPSRAVGTVKVYLPNKQRTVVTVRDGMSVYDSLDKALKVRGLNQDCCVVYRLIKGRKTVTAWDTAIAPLDGEELIVEVLEDVPLTMHNFVRKTFFSLAFCDFCLKFLFHGFRCQTCGYKFHQHCSSKVPTVCVDMSTNRRQFYHSIQDLSGGSRQQEVPSNLSVNELLTPQGPSPFTQQRDQEHFSFPAPANPPLQRIRSTSTPNVHMVSTTAPMDSSLMQFTAQSFSTDAAGRGGDGAPRGSPSPASVSSGRKSPHSKLPAEQRERKSLADEKKKVKNLGYRDSGYYWEVPPSEVQLLKRIGTGSFGTVFRGRWHGDVAVKVLKVAQPTAEQAQAFKNEMQVLRKTRHVNILLFMGFMTRPGFAIITQWCEGSSLYHHLHVADTRFDMVQLIDVARQTAQGMDYLHAKNIIHRDLKSNNIFLHEGLTVKIGDFGLATVKTRWSGAQPLEQPSGSVLWMAAEVIRMQDPNPYSFQSDVYAYGVVLYELMTGSLPYSHIGSRDQIIFMVGRGYLSPDLSKIFSNCPKAMRRLLTDCLKFQREERPLFPQILATIELLQRSLPKIERSASEPSLHRTQADELPACLLSAARLVP

SEQ ID NO: 13444 - protein, 550 aa, Rattus norvegicus
MRVPILTLERAFANKPGPKGFGVDISCSNDGNGFILCPGYSAPCKKQQDSTFQSILCCCCCCSVQGRRVTTRISLSREEELSEKHSQRQRQWFSKLMGKSQEFTEERIRVKALYDFLPREPCNLALKRAEEYLILERCDPHWWRARDRLGNEGLIPSNYVTENRLTNLETYEWYHKNITRDQTERLLRQEAKEGAFIVRDSRHLGSYTISVFTRARRHTQSSIKHYQIKKNDSGQWYVTERHLFPSVPELIQYHQYNAAGLMSRLRYPVGLLGSCLPATSGFSYEKWEIDPSELTFVKEIGSGQFGVVYLGEWRARIRVAIKAINEGSMSEEDFIEEAKVMMKLSHSRLVQLYGVCIQQKPLYIVTEFMENGCLLDYLRERKGKLPKALLLSMCQDICEGMAYLEKSCYIHRDLAARNCLVSSACVVKISDFGMARYVLDDEYISSSGAKFPVKWSPPEVFHFNKYSSKSDVWSFGVLMWEVFTEGKMPFENKSNLQVVEAISKGFRLYRPHLAPMSIYGVMYSCWHESPKGRPTFAELLQVLAEIAETW

SEQ ID NO: 13445 - protein, 506 aa, Rattus norvegicus
MGSVCMRLWAYLQPFLPCWSQEADKSVVIENPGAYCPPEANRSQGQYFVALFDYEARTAEDLSFHAGDKLQVLDTSHEGWWLARHLEKKGPGLGQQLQGYIPSNYVAEDRSLQAEPWFFGAIKRADAEKQLLYSENQTGAFLIRESESQKGDFSLSVLDEGVVKHYRIRRLDEGGFFLTRRKTFSTLNEFVNYYTTTSDGLCVKLEKPCLKIQVPTPFDLSYKTVDQWEIDRNSIQLLKRLGSGQFGEVWEGLWNNTTPVAVKTLKPGSMDPNDFLREAQIMKSLRHPKLIQLYAVCTLEDPIYIITELMRHGSLQEYLQNDGGSKIRLTQQVDMAAQVASGMAYLESQNYIHRDLAARNVLVGEHNIYKVADFGLARVFKVDNEDIYESKHEIKLPVKWTAPEAIRTNKFSIKSDVWSFGILLYEIITYGKMPYSGMTGAQVIHMLGQNYRLPQPSNCPEQFYSIMMECWNVEPKQRPTFETLHWKLEDYFEPDSSYSDTNNFIN

SEQ ID NO: 13446 - protein, 537 aa, Rattus norvegicus
MGCVQCKDKEAAKLTEERDGSLNQSSGYRYGTDPTPQHYPSFGVTSIPNYNNFHAAGGQGLTVFGGVNSSSHTGTLRTRGGTGVTLFVALYDYEARTEDDLSFHKGEKFQILNSSEGDWWEARSLTTGETGYIPSNYVAPVDSIQAEEWYFGKLGRKDAERQLLSFGNPRGTFLIRESETTKGAYSLSIRDWDDMKGDHVKHYKIRKLDNGGYYITTRAQFETLQQLVQHYSERAAGLCCRLVVPCHKGMPRLTDLSVKTKDVWEIPRESLQLIKRLGNGQFGEVWMGTWNGNTKVAIKTLKPGTMSPESFLEEAQIMKKLKHDKLVQLYAVVSEEPIYIVTEYMNKGSLLDFLKDGEGRALKLPNLVDMAAQVAAGMAYIERMNYIHRDLRSANILVGNGLICKIADFGLARLIEDNEYTARQGAKFPIKWTAPEAALYGRFTIKSDVWSFGILLTELVTKGRVPYPGMNNREVLEQVERGYRMPCPQDCPISLHELMIHCWKKDPEERPTFEYLQGFLEDYFTATEPQYQPGENL

SEQ ID NO: 13447 - protein, 542 aa, Rattus norvegicus
MGSNKSKPKDASQRRRSLEPAENVHGAGGAFPASQTPSKPASADGHRGPNAAFVPPAAAEPKLFGGFNSSDTVTSPQRAGPLAGGVTTFVALYDYESRTETDLSFKKGERLQIVNNTRKVDVREGDWWLAHSLSTGQTGYIPSNYVAPSDSIQAEEWYFGKITRRESERLLLNAENPRGTFLVRESETTKGAYCLSVSDFDNAKGLNVKHYKIRKLDSGGFYITSRTQFNSLQQLVAYYSKHADGLCHRLTTVCPTSKPQTQGLAKDAWEIPRESLRLEVKLGQGCFGEVWMGTWNGTTRVAIKTLKPGTMSPEAFLQEAQVMKKLRHEKLVQLYAVVSEEPIYIVTEYMNKGSLLDFLKGETGKYLRLPQLVDMSAQIASGMAYVERMNYVHRDLRAANILVGENLVCKVADFGLARLIEDNEYTARQGAKFPIKWTAPEAALYGRFTIKSDVWSFGILLTELTTKGRVPYPGMVNREVLDQVERGYRMPCPPECPESLHDLMCQCWRKEPEERPTFEYLQAFLEDYFTSTEPQYQPGENL

SEQ ID NO: 13448 - protein, 380 aa, Rattus rattus
EAVREFAKEIDVSFVKIEEVIGAGEFGEVYKGRLKLPGKREIYVAIKTLKAGYSEKQRRDFLSEASIMGQFDHPNIIRLEGVVTKSRPVMIITEFMENGALDSFLRQNDGQFTVIQLVGMLRGIAAGMKYLSEMNYVHRDLAARNILVNSNLVCKVSDFGLSRYLQDDTSDPTYTSSLGGKIPVRWTAPEAIAYRKFTSASDVWSYGIVMWEVMSFGERPYWDMSNQDVINAIEQDYRLPPPMDCPAALHQLMLDCWQKDRNSRPRFAEIVNTLDKMIRNPASLKTVATITAVPSQPLLDRSIPDFTAFTTVDDWLSAIKMVQYRDSFLTAGFTSLQLVTQMTSEDLLRIGVTLAGHQKKILSSIHSMRVQMNQSPSVMA

SEQ ID NO: 13449 - protein, 1083 aa, Rattus sp.
TSLTCIASGWHPHEPITIGRDFEALMNQHQDPLEVTQDVTREWAKKVVWKREKASKINGAYFCEGRVRGQAIRIRTMKMRQQASFLPATLTMTVDRGDNVNISFKKVLIKEEDAVIYKNGSFIHSVPRHEVPDILEVHLPHAQPQDAGVYSARYIGGNLFTSAFTRLIVRRCEAQKWGPDCNRPCTTCKNNGVCHEDTGECICPPGFMGRTCEKACEPHTFGRTCKERCSGSEGCKSYVFCLPDPYGCSCATGWRGLQCNEACPYGHYGPDCKLRCHCTNEEMCDRFQGCLCSQGWQGLQCEKEGRPRMTPQIEDLPDHIEVNSGKFNPICKASGWPLPTSEEMTLVKPDGTVLQPNDFNHTDHFSVAIFTVNRILPPDSGVWVCSVNTVAGMVEKPFNISVKVLPEPLHAPNVIDTGHNFAIINISSEPYFGDGPIKSKKLFYKPVNQAWKYIQVMNEIVTLNYLEPRTDYELCVQLVRPGEGGEGHPGPVRRFTTASIGLPPPRGLSLLPKSQTALNLTWQPIFTSSEDEFYVEVERWSQQTRSDQQNIKVPGNLTSVLLNNLLPREQYSVRARVNTKAQGEWSEELRAWTLDDSDILPPQPENIKITNITDYTALVSWTIVDGYSISSIIIRYKVQGKNEDQHIDVKIKNATITQYQLKGLEPETTYHVDIFAENNIGSSNPAFSQEIRTLPAPKDLGGGKMLLIAILGSAGMTCITVLLAFLIMLQLKRANVQRRMAQAFQNVREEPAVQFNSGTLALNRKAKNNPDPTIYPVLDWNDIKFQDVIGEGNFGQVLKARIKKDGLRMDAAIKRMKEYASKDDHRDFAGELEVLCKLGHHPNIINLLGACEHRGYLYLAIEYAPHGNLLDFLRKSRVLETDPAFAIANSTASTLSSQQLLHFAADVARGMDYLSQKQFIHRDLAARNILVGENYIAKIADFGLSRGQEVYVKKTMGRLPVRWMAIESLNYSVYTTNSDVWSYGVLLWEIVSLGGTPYCGMTCAELYEKLPQGYRLEKPLNCDDEVYDLMRQCWREKPYERPSFAQILVSLNRMLEERKTYVNTTLYEKFTYAGIDCSAEEAA

SEQ ID NO: 13450 - protein, 697 aa, Feline sarcoma virus
AFPLTRPNWDFATPAGREHLRLYRQLLLAGLRGAARRPTNLAQVKQVVQGKEENLLAGPSENDPNLFVALYDFVASGDNTLSITKGEKLRVLGYNHNGEWCEAQTKNGQGWVPSNYITPVNSLEKHSWYHGPVSRNAAEYLLSSGINGSFLVRESESSPGQRSISLRYEGRVYHYRINTASDGKLYVSPESRFNTLAELVHHHSTVADGLITTLHYPAPKRNKPTVYGVSPNYDKWEMERTDITMKHKLGGGQYGEVYEGVWKKYSLTVAVKTLKEDTMEVEEFLKEAAVMKEIKHPNLVQLLGVCTREPPFYIITEFMTYGNLLDYLRECNRQEVNAVVLLYMATQISSAMEYLEKKNFIHRDLAARNCLVGENHLVKVADFGLSRLMTGDTYTAHAGTKFPIKWTAPESLAYNKFSIKSDVWAFGVLLWEIATYGMSPYPGIDLSQVYELLEKDYRMERPEGCPEKVYELMRACWQWNPSDRPAFAEIHHDCLQILAETHGTRPDLTDQPPLPDADLTWYSDGSFIRNGERKAGAAVTTESEVIWAASLPPGTSAQRAELIALTQALKMAKGKKLTVYTDSRYAFATAHVHGEIYRRRGLLTSEGKEIKNKNEILALLEALFLPKRLSIIHCPGHQKGDSPQAKGNRLADDTAKKAASETQSSLTIIPTELIEGPKRPPWEYDDSDLDLVQKLEA

SEQ ID NO: 13451 - protein, 774 aa, Feline sarcoma virus
  unsure (1)..(774): unsure at all Xaa locations
MGQTVTTPLSLTLDHWSEVRARAHNQGVEVRKKKWITLCKAEWVMMNVGWPREGTFSLDNISQVKKKIFAPGPHGHPDQVPYITTWRSLATDPPSWVRPFLPPPKPPTPLPQPLSPQPSAPLTSSLYPVVPKPDPPKPPVLPPDPSSPLIDLLTEEPPPYPGGHGPPPSGPRTPAASPIVSRLRERRENPAEESQALPLREGPNNRPQYWPFSASDLYNWKSHNPPFSQDPVALTNLIESILVTHQPTWDDCQQLLQALLTGEERQRVLLEARKQVPGEDGRPTQLPNVIDETFPLTHPREQVQLLAKKQVLQEALQALQVALCSQAKLQAQRELLQAKLEQLGPGEPPPVLLLQDDRHSTSSSEQEREGGRTPTLEILKSHISGIFRPKFSLPPPLQLVPEVQKPLHEQLWYHGALPRAEVAXXXXXXXXXXXXXXXXXXXXXXXXXXXXXXXXXXXXXXXXXXXXXXXXXASIPLLVDHLLRSQQPLTKKSGIVLNRAVPKDKWVLNHEDLVLGEQIGRGNFGEVFSGRLRADNTLVAVKSCRETLPPDIKAKFLQEAKILKQYSHPNIVRLIGVCTQKQPIYIVMELVQGGDFLTFLRTEGARLRMKTLLQMVGDAAAGMEYLESKCCIHRDLAARNCLVTEKNVLKISDFGMSREEADGVYAASGGLRLVPVKWTAPEALNYGRYSSESDVWSFGILLWETFSLGASPYPNLSNQQTREFVEKGGRLPCPELCPDAVFRLMEQCWAYEPGQRPSFSAFYQELQSIRKRHR

SEQ ID NO: 13452 - protein, 609 aa, Gardner-Arnstein feline sarcoma virus
AARADGTMGFSSELCSPQGHGAEQQMQEAELRLLEGMRKWMAQRVKSDREYAGLLHHMSLQDGGGRGTGPYSPISQSWAEITSQTEGLSRLLRQHAEDLNSGPLSKLGLLIRERQQLRKTYSEQWQQLQQELTKTHNQDIEKLKSQYRALARDSAQARRKYQEASKDKDRDKAKLEQLGPGEPPPVLLLQDDRHSTSSSEQEREGGRTPTLEILKSHISGIFRPKFSLPPPLQLVPEVQKPLHEQLWYHGALPRAEVAELLTHSGDFLVRESQGKQEYVLSVLWDGQPRHFIIQSADNLYRPEGDGFASIPLLVDHLLRSQQPLTKKSGIVLNRAVPKDKWVLNHEDLVLGEQIGRGNFGEVFSGRLRADNTLVAVKSCRETLPPDIKAKFLQEAKILKQYSHPNIVRLIGVCTQKQPIYIVMELVQGGDFLTFLRTEGARLRMKTLLQMVGDAAAGMEYLESKCCIHRDLAARNCLVTEKNVLKISDFGMSREAADGIYAASGGLRQVPVKWTAPEALNYGRYSSESDVWSFGILLWETFSLGASPYPNLSNQQTREFVEKGGRLPCPELCPDAVFRLMEQCWAYEPGQRPSFSAIYQELQSIRKRHR

SEQ ID NO: 13453 - protein, 439 aa, Feline sarcoma virus (strain Hardy-Zuckerman 2)
ENLLAGPSENDPNLFVALYDFVASGDNTLSITKGEKLRVLGYNHNGEWCEAQTKNGQGWVPSNYITPVNSLEKHSWYHGPVSRNAAEYLLSSGINGSFLVRESESSPGQRSISLRYEGRVYHYRINTASDGKLYVSPESRFNTLAELVHHHSTVADGLITTLHYPAPKRNKPTVYGVSPNYDKWEMERTDITMKHKLGGGQYGEVYEGVWKKYSLTVAVKTLKEDTMEVEEFLKEAAVMKEIKHPNLVQLLGVCTREPPFYIITEFMTYGNLLDYLRECNRQEVNAVVLLYMATQISSAMEYLEKKNFIHRDLAARNCLVGENHLVKVADFGLSRLMTGDTYTAHAGTKFPIKWTAPESLAYNKFSIKSDVWAFGVLLWEIATYGMSPYPGIDLSQVYELLEKDYRMERPEGCPEKVYELMRACWQWNPSDRPAFAEIH

SEQ ID NO: 13454 - protein, 477 aa, Feline sarcoma virus (strain Snyder-Theilen)
HPREQVQLLAKKQVLQEALQALQVALCSQAKLQAQRELLQAKLEQLGPGEPPPVLLLQDDRHSTSSSEQEREGGRTPTLEILKSHISGIFRPKFSLPPPLQLVPEVQKPLHEQLWYHGALPRAEVAELLTHSGDFLVRESQGKQEYVLSVLWDGQPRHFIIQSADNLYRPEGDGFASIPLLVDHLLRSQQPLTKKSGIVLNRAVPKDKWVLNHEDLVLGEQIGRGNFGEVFSGRLRADNTLVAVKSCRETLPPDIKAKFLQEAKILKQYSHPNIVRLIGVCTQKQPIYIVMELVQGGDFLTFLRTEGARLRMKTLLQMVGDAAAGMEYLESKCCIHRDLAARNCLVTEKNVLKISDFGMSREEADGVYAASGGLRLVPVKWTAPEALNYGRYSSESDVWSFGILLWETFSLGASPYPNLSNQQTREFVEKGGRLPCPELCPDAVFRLMEQCWAYEPGQRPSFSAFYQELQSIRKRHR

SEQ ID NO: 13455 - protein, 981 aa, Abelson murine leukemia virus
MGQTVTTPLSLTLGHWKDVERIAHNQSVDVKKRRWVTFCSAEWPTFNVGWPRDGTFNRDLITQVKIKVFSPGPHGHPDQVPYIVTWEALAFDPPPWVKPFVHPKPPPPLPPSAPSLPLEPPLSTPPRSSLYPALTPSLGAKPKPQVLSDSGGPLIDLLTEDPPPYRDPRPPPSDRDGNGGEATPAGEAPDPSPMASRLRGRREPPVADSTTSQAFPLRTGGNGQLQYWPFSSSDLYITPVNSLEKHSWYHGPVSRNAAEYLLSSGINGSFLVRESESSPGQRSISLRYEGRVYHYRINTASDGKLYVSSESRFNTLAELVHHHSTVADGLITTLHYPAPKRNKPTIYGVSPNYDKWEMERTDITMKHKLGGGQYGEVYEGVWKKYSLTVAVKTLKEDTMEVEEFLKEAAVMKEIKHPNLVQLLGVCTREPPFYIITEFMTYGNLLDYLRECNRQEVSAVVLLYMATQISSAMEYLEKKNFIHRDLAARNCLVGENHLVKVADFGLSRLMTGDTYTAHAGAKFPIKWTAPESLAYNKFSIKSDVWAFGVLLWEIATYGMSPYPGIDLSQVYELLEKDYRMERPEGCPEKVYELMRACWQWNPSDRPSFAEIHQAFETMFQESSISDEVEKELGKRGTRGGAGSMLQAPELPTKTRTCRRAAEQKASPPSLTPKLLRRQVTASPSSGLSHKKEATKGSASGMGTPATAEPAPPSNKVGLSKASSEEMRVRRHKHSSESPGRDKGRLAKLKPAPPPPPACTGKAGKPAQSPSQEAGEAGGPTKTKCTSLAMDAVNTDPTKAGPPGEGLRKPVPPSVPKPQSTAKPPGTPTSPVSTPSTAPAPSPLAGDQQPSSAAFIPLISTRVSLRKTRQPPERIASGTITKGVVLDSTEALCLAISRNSEQMASHSAVLEAGKNLYTFCVSYVDSIQQMRNKFAFREAINKLESNLRELQICPATASSGPAATQDFSKLLSSVKEISDIVRR

SEQ ID NO: 13456 - protein, 918 aa, Abelson murine leukemia virus
MGQTVTTPLSLTLGHWKDVERIAHNQSVDVKKRRWVTFCSAEWPTFNVGWPRDGTFNRDLITQVKIKVFSPGPHGHPDQVPYIVTWEALAFDPPPWVKPFVHPKPPPPLPPSAPSLPLEPPLSTPPRSSLYPALTPSLGAKPKPQVLSDSGGPLIDLLTEDPPPYRDPRPPPSDRDGNGGEATPAGEAPDPSPMASRLRGRREPPVADSTTSQAFPLRTGGNGQLQYWPFSSSDLYITPVNSLEKHSWYHGPVSRNAAEYLLSSGINGSFLVRESESSPGQRSISLRYEGRVYHYRINTASDGKLYVSSESRFNTLAELVHHHSTVADGLITTLHYPAPKRNKPTIYGVSPNYDKWEMERTDITMKHKLGGGQYGEVYEGVWKKYSLTVAVKTLKEDTMEVEEFLKEAAVMKEIKHPNLVQLLGVCTREPPFYIITEFMTYGNLLDYLRECNRQEVSAVVLLYMATQISSAMEYLEKKNFIHRDLAARNCLVGENHLVKVADFGLSRLMTGDTYTAHAGAKFPIKWTAPESLAYNKFSIKSDVWAFGVLLWEIATYGMSPYPGIDLSQVYELLEKDYRMERPEGCPEKVYELMRACWQWNPSDRPSFAEIHQAFETMFQESSISDEVEKELGKRGTRGGAGSMLQAPELPTKTRTCRRAAEQKASPPSLTPKLLRRQVTASPSSGLSHKKEATKGSASGMGTPATAEPAPPSNKVGLSKASSEEMRVRRHKHSSESPGRDKGRLAKLKPAPPPPPACTGKAGKPAQSPSQEAGEAGGPTKTKCTSLAMDAVNTDPTKAGPPGEGLRKPVPPSVPKPQSTAKPQGLPPARSPPPPQHQLLHPWLGTSSHLLPPSSPSYQPVCLLGRPASRQSALPVAPSPRVWFWTVLRPCALPSPGTQSRWPATVLYWRLARTCTLSV

SEQ ID NO: 13457 - protein, 746 aa, Abelson murine leukemia virus
YITPVNSLEKHSWYHGPVSRNAAEYLLSSGINGSFLVRESESSPGQRSISLRYEGRVYHYRINTASDGKLYVSSESRFNTLAELVHHHSTVADGLITTLHYPAPKRNKPTIYGVSPNYDKWEMERTDITMKHKLGGGQYGEVYEGVWKKYSLTVAVKTLKEDTMEVEEFLKEAAVMKEIKHPNLVQLLGVCTREPPFYIITEFMTYGNLLDYLRECNRQEVSAVVLLYMATQISSAMEYLEKKNFIHRDLAARNCLVGENHLVKVADFGLSRLMTGDTYTAHAGAKFPIKWTAPESLAYNKFSIKSDVWAFGVLLWEIATYGMSPYPGIDLSQVYELLEKDYRMERPEGCPEKVYELMRACWQWNPSDRPSFAEIHQAFETMFQESSISDEVEKELGKRGTRGGAGSMLQAPELPTKTRTCRRAAEQKASPPSLTPKLLRRQVTASPSSGLSHKKEATKGSASGMGTPATAEPAPPSNKVGLSKASSEEMRVRRHKHSSESPGRDKGRLAKLKPAPPPPPACTGKAGKPAQSPSQEAGEAGGPTKTKCTSLAMDAVNTDPTKAGPPGEGLRKPVPPSVPKPQSTAKPPGTPTSPVSTPSTAPAPSPLAGDQQPSSAAFIPLISTRVSLRKTRQPPERIASGTITKGVVLDSTEALCLAISRNSEQMASHSAVLEAGKNLYTFCVSYVDSIQQMRNKFAFREAINKLESNLRELQICPATASSGPAATQDFSKLLSSVKEISDIVRR

SEQ ID NO: 13458 - protein, 818 aa, Abelson murine leukemia virus
YITPVNSLEKHSWYHGPVSRNAAEYLLSSGINGSFLVRESESSPGQRSISLRYEGRVYHYRINTASDGKLYVSSESRFNTLAELVHHHSTVADGLITTLHYPAPKRNKPTIYGVSPNYDKWEMERTDITMKHKLGGGQYGEVYEGVWKKYSLTVAVKTLKEDTMEVEEFLKEAAVMKEIKHPNLVQLLGVCTREPPFYIITEFMTYGNLLDYLRECNRQEVSAVVLLYMATQISSAMEYLEKKNFIHRDLAARNCLVGENHLVKVADFGLSRLMTGDTYTAHAGAKFPIKWTAPESLAYNKFSIKSDVWAFGVLLWEIATYGMSPYPGIDLSQVYELLEKDYRMERPEGCPEKVYELMRACWQWNPSDRPSFAEIHQAFETMFQESSISDEVEKELGKRGTRGGAGSMLQAPELPTKTRTCRRAAEQKDAPDTPELLHTKGLGESDALDSEPAVSPLLPRKERGPPDGSLNEDERLLPRDRKTNLFSALIKKKKKMAPTPPKRSSSFREMDGQPDRRGASEDDSRELCNGTTSSHLRRSRAYQVPKGQQWGWLPNGAFREPGNSGFRSPHMWKKSSTLTGSRLAAAEEESGMSSSKRFLRSCSASCMPHGARDTEWRSVTLPRDLPSAGKQFDSSTFGGHKSEKPALPRKRTSESRSEQVAKSTAMPLPGWLKKNEEAAEEGFKDTESSPGSSPPSLTPKLLRRQVTASPSSGLSHKKEATKGSASGMGTPATAEPAPPSNKVGLSKASSEEMRVRRHKHSSESPGRDKGRLAKLKPAPPPPPACTGKAGKPAQSPSQEAGEAGGPQRQNARVWLWML

SEQ ID NO: 13459 - protein, 359 aa, Murine sarcoma virus
AKVKGITQGPNESPSAFLERLKEAYRRYTPYDPGTQEKNKIRPRGQRDSSYYWKMEASEVMLSTRIGSGSFGTVYKGKWHGDVAVKILKVVDPTPEQLQAFRNEVAVLRKTRHVNILLFMGYMTKDNLAIVTQWCEGSSLYKHLHVQETKFQMFQLIDIARQTAQGMDYLHAKNIIHRDMKSNNIFLHEGLTVKIGDFGLATVKSRWSGSQQVEQPTGSVLWMAPEVIRMQDDNPFSFQSDVYSYGIVLYELMAGELPYAHINNRDQIIFMVGRGYASPDLSRLYKNCPKAIKRLVADCVKKVKEERPLFPQILSSIELLQHSLPKINRSAPEPSLHRAAHTEDINACTLTTSPRLPVF

SEQ ID NO: 13460 - protein, 323 aa, Murine sarcoma virus 3611
EKNKIRPRGQRDSSYYWKMEASEVMLSTRIGSGSFGTVYKGKWHGDVAVKILKVVDPTPEQLQAFRNEVAVLRKTRHVNILLFMGYMTKDNLAIVTQWCEGSSLYKHLHVQETKFQMFQLIDIARQTAQGMDYLHAKNIIHRDMKSNNIFLHEGLTVKIGDFGLATVKSRWSGSQQVEQPTGSVLWMAPEVIRMQDDNPFSFQSDVYSYGIVLYELMAGELPYAHINNRDQIIFMVGRGYASPDLSRLYKNCPKAIKRLVADCVKKVKEERPLFPQILSSIELLQHSLPKINRSAPEPSLHRAAHTEDINACTLTTSPRLPVF

SEQ ID NO: 13461 - protein, 957 aa, Gardner-Arnstein feline leukemia oncovirus B
MGQTITTPLSLTLDHWSEVRARAHNQGVEVRKKKWITLCEAEWVMMNVGWPREGTFSLDNISQVEKKIFAPGPYGHPDQVPYITTWRSLATDPPSWVRPFLPPPKPPTSLPQPLSPQPSAPLTSSLYPVLPKSDPPKPPVLPPDPSSPLIDLLTEEPPPYPGGHGPPPSGPRTPTASPIASRLRERRENPAEESQALPLREGPNNRPQYWPFSASDLYNWKSHNPPFSQDPVALTNLIESILVTHQPTWDDCQQLLQALLTGEERQRVLLEARKQVPGEDGRPTQLPNVIDETFPLTRPNWDFATPAGREHLRLYRQLLLAGLRGAARRPTNLAQVKQVVQGKEETPAAARADGTMGFSSELCSPQGHGAEQQMQEAELRLLEGMRKWMAQRVKSDREYAGLLHHMSLQDGGGRGTGPYSPISQSWAEITSQTEGLSRLLRQHAEDLNSGPLSKLGLLIRERQQLRKTYSEQWQQLQQELTKTHNQDIEKLKSQYRALARDSAQARRKYQEASKDKDRDKAKLEQLGPGEPPPVLLLQDDRHSTSSSEQEREGGRTPTLEILKSHISGIFRPKFSLPPPLQLVPEVQKPLHEQLWYHGALPRAEVAELLTHSGDFLVRESQGKQEYVLSVLWDGQPRHFIIQSADNLYRPEGDGFASIPLLVDHLLRSQQPLTKKSGIVLNRAVPKDKWVLNHEDLVLGEQIGRGNFGEVFSGRLRADNTLVAVKSCRETLPPDIKAKFLQEAKILKQYSHPNIVRLIGVCTQKQPIYIVMELVQGGDFLTFLRTEGARLRMKTLLQMVGDAAAGMEYLESKCCIHRDLAARNCLVTEKNVLKISDFGMSREAADGIYAASGGLRQVPVKWTAPEALNYGRYSSESDVWSFGILLWETFSLGASPYPNLSNQQTREFVEKGGRLPCPELCPDAVFRLMEQCWAYEPGQRPSFSAIYQELQSIRKRHR

SEQ ID NO: 13462 - protein, 506 aa, Avian myelocytomatosis virus MH2
AGPWADITQGPSESFVDFANRLIKAVEGSDLPPSARAPVIIDCFRQKSQPDIQQLIRAAPSTLTTPGEIIKYVLDRQKTAPLTDQGIAAAMSSAIQPLVMAVVNRERDGQTGSGGRARGLCYTCGSPTMPVDSRIIEDAIRNHSESASPSASSGSPNNMSPTGWSQPKTPVPAQRERAPGTNTQEKNKIRPRGQRDSSYYWEIEASEVLLSTRIGSGSFGTVYKGKWHGDVAVKILKVVDPTPEQFQAFRNEVAVLRKTRHVNILLFMGYMTKDNLAIVTQWCEGSSLYKHLHVQETKFQMFQLIDIARQTAQGMDYLHAKNIIHRDMKSNSIFLHEGLTVKIGDFGLATVKSRWSGSQQVEQPTGSILWMAPEVIRMQDSNPFSFQSDVYSYGIVLYELMTGELPYSHINNRDQIIFMVGRGYASPDLSKLYKNCPKAMKRLVADCLKKAREERPLFPQILSSIELLQHSLPKINRSASEPSLHRASHTEDINSCTLTSTRLPVF

SEQ ID NO: 13463 - protein, 410 aa, Avian myelocytomatosis virus MH2
PLVMAVVNRERDGQTGSGGRARGLCYTCGSPTMPVDSRIIEDAIRNHSESASPSASSGSPNNMSPTGWSQPKTPVPAQRERAPGTNTQEKNKIRPRGQRDSSYYWEIEASEVLLSTRIGSGSFGTVYKGKWHGDVAVKILKVVDPTPEQFQAFRNEVAVLRKTRHVNILLFMGYMTKDNLAIVTQWCEGSSLYKHLHVQETKFQMFQLIDIARQTAQGMDYLHAKNIIHRDMKSNNIFLHGGLTVKIGDFGLATVKSRWSGSQQVEQPTGSILWMAPEVIRMQDSNPFSFQSDVYSYGIVLYELMTGELPYSHINNRDQIIFMVGRGYASPDLSKLYKNCPKAMKRLVADCLKKVREERPLFPQILSSIALLQHSLPKINRSASEPSLHRASHTEDINSCTLTSTRLPVF

SEQ ID NO: 13464 - protein, 410 aa, Avian myelocytomatosis virus MH2
PLVMAVVNRERDGQTGSGGRARGLCYTCGSPTMPVDSRIIEDAIRNHSESASPSASSGSPNNMSPTGWSQPKTPVPAQRERAPGTNTGEKNKIRPRGQRDSSYYWEIEASEVLLSTRIGSGSFGTVYKGKWHGDVAVKILKVVDPTPEQFQAFRNEVAVLRKTRHVNILLFMGYMTKDNLAIVTQWCEGSSLYKHLHVQETKFQMFQLIDIARQTAQGMDYLHAKNIIHRDMKSNNIFLHGGLTVKIGDFGLATVKSRWSGSQQVEQPTGSILWMAPEVIRMQDSNPFSFQSDVYSYGIVLYELMTGELPYSHINNRDQIIFMVGRGYASPDLSKLYKNCPKAMKRLVADCLKKVREERPLFPQILSSIALLQHSLPKINRSASEPSLHRASHTEDINSCTLTSTRLPVF

SEQ ID NO: 13465 - protein, 380 aa, Avian myelocytomatosis virus MH2
PTMPVDSRIIEDAIRNHSESASPSASSGSPNNMSPTGWSQPKTPVPAQRERAPGTNTQEKNKIRPRGQRDSSYYWEIEASEVLLSTRIGSGSFGTVYKGKWHGDVAVKILKVVDPTPEQFQAFRNEVAVLRKTRHVNILLFMGYMTKDNLAIVTQWCEGSSLYKHLHVQETKFQMFQLIDIARQTAQGMDYLHAKNIIHRDMKSNNIFLHGGLTVKIGDFGLATVKSRWSGSQQVEQPTGSILWMAPEVIRMQDSNPFSFQSDVYSYGIVLYELMTGELPYSHINNRDQIIFMVGRGYASPDLSKLYKNCPKAMKRLVADCLKKVREERPLFPQILSSIALLQHSLPKINRSASEPSLHRASHTEDINSCTLTSTRLPVF

SEQ ID NO: 13466 - protein, 1079 aa, Avian retrovirus IC10
MEAVIKVISSACKTYCGKTSPSKKEIGAMLSLLQKEGLLTSPSDLYSPGSWDPITAALSQRAMVLGKSGELKTWGLVLGALKAAREEQVTSEQAKFWLGLGGGRVSPPGPESIEKPATERRIDKGEEVGETTVQRDAKMAPEETATPKTVGTFCYHCGTAIGCNCATASAPPPPYVGSGLYPSLAGVGEQQGQGGDTPPGAEQPRAEQQHAGQAPGPALTDWARVREELASTGPPVVAMPVVIKTEGPAWTPLEPKLITRLADTVRTKGLRSPITMAEVEALMSSPLLPHDVTNLMRVILGPAPYALWMDAWGVQLQTVIAAATRDPRHPANGQGRGERTNLDRLKGLADGMVGNPQGQAVLLRPGELVAITASALQAFREVARLAEPAGPWADITQGPSESFVDFANRLIKAVEGSDLPPSARAPVIIDCFRQKSQPDIQQLIRAAPSTLTTPGEIIKYVLDRQKTAPLTDQGIAAAMSSAIQPLVMAVVNRERDGQTGSGGRARGLCYTCGSPGHYQAQCPKKRKSGNSRERCQLCDGMGHNAKQCRKRDGNQGQRPGRGLSSGPWPGPDQPAVSLAMTMEHKDRPLVRVILTNTGSHPVKQRSVYITALLDSGADITIISEEDWPTDWPVMEAANPQIHGIGEGGSTAGLSATPPASLPGSLTNVKALQKSPGPQRERKSSSSSEDRNRMKTLGRRDSSDDWEIPDGQITVGQRIGSGSFGTVYKGKWHGDVAVKMLNVTAPTPQQLQAFKNEVGVLRKTRHVNILLFMGYSTKPQLAIVTQWCEGSSLYHHLHIIETKFEMIKLIDIARQTAQGMDYLHAKSIIHRDLKSNNIFLHEDLTVKIGDFGLATVKSRWSGSHQFEQLSGSILWMAPEVIRMQDKNPYSFQSDVYAFGIVLYELMTGQLPYSNINNRDQIIFMVGRGYLSPDLSKVRSNCPKAMKRLMAECLKKKRDERPLFPQILASIELLARSLPKIHRSASEPSLNRAGFQTEDFSLYACASPKTPIQAGGIGEWAVHLLKGLLLGLVVILLLVVCLPCLLQCVSSSIRKMIDNSLGYREEYKKLQEAYKQPERRA

SEQ ID NO: 13467 - protein, 367 aa, Avian retrovirus IC10
EGGSTAGLSATPPASLPGSLTNVKALQKSPGPQRERKSSSSSEDRNRMKTLGRRDSSDDWEIPDGQITVGQRIGSGSFGTVYKGKWHGDVAVKMLNVTAPTPQQLQAFKNEVGVLRKTRHVNILLFMGYSTKPQLAIVTQWCEGSSLYHHLHIIETKFEMIKLIDIARQTAQGMDYLHAKSIIHRDLKSNNIFLHEDLTVKIGDFGLATVKSRWSGSHQFEQLSGSILWMAPEVIRMQDKNPYSFQSDVYAFGIVLYELMTGQLPYSNINNRDQIIFMVGRGYLSPDLSKVRSNCPKAMKRLMAECLKKKRDERPLFPQILASIELLARSLPKIHRSASEPSLNRAGFQTEDFSLYACASPKTPIQA

SEQ ID NO: 13468 - protein, 567 aa, Avian retrovirus IC10
GSPGHYQAQCPKKRKSGNSRERCQLCDGMGHNAKQCRKRDGNQGQRPGRGLSSGPWPGPDQPAVSLAMTMEHKDRPLVRVILTNTGSHPVKQRSVYITALLDSGADITIISEEDWPTDWPVMEAANPQIHGIGEGGSTAGLSATPPASLPGSLTNVKALQKSPGPQRERKSSSSSEDRNRMKTLGRRDSSDDWEIPDGQITVGQRIGSGSFGTVYKGKWHGDVAVKMLNVTAPTPQQLQAFKNEVGVLRKTRHVNILLFMGYSTKPQLAIVTQWCEGSSLYHHLHIIETKFEMIKLIDIARQTAQGMDYLHAKSIIHRDLKSNNIFLHEDLTVKIGDFGLATVKSRWSGSHQFEQLSGSILWMAPEVIRMQDKNPYSFQSDVYAFGIVLYELMTGQLPYSNINNRDQIIFMVGRGYLSPDLSKVRSNCPKAMKRLMAECLKKKRDERPLFPQILASIELLARSLPKIHRSASEPSLNRAGFQTEDFSLYACASPKTPIQAGGIGEWAVHLLKGLLLGLVVILLLVVCLPCLLQCVSSSIRKMIDNSLGYREEYKKLQEAYKQPERRA

SEQ ID NO: 13469 - protein, 587 aa, Avian sarcoma virus
MGSSKSKPKDPSQRRRSLEPPDSTHHGGFPASQTPNKTAAPDTHRTPSRSFGTVATEPKLFGGFNTSDTVTSPQRAGALAGGVTTFVALYDYESRTETDLSFKKGERLQIVNNTEGDWWLAHSLTTGQTGYIPSNYVAPSDSIQAEEWYFGKTTRRESERLLLNPENPRGTFLVRESETTKGAYCLSVSDFDNAKGLNVKHYKIRKLDSGGFYITSRTQFSSLQQLVAYYSKHADGLCHRLTNVCPTSKPQTQGLAKDAWEIPRESLRLEVKLGQGCFGEVWMGTWNGTTRVAIKTLKPGTMSSEAFLQEAQVMKKLRHEKLVQLYAVVSEEPIYIVTEYMSKGSLLDFLKGEMGKYLRLPQLVDMAAQIASGMAYVERMNYVHRDLRAANILVGENLVCKVADFGLARLIEDNEYTARQGAKFPIKWTAPEAALYGRFTIKSDVWSFGILLTELTTKGRVPYPGMVNREVLDQVERGYRMPCPPECPESLHDLMCQCWRKDPEERPTFEYLQAFLEDYFTSTEPPVPAWREPIGLELLLAPEASLWGTGAWLRAEGPRFGEQPQSRMWHGEVSGAPSLIKTVLGHP

SEQ ID NO: 13470 - protein, 812 aa, Avian sarcoma virus
MEAVIKVISSACKTYCGKTSPSKKEIGAMLSLLQKEGLLMSPSDLYSPGSWDPITAALSQRAMVLGKSGELKTWGLVLGALKAAREEQVTSEQAKFWLGLGGGRVSPPGPECIEKPATERRIDKGEEVGETTVQRDAKMAPEETATPKTVGTSCYHCGTASGCNCATATASAPPPPYVGSGLCPSLAGVGEQRKRGDDTPRGAEQPRAEPRHTGLTLGPARSARLPPPAPLPSSLPLLPPFPPRVAAVPGGAGGAPLPSLSPSFSHPRRRGRAEATVGCIKSKEDKGPAMKYRTDNTPEPISSHVSHYGSDSSQATQSPAIKGSAVNFNSHSMTPFGGPSGMTPFGGASSSFSAVPSPYPSTLTGGGTVFVALYDYEARTTDDLSFKKGERFQIINNTEGDWWEARSIATGKTGYIPSNYVAPADSIQAEEWYFGKMGRKDAERLLLNPGNQRGIFLVRESETTKGAYSLSIRDWDEVRGDNVKHYKIRKLDNGGYYITTRAQFESLQKLVKHYREHADGLCHKLTTVCPTVKPQTQGLAKDAWEIPRESLRLEVKLGQGCFGEVWMGTWNGTTKVAIKTLKLGTMMPEAFLQEAQIMKKLRHDKLVPLYAVVSEEPIYIVTEFMTKGSLLDFLKEGEGKFLKLPQLVDMAAQIADGMAYIERMNYIHRDLRAANILVGDNLVCKIADFGLARLIEDNEYTARQGAKFPIKWTAPEAALYGRFTIKSDVWSFGILLTELVTKGRVPYPGMVNREVLEQVERGYRMPCPQGCPESLHELMKLCWKKDPDERPTFEYIQSFLEDYFTAAEPSGY

SEQ ID NO: 13471 - protein, 634 aa, Avian sarcoma virus
ITRLADTVRTKGLRSPITMAEVEALMSSPLLPHDVTNLMRVILGPAPYALWMDAWGVQLQTVIAAATRDPRHPANGQGRGERTNLDRLKGLADGMVGNPQAASGQLHRPQPQEHTSTSAAAGTWRHTQASESRHRLPHCSAAPSHQDHSAMGFGPELWCPKGHSELLRLQDSELRLLELMKKWMSERAKSDREYAGMLHHMFSQLGSEEPPPALPLQEDRQSVCSTDQERSGVTALETIKNHISGIFSPRFSLPPPVPLIPEVQKPLCQQAWYHGAIPRSEVQELLKCSGDFLVRESQGKQEYVLSVLWDGQPRHFIIQAADNLYRLEGDGFPTIPLLIDHLLQSQQPITRKSGIVLTRAVLKDKWVLNHEDVLLGERIGRGNFGEVFSGRLRADNTPVAVKSCRETLPPELKAKFLQEARILKQYNHPNIVRLIGVCTQKQPIYIVMELVQGGDFLSFLRSKGPHLKMKELIKMMENAAAGMEYLESKHCIHRDLAARNCLVTEKNTLKISDFGMSRQEEDGVYASTGGMKQIPVKWTAPEALNYGRYSSESDVWSFGILLWEAFSLGAVPYANLSNQQTREAIEQGVRLEPPEQCPEDVYRLMQRCWEYDPRRRPSFGAVHQDLIAIRKRHR

SEQ ID NO: 13472 - protein, 587 aa, Avian sarcoma virus PR2257
MGSSKSKPKDPSQRRRSLEPPDSTHHGGFPASQTPNKTAAPDTHRTPSRSFGTVATEPKLFGGFNTSDTVTSPQRAGALAGGVTTFVALYDYESRTETDLSFKKGERLQIVNNTEGDWWLAHSLTTGQTGYIPSNYVAPSDSIQAEEWYFGKITRRESERLLLNPENPRGTFLVRESETTKGAYCLSVSDFDNAKGLNVKHYKIRKLDSGGFYITSRTQFSSLQQLVAYYSKHADGLCHRLTNVCPTSKPQTQGLAKDAWEIPRESLRLEVKLGQGCFGEVWMGTWNGTTRVAIKTLKPGTMSPEAFLQEAQVMKKLRHEKLVQLYAVVSEEPIYIVTEYMSKGSLLDFLKGEMGKYLRLPQLVDMAAQIASGMAYVERMNYVHRDLRAANILVGENLVCKVADFGLARLIEDNEYTARQGAKFPIKWTAPEAALYGRFTIKSDVWSFGILLTELTTKGRVPYPGMVNREVLDQVERGYRMPCPPECPESLHDLMCQCWRKDPEERPTFEYLQAFLEDYFTSTEPPVPAWREPIGLELLLAPEASLWGTGAWLRAEGPRFGEQPQSRMWHGEVSGAPSLIKTVLGHP

SEQ ID NO: 13473 - protein, 533 aa, Avian sarcoma virus PRCII
ASGQLHRPQPQEHTSTSAAAGTWRHTQASESRHRLPHCSAAPSHQDHSAMGFGPELWCPKGHSELLRLQDSELRLLELMKKWMSERAKSDREYAGMLHHMFSQLGSEEPPPALPLQEDRQSVCSTDQERSGVTALETIKNHISGIFSPRFSLPPPVPLIPEVQKPLCQQAWYHGAIPRSEVQELLKCSGDFLVRESQGKQEYVLSVLWDGQPRHFIIQAADNLYRLEGDGFPTIPLLIDHLLQSQQPITRKSGIVLTRAVLKDKWVLNHEDVLLGERIGRGNFGEVFSGRLRADNTPVAVKSCRETLPPELKAKFLQEARILKQYNHPNIVRLIGVCTQKQPIYIVMELVQGGDFLSFLRSKGPHLKMKELIKMMENAAAGMEYLESKHCIHRDLAARNCLVTEKNTLKISDFGMSRQEEDGVYASTGGMKQIPVKWTAPEALNYGRYSSESDVWSFGILLWEAFSLGAVPYANLSNQQTREAIEQGVRLEPPEQCPEDVYRLMQRCWEYDPRRRPSFGAVHQDLIAIRKRHR

SEQ ID NO: 13474 - protein, 568 aa, Avian sarcoma virus S1
MGSSKSKPKDPSQRRRSLEPPDSTHHGGFPASQTPNKTAAPDTHRTPSRSFGTVATEPKLFGGFNTSDTVTSPQRAGALAGGVTTFVALYDYESRTETDLSFKKGERLQIVNNTEGDWWLAHSLTTGQTGYIPSNYVAPSDSIQAEEWYFGKITRRESERLLLNPENPRGTFLVRESETTKGAYCLSVSDFDNARGLNVKHYKIRKLDSGGFYITSRTQFSSLQQLVAYYSKHADGLCHRLTNVCPTSKPQTQGLAKDAWEIPRESLRLEVKLGQGCFGEVWMGTWNGTTRVAIKTLKPGTMSPEAFLQEAQVMKKLRHEKLVRLYAVVSEEPIYIVTEYMSKGSLLDFLKGEMGKYLRLPQLVDMAAQIASGMAYVERMNYVHRDLRAANILVGENLVCKVADFGLARLIEDNEYTARQGAKFPIKWTAPEAALYGRFTIKSDVWSFGILLTELTTKGRVPYPGMVNREVLDQVERGYRMPCPPECPESLHDLMCQCWRKDPEERPTFEYLQAFLEDYFTSTEPTAVHMATDPGKYTTAHKSRARVSSNTAVARPAAPVRVLLKPSV

SEQ ID NO: 13475 - protein, 557 aa, Avian sarcoma virus S2
MGSSKSKPKDPSQRRRSLEPPDSTHHGGFPASQTPNKTAAPDTHRTPSRSFGTVATEPKLFGGFNTSDTVTSPQRAGALAGGVTTFVALYDYESRTETDLSFKKGERLQIVNNTEGDWWLAHSLTTGQTGYIPSNYVAPSDSIQAEEWYFGKITRRESERLLLNPENPRGTFLVRESETTKGAYCLSVSDFDNAKGLNVKHYKIRKLDSGGFYITSRTQFSSLQQLVAYYSKHADGLCHRLTNVCPTSKPQTQGLAKDAWEIPRESLRLEVKLGQGCFGEVWMGTWNGTTRVAIKTLKPGTMSPEAFLQEAQVMKKLRHEKLVQLYAVVSEEPIYIVTEYMSKGSLLDFLKGEMGKYLRLPQLVDMAAQIASGMAYVERMNYVHRDLRAANILVGENLVCKVADFGLARLIEDNEYTARQGAKFPIKWTAPEAALYGRFTIKSDVWSFGILLTELTTKGRVPYPGMVNREVLDQVERGYRMPCPPECPESLHDLMCQCWRKDPEERPTFEYLQAFLEDYLGILAWTPWEDKQEGPRGETASNKQERPGEDTLAADES

SEQ ID NO: 13476 - protein, 812 aa, Avian sarcoma virus Y73
MEAVIKVISSACKTYCGKTSPSKKEIGAMLSLLQKEGLLMSPSDLYSPGSWDPITAALSQRAMVLGKSGELKTWGLVLGALKAAREEQVTSEQAKFWLGLGGGRVSPPGPECIEKPATERRIDKGEEVGETTVQRDAKMAPEETATPKTVGTSCYHCGTASGCNCATATASAPPPPYVGSGLCPSLAGVGEQRKRGDDTPRGAEQPRAEPRHTGLTLGPARSARLPPPAPLPSSLPLLPPFPPRVAAVPGGAGGAPLPSLSPSFFHPRRRGRAEATVGCIKSKEDKGPAMKYRTDNTPEPISSHVSHYGSDSSQATQSPAIKGSAVNFNSHSMTPFGGPSGMTPFGGASSSFSAVPSPYPSTLTGGGTVFVALYDYEARTTDDLSFKGGERFQIINNTEGDWWEARSIATGKTGYIPSNYVAPADSIEAEEWYFGKMGRKDAERLLLNPGNQRGIFLVRESETTKGAYSLSIRDWDEVRGDNVKHYKIRKLDNGGYYITTRAQFESLQKLVKHSREHADGLCHKLTTVCPTVKPQTQGLAKDAWEIPRESLRLEVKLGQGCFGEVWMGTWNGTTKVAIKTLKLGTMMPEAFLQEAQIMKKLRHDKLVPLYAVVSEEPIYIVTEFMTKGSLLDFLKEGEGKFLKLPQLVDMAAQIADGMAYIERMNYIHRDLRAANILVGDNLVCKIADFGLARLIEDNEYTARQGAKFPIKWTAPEAALYGRFTIKSDVWSFGILLTELVTKGRVPYPGMVNREVLEQVERGYRMPCPQGCPESLHELMKLCWKKDPDERPTFEYIQSFLEDYFTAAEPSGY

SEQ ID NO: 13477 - protein, 528 aa, Avian sarcoma virus Y73
DKGPAMKYRTDNTPEPISSHVSHYGSDSSQATQSPAIKGSAVNFNSHSMTPFGGPSGMTPFGGASSSFSAVPSPYPSTLTGGGTVFVALYDYEARTTDDLSFKGGERFQIINNTEGDWWEARSIATGKTGYIPSNYVAPADSIEAEEWYFGKMGRKDAERLLLNPGNQRGIFLVRESETTKGAYSLSIRDWDEVRGDNVKHYKIRKLDNGGYYITTRAQFESLQKLVKHSREHADGLCHKLTTVCPTVKPQTQGLAKDAWEIPRESLRLEVKLGQGCFGEVWMGTWNGTTKVAIKTLKLGTMMPEAFLQEAQIMKKLRHDKLVPLYAVVSEEPIYIVTEFMTKGSLLDFLKEGEGKFLKLPQLVDMAAQIADGMAYIERMNYIHRDLRAANILVGDNLVCKIADFGLARLIEDNEYTARQGAKFPIKWTAPEAALYGRFTIKSDVWSFGILLTELVTKGRVPYPGMVNREVLEQVERGYRMPCPQGCPESLHELMKLCWKKDPDERPTFEYIQSFLEDYFTAAEPSGY

SEQ ID NO: 13478 - protein, 528 aa, Avian sarcoma virus Y73
DKGPAMKYRTDNTPEPISSHVSHYGSDSSQATQSPAIKGSAVNFNSHSMTPFGGPSGMTPFGGASSSFSAVPSPYPSTLTGGGTVFVALYDYEARTTDDLSFKKGERFQIINNTEGDWWEARSIATGKTGYIPSNYVAPADSIQAEEWYFGKMGRKDAERLLLNPGNQRGIFLVRESETTKGAYSLSIRDWDEVRGDNVKHYKIRKLDNGGYYITTRAQFESLQKLVKHYREHADGLCHKLTTVCPTVKPQTQGLAKDAWEIPRESLRLEVKLGQGCFGEVWMGTWNGTTKVAIKTLKLGTMMPEAFLQEAQIMKKLRHDKLVPLYAVVSEEPIYIVTEFMTKGSLLDFLKEGEGKFLKLPQLVDMAAQIADGMAYIERMNYIHRDLRAANILVGDNLVCKIADFGLARLIEDNEYTARQGAKFPIKWTAPEAALYGRFTIKSDVWSFGILLTELVTKGRVPYPGMVNREVLEQVERGYRMPCPQGCPESLHELMKLCWKKDPDERPTFEYIQSFLEDYFTAAEPSGY

SEQ ID NO: 13479 - protein, 1182 aa, Fujinami sarcoma virus
MEAVIKVISSACKTYCGKTSPSKKEIGAMLSQLQKEGLLMSLSDLYSPGSWDPITAALTQRAMVLGKSGELKTWGLVLGALKAAREEQVTSEQAKFWLGLGGGRVSPPGPECIEKPATERRIDKGETTVQRDTKMAPEETATPKTVGTSCYHCGTAIGCNCATASAPPPPYVGSGLYPSLAGVGEQQGQGGDTPRGAEQPRAEPGRTGLAPGPALTDWARIREELASTGPPMVAMPVVIKTEGPAWTPLEPKLIAGLAGAVGAGGLRSPIAVAGVEALMSSPLLPHDVTNPMRVILGPAPHALWMDAWAASGQLHRPQPQEHTSTSAAAGTWRLTQASESRHRLPHCSAAPSHQDHSAMGFGPELWCPKGHTELLRLQDSELRLLELMKKWMSQRAKSDREYAGMLHHMFSQLEKQEGLGHLRATDHSSQIGESWWVLASQTETLSQTLRRHAEELAAGPLAKLSILIRDKQQLRKVFSEQWQQLSQEYAWTTQQEVEKLKAQYRSLVRDSTQAKRKYQEASKDKEREKAKEKYVRSLSKLYALHNQYVLAVQAAALHHHHHYQRALPTLHESLYSLQQEMVLVLKEILGEYCSITSLVQEDVLAIHQKVAHAVEMIDPATEYSSFVQCHRYDSEVPPAVTFDESLLEEAENLEPGELQLNELTIESVQHSLTSIEEELLASRKAVSSKEQRVWELQVELRGEELALSPGERVHLLGKRQGLREAQQQLQGLVCAQAKLQAQRDMLANKLAELGSEEPPPALPLQEDRQSARSTDQERSGVTALKTIKNHISGIFSPRFSLPPPVPLIPEVQKPLCQQAWYHGAIPRSEVQELLKYSGDFLVRESQGKQEYVLSVLWDGQPRHFIIQAADNLYRLEDDGLPTIPLLIDHLLQSQRPITRKSGIVLTRAVLKDKWVLNHEDVLLGERIGRGNFGEVFSGRLRADNTPVAVKSCRETLPPELKAKFLQEARILKQCNHPNIVRLIGVCTQKQPIYIVMELVQGGDFLSFLRSKGPRLKMKKLIKMMENAAAGMEYLESKHCIHRDLAARNCLVTEKNTLKISDFGMSRQEEDGVYASTGGMKQIPVKWTAPEALNYGWYSSESDVWSFGILLWEAFSLGAVPYANLSNQQTREAIEQGVRLEPPEQCPEDVYRLMQRCWEYDPHRRPSFGAVHQDLIAIRKRHR

SEQ ID NO: 13480 - protein, 873 aa, Fujinami sarcoma virus
ASGQLHRPQPQEHTSTSAAAGTWRLTQASESRHRLPHCSAAPSHQDHSAMGFGPELWCPKGHTELLRLQDSELRLLELMKKWMSQRAKSDREYAGMLHHMFSQLEKQEGLGHLRATDHSSQIGESWWVLASQTETLSQTLRRHAEELAAGPLAKLSILIRDKQQLRKVFSEQWQQLSQEYAWTTQQEVEKLKAQYRSLVRDSTQAKRKYQEASKDKEREKAKEKYVRSLSKLYALHNQYVLAVQAAALHHHHHYQRALPTLHESLYSLQQEMVLVLKEILGEYCSITSLVQEDVLAIHQKVAHAVEMIDPATEYSSFVQCHRYDSEVPPAVTFDESLLEEAENLEPGELQLNELTIESVQHSLTSIEEELLASRKAVSSKEQRVWELQVELRGEELALSPGERVHLLGKRQGLREAQQQLQGLVCAQAKLQAQRDMLANKLAELGSEEPPPALPLQEDRQSARSTDQERSGVTALKTIKNHISGIFSPRFSLPPPVPLIPEVQKPLCQQAWYHGAIPRSEVQELLKYSGDFLVRESQGKQEYVLSVLWDGQPRHFIIQAADNLYRLEDDGLPTIPLLIDHLLQSQRPITRKSGIVLTRAVLKDKWVLNHEDVLLGERIGRGNFGEVFSGRLRADNTPVAVKSCRETLPPELKAKFLQEARILKQCNHPNIVRLIGVCTQKQPIYIVMELVQGGDFLSFLRSKGPRLKMKKLIKMMENAAAGMEYLESKHCIHRDLAARNCLVTEKNTLKISDFGMSRQEEDGVYASTGGMKQIPVKWTAPEALNYGWYSSESDVWSFGILLWEAFSLGAVPYANLSNQQTREAIEQGVRLEPPEQCPEDVYRLMQRCWEYDPHRRPSFGAVHQDLIAIRKRHR

SEQ ID NO: 13481 - protein, 898 aa, Fujinami sarcoma virus
PHDVTNPMRVILGPAPYALWMDAWAASGQLHRPQPQEHTSTSAAAGTWRLTQASESRHRLPHCSAAPSHQDHSAMGFGPELWCPKGHSELLRLQDSELRLLELMKKWMSQRAKSDREYAGMLHHMFSQLEKQEGLGHLRATDHSSQIGESWWVLASQTETLSQTLRRHAEELAAGPLAKLSILIRDKQQLRKVFSEQWQQLSQEYAWTTQQEVEKLKAQYRSLVRDSTQAKRKYQEASKDKEREKAKEKYVRSLSKLYALHNQYVLAVQAAALHHRHHYQRALPTLHESLYSLQQEMVLVLKEILGEYCSITSLVQEDVLAIHQEVAHAVEMIDPATEYSSFVQCHRYDSEVPPAVTFDESLLEEAESLEPGELQLNELTIESVQHSLTSIEEELLASRKAVSSKEQRVWELQVELRGEELALSPGERVHLLGKRQGLREAQQQLQGLVCAQAKLQAQRDMLTNKLAELGSDEPPPALPLQEDRQSACSTDQERSGVTALKTIKNHISGIFSPRFSLPPPVPLIPEVQKPLCQQAWYHGAIPRSEVQELLKYSGDFLVRESQGKQEYVLSVLWDGQPRHFIIQAADNLYRLEDDGLPTIPLLIDHLLQSQRPITRKSGIVLTRAVLKDKWVLNHEDVLLGERIGRGNFGEVFSGRLRADNTPVAVKSCRETLPPELKAKFLQEARILKQCNHPNIVRLIGVCTQKQPIYIVMELVQGGDFLSFLRSKGPRLKMKKLIKMMDNAAAGMEYLESKHCIHRDLAARNCLVTEKNTLKISDFGMSRQEEDGVYASTGGMKQIPVKWTAPEALNYGWYSSESDVWSFGILLWEAFSLGAVPYANLSNQQTREAIEQGVRLEPPEQCPEDVYRLMQRCWEYDPHRRPSFGAVHQDLIAIRKRHR

SEQ ID NO: 13482 - protein, 873 aa, Fujinami sarcoma virus
ASGQLHRPQPQEHTSTSAAAGTWRLTQASESRHRLPHCSAAPSHQDHSAMGFGPELWCPKGHSELLRLQDSELRLLELMKKWMSQRAKSDREYAGMLHHMFSQLEKQEGLGHLRATDHSSQIGESWWVLASQTETLSQTLRRHAEELAAGPLAKLSILIRDKQQLRKVFSEQWQQLSQEYAWTTQQEVEKLKAQYRSLVRDSTQAKRKYQEASKDKEREKAKEKYVRSLSKLYALHNQYVLAVQAAALHHRHHYQRALPTLHESLYSLQQEMVLVLKEILGEYCSITSLVQEDVLAIHQEVAHAVEMIDPATEYSSFVQCHRYDSEVPPAVTFDESLLEEAESLEPGELQLNELTIESVQHSLTSIEEELLASRKAVSSKEQRVWELQVELRGEELALSPGERVHLLGKRQGLREAQQQLQGLVCAQAKLQAQRDMLANKLAELGSEEPPPALPLQEDRQSACSTDQERSGVTALKTIKNHISGIFSPRFSLPPPVPLIPEVQKPLCQQAWYHGAIPRSEVQELLKYSGDFLVRESQGKQEYVLSVLWDGQPRHFIIQAADNLYRLEDDGLPTIPLLIDHLLQSQRPITRKSGIVLTRAVLKDKWVLNHEDVLLGERIGRGNFGEVFSGRLRADNTPVAVKSCRETLPPELKAKFLQEARILKQCNHPNIVRLIGVCTQKQPIYIVMELVQGGDFLSFLRSKGPRLKMKKLIKMMDNAAAGMEYLESKHCIHRDLAARNCLVTEKNTLKISDFGMSRQEEDGVYASTGGMKQIPVKWTAPEALNYGWYSSESDVWSFGILLWEAFSLGAVPYANLSNQQTREAIEQGVRLEPPEQCPEDVYRLMQRCWEYDPHRRPSFGAVHQDLIAIRKRHR

SEQ ID NO: 13483 - protein, 526 aa, Rous sarcoma virus
MGSSKSKPKDPSQRRRSLEPPDSTHHGGFPASQTPDETAAPDAHRNPSRSFGTVATEPKLFWGFNTSDTVTSPQRAGALAGGVTTFVALYDYESWTETDLSFKKGERLQIVNNTEGDWWLAHSLTTGQTGYIPSNYVAPSDSIQAEEWYFGKITRRESERLLLNPENPRGTFLVRKSETAKGAYCLSVSDFDNAKGPNVKHYKICKLYSGGFYITSRTQFGSLQQLVAYYSKHADGLCHRLTNVCPTSKPQTQGLAKDAWEIPRESLRLEAKLGQGCFGEVWMGTWNGTTRVAIKTLKPGTMSPEAFLQEAQVMKKLRHEKLVQLYAVVSEEPIYIVIEYMSKGSLLDFLKGEMGKYLRLPQLVDMAAQIASGMAYVERMNYVHRDLRAANILVGENLVCKVADFGLARLIEDNEYTARQGAKFPIKWTAPEAALYGRFTIKSDVWSFGILLTELTTKGRVPYPGMVNREVLDQVERGYRMPCPPECPESLHDLMCQCWRKDPEERPTFKYLQAQLLPACVLEVAE

SEQ ID NO: 13484 - protein, 526 aa, Rous sarcoma virus
MGSSKSKPKDPSQRRRSLEPPDSTHHGGFPASQTPNKTAAPDTHRTPSRSFGTVATEPKLFGGFNTSDTVTSPQRAGALAGGVTTFVALYDYESWIETDLSFKKGERLQIVNNTEGNWWLAHSLTTGQTGYIPSNYVAPSDSIQAEEWYFGKITRRESERLLLNPENPRGTFLVRESETTKGAYCLSVSDFDNAKGLNVKHYKIRKLDSGGFYITSRTQFSSLQQLVAYYSKHADGLCHRLTNVCPTSKPQTQGLAKDAWEIPRESLRLEVKLGQGCFGEVWMGTWNGTTRVAIKTLKPGTMSPEAFLQEAQVMKKLRHEKLVQLYAVVSEEPIYIVIEYMSKGSLLDFLKGEMGKYLRLPQLVDMAAQIASGMAYVERMNYVHRDLRAANILVGENLVCKVADFGLARLIEDNEYTARQGAKFPIKWTAPEAALYGRFTIKSDVWSFGILLTELTTKGRVPYPGMGNGEVLDRVERGYRMPCPPECPESLHDLMCQCWRRDPEERPTFEYLQAQLLPACVLEVAE

SEQ ID NO: 13485 - protein, 772 aa, Rous sarcoma virus
IPSRPVGGPCYLGKLTMLAPKHTDILKVLVNSSRTGIRRKRSTSHLDDTCSDEVQLWGPTARIFASILAPGVAAAQALREIERLACWSVKQANLTTSLLGDLLDDVTSIRHAVLQNRAAIDFLLLAHGHGCEDVAGMCCFNLSDQSESIQKKFQLMKEHVNKIGVDSDLIGSWLRGLFGGIGEWAVHLLKGLLLGLVVILLLVVCLPCLLQMLCGNRRKMINNSISYHTEYKKLQKACGQPESRIVMGSSKSKPKDPSQRRRSLEPPDSTHHGGFPASQTPNKTAAPDTHRTPSRSFGTVATEPKLFGGFNTSDTVTSPQRAGALAGGVTTFVALYDYESWIETDLSFKKGERLQIVNNTEGNWWLAHSLTTGQTGYIPSNYVAPSDSIQAEEWYFGKITRRESERLLLNPENPRGTFLVRESETTKGAYCLSVSDFDNAKGLNVKHYKIRKLDSGGFYITSRTQFSSLQQLVAYYSKHADGLCHRLTNVCPTSKPQTQGLAKDAWEIPRESLRLEVKLGQGCFGEVWMGTWNGTTRVAIKTLKPGTMSPEAFLQEAQVMKKLRHEKLVQLYAVVSEEPIYIVIEYMSKGSLLDFLKGEMGKYLRLPQLVDMAAQIASGMAYVERMNYVHRDLRAANILVGENLVCKVADFGLARLIEDNEYTARQGAKFPIKWTAPEAALYGRFTIKSDVWSFGILLTELTTKGRVPYPGMGNGEVLDRVERGYRMPCPPECPESLHDLMCQCWRRDPEERPTFEYLQAQLLPACVLEVAE

SEQ ID NO: 13486 - protein, 526 aa, Rous sarcoma virus
MGSSKSKPKDPSQRRRSLEPPDSTHHGGFPASQTPNTTAAPDTHRTPSRSFGTVATEPKLFGDFNTSDTVTSPQRAGALAGGVTTFVALYDYESWIETDLSFKKGERLQIVNNTEGNWWLAHSVTTGQTGYIPSNYVAPSDSIQAEEWYFGKITRRESERLLLNPENPRGTFLVRESETTKGAYCLSVSDFDNAKGLNVKHYKIRKLDSGGFYITSRTQFSSLQQLVAYYSKHADGLCHRLTNVCPTSKPQTQGLAKDAWEIPRESLRLEVKLGQGCFGKVWMGTWNGTTRVAIKTLKPGTMSPEAFLQEAQVMKKLQHEKLVQLYAVVSKEPIYIVIEYMSKGSLLNFLKGEMGKYLRLPQLVDMAAQIASGMAYVERMNYVHRDLRAANILVGENLVCKVADFGLARLIEDNEYTARQGAKFPIKWTAPEAALYGRFTIKSDVWSFGILLTELTTKGRVPYPGMGNGEVLDRVERGYRMPCPPECPESLHDLMCQCWRRDPEERPTFEYLQAQLLPACVLEVAE

SEQ ID NO: 13487 - protein, 526 aa, Rous sarcoma virus
MGSSKSKPRDPSQRRHSLEPPDSTHHGGFPASQTPDETAAPDAHRNPSRSFGTVATEPKLFWGFNTSDTVTSPQRAGALAGGVTTFVALYDYESWTETDLSFKKGERLQIVNNTEGYWWLAHSLTTGQTGYIPSNYVAPSDSIQAEEWYFGKITRRESERLLLNPENPRGTFLVRKSETAKGAYCLSVSDFDNAKGPNVKHYKIYKLYSGGFYITLRTQFGSLQQLVAHYSKHADGLCHRLTNVCPTSKPQTQGLAKDAWEIPRESLRLEAKLGQGCFGEVWMGTWNGTTRVAIKTLKPGTMSPEAFLQEAQVMKKFRHEKLVQLYAVVSEEPIYIVIEYMSKGSLLDFLKGEMGKYLRLPQLVDMAAQIASGMAYVERMNYVHRDLRAANILVGENLVCKVADFGLARLIEDNEYTARQGAKFPIKWTAPEAALYGRFTIKSDVWSFGILLTELTTKGRVPYPGMVNREVLDQVERGYRMPCPPECPESLHDLMCQCWRKDPEERPTFKYLQAQLLPACVLEVAE

SEQ ID NO: 13488 - protein, 523 aa, Rous sarcoma virus
MGSSKSKPKDPSQRRRSLEPPDSTHHGGFPASQTPNKTAAPDTHRTPSRSFGTVATEPKLFGDFNTSDTVTSPQRAGALAGGVTTFVALYDYESWIETDLSFKKGERLQIVNNTEGNWWLAHSVTTGQTGYIPSNYVAPSDSIQAEEWYFGKITRRESERLLLNPENPRGTFLVRESETTKGAYCLSVSDFDNAKGLNVKHYKIRKLDSGGFYITSRTQFSSLQQLVAYYSKHADGLCHRLTNVCPTSKPQTQGLAKDAWEIPRESLRLEVKLGQGCFGEVWMGTWNGTTRVAIKTLKPGTMSPEAFLQEAQVMKKLRHEKLVQLYAVVSEEPIYIVIEYMSKGSLLDFLKGKYLRLPQLVDMAAQIASGMAYVERMNYVHRDLRAANILVGENLVCKVADFGLARLIEDNEYTARQGAKFPIKWTAPEAALYGRFTIKSDVWSFGILLTELTTKGRMPYPGMGNGEVLDRVERGYRMPCPPECPESLHDLMCQCWRRDPEERPTFEYLQAQLLPACVLEVAE

SEQ ID NO: 13489 - protein, 526 aa, Rous sarcoma virus
MGSSKSKPKDPSQRRRSLEPPDSTHHGGFPASQTPDETAAPDAHRNPSRSFGTVATEPKLFWGFNTSDTVTSPQRAGALAGGVTTFVALYDYESWTETDLSFKKGERLQIVNNTEGDWWLAHSLTTGQTGYIPSNYVAPSDSIQAEEWYFGKITRRESERLLLNPENPRGTFLVRKSETTKGAYCLSVSDFDNAKGPNVKHYKIYKLYSGGFYITSRTQFGSLQQLVAYYSKHADGLCHRLANVCPTSKPQTQGLAKDAWEIPRESLRLEAKLGQGCFGEVWMGTWNNTTRVAIKTLKPGTMSPEAFLQEAQVMKKLRHEKLVQLYAVVSEEPIYIVIEYMSKGSLLDFLKGEMGKYLRLPQLVDMAAQIASGMAYVERMNYVHRDLRAANILVGENLVCKVADFGLARLIEDNEYTARQGAKFPIKWTAPEAALYGRFTIKSDVWSFGILLTELTTKGRVPYTGMVNREVLDQVERGYRMPCPPECPESLHDLMCQCWRKDPEERPTFKYLQAQLLPACVLEVAE

SEQ ID NO: 13490 - protein, 546 aa, Rous sarcoma virus
MGSSKSKPKDPSQRRRSLEPPDSTHHGGFPASQTPNKTAPLTAAPRSSRRPPASQHRAAAPDTHRTPSRSFGAVATEPKLLGDFNTSDTVTSPQRARALAGGVTTFVALYDYESWIETDLSFKKGERLQIVNNTEGNWWLAHSVTTGQTGYIPSNYVAPSDSIQAEEWYFGKITRRESGRLLLNPENPRGTFLVRESETTKGAYCLSVSDFDNAKGLNVKHYKIRKLDSGGFYITSRTQFSSLQQLVAYYSKHADGLCHRLTNVCPTSKPQTQGLAKDAWEIPRESLRLEVKLGQGCFGEVWMGTWNGTTRVAIKTLKPGTMSPEAFLQEAQVMKKLRHEKLVQLYAVVSEEPIYIVIEYMSKGSLLNFLKGEMGKYLRLPQLVDMAAQIASGMAYVERMNYVHRDLRAANILVGENLECKVADFGLARLIEDNEYTARQGAKFPAKWTAPEAGLYGRFTIKSDVWSFGILLTELTTKGRVPYPGMGNGEVLDRVERGYRMPCPPECPESLHDLMCQCWRRDPEERPTFEYLQAQLLPACMLEVAE

SEQ ID NO: 13491 - protein, 526 aa, Rous sarcoma virus
MGSSKSKPKDPSQRRHSLEPPDSTHHGGFPASQTPDETAAPDAHRNPSRSFGTVATEPKLFWGFNTSDTVTSPQRAGALAGGVTTFVALYDYESWTETDLSFKKGERLQIVNNTEGDWWLAHSLTTGQTGYIPSNYVAPSDSIQAEEWYFGKITRRESERLLLNPENPRGTFLVRKSETAKGAYCLSVSDFDNAKGPNVKHYKIYKLYSGGFYITSRTQFGSLQQLVAYYSKHADGLCHRLANVCPTSKPQTQGLAKDAWEIPRESLRLEAKLGQGCFGEVWMGTWNDTTRVAIKTLKPGTMSPEAFLQEAQVMKKLRHEKLVQLYAVVSEEPIYIVIEYMSKGSLLDFLKGEMGKYLRLPQLVDMAAQIASGMAYVERMNYVHRDLRAANILVGENLVCKVADFGLARLIEDNEYTARQGAKFPIKWTAPEAALYGRFTIKSDVWSFGILLTELTTKGRVPYPGMVNREVLDQVERGYRMPCPPECPESLHDLMCQCWRKDPEERPTFKYLQAQLLPACVLEVAE

SEQ ID NO: 13492 - protein, 526 aa, Rous sarcoma virus
MGSSKSKPKDPSQRRRSLEPPDSTHHGGFPASQTPNTTAAPDTHRTPSRSFGTVATEPKLFGDFNTSDTVTSPQRAGALAGGVTTFVALYDYESWIETDLSFKKGERLQIVNNTEGNWWLAHSVTTGQTGYIPSNYVAPSDSIQAEEWYFGKITRRESERLLLNPENPRGTFSVRESETTKGAYCLSVSDFDNAKGLNVKHYKIRKLDSGGFYITSRTQFSSLQQLVTYYSKHADGLCHRLTNVCPTSKPQTQGLAKDAWEIPRESLRLEVKLGQGCFGEVWMGTWNGTTRVAIKTLKPGTMSPEAFLQEAQVMKKLQHEKLVQLYAVVSEEPIYIVIEYMSKGSLLNFLKGEMGKYLRLPQLVDMAAQIASSMAYVERMNYVHRDLRAANILVGENLVCKVADFGLARLIEDNEYTARQGAKFPIKWTAPEAALYGRFTIKSDVWSFGILLTELTTKGRVPYPGMGNGEVLDRVEEGYRMPCPPECPESLHDLMCQCWRRDPEERPTFEYLQAQLLPACVLEVAE

SEQ ID NO: 13493 - protein, 526 aa, Rous sarcoma virus
MGSSKSKPKDPSQRRRSLEPPDSTHHGGFPASQTPNKTAAPDTHRTPSRSFGTVATEPKLFEDFNTSDTVTSPQRAGALAGGVTTFVALYDYESWIETDLSFKKGERLQIVNNTEGNWWLAHSVTTGQTGYIPSNYVAPSDSIQAEEWYFGKITRRESERLLLNPENPRGTFLVRESETTKGAYCLSVSDFDNAKGLNVKHYKIRKLDSGGFYITSRTQFSSLQQLVAYYSKHADGLCHRLTNVCPTSKPQTQGLAKDAWEIPRESLRLEVKLGQGCFGEVWMGTWNGTTRVAIKTLKPGTMSPEAFLQEAQVMKKLQHEKLVQLYAVVSEEPIYIVIEYMSKGSLLDFLKGEMGKYLRLPQLVDMADQIASGMAYVERMNYVHRDLRAANILVGENLVCKVADFGLARLIEDNEYTARQGAKFPIKWTAPEAALYGRFTIKSDVWSFGILLTELTTKGRMPYPGMGNGEVLDRVERGYRMPCPPECPESLHDLMCQCWRRDPEERPTFEYLQAQLLPACVLEVAE

SEQ ID NO: 13494 - protein, 523 aa, Rous sarcoma virus
MGSSKSKPKDPSQRRRSLEPPDSTHHGGFPASQTPNKTAAPDTHRTPSRSFGTVATELKLFGDFNTSDTVTSPQRAGALAGSVTTFGTRESRIETDLSFKKRERLQIVNNTEGDWWLAHSLTTGQTGYIPSNYVAPSDSIQAEEWYFGKITRRESGRLLLNPENPRGTFLVRESETTKGAYCLSVSDFDNAKGLNVKHYKIRKLDSGGFYITSRTQFSSLQQLVAYYSKHADGLCHRLTNVCPTSKPQTQGLAKDAWEIPRESLRLEVKLGQGYFGEVWMGTWNGTTRVAIKTLKPGTMSPEAFLQEAQVMKKLRHEKLVQLYAMVSEEPIYIVIEYMSKGSLLDFLKGEMGKYLRLPQLVEMAAQIASGMAYVERMNYVHRDLRAANILVGENLVCKVADFGLARLIEDNEYTARPGARFPVKWTAPEAALYGRFTIKSDVWSFGILLTELTTKGRAPYPGMVNGEVLDRVERGYRMPCPPECPESLHDLMCQCWRKDPEERPTFEYLQAQLLPACVLKIAE

SEQ ID NO: 13495 - protein, 535 aa, Rous sarcoma virus
MGSSKSKPKDPSHRRRSLEPPDSTHHGGFPASQTPNKTAAPDTHRTPSRSFGTVATEPKLFGDFNTSDTVTSPQRAGALAGGVTTFVALYDYESWIETDLSFKKGERLQIVNNTEGNWWLAHSVTTGQTGYIPSNYVAPSDSIQAEEWYFGKITRRESERLLLNPENPRGTFLVRESETTKGAYCLSVSDFDNAKGLNVKHYKIRKLDSGGFYITSRTQFSSLQQLVAYYSKHADGLCHRLTNVCPTSKPQTQGLAKDAWEIPRESLRLEVKLGQGCFGEVWMGTWNGTTRVGTWNGTTRVAIKTLKPGTMSPEAFLQEAQVMKKLRHEKLVQLYAVVSEEPIYIVIEYMSKGSLLDFLKGEMGKYLRLPQLVDMAAQIASGMAYVERMNYVHRDLRAANILVGENLVCKVADFGLARLLEDNEYTARQGAKFPIKWTAPEAALYGRFTIKSDVWSFGILLTELTTKGRMPYPGMGNGEVLDRVERGYRMPCPPECPESLHDLMCQCWRRDPEERPTFEYLQAQLLPACVLEVAE

SEQ ID NO: 13496 - protein, 545 aa, Rous sarcoma virus
MGSSKSKPKDPSQRRRSLEPPDSTHHGGFPASQTPNKTAPLTAAPRSSRRPPASQHRAAAPDTHRTPSRSFGTVANEPKLFGDFNTSDTVTSPQRARTLAGGVTTFVALYDYESWIETDLSFKKGERLQIVNNTEGNWWLAHSVTTGQTGYIPSNYVAPSDSIQAEEWYFGKITRRESGRLLLNPENPRGTFLVRESETTKGAYCLSVSDFDNAKGLNVKHYKIRKLDSGGFYITSRTQFSSLQQLVAYYSKHADGLCHRLTNVCPTSKPQTQGLAKDAWEIPRESLRLEVKLGQGCFGEVWMGTWNGTTRVAIKTLKPGTMSPEAFLQEAQVMKKLRHEKLVQLYAVVSEEPIYIVIEYMSKGSLLNFLKGEMGKYLRLPQLVDMAAQIASGMAYVERMNYVHRDLRAANILVGENLECKVADFGLARLIEDNEYTARQGAKFPAKWTAPEAGLYGRFTIKSDVWSFGILLTELTTKGRVPYPGMGNGEVLDRVERGYRMPCPPECPESLHDLMCQCWRREPEERPTFEYLQAQLLPACVLAAE

SEQ ID NO: 13497 - protein, 526 aa, Rous sarcoma virus (strain H-19)
MGSSKSKPKDPSQRRRSLEPPDSTHHGGFPASQTPDETAAPDAHRNPSRSFGTVATEPKLFWGFNTSDTVTSPQRAGALAGGVTTFVALYDYESWTETDLSFKKGERLQIVNNTEGDWWLAHSLTTGQTGYIPSNYVAPSDSIQAEEWYFGKITRRESERLLLNPENPRGTFLVRKSETAKGAYCLSVSDFDNAKGPNVKHYKICKLYSGGFYITSRTQFGSLQQLVAYYSKHADGLCHRLTNVCPTSKPQTQGLAKDAWEIPRESLRLEAKLGQGCFGEVWMGTWNGTTRVAIKTLKPGTMSPEAFLQEAQVMKKLRHEKLVQLYAVVSEEPIYIVIEYMSKGSLLDFLKGEMGKYLRLPQLVDMAAQIASGMAYVERMNYVHRDLRAANILVGENLVCKVADFGLARLIEDNEYTARQGAKFPIKWTAPEAALYGRFTIKSDVWSFGILLTELTTKGRVPYPGMVNREVLDQVERAYRMPCPPECPESLHDLMCQCWRKDPEERPTFKYLQAQLLPACVLEVAE

SEQ ID NO: 13498 - protein, 526 aa, Rous sarcoma virus (strain Schmidt-Ruppin)
MGSSKSKPKGPSQRRRSLEPPDSTHHGGFPASQTPNKTAAPDTHRTPSRSFGTVATEPKLFGDFNTSDTVTSPQRAGALAGGVTTFVALYDYESWIETDLSFKKGERLQIVNNTEGNWWLAHSVTTGQTGYIPSNYVAPSDSIQAEEWYFGKITRRESERLLLNPENPRGTFLVRESETTKGAYCLSVSDFDNAKGLNVKHYKIRKLDSGGFYITSRTQFSSLQQLVAYYSKHADGLCHRLTNVCPTSKPQTQGLAKDAWEIPRESLRLEVKLGQGCFGEVWMGTWNGTTRVAIKTLKPGTMSPEAFLQEAQVMKKLRHKKLVQLYAVVSEEPIYIVIEYMSKGSLLDFLKGEMGKYLRLPQLVDMAAQIASGMAYVERMNYVHRDLRAANILVGENLVCKVADFGLARLIEDNEYTARQGAKFPIKWTAPEAALYGRFTIKSDVWSFGILLTELTTKGRVPYPGMGNGEVLDRVERGYRMPCPPECPESLHDLMSQCWRRDPEERPTFEYLQAQLLPACVLEVAE

SEQ ID NO: 13499 - protein, 526 aa, Avian sarcoma virus RASV1441
MGSSKSKPKDPSQRRCSLEPPDSTHHGGFPASQTPNKTAAPDTHRTPSRSFGTVATEPKLFGGFNTSDTVTSPQRAGALAGGVTTFVALYDYESRTETDLSFKKGERLQIVNNTEGDWWLAHSLTTGQTGYIPSNYVAPSDSIQAEEWYFGKITRRESERLLLNPENPRGTFLVRESETTKGAYCLSVSDFDNAKGLNVKHYKIRKLDSGGFYITSRTQFSSLQQLVAYYSKHADGLCHRLTNVCPTSKPQTQGLAKDAWEIPRESLRLEVKLGQGCFGEVWMGTWNGTTRVAIKTLKPGTMSPEAFLQEAQVMKKLRHEKLVQLYAVVSEEPIYIVTEYMSKGSLLDFLKGEMGKYLRLPQLVDMAAQIASGMAYVERMNYVHRDLRAANILVGENLVCKVADFGLARLIEDNEYTARQGAKFPIKWTAPEAALYGRFTIKSDVWSFGILLTELTTKGRVPYPGMGNGEVLDRVERGYRMPCPPECPESLHDLMCQCWRRDPEERPTFEYLQAQLLPACVLEVAE

SEQ ID NO: 13500 - protein, 450 aa, Rous-associated virus type 1
MEAVIKDLIRDQGVRGEGGSTAGLSATPPASLPGSLTNVKALQKSPGPQRERKSSSSSEDRNRMKTLGRRDSSDDWEIPDGQITVGQRIGSGSFGTVYKGKWHGDVAVKMLNVTAPTPQQLQAFKNEVGVLRKTRHVNILLFMGYSTKPQLAIVTQWCEGSSLYHHLHIIETKFEMIKLIDIARQTAQGMDYLHAKSIIHRDLKSNNIFLHEDLTVKIGDFGLATVKSRWSGSHQFEQLSGSILWMAPEVIRMQDKNPYSFQSDVYAFGIVLYELMTGQLPYSNINNRDQIIFMVGRGYLSPDLSKVRSNCPKAMKRLMAECLKKKRDERPLFPQILASIELLARSLPKIHRSASEPSLNRAGFQTEDFSLYACASPKTPIQAGGIGEWAVHLLKGLLLGLVVILLLVVCLPCLLQCVSSSIRKMIDNSLGYREEYKKLQEAYKQPERRA

SEQ ID NO: 13501 - protein, 677 aa, Anopheles gambiae str. PEST
MLMRSGIERSGSREQRDQQQDWVMMSPLWTARYDYEAQGDDELSLRVGQIVYVLSTDSSISGDEGWWTGKIGDRVGIFPSNFVTNEDPAVLKVQPVEIQYHELDLKEVIGVGGFSKVHRAFLNGEEVAVKASRQDDEFEVARQNVLQEAKLFWSLKHPNIVSLKGVCLDPKTLCLVMEYARGGSLNKILAGRKIPPNVLVDWAIQIARGMKYLHCEAPISVIHRDLKSSNVLISESIQHGHLLNKTLKITDFGLAREAYRTTRMSAAGTFAWMPPEVIKSGTYSKASDVWSYGVLLWELLTGETPYKGFDSLSVAYGVAVNTLALPIPKTCPESWGKLMKSCWEIDPHRRPSFKDIEKDLDIIARSGFAQTPHESFHTMQDGWKKEIAEVLQELRKKEKELRSKEEELTRVQQEQRYKEENLAKREQELHAREIELLGRELKILINQNTPTPKKRKGKFSKSRIKLIKKAPGQISLPSDFRHTITIQHTAIRDERQRIDTPPGSPATRLRTIVFPGDVIKGKTWGPSTLHQRERSHLPTMRPSARPQQFSKSAPNLDKSRATALSASSSRHEILGKSHDDGLHTIEANRNYSRTNTTTTCTSNDVMNSNINRNRMHNTFQHYHTTVPRTVDSNSGVCSSNRSNYSPHSNPHHPHHNHAADSGRAHSEASVLAARQDV

SEQ ID NO: 13502 - protein, 712 aa, Anopheles gambiae str. PEST
LEEDLRNIKSVIHVTRENIDALNEKFADFQQPPALYLEEYQELTSKLHDLEIKEQDLMEKKIQMQNEQLSEPSEPPDPAERVEVSLSYCEKCRILSSSHCFQTESMCGTLSRQSKMLLRAFLPNQQRTSVQVIPGMRLKDALAKALKRRNLTCEFCEVTAGNSNYPIPWETDVSALNCDEVFVRILDIGFPTYISHQFIRKTFFSLAFCECCRRLLFTGFYCNQCNYRFHQRCVDKVPPICSKRHMDSTFYHVLLANPESTAGIINPGAGGYSTSLRHPRSLNQHDRSNSAPNVCINNVIKPFFGGENRHVISNRPLQVVLICFMYNLSFMVKPKLLMRSHCLSIDFTGILYICNGLQAQPNQEHSHSTQASPTNTLNHSKRPRARSADESNKNLLSPRDSKQSDENWNIQAEEILIGQRIGSGSFGTVYKAHWHGPVAVKTLNVKTPSPAQLQAFKNEVAMLKKTRHCNILLFMGCVSKPSLAIVTQWCEGSSLYKHIHVNETKFKLNTLIDIARQAAQGMDYLHAKNIIHRDLKSNNIFLHDDFSVKIGDFGLATAKVRWSGSQQSNQPTGSILWMAPEVIRMKEQNPYSFQSDVYAFGIVLYEMLTEQLPYNHINNKDQILFMVGCGKLRPDSTKVRTDCPQALKRCVEDCIKFNRDERPLFRLLLNMLENMLRTMPKFHRSASEPNFTQTQLQNDDFLYMCSSPKTPV

SEQ ID NO: 13503 - protein, 880 aa, Anopheles gambiae str. PEST
MCANGWPQLPVGMVAAGGPGVGPVGVGIGVGVGVGMSSKPATAGWMDGLFGCMRPVLSLIGKSHIMEMKSKQTEDWEIPYETITDMVWLGSGAQGAVFCGKLRNELVAVKKVRELKETDIRHLRKLDHENIVKFKGVCTQAPVFCIIMEYCAHGPLHKKLQDSGGVITPQQLVSWSQQIALGMQYLHTHKIIHRDLKSPNILIGENDVIKISDFGTSREWNEISTKMSFAGTVAWMAPEVIRNEPCNEKVDIWSYGVVLWELLTGEVPYKNVDSSQIIFGVGNNSLYLPIPDTCPEGFKLLIKQCWSAKPRNRPSFKIILTHLDIAGRELLQACEKGQYELYYQTQRSWREDIRSHMQKLTSNGMDIQKHEQDLIQKRKDEWKHAQDVRMTYERKLERTNMLCMQLSQLILQVEQKEQEILKREKLLAPEQRKCGFLKRGGDKANRKRPFSFPAMTTALPGRGGYGYSTTPSPTAAGVTPAKATLYAELNPSGHQGAKSVVVPVAAAPPPPYSTLAPLQTAAAAVPVTSPITSPEAVPVQPMAPSTTSSGRVKKLRHRRVGSGTINCSPKCSPCRDRRVQSEPESRHVKLVDTETQTEPMDISEPDVIEEALRRLSVSERLAGDRVLPVETRVSAYRCSSKPQSEDDGEVPEDEENGNSISISTMTNSRSSDMMTTSGGVPVTGSEQNYRYRRQQSSQQQEDLREEEADGYVEEFDDEREGSSPDPIMDAMNRNERFDRACSDDDKIDTLDRKVNIISEKLQQSAAYGNLLNDNNVIVYRAALKQPNGPPSGGKTILLKHPGAGSNLKPAGAGGAGIGAYLYSGPHAGGLAVVGGGAGAVPAEVEQHHEPKLGEQEEEESWTDEEGEEPDQKQYYVLRRK

SEQ ID NO: 13504 - protein, 871 aa, Anopheles gambiae str. PEST
VNIRRGLDVIQSMIDISADRLEGLRTQCATSAELTQQEIRTLETKLVKLFSDLLITKSKLPERLPAQGLPATGNELKQWLRVVGLSCASLNAVIQQVSTLEGLLEKDEKELRTIMGNNVYVREEEMKRLTRACGNLRRCREHLELPATDGSVSRKGTEPHDLFWDSWDRQPACHRTNGPGMPGEAMGSTSNTSPQTDDGGGSLSLATTQHVEGAALLNPQHAISPDEASTSGCTPSPSPPNSPSNVQLHNRQNRRGFPTTPPPRKKHQTALLSFASGGSATSAGMLSETGGEYGGDPGVPPHPTGYSAVPPKSPCTPIITRGMGHMIQHRFTKKFKVTKSTCDLCNKQMFFGFKCTECKYRCHKDCKSNVPPSCGLPQEFVDEFKKSLHGGIGRGPMHAIHACGGGPDSSSAGSSCNSSSPSSPALLSLPPQTPATSKYSQFNFPEVSNSIGGSGGGGNGGSLMMMNYASSMGGGSSSGGITIETHPIGGGTGGAGGLGGSLGSSGVYTMDTSVEIPKLQFSDDHSVPGGGEDKTGSASATSTDSSSDRTPIRLDSTEERDHESSWPRQNSLSLKEWDIPYDDLHLKEKIGNGRFGTVHRALWHGDVAVKLLKEDYVADERTLEAFKLEVATFKKTRHENVVLFMGACMKPPRLAIVTSLCKGNTLFTHIHLRKDKFNLNRTTLVAQQISQGMGYLHARGIVHKDLKTKNIFLENGKVIITDFGLFSATKLLYCDLGLGIPGGWLCYLAPELMRNLTPYRPIEGDLPFSKTSDIYAFGTVWYELLCGEFPFKSQPAESIIWQVGRGMKQTLANLQASRDVKDILIQCWSHNSEDRPDFAKLLTQLERLPKKRLARSPSHPVQLSRSAESVF

SEQ ID NO: 13505 - protein, 1314 aa, Anopheles gambiae str. PEST
EALLQSRPLPHIPPPGSLLPTDLLGQNQDGLENHTGTMHSQGSSNAAQSSFETAHRWTSKENLLAPGPEEDDPQLFVALYDFKAGGENQLSLRKGEQVRILSYNKSGEWCEAHSDSGHVGWVPSNYVTPLNSLEKHSWYHGPISRNAAEYLLSSGINGSFLVRESESSPGQRSISLRYDGRVYHYRISEDSDGKVYVTADAKFNTLAELVHHHSALHEGHGLITPLLYPAPKQNKPTVFPLSPEPDEWEICRTDIVMKHKLGGGQYGEVYEAVWKRYGNTVAVKTLKEDTMALKDFLEEAAIMKEMKHPNLVQLIGVCTREPPFYIITEFMSHGNLLDFLRTAGRETLDAVALLYMATQIASGMSYLESRNFIHRDLAARNCLVGDNNLVKVADFGLARLMRDDTYTAHAGAKFPIKWTAPEGLAYNKFSTKSDVWAFGVLLWEIATYGMSPYPGIDLTDVFHKLESGYRMERPPGCPPEVYDLMRKCWQWNAQDRPTFKSIHHDLEHMFQESSITEAVEKQLQGVGWETCITLIATWFFFSDSGSGSGSKFSTFGNKQPSTAGVQMRRTTNKRGKTAPAPPKRTSLLSSSRDSTYRDDDNCKLGEGEQNANGFSRDMANLMNRATDSENEQTEVTPDTDTDNPEPVGFQKTPQQSSFKRAPIMGNRGLETRGSKRLPQQARRDQLPPGPGGQPCTPVLGTGQPPIVGALEVQNVKKAINRYGTLPKDARIGAYLESLRQSDGTMGMNPNMALVSEPPPPPMAAANAISNSILAQRNAAAIKAQPQMIRSNSSSGVTMSNSATASLSKLQRHRTTTDGSMMTFSSFRGSVGNNSPKRAVQPTLADLEFPPPPVDLPPPPEEFDMPLDQRGGGGSGGSGGMLEKSIAPSNDVRNTEPSVEEASTRFGVSLRKREPSTDSCSSLGSPADAMINTVGDPSSLPIPPPPPAKDLKADPKRVTNVPKCLQGDVVGGKRTAGPLHGTSDPASQLVSELAESMHLPKAPSPLTTAQEPQHHQQQQPISHYKSSDPPFKAQLKKVDTAKRAPAQPAKKEESTGGIIDFKSRLRKVDQNNTEVSSNGGSGGAPIDSNKVIELKKTEIKIELSDDRKRESLEGNSLKVDSGGGSGDNLSTGSSGAGGEDGDGKRKSTGSISSLKKLWEAKESPSDPNKKPAVPMKPSKFASIYATPVQNMMQTASSTVASATGSSVGGGGGRESILELVQLLQTSLKQPVGNISASQWLALSDRLNSLQSSCVTFADNESLPPHAKFHFRELVTRVENQARSLRSASNKNVQDNEKLVQEVGQSLKQISNALHR

SEQ ID NO: 13506 - protein, 473 aa, Anopheles gambiae str. PEST
VNGGGDLNMPGGPTVTPGTPNTKAKDVSPRVKIVVALYPFKAIESGDLSLEKNAEYEVIDDSQEHWWKVKDQHGTIGYIPSNYVKEKELLGLQKYDWYVGDMSRQRAESLLKQNDKEGCFVVRKSSTKGLYTLSLHTKVPQSHVKHYHIKQNARSEFYLSEKHCCETIPDLINYHRHNSGGLACRLKTSPCDRPVPPTAGLSHDKWEIHPSELMILEELGSGQFGVVRRAKWRGSIDTAVKMMKVGTMSEDDFIEEAKVMTKLQHPNLVQLYGVCSKHRPIYIITEYMKHGSLLNYLRRHEQSLIGNMGLLLDMCIQVCKGMSYLERHNYIHRDLAARNCLVGSENTVKVADFGLARYVLDDQYTSSGGTKFPIKWAPPEVLNYTRFSSKSDVWAYGVLMWEVFTCGKMPYGRLKNTEVVERVQRGIILEKPKACAKEIYDVMKKCWSHSPEDRPGFRILKDQLAAVAQGLTD

SEQ ID NO: 13507 - protein, 589 aa, Anopheles gambiae str. PEST
CASCYNAIEPEQHVAAVGQLWHAECFRCSVCDARLSSWYFEKDGLLFCRDDHWSKFGDCCQQCSQFISGPAMFAGDHKFHPECFRCESCKVFIGDRESYALLERSKLYWYVLTGAKNAIAPPKDRIIMSPTKQERQRIPHSIRLVEIPWSGNRSDRIRLATDDKPSGVKGVANGCKSVRISEVTLNSDLMALRVGDKVLEVNGTPVRDVPLESLQNLIEASAGKALQLTVEHDPDVVALATAGGLPGCKGILSASYAGTETNSTNSLKEKERSSSMSRLLDEHRTMATGGEFYDLSRTKSFRVEPKAARIFRASDLVQGELLGKGFFGQVFKVTHRVTQEVMVLKELYRVDEEAQKNFLKEVAVLRSLSHHNVLRFIGVLYKDKKLHLVTEFIPGGSLKELIHDSGLPLSWAQRISFARDISSGMSYLHSMNIIHRDLNSLNCLVRENGTVIVADFGLARIIKQPLISTTAYEKPRRQRYTVVGNPYWMAPEMMRGNKYDEKVDIFSFGIMLCEIIGRVQADPDYLPRLPDFGLNEKVFREKFCGQCPEPFYKIAFLCCDLNPDKRPPFHVLQGWLETMATVVALQRPI

SEQ ID NO: 13508 - protein, 268 aa, Anopheles gambiae str. PEST
TVGKGSYGTVIKAKWRNKYVAVKYMEVLTEQAFTAEVSHLSRVAHPNIIELYGACTEKPNFCLVMEYADGGSLHKVLHSRPRPVYTAAHAMSWARQCAEGVAYLHDMTPRPMIHRDLKPPNLLLVNNGTVLKICDFGTVTDKSTLMTNNKGSAAWMAPEVFEGSSYTEKCDVFSWGIILWEVIAREQPFKHIDTSYAIMWRVHQGSRPPLIDHCPKPIEQLMVRCWDKDPISRPSMKEVVNVMNALCKLFTGENEPIGNEFLPEDEVE

SEQ ID NO: 13509 - protein, 378 aa, Anopheles gambiae str. PEST
MTLSTNRPLHEEEWFHGVLPREEVVRLLRNEGDFLVRETTRNDESQTVLSVCWNGHKHFIVQTTAEGHYRFEGPAFPSIQELIVHQYQSELPVTGRSGAVLRKPVLRERWELSNDDVILLDKIGRGNFGDVYKAKLKSSKNTLVAVKTCRMTLPEEQKRKFLQEGRILKQYDHPNIVKLIGICVQKQPIMIVMELVAGGSLLMFLRKNASTLGQRQMMGMCRDAAAGMRYLESKNCIHRDLAARNCLIGSENIVKISDFGMSREEEEYIVSGGMKQIPIKWTAPEALNFGKYTSLCDVWSYGILVWEIFSRGDTPYSGMSNSMARERIDEGYRMPAPEGAPPEMYRLMLKCWSYEPESRPHFDEICSVVDALLLCTKD

SEQ ID NO: 13510 - protein, 1066 aa, Anopheles gambiae str. PEST
QVPDLSCLKALDQELFNYYYSQLRYDLLHNRIPEIDYRKYKNKILGYVVNDMYRKMIEDKVGLSELKRDFEKYIPRKISREHSVCFVNVAQKRIFESLNSIQNRDHDVNYVKNVYINDIDNIAPGYLYEEYAAEIQYPRGEFSSRTGKCPVKLRFQPYGTAVSSRETTKYGSTGGGLERTLDHEDATTTPGLKVFYASKWQHVTNIDEILTILVEKLTVKLALEDQSEPYCIDFHDQTELNSFVTCLAGYYRLMCKWTVYLCQDYLSSPMLNLLKELKCHGPIGGKYSTDKIREKNSSCGACIIRQCEEQYDTYYVDMLETDGLIKTYKLIHAEDQWHVQRDKEEEEALHRYNQLTEALKSLNPEITSVYRLPPSDNDTAPNLLLCRPTHKASPKRLLRGGTQELGQKRACIINAAKELVINRNAVEDESDGYTKRTRADFLLPNNSKMEVTLKLLKNEKEGEYLKDFLQVAGQWATIDSIDIIKLYGMTVCKPITMVLEFPRYGRLDEFLRTRRTSVRPTALIEIGHSLARALYYLQKHGIIHGHIRCSSMLVTQYDEGEQRVLAKLGDPGMHGQRRLTKHDLLWIPYEYQDLSEQSVARLRADPATDAWACTSTLWEIFSRGIKMHVYKPAEFLPTRKWLQTMPPELKDSKQIYECLSCGWHADPDKRLAPQTVVGLLVHARQLDGSYCTVGNGHVNGHSTSNMLNGSVFKNSILSMETNSTLIRSRTDCTSSSYVSNGSDSELRSNASSGSSSLPLLSNSINRFSGDSYYEKTFVNCSDYIQLSGSERIFFHNMLGEGNYGRVYRGTLERDNQAPRDVALKTIYDDRPDLGRVKDDFRREVDIMKNLRHTNIVEFICFIEELDKLVVVMEYVPLGSLLAYLGYMRYELKELDLLWMARDIANGMNYLCEKNIVHRDLAARNILVESKKCVKISDFGLAQVTEGSNYYVARHSRELPIRWYAPETLETQKYSSQSDVWSFGVTLYEMFTYGATPYSHVDVKSAAQLYQLLQRETKILQLPEDFSYVYDKLMAPCFKRDPHERMTFSELLEELNDMINQYGEPIY

SEQ ID NO: 13511 - protein, 500 aa, Anopheles gambiae str. PEST
SCPTLRFSYVSSDGKGKKPHPKQADPVVCVWEFPEKQPSAAAFPRRSRKTRKMEDIFHWCREGNSIQVRLWLDDTEHDMNLGDDHGFSPLHWCAKEGHSKLVEMLLHRGARVNATNMGDDIPLHLASAHGHYDIVQMLIRHRSDVNAANEHGNTPLHYACFWGYQAIAEELVNNGALISLANKDGDTPLDKAKALLATRLHNLAVESGQELKKISFKDQSWSGMKTRSRDATLSRFKGINIQELTLHNKVAITPGGETWRGRWQNNEIIAKILAIRECTARVARDFNEEFPKLRIFSHPNILPVLGACNAPSNLIVISQYMPRGSLYDLLHGTAGIVVDTAQAVRFALDIARGMAYLHSLERIIPEYHLNSFHVMIDDDLTARINMADAKFSFQERGRVYQPAWMSPEMLQKKRTERNWEACDMWSFAICIWELATREIPFADLTPMEAGMRIATEGLRVTIPPGTSPHLAKLIKICMNEDPGKRPTFDMIIPILDKMKR

SEQ ID NO: 13512 - protein, 994 aa, Anopheles gambiae str. PEST
VVLGALLLAIETINNDSTLLPGKKLRLRAVDIGAQKSLKAFPIKKMTEMRDNGIVVFIGPDETCTSEALVASAWNLPMISYKCADIAVSDKTVYSSFARTLPPATKVSKSVAALLLANNWHCFSIVASKHPAWSMEIAHAIELQAELNNLTVNHFRIYSDYIPSKIYELQEIVDNTYRNTRVYVFVGDHIEMVDFVRCLQNRKLLSTGDYIVISIDDEIYDPNMKRNIYQDKHQQNRKRYNYKDQERLQEAFQSVLRISPLFPMNPKFVRPSLRPIYGAYLYDALIIYARAATEVLRDGGDVSDGRLIMRHIFNRSYHSIQGFDVYIDANGDAEGNFSVIALQKDDKVNNSLHMSMQPVALFAYGARNATGTGTTLPEFRYLNPNRPIMWLKGRPPLAEPVCGFYNEKCRPKAKDWRYITGALVVILFMAIFTIILFKHYRYEQTLACLLWKVDMKDVILITSPDALYNNELRKNLVCQQSIMVNSAGDVNKRAYTTIGLYRGNIVAIKYLHKRTVDITRNIRKELKQMREIRHENLITFVGASIDHGTVSILTSYCARGSLVDVLSNEDLKLDHMFVSSLVSDIVKGLIYLHDSDVGSHGNLRSSKILIDSRWVAQIADFGLHEFKSCQEEPSKFEKELRRSLWKAPELLRDPNCPPKGTQKGDVYSFGIVLYEIIGRKGPWGDLNMSWQDIVARVMSPEEYGIFRPSLRGIDAPEYVIQLLHSCWEEDPEDRPDIRLVRVKLKPMQAGLKPNIFDNMLAIMEKYAYNLEGIVQERTNQLSEEKKKTESLLLRMLPKSVAESLKRGERVEAECFDCVTIFFSDLVGFTELCAQSTPFEVVEMLNDLYTCCDFIISSYDVYKVETIGDAYMVVSGLPLRNGDRHAGEIASLALHLLNSISNLEIRHRPGEFIQMRIGIHSGQCVAGVVGLKMPRYCLFGDTVNTASRMESNGEALKIHISSITYGLLKKLGGYKCEERGIIKVKGKGEMRTYWL

SEQ ID NO: 13513 - protein, 1046 aa, Anopheles gambiae str. PEST
DTVWLEELLKDVQLEQFLPRIRDELQVTRLAHFDYVHVDDLEKIGLGKPGIRRLLEAVKKRKAQQWRRNILSKLIGGGKQQPPKKSTGVGGSVGGAGQNEEPSALALTCLIHEKDVTLSVKLGDGSFGVVRRGEWHAPGNHLVPVAVKVLKADTLAQPGVIEDFFKEVQAMHAMNHPNLIRLHGVVLSQPMMMVTELAVNGSLLDLLRKQCKHTPLPMIWSWSVQIATGMAYLESKRFLHRDLACRNVLLAAGNKIKIGDFGLMRALPQQEDCYVMTEHKKVPFPWCAPESLRYRQFSHASDTWMFAVTLWEMFTFGEDPWVGLNGSQILRKIDREGERLHHPDACPPDVYQLMLQCWDKTPSERPTFAAIKEFLTGVPPPIYRAVSNYSAENRLAAQQGDTIVIVDDRPELQFIKGQNQRTFDIGTIPRGVVVDARKSSTSSSGGSSATISRPLHDSFRHTGHGSPFGASWGNPATLEMEGEVKLRNKSKDLVSVDRRGKCISEQYVKERKSNASKQFSYNKLVNENHSKQQHLHHQAQLHRPPRPPQPQQPAATEGILIDLSSPNDDATFGGSSGASGAAPGTVRQVASILDEPIDIPTEGDDPFGAQQPAQQQHEQQHLQLATVASFASVSPVPSVAAKLEPPPYQMPPKYSNTYGIVHDSTLNLSIATEPDPFAPQQSQPAQQHYQKQETIVTSDYESGPSSSVSARDLMASIKRQQTIEQGAAPPTQPVDTYNDSLEVNVSGNELASPYGGSTAHVNVTPKKLDKSFLAELEKDIYKQEPSAGNSMNSSVAYAARNSAKDVSHSKYDTTANLAMSQIYANQANSIALAASLQQQLTLSPKKQNMVQQPVASDTNTLVQQMWAERNNVAAAAAAAPLPDGGQQPVSPQKSHNFVALSNGVQPAHHHQYGSTMSLSGANIYSSVYNGSIASSDVYQTVGGDLELRPIRPAPSAPLSAQQIQRRLDRLAQQDQQVASLLQELGDEANEEEARNSLAAVNWDHTLAVRHFKIERLCRLGLANRTRCEEALQKTGWSIQLAASILL

SEQ ID NO: 13514 - protein, 520 aa, Pyrus communis
DVQYLTGHVDERKPPQLADFLNWFLHDKKGTSTLSKPSSTGHRPHHVRVTGRLSTSCHLVDEDRELLLPRRHHNDDDHDNHVSSIFIDQSLTDGGEGGQIIKETSLLPGDQTRFGLESSLMRLELKGNSPHCLVQSDIPPCVQGDASEALDVTATAVASLEECARLSEENDVVQQAYRKEIVVSRNQVIRNSVEQPKVTLYNQSDLEGVHSELVKQGRITAVTNPRYLNLEPTLAMDWLEISWDELNIKERVGAGSFGTVHRAEWNGSDVAVKVLTVQDFHDDQLKDFLREVAIMKRVLHPNVVLFMGAVTKRPHLSIVTEYLPRGSLYRLIHRPASGELLDQRRRLRLALDVAKGINYLHCLNPPIVHWDLKSPNLLVDKNWTAKVCDFGLSRFKANTFISSKSVAGTPEWMAPEFLRGEPSNEKSDVYSFGVILWELATMQQPWGNLNPAQVVAAVGFKNKRLEIPRDLNPNVAAIIEACWANEPWKRPSFAVIMDSLTPLIKAPVTQPSRADMPLLT

SEQ ID NO: 13515 - protein, 634 aa, Takifugu rubripes
MSDLILEELFIKRSQQKKKTSPLNYKERLFVLTQEKIAYYDFDAEKRKRKGLRGSVDLEKIKCVETVEPEPNAPQERMYAFQIVYDEGPLYIFAKNEDARCRWIKTLKNMVRCNKDLLQKYHPCAWMDGMWLCCHQEVKQAMGCRVLDNKNGFNWISPRRTSRKPLPPTPTEENPGPNVLLQAPEPQGPSVGMTVTAEYNYLPMTTQDLELKKDEEYTILEMSDPNWWRARDKYGNEGYIPSNYVVEAENGLERFDWFCKNTNRSQAEKLLRTENKDGGFLVRDSSRPGKYTVSLLSKSGGDTGASCRHYNICTTPQGHFYLAEKHYFSTIPELIVYHQHNAAGMVSRLKYIVTTRMRPPSTVGLGYGVWEIDPRHLTFIKDLGTGQFGVVKYGKWQGKHDVAIKMIKEGSMSEDDFIEEAKIMMKLHHENLVQLYGVCTTQRPIYIVTEFLSNGCLLTYLREGLKQHPTMVQLLEMCKDVSEGMAYLESKQYIHRDLAARNCLVDSNGTVKVTDFGLSRYVLDDEYTSSVGAKFPVRWSPPEVLLYCKFSSKSDVWAYGVLLWEVYTLGKLPYERLNNQEIVDKVSSGRRLYRPQLASEKVYAVMTSCWHEKADERPTFEELVLTVQDLLDGL

SEQ ID NO: 13516 - protein, 1425 aa, Takifugu rubripes
MNLCSFPAAVLLLWALSASAEGHCQKSPEPNKLNLSVSYELPTFTAEFPIQNVVTLDGIIYVGATNRIYALAPSLTKLSEYRTGPLLANQTCGQKVANASSGGGRKDNLNVALVVENIYDKGLFSCGSADNGVCRRHVLEDDVSLDEEGRQKSVDELVYCFTDLKQDKGQPRDSDVVVSPSGSQVLNVESNMIMFFVGNSEIPGSGNVTGPTARPHTMSLRKMKTSQNGFTFFSNRSYMDLIPPLRGSYYLRYVYSFHSGPFTYFLTVQQVSKDSQTYHTRIVRMCSSDHDIRRYVEMPLECISTDKRRRRSMEDVKVFNILQAATVTKVGSDVELQRQLRLEEGDDVLFAAFARGKPNSTEATPNSAICVMSLKLINSMFKMYMQKCNTVDLYHFTGSDKKSCYNVSSSDDCDPHEGIHEGKEGKYRLQVTQFVQRLEYWQKVLTNTLVTSITVVTVHGRAVGYLGTADGRHIQVVFSRFASPHVNIRLDSRPVSGSVVLPGQDPSEGALLLTTGNKITKVPLIGPGCDHLTTCTSCLVSSRVTECGWCEGRCTRANQCPPSVWTQEYCTPVVTKVFPTSGPIRGSTTVTMCGRNFGFDKTESFKASLVTVEVAGVPCKLSRQDYASRWTEIQCSPMFSGNFTPSGHTVKVTSGHKIATIEGFTFVDPVVSEIFPTFGPKSGNTMLTIRGAFLDTGNKREVTVGKAACKIQSLSATMLTCKTPPHAVPSKQPVRLTVDSVARDAPVLYTYHQDPIISSIQPSRSFVSGGCTVAAHGLFLQSGLQPQMVLTTGQDAEVFHVSCVYGENRTSIQCTTPSLAKLALQPPVVTKVAFVLDGYMTEQWDLIYVEDPLFQDPKLTSKDNKSIVELKGDRMDREAMKCQVLTVSNHSCESLTLVGNTLECTVPTELQTTTSKELQVEWRQADSIRHLGKVTLAQEQDYTGLIVGCMCVSLLLLLLGTLLLWKKNKHIDDLSEVWYDGRGHIQHLDRLANARSVSPTNEMVSHESVDYRTNLLEDQGSDRPETCRAGPPIYGGNGELLSPRLVALGSGLGLGMEGELVSPLLMAPVHIDPSCLHPDLLTEVQHVVIAREQLLLHLNQVIGRGHFGCVFHGTLLEPDGQKQHCAVKSLNRITDLEEVSQFLKEGIIMKDFSHPNVLSLLGICLPPEGSPLMVLPYMKHGDLRNFIRDESHNPTVKDLMGFGLQVARGMEYLASKKFVHRDLAARNCMLDESYTVKVADFGLARDVYDKEYYSVHNKSGVKLPVKWMALESLQTHKFTSKSDVWSFGVLLWELMTRGAPPYSDVNSFDITVFLLQGRRLLQPEFCPDALYTVMIECWHPNPERRPSFSELVEPISSIFSSFSGEHYILLNTTYVNIEKLNPYPSLFASTHLTPSSSSLSSDPTTSTSLPAQSPLFCRVERACCT

SEQ ID NO: 13517 - protein, 1369 aa, Caenorhabditis vulgaris
  unsure (1)..(1369): unsure at all Xaa locations
MRFLFLFLFLILEINTKDATSSSTPGMTNMRRRQRKIVVREYNLTDPDVMQYLPTVLILLIIVFYEKCHAQLWRRCEFENECVCSGTNNLLSRYGSGNILEDLEHMYRGCRRVYGNLEITWIEANEIQKWRNSTNQTVDADIDYLKTVNFFDHLEEIRGSLIIYRANIQKISFPKLRVIYGDEVFHDNSLYIHQNEKVNELVMKELRVIRNGSVSIQNNPRMCFLATKVDWNEILYDXSRQKVEXXNSHKACWXNGELIASXHENCKDKCWGKGDNDCQKIYRSVCPKPCSQCFYSNITQSYECCDSSCLGGCTNHGPDSCIACSKYEMDEMCIDTCPARKIFNHKTGRLVPNPDGRYQNGNHCVKECPPELLIXNDVCVRHCSEGHHYDATKDMRECEKCPSSGCPKICTVDGPLTNETLKTLEGCEQIDGHLIIEKKFKYEELKVLETVKIVSEXITIVEQDFFXLKFLKNLQIIEGRKHHHMKWALAIYLCDNLAELXLNSLKLIRTGSVLIKKNHRLCYVGTVDWESIIQSKGDQGKPNLKVEENRDRKLCIQEEEICDPNCNSRGCWGKRPEDCRECRTWNNMGTCVSKCDTIGFLRNQTSMKCQKCSPECETCNGLGEFDCLSCRHYTLYNSDFGNRMECVSDCPTSTHYSTTKNVCERCHPTCYENGCTGSDSNLGHGGCNKCKYAVKYLNGTVQCLKATGTNSVCMENNLEHFHIHPMDIDGVTDSHCEECHPFCTTCSTYGRNKNGNGCVCKQFEYHPNDVEEICVDQCPINTFLIPDANESGYGICXKCHEECDQNLPCVNEFATGCKKCKSYNVFNNDVVECVSECPENLPFTNEANGECLSYDIAGRQKKTRMIIIGTVLIGFAIMFLFIMLIYWRCQKIGKKLKIAEMVDMPELTPIDASVRPNMSRICLIPSSELQIKLDKKLGSGAFGTVFAGIYYPKRAKNVKIPVAIKIFQTDQSQTDEMIEEATNMFRLKHENLLKIIGFCMHDDGLKIVTIYRPLGNLQSFLKLHKENLGAREQMLYCYQIASGMRYLYHQRVVHRDLATRNVLVKKFNHVEITDFGLSKILKHDADSITIKSGKVAIKWLAXEIFSKHCYTHASDVWAFGVTCWEIITFGQSPYQGMSTDSIHNFLKDGNRLAQPPNSTPDLYQELLRCWMADPKSRPDFDTLYQRFKEFCKVPQLFLENSNNISETDLTAEEKFQTEQLREIFGGNIDPQTYFDQASMPSSPTSMATFTMPNGDLISRMQSVNSSRYXTEPFDYGSTPEDNSYLIPKTKEVQQSSVLYTAVTMEDGQTELSPSNGDYYNQPNDSNSPSTSNAYYNQPNIDNNKNEATEKNEDTVEYQNETIAQKETCL

SEQ ID NO: 13518 - protein, 1368 aa, Caenorhabditis vulgaris
  unsure (1)..(1368): unsure at all Xaa locations
MRFLFLFLFLILEINTKDATSSSTPGMTNMRRRQRKIVVREYNLTDPDVMQYLPTVLILLIIVFYEKCHAQLWRRCEFENECVCSGTNNLLSRYGSGNILEDLEMYRGCRRVYGNLEITWIEANEIQKWRNSTNQTVDADIDYLKTVNFFDHLEEIRGSLIIYRANIQKISFPKLRVIYGDEVFHDNSLYIHQNEKVNELVMKELRVIRNGSVSIQNNPRMCFLATKVDWNEILYDXSRQKVEXXNSHKACWXNGELIASXHENCKDKCWGKGDNDCQKIYRSVCPKPCSQCFYSNITQSYECCDSSCLGGCTNHGPDSCIACSKYEMDEMCIDTCPARKIFNHKTGRLVPNPDGRYQNGNHCVKECPPELLIXNDVCVRHCSEGHHYDATKDMRECEKCPSSGCPKICTVDGPLTNETLKTLEGCEQIDGHLIIEKKFKYEELKVLETVKIVSEXITIVEQDFFXLKFLKNLQIIEGRKHHHMKWALAIYLCDNLAELXLNSLKLIRTGSVLIKKNHRLCYVGTVDWESIIQSKGDQGKPNLKVEENRDRKLCIQEEEICDPNCNSRGCWGKRPEDCRECRTWNNMGTCVSKCDTIGFLRNQTSMKCQKCSPECETCNGLGEFDCLSCRHYTLYNSDFGNRMECVSDCPTSTHYSTTKNVCERCHPTCYENGCTGSDSNLGHGGCNKCKYAVKYLNGTVQCLKATGTNSVCMENNLEHFHIHPMDIDGVTDSHCEECHPFCTTCSTYGRNKNGNGCVCKQFEYHPNDVEEICVDQCPINTFLIPDANESGYGICXKCHEECDQNLPCVNEFATGCKKCKSYNVFNNDVVECVSECPENLPFTNEANGECLSYDIAGRQKKTRMIIIGTVLIGFAIMFLFIMLIYWRCQKIGKKLKIAEMVDMPELTPIDASVRPNMSRICLIPSSELQIKLDKKLGSGAFGTVFAGIYYPKRAKNVKIPVAIKIFQTDQSQTDEMIEEATNMFRLKHENLLKIIGFCMHDDGLKIVTIYRPLGNLQSFLKLHKENLGAREQMLYCYQIASGMRYLYHQRVVHRDLATRNVLVKKFNHVEITDFGLSKILKHDADSITIKSGKVAIKWLAXEIFSKHCYTHASDVWAFGVTCWEIITFGQSPYQGMSTDSIHNFLKDGNRLAQPPNSTPDLYQELLRCWMADPKSRPDFDTLYQRFKEFCKVPQLFLENSNNISETDLTAEEKFQTEQLREIFGGNIDPQTYFDQASMPSSPTSMATFTMPNGDLISRMQSVNSSRYXTEPFDYGSTPEDNSYLIPKTKEVQQSSVLYTAVTMEDGQTELSPSNGDYYNQPNDSNSPSTSNAYYNQPNIDNNKNEATEKNEDTVEYQNETIAQKETCL

SEQ ID NO: 13519 - protein, 495 aa, Ephydatia fluviatilis
MGSCLSSPDSSDKKSKGGVELTNKGKERQPEPKPRAPQAPPVQEVKYPIYVGKYDYDSRTDDDLSFKKGDLMYIISTDEGDWWFARSKDTGKEGYIPSNYVAEYKSLDAEEWFLGKIKRVEAEKILNQSFNQIGSFLIRDSETTPGDFSLSVKDQDRVRHYRIRRLEDGSLFVTRRSTFQGLHELVEHYKTNTDGLCCNLLYPCLQAEKPQTAGLSRQANEEWEIEKKQIKLLKKLGAGQFGEVWEGVWNGTTSVAVKTLKPGTMSVEEFLQEASIMKKLRHPKLIQLYAVCTKEEPIYIVTELMKYGSLLEYLRGDGRTLKIDRLVDIAAQVASGMSYLEQQNYIHRDLAARNILVGEHGICKVADFGLARVIDEEIYEAHTGAKFPIKWTAPEAAMYNRFTIKSDVWSFGVVLYEIITYGRFPYPGMTNPEVLEKIQQGYRMPCPANCPKQYHDVMLDCWREDPASRPTFETLQWQLEEFFNSEGYRDPDALH

SEQ ID NO: 13520 - protein, 893 aa, Ephydatia fluviatilis
MLSENVWLCASIQIVLFATLQAQAPEDGSDTCRNPPFTKPPFPSNIVPLLDSYDYLGLLGTMGTWKTQDVDGDSRTWSQPGDTACRQVPGSCSYTFGPQNNWLITQHINTTVNGVALSQVVVRVNFSLNGCLTGGSCQQSFLLQTYQTQNIDPSGSLNATNYASFPGNRVTVGSNPTGTVVETQDVMVPLGAIGGMYLAAQETGTCVSISRLIVFHYMCPQQVVNFISYPMAMSNGAITQLACVSGASLVGVQLPLATCGSQGVWGAPNGGCSCNFGYTSIGQSCQSCPPGTYKSVQGSSVCLPCPSNSNSSVNGSSQCPCLPGYYRPASSGADSDCIASRPPSAPQNLNKGAASATSVVLSWSPPQDSGGTGIVLYTVYYQAIISGSLRMTWGNVTTTSVTVTNLLPATEYIMTVVAQNGEPGDEADRSVSLRVTTLNTASSNPSSISTPIIVGVLVGVLLPIAICIGICIVVPLLVWSFCYRPGKGVYLPQTSSEMVDIPQNKGTRMYVDPRTYQSTTQAVSTVATEIPPKYIKLVEEIGGGEFGTVYKGMWNERKPPVPIAVKTLKPGSSDKMRDDFLTEASIMGQFHHPNVIKLYGVITKVEPAMIIMEFMDNGSLYYYLRHNDEKLSLQQLLKMACGVAAGMQYLSEVGYVHRDLAARNILVSKDEVCKVADFGLSRETTNDEYDVKKGGKIPVRWTAPEAISYRKFTTASDVWSYGVLLWEVMSYGQQPYEDWDNQMVLDKLESGYRLQKPKDCPSTVYELMQSCWSAEHTDRPTFKELVRLLDAMLESNNKDAPIPKPRTRRGTFGLGRKTPLDYQSIEAWLEAIKMDRYVQNFHSQGLKSIQDVLLLAEEDLRGMGVAIPGHVNKIMSSVRGAHQQMQREASVRV

SEQ ID NO: 13521 - protein, 503 aa, Ephydatia fluviatilis
MGCKQSTTADTPQKANDVKIEFSQSQNSVQLPTARVATPPPLPQPPPPIVSPSKPMYVARYTYTARTAEDLSFDKGDKLIILAGLDGDWWMARSTKTNKEGYIPRNYVAPLASYEAEDWYFGDVGRAEAEKWLLAPGTQSGAFLVRASSTQKNSLSLSLRDGEGIKHYRIRTLDNGGFFIANRISFPTLQDLVAHYMMDSDGLAQRLAMPCSRANIPITSGLSYKDEWEIDRSTIVLQRKLGQGNFGEVWAGVWNGTTAVAVKTLKPDTMEVKDFVQEAQVMKKIHHPNLLQLYAVCTIGEPIYIVTELMKFGSLLEYLKHGEGKNITLHQMIDMSAQIASGMTYLEAHSYIHRDLAARNILVGEGNVCKVADFGLARVIKEDIYSPREGTKFPIKWTAPEAALYNRFTIKSDVWSFGVLISEILTRGAMPYTGMNNKQVLEAVDRGYRMPPPEGCPDPLYKIMLTCWKHEPEDRPTFESLKNLLEDYYVSASEGSYREPTSR

SEQ ID NO: 13522 - protein, 504 aa, Ephydatia fluviatilis
MGCLESKTEENSVRAQTKGGNGATQSTNMENLQSSTQWNPPPVVPQATAKSYEPKGPIYLALFDYDQRTSEDLAFRKGERLEIINNQDGDWWFARSLTTMKEGYIPSNYVAEDKSIKAEEWFFGAIKRAESEKLLRAAGEKGTFLVRESESKPGDYSLSIQDGDNVKHYRIRKLDEGGFFITRRAVFNTLKDLVQYYQNESDGLCVNLRQPCRALERPQIDLSHKTKDMWEISRDSITLIRKLGAGQFGEVYQGLWNNSTPVAVKTLKAGTMQPAAFLAEAQIMKKLRHPKLIQLYAVCTQGEPVYIITELMSKGSLLDYLQGEGRNLKLPQLIDMAAQVAAGMAYLELHNYIHRDLAARNILVGDNNICKVADFGLARLIVSDDYNATEGAKFPIKWTAPEAALFNRFSIKSDVWSFGILITELVTYGRIPYPGMSNAEVLQNLDKGYRMPCPANTPESLYQIMLDCWKRNPADRPTFEALQWRLEDFFVLDAGQYQHASDVL

SEQ ID NO: 13523 - protein, 893 aa, Ephydatia fluviatilis
  unsure (1)..(893): unsure at all Xaa locations
NFGFCLQSGRDCINKRHDDELKALESFRVYMHKRAKADAEYAVTLGKINSQTAREMAGVGANSIIVQAWNGALEAMDSIQKKLLNCSQQVETLLHNIDLLIKDKRGAKRAYDIGRSQLDDEYRKSCNEVQNLRREYVQTLQATTAAKKKLEQTVSKQPVKPAEVDKLRGKFVSSAAKLHKCHNDYTLAILNANTHLEHYHKSTVPFCLNTLQERMELIVSQWRKGMEEYARTTDMTQVYQESFGKLFTNLQNLNPQDEYTKLIQENKSDSDEDVFTFDTSLLQDYSSPKVEATKMSVNNLTYESLKAELSKMEQRLEEYAKQHAEKEEKLKALNXAAPDAQQNSEVPKAVLISNLQAELKLLDCTLEREKVKAEKVKEDLQGIGESPPLFDPLGEGVVXTDPTSPTTPTHPGDHASPSATLDTESVENGGKKAAEKGGNSKAAKISNTLKKSFAKGFSMFRHRMQSNTSQSIDSTEGEAGEPGEPGETATDAASSADPSAIVEDNESETGSTTDVPPETRVEEERWFYPNMERKEAEEKCKNTGDYLIRYSSKQNRYVLTVCWAGQGKHFVIQEAPDEQTKTKYRFESRSFPSVRELLDFHVNSQTPVTKASGAILSRPILREDDKWALKHEDIKMGRKLGKGAFGDVWEAALKGQGKVAVKTCRSTDVPDREKFLQEAEILKQYDHPNIVKLIGVSWDTEPVLIVMELMPGGSLLDYLRKKAAQMTKGKLLHMSIDACGGMEYLESKNCIHRDLAARNCLVGENDIVKISDFGMSREEEGGMYTVQSGTRQIPIKWTAPEALNYGRYTSASDVWSFGVLLYEVFSGGSTPYPGMSNAETRTQVDSGYRMPPPQGCPAEIHQIMQLCWAYDAEDRPKFGAVLESLKKLDGTVQ

SEQ ID NO: 13524 - protein, 485 aa, Ephydatia fluviatilis
MAQVWAVGTECIGKYNFPGSSPHDLPFKKGDRLVIVAPSKDPNWYKARREDGLEGMIPFNYVQEKVPVAGSAPQPPQRPVLSAPQPVADNDAAMNHASKGAVQLKTMPWFHGRISREDAEKLLTPPKNGRFLVRESQNYPGDYTLCVSYDGRVENYRVRRNEKGLVTVDDDEYFDNLIKLVEHYQKEADGLCTRLKAPVDKEGQHLFVVDVNDFKEKGWAIPKASLLKKSLIGKGEFGEVWLGDYEGKKVAMKSMKDHLKDEKAKTQFLAEASVMTTLRHPNLVCLIGISLDDNPIYLITEFMAKGSLIDYLRSRGRAVITKQNQIDFARDVVKGMVYLESQNFVHRDLAARNVLIAEDNVAKVSDFGLAKSSSNVKQEGAKLPVKWTAPEALRENKFSNKTDVWSFGVLLWEIYSYGRVPYPRVPVEDVANHVENGYRMESPDGCPDQIYKIMMDCWEKDPSQRPNFTRIEKALESVAVAMSSS

SEQ ID NO: 13525 - protein, 470 aa, Ephydatia fluviatilis
MGSCCSSPERKDTNTVKTELEKDKGVQEVEHPIYVGKYDYDSRTDDDLGFKKGDLMYIISTEDVDWWFARLKDTRKEGYIPSSYVAEYKSLDAEAWFLGQIKRIEAERLLNQPVNKVESFLIRDSESNPGDFSLSVKDQDRVRHYRVHRLEDGSLFVTNGVMFQSLHDLVEHYKTQKDGLCCNLLCPCLQTEKPQTAGLSRQANKEWEIDKTQIQLKTKLGAGMLGEVWEGVWNGTTSVAVKTIRPGKVSVEVFLQEARIVKKLRHPRLIQLYAVCTKEEPIYMVMELMKYGSLVEYLKGEGRTLKIERLVDIAAQVASGMSYLEQQNYIHCDLAARNILVGEHGMCKVADIGLTKVIDKDNMEAQGAKFPIKWTAPEAAIYNRFSTKSDVWSFGVVLYEIITYGRPVYPGITDHEVLEKIQQGYRMPCPPNCPKEYYDIMLDCWHEDPASRPTFETLQWQLEEFFNSEG

SEQ ID NO: 13526 - protein, 523 aa, Rous sarcoma virus (strain PA101T)
MGSSKSKPKDPSQRRRSLEPPDSTHHGGFPASQTPNKTAAPDTHRTPSRSFGTVATELKLFGDFNTSDTVTSPQRAGALAGSVTTFGTRESRIETDLSFKKRERLQIVNNTEGTWWLAHSLTTGQTGYIPSNYVAPSDSIQAEEWYFGKITRRESGRLLLNPENPRGTFLVRESETTKGAYCLSVSDFDNAKGLNVKHYKIRKLDSGGFYITSRTQFSSLQQLVAYYSKHADGLCHRLTNVCPTSKPQTQGLAKDAWEIPRESLRLEVKLGQGYFGEVWMGTWNGTTRVAIKTLKPGTMSPEAFLQEAQVMKKLRHEKLVQLYAMVSEEPIYIVIEYMSKGSLLDFLKGEMGKYLRLPQLVEMAAQIASGMAYVERMNYVHRDLRAANILVGENLVCKVADFGLARLIEDNEYTARPGARFPVKWTAPEAALYGRFTIKSDVWSFGILLTELTTKGRVPYPGMVNGEVLDRVERGYRMPCPPECPESLHDLMCQCWRKDPEERPTFEYLQAQLLPACVLKIAE

SEQ ID NO: 13527 - protein, 628 aa, Raja eglanteria
MEEVFIKRSQQKKKTSPLNYKERLFILSLTRVAYYEYDTERMKRGCKKGSIDLERIKCVEEVKPEESGPIDRQFPFQIVHDEGPLYVFAKTEDVRRQWITELGNRIRFNTELLQKYHPCFWMEGEWSCCQQSAKTAPGCCLVHTHNSFPGAGTSRRKSRKPLPPTPQEQAVKPVSVSASRKVVVALYDYDIMNPDDLPLRKDQEYVVLEQGAHNWWRARDAQGREGFIPSNYVVETRDQLEHCQWYNKDITRSKAEQLLKQEGKEGAFLLRNSSQPGKYTMSVLSKAAGEQSGKVKHYTVCVTPSDQYYLAEKHAFTTIPELIKYHQHNAAGLVTRLRHPVSCHSTKAPLTAGFGYGAWEINPVDLTFLRELGDGQFGVVKHGKWRGQYEVAIKMIKEGSMSEDDFIEEAETMMRLTHPKLVQLYGVCTKQRPIYIVTEFMAQGNLLDHLRGQGRRLSGLQLLEMSRDVCEAMAYLESHQFLHRDLAARNCLVDDAATVKVSDFGLSRYVLDDEYTSSQGSKFPVRWSPPEVLNFCRFSSKSDVWAFGVLMWEIFSLGKTPYERFSNADVVDHIVQGRRLYRPQHATDHVYTVMCSFWEEKADNRPPFSSLLSNIQELVEDDSQTSGD

SEQ ID NO: 13528 - protein, 1233 aa, Plasmodium falciparum 3D7
MGKRIKCNNVSYIRTVRGVYIGRIENGQKNGWGLQINNNGNKYEGLFKNDEKYLFGLELICCLCGHTYRNKVQNGIYEKGKIHYKDVNNISAYNNDDQHDNIHHEKVYHENIHHEKVYHENIHHEKVYHDNINHEKVYHGNIYDHNIYHNNKFNFQYSSENEFAKGNICVHENRYIYIGTYKKGKKHGKGILINYNNYFMYSCIFYKNKIIYVDMLFSKVQKYMNMKNIDMKHYNTHKKKKIYLFLQKEYKNKILGFINFYKHITHKIKKKQENVHDKITFLKCLKELFFVTHTNKENNQMEGIIHTYKNYTINKNDNTYNIFKEKLHNITQGGNKTQHEKRYMKTIYRHAGHENVILNNKRKEKNKSTNMSSDEKKTNKHTNISSDEKKKNKHTNISSDEKKKKKRTNITNDEKTNKHTNIINDEKTNKRTNISNDEKTNKHTTISCDEKKNGYLFLSNEIKTKYCMIENMKKKKESYTMINNNKKKEHLYNLKSMIYQEVQFFHNNSICDHENKKKNRNIEMPFFLKRTKKNNDIEQLVLVKNKYNKCYNLESGKDDIIYNNQKDKIKKDKLKVPFFFKEKGIYNFFNKTVENKEDERFFVHEQNDEKIFTDKVTNDVRTNDIRTNDIRTNDVRTYDVRTNDVRTNDIRTNDIRTNDIRTNDIRTNDIRTNDIPYNIIPNKRETIVDDINSCSNNFTTRSNTDNANSYHMNMYSDSNNFYGNKKKKIKKRNNNKCEYSSIIKNKNQLYNDQIHNNTCVCIKFKTKCCSFKINKLEKKKKESYKCNSHKELKQHDKNLLFNNYIFNDNFLDNVFVLKPPMDEEEKKKNYDKLKRDTFPLFLRKKKKKLFQAQNYIYWNIFELNLFFFLVGIPKEILEIFIYHRLDGYCLKYIDKKILKEMKIKNRMMRKYIYLCIQYLLRLREKYKYKKKSNSKLTEKINEDFILKKEQLHILNLIGRGGYSNVYRCIYGNKNILRINKFFDIHYSINNTALKIFLNKKKNILEYFTELYIVSNLRHPNVTLFLGAINNPRAIVLEYIQYGTLFDILHKYKINMKLQDIIKISKDITAFMSFLHNKGIMHCDLKSSNILISITRDIKICDFGLSVFNKYNKPKYLGIVGTYQWTAPEVLRSEGYTKEADIYSFGVILWEMIHRKIPFSDMKNPLDIIAHVGYANKKLSVTNKNIPDQLKYILHSCLHKNTHKRKSFLFWSEYFDFLYNVTDIPKEDHTSFFF

SEQ ID NO: 13529 - protein, 375 aa, IC4 retrovirus
MEAVIKDAIRNHSESASPSALSGSPNNMSPTGWSQPKTPVPAQRERAPGTNTQEKNKIRPRGQRDSSYYWEIEASEVMLSTRIGSGSFGTVYKGKWHGDVAVKILKVVDPTPEQFQAFRNEVAVLRKTRHVNILLFMGYMTKDNLAIVTQWCEGSSLYKHLHVQETKFQMFQLIDIARQTAQGMDYLHAKNIIHRDMKSNNIFLHEGLTVKIGDFGLATVKSRWSGSQQVEQPTGSILWMAPEVIRMQDSNPFSFQSDVYSYGIVLYELMTGELPYSHINNRDQIIFMVGRGYASPDLSKLYKNCPKAMKRLVADCLKKVREERPLFPQILSSIELLQHSLPKINRSASEPSLHRASHTEDINSCTLTSTRLPVF

SEQ ID NO: 13530 - protein, 765 aa, Arabidopsis thaliana
MENPNPPAEKLLKKIRELEESQEDLKREMSKLKVSAEIKRRSHSSSPKRPSRRNSGEGTPLWRKTGAASFRHASPLRKESHSKDGVAGGGDGPSAGKFTDKQYLNILQSMAQAVHVFDLNGQIIFWNSMAEKLYGFSAAEALGKDSINILVDGQDAAVAKNIFQRCSSGESWTGEFPVKNKMGERFSVVTTISPFYDDDGLLIGIICITNDSALFQRPRVPPAKNRWQEGDSSFCRGTNGVASRLGFDSKEAVVSKLGLDSQQPIQAAIASKISDLASKVGNKVRSKMRAGDNNASHPEGGNGGSHQSDQGFFDAAFSDQREDAETNDASTPRGNLIQSPFGVFLCNDDKSSSKASGESNDENDRNSVVPKKLTSKTEEWMVKKGLSWPWKGNEREGLERRNAHSVWPWVHNEQQKEEAHHSNSYNSVKSESLASESNKPANNENMGSVNVNSASSASSCGSTSSSVMNKVDMDSDCLDYEILWEDLTIGEQIGQGSCGTVYHGLWFGSDVAVKVFSKQEYSEEIITSFKQEVSLMKRLRHPNVLLFMGAVASPQRLCIVTEFLPRGSLFRLLQRNKSKLDLRRRIHMASDIARGMNYLHHCSPPIIHRDLKSSNLLVDRNWTVKVADFGLSRIKHETYLTTNGRGTPQWMAPEVLRNEAADEKSDVYSFGVVLWELVTEKIPWENLNAMQVIGAVGFMNQRLEVPKDVDPQWIALMESCWHSEPQCRPSFQELMDKLRELQRKYTIQFQAARAASIDNSSLKEK

SEQ ID NO: 13531 - protein, 765 aa, Arabidopsis thaliana
MENPNPPAEKLLKKIRELEESQEDLKREMSKLKVSAEIKRRSHSSSPKRPSRRNSGEGTPLWRKTGAASFRHASPLRKESHSKDGVAGGGDGPSAGKFTDKQYLNILQSMAQAVHVFDLNGQIIFWNSMAEKLYGFSAAEALGKDSINILVDGQDAAVAKNIFQRCSSGESWTGEFPVKNKMGESFSVVTTISPFYDDDGLLIGIICITNDSALFQRPRVPPAKNRWQEGDSSFCRGTNGVASRLGFDSKEAVVSKLGLDSQQPIQAAIASKISDLASKVGNKVRSKMRAGDNNASHPEGGNGGSHQSDQGFFDAAFSDQREDAETNDASTPRGNLIQSPFGVFLCNDDKSSSKASGESNDENDRNSVVPKKLTSKTEEWMVKKGLSWPWKGNEREGLERRNAHSVWPWVHNEQQKEEAHHSNSYNSVKSESLASESNKPANNENMGSVNVNSASSASSCGSTSSSVMNKVDMDSDCLDYEILWEDLTNGEQIGQGSCGTVYHGLWFGSDVAVKVFSKQEYSEEIITSFKQEVSLMKRLRHPNVLLFMGAVASPQRLCIVTEFLPRGSLFRLLQRNKSKLDLRRRIHMASDIARGMNYLHHCSPPIIHRDLKSSNLLVDRNWTVKVADFGLSRIKHETYLTTNGRGTPQWMAPEVLRNEAADEKSDVYSFGVVLWELVTEKIPWENLNAMQVIGAVGFMNQRLEVPKDVDPQWIALMESCWHSEPQCRPSFQELMDKLRELQRKYTIQFQAARAASIDNSSLKEK

SEQ ID NO: 13532 - protein, 773 aa, Arabidopsis thaliana
MENPPAEELLKKILELEESQEHLKQEMSRLKVSTELRQRSHSVSPHRPARRNIGEGAPSWRKSGAASFRNASPLRKESRIQNSMRLRSEVGGGGPSAGKFTDKQYLNILQSMAQAVHAFDLNMRIIFWNAMAEKVYGYSAAEALGENPINVIADDRDAAFAMNIARRCVRGESWTGEFPVKSKSGDRFSAVTTCSPFYDDDGALMGIICITSNTAPYLNPRISLAKLKAQEEGETSSIPARNSFASKLGLDSRGAVISKLGLDSDQPIQVAIASKISDLASKVSNKVRSKMRAGDNSATLSEGGSGDSHQKDHNVFGATLVDHRDDAASSGASTPRGDFIQSPFGVFTCNDEKFVSKPFKDSSDESDGKPAIHKVLTSKAEEWMVKKGLSWPWKGNEQEGSKGRPTNSVWPWVQNEQKKERCHQINPSAGVQYESHAFESNKPINNEASSLWSSPINANSTSSASSCGSTSSSVMNKVDTDSEGLEYEILWDDLTIGEQVGQGSCGTVYHGLWFGSDVAVKVFSKQEYSAEVIESFKQEVLLMKRLRHPNVLLFMGAVTSPQRLCIVSEFLPRGSLFRLLQKSTSKLDWRRRIHMALDIARGMNYLHHCSPPIIHRDLKSSNLLVDKNWTVKVADFGLSRIKHETYLTSKSGKGTPQWMAPEVLRNESADEKSDIYSFGVVLWELATEKIPWETLNSMQVIGAVGFMDQRLEIPKDIDPRWISLMESCWHSDTKLRPTFQELMDKLRDLQRKYMIQFQATRAALSDNSLLKDN

SEQ ID NO: 13533 - protein, 738 aa, Arabidopsis thaliana
MENPNPPAEKLLKKIRELEESQEDLKREMSKLKVSAEIKRRSHSSSPKRPSRRNSGEGTPLWRKTGAASFRHASPLRKESHSKDGVAGGGDGPSAGKFTDKQYLNILQSMAQAVHVFDLNGQIIFWNSMAEKLYGFSAAEALGKDSINILVDGQDAAVAKNIFQRCSSGESWTGEFPVKNKMGERFSVVTTISPFYDDDGLLIGIICITNDSALFQRPRVPPAKNRWQEGDSSFCRGTNGVASRLGFDSKEAVVSKLGLDSQQPIQAAIASKISDLASKVGNKVRSKMRAGDNNASHPEGGNGGSHQSDQGFFDAAFSDQREDAETNDASTPRGNLIQSPFGVFLCNDDKSSSKASGESNDENDRNSVVPKKLTSKTEEWMVKKGLSWPWKGNEREGLERRNAHSVWPWVHNEQQKEEAHHSNSYNSVKSESLASESNKPANNENMGSVNVNSASSASSCGSTSSSVMNKVDMDSDCLDYEILWEDLTIGEQIGQGSCGTVYHGLWFGSDVAVKVFSKQEYSEEIITSFKQEVSLMKRLRHPNVLLFMGAVASPQRLCIVTEFLPRGSLFRLLQRNKSKLDLRRRIHMASDIARGMNYLHHCSPPIIHRDLKSSNLLVDRNWTVKVADFGLSRIKHETYLTTNGRGTPQWMAPEVLRNEAADEKSDVYSFGVVLWELVTEKIPWENLNAMQVIGAVGFMNQRLEVPKDVDPQWIALMESCWHRYINHIKHYIYLARGK

SEQ ID NO: 13534 - protein, 671 aa, Arabidopsis thaliana
MEEELLKKMLELEQSQELLKQEMSRLKLSTELRQPSHPVLPRRPLRRIQGSMNSNPSPGKFTDKQYLNILQSLAQSVHVLDLNTRIIFWNAMSEKLYGYSAAEVVGRNPVHVIVDDQNAAFALNVARRCANGESWTGEFPVKTKSGKIFSAVTTCSPFYDDNGTVVGIISITSDIAPYLNPRLSLPRLKPQEPERKLGLDSKGAVISKPGLDSDQPIQVSIASKISSLASKLSNKVRSKMRAGDNSACGDSHHSDHDVFGDTLSDHRDDAASSGASTPRGDFIQSPFGVFTCYDDKFPSKPSKDSSDRKPAIHKVPTSKAEEWMVKKGLSRPWKGNEQEGSRVRPTHSVWSWVENEQEKDKYHQIYPSAGVKSESHGSESNKPTDDEASNMWSSSINANSTNSASSCGSTSRSVMDKVDIDSDPLEHEILWDDLTIGEQIGRGSCGTVYHGIWFGSDVAVKVFSKQEYSESVIKSFEKEVSLMKRLRHPNVLLFMGAVTSPQRLCIVSEFVPRGSLFRLLQRSMSKLDWRRRINMALDIARGMNYLHCCSPPIIHRDLKSSNLLVDRNWTVKVADFGLSRIKHQTYLTSKSGKGTPQWMAPEVLRNESADEKSDIYSFGVVLWELATEKIPWENLNSMQVIGAVGFMNQRLEIPKDTDPDWISLIESCWHR

SEQ ID NO: 13535 - protein, 763 aa, Arabidopsis thaliana
MVKLLQDPITPNKELLKKMIELEKSQEHLMQEMSRLKVSTELRKESRIQCSMNLRPSPWKFTHKQYLNILQSMAQSVHAFDLNMRIIFWNAMAEKVYGYSAAEAVGQNPIDVMVDDRDAPFAMTIAQLCSNGESWTGKFPVKRRTGEKFSAVTTCSPFYADDGSLIGIVSITSDVAPYLNPTISLAKLKASEVETSSTPARNSFAFKLGLDTKGAVVSKLGLDSDQPIQVAIASKISDLASKVRNKVRSKMPAGDSSVTVFEGETGDSHHSDHGVFGATLSDHMDDAASSGASTPRGDFIQSPFGVFTCNDDKFSSEPFIDSSDGYPITLFTSKAEEWMVKKGLSWPWKGNEQEGSRVKPTYSVWPCVQNEQKKDKSHQINRYSGVKSKSHASESNKPTNNKASGLRSSCINANSAISRGIISHSTMNKVDTNSNCLEYEILWDDLTIGEQIGQGSCGTVYHGLWFGSDVAVKLISKQEYSEEVIQSFRQEVSLMQRLRHPNVLLFMGAVTLPQGLCIVSEFLPRGSLFRLLQRNMSKLDWRRRINMALDIARGMNYLHRCSPPIIHRDLKSSNLLVDKNLTVKVADFGLSRIKHHTYLTSKSGKGMPQWMAPEVLRNESADEKSDIYSFGVVLWELATEKIPWENLNSMQVIGAVGFMNQRLEIPKDIDPDWISLIESCWHRDAKLRPTFQELMERLRDLQRKYTIQFQATRAALSDKNKEREKERVGLFEQQQLVETCCAGVPMSSTIEQGYGIENIMKVG

SEQ ID NO: 13536 - protein, 777 aa, Arabidopsis thaliana
MVKLLQDPITPNKELLKKMIELEKSQEHLMQEMSRLKVSTELRKESRIQCSMNLRPSPWKFTHKQYLNILQSMAQSVHAFDLNMRIIFWNAMAEKVYGYSAAEAVGQNPIDVMVDDRDAPFAMTIAQLCSNGESWTGKFPVKRRTGEKFSAVTTCSPFYADDGSLIGIVSITSDVAPYLNPTISLAKLKASEVETSSTPARNSFAFKLGLDTKGAVVSKLGLDSDQPIQVAIASKISDLASKVRNKVRSKMPAGDSSVTVFEGETGDSHHSDHGVFGATLSDHMDDAASSGASTPRGDFIQSPFGVFTCNDDKFSSEPFIDSSDGYPITLFTSKAEEWMVKKGLSWPWKGNEQEGSRVKPTYSVWPCVQNEQKKDKSHQINRYSGVKSKSHASESNKPTNNKASGLRSSCINANSAISRGIISHSTMNKVDTNSNCLEYEILWDDLTIGEQIGQGSCGTVYHGLWFGSDVAVKLISKQEYSEEVIQSFRQEVSLMQRLRHPNVLLFMGAVTLPQGLCIVSEFLPRGSLFRLLQRNMSKLDWRRRINMALDIARGMNYLHRCSPPIIHRDLKSSNLLVDKNLTVKVADFGLSRIKHHTYLTSKSGKGMPQWMAPEVLRNESADEKSDIYSFGVVLWELATEKIPWENLNSMQVIGAVGFMNQRLEIPKDIDPDWISLIESCWHRDAKLRPTFQELMERLRDLQRKYTIQFQATRAALSDKNKEREKERVGLFEQQQLVETCCAGVPMSSTIEQGYGIENIMKICIMLCTDQCVSGHGG

SEQ ID NO: 13537 - protein, 483 aa, Arabidopsis thaliana
MRAGDNNAANLEGGSGDSHQSDQGFFDAAFADRREDAATSGADTPRGDFIQSPFGVFLRSDEKASTKPFRDSSDESDGNSVVPKTLTSKAEEWMVKKGLSWPWKGNEREGLEGRRSHSVWPWVRNEQQKQQAYQSNSNHSVKSESQACESIKASSNEPMGYWSSSVNVNSTSSSSSCGSTSSSVMNKVDMDSDCLDYEILWEDLTIGEQIGQGSCGTVYHGLWFGSDVAVKVFSKQEYSEEIITSFRQEVSLMKRLRHPNVLLFMGAVTSPQRLCIVTEFLPRGSLFRLLQRNTSKLDWRRRIHMASDIARGMNYLHHCTPPIIHRDLKSSNLLVDKNWTVKVADFGLSRIKHETYLTTKTGRGTPQWMAPEVLRNEAADEKSDVYSFGVILWELVTEKIPWESLNAMQVIGAVGFMNQRLEVPKNVDPQWISLMESCWHSEPQDRPSFQEIMEKLRELQRKYTIQFQAARAASIENSALKEK

SEQ ID NO: 13538 - protein, 735 aa, Arabidopsis thaliana
MAGNNSESSLYQVLVEWCQRMETSQARLREDVDDLLLQEESRTGKESATGLETDTEKEAEVEVEAEAADSWDNPTATWERAVSGFYFADSAYRTLMDSMGHAIHVTSAASGEITFWSRSAENLYHWYAEEVVGYRTIDVLVTEEYRNSLTGIRNRVCRGETWTGQFPFQKKTGELFMALVTKSPVYENGELVGVVTVSSDATLFNRMHPLSNEHQQQARSNNRHESNLRKHQWHLPRPQIAAASQVPVVPQYSSAVASNLASKLLPQRNGDDSFNGNHNSRSRDENVPVVASTTFEKYGSLADKFLGKLQRKITGSQGTEDNEPILRNGINKSACGSGGSSKASNAVTCTAFRDNGNGKPKRAEVRISDVYGNGAEGLIHNGDRFQYIGNLGQSKPPRGLESGLVSGMRGTKMSDLNGEIEDAWNTRLSVDPLPILGVNSGRQQSPVNQRNNRLVTDSSCEIRWEDLQLGEEVGRGSFAAVHRGVWNGSDVAIKVYFDGDYNAMTLTECKKEINIMKKLRHPNVLLFMGAVCTEEKSAIIMEYMPRGSLFKILHNTNQPLDKKRRLRMALDVARGMNYLHRRNPPIVHRDLKSSNLLVDKNWNVKVGDFGLSKWKNATFLSTKSGKGTPQWMAPEVLRSEPSNEKCDVFSFGVILWELMTTLVPWDRLNSIQVVGVVGFMDRRLDLPEGLNPRIASIIQDCWQTDPAKRPSFEELISQMMSLFRKPGSGAQEEDD

SEQ ID NO: 13539 - protein, 736 aa, Arabidopsis thaliana
MAGNNSESSLYQVLVEWCQRMETSQARLREDVDDLLLQEESRTGKESATGLETDTEKEAEVEVEAEAADSWDNPTATWERAVSGFYFADSAYRTLMDSMGHAIHVTSAASGEITFWSRSAENLYHWYAEEVVGYRTIDVLVTEEYRNSLTGIRNRVCRGETWTGQFPFQKKTGELFMALVTKSPVYENGELVGVVTVSSDATLFNRMHPLSNEHQQQARSNNRHESNLRKHQWHLPRPQIAAASQVPVVPQYSSAVASNLKASKLLPQRNGDDSFNGNHNSRSRDENVPVVASTTFEKYGSLADKFLGKLQRKITGSQGTEDNEPILRNGINKSACGSGGSSKASNAVTCTAFRDNGNGKPKRAEVRISDVYGNGAEGLIHNGDRFQYIGNLGQSKPPRGLESGLVSGMRGTKMSDLNGEIEDAWNTRLSVDPLPILGVNSGRQQSPVNQRNNRLVTDSSCEIRWEDLQLGEEVGRGSFAAVHRGVWNGSDVAIKVYFDGDYNAMTLTECKKEINIMKKLRHPNVLLFMGAVCTEEKSAIIMEYMPRGSLFKILHNTNQPLDKKRRLRMALDVARGMNYLHRRNPPIVHRDLKSSNLLVDKNWNVKVGDFGLSKWKNATFLSTKSGKGTPQWMAPEVLRSEPSNEKCDVFSFGVILWELMTTLVPWDRLNSIQVVGVVGFMDRRLDLPEGLNPRIASIIQDCWQTDPAKRPSFEELISQMMSLFRKPGSGAQEEDD

SEQ ID NO: 13540 - protein, 411 aa, Arachis hypogaea
MLEGGAKFPGLIDLNKHTTDNYYDFSQGFYHKLGEGTNMSIDSMQTSNGGGSVAMSIDNSSVGSNDSHTRILNHQGLRRRANDNYSVQNSVNRRGRVTHALSDDALAQALMDSSSPTEGLENFDEWTIDLRKLNMGEAFAQGAFGKLYRGTYNGEDVAIKILERPENELSKAQLMEQQFQQEVMMLATLKHPNIVRFIGACRKPMVWCIVTEYAKGGSVRQSLMKRQNRSVPLKLAVKQALDVARGMAYVPWLGLIHRDLKSDNLLIFGAKSIKIADFGVAGIEVQTEGMTPETGTYRWMAPEMIQHRPYTQKVDVYSFGIVLWELIPGMLPFQNMPAVQAAFAVVTKNVRPIIPNDCLPVLRDIMPRCWDPNPDVRPPICRNCRNAETEIMTTVRKARFRCCMTQPMTAD

SEQ ID NO: 13541 - protein, 433 aa, Glycine max
  unsure (1)..(433): unsure at all Xaa locations
XLRESGDESEGKSIHKIIPKAEAWIQRKTLSWPWRTKDREGSDAMNVRVAGSWRQNDQENESVNQKILSSGLKQESQAGESNRPTNNEASGSWSSXXNVNSTSSASSCGSAGSGAANIKGDVDSDCLDYEILWEDLTMGEPIGQGSCGTVYHAQWYGSDVAVKVFSKHEYTDDTILSFKQEVSVMKRLRHPNIILFMGAVTSPQHLCIVTEFLPRGSLFRLFQRNTSKIDWRRRVHMALDVARGVNYLHHCNPPIIHRDLKSSNLLVDKNWTVKVGDFGLSRLKHETYLTTKTGRGTPQWMAPEVLRNEPSDEKSDVYSFGVILWEIATEKIPWDNLNSMQVIGAVGFMNQRLEIPKNVDPRWASIIESCWHSDPACRPTFPELLDKLKELQKQYVIQFQAARSTAKESTQKESXTTLELFFLSPVPVAVADA

SEQ ID NO: 13542 - protein, 434 aa, Glycine max
  unsure (1)..(434): unsure at all Xaa locations
XLRESGDESEGKSIHKIIPKAEAWIQRKTLSWPWRTKDREGSDAMNVRVAGSWRQNDQENESVNQKILSSGLKQESQAGESNRPTNNEASGSWSSXXNVNSTSSASSCGSAGSGAANIKGDVDSDCLDYEILWEDLTMGEPIGQGSCGTVYHAQWYGSDVAVKVFSKHEYTDDTILSFKQEVSVMKRLRHPNIILFMGAVTSPQHLCIVTEFLPRGSLFRLLHRNTSKLDWRRRVHMALDIARGVNYLHHCNPPIMHRDLKASNXLLVDKNWTDKGGDYGISRIKHETYLTAKTGRGTPQWMAPEVLHXEPLDVKXDVYRLQVTRGEIATEKIPWDNLNSMQVIGAARFTDQRLEIPKNVDPRWASIIESCWHSDPACRPTFPELLDKLKELQKQYVIQFQAARSTAKESTQKESXTTLELFFLSPVPVAVADA

SEQ ID NO: 13543 - protein, 903 aa, Oryza sativa (indica cultivar-group)
QIRKAKLISLGRGNRFAAVRDDEQTADALSRRYRDYNFLDYHEKVIDGFYDIFGPSMESSKQGKMPSLADLQTGIGDLGFEVIVINRAIDTTLQEMEQVAQCILLDFPVANIAALVQRIAELVTDHMGGPVKDANDMLTRWLEKSTELRTSLHTSLLPIGCIKIGLSRHRALLFKILADSVGIPCKLVKGSNYTGDDDDAINIIKMNEREFLVDLMAAPGTLIPSDVLSWKGNSLNSNARLTQNPLAGSSSTTDSNLSANALPPGHKGGQLPLFSSGDWILASQSGYEKDGATTSSQASSSGTTSVAAGSAFDSSWTLVSHGQSDDPSTSAGMSAQQKVILPGGEHPWNENINARNENIKLVSDLQGNSESINLFADLNPFGGREPKRTSVPLNGPDNRNNELQRRRENVVPSTRRPQQRLVMKNWSPYNDVSNNKQYNYVEDSFARRNIGDNAASSSQVARPSAKNTNLNVGVRTDTPYMAAHNYDNSMAGSSAMKMTSTAGIGKVPDKVLYGDLDKGLTNSRLGDQPPIERHKWGNSVEGRIPTGTVHNQAKEHKENFDGKQDNKKLHPDPKKSPLDRFMDTSMPSRNPESVSPSFARSHKLDTMFDDVSECEIHWEDLVIGERIGLGSYGEVYRADWNGTEVAVKKFLDQDFYGDALDEFRSEVRIMRRLRHPNIVLFMGAVTRPPNLSIVSEYLPRGSLYKILHRPNCQIDEKRRIKMALDVAKGMNCLHISVPTIVHRDLKSPNLLVDNNWNVKVCDFGLSRLKHSTFLSSKSTAGTPEWMAPEVLRNEQSNEKCDVYSFGVILWELATLRMPWSGMNPMQVVGAVGFQDKRLDIPKEIDPLVARIIWECWQKDPNLRPSFAQLTSALKTVQRLVTPSHQESQSPPVPQEIWVNSSTP

SEQ ID NO: 13544 - protein, 461 aa, Oryza sativa (japonica cultivar-group)
GRRVDGEAVHQGVAVAGAVLHILDLEGKIMYWNRSAEKLYGYPASEALGQDGLMLLIDSCDINVVNDIFRRISLGESWTGKFPVKNRAGDRFSAVATNTPFYDEDGSLVGIVCVSSDLRTMEEIISGPSICARPHPESSRTYCEASCSNSNRKASLLSRSPFDSQQPLQSTIASKITNLATKVTNKVRSRVRADENGIEREGGSGESHCSDRDAKEEPTSSGTTTPRGDAPRGAFATEESSPGKTAKMNSDESEGKVGFHRILSSKAEALLNKKGISWPWKGRDNDGPDVKNQATWPWLHGEQDGSQNHQKISDSAITQDGQGAEYNQPNKNEASGSWSSFNNNSTSSASSTGSTNSSALYKVDHEADCLDYEILWEDLVIGEQIGQGSCGTVYHALWYGSDVAVKVFSKQEYSEEVIQTFRQEVSLMKKLRHPNILLFMGAVTSPQRLCIVTEFLPPDAW

SEQ ID NO: 13545 - protein, 982 aa, Lycopersicon esculentum
MKHIFKKLHHSNRSNDAQSTSSISSSSSPASSLSSASCTTDHRNSNSVSQSPLSPSTISTASTTTTPAAPVGAGGGGGGGNLSTINRQQDYYTSEEEYQVQLALALSVSSSQSQDPFPSDVNSSNGHGVGRTAVDLARDREDAAADLLSRQYWDYGVMDYEEKVVDGFYDVYNLFTDPASRGKMPSLSELETNPGTSNFEGVIINQRIDPSLEELMQIAHCITLDCPASEISLLVLRLSELVTGHLGGPVKDANIILAKWMEISTELRTSLHTSVLPIGSLKIGLSRHRALLFKVLADHVGIPCRLVKGSHYTGVEDDAVNIVKLPNDSEFLVDLMGAPGTLIPADVLSAKDASFNSPKLNKIPSLPSNSHSGVSYPRRNLLSGQNSVLGDDFSGRSKPEKIESVHSISDAGGSSTAGSSGINKRPSSNQVDWTSPLAIGTSLYKGGRGPNAAGDGLRLNVNVVPYDQNNPEDPKNLFADLNPFQIKGSGNTLLQKNPARNKVSELQQPINTLIPGRPPAPMMWKNRYAPNEVPRKNESDSEGLFPKKNGGSSGYNISSIASTSSNIPQKSSTDTSRLHGNSRPAYRGNDEVASTRNNSSILSAELEFRRLSVQNSQNNNRETSQWEGHSLQSDDLNRTQAYGDDIIVESDHTRNLQAQSIGTNIKLKEPENPTSSGNLGPSQVDPVFDDVGDCEIPWEDLVIGERIGLGSYGEVYHADWNGTEVAVKKFLDQDFSGAALAEFKREVRIMRRLRHPNVVRFMGAITRPPHLSIITEFLPRGSLYRIIHRPHFQIDERQKIKMALDVAKGMDCLHTSNPTIVHRDLKSPNLLVDTDWNVKVCDFGLSRLKHNTFLSSKSTAGTPEWMAPEVLRNEPSNEKCDIYSFGVILWELATLRLPWSGMNPMQVVGAVGFQNKRLEIPKELDPIVARIIWECWQTDPNLRPSFAQLTVALTPLQRLVIPAYVDQLNSRLPQEISVNSTP

SEQ ID NO: 13546 - protein, 982 aa, Lycopersicon esculentum
MKHIFKKLHHSNRSNDAQSTSSISSSSSPASSLSSASCTTDHRNSNSVSQSPLSPSTISTASTTTTPAAPVGAGGGGGGGNLSTINRQQDYYTSEEEYQVQLALALSVSSSQSQDPFPSDVNSSNGHGVGRTAVDLARDREDAAADLLSRQYWDYGVMDYEEKVVDGFYDVYNLFTDPASRGKMPSLSELETNPGTSNFEGVIINQRIDPSLEELMQIAHCITLDCPASEISLLVLRLSELVTGHLGGPVKDANIILAKWMEISTELRTSLHTSVLPIGSLKIGLSRHRALLFKVLADHVGIPCRLVKGSHYTGVEDDAVNIVKLPNDSEFLVDLRGAPGTLIPADVLSAKDASFNSPKLNKIPSLPSNSHSGVSYPRRNLLSGQNSVLGDDFSGRSKPEKIESVHSISDAGGSSTAGSSGINKRPSSNQVDWTSPLAIGTSLYKGGRGPNAAGDGLRLNVNVVPYDQNNPEDPKNLFADLNPFQIKGSGNTLLQKNPARNKVSELQQPINTLIPGRPPAPMMWKNRYAPNEVPRKNESDSEGLFPKKNGGSSGYNISSIASTSSNIPQKSSTDTSRLHGNSRPAYRGNDEVASTRNNSSILSAELEFRRLSVQNSQNNNRETSQWEGHSLQSDDLNRTQAYGDDIIVESDHTRNLQAQSIGTNIKLKEPENPTSSGNLGPSQVDPVFDDVGDCEIPWEDLVIGERIGLGSYEKFTHADWNGTEVAVKKFLDQDFSGAALAEFKREVRIMRRLRHPNVVRFMGAITRPPHLSIITEFLPRGSLYRIIHRPHFQIDERQKIKMALDVAKGMDCSHTSNPTIVHRDLKSPNLLVDTDWNVKVCDFGLSRLKHNTFLSSKSTAGTPEWMAPEVLRNEPSNEKCDIYSFGVILWELATLRLPWSGMNPMQVVGAVGFQNKRLEIPKELDPIVARIIWECWQTDPNLRPSFAQLTVALTPLQRLVIPAYVDQLNSRLPQEISVNSTP

SEQ ID NO: 13547 - protein, 2165 aa, Dictyostelium discoideum
MDDEFMTLKEGILLLFEDDRQQYLEKRVSLVSEAVTGCILNKMPVVNNLNFEILVTNNHSLKFQCFSYEDKESWIKQLSVYTINKNNNSTTTQNKSRGISLPDVKVDNPSQVHHRNFNQSAPSLISVATNSVKDYSKDDQIDFSSASFQENIDDNFDNSFEGNDSSDQESTENEESEVEESQESDQQSISEESEEDEESEQEESEESEEEIPESFEEREQDHNFIKQPPQSPQLQTQQQQQQQQQQQTQPQKHLNRELNEDESFIIELFPNVEVSVILDAMDFCGGDRDEVIALLASQTRLSFQDLNGFSPLDNKRKSSIGQNLRQQQNEKERKQEQLNKEQEELKKELKKELKQLENEEKQFDNLNTNQDCYNNNNKNITTTTTNKQTTQSPKRKQSLATNIKKPTPITKNNNSSINTNSYESNSSTASLTAFSPSLIWQPQSINNNNNSNIINSINNNNNKCIQLDTQSDDGTTTGSLEDEVSFESHHISKENEKIVTIEPPSFVSLNISGRSRRSSKNNNNCTVPSPSLHSSTPSLPSHSSSSQQQQIKKSNWSYKPSAQSSPTSSNSTTAPSSLSSSQDRNVLNTSQDRSLSSSQDRGLSSSQDRFQQQQQQSSSPSTPLKSSQERPITPNSWKPSSKSGTAWDISIRIVGFFQIDDHIEYKLQVISNSNEWFVCRRYNNFLMLDKKLKSSGIIDKKDLGLTLPPKKLKVASNQVAKARQLPLQSYLVHLLSNYQGIFYNNNIVATTNSNSSINNTHLTNVSKQGGLRNRSHSFSEDLSQPHSPILKKKFPSSPSQSRNNSHNNTHHSHHNTHQQHKIPDKVSTILKSTTMETSSNSSGSSSSPPSQHQQQQQQNSQLNLSSQSCFSNNSSSAADFNNYMESKLSEENNYYKNFNSNLDRGDSFKLEKESIKDTIKDNIKEDKICNDNNNSSSSSSSSSSGNNNNNIKDGRAPSPITTQQISPNKLILNTTKAITKPTPILNTQQTPTTTATTNTSTSTTNSTPSKFKKIKNSTINPTIEFISKPSLSVMFGFSPIYFVESIFIVLLIYILSNFVLKETSVYVISIFVIYFVIYFDNRYQIINKLSKSSINDSDSSSNNNNNNNNTTTTNNDSASTKGNNNNEISSPETYQKDVKSKINFYEHVNISSTNLNNVNTTSNTPITNPSNVNQPSNITTATTATTTSTNNNNNVNNSINNNNNNNNNNNNNNNNNNNNNNNNNNNNNNNNNNNNGNNNGNNNGNNNNILSKENSTNSLLNNLILNNTSVGKTHNRSSSGSDSIQPPPLPTGGSSHNIFYSAFPTHPYTDIDQSSTYRTRTFGSSSINNRKSLPPEYYNQYLNFLAHSNNNNNNNNSNTNNNNNNQSVSAPVSQLATPVYQTPGTNSVVGNLENDNENNNDSFSDINDNNSVVGNDFEQDDQILQNNGISTTTSTIVPTNDETKQELSQLENSNKVRSTVSKFIKLSTGVEEKLDWAIAQQCTLQPPRSSHSVTVYGSSLVLIGGEGITGENLVQFIDVERNLFISPKVTGGKVGPESIYNHDYCRIGNKFYLFGGYVAGKLSNKLYVLTIMDDSTVHWSSPRISGGCIPSPRYGHTFTRYGNRFLLFGGYDGEQCLNDLYILEPETMCWSTVTNIKGGQTPSERFGHTSTILGEKLIIFGGKGINNNNNNNNNNNNNNNNNNNNNNNNNNNNNKGLVELNDTHILLLNEIDSSFQWQVASFHQVSEIPSERSFHSATRVGRNIVMVGGKKDDSNGNPIALRDCWVLSYRMQWSKVSGVQFSPPRYNFGLIKNGSKLFILGGKGNNNNINNNSSSGGNNSSSSSGNSNTIITNTTNTTNNNNNNNNNNNNNNNNNNNNNNNNNNNNNNNNNNNNNNNNLSILDDIWFVNTVTLPISSSVTMINYSDIKIDKEIGKGHFSKVLKGNWKGKDVAVKKLNSNKDKAREEMIQEFKAEVELLGSLQHPNLVTCYGYSLNPMCIVMEFLPSGNLFELIHSKPSEQQQSIKLDSTLILAIAFDIARGMQHLHTRNIIHRDLKSSNLLMDKHFNIKIADLGIARETSFTQTMTTIGTVAWTAPEILRHESYNQKADVYSYAIVLYELLTGEEPYQGIPPMNAGILVASKGLRPELPDNCDPNWKKLVVWCWSEDPNKRPSFEEITNYLTKTF

SEQ ID NO: 13548 - protein, 1584 aa, Dictyostelium discoideum
MSFKFFKKKLVPSNEYRWDLRKSNSLTLNIEDKSRCSYRLPTSGSKGIAKSTQPFSSSFTYFELFITNGNGDKICFGLTTNDHPIEVYPGNYQGSYGYSGDGKCYFGTNEGRVYGPSFSSGDVVGCGYDSSSKTLYFTKNGVYLGVAAQKVNLIGLYPTVGLQNPGESVVINFFGPFSYRGAPEKPSKQSTIKDSGGSSIIPSEDLIPKEEFEVCRWSEKKNYHGKHVVVRNRTAFLPLDSPKDTIGGVRATQPFGEGFCYFEVIIDQLDKGQLSIGLANLEYPTFYHVGWMPRSYGYHNDDGRKFRWREEPGVNEGESYGSSYKKGDIIGCGLSFTSREIFFTKNGMYLGTAFSNVYGVFYPSVAFNEPGISITGVFGPPFKFSQVTLMLKNVNSTSILVPNGNNNNNSNNNNNNNNNNIIGNGKITTTTTTSTSPSSINNNEDISSNNNNNNNNNNNNNNNNNNNNNNNNNNNNNNSNSSNTNNNNINNTTNNNNSNSNNNNNNNNSNSNSNSNNNNINNNNNNNNNNNNIYLTKKPSIGSTDESSTGSLGGNNSSGNNNSSSGSIGNNSSIIKQRSPPHSINGPLMLPPSSTNNNNNIYSSYNSTTAGSSTTILPTLNHPIFGNTTSNNNSSSTLSVGGNNNLLGRHCQSLPITASTNHTLSSSLGVSFSSPSSSPKTSPRKIVNSSEDLGFVQTFQDQDGQPPSAWRRCGKSIKTKDDITLTIIKKKTSVAMADRPFSSNSSSTICYFEVYLEGHDKKGSITVGLSHSTYPFIKHIGREPKSYGFSSEGEKYGGSEIGEPYGPFFFFDGDSIASSCVIGCGINTSTRDIFFTKNGHYLGVAFSRVTSDPLYPSISFRGVVGGLCVATFPGGHFRFNIEDLPGISPSVWTEALGPDRQGSGFKNWAPNDVAIWLESFNYGQYRKNFRDNNISGRHLEGITHAMLKNDLGIEPYGHREDIINRLNRMIQIWNDKSPDSYPKIAIDSSDKIRWPASGGSSGGINISGGVVIGSSSGSDDGITEISSSSKNIRPYKSYTQKEIEDRNRRSTISGGEKKNKYYIDNQMDPHQIGSMDSDGLLPDFGQGPPDEKNSSKTLSNEQIRYLQQRKDEPPIAISSTGNGGSVSSTGGSSGFLTFPSSNSLTHPPQRDKPTQEFTHLPPITSNYKGITNTGQPHKSFDQPLELFPRHSAFSNNGNNGNNNNNNNNNNIKANQQQQQQSSYQQSQTQQQQQHITSTSTSTTNKWIDPFGGWETQSSLSHPPSRPPPPPPPPPQLPVRSEYEIDFNELEFGQTIGKGFFGEVKRGYWRETDVAIKIIYRDQFKTKSSLVMFQNEVGILSKLRHPNVVQFLGACTAGGEDHHCIVTEWMGGGSLRQFLTDHFNLLEQNPHIRLKLALDIAKGMNYLHGWTPPILHRDLSSRNILLDHNIDPKNPVVSSRQDIKCKISDFGLSRLKKEQASQMTQSVGCIPYMAPEVFKGDSNSEKSDVYSYGMVLFELLTSDEPQQDMKPMKMAHLAAYESYRPPIPLTTSSKWKEILTQCWDSNPDSRPTFKQIIVHLKEMEDQGVSSFASVPVQTIDTGVYA

SEQ ID NO: 13549 - protein, 337 aa, Dictyostelium discoideum
RPFGGWETQSSLSHPPSRPPPPPPPPPQLPVRSEYEIDFNELEFGQTIGKGFFGEVKRGYWRETDVAIKIIYRDQFKTKSSLVMFQNEVGILSKLRHPNVVQFLGACTAGGEDHHCIVTEWMGGGSLRQFLTDHFNLLEQNPHIRLKLALDIAKGMNYLHGWTPPILHRDLSSRNILLDHNIDPKNPLVSSRQDIKCKISDFGLSRLKKEQASQMTQSVGCIPYMAPEVFKGDSNSEKSDVYSYGMVLFELLTSDEPQQDMKPMKMAHLAAYESYRPPIPLTTSSKWKEILTQCWDSNPDSRPTFKQIIVHLKEMEDQGVSSFASVPVQTIDTGVYA

SEQ ID NO: 13550 - protein, 1024 aa, Dictyostelium discoideum
MATLDLCNNEHLNETESADEEDDQLQTPIKTVVTLKFKENPDSTSPIQVFQLNIGSNIIGRGSPSFLNDIKISRRHAEIIVSAEVGNVTFNQLGQNHSTLYRKDQTPIKMVRGISNQLLDDDLISLYDGSIPFSIHIERDNQFMSVCEGNFILTQDAADTNYHINSPTKTITTTSTTTTTTETLIKNIDNNNNNNNNNNNNNNNNNNNNNNNNNNNNNNNNNNNNNNNNNNNNNNNNNNNNNNNSILSKRSRDNENNHNHQYIHHDKTPLTLQQQQQLQNQQQLHQQQQQQLQYEQLQQLQQLQQHQQQQQHQQQQQQQQQQQQQQQQQQQQQQFKKHKRENTPVIVEDSLKLNIQENELLFIKKIGSGACGEVCQYEWKGTPVAVKTIFKSLLRKDKKEEFEKEVSILKCLRHPNVVLFMGTCLLNGNLAIITEYLNRGSLRDVLTTMNKSELSLSVKVKMLIDVAQGMNYLHTYSPPIIHRDLKSLNLLVDNNFNVKVSDFGLSRFISGGIGSSAKTFCGTLSWIAPEVFNGSGYTTKVDVYSFGIVLWEILTHKQPSGNISATSLGHPELPSNCPQSFSDLIKECCNRNPDQRPNFSQILLKLKLMYNQINNNNNNNKIDSSSFHNNNNNCSYNNSNDNNGILVTGGVGGNVSGNVESNNNNNNNTLNGAGNVIILNEIKDFTIQPNEITNIKTIIVKDSYSILEGQYKGKLVSIKQINGSINDFEMKQLGVLASIKSPLAVRFIGVVFNTDEYAIISEHVGNNGSLLTLMQNHSNQLNWSNTIDLAIQITQSIQYLHKHQPPILHRNITSDCFLLSSLNNNSNQNNNNNNNNNNNNNNNNNNNNNNNKKNDGGDDNGENTNTTTTTTTTTTTATNITNELNINEIKIKVHDFGLSRFNTQENEESLKEIKGNFLYSPPELLSLNTYSNKSDIYSLSIVLYELFETCLTKTYKKPYHEVTLDFDFQIIHKTSKLNLRPTISNNMPNEISKILQQGWFSDSVLRPSLDTIIKELLICKKNLC

SEQ ID NO: 13551 - protein, 527 aa, Dictyostelium discoideum
MATQQQQQQQQQQQQQIKARKDIQIQQAQSASDILGPPEISETEITTESILGDGSFGTVYKGRCKLKDVPVKVMLKQVDQKTLTDFRKEVAIMSKIFHPNIVLFLGACTSTPGKLMICTELMKGNLESLLLDPMVKLPLITRMRMAKDAALGVLWLHSSNPVFIHRDLKTSNLLVDANLTVKVCDFGLSQIKQRGENLKDGQDGAKGTPLWMAPEVLQGRLFNEKADVYSFGLVLWQIFTRQELFPEFDNFFKFVAAICEKQLRPSIPDDCPKSLKELIQKCWDPNPEVRPSFEGIVSELEEIIIDCCIPDEYGAILWKNHFKHENEANWKDFINVFSNFVGLTNANTPSMSDLLQFSPNLNGSTIELNFKCLKSIIVSSPKGPHEEEVVLMEQFGKVLAWFGNLKEDGSQILDKIRQLMECAWFHGDISTSESENRLRQKPEGTFLVRFSTSEYGAYTISKVSKNGGISHQRIHRPQGKFQVNNSKYLSVKELITGEAQALGINTPCLGSRFLFLIYKAQLSGYIN

SEQ ID NO: 13552 - protein, 2964 aa, Dictyostelium discoideum
IIDIEDIVSSFQYVGNESEIADLVKIVLSNNDGLSSNSNNNSSSNIGSMLNSGGGGSGSNLGLGLSSGTGGSFNGNSSGSSSSSSYYYNNNNNNNNIELTAQQKNPKVLCSFILHLLQIIFSQTSLTYSLYITYLKTNNNNNNNNNNNSSSPSNTDLSRSTYFYDIPVKSRIILKHIMLFLYNLTQRDASLLDSLSNIIGPFILGNVLLDPPPPPPSNSSPPISKSTSNNNLNVSNYHNNNNNNNNSNSNLSNSGNGDESPDFQSQNLVKSYNRENSGNSLNSMLHQTSLPNNNNSNVVNNNNNNNNNNNNNNNNNNNNNNNNNNNNNNNNNINNNSTSSNNNNNNNSNNNNSQIPPLIQVRQPSSDFTTTSSGNLRSLSNTENSLCKKVAIDLIQNIPLYLLFSHLKIQQLEGEKILFSAENIFCVDKCNFPPNKAMLGEIWVTNFRIIFINSNSNSSTIPNSTSSTSISSFASTQNLSILSIMTLFGSYNGNGGSGPTNATLSGGGSTSSSSNLNTPITTSPIHTSTNSNGAILNPINNSLINSNNNNNNNNINNNINNNINNINNNINNINSNSNNNINSIINSNSNNNNNNNNLNKLSTLDNTEIPLSMIYRWKMVKTGSLYDSFKIYCKDFRCKIIGFQINSHVLVKFKDLLTKCSVPTLDTIFAYNSKESSFGNTECFPDHSLLQEYNRIGVSWDLWRTTTQSKLCEHYPPTSVVPKSVSDNIVVTSAYYRSYGFPVLAWSHPTQKSSITRATSPEDQNNGSSNYLLTPNSPNSSSSNLANNNNSNNNNINNNNNNNNNNNNNNNNNSNNNNNNNNNNNNNNNNNNNNNGGGSGSRSTTIDNGQTSILNKNISNTPLIQSPTPNLPPSQHSLNLLMSPQTSSPRIHQSISSSSIPQVCQEDIDFLRGILDIKSSSMLNVFDTGSGGSYSSTMIGCQIEFLNLPPPNKVRERFNRLLHLHLGNPDSEWSETIRFFWLDPLKPILSAAINIAMHVDQGRSVLIQNSSSGPDIELQLSSLAQILLDPYYRTMDGFKVLIEKEWLSYGYPFSKRCHHKTSDDGFSPIFMQFIFLVWQIWKEFPTHFQFNEYYLLTLLDNVYNSRFGTFLCNNYKERMENNVYSSTKSFWSFQQQNQSRFTNLFYRPSPSSSSSSSSSSSSLSNGYNSSVQHLKCLRVFQDTMWNEYFFRYCFKSSLAIEQFEDRIKLSLLDIEMTVNSAITSTANALLPFLETLDLSNLRLYYLPSESTLYHLVGLRELNLSKNNLNSISCSLSSLVKLEKLSFEENSITNLPIETVVLLAEKLTSLTELNLSSNQLIDLPIEFSMFSKSLKKLHLKNNRFSAIPEVLGMLENLIELDLSELDLSSSTNSGVGIPTKLSKLCILNLNQTRIVELPKEFGDLKSLEKLYLDFNSLVTLPHSFRQLTNLEELSLSFNSMTELPREVCFLINLKKLMIEGNQIQFLPNEISQLSKLMILNVCKNKLDSLPASIGQLSQLVSLNLNNNSQLVSLRPTMGLLSNLVELKLDGTRLKTPPPEIVSLGLKSILLYLKDLIKGQEQCYKMKLMIVGQENVGKTTLLKTLKEKKKKATPSGPNISTDGIAIDQWVFSCLFEELDETSQNGRLIKKKQDITLSIWDFAGQEIYYTTHQFFLSERSVYIVAWNCALAEEESRVEFWLQSITTRAKDAPIIIVGTHLDDVNRTTAKMQKKRMKEKYLIRYQNIKAIKLVSCTSGKGITSLREKLEALVQSQSNMGESLPRSYMLLENLVKEETKKRIIPTIPWTEFIQMGTICTITDEAELLRATMFLHQLGSLVYFPKEPGLKQFVILDPQWITTMLSSIITTKHSYAKDGILNHKSLKQIWRPPQYPTHLHPHLISLLEKFEISYNLSPDSTSFETGTSLIPSLLLNDRPAIFPSLWGSFNQLVRQFGRIYQFEFVPNGFFSRLMVRILNFARVEAKCYWKNGMILQHDEETIFLEMNNAKKSLSFTVRGGANSTTLSRDVIETIQSLLDDSFQLPTYVFVPCFHCIFLSLPQCYYFPLDVCENAAVKGTGYLKCLTYDANVRTDLLVPDLVMSNFTGAKIPFDQLMIEELIGEGGAALVYRARWQGQTVAVKKLKTIENLDSPIEINDISLSKAFNEFRRECWVMSELEHPNIVQLKGLCLDPLCIVTEYLPHGNLYSFLHKPEMEFSWLFRLKVALDISSGMAFLHSSTPPIIHRDLKSPNILLASINENAQTIAKVVDFGLSGLQHTITNRGVENPLWLAPEILNKTKEASTQTDVYAFGVILWELVTRKDYFGEIGFMTLIEEKVINGERPKIPEDCPEMYSKLIVECWQTDASQRPKFSEIEDRLIKIAEAMFPDIHLSNIYQQQQQQQQQQQQSSPSKSSSTSPIIKSLNLSTVSELGESSNQTPKQNITTTTTTTHSDHKRQLSTDSGSSYRNKSHDTISHSTSVASDLLDIDNTLTVATTPRNRSKTNDDNIINTSNGRIITNSINNSNSNNEQPLSPNSLLQHSQSQQQLENVGLSALLDALPNSPIVSSTAAPSTTSTNKKVMYTSIVGDSARTRRGSVSIQPFQNEFNRELLPNQGTIQCLIKVGGNGCQVWAGTGNGFISTWKIEGQEKYIQRLFEANKDKKRIHCLYPYMNTVWCGSADDSITIWDIDTYQKIKSYSVEGPSCITRVGNTMWVGTIVNTIHIYDLKKKTKYKGKISLDSPIECLLRRDQEVWVATLGNIARIDVNSLRVVQMTKAHERAIHAMIQVDDHVWTASSDGTIKVWSSTCQSVHTIENAHSSRIFTLELVGDFVWSGSWDTTIKIWSTKDYHLVSENSGKHKDAISSFVYISNDQPLQTNERPIQKQVWSGSWDSSICVWALPNDTNSRSNTIFSSDSQFNLNGGSSNSITNSNSNSNNNLNGNLNNSNNSINNNYIIIIIIIIIIIIIIIIIIIIIIITIIIIIIIIIIVIM

SEQ ID NO: 13553 - protein, 752 aa, Oryza sativa
  unsure (1)..(752): unsure at all Xaa locations
METDEAAMEAADLVKKIRELEEGQAELKREISRIVPERGYARRPPTLSXRSIGAPSSRMRRRRHRCLXSCSAWTAPDSXDRHYVRILHSLGQAVHVISLDGKLMYWNRYAEHLYGYSVPEAVGQNALELIVHPSDYGAANDIIQNIFMGKCWRGKFPVKHKSGERFNIVASNTPLYDDDGSLVGLICLSTDTRTLEEILXXPFNLRESVSEFSKAARSTQXGSKSGLLNKVSCDSQQPLQSAITSRITNLATRVTNRVRSRVKTGQNCDDQFGGACESHYSEXXDAREEQTSSEGSTPSGDVLXXGAFVSEDNYSGKSSKTNSDDSGEGKLGLHKILSSTAEALWANRGIPWPWRGHGNEGRIERTCHSSMKFKRMDRAIRKFQSQSYYQTAKILNLSRKSNMRFQVPGGLSMXSTSSMSSTGSTNSSAIERADREADCLDFEILWEDLAIGEQVGQGSCGTVYHALWYGSDVAVKVFSKYEYSEDMILTFRQEVALMKKLRHPNVILFMGAVASLQRLCIVTEFLPRGSLFRLLQKNAGKLDPRRRVHMAIDIARGMNYLHNSSPPIVHRDLKSSNLLVDKNWTVKVADFGLSRLKLETFLTTNGKGTPQWMAPEVLRNEPSNEKSDVYSYGVILWEIATQKIPWDNLNTMQVVGAVGFMDHRLDIPSDVDPHWASMIESCWDSDPQRRPSFQELLDQLRDLQKQYNLQAQLQRTAAAKMSVDDCXLQNLNGPCSACCQYEVPAGQQNGIR

SEQ ID NO: 13554 - protein, 707 aa, Oryza sativa
  unsure (1)..(707): unsure at all Xaa locations
MEAADLVKKIRELEEGQAELKREISRIVPERGYARRPPTLSAQHRRTELPHAEXGGGGPGGGTVVSDPAAXILHSLGQAVHVISLDGKLMYWNRYAEHLYGYSVPEAVGQNALELIVHPSDYGAANDIIQNIFMGKCWRGKFPVKHKSGERFNIVASNTPLYDDDGSLVGLICLSTDTRTLEEILXXPFNLRESVSEFSKAARSTQXGSKSGLLNKVSCDSQQPLQSAITSRITNLATRVTNRVRSRVKTGQNCDDQFGGACESHYSEXXDAREEQTSSEGSTPSGDVLXXGAFVSEDNYSGKSSKTNSDDSGEGKLGLHKILSSTAEALWANRGIPWPWRGHGNEGRIERTCHSSMKFKRMDRAIRKFQSQSYYQTAKILNLSRKSNMRFQVPGGLSMXSTSSMSSTGSTNSSAIERADREADCLDFEILWEDLAIGEQVGQGSCGTVYHALWYGSDVAVKVFSKYEYSEDMILTFRQEVALMKKLRHPNVILFMGAVASLQRLCIVTEFLPRGSLFRLLQKNAGKLDPRRRVHMAIDINITYIFLQARGMNYLHNSSPPIVHRDLKSSNLLVDKNWTVKVADFGLSRLKLETFLTTNGKGTXXRSDVYSYGVILWEIATQKIPWDNLNTMQVVGAVGFMDHRLDIPSDVDPHWASMIESCWDSDPQRRPSFQELLDQLRDLQKQYNLQAQLQRTAAAKMSVDDCX

SEQ ID NO: 13555 - protein, 282 aa, Oryza sativa
  unsure (1)..(282): unsure at all Xaa locations
XPRAAGIRHGAGSCGTVYHALWYGSDVAVKVFSKQEYSEEVIQTFRQEGSLMKKLRHPNLLLFGAAVTSPQRLCIVTEFLPRGSLFRVLQRNNTKLDWRRRVHMALDIARGMNYLHHFSPLIIHRDLKSSNLLVDKNWTVKVADFGLSRLKRETFLTTKTGKGTPQWMAPEVLRNEPSDEKSDVYSYGVILWELVTQKIPWENLNSMQVIGAVGFMNHRLEIPSETDPQWTSLILSCWETDSQLRPSFQQLLERLRELQRQYNVQTQMERNASAAAKNSSIE

SEQ ID NO: 13556 - protein, 236 aa, Triticum aestivum
  unsure (1)..(236): unsure at all Xaa locations
XSGSWSSXXNNNSSSSASSTGSTNSSALYKIDHEADCLDYEILWEDLVIGEQVGQGSCGTVYHALWYGSDVGVKVFSRQEYSEEVIQAFRQEVSLMKKLRHPNILLFMGAVTSPHRLCIVTEFLPRGSLFRLLQRSTTKLDWRRRVHMALDVARGMNYLHHYSPPIIHRDLKSSNLLVDKNWTVNVADFGLSRLKRETYLTTNTGKGTPQWMAPEVLRNEPSDEKSDVYSYGVTLX

SEQ ID NO: 13557 - protein, 1120 aa, Tetraodon fluviatilis
MASLAAMETLADACPTVHQNGTAQRESPEARLSVDVLRLHFYRSGQGATDSSFLSYPPGNYVAEELCIDAAKACSISPLYFSLFGLFRERDCLWFSPNHTFQLDEFASEDVFFRIRYYFPGWYSGGASRAYRYGVAKGSESPVFDDCVMSYLFSQWRNDFVNGFMKIPSSHEIQEECLGMAVLDMTRTAKERQLSPLDIYHTMSYKSFLPKEIRAQIQDCNFLTRKRIRFRFKRFIQQFSQCRTTVRDLKLKYLISMESLEKAFYTETFQVRELSRGQLIILVVADNGIQWCQEKLKDSDEELQILCDFPDVTDISIKQASKEGATESRVVTINKQDGKNLELEFPSLSEALSFVSLIDGYYRLTTDAHHYLCKEVAPPRLVEAITSHCHGPISLEFAINQLQKCGNKQGLFILQCSPKDFNKYFLTFPVEVYGTVEFKHCQITRSECGQFNLSGTKRNFSSLHELLSCYKNETVRSDSVVFQFSKCCPPKAKERSCLLVCRTNKGPEVPLSPSTNRHNISQMVFHKIRKEDLEFNESLGQGTFTKIFKGVRKELGDYGLMHQTEVVMKVLDQAHRNYSESFFEAASMMTQLSHVHLILNYGVCVCGEENIMVQEYVKFGSLDTYLKKNKNSVNILWKLEVAKQLAQAMNFLEEKNLVHGNVCAKNVLLIREDDWRAGNPPFIKLSDPGISITVLPKEILVERIPWVPPECVNDPANLSLAADKWSFGTTLWEICSGGEKPLASLDNTNKTLFYEDRHQLPAPKWIELANLITSCMDYEPTFRPTFRAIIRDLHSLFTPDYELIVDSDILPNRTACTGWSTGGFDSQEPAQFEERHLIFLQQLGKGNFGSVEMCRYDPLQDNTGEVVAVKKLQHGTAEHIRDFEREIEILKSLQHENIVKYKGVCYSAGRRNLRLVMEYLPFGSLRDYLIKNKERIDHKKLVHYSSQICKGMEYLSGKRYIHRDLATRNILVESESRVKIGDFGLTKILPQDKEYYMVREPGESPIFWYAPESLTESKFSVASDVWSFGVVLYELFTHSSRNSSPPTVFMSMMGNDKQGQLIVYHLIELLKSGSRLPQPLDCPTEIHEIMEQCWDNDPYLRPSFKELALSIDLFREHKEF

SEQ ID NO: 13558 - protein, 974 aa, Saccharomyces cerevisiae
MNSMADTDRVNLTPIQRASEKSVQYHLKQVIGRGSYGVVYKAINKHTDQVVAIKEVVYENDEELNDIMAEISLLKNLNHNNIVKYHGFIRKSYELYILLEYCANGSLRRLISRSSTGLSENESKTYVTQTLLGLKYLHGEGVIHRDIKAANILLSADNTVKLADFGVSTIVNSSALTLAGTLNWMAPEILGNRGASTLSDIWSLGATVVEMLTKNPPYHNLTDANIYYAVENDTYYPPSSFSEPLKDFLSKCFVKNMYKRPTADQLLKHVWINSTENVKVDKLNKFKEDFTDADYHWDADFQEEKLNISPSKFSLRAAPAPWAENNQELDLMPPTESQLLSQLKSSSKPLTDLHVLFSVCSLENIADTIIECLSRTTVDKRLITAFGSIFVYDTQHNHSRLRLKFIAMGGIPLIIKFEHLAKEFVIDYPQTLIECGIMYPPNFASLKTPKYILELVYRFYDLTSTAFWCRWCFKHLDISLLLNNIHERRAQSILLKLSSYAPWSFEKILPSLIDSKLKKKILISPQITYVVFKSINYMITTNDDKIHKSAIPSSSSLPLSSSPTRNSPVNSVQSPSRSPVHSLMATRPSSPMRHKSISNFPHLTISSKSRLLIELPEGFFTWLTSFFVDMAQIKDLSVLKYFTKLCYLTVHINSTFLNDLLDNDAFFAFIRNIDTIIPFIDDAKTAAFIWKQITAICVEMSLDMDQMSASLFSTAMNFIRKKNNTSISGLEIILNCLHFTLRNVNDDVAPTVGSSESHSVFLIKVNNDAAIELPIDQLVDLFYALNDDDVNLSKLISIFTKICSLPGFENLTINIIFHPNFYEKIVSFFDTYFNSLLIQIDLLKFIKLIFSKSLLKLYDYTGQPDPIKQTEPNRRNKATVFKLRAILVQITEFLNNNWNNGCPKRNSNQVGGDSVLICQLCEDIRSLSKKGSLQKVSSVTAAIGSSPTKDERSNLRSSKDKSDGFSVPITTFQT

SEQ ID NO: 13559 - protein, 974 aa, Saccharomyces cerevisiae
MNSMADTDRVNLTPIQRASEKSVQYHLKQVIGRGSYGVVYKAINKHTDQVVAIKEVVYENDEELNDIMAEISLLKNLNHNNIVKYHGFIRKSYELYILLEYCANGSLRRLISRSSTGLSENESKTYVTQTLLGLKYLHGEGVIHRDIKAANILLSADNTVKLADFGVSTIVNSSALTLAGTLNWMAPEILGNRGASTLSDIWSLGATVVEMLTKNPPYHNLTDANIYYAVENDTYYPPSSFSEPLKDFLSKCFVKNMYKRPTADQLLKHVWINSTENVKVDKLNKFKEDFTDADYHWDADFQEEKLNISPSKFSLRAAPAPWAENNQELDLMPPTESQLLSQLKSSSKPLTDLHVLFSVCSLENIADTIIECLSRTTVDKRLITAFGSIFVYDTQHNHSRLRLKFIAMGGIPLIIKFEHLAKEFVIDYPQTLIECGIMYPPNFASLKTPKYILELVYRFYDLTSTAFWCRWCFKHLDISLLLNNIHERRAQSILLKLSSYAPWSFEKILPSLIDSKLKKKILISPQITYVVFKSINYMITTNDDKIHKSAIPSSSSLPLSSSPTRNSPVNSVQSPSRSPVHSLMATRPSSPMRHKSISNFPHLTISSKSRLLIELPEGFFTWLTSFFVDMAQIKDLSVLKYFTKLCYLTVHINSTFLNDLLDNDAFFAFIRNIDTIIPFIDDAKTAAFIWKQITAICVEMSLDMDQMSASLFSTAMNFIRKKNNTSISGLEIILNCLHFTLRNVNDDVAPTVGSSESHSVFLIKVNNDAAIELPIDQLVDLFYALNDDDVNLSKLISIFTKICSLPGFENLTINIIFHPNFYEKIVSFFDTYFNSLLIQIDLLKFIKLIFSKSLLKLYDYTGQPDPIKQTEPNRRNKATVFKLRAILVQITEFLNNNWNKDVPKRNSNQVGGDSVLICQLCEDIRSLSKKGSLQKVSSVTAAIGSSPTKDERSNLRSSKDKSDGFSVPITTFQT

SEQ ID NO: 13560 - protein, 666 aa, Neurospora crassa
MDGSLMAALPQGQDVIRVISTGGVTKVVKIADCNTCEEVMRVTLRKFGLREDHERNYCFWVLAGVDPDPNQCRRLGDTELWRVIKDHTRPERNRLILRRVPSGEPGKAELERAAAIAMEEAQQTHRPPIEPSDKRSQLKLQKVLGVGWEDLQQQPPLSPMSYQDRERNVSNAARDLERPAPLETPRAMPRRTQALRQFGGLRPPSELIASDLTSYFPDHSREAIDRTARLSMRRSARLSRVNHRLSVASTLSFASSIQDAPPIPTIADSWLTASNQIAKVRPRDVLPRAPHGYRDSVASSVLDTLQEEGSPTEPNRRSFVPFSDSGSDTAAVSVIDPDGNIVRHSYYDSGTNNSADSAVIQEALAEDGEDAADKELQTFLAGDAWDDSMWMKGSLIGQGSFGSVYLALHAITGELLAVKQVETPAPGADSKNDARKKSMIEALKREITLLRDLQHPNIVQYLGCSSSAEYLNIFLEYVPGGSVQTMLNQYGALPESLVRSFVRQILQGLSYLHNRDIIHRDIKGANILVDNKGTIKISDFGISKKLEATNILNGANNNKHRPSLQGSVFWMAPEVVKQTSYTRKADIWSLGCLVVEMMTGTHPFPDCTQLQAIFKIGGSKASPTIPDNASEEAKQFLAQTFEIDHNKRPSADELMLSPFLTPVPGT

SEQ ID NO: 13561 - protein, 879 aa, Sycon raphanus
MAEQDECNFGTDLITRAGSEALLRLNDEEIRLLESMKTYMTKRAKADQDYAKELLRLRVDRSTGGALHRSDSTSAEETSPILKAWHQFQAETDRVSSLIAQHAQALNAITVQSVDKLLLNKKTAKKRFTTCRQDADAAYGRTTERVNKLKKSYQQLSADVSRKKTEFQKSVGSPNQQDKMKRYIRAADKLCKCHNDYLLALQEVQEHQEAYRTRILPLLLNNMQQVCQGHAQQWMDALNDSLDNIDSCRDEYREIFSRLHATLGDLDPSSEYNGFLERNGEKLPPAEKFTFDVKLLEHAPEHASPDHLIINNLTQPQLESSITTMNSQLEELKKTLQTKTDELEVVRNTEVDENATTAEQMDQHMSTLGKYSDISLEVEQLWLNQTKLELAINTMESSLTSLGGQPAPLFDESVGNVDQQMLDHAEQVNGGGDQTAAAHPTSTKLFSAMLGGVKSMKNKVKKKALKMKTSMTATSHAQSSNLAVSSSPCGDMEDEFDDEDVEYDTPEAHAGVEEEPWYHGEISRQEATGLLKKMGDFLVRYSADKEHYTLTVKMEGIKHFIIQHNEEGFRFEGDPYPSIPMLIDHHFKNRLPVTRKSQAILRQPVKKPDLREYNISHDNILIGEKIGKGNFGDVFKGYLKTHNMEVAVKSCRSEDFPDKQKFLQEAEILKQYRHPNIVELIGVCAEKEPLYIIMELMAGGNFLSFLRGPEGKRLKVNNLTEMCVEAAAGMVFLEQRNCIHRDLAARNCLVGDNNVLKISDFGMSREEDDGIYTVSSGLKQIPIKWTSPEALNYGRYTTQSDVWSYGILLWETYTYGSGPYPGMNNRETRERIESNYRMPRPELCPHPVYKLMLSCWEYDPDKRPSFAEIYDKLYSFNHQ

SEQ ID NO: 13562 - protein, 505 aa, Spongilla lacustris
MGSCCSSQDGDGNGKATAGSTVDSHELSQSVKGKIKQPEPKPKPPPQVPPAQDVKYPIYVGKYDYDSRTDDDLSFKKGDLMYIISTDEGDWWFARSKDTAGKEGYIPSNYVAEYKSLDAEEWFLGKIKRVEAEKMLNQSFNQVGSFLIRDSETTPGDFSLSVKDQDRVRHYRVRRLEDGSLFVTRRSTFQILHELVDHYKIETDGLCCKLLYPCLQAEKPQTAGLLRQANEEWEIEKTQIKLLRRLGAGQFGEVWEGLWNGTTSVAVKTLKPGTMSVEEFLQEASIMKRLRHPKLIQLYAVCTKEEPIYIVTELMKYGSLLEYLRGEDGVLKIEQLVDVAAQVASGMSYLEQQNYIHRDLAARNILVGEHGICKVADFGLARVIDEEIYEAHTGAKFPIKWTAPEAAMYNRFTIKSDVWSFGVVLYEIITYGRFPYPGMTNPEVLEKIQQNYRMPCPANCPKQFHDIMLDCWREDPASRPTFETLQWQLEEFFNSEGYRDPDAIH

SEQ ID NO: 13563 - protein, 505 aa, Spongilla lacustris
MGSCCSSQDGDGNGKATAGSTVDSHELSQSVKGKIKQPEPKPKPPPQVPPAQDVKYPIYVGKYDYDSRTDDDLSFKKGDLMYIISTDEGDWWFARSKDTAGKEGYIPSNYVAEYKSLDAEEWFLGKIKRVEAEKMLNQSFNQVGSFLIRDSETTPGDFSLSVKDQDRVRHYRVRRLEDGSLFVTRRSTFQILHELVDHYKIETDGLCCKLLYPCLQAEKPQTAGLLRQANEEWEIEKTQIKLLRRLGAGQFGEVWEGLWNGTTSVAVKTLKPGTMSVEEFLQEASIMKRLRHPKLIQLYAVCTKEEPIYIVTELMKYGSLLEYLRGEDGVLKIEQLVDYAAQVASGMSYLEQQNYIHRDLAARNILVGEHGICKVADFGLARVIDEEIYEAHTGAKFPIKWTAPEAAMYNRFTIKSDVWSFGVVLYEIITYGRFPYPGMTWPEVLEKIQQNYRMPCPANCPKQFHDIMLDCWREDPASRPTFETLQWQLEEFFNSEGYRDPDAIH

SEQ ID NO: 13564 - protein, 506 aa, Spongilla lacustris
MGSCCSSQDGDGNGKATAGSTVDSHELSQSVKGKIKQPEPKPKPPPQVPPAQDVKYPIYVGKYDYDSRTDDDLSFKKGDLMYIISTDEGDWWFARSKDTAGKEGYIPSNYVAEYKSLDAEEWFFGQVKRVDAEKQLMMPFNNLGSFLIRDSDTTPGDFSLSVRDIDRVRHYRIKKLENGTYFVTRRLTFQSIQELVAYYTQQADGLCVNLKGPCMVMEKPQTAGLSKQANEEWEIEKKQIKLLRGLGAGQFGEVWEGLWNGTTSVAVKTLKPGTMSIEEFLEEASIMKQLRHPKLIQLYAVCTKEEPIYIVTELMKHGSLLEYLRGDGRSLKLPDLVDMCSQVASGMSYLEQQNYIHRDLAARNILVGEHKICKVADFGLARVIDEEIYEAKLGAKFPIKWTAPEAAMYSRFTIKSDVWSFGIVLYEVITYGRFPYPGMTNAQVLEQIQQSYRMPRPMGCPEKLYAIMMDCWREDPASRPTFETLSWQLEEFFTTGDDAGYKDMER

SEQ ID NO: 13565 - protein, 334 aa, Spongilla lacustris
IRTLDDGGFYMANRISFPTLQNLVSHYMMDADGLAQRLSRPCSRANIPITSGLSYKDEWEIDRTTIQLQRKLGQGNFGEVWAGVWNGTTAVAVKTLKPDTMEVKDFVQEAQVMKKIHHPNLLQLYAVCTIGEPIYIVTELMKYGSMLEYLKHGEGKNITLHQMVDMSAQIASGMTYLEAHSYIHRDLAARNILVGEGNVCKVADFGLARVIKEDIYNPREGTKFPIKWTAPEAALYNRFTIKSDVWSFGVLISEIVTHGRMPYPGMTNRQVLEAVDRGYRMPCPEGCPDPLYKIMLSCWKHEPDDRPTFESLKNLLEDYYVSAAEGSYREPAPR

SEQ ID NO: 13566 - protein, 362 aa, Spongilla lacustris
TFLVRESESKPGDYSLSIQDGDNVKHYRIRKLDEGGFFITRRAVFNTLKDLVQYYQNESDGLCVNLRQPCRPLERPQIDLSHKTKDMWEISRDSITLIRKLGAGQFGEVYQGLWNNSTPVAVKTLKAGTMQPAAFLAEAQIMKKLRHPKLIQLYAVCTQGEPVYIITELMSKGSLLDYLQGEAGALKLPQLIDMAAQVAAGMAYLELHNYIHRDLAARNILVGDNNICKVADFGLARLIVSDDYNATEGAKFPIKWTAPEAALFNRFSIKSDVWSFGILITELVTYGRIPYPGMSNAEVLQNLDKGYRMPCPVTTPESLYQIMLDCWKRNPADRPTFEALQWRLEDFFVLDAGQYQHAADVL

SEQ ID NO: 13567 - protein, 467 aa, Hydra vulgaris
MSNSMSGNSGNPMSGNSSKNFPNGTECVARYDFKGNSEKDLPFKKGDIIEILQSTRDPNWYNAKKVSDGRTGLIPINYVQQRRALHLHEMPWFFGKITREKAEELLTPREVGLFLVRESTNFPGDYTLCVVSPQNNKKVEHYRVISTSDNQVTVDEEAFFPTLIELIKHYEKDADGLCTMLKKPLKKKTEILQSAIFKESFQKEGWAVPIEDVEFKELIGKGEFGNVYKGVWAKKTVAIKKLRDDSKTAQSLLAEASVMTTLQHKNLVVLVAISFQGDSILILTEYCEKGVLVEYLRTRGRAVITLEEQKGFAIDVCNGMRYLEEKNIIHRDLAARNVLLSDELCAKVSDFGLAKDVEQELASGKFPVKWTAPEAIELKIFSTKSDVWSFGILLWEIFSFGRNPYPREPLDELLTKIKSNYRMECPEKCPPFVYQLMLKCWDADPSRRPSFKQLHNELFNPDRETKL

SEQ ID NO: 13568 - protein, 887 aa, Dugesia japonica
MLNKFIVIVTMLAMWNYAQDCNFELSKNETVQFTSFLPLILNCASISKFDTDLCETINDERPYNWYFQNKKIGNETKGKIKLVSSSQQMIIFNGSASDEGNYMCETINNNKEFISKTFDARMIEPSMTQMELLLNSFPNDHQEEINGRIYWLPEMILNHIRDVVIINQGAESDLHSFYYVSGSDSQISTFDVQWYFHYQPKSEDKTIIDHNIKTFYSSCNDLDLLPRKVNGSCYSSRLYLYNVEIKDQGFYSVEATLRMKNGSSHGLNFTYELKINIANILDPDKTNSILSTPQISFNLNSRVCINDRFDWICKVTPVVSYYVTIYKNNSNPNNITVLAESEVLQMNIDGNSGQGFYLKSSTVNYSVNSVQREHAGVYACRIINFKDYSSDHQNRHEPEVLMRLTVKDCVGNSYFTIIWYSISVGIIILVVISFLIIRLYNKYSNGYIVKTVIVQHPNKLYVPHDTCFPLLMPDITIKTIHKHINSSEDSLLQQKHFTNNSNIPFSQKISKYFRKSFIFSYRHVDVSSSNLDSPLGVISNTETNKLTSNSLTVETQRPQLILQNDANTKYILPSNIGWIFSRDSLIIGSKIGEGAFGIVYSALVKSFSENSASVEVAIKTLHTSFGDQDVINLIQELEMMKIIGRHRHIISLYGACIDNGHPYMVIELAKHGNLRDFLRAQRSQSKVGEIQNSGGLVTRLTVTDFLRFSIEIAEGMEYLSSRKIIHRDLAARNVLVDQYVEMKIADFGLTRIVENYYRKTTDGRLPIKWMAPECLLDRVYTVKSDVWSYGIVLWEIFTMGQTPYPTIQSDGMHQALRNGIRNEKPALASDEMYRLMLTIWNDDPLERHTFSEIIDKLTHIQLSNGGSSPKRDYLEISSNQCYSTTIV

SEQ ID NO: 13569 - protein, 666 aa, Dugesia japonica
LDLLPRKVNGSCYSSRLYLYNVEIKDQGFYSVEATLRMKNGSSHGLNFTYELKINIANILDPDKTNSILSTPQISFNLNSRVCINDRFDWICKVTPVVSYYVTIYKNNSNPNNITVLAESEVLQMNIDGNSGQGFYLKSSTVNYSVNSVQREHAGVYACRIINFKDYSSDHQNRHEPEVLMRLTVKDCVGNSYFTIIWYSISVGIIILVVISFLIIRLYNKYSNGYIVKTVIVQHPNKLYVPHDTCFPLLMPDITIKTIHKHINSSEDSLLQQKHFTNNSNIPFSQKISKYFRKSFIFSYRHVDVSSSNLDSPLGVISNTETNKLTSNSLTVETQRPQLILQNDANTKYILPSNIGWIFSRDSLIIGSKIGEGAFGIVYSALVKSFSENSASVEVAIKTLHTSFGDQDVINLIQELEMMKIIGRHRHIISLYGACIDNGHPYMVIELAKHGNLRDFLRAQRSQSKVGEIQNSGGLVTRLTVTDFLRFSIEIAEGMEYLSSRKIIHRDLAARNVLVDQYVEMKIADFGLTRIVENYYRKTTDGRLPIKWMAPECLLDRVYTVKSDVWSYGIVLWEIFTMGQTPYPTIQSDGMHQALRNGIRNEKPALASDEMYRLMLTIWNDDPLERHTFSEIIDKLTHIQLSNGGSSPKRDYLEISSNQCYSTTIV

SEQ ID NO: 13570 - protein, 813 aa, Caenorhabditis elegans
MSRINFKKSSASTTPTSPHCPSPRLISLPRCASSSIDRKDQASPMASPSTPLYPKHSDSLHSLSGHHSAGGAGTSDKEPPKFKYKMIMVHLPFDQHSRVEVRPGETARDAISKLLKKRNITPQLCHVNASSDPKQESIELSLTMEEIASRLPGNELWVHSEYLNTVSSIKHAIVRRTFIPPKSCDVCNNPIWMMGFRCEFCQFKFHQRCSSFAPLYCDLLQSVPKNEDLVKELFGIASQVEGPDRSVAEIVLANLAPTSGQSPAATPDSSHPDLTSIKRTGGVKRHPMAVSPQNETSQLSPSGPYPRDRSSSAPNINAINDEATVQHNQRILDALEAQRLEEESRDKTGSLLSTQARHRPHFQSGHILSGARMNRLHPLVDCTPLGSNSPSSTCSSPPGGLIGQPTLGQSPNVSGSTTSSLVAAHLHTLPLTPPQSAPPQKISPGFFRNRSRSPGERLDAQRPRPPQKPHHEDWEILPNEFIIQYKVGSGSFGTVYRGEFFGTVAIKKLNVVDPTPSQMAAFKNEVAVLKKTRHLNVLLFMGWVREPEIAIITQWCEGSSLYRHIHVQEPRVEFEMGAIIDILKQVSLGMNYLHSKNIIHRDLKTNNIFLMDDMSTVKIGDFGLATVKTKWTVNGGQQQQQPTGSILWMAPEVIRMQDDNPYTPQSDVYSFGICMYEILSSHLPYSNINNRDQILFMVGRGYLRPDRSKIRHDTPKSMLKLYDNCIMFDRNERPVFGEVLERLRDIILPKLTRSQSAPNVLHLDSQYSVMDAVMRSQMLSWSYIPPATAKTPQSAAAAAAANKKAYYNVYGLI

SEQ ID NO: 13571 - protein, 813 aa, Caenorhabditis elegans
MSRINFKKSSASTTPTSPHCPSPRLISLPRCASSSIDRKDQASPMASPSTPLYPKHSDSLHSLSGHHSAGGAGTSDKEPPKFKYKMIMVHLPFDQHSRVEVRPGETARDAISKLLKKRNITPQLCHVNASSDPKQESIELSLTMEEIASRLPGNELWVHSEYLNTVSSIKHAIVRRTFIPPKSCDVCNNPIWMMGFRCEFCQFKFHQRCSSFAPLYCDLLQSVPKNEDLVKELFGIASQVEGPDRSVAEIVLANLAPTSGQSPAATPDSSHPDLTSIKRTGGVKRHPMAVSPQNETSQLSPSGPYPRDRSSSAPNINAINDEATVQHNQRILDALEAQRLEEESRDKTGSLLSTQARHRPHFQSGHILSGARMNRLHPLVDCTPLGSNSPSSTCSSPPGGLIGQPTLGQSPNVSGSTTSSLVAAHLHTLPLTPPQSAPPQKISPGFFRNRSRSPGERLDAQRPRPPQKPHHEDWEILPNEFIIQYKVGSGSFGTVYRGEFFGTVAIKKLNVVDPTPSQMAAFKNEVAVLKKTRHLNVLLFMGWVREPEIAIITQWCEGSSLYRHIHVQEPRVEFEMGAIIDILKQVSLGMNYLHSKNIIHRDLKTNNIFLMDDMSTVKIGDFGLATVKTKWTVNGGQQQQQPTGSILWMAPEVIRMQDDNPYTPQSDVYSFGICMYEILSSHLPYSNINNRDQILFMVGRGYLRPDRSKIRHDTPKSMLKLYDNCIMFDRNERPVFGEVLERLRDIILPKLTRSQSAPNVLHLDSQYSVMDAVMRSQMLSWSYIPPATAKTPQSAAAAAARNKKAYYNVYGLI

SEQ ID NO: 13572 - protein, 850 aa, Caenorhabditis elegans
MGNYKSRPLTSCSDELKKKISEGYSVVRSRLSDDVRSRSNLGWVDVQIAAFEKSLEDFKQHMCPENAELKSTQLLSLFHIICAGHSDSQPEKLQFLIDNLPKESSITLISSQSANGFTPLHIAIYRGDVAILKALIATKLVDLDQSGRHLLPALHLAAMIGDSEMLTILLNSGANIHVTDFVHFTALHCATYFGQENAVRTLISASANLNLGGAVNDRPIHLAAAKGLTSITKLLLEAKADPLLADDEGNQALHYAAKSGSLVILNMLIKQVRGTNDRICARNLYGDTALHLSCYSGRLDIVKSILDSSPTNIVNMENVFSETPLHAACTGGKSIELVSFLMKYPGVDPNYQGQDGHTALHSACYHGHLRIVQYLLENGADQSLASRAFEGGALRQQAGPGTNRPSKVASAIMALNRSDTPSSNASYNSTVSLDDQQTPVIWAYERGHDAIVALLKHYAARTVEGDVCSEYSSGESSYTPLPSPMGRLTSLTRDKADLLQLRSALPAPFHLCLAEIEFQESIGSGSFGKVYKGTYRGKLVAVKRYRAMAFGCKSETDMLCREVSILSRLAHPNVVAFVGTSLDDPSQFAIITEFVENGSLFRRENGERKNYRVMDPAFRLRISLDVARGMRYLHESAAKPVIHRDLNSHNILIHADGRSVVADFGESRFVCQREDENLTKQPGNLRWMAPEVFSQSGKYDRKVDVFSFALVIWEIHTAELPFSHLKPAAAAAEMTYKRGRPTLPNQPTAQFPAHILSLIPQAWHPESSSRPDFVEIVALLEPHVESTHTDISAPSTVSQLTSQWEQLSVAPPPASKFPPILSALHGIAATGTVEELRQRIDNNGYVINKS

SEQ ID NO: 13573 - protein, 842 aa, Caenorhabditis elegans
MRTFSDELKKKISEGYSVVRSRLSDDVRSRSNLGWVDVQIAAFEKSLEDFKQHMCPENAELKSTQLLSLFHIICAGHSDSQPEKLQFLIDNLPKESSITLISSQSANGFTPLHIAIYRGDVAILKALIATKLVDLDQSGRHLLPALHLAAMIGDSEMLTILLNSGANIHVTDFVHFTALHCATYFGQENAVRTLISASANLNLGGAVNDRPIHLAAAKGLTSITKLLLEAKADPLLADDEGNQALHYAAKSGSLVILNMLIKQVRGTNDRICARNLYGDTALHLSCYSGRLDIVKSILDSSPTNIVNMENVFSETPLHAACTGGKSIELVSFLMKYPGVDPNYQGQDGHTALHSACYHGHLRIVQYLLENGADQSLASRAFEGGALRQQAGPGTNRPSKVASAIMALNRSDTPSSNASYNSTVSLDDQQTPVIWAYERGHDAIVALLKHYAARTVEGDVCSEYSSGESSYTPLPSPMGRLTSLTRDKADLLQLRSALPAPFHLCLAEIEFQESIGSGSFGKVYKGTYRGKLVAVKRYRAMAFGCKSETDMLCREVSILSRLAHPNVVAFVGTSLDDPSQFAIITEFVENGSLFRRENGERKNYRVMDPAFRLRISLDVARGMRYLHESAAKPVIHRDLNSHNILIHADGRSVVADFGESRFVCQREDENLTKQPGNLRWMAPEVFSQSGKYDRKVDVFSFALVIWEIHTAELPFSHLKPAAAAAEMTYKRGRPTLPNQPTAQFPAHILSLIPQAWHPESSSRPDFVEIVALLEPHVESTHTDISAPSTVSQLTSQWEQLSVAPPPASKFPPILSALHGIAATGTVEELRQRIDNNGYVINKS

SEQ ID NO: 13574 - protein, 848 aa, Caenorhabditis elegans
MVAATGNASKPSLNSFYADGLGQLRNGLFSCFQPVFGYFGTKTTVEIEKSEDELWEIPFDAISELEWLGSGSQGAVFRGQLENRTVAVKKVNQLKETEIKHLRHLRHQNIIEFLGVCSKSPCYCIVMEYCSKGQLCTVLKSRNTITRELFAQWVKEIADGMHYLHQNKVIHRDLKSPNILISAEDSIKICDFGTSHMQKKMDSTMMSFCGTVSWMAPEMIKKQPCNEKVDVYSFGVVLWEMLTRETPYANIAQMAIIFGVGTNILSLPMPEEAPKGLVLLIKQCLSQKGRNRPSFSHIRQHWEIFKPELFEMTEEEWQLAWDSYREFAKCIQYPSTVTRDHGGPKSAFAMEEEIQRKRHEQLNHIKDIRNMYEMKLKRTNKMYDKLQGCFTELKLKESELAEWEKDLTEREQWHNQNSPKAVAAPRAQLRGYPNEGYDDMSSDEDVQPCRGSPYRCSNTSSSSGVQSSPFSRQSSSRSSAGQQTRRSEGANPPKILRNDAIRHSGSYWETLGGARGSPARDSGFSQDSGMWSAGAGSCTAINGGGQQVCYSQTLYRNGDGRWSDGRIASRRRVSTSVNKSTAVPGQPVFFTRDSPSRVPHARSSSKLNRSSYPSRNAPHQLEDGCCCAHARAPRAKSIAVPMTSSSRARSPTPYDNDFENAESFVDPESPKNLKNLEKIVNLPESTSYDEALCNSDVTMNPIYTSPITTYSNPCHVELVDEENANDVDLTSSMDSRRSRSDDADVESSEEDEGNGNNILNTSMESEDLRYRIDTSQSTMMSSLERSLEIGATRSDGLSDNEMRVQAVKMSIKTHRRTGSNPQALIHQCIDEYTTSATDDSDDAGAVRI

SEQ ID NO: 13575 - protein, 855 aa, Caenorhabditis elegans
MVAATGNASKPSLNSFYADGLGQLRNGLFSCFQPVFGYFGTKTTVEIEKSEDELWEIPFDAISELEWLGSGSQGAVFRGQLENRTVAVKKVNQLKETEIKHLRHLRHQNIIEFLGVCSKSPCYCIVMEYCSKGQLCTVLKSRNTITRELFAQWVKEIADGMHYLHQNKVIHRDLKSPNILISAEDSIKICDFGTSHMQKKMDSTMMSFCGTVSWMAPEMIKKQPCNEKVDVYSFGVVLWEMLTRETPYANIAQMAIIFGVGTNILSLPMPEEAPKGLVLLIKQCLSQKGRNRPSFSHIRQHWEIFKPELFEMTEEEWQLAWDSYREFAKCIQYPSTVTRDHGGPKSAFAMEEEIQRKRHEQLNHIKDIRNMYEMKLKRTNKMYDKLQGCFTELKLKESELAEWEKDLTEREQWHNQNSPKAVAAPRAQLRGYPNEGYDDMSSDEDVQPCRGSPYRCSNTSSSSGVQSSPFSRQSSSRSSAGQQTRRSEGANPPKILRNDAIRHSGSYWETLGGARGSPARDSGFSQDSGMWSAGAGSCTAINGGGQQVCYSQTLYRNGDGRWSDGRIASRRRVSTSVNKSTAVPGQPVFFTRDSPSRVPHGVISCSSPRSSSKLNRSSYPSRNAPHQLEDGCCCAHARAPRAKSIAVPMTSSSRARSPTPYDNDFENAESFVDPESPKNLKNLEKIVNLPESTSYDEALCNSDVTMNPIYTSPITTYSNPCHVELVDEENANDVDLTSSMDSRRSRSDDADVESSEEDEGNGNNILNTSMESEDLRYRIDTSQSTMMSSLERSLEIGATRSDGLSDNEMRVQAVKMSIKTHRRTGSNPQALIHQCIDEYTTSATDDSDDAGAVRI

SEQ ID NO: 13576 - protein, 449 aa, Caenorhabditis elegans
MEDVFGWVREGNAFQVRVWLDDHEHDLNVGDDHAFSLLHWAAKGGHVAIAEMLLSRGARVNSTNMGDDTSLHLAAAHGHRQIVVKLLSRKADVNATNEHGMTPLHYACFWGYEQIAEDLISCGAAVNVCNKKGMTPLDVCQPMCKNTILEIAQEHGQSPNDRVPFKDTTWKGTKSRTRDATLSRYTGVDVSSLNLITKIAESHSGELWRGKWQGNDIVARILNVQEVTARISRDFQTEFPALRIFAHPNICAVLAAANQPPNLVIISQYMPFGSLYNVLHEQSSVVIDHGQAVRFALDIARGMSYLHSLDPMLLRFYLSSKHVVVDEELTAKLSMADTKFSFQEVGKAYSPAWMSPEALSRAPEDLNIRAADMWSFAILLWELNTREVPFSDLPPMECGMKIALEGLRVHIPPGIARNMNRLMNICMNEDPGRRPNFDQIIPILERMIL

SEQ ID NO: 13577 - protein, 466 aa, Caenorhabditis elegans
MSLSTHYHAHKPNVPIIMEDVFGWVREGNAFQVRVWLDDHEHDLNVGDDHAFSLLHWAAKGGHVAIAEMLLSRGARVNSTNMGDDTSLHLAAAHGHRQIVVKLLSRKADVNATNEHGMTPLHYACFWGYEQIAEDLISCGAAVNVCNKKGMTPLDVCQPMCKNTILEIAQEHGQSPNDRVPFKDTTWKGTKSRTRDATLSRYTGVDVSSLNLITKIAESHSGELWRGKWQGNDIVARILNVQEVTARISRDFQTEFPALRIFAHPNICAVLAAANQPPNLVIISQYMPFGSLYNVLHEQSSVVIDHGQAVRFALDIARGMSYLHSLDPMLLRFYLSSKHVVVDEELTAKLSMADTKFSFQEVGKAYSPAWMSPEALSRAPEDLNIRAADMWSFAILLWELNTREVPFSDLPPMECGMKIALEGLRVHIPPGIARNMNRLMNICMNEDPGRRPNFDQIIPILERMIL

SEQ ID NO: 13578 - protein, 533 aa, Caenorhabditis elegans
MGCLFSKERRSGGSDMGVSERIDVSRFQTPQQQTVFHVNNGGNEGTISQLNGTSDGMMGNGRGGGGGGGAQERETLVALYPYDSRADGDLSFQKGDAMYLLDHSNCDWWYVRHQRTGQTGYVPRNFVAKQQTIESEEWYAGKIPRNRAERLVLSSHLPKGTFLIREREADTREFALTIRDTDDQRNGGTVKHYKIKRLDHDQGYFITTRRTFRSLQELVRYYSDVPDGLCCQLTFPAPRLAPTRPDLSHDTQQNWEIPRNQLHLKRKLGDGNFGEVWYGKWRGIVEVAIKTMKPGTMSPEAFLQEAQIMKQCDHPNLVKLYAVCTREEPFYIITEYMINGSLLQYLRTDGSTLGIQALVDMAAQIANGMMYLEERKLVHRDLAARNVLVGDKISGVPVVKVADFGLARKLMEEDIYEARTGAKFPIKWTAPEAATCGNFTVKSDVWSYGILLYEIMTKGQVPYPGMHNREVVEQVELGYRMPMPRGCPEQIYEEVLLKCWDKTPDRRPTFDTLYHFFDDYFVSTQPNYAPPSA

SEQ ID NO: 13579 - protein, 539 aa, Caenorhabditis elegans
MGCLFSKERRSGGSDMGVSERIDVSRFQTPQQQTVFHVNNGGNEGTISQLNGTSDGMMGNGRGGGGGGGAQERETLVALYPYDSRADGDLSFQKGDAMYLLDHSNCDWWYVRHQRTGQTGYVPRNFVAKQQTIESEEWYAGKIPRNRAERLVLSSHLPKGTFLIREREADTREFALTIRDTDDQRNGGTVKHYKIKRLDHDQGYFITTRRTFRSLQELVRYYSDVPDGLCCQLTFPAPRLAPTRPDLSHDTQQNWEIPRNQLHLKRKLGDGNFGEVWYGKWRGIVEVAIKTMKPGTMSPEAFLQEAQIMKQCDHPNLVKLYAVCTREEPFYIITEYMINGSLLQYLRTDGSTLGIQALVDMAAQIANGMMYLEERKLVHRDLAARNVLVGDKISGVPVVKVADFGLARKLMEEDIYEARTGAKFPIKWTAPEAATCGNFTVKSDVWSYGILLYEIMTKGQVPYPGMHNREVVEQVELGYRMPMPRGCPEQIYEEVLLKCWDKTPDRRPTFDTLYHFFDDYFVSTQPNYAPPILYTNIYI

SEQ ID NO: 13580 - protein, 328 aa, Caenorhabditis elegans
MSRNHEENKRKTKNKEYKCMKMSTPTSNESTSSSSNNSDQRVLFPDIQRDDIQVGDHIGVGTFGAVFSGNWTLPDGSQRTIALKKVFVLEKEAEILSKIRHKNIIQFYGICKATGNDFFIVTEYAEKGSLYDFIHSEESQSFASSSGGNSFDVVVKWASQIASGIQYLHYDAVDTIIHRDLKSKNVVLDKNLVCKICDFGTSKDLTHSCTAPSWGGTAAWMSPEMILQSEGLTTATDVWSYGVVLWEILSKEVPYKDYSEFRIFTMITQSGITLAIPPSCPAPLKQLMSNCWKMTPKDRANMRQIQGELNRLAGNQKVRVSKLSLSSV

SEQ ID NO: 13581 - protein, 1224 aa, Caenorhabditis elegans
MGHSHSTGKEINDNELFTCEDPVFDQPVASPKSEISSKLAEEIERSKSPLILEVSPRTPDSVQMFRPTFDTFRPPNSDSSTFRGSQSREDLVACSSMNSVNNVHDMNTVSSSSSSSAPLFVALYDFHGVGEEQLSLRKGDQVRILGYNKNNEWCEARLYSTRKNDASNQRRLGEIGWVPSNFIAPYNSLDKYTWYHGKISRSDSEAILGSGITGSFLVRESETSIGQYTISVRHDGRVFHYRINVDNTEKMFITQEVKFRTLGELVHHHSVHADGLICLLMYPASKKDKGRGLFSLSPNAPDEWELDRSEIIMHNKLGGGQYGDVYEGYWKRHDCTIAVKALKEDAMPLHEFLAEAAIMKDLHHKNLVRLLGVCTHEAPFYIITEFMCNGNLLEYLRRTDKSLLPPIILVQMASQIASGMSYLEARHFIHRDLAARNCLVSEHNIVKIADFGLARFMKEDTYTAHAGAKFPIKWTAPEGLAFNTFSSKSDVWAFGVLLWEIATYGMAPYPGVELSNVYGLLENGFRMDGPQGCPPSVYRLMLQCWNWSPSDRPRFRDIHFNLENLISSNSLNDEVQKQLKKNNDKKLESDKRRSNVRERSDSKSRHSSHHDRDRDRESLHSRNSNPEIPNRSFIRTDDSVSFFNPSTTSKVTSFRAQGPPFPPPPQQNTKPKLLKSVLNSNARHASEEFERNEQDDVVPLAEKNVRKAVTRLGGTMPKGQRIDAYLDSMRRVDSWKESTDADNEGAGSSSLSRTVSNDSLDTLPLPDSMNSSTYVKMHPASGENVFLRQIRSKLKKRSETPELDHIDSDTADETTKSEKSPFGSLNKSSIKYPIKNAPEFSENHSRVSPVPVPPSRNASVSVRPDSKAEDSSDETTKDVGMWGPKHAVTRKIEIVKNDSYPNVEGELKAKIRNLRHVPKEESNTSSQEDLPLDATDNTNDSIIVIPRDEKAKVRQLVTQKVSPLQHHRPFSLQCPNNSTSSAISHSEHADSSETSSLSGVYEERMKPELPRKRSNGDTKVVPVTWIINGEKEPNGMARTKSLRDITSKFEQLGTASTIESKIEEAVPYREHALEKKGTSKRFSMLEGSNELKHVVPPRKNRNQDESGSIDEEPVSKDMIVSLLKVIQKEFVNLFNLASSEITDEKLQQFVIMADNVQKLHSTCSVYAEQISPHSKFRFKELLSQLEIYNRQIKFSHNPRAKPVDDKLKMAFQDCFDQIMRLVDR

SEQ ID NO: 13582 - protein, 552 aa, Caenorhabditis elegans
NNEWCEARLYSTRKNDASNQRRLGEIGWVPSNFIAPYNSLDKYTWYHGKISRSDSEAILGSGITGSFLVRESETSIGQYTISVRHDGRVFHYRINVDNTEKMFITQEVKFRTLGELVHHHSVHADGLICLLMYPASKKDKGRGLFSLSPNAPDEWELDRSEIIMHNKLGGGQYGDVYEGYWKRHDCTIAVKALKEDAMPLHEFLAEAAIMKDLHHKNLVRLLGVCTHEAPFYIITEFMCNGNLLEYLRRTDKSLLPPIILVQMASQIASGMSYLEARHFIHRDLAARNCLVSEHNIVKIADFGLARFMKEDTYTAHAGAKFPIKWTAPEGLAFNTFSSKSDVWAFGVLLWEIATYGMAPYPGVELSNVYGLLENGFRMDGPQGCPPSVYRLMLQCWNWSPSDRPRFRDIHFNLENLISSNSLNDEVQKQLKKNNDKKLESDKRRSNVRERSDSKSRHSSHHDRDRDRESLHSRNSNPEIPNRSFIRTDDSVSFFNPSTTSKVTSFRAQGPPFPPPPQQNTKPKLLKSVLNSNARHASEEFERNEQDDVVPLA

SEQ ID NO: 13583 - protein, 1196 aa, Caenorhabditis elegans
MGHSHSTGKEINDNELFTCEDPVFDQPVASPKSEISSKLAEEIERSKSPLILEVSPRTPDSVQMFRPTFDTFRPPNSDSSTFRGSQSREDLVACSSMNSVNNVHDMNTVSSSSSSSAPLFVALYDFHGVGEEQLSLRKGDQVRILGYNKNNEWCEARLYSTRKNDASNQRRLGEIGWVPSNFIAPYNSLDKYTWYHGKISRSDSEAILGSGITGSFLVRESETSIGQYTISVRHDGRVFHYRINVDNTEKMFITQEVKFRTLGELVHHHSVHADGLICLLMYPASKKDKGRGLFSLSPNAPDEWELDRSEIIMHNKLGGGQYGDVYEGYWKRHDCTIAVKALKEDAMPLHEFLAEAAIMKDLHHKNLVRLLGVCTHEAPFYIITEFMCNGNLLEYLRRTDKSLLPPIILVQMASQIASGMSYLEARHFIHRDLAARNCLVSEHNIVKIADFGLARFMKEDTYTAHAGAKFPIKWTAPEGLAFNTFSSKSDVWAFGVLLWEIATYGMAPYPGVELSNVYGLLENGFRMDGPQGCPPSVYRLMLQCWNWSPSDRPRFRDIHFNLENLISSNSLNDEVQKQLKKNNDKKLESDKRRSNVRERSDSKSRHSSHHDRDRDRESLHSRNSNPEIPNRSFIRTDDSVSFFNPSTTSKVTSFRAQGPPFPPPPQQNTKPKLLKSVLNSNARHASEEFERNEQDDVVPLAEKNVRKAVTRLGGTMPKGQRIDAYLDSMRRVDSWKESTDADNEGAGSSSLSRTVSNDSLDTLPLPDSMNSSTYVKMHPASGENVFLRQIRSKLKKRSETPELDHIDSDTADETTKSEKSPFGSLNKSSIKYPIKNAPEFSENHSRVSPVPVPPSRNASVSVRPDSKAEDSSDETTKDVGMWGPKHAVTRKIEIVKNDSYPNVEGELKAKIRNLRHVPKEESNTSSQEDLPLDATDNTNDSIIVIPRDEKAKVRQLVTQKVSPLQHHRPFSLQCPNNSTSSAISHSEHADSSETSSLSGVYEERMKPELPRKRSNGDTKVVPVTWIINGEKEPNGMARTKSLRDITSKFEQLGTASTIESKIEEAVPYREHALEKKGTSKRFSMLEGSNELKHVVPPRKNRNQDESGSIDEEPVSKDMIVSLLKVIQKEFVNLFNLASSEITDEKLQQFVIELLSQLEIYNRQIKFSHNPRAKPVDDKLKMAFQDCFDQIMRLVDR

SEQ ID NO: 13584 - protein, 1209 aa, Caenorhabditis elegans
MIMNPCFRERSQKRTKKRAKNRAKSRSTMYLSKVGDSSLAMSRSLPSVALPMHYLHHKLAESICFITATIDSLEDLVACSSMNSVNNVHDMNTVSSSSSSSAPLFVALYDFHGVGEEQLSLRKGDQVRILGYNKNNEWCEARLYSTRKNDASNQRRLGEIGWVPSNFIAPYNSLDKYTWYHGKISRSDSEAILGSGITGSFLVRESETSIGQYTISVRHDGRVFHYRINVDNTEKMFITQEVKFRTLGELVHHHSVHADGLICLLMYPASKKDKGRGLFSLSPNAPDEWELDRSEIIMHNKLGGGQYGDVYEGYWKRHDCTIAVKALKEDAMPLHEFLAEAAIMKDLHHKNLVRLLGVCTHEAPFYIITEFMCNGNLLEYLRRTDKSLLPPIILVQMASQIASGMSYLEARHFIHRDLAARNCLVSEHNIVKIADFGLARFMKEDTYTAHAGAKFPIKWTAPEGLAFNTFSSKSDVWAFGVLLWEIATYGMAPYPGVELSNVYGLLENGFRMDGPQGCPPSVYRLMLQCWNWSPSDRPRFRDIHFNLENLISSNSLNDEVQKQLKKNNDKKLESDKRRSNVRERSDSKSRHSSHHDRDRDRESLHSRNSNPEIPNRSFIRTDDSVSFFNPSTTSKVTSFRAQGPPFPPPPQQNTKPKLLKSVLNSNARHASEEFERNEQDDVVPLAEKNVRKAVTRLGGTMPKGQRIDAYLDSMRRVDSWKESTDADNEGAGSSSLSRTVSNDSLDTLPLPDSMNSSTYVKMHPASGENVFLRQIRSKLKKRSETPELDHIDSDTADETTKSEKSPFGSLNKSSIKYPIKNAPEFSENHSRVSPVPVPPSRNASVSVRPDSKAEDSSDETTKDVGMWGPKHAVTRKIEIVKNDSYPNVEGELKAKIRNLRHVPKEESNTSSQEDLPLDATDNTNDSIIVIPRDEKAKVRQLVTQKVSPLQHHRPFSLQCPNNSTSSAISHSEHADSSETSSLSGVYEERMKPELPRKRSNGDTKVVPVTWIINGEKEPNGMARTKSLRDITSKFEQLGTASTIESKIEEAVPYREHALEKKGTSKRFSMLEGSNELKHVVPPRKNRNQDESGSIDEEPVSKDMIVSLLKVIQKEFVNLFNLASSEITDEKLQQFVIMADNVQKLHSTCSVYAEQISPHSKFRFKELLSQLEIYNRQIKFSHNPRAKPVDDKLKMAFQDCFDQIMRLVDR

SEQ ID NO: 13585 - protein, 1214 aa, Caenorhabditis elegans
MGHSHSTGKEINDNELFTCEDPVFDQPVASPKSEISSKLAEEIERSKSPLILEMFRPTFDTFRPPNSDSSTFRGSQSREDLVACSSMNSVNNVHDMNTVSSSSSSSAPLFVALYDFHGVGEEQLSLRKGDQVRILGYNKNNEWCEARLYSTRKNDASNQRRLGEIGWVPSNFIAPYNSLDKYTWYHGKISRSDSEAILGSGITGSFLVRESETSIGQYTISVRHDGRVFHYRINVDNTEKMFITQEVKFRTLGELVHHHSVHADGLICLLMYPASKKDKGRGLFSLSPNAPDEWELDRSEIIMHNKLGGGQYGDVYEGYWKRHDCTIAVKALKEDAMPLHEFLAEAAIMKDLHHKNLVRLLGVCTHEAPFYIITEFMCNGNLLEYLRRTDKSLLPPIILVQMASQIASGMSYLEARHFIHRDLAARNCLVSEHNIVKIADFGLARFMKEDTYTAHAGAKFPIKWTAPEGLAFNTFSSKSDVWAFGVLLWEIATYGMAPYPGVELSNVYGLLENGFRMDGPQGCPPSVYRLMLQCWNWSPSDRPRFRDIHFNLENLISSNSLNDEVQKQLKKNNDKKLESDKRRSNVRERSDSKSRHSSHHDRDRDRESLHSRNSNPEIPNRSFIRTDDSVSFFNPSTTSKVTSFRAQGPPFPPPPQQNTKPKLLKSVLNSNARHASEEFERNEQDDVVPLAEKNVRKAVTRLGGTMPKGQRIDAYLDSMRRVDSWKESTDADNEGAGSSSLSRTVSNDSLDTLPLPDSMNSSTYVKMHPASGENVFLRQIRSKLKKRSETPELDHIDSDTADETTKSEKSPFGSLNKSSIKYPIKNAPEFSENHSRVSPVPVPPSRNASVSVRPDSKAEDSSDETTKDVGMWGPKHAVTRKIEIVKNDSYPNVEGELKAKIRNLRHVPKEESNTSSQEDLPLDATDNTNDSIIVIPRDEKAKVRQLVTQKVSPLQHHRPFSLQCPNNSTSSAISHSEHADSSETSSLSGVYEERMKPELPRKRSNGDTKVVPVTWIINGEKEPNGMARTKSLRDITSKFEQLGTASTIESKIEEAVPYREHALEKKGTSKRFSMLEGSNELKHVVPPRKNRNQDESGSIDEEPVSKDMIVSLLKVIQKEFVNLFNLASSEITDEKLQQFVIMADNVQKLHSTCSVYAEQISPHSKFRFKELLSQLEIYNRQIKFSHNPRAKPVDDKLKMAFQDCFDQIMRLVDR

SEQ ID NO: 13586 - protein, 669 aa, Drosophila mauritiana
QELMERLNSQDQQEDSSLVERFKEQPHYQNQTQILQQQRQLARVHHGNDLTDSLGSQPGSQCGTLTRQPKILLRAHLPNQQRTSVEVISGVRLCDALMKALKLRQLTPDMCEVSTTHSGRHIIPWHTDIGTLHVEEIFVRLLDKFPIRTHIKHQIIRKTFFSLVFCEGCRRLLFTGFYCSQCNFRFHQRCANRVPMLCQPFPMDSYYQLLLAENPDNGVGFPGRGTAVRFNMSSRSRSRRCSSSGSSSSSKLPSSSSGNHRQGRPPRISQDDRSNSAPNVCINNIRSVTSEVQRSLIMQARPPLPHPCTDHSNSTQASPTSTLKHNRPRARSADESNKNLLLRDAKSSEENWNILAEEILIGPRIGSGSFGTVYRAHWHGPVAVKTLNVKTPSPAQLQAFKNEVAMLKKTRHCNILLFMGCVSKPSLAIVTQWCEGSSLYKHVHVSETKFKLNTLIDIGRQVAQGMDYLHAKNIIHRDLKSNNIFLHEDLSVKIGDFGLATAKTRWSGEKQANQPTGSILWMAPEVIRMQELNPYSFQSDVYAFGIVMYELLAECLPYGHISNKDQILFMVGRGLLRPDMSQVRSDAPQALKRLAEDCIKYTPKDRPLFRPLLNMLENMLRTLPKIHRSASEPNLTQSQLQNDEFLYLPSPKTPVNFNNFQFFGSAGNI

SEQ ID NO: 13587 - protein, 977 aa, Drosophila melanogaster
MQPFSDSLSKSRDDLVTAASRQQQQLHGRRRHHGSSPNLSLDQTDNLRRSMACLQDEFGHLGIAATDLPFKSSDLDSPPRLQHHNNYAEITDSSAENTCQQRWPPHVGGAGAAFGHPDKPIGWMYGLLGCMKPVLSFIGKTGVIEVKSQRSEDWQIPFESITELEWLGSGAQGAVFSGRLKNETVAVKKVKELKETDIKHLRKLDHENIIKFKGVCTQSPVFCIIMEFCPYGPLQNILKEEQVMLPSRLVSWSKQIALGMQYLHSHKIIHRDLKSPNILISTNEVVKISDFGTSREWNEISTKMSFAGTVAWMAPEVIRNEPCSEKVDIWSYGVVLWEMLTCEIPYKDVDSSAIIWGVGNNSLKLLVPSTCPEGFKLLVKLCWKSKPRNRPSFRQILSHLDIAGPELLRKTEKQYFETQKSWKEEVRSHLKEITQNGTNIHKYEQDLIKRRTAEWRHAQDIRMVYEDKLQKTNQLFFELSECMSQLQEKEKEIAERERKLPGSGYKPNRRFGNTIRKMQHYRRRLNPAPAAIQQQSTTPDPETTPESPVKCMLYAQLDSNCQPKSYLANIIPSSGLGAPMPNKNKKVFRHRRNASGSFGAPPKYSPTRDRRYQSEPENRKVQLVERQTQTDAMDVSETDISPSAEAPRSQPIDVPVPNHRQLPLQLQRVQKIAQAQARARSGSTSSAAGAVNPACPSNGNSLSTSELTYQDACSSPDQLIDDVMNSNERLDMTECCSDNENLERLGRKVIEFINENRLSIQSNTNSVSNADNGNGGASPLELRESGNSPCLSRCSSTHSKRRKHPLGDNPNGSSIGNANGESHEQDSWSDEEGETTDYKYALRRRSIGRQPIARGMRPRRSYKAPLSQKIAIHKRNVVIVSDEEENTSEYSHSPSSQHSTLESNTDIADMKKTQATSTSSNSYSEPEDDSSDSSDEEQGNRPTEAKAEGPALPMGAVRSSDIISIPTFEADGAVNMV

SEQ ID NO: 13588 - protein, 675 aa, Drosophila melanogaster
ELEAKEQELMERLNSQDQQEDSSLVERFKEQPHYQNQTQILQQQRQLARVHHGNDLTDSLGSQPGSQCGTLTRQPKILLRAHLPNQQRTSVEVISGVRLCDALMKALKLRQLTPDMCEVSTTHSGRHIIPWHTDIGTLHVEEIFVRLLDKFPIRTHIKHQIIRKTFFSLVFCEGCRRLLFTGFYCSQCNFRFHQRCANRVPMLCQPFPMDSYYQLLLAENPDNGVGFPGRGTAVRFNMSSRSRSRRCSSSGSSSSSKLPSSSSGNHRQGRPPRISQDDRSNSAPNVCINNIRSVTSEVQRSLIMQARPPLPHPCTDHSNSTQASPTSTLKHNRPRARSADESNKNLLLRDAKSSEENWNILAEEILIGPRIGSGSFGTVYRAHWHGPVAVKTLNVKTPSPAQLQAFKNEVAMLKKTRHCNILLFMGCVSKPSLAIVTQWCEGSSLYKHVHVSETKFKLNTLIDIGRQVAQGMDYLHAKNIIHRDLKSNNIFLHEDLSVKIGDFGLATAKTRWSGEKQANQPTGSILWMAPEVIRMQELNPYSFQSDVYAFGIVMYELLAECLPYGHISNKDQILFMVGRGLLRPDMSQVRSDAPQALKRLAEDCIKYTPKDRPLFRPLLNMLENMLRTLPKIHRSASEPNLTQSQLQNDEFLYLPSPKTPVNFNNFQFFGSAGNI

SEQ ID NO: 13589 - protein, 782 aa, Drosophila melanogaster
MSSESSTEGDSDLYDPLAEELHNVQLVKHVTRENIDALNAKFANLQEPPAMYLIGESSKAELNTTWVLGNPTPTSKLFIKYPTYVYVCISRLWFLPTEYQELTSKLHELEAKEQELMERLNSQDQQEDSSLVERFKEQPHYQNQTQILQQQRQLARVHHGNDLTDSLGSQPGSQCGTLTRQPKILLRAHLPNQQRTSVEVISGVRLCDALMKALKLRQLTPDMCEVSTTHSGRHIIPWHTDIGTLHVEEIFVRLLDKFPIRTHIKHQIIRKTFFSLVFCEGCRRLLFTGFYCSQCNFRFHQRCANRVPMLCQPFPMDSYYQLLLAENPDNGVGFPGRGTAVRFNMSSRSRSRRCSSSGSSSSSKPPSSSSGNHRQGRPPRISQDDRSNSAPNVCINNIRSVTSEVQRSLIMQARPPLPHPCTDHSNSTQASPTSTLKHNRPRARSADESNKNLLLRDAKSSEENWNILAEEILIGPRIGSGSFGTVYRAHWHGPVAVKTLNVKTPSPAQLQAFKNEVAMLKKTRHCNILLFMGCVSKPSLAIVTQWCEGSSLYKHVHVSETKFKLNTLIDIGRQVAQGMDYLHAKNIIHRDLKSNNIFLHEDLSVKIGDFGLATAKTRWSGEKQANQPTGSILWMAPEVIRMQELNPYSFQSDVYAFGIVMYELLAECLPYGHISNKDQILFMVGRGLLRPDMSQVRSDAPQALKRLAEDCIKYTPKDRPLFRPLLNMLENMLRTLPKIHRSASEPNLTQSQLQNDEFLYLPSPKTPVNFNNFQFFGSAGNI

SEQ ID NO: 13590 - protein, 739 aa, Drosophila melanogaster
MSSESSTEGDSDLYDPLAEELHNVQLVKHVTRENIDALNAKFANLQEPPAMYLIEYQELTSKLHELEAKEQELMERLNSQDQQEDSSLVERFKEQPHYQNQTQILQQQRQLARVHHGNDLTDSLGSQPGSQCGTLTRQPKILLRAHLPNQQRTSVEVISGVRLCDALMKALKLRQLTPDMCEVSTTHSGRHIIPWHTDIGTLHVEEIFVRLLDKFPIRTHIKHQIIRKTFFSLVFCEGCRRLLFTGFYCSQCNFRFHQRCANRVPMLCQPFPMDSYYQLLLAENPDNGVGFPGRGTAVRFNMSSRSRSRRCSSSGSSSSSKPPSSSSGNHRQGRPPRISQDDRSNSAPNVCINNIRSVTSEVQRSLIMQARPPLPHPCTDHSNSTQASPTSTLKHNRPRARSADESNKNLLLRDAKSSEENWNILAEEILIGPRIGSGSFGTVYRAHWHGPVAVKTLNVKTPSPAQLQAFKNEVAMLKKTRHCNILLFMGCVSKPSLAIVTQWCEGSSLYKHVHVSETKFKLNTLIDIGRQVAQGMDYLHAKNIIHRDLKSNNIFLHEDLSVKIGDFGLATAKTRWSGEKQANQPTGSILWMAPEVIRMQELNPYSFQSDVYAFGIVMYELLAECLPYGHISNKDQILFMVGRGLLRPDMSQVRSDAPQALKRLAEDCIKYTPKDRPLFRPLLNMLENMLRTLPKIHRSASEPNLTQSQLQNDEFLYLPSPKTPVNFNNFQFFGSAGNI

SEQ ID NO: 13591 - protein, 675 aa, Drosophila melanogaster
ELEAKEQELMERLNSQDQQEDSSLVERFKEQPHYQNQTQILQQQRQLARVHHGNDLTDSLGSQPGSQCGTLTRQPKILLRAHLPNQQRTSVEVISGVRLCDALMKALKLRQLTPDMCEVSTTHSGRHIIPWHTDIGTLHVEEIFVRLLDKFPIRTHIKHQIIRKTFFSLVFCEGCRRLLFTGFYCSQCNFRFHQRCANRVPMLCQPFPMDSYYQLLLAENPDNGVGFPGRGTAVRFNMSSRSRSRRCSSSGSSSSSKPPSSSTGNHRQGRPPRISQDDRSNSAPNVCINNIRSVTSEVQRSLIMQARPPLPHPCTDHSNSTQASPTSTLKHNRPRARSADESNKNLLLRDAKSSEENWNILAEEILIGPRIGSGSFGTVYRAHWHGPVAVKTLNVKTPSPAQLQAFKNEVAMLKKTRHCNILLFMGCVSKPSLAIVTQWCEGSSLYKHVHVSETKFKLNTLIDIGRQVAQGMDYLHAKNIIHRDLKSNNIFLHEDLSVKIGDFGLATAKTRWSGEKQANQPTGSILWMAPEVIRMQELNPYSFQSDVYAFGIVMYELLAECLPYGHISNKDQILFMVGRGLLRPDMSQVRSDAPQALKRLAEDCIKYTPKDRPLFRPLLNMLENMLRTLPKIHRSASEPNLTQSQLQNDEFLYLPSPKTPVNFNNFQFFGSAGNI

SEQ ID NO: 13592 - protein, 675 aa, Drosophila melanogaster
ELEAKEQELMERLNSQDQQEDSSLVERFKEQPHYQNQTQILQQQRQLARVHHGNDLTDSLGSQPGSQCGTLTRQPKILLRAHLPNQQRTSVEVISGVRLCDALMKALKLRQLTPDMCEVSTTHSGRHIIPWHTDIGTLHVEEIFVRLLDKFPIRTHIKHQIIRKTFFSLVFCEGCRRLLFTGFYCSQCNFRFHQRCANRVPMLCQPFPMDSYYQLLLAENPDNGVGFPGRGTAVRFNMSSRSRSRRCSSSGSSSSSKPPSSSSGNHRQGRPPRISQDDRSNSAPNVCINNIRSVTSEVQRSLIMQARPPLPHPCTDHSNSTQASPTSTLKHNRPRARSADESNKNLLLRDAKSSEENWNILAEEILIGPRIGSGSFGTVYRAHWHGPVAVKTLNVKTPSPTQLQAFKNEVAMLKKTRHCNILLFMGCVSKPSLAIVTQWCEGSSLYKHVHVSETKFKLNTLIDIGRQVAQGMDYLHAKNIIHRDLKSNNIFLHEDLSVKIGDFGLATAKTRWSGEKQANQPTGSILWMAPEVIRMQELNPYSFQSDVYAFGIVMYELLAECLPYGHISNKDQILFMVGRGLLRPDMSQVRSDAPQALKRLAEDCIKYTPKDRPLFRPLLNMLENMLRTLPKIHRSASEPNLTQSQLQNDEFLYLPSPKTPVNFNNFQFFGSAGNI

SEQ ID NO: 13593 - protein, 675 aa, Drosophila melanogaster
ELEAKEQELMERLNSQDQQEDSSLVERFKEQPHYQNQTQILQQQRQLARVHHGNDLTDSLGSQPGSQCGTLTRQPKILLRAHLPNQQRTSVEVISGVRLCDALMKALKLRQLTPDMCEVSTTHSGRHIIPWHTDIGTLHVEEIFVRLLDKFPIRTHIKHQIIRKTFFSLVFCEGCRRLLFTGFYCSQCNFRFHQRCANRVPMLCQPFPMDSYYQLLLAENPDNGVGFPGRGTAVRFNMSSRSRSRRCSSSGSSSSSKPPSSSSGNHRQGRPPRISQDDRSNSAPNVCINNIRSVTSEVQRSLIMQARPPLPHPCTDHSNSTQASPTSTLKHNRPRARSADESNKNLLLRDAKSSEENWNILAEEILIGPRIGSGSFGTVYRAHWHGPVAVKTLNVKTPSPAQLQAFKNEVAMLKKTRHCNILLFMGCVSKPSLAIVTQWCEGSSLYKHVHVSETKFKLNTLIDIGRQVAQGMDYLHAKNIIHRDLKSNNIFLHEDLSVKIGDFGLATAKTRWSGEKQANQPTGSILWMAPEVIRMQELNPYSFQSDVYAFGIVMYELLAECLPYGHISNKDQILFMVGRGLLRPDMSQVRSDAPQALKRLAEDCIKYTPKDRPLFRPLLNMLENMLRTLPKIHRSASEPNLTQSQLQNDEFLYLPSPKTPVNFNNFQFFGSAGNI

SEQ ID NO: 13594 - protein, 675 aa, Drosophila melanogaster
ELEAKEQELMERLNSQDQQEDSSLVERFKEQPHYQNQTQILQQQRQLARVHHGNDLTDSLGSQPGSQCGTLTRQPKILLRAHLPNQQRTSVEVISGVRLCDALMKALKLRQLTPDMCEVSTTHSGRHIIPWHTDIGTLHVEEIFVRLLDKFPIRTHIKHQIIRKTFFSLVFCEGCRRLLFTGFYCSQCNFRFHQRCANRVPMLCQPFPMDSYYQLLLAENPDNGVGFPGRGTAVRFNMSSRSRSRRCSSSGSSSSSKPPSSSSGNHRQGRPPRISQDDRSNSAPNVCINNIRSVTREVQRSLIMQARPPLPHPCTDHSNSTQASPTSTLKHNRPRARSADESNKNLLLRDAKSSEENWNILAEEILIGPRIGSGSFGTVYRAHWHGPVAVKTLNVKTPSPAQLQAFKNEVAMLKKTRHCNILLFMGCVSKPSLAIVTQWCEGSSLYKHVHVSETKFKLNTLIDIGRQVAQGMDYLHAKNIIHRDLKSNNIFLHEDLSVKIGDFGLATAKTRWSGEKQANQPTGSILWMAPEVIRMQELNPYSFQSDVYAFGIVMYELLAECLPYGHISNKDQILFMVGRGLLRPDMSQVRSDAPQALKRLAEDCIKYTPKDRPLFRPLLNMLENMLRTLPKIHRSASEPNLTQSQLQNDEFLYLPSPKTPVNFNNFQFFGSAGNI

SEQ ID NO: 13595 - protein, 781 aa, Drosophila melanogaster
MSSESSPKRQDLYDPLAEELHNVQLVKHVTRENIDALNAKFANLQEPPAMYLIGESSKAELNTTWVLGNPTPTSKLFIKYPTYVYVCISRLWFLPTEYQELTSKLHELEAKEQELMERLNSQDQQEDSSLVERFKEQPHYQNQTQILQQQRQLARVHHGTDLTDSLGSQPGSQCGTLTRQPKILLRAHLPNQQRTSVEVISGVRLCDALMKALKLRQLTPDMCEVSTTHSGRHIIPWHTDIGTLHVEEIFVRLLDKFPIRTHIKHQIIRKTFFSLVFCEGCRRLLFTGFYCSQCNFRFHQRCANRVPMLCQPFPMDSYYQLLLAENPDNGVGFPGRGTAVRFNMSSRSRSRRCSSSGSSSSSKPPSSSSGNHRQGRPPRISQDDRSNSAPNVCINNIRSVTSEVQRSLIMQARPPLPHPCTDHSNSTQASPTSTLKHNRPRARSADESNKNLLLRDAKSSEENWNILAEEILIGPRIGSGSFGTVYRAHWHGPVAVKTLNVKTPSPAQLQAFKNEVAMLKKTRHCNILLFMGCVSKPSLAIVTQWCEGSSLYKHVHVSETKFKLNTLIDIGRQVAQGMDYLHAKNIIHRDLKSNNIFLHEDLSVKIGDFGLATAKTRWSGEKQANQPTGSILWMAPEVIRMQELNPYSFQSDVYAFGIVMYELLAECLPYGHISNKDQILFMVGRGLLRPDMSQVRSDARRHSKRLAEDCIKYTPKDRPLFRPLLNMLENMLRTLPKIHRSASEPNLTQSQLQNDEFLYLPSPKTPVNFNNFQFFGSAGNI

SEQ ID NO: 13596 - protein, 781 aa, Drosophila melanogaster
MSSESSPKRQDLYDPLAEELHNVQLVKHVTRENIDALNAKFANLQEPPAMYLIGESSKAELNTTWVLGNPTPTSKLFIKYPTYVYVCISRLWFLPTEYQELTSKLHELEAKEQELMERLNSQDQQEDSSLVERFKEQPHYQNQTQILQQQRQLARVHHGTDLTDSLGSQPGSQCGTLTRQPKILLRAHLPNQQRTSVEVISGVRLCDALMKALKLRQLTPDMCEVSTTHSGRHIIPWHTDIGTLHVEEIFVRLLDKFPIRTHIKHQIIRKTFFSLVFCEGCRRLLFTGFYCSQCNFRFHQRCANRVPMLCQPFPMDSYYQLLLAENPDNGVGFPGRGTAVRFNMSSRSRSRRCSSSGSSSSSKPPSSSSGNHRQGRPPRISQDDRSNSAPNVCINNIRSVTSEVQRSLIMQARPPLPHPCTDHSNSTQASPTSTLKHNRPRARSADESNKNLLLRDAKSSEENWNILAEEILIGPRIGSGSFGTVYRAHWHGPVPVKTLNVKTPSPAQLQAFKNEVAMLKKTRHCNILLFMGCVSKPSLAIVTQWCEGSSLYKHVHVSETKFKLNTLIDIGRQVAQGMDYLHAKNIIHRDLKSNNIFLHEDLSVKIGDFGLATAKTRWSGEKQANQPTGSILWMAPEVIRMQELNPYSFQSDVYAFGIVMYELLAECLPYGHISNKDQILFMVGRGLLRPDMSQVRSDARRHSKRLAEDCIKYTPKDRPLFRPLLNMLENMLRTLPKIHRSASEPNLTQSQLQNDEFLYLPSPKTPVNFNNFQFFGSAGNI

SEQ ID NO: 13597 - protein, 666 aa, Drosophila melanogaster
MERLNSQDQQEDSSLVERFKEQPHYQNQTQILQQQRQLARVHHGTDLTDSLGSQPGSQCGTLTRQPKILLRAHLPNQQRTSVEVISGVRLCDALMKALKLRQLTPDMCEVSTTHSGRHIIPWHTDIGTLHVEEIFVRLLDKFPIRTHIKHQIIRKTFFSLVFCEGCRRLLFTGFYCSQCNFRFHQRCANRVPMLCQPFPMDSYYQLLLAENPDNGVGFPGRGTAVRFNMSSRSRSRRCSSSGSSSSSKPPSSSSGNHRQGRPPRISQDDRSNSAPNVCINNIRSVTSEVQRSLIMQARPPLPHPCTDHSNSTQASPTSTLKHNRPRARSADESNKNLLLRDAKSSEENWNILAEEILIGPRIGSGSFGTVYRAHWHGPVPVKTLNVKTPSPAQLQAFKNEVAMLKKTRHCNILLFMGCVSKPSLAIVTQWCEGSSLYKHVHVSETKFKLNTLIDIGRQVAQGMDYLHAKNIIHRDLKSNNIFLHEDLSVKIGDFGLATAKTRWSGEKQANQPTGSILWMAPEVIRMQELNPYSFQSDVYAFGIVMYELLAECLPYGHISNKDQILFMVGRGLLRPDMSQVRSDARRHSKRLAEDCIKYTPKDRPLFRPLLNMLENMLRTLPKIHRSASEPNLTQSQLQNDEFLYLPSPKTPVNFNNFQFFGSAGNI

SEQ ID NO: 13598 - protein, 669 aa, Drosophila simulans
QELMERLNSQDQQEDSSLVERFKEQPHYQNQTQILQQQRQLARVHHGNDLTDSLGSQPGSQCGTLTRQPKILLRAHLPNQQRTSVEVISGVRLCDALMKALKLRQLTPDMCEVSTTHSGRHIIPWHTDIGTLHVEEIFVRLLDKFPIRTHIKHQIIRKTFFSLVFCEGCRRLLFTGFYCSQCNFRFHQRCANRVPMLCQPFPMDSYYQLLLAENPDNGVGFPGRGTAVRFNMSSRSRSRRCSSSGSSSSSKPPSSSSGNHRQGRPPRISQDDRSNSAPNVCINNIRSVTSEVQRSLIMQARPPLPHPCTDHSNSTQASPTSTLKHNRPRARSADESNKNLLLRDAKSSEENWNILAEEILIGPRIGSGSFGTVYRAHWHGPVAVKTLNVKTPSPAQLQAFKNEVAMLKKTRHCNILLFMGCVSKPSLAIVTQWCEGSSLYKHVHVSETKFKLNTLIDIGRQVAQGMDYLHAKNIIHRDLKSNNIFLHEDLSVKIGDFGLATAKTRWSGEKQANQPTGSILWMAPEVIRMQELNPYSFQSDVYAFGIVMYELLAECLPYGHISNKDQILFMVGRGLLRPDMSQVRSDAPQALKRLAEDCIKYTPKDRPLFRPLLNMLENMLRTLPKIHRSASEPNLTQSQLQNDEFLYLPSPKTPVNFNNFQFFGSAGNI

SEQ ID NO: 13599 - protein, 971 aa, Drosophila simulans
MSSNNNAPASAPDTGSTNANDPISGSLSVDSNLVIIQDMIDLSANHLEGLRTQCAISSTLTQQEIRCLESKLVRYFSELLLAKMRLNERIPANGLVPHATGNELRQWLRVVGLSQGTLTACLARLTTLEQSLRLSDEEIRQLLADSPSQREEEELRRLTRAMQNLRKCMESLESGTAASNNDPEQWHWDSWDRPIHIHRGSVGNIGLGHNSTASPRTHHRQHGVKGKNSALANSTNFTSSKSGRQSPSATEELNSTQGSQLTLTLTPSPPNSPFTPSSGLSSSLNGTPQRSRGTPPPARKHQTLLSQSQSHVQVDGEQLARNRLPTDPSPDSHSSTSSDIFVDANTNASSGGSSSNVLMVPCSPGVGHVGMGHAIKHRFTKALGFMATCTLCQKQVFHRWMKCTDCKYICHKSCAPHVPPSCGLPREYVDEFRHIKEQGGYASLPHVHGATKGSPLVKKSTLGKPLHQQHGDSSSPSSSCTSSTPSSPALFQQRERELDQAGSSSSANLLPTPSLGKHQPSQFNFPNVTVTSSGGSGGVSLISNEPVAEQFPTAPVTANGGLDSLVSSSNGHMSSLIGSQTSNASSAATLTGSLVNSTTTTSTSSFFPRKLSTAGVDKRTPFTSEYTDTHKSNDSDKTVSLSGSASTDSDRTPVRVDSTEDGDSGQWRQNSISLKEWDIPYGDLLLLERIGQGRFGTVHRALWHGDVAVKLLNEDYLQDEHMLETFRSEVANFKNTRHENLVLFMGACMNPPYLAIVTSLCKGNTLYTYIHQRREKFAMNRTLLIAQQIAQGMGYLHAREIIHKDLRTKNIFIENGKVIITDFGLFSSTKLLYCDMGLGVPHNWLCYLAPELIRALQPEKPRGECLEFTPYSDVYSFGTVWYELICGEFTFKDQPAESIIWQVGRGMKQSLANLQSGRDVKDLLMLCWTYEKEHRPQFARLLSLLEHLPKKRLARSPSHPVNLSRSAESVF

SEQ ID NO: 13600 - protein, 308 aa, Drosophila sp.
LGLCHILSRPCPASLPQTAAPDVGFGPQLRDKYEIPRSEIQVVRKVGRRNFGEVFYGKWRNSIDVAVKTLRAGTMSTAAFLQEAAIMKKFRHNRLVALYAVCSQEEPIYIVQEYMSKGSLLDFLREGDDRYLHFEDLIYMHTQVTTGMKYLESKQVIHRDLTTRNVLIGENNVAKICDFGLARVIADDEYRPKQGSRFPVKWTAPEAIIYGKFSIKSDVWSYGILLTELFTYGQVPYPGLHSREVIENIERGFRMPKPTNHYLPDNIYQLLLQCWDAVPEKRPTFEFLNHYLESFSVTSEVPYREVQD

SEQ ID NO: 13601 - protein, 1003 aa, Drosophila virilis
MSSSAAAQLTAPPVSNSNSSSSNNNTTTTASESNLIIIQDMIDLSANHLEGLRTQCATSATLTQQEIRCLESKLVRYFSELLLTKTRLNERIPANGLLPHHQATGNELRQWLRVVGLSPESLNACLARLTTLEQTLQLSDEELKQLLAHNSSTQLDEELRRLTKAMHNLRKCMETLDSSGAVASNVDPEQWHWDSWDRPHPHHMHRGSIGNIGLGLSSASPRAHHRQHQHQHANSKPKIVNNSASSSRSEQQPLTGSQLTLTLTPSPPNSPFTPASGTASASGTPQRSRSTTTAAGTPPPAKKHQTLLMHNSSASETALAEQPPRPPRSRLPTDPSPDSHSSASSSDIFVDGGSINSSNVLLVPPSPGVAHVGMGHTIKHRFSKWFGFMATCKLCQKQMMSHWFKCTDCKYICHKSCAPHVPPSCGLPPEYVHEFRQTQVGGRWDPAQHSSSKASPVPRKSTLGKPQLQQPQLQHGDSSSPSSSCTSSTPSSPALFQQQQLQLATPSACQPKPAPAAVAAAATQQGQQSQFNFPNVTITSINACNSNASAAQTLISNEPQAHMATTESTLTNGNNNSSSNNGSSANNNSSSSSSCSNGHLHSLTGSQVSTHSATSQVSNVSGSSSATYTSSLVNSGSFFPRKLSNAGVDKRVPFTSEYTDTHKSNDSDKTVSLSGSASTDSDRTPVRLDSTEDGDSGQWRQNSISLKEWDIPYGDLHLLERIGQGRFGTVHRALWHGDVAVKLLNEDYLQDEHMLESFRNEVANFKKTRHENLVLFMGACMNPPYLAIVTALCKGNTLYTYIHQRREKFAMNRTLLIAQQIAQGMGYLHARDIIHKDLRTKNIFIENGKVIITDFGLFSSTKLLYCDMGLGVPQNWLCYLAPELIRALQPCKPPGECLEFTSYSDVYSFGTVWYELICGEFTFKDQPAESIIWQVGRGMKQSLANLQSGRDVKDLLMLCWTYEKEHRPDFARLLSLLEHLPKKRLARSPSHPVNLSRSAESVF

SEQ ID NO: 13602 - protein, 511 aa, Strongylocentrotus purpuratus
MGCVNSTSKSKGDNYRPGQGQTTSPSHNQQSFPDHNTSRTSQFDRAPPGMIIPPANKPKAVAHPYTALYDYDARSEDDLDFKKGDILDVTKTEGDWWLARSQKTGKEGYIPSNYVAPVDSMKREDWYFGKCARKDAEKKLIAIGINKGQFIVRDGEANPGTFSLSVRDNDPQKGDHVKHYRIRKMDGGNGFFITQRSVFPTLSELVRHYQSNIDGLCCILSRACPKENPNTIGLGKDRWEIPRESLRMTRRLGHGQFGEVWQGVWNGNTPVAVKTLKEGTMSPAAFLAEANVMKKVRHERLVQLYAVCSDREPIYIVTELMSNGSLLDYLKDGTGKDTKLTTHVDMGAQIASGMAYLESMNFVHRDLAARNVLVGEGNVVKVADFGLARLIEEDEYMARVGAKFPIKWTAPEAALHGRFTIKSDVWSFGILMTEIVTFGRIPYPGMTNREVLDQVDLGYRMPKMHHCPDSLYEIMLKCWHKDPQQRPTFEFLHFCLDDYFVSTEPNYKEAD

SEQ ID NO: 13603 - protein, 542 aa, Halocynthia roretzi
MPNIFNKFGEELSLDERSAKTFLSRRLQANTASHFEEIQQGNLERECYEELCSFEEAREVFETNIQDLNEFWAKYTGVNNNKSEDNVVGMIIGIMLGVLGFIILIIAVYVVWKKRKGQLDREVMHGSQPYAPFPIHVLYPQNQNGRKDNHYERPIIDAYDSDLALGISECYLERERLQIGELITSGNFGEVHEGQLRMRDGTWLEVAVKNLITLDDKDDIEKFLREGVMMRGLDHKNVLALIGVCVEDDDMRRSPLIVLPFMKHGDLRTFLRDGNNVLTVMHLLTFCSDVAHGMQYLAEKKFVHRDLAARNCMVNESWCVKVADFGLSRDLFDRDYYTSSVKTQLPLKWMPPESIKFGRYDEKSDVWAYGIVCWEIMTRGAIPYPTVQAVAILQYLSDGNRMEKPECSPSKLYSVMKSCWEDEPQDRPTFKELVQGTNEVLKDARRVSGRRTKGSNASSSTHGGSTYHNSDLERSSVRRDRSNGRGREEKRQPKPKPRTKSRKDYDGGRSRESRRSKVSEVAEYLDPDDGSSSGDVGNSVRV

SEQ ID NO: 13604 - protein, 353 aa, Lethenteron reissneri
EVCSGRLKLPGKREMAVAIKTLKAGYTERQRRDFLSEASIMGQFDHPNVIHLEGVVTKSRPVMIITEFMENGSLDSFLRQNDGQFTVIQLVGMLRGIAAGMKYLADMSYVHRDLAARNILVNSNLVCKVSDFGLSRFLEDDTSDPTYTSAMGGKIPIRWTAPEAIQYRKFTTASDVWSYGIVMWEVMSYGERPYWDMSNQDVINAIEQDYRLPAPMDCPAALHQLMLDCWQKERNERPKFGQIVNTLDKLIRTPASLKTVACVTPGISQPLLDRSVPDFASFGSVDEWLDAIKMGRYKDNFASAGFTSFDLVSRMTAEDILRIGVTLAGHQKKILNSIQTMRVQMNQIQTVQV

SEQ ID NO: 13605 - protein, 349 aa, Eptatretus burgeri
EVCRGRLRIPNEPEVAVAIKTLKAGYSEKQRRDFLSEASIMGQFEHPNIIRLEGVVTKSKPVMIITEHMENGSLDSFLKKNDGQFTVIQLLGMLRGIAAGMKYLSDMNYIHRDLAARNVLVNGNLMCKVSDFGLSRGLEDDPQAVYTTHGGKIPIRWTAPEAIAFRKFTSASDVWSFGIVMWEVMSYGERPYWDINNQDVIQSIEEGYRLPAPMDCPIALHQLMLDCWQKDRAERPSFMELLAYLDKLLQTPAALKAPPGTPQGPTGSLLERKPPEYTMFCSVSEWLEAIKMGRYKENFTNAGYVAWTSVAQMTLEDLQRVGVTLAGHQKRILTSIQALRAQLANVVQA

SEQ ID NO: 13606 - protein, 542 aa, Torpedo californica
MGCVQCKDKETTKTTVEERAGSIPQNPGYRYGPDPSPQHYPNFSVTGIPNYNSFHGTGGQTLTVFGGVHTSSHTGTLRTRGGGSLTVGVTLFVALYDYDARTDDDLSFHKGEKFQILNNTEGDWWEARSLQTGGTGYIPSNYVAPVDSIQAEEWYFGKLGRKEAERQLLSVCNPRGTFLIRESETTKGAYSLSIRDWDDTKGDHVKHYKIRKLDSGGYYITTRAQFETLQQLVQHYAERAAGLCCRLVVPCHKGMPRLADLSVKTKDVWEISRESLQLIKRLGNGQFGEVWMGTWNGTTKVAVKTLKPGTMSPESFLEEAQIMKKLRHDKLVQLYAVVSEEPIYIVTEYMSKGSLLDFLKDGEGRVLKLPNLVDMAAQVAAGMAYIERMNYIHRDLRSANILVGDNLVCKIADFGLARLIEDNEYTARQGAKFPIKWTAPEAALYGRFTIKSDVWSFGILLTELVTKGRVPYPGMNNREVLEQVERGYRMASPQDCPSSLHELMIQCWKKDPEERPTFEYLQAFLEDYFTATEPQYQPGDNL

SEQ ID NO: 13607 - protein, 539 aa, Torpedo californica
MGCVHCKEKGTAKSQADDGDGLFNQNTNPRYGPDPTNQAQTAVFTRIPDFNSFHENTSTALNPFGGPVGYSAGSLTSRVGGVTGGVTMFIALYNYDARTEDDLTFRKGEKFHIINSSEGDWWEARSLTTGSTGYIPSNYVAPVDSIQAEEWYFGKMGRKDTERMLLCPGNPRGTFLIRESETTKGAYSLSIRDWDEVKGDHVKHYKIRKLDNGGYYITTRAQFETVPQLVHHYTERAAGLCCRLVVPCHKGMPKLADLSVKTKDVWEIPRESLQLIKKLGNGQFGEVWMGTWNGTTKVAVKTLKPGTMSPEAFLEEAQIMKRLRHDKLVQLYAVVSEEPIYIVTEFMTQGSLLDFLKDGDGRILKLPQLVDMAAQIAAGMAYIERMNYIHRDLRAANILVGENLVCKIADFGLARLIEDNEYTARQGAKFPIKWTAPEAALYGKFTIKSDVWSFGILLTELATKGRVPYPGMNNREVLEQVERGYRMPCPNACPVSLHELMIQCWKKDPEERHTFEYLQSFLEDYFTATEPQYQPGENL

SEQ ID NO: 13608 - protein, 371 aa, Danio rerio
MTGIVHSATGQRVSPDLTEHTTNSQRECQYEMSSLSASFVQIPFDDIRFYENCGGGSFGSVYRAHWVPQDKEVAVKKLLKIDAEAEILSVLSHKNIIQFYGAILEAPNDGIVTEYASRGSLYEYLSSADSEEMDMDQVMTWAMEIAKGMHYLHAEAPLKVIHRDLKSRNVVLTADNVLKICDFGASKMVSHTTHMSLVGTFPWMAPEVIQSLPVSETCDTYSYGVVLWEMLTREVPFKGFEGLQVAWLVVEKHERPTIPSSCPASFADLMRRCWNAEPKERPQFKQILGTLETMKNDSRLPDQCNSFLHNKAEWRCEIEETLERLKQLERELSCKEQELEERERRLTEWENRLMERSRSCTPVSLASEELI

SEQ ID NO: 13609 - protein, 643 aa, Danio rerio
MEQLQGAWRTVTNGLLTKDSVFESSYVSPVIKSPAPCQSRSSDDSKTSRTIRVFLPNQQRTVVNVRPGMTLHSCLIKALKVRGLQPECCAVFSLHPGQRSKKSRMEWSTDSTSLIGEELLVEVLDHVPLTTHNFVRKTFLKLAFCDICQKFLLNGFRCQRCGYKFHEHCSTKVPTMCVDWTNIRQLLLFPTPGESGAPSLPSLTSRRMRESLTRIPSSSVHRYSNPHVSNYTSPYPPSGAALTQRLRSTSTPNVTMLSTTVPVDSSLIELDTSPSSWCQQFSLKRRDAIRVHSSAGSSPNQSPTGWNQASAHIPASALNPQEKVKIRPREKRDSSYYWEIEANEVVLLSRIGSGSFGTVHKGKWHGDVAVKVLKVTNPTPEQFQAFRNEVAVLRKTRHVNILLFMGYMTKGNLAIVTQWCEGSSLYKHLHVLETNFQMFQLIDIARQTAQGMDYLYMRKHIHRDMKSNNIFLHEGLTVKIGDFGLATVKARWSGSQQVEQPSGSILWMAPEVIRMQDNNPYSFQSDVYSYGIVLFELMTGELPYSQIGNRDQIIFMVGRGYLSPDLSKLYKRCPKAMKRLVADCIKKSKDERPLFPQILSSIELLQHSLPKINRSASEPSLHRASQSEDISSCTLTSMKLPVF

SEQ ID NO: 13610 - protein, 307 aa, Danio rerio
ITGDRTNEVVLLSRIGSGSFGTVHKGKWHGDVAVKVLKVTNPTPEQFQAFRNEVAVLRKTRHVNILLFMGYMTKGNLAIVTQWCEGSSLYKHLHVLETNFQMFQLIDIARQTAQGMDYLYMRKHIHRDMKSNNIFLHEGLTVKIGDFGLATVKARWSGSQQVEQPSGSILWMAPEVIRMQDNNPYSFQSDVYSYGIVLFELMTGELPYSQIGNRDQIIFMVGRGYLSPDLSKLYKRCPKAMKRLVADCIKKSKDERPLFPQILSSIELLQHSLPKINRSASEPSLHRASQSEDISSCTLTSMKLPVF

SEQ ID NO: 13611 - protein, 616 aa, Danio rerio
MYPRVILKETLYKKSQQKRRTSPCNYKERTFILNTQDLAYFEQRPGKKPTQKGCIELSHIKCVEIVRSDVPIPCDYKYPFQIIHDSYYLYVFAPDNDCRLKWVKALKEAIQNNSLFLKYHPDFWGEGKWRCCQQTEKLATGCSEYYPNGAKPLPPTPDPSRRSSEPEERIVVALRNFIPKEHTDLPLQKDEEYFIVDCSEPNWWTVKDKDGNVGSVPCIYVTEKLSNNIEKFEWYNKDINRTEAEDLLMQENKDGGFMVRNSKHAGVYTVSIFTRVSGSNGEKCPQVKHYQIKVQSEGEKVLYYLAEKYLFPTIPELIRYHQHNPAGLITRLRHCVSRNVPNSARIKELSSDKWEIHPDEVKLSVELGSGQFGLVWKGSWQDREVAVKTVREGFMSEEEFKEEAQVMMKLSHNRLVQLYGVVTQRSPIYLVFEFMENGCLTEFLRAKKGKLSQKALLEMCLDVSEGMAYLESSNFIHRDLAARNCLVSENSVVKIADFGMTRFVLDDQYTSSHGSKFPVRWSSPEVIKFGKYSSKSDVWSFGVFMWEVYSEGRTPYDNRSNSEVVETLNAGHRLLKPRLCPQSVYELMQWSWKEKPEDRPSFALLLHELACLDQEP

SEQ ID NO: 13612 - protein, 525 aa, Danio rerio
MGCACCKQRKASKAVSNQNSCDAFNGTQASEPSRYIPDPTFNSGIPNFNDFSNPLTPPTSIINPARPPGLTGGGVTLFIALYEYDARTEDDLSFQKGEKFHIINNTEGDWWEARSLDTGKSGYIPSNYVAPVDSIQAEEWYFGKMGRKDAERQLLAQNNPRGTFLIRESETTKGAYSLSIRDWDDAKGDHVKHYKIRKLDNGGYYITTRTQFDTVQQLVEHYTGSNDGLCCYLTKACPNTTPQTMGLGRDAWEIARDTLKLNRKLGQGCFGDVWMGMWNGTTKVAVKTLKPGTMSPEAFLDEAQIMKRLRHDKLVQLYAVVSEEPIYIITEFMSQGSLLDFLKDGDGRNLKLPQLVDMAAQIAAGMAYIERMNYIHRDLRAANILVGDGLVCKIADFGLARLIEDNEYTARQGAKFPIKWTAPEAALYGKFTIKSDVWSFGILLTELITKGRVPYPGMNNREVLEQVERGYRMPCPQGSPASLHELMLQCWRKDPDERHTFEYLQSFLEDYFTATEPQYQPGENL

SEQ ID NO: 13613 - protein, 976 aa, Danio rerio
MATLWIYPSLLFFLFPSLTPSQALRNYPENEVTLLDTMSALGDLGWEAYPAEGWEEISVMDERNTPMRSYQVCNVMEASQNNWFRTRHIAREGAQRVYIEIKFTLRDCNSLPGVPGTCKETFNMYYYESNNPNLWFIKESQYIKIDTIAADESFTQTDVGDRVMRLNTEIRDINNLSKKGFYLAFQDVGACIALVSLRVFYKKCPLAVLNLAQFPDTVTGGDSALVEVRGSCVNDSEEFEAPRMYCSGDGGWLVPIGRCVCKPGFEENKDYCQACRPGTYKASSMDAYCSKCPPHSFSHQEKASECSCEKGFYRADMDPRSMACTRPPSAPENPISTLNDTSVTLEWSPPRDSGGRGDVTYSIHCRKCAGDGRICSPCSNNVHFVPRQFGLSIPKVLITDLLSNTNYTFSVEAVNGVSDLSPTPKQLVTVNITTSQTVNVILKERKSKDSITLAWQGPDRPNGVIVEYEVIYYEKNQRDQNYTVLKTKGHMMTVEGLKPGTTYVFRVRARTDGGYGNYGGEIELETSHEDMLAIGGPNQSTILAVSIAGGIVLLTFLVACFVVSGRHCGYIKAKQDPDEEKMQFQNGRVKLPGSRTYIHPHTYEDPNQAVRDFAKEIDASTIRIERVIGAGEFGEVCSGRLKLPSKREIYVAIKSLKAGYSEKQRRDFLSEASIMGQFDHPNIIRLEGVVTRCKPVMIITEYMENGSLDTFLKKHDGQFTVIQLVGMMRGIASGMKYLSDMSYVHRDLAARNILVNSNLVCKVSDFGLSRVLEDDPEAAYTTRGGKIPIRWTAPEAIAYRKFTSASDVWSYGIVMWEVISYGERPYWEMSNQDVIKAIDEGYRLPAPMDCPVVLHQLMLDCWEKSRSERPKFGQIVNTLDKLIRNPNSLKELANSSVWEDPTTPEFSVSTVDEWLDAINMGQYKDNFANAGYVSLDSILYISMCELSKMDVTLVGHQKKILSAVQSLHAQGTHVQV

SEQ ID NO: 13614 - protein, 981 aa, Danio rerio
MALFRIYSFLAPFHILVLCQALRNYPDNEVTLLDSMSAPGDLGWEAYPSEGWEEISVMDERNIPMRTYQVCNVMEANQNNWLRTGLIQREGAQRVYVEIKFTLRDCNSLPGVPGTCKETFNVYYHESNNAVAAPLRHIRESQYIKIDTIAADESFTQTDVGDRVMKLNTEVRDISGLSKRGLYLAFQDLGACIALVSVRVFYKRCPLAVLNLARFPDTVTGGDSALVEVRGTCVEDAEELEGPRMFCSADGGWLVPIGRCVCRPGFEEVDGHCQPCRSGFYKASAMDAYCVKCPPHSYSHQDKASECVCERGFYRAESDPRSMACTRPPSAPGNPISMVNETAVTLEWSPPRDSGGRGDVSYSVHCRKCSGETGASERCVPCGSGAHFNPRQFGLTHPRVLVTELQPHTNYTFSVEALNGVSDLSPSPRQLVSVNVTTSQTVSVILKERKGTDSVTLAWQGPEPVDGTVVEYEVTYYEKNQQDQNYTVLKTKSNSMTVDGLKPGTTYIFRVRARTDGGYGNYKGEIELETSHEDMLAVGDPNQQTILAISVAGGAVLLVLLVACFIVSGRRCGYIKAKQDPEEEKMQFQHGRVKLPETRTYIHPHTYEDPNQAVRDFAKEIEVSNIRIERVIGAGEFGEVCSGRLRLPSKREIQVAIKSLKAGYSEHQRRDFLSEASIMGQFDHPNIIRLEGVVTRCKPVMIVTEYMENGSLDTFLKKHDGQFTVIQLLGMLRGIAAGMQYLSEMNYVHRDLAARNILVNRNLVCKVSDFGLSRVLEDDPEAAYTTRGGKIPIRWTAPEAITYRKFTSASDVWSYGIVMWEVISYGERPYWEMSNQDVIKAVDEGYRLPAPMDCPVVLHQLMLDCWEKNRSDRPKFGQIVNTLDRLIRNPSSLKQLANSAVWEDPVTPEAAVNTVEDWLDLIKMGQYKEHFSSAGYVTLDSVLYVSSSELDKMGVELAGHQKKILSSIQCLQAHHGTQVQV

SEQ ID NO: 13615 - protein, 515 aa, Danio rerio
ECVSRQHYRKHKGVKLTNLGPGNYSVRVRATSLAGNGSWTEPIAFSVHQLEQSSYDPVIFIAILPALLLIAGLVVFGYTWMNKNRNNDRLGNGVLYASVNPEYFSAAEMYVPDEWEVEREKITMCRELGQGSFGMVYEGIAKGVVKDEPETRVAIKTVNESASLHERIEFLNEASVMKEFNCHHVVRLLGVVSQGQPTLVIMELMTRGDLKSYLRSLRSVENTSSLPLPPLKKMIQMAGEIADGMAYLNANKFVHRDLAARNCMVAEDFIVKIGDFGMTRDIYETDYYRKGGKGLLPVRWMSPESLKDGVFTTMSDVWSFGVVLWEIATLAEQPYQGMSNEQVLRFVMEGGLLDKPDNCPDMLFELMRMCWQYNPKMRPSFLEIISSIKEDLEAGFKETSFFYSEENKPPDTEELDMENVGTMENVPLEPSSSLQPLAPSISPPQQCTAAAQSCSSPSSPPSSPSSTDKHPLPTSAANGPSMVLRGPFEEGQPYAHMNGGRKNERALPLPQSSAC

SEQ ID NO: 13616 - protein, 439 aa, Danio rerio
GYTWMNKNRNNDRLGNGVLYASVNPEYFSAAEMYVPDEWEVEREKITMCRELGQGSFGMVYEGIAKGVVKDEPETRVAIKTVNESASLHERIEFLNEASVMKEFNCHHVVRLLGVVSQGQPTLVIMELMTRGDLKSYLRSLRSVENTSSLPLPPLKKMIQMAGEIADGMAYLNANKFVHRDLAARNCMVAEDFIVKIGDFGMTRDIYETDYYRKGGKGLLPVRWMSPESLKDGVFTTMSDVWSFGVVLWEIATLAEQPYQGMSNEQVLRFVMEGGLLDKPDNCPDMLFELMRMCWQYNPKMRPSFLEIISSIKEDLEAGFKETSFFYSEENKPPDTEELDMENVGTMENVPLEPSSSLQPLAPSISPPQQCTAAAQSCSSPSSPPSSPSSTDKHPLPTSAANGPSMVLRGPFEEGQPYAHMNGGRKNERALPLPQSSAC

SEQ ID NO: 13617 - protein, 490 aa, Danio rerio
KSNSMTVDGLKPGTTYIFRVRARTDGGYGNYKGEIELETSHEDMLAVGDPNQQTILAISVAGGAVLLVLLVACFIVSGRRCGYIKAKQDPEEEKMQFQHGRVKLPETRTYIHPHTYEDPNQAVRDFAKEIEVSNIRIERVIGAGEFGEVCSGRLRLPSKREIQVAIKSLKAGYSEHQRRDFLSEASIMGQFDHPNIIRLEGVVTRCKPVMIVTEYMENGSLDTFLKKHDGQFTVIQLLGMLRGIAAGMQYLSEMNYVHRDLAARNILVNGNLVCKVSDFGLSRVLEDDPEAAYTTRGGKIPIRWTAPEAITYRKFTSASDVWSYGIVMWEVISYGERPYWEMSNQDVIKAVDEGYRLPAPMDCPVVLHQLMLDCWEKNRSDRPKFGQIVNTLDRLIRNPSSLKQLANSAVWEDPVTPEAAVNTVEDWLDLIKMGQYKEHFSSAGYVTLDSVLYVSSSELDKMGVELAGHQKKILSSIQCLQAHHGTQVQV

SEQ ID NO: 13618 - protein, 669 aa, Carassius auratus
LHNAIFTPRPPDRRRRDLFGVANATSLHTLLAGNWNLTEGNFSDNEPPRQEFSFIEKKVKERSADIGGLHPFTVYRIDVHACNKEVRHCSVAAFIFSRTRAAERADDIPGPVTWEHLEGSVFLKWPEPQKPNGLILLYEIQYRLGTEPDKHECVSRQHYREHKGVKLSNLGAGNYSARVRATSLSGNGSWTDRIPFYVNQVEQSNYEHYLSYIIIPIFLICVLGAGMAFFCFNKRRNSDRLGNGVLYASVNPEYFSAAEMYVPDEWEVEREKITMCRELGQGSFGMVYEGIAKGVVKDEPETKVAIKTVNESASLHERIEFLNEASVMKEFNCHHVVRLLGVVSQGQPTLVIMELMTRGDLKSYLRSLRSAENTSSLPLPPLKKMIQMAGEIADGMAYLHANKFVHRDLAARNCMVAEDFTVKIGDFGMTRDIYETDYYRKGGKGLLPVRWMSPESLKDGVFTTMSDVWSFGVVLWEIATLAEQPYQGMSNEQVLRFVMEGGLLDKPDNCPDMLFELMRMCWQYNPKMRPSFLEIISSIKDDLEAGFKEMSFFYSEENKPPDTEELDMENVGAMENVPLEPPSSLQPLAPSLASPQQCAPASQGSSSPAGPSSPPPPPAPRTSTRSPASAANGPSMVLRASFDERQPYAHMNGGRKNERALPLPQSSAC

SEQ ID NO: 13619 - protein, 537 aa, Xiphophorus hellerii
MGCVQCKDKEATKLTDDRDASISQGAGYRYGADPTPQHYPSFGVTAIPNYNNFHAPVGQGVTVFGGVNTSSHTGTLRTRGGTGVTLFVALYDYEARTEDDLSFRKGERFQILNSTEGDWWDARSLTTGGSGYIPSNYVAPVDSIQAEDWYFGKLGRKDAERQLLSTGNPRGTYLIRESETTKGAFSLSIRDWDDEKGDHVKHYKIRKLDSGGYYITTRAQFDTLQQLVQHYSDRAAGLCCRLVVPCHKGMPRLADLSVKTKDVWEIPRESLQLIKRLGNGQFGEVWMGTWNGTTKVAVKTLKPGTMSPESFLEEAQIMKKLRHDKLVQLYAVVSEEPIYIVTEYMSKGSLLDFLKDGEGRALKLPNLVDMAAQVAAGMAYIERMNYIHRDLRSANILVGDNLVCKIADFGLARLIEDNEYTARQGAKFPIKWTAPEAALYGRFTIKSDVWSFGILLTELVTKGRVPYPGMNNREVLEQVERGYRMPCPQDCPASLHELMLQCWKKDPEERPTFEYLQAFLEDYFTATEPQYQPGDNL

SEQ ID NO: 13620 - protein, 544 aa, Xiphophorus hellerii
MGCVRSKEAKGPALKYQPDNSNVVPVSAHLGHYGPEPTIMGQSPAMKTQNNSHPTALSPFGGVSSPMTPFGGASTSFTSVTVNNPFPAVITGGVTFFVALYDYEARTSDDLSFRKGDRFQIINNTEGDWWEARSINTGENGYIPSNYVAPADSIQSEEWYFGKLSRKDTERLLLLPGNERGTFLIRESETTKGAYSLSLRDWDETKGDNCKHYKIRKLDNGGYYITTRTQFMSLQMLVKHYTEHVDGLCYKLTTVCPQVKPQTQGIAKDAWEIPRESLRLDVRLGQGCFGEVWMGTWNGTTKVAIKTLKPGTMSPEAFLEEAQIMKKLRHDKLVPLYAVVSEEPIYIVTEFMGKGSLLDFLKEGDGKHLKLPQLVDMASQIADGMAFIERMNYIHRDLRAANILVADNLVCKIADFGLARLIEDNEYTARQGAKFPIKWTAPEAALYGRFTIKSDVWSFGILLTELVTKGRVPYPGMVNREVLEQVDRGYRMPCPQGCPESLHEMMRQCWKKEPDERPTFEYIQSFLEDYFTATEPQYQPGDNL

SEQ ID NO: 13621 - protein, 527 aa, Xiphophorus xiphidium
MGGSKSKPKDVAQRNRSLDSNISSGGGAGSLHHNSAQQSATPNRSTIVDTDPQLVTNNAGLVLFGGVDNNRITPTGVTAFVALYDYESRTETDLSFKKGERLQILNNTEGDWWLANSLTTGKSGYIPSNYVAPSDSIQAEEWFFAKITRRDSERMLLALENRRGTFVVRESETTKGAYCLSVLDCDNTRGLNVKHYKIRKLDSGGFYITSRTPFATLQQLVQSYGKHADGLCHTLTDVCPVLKPQTQGLSKDAWEIPRESLRLEVKMGQGCFGEVWRGTWNGTTQVAIKTLKPGTMSPEAFLQEAQVMKKLRHEKLVQLYAVVSEEPIYIVTEFMDQGSLLEFLKGQYSTMLRLPQLVDFASQIASGMAYVERMNYVHRDLRAANILVGDNLVCKVADFGLARLIEDNEYTARQGAKFPIKWTAPEAALYGRFTIKSDVWSFGILLVELATKGRVPYPGMVNREVLDQVERGYRMPCPSECPASLHELMLNCWRKEAEERPTFEYLQGFLEDYFTSTEPQYQPGDNL

SEQ ID NO: 13622 - protein, 635 aa, Seriola quinqueradiata
MEHLQGAWKTLSNGFGMKDSAFEGPCLSPTMVQGFPCQRRSSDDSKMPDSKTSSTIRVYLPNQQRTVVNVRPGMTLHNCLIKALKVRGLQPQCCAVFRLHPGQRSKKLRMDWNTDSTSLIGQELLVEVLDHVPLTTHNFVRKTYLKLAFCDICQKFLLNGFRCQTCGYKFHEHCSTKVPTMCVDWSNIRQLLLCPTPGESGAPSLPPLTSRRMRESLTRFPSSAHRYSTPHAFNYTTPYPPTGGGLSQRQRSTSTPNVHMVSTTLPVDSSVIEDAMRDHDSAGSSPSQSPTGWSQSKAPAPAQRERAPSFNTHEKNKIRPRDKRDSSYYWEIEASEVYLNSRIGSGSFGTVYKGKWHGDVAVKILKVTDPTPEQFQAFRNEVAVLRKTRHVNILLFMGYMTKDNLAIVTQWCEGSSLYKHIHVLETNFKMIQLIDIARQTAQGMDYLHAKNIIHRDMKSNNIFLHEGLTVKIGDFGLATVKARWSGSHQVEQPSGSILWMAPEVIRMQDNNPYSFQSDVYSYGIVLFELMTGELPYSQIANRDQIIFMVGRGYLSPDLSKLYKNCPKAMKRLVADCIKKSKDERPLFPQILSSIELLQHALPKINRSASEPSLHRASHTEDINACTLTSTRLPVF

SEQ ID NO: 13623 - protein, 285 aa, Seriola quinqueradiata
VYKGKWHGDVAVKILKVTDPTPEQFQAFRNEVAVLRKTRHVNILLFMGYMTKDNLAIVTQWCEGSSLYKHIHVLETNFKMIQLIDIARQTAQGMDYLHAKNIIHRDMKSNNIFLHEGLTVKIGDFGLATVKARWSGSHQVEQPSGSILWMAPEVIRMQDNNPYSFQSDVYSYGIVLFELMTGELPYSQIANRDQIIFMVGRGYLSPDLSKLYKNCPKAMKRLVADCIKKSKDERPLFPQILSSIELLQHALPKINRSASEPSLHRASHTEDINACTLTSTRLPVF

SEQ ID NO: 13624 - protein, 1418 aa, Paralichthys olivaceus
MRSRTERNRLTLFWGLMLGLSSLLRPATAEICGPSIDIGNDIREFSRLENCTVVEGYLQILLIGDKNNNNINLEDFRSLSFPKLTMITDYLLLFRVSGLDSLSALFPNLAVIRGRNLFYNYALVIFEMTSLKDIGLYNLRNITRGAIRIEKNPELCYLDSIDWSLIMDAEFNNYIAGNKQSKECSDVCPGIMENSPQCKKTMFNNNYNYRCWNSNHCQKECPEKCVRRACTADGECCHPQCLGSCTAPYSDTACAACMHYYHQGRCVADCPPGTYKFEGWRCISAELCSKVHLPEFDSFIIHSGECMPECPSGYTRTTPNSMNCTACDGLCDKVCEEKVIDSMDAAQSLKGCTVIKGNLHINIRRGHNMVAELESFTCLIQRVTGYVGSRHSHTLSSLASLRSLRYTDGEDLLDDMYASSAFDNQQLQYLWDWKQRNLTIKTGKLSFRANPKLCRSEIRNMWDKTGIQGRFDEGDFRYNGDRASCESTILNFKSNTTSSTRIKLTWQRYRPPDYRDLISFIVYYKEAPFQNITEFEGQDGCGSNSWNMVDVELRLDKDSDPGVLLSALKPWTQYAIFVKAIMLKVEDKHMPTAKSKVVYIRTSPSVPSMPQDVRAYSNSTTQLVVRWSPPIAPNGNQTYYLVRWQQQAEDRELYQHNYCSKELKIPIRIAAIGVGDQEEDTKPTKPDPEGGDKGPCCPCPKSVEDLEAEAADASYRKVFENFLHKSIFTPRPPDRRRRDLFGIAKSTHSRRNRLHTNSSNVPPHQAAGNSSNLADVEPADREFEFMEQAVTERELLISGLQPFTVYRIDIHACNRQVQRCSAAEFVFSRTKPAEKADDIPGQVTVEGHEDWVFLRWPGPPHPNGLILMYEIKFKLASETEKHECVSGQMYQAQRGVRLSNLSPGNYSVRVRATSLAGNGSWTHIVDLYVAERYENVLYAMIFIPIAIILFICLLVTMLVAFNKKRNSDRLGNGVLYALVNPEYFSAAEMDVPDEWEVVREKIVLSRELGQGSFGMVYEGLAKGVVKDEPETRVAIKTVNESASMRERIEFLNEASVMKEFNCHHVVRLLGVVSQGQPTLVIMELMTRGDLKSYLRSLRPKEQQWSSLSLPPLKKMLQMAGQIADGMAYLNANKFVHRDLAARNCMVAEDFIVKIGDFGMTRDIYETDYYRKGGKGLLPVRWMSPESLKDGVFTTNSDVWSFGVVLWEISTLAEQPYQGLSNEQVLRFVMEGGLLEKPQNCPDMLFELMRMCWQYNPKMRPSFVEIISSLKDELEVSFKEVSFFYSADNKPSEEQQVHLDKMDNIEDVPADQPSSTQPQQAQVPQQTPPSPSSEAPPAPSLSPSSPSSPCTSTAAMDKQASGQQAANGLSGPSLAAGSGLGTGAGGTMRPSLEELPPYAHMNGGRKNERAMPLPQSSAC

SEQ ID NO: 13625 - protein, 1363 aa, Cynops pyrrhogaster
MTPGAGRRSLTLRCGFTLLVCIVHLWPANGEICWPGYDIRNSVDELKRLENCTVIEGYLQILLISNAKPDDFRNIRFPKLTVITDYLLLFRVSGLESLSDLFPNLTVIRGRNLFYNYALVIFEMTNLKEIGLHSLQSIPRGGLRIEKNSDLCYLSTVDWTLILDAVYNNYIVGNKPPKECGDLCPGAMEAKPLCEKTSINYEYSRRCWSANHCQKVCPPECGKGACTDQKQCCHAECLGSCSMPDNDTACVACRHFFYEGRCLATCPPHTYMFEGWRCVSREFCARVPSSDTDYEPYVIHKGECMPECPSGFTRNGSQSMFCSPCEGPCPKICEEEKTIDSVTSAQNLQGCTVLKGNLLINIRKGNNIASELENFMGLIETVTGYVKIRHSHALVSLSFLKSLRRIMGEKQLDGNYSFYAVDNQNLQQLWDWNYHNLTIDEGKMYFAVNPKLCLSEITRMEEVTGTKGRQSTGDINPKNNGERASCKTYKLKFISNTTMKNRIKLTWEWYRPQDFRDLISFTVYYKEAPIQNVTEFDGQDACGSNSWNMVDVDLPQNKEINPGVLLQGLKPWTQYAIYVKAVTLTLMESNDIHGAKSEVIYIRTSAAVPSTPLDVLSASNSSTQLIVKWKPPSLPNGNLSYYIVRWQQQPQDSYLYLHNYCSKDKIPVRKYSNQSIDADENSESSKTDSGGTERGQCCACPKTEAEKQAEKEEAEYRKVFENFLHNSIFVPRPDRKRRDVFSIANSTAPSSSSRNTTIPDHYANMSDYTEIDYPFYETKVENGERTLISNLQPFTLYRIDIHSCNHEADAHGCSASNFVFARTMPAMGADDIPGPVTWEGGEDNAVIMKWNEPVSPNGLILMYYVEFKLQGEGEMQRECVSRQAYREVGGAKLIRLNPGNYSSQVQAISLSGTGALTEPIFFYVQAKPPDYGKYLLTAIMVPLLALLLLSATILTVCYFNKKRNSDRLGNGVLYASVNPEYFSAAEMYVPDEWEVAREKITMNRELGQGSFGMVYEGIAKGVVKDEPETRVAIKTVNESASMRERIEFLNEASVMKEFNCHHVVRLLGVVSQGQPTLVIMELMTRGDLKSYLRSLRTDAESHPGQSPPTLKKMIQMAGEIADGMSYLNANKFVHRDLAARNCMVTEDFTVKIGDFGMTRDIYETDYYRKGGKGLLPVRWMSPESLKDGVFTTHSDVWSFGVVLWEIATLAEQPYQGMTNEQVLRFVMEGGLLEKPDNCPDMLFELMRMCWQYNPKMRPSFLEIINSIKDELDPSFKEVSFFYSDENKPPDMEELDLEAENMESIPLDPSSTLQHTDKHSGHTTENGPGVVVLRASFDERQSYAHMNGGRKNERSRPLPQSSAC

SEQ ID NO: 13626 - protein, 638 aa, Xenopus laevis
MEHIQGAWKTLSNGFGFKESVFEGSSCMSPTIVHQFGYQRRASDDGKLSDTSKTSSTMRVYLPNKQRTVVNVRSGMSLHDCLMKSLKVRGLQPECCAVFRLIQDPKGKLRLDWNTDAMSLVGAELQVDFLDHVPLTTHNFVRKTFLKLAFCDICQKFLLNAFRCQTCGYKFHEHCSTKVPTMCVDWSNIRQLLLFPNPNNIEGGSHTLPSLTMRRIGESVRIPVSSQQRYSTPHPFSFSTPSPVSECSLSQRQRSTSTPNVHMVSTTMAVDSRVIEDALRSHSESGSPNNLSPTGWSNAKAPAPTHRERAASSTGQEKNKIRARGQRDSSYYWEIIASEVMLSSRIGSGSFGTVYKGKWHGDVAVKILKVTDPTPEQLQAFRNEVAVLRKTRHVNILLFMGYMTKDNLAIVTQWCEGSSLYYHLHVLDTKFQMFQLIDIARQTAQGMDYLHAKNIIHRDMKSNNIFLHEGLTVKIGDFGLATVKTRWSGSQQVEQLTGSILWMAPEVIRMQDNNPFSFQSDVYSYGIVLYELMTGELPYSHIRDRDQIIFLVGRGGVVPDLSKLYKNCPKAMKRLVADSIKKLRDERPLFPQILSSIELLQHSLPKINRSALEPSLHRAAHTEDISSCALTSTRLPVF

SEQ ID NO: 13627 - protein, 638 aa, Xenopus laevis
MEHIQGAWKTLSNGFGFKESVFEGSSCMSPTIVHQFGYQRRASDDGKLSDTSKTSSTMRVYLPNKQRTVVNVRSGMSLHDCLMKSLKVRGLQPECCAVFRLIQDPKGKLRLDWNTDAMSLVGAELQVDFLDHVPLTTHNFVRKTFLKLAFCDICQKFLLNAFRCQTCGYKFHEHCSTKVPTMCVDWSNIRQLLLFPNPNNIEGGSHTLPSLTMRRIGESVRIPVSSQQRYSTPHPFSFSTPSPVSECSLSQRQRSTSTPNVHMVSTTMAVDSRVIEDALRSHSESGSPNNLSPTGWSNAKAPAPTHREKAASSTGQEKNKIRARGQRDSSYYWEIIASEVMLSSRIGSGSFGTVYKGKWHGDVAVKILKVTDPTPEQLQAFRNEVAVLRKTRHVNILLFMGYMTKDNLAIVTQWCEGSSLYYHLHVLDTKFQMFQLIDIARQTAQGMDYLHAKNIIHRDMKSNNIFLHEGLTVKIGDFGLATVKTRWSGSQQVEQLTGSILWMAPEVIRMQDNNPFSFQSDVYSYGIVLYELMTGELPYSHIRDRDQIIFLVGRGGVVPDLSKLYKNCPKAMKRLVADSIKKLRDERPLFPQILSSIELLQHSLPKINRSALEPSLHRAAHTEDISSCALTSTRLPVF

SEQ ID NO: 13628 - protein, 615 aa, Xenopus laevis
MSATSADMIETPPVLNFEEIDYKEIEVEEVVGRGTFGVVCKAKWRGKDVAIKQIESESERKAFIVELRQLSRVNHPNIVKLYGACLNPVCLVMEYAEGGSLYNVLHGAEPLPYYTAAHAMSWCLQCAQGVAYLHSMKPKALIHRDLKPPNLLLVAGGTVLKICDFGTACDIQTHMTNNKGSAAWMAPEVFEGSNYSEKCDVFSWGIILWEVITRRKPFDEIGGPAFRIMWAVHNGTRPPLIKNLPKPIESLMTRCWSKDPPQRPSMEEIVKIMTHLKQYFPGADVSLQYPCQYSDEGQSNSATSTGSCTDITSTNTSNKSEINIEPGDFQASTSNDTIKRIESKLAQTLKNQSKQGGETGRLSLPPSRGSSVESLSEIRGRPPSTLGTSEGKRMSADMSELEARISASTAFAKPKRGHRKTASFGNILDVPEIIITGNGQQRRRSVQDLTILGTESSQESRNSSRSSSPSVRMITTSGPTPDKPPRGLPWAPDESSDTNGSDNSIPMAYLTLDHQLQPLAPCPNSKESMAVFEQHCKMAQEYMKVQTEIALLLQRKQELIAELDQDEKDQQNTSRLVQEHKKLLDENKSLSTYYQQCKKQLEVIRSQQQKRQGTS

SEQ ID NO: 13629 - protein, 616 aa, Xenopus laevis
MSATSAEMIETPPVLNFEEIDYKEIEVEEVVGRGTFGVVCKAKWRGKDVAIKQIESESERKAFIVELRQLSRVNHPNIVKLYGACLNPVCLVMEYAEGGSLYNVLHGAEPLPYYTAAHAMSWCLQCAQGVAYLHSMKPKALIHRDLKPPNLLLVAGGTVLKICDFGTACDIQTHMTNNKGSAAWMAPEVFEGSNYSEKCDVFSWGIILWEVITRRKPFDEIGGPAFRIMWAVHNGTRPPLIKNLPKPIESLMTRCWSKDPPQRPSMEEIVKIMTHLMQYFPGADVSLQYPCQYSDEGQSNSATSTGSCIDITSTNTSNKSDIHIEPGDFQASASNDTIKRIESKLAQHLKNQAKQTGESGRLSLPPSRGSSVESLSEIRGRPPSTLGTSEGKRMSADMSELEARISASTAYVKPKRGHRKTASFGNILDVPEIIITAGNGQQRRRSVQDLTIVGTESSQESRNSSRSSSPSVRMITTSGPTPDKPPRGLPWAPDESSDTNGSDNSIPMAYLTLDHQLQPLAPCPNSKESMAVFEQHCKMAQEYMKVQTEIALLLQRKQELIAELDQDEKDQQNTSRLVQEHKKLLDENKSLSTYYQQCKKQLEVIRSQQQKRQGTS

SEQ ID NO: 13630 - protein, 537 aa, Xenopus laevis
MGCVQCKDKEATKLTDERDNSLTQSLGYRYGTDPTPQHYPSFTVTTIPNYNNFHATAGQGLTVFGGVNSSSHTGTLRTRGGTGVTLFVALYDYEARTEDDLSFQKGEKFQILNSSEGDWWEARSLTTGGTGYIPSNYVAPVDSIQAEEWYFGKLGRKDAERQLLSFGNPRGTYLIRESETTKGAYSLSIRDWDDMKGDHVKHYKIRKLDNGGYYITTRAQFETLQQLVQHYSERAAGLCCRLVVPCHKGMPRLTDLSVKTKDVWEIPRESLQLIKRLGNGQFGEVWMGTWNGNTKVAIKTLKPGTMSPESFLEEAQIMKKLKHDKLVQLYAVVSEEPIYIVTEYMSKGSLLDFLKDGEGRALKLPNLVDMAAQVARGMAYIERMNYIHRDLRSANILVGNGLICKIADFGLARLIEDNEYTARQGAKFPIKWTAPEAALYGRFTIKSDVWSFGILLTELVTKGRVPYPGMNNREVLEQVERGYRMPCPQDCPISLHELMLNCWKKDPEERPTFEYLQGFLEDYFTATEPQYQPGDNL

SEQ ID NO: 13631 - protein, 519 aa, Xenopus laevis
MGCKQCKEDEVAKAEESALENPQRYCPDPTSQMPFRTQETHTPFINTGIGGVMSGPSHRGMGVGVTAGATLFIALYDYDARTEDDLTFQKGEKFHIINNSEGDWWEARSLSSGNTGYIPSNYVAPMNSIQSKDWFFGKIGRKDAERLLLSEGNPRGTFMIRESETTKGAYSLSVRDWDASRGDHAKHYKIRKLDSGGFYITTRVQFNTVEELVEHYGEFNDGLCHLLTSPCINQKPQTLGLAKDAWEITRDSISLDKKLGQGCFGDVWKGTWNGTTNVAVKTLKPGTMSPEAFLEEAQIMKKLRHDKLVQLYAVVSEEPIYIVTEFMTKGSLLDYLKDGEGHFLKLPQLVDMSAQIASGMAYIERMNYIHRDLRAANILVGDNLICKIADFGLARLIEDNEYTARQGAKFPIKWTAPEAALYGRFTIKSDVWSFGIMVCELVTKGRIPYPGMSNREVLEQVERGYRMPAPPGCPPSLHELKLQCWRGDPEERPTFEYLQSFLEDYFTATEPQYQPGDNI

SEQ ID NO: 13632 - protein, 537 aa, Xenopus laevis
MGCVQCKDKEATKLTDERDNSLTQSLGYRYGTDPTPQHYPSFTVTTIPNYNNFHATAGQGLTVFGGVNSSSHTGTLRTRGGTGVTLFVALYDYEARTEDDLNFQKGEKFQILNSSEGDWWEARSLTTGGTGYIPSNYVAPVDSIQAEEWYFGKLGRKDAERQLLSFGNPRGTYLIRESETTKGAYSLSIRDWDDMKGDHVKHYKIRKLDNGGYYITTRAQFEALQQLVQHYSERAAGLCCRLVVPCHKGMPRLTDLSVKTKDVWEIPRESLQLIKRLGNGQFGEVWMGTWNGNTKVAIKTLKPGTMSPESFLEEAQIMKKLKHDKLVQLYAVVSEEPIYIVTEYMSKGSLLDFLKDGEGRALKLPNLVDMAAQVAAGMAYIERMNYIHRDLRSANILVGNGLICKIADFGLARLIEDNEYTARQGAKFPIKWTAPEAALYGRFTIKSDVWSFGILLTELVTKGRVPYPGMNNREVLEQVERGYRMPCPQDCPNSLHELMLNCWKKDPEERPTFEYLQGFLEDYFTATEPQYQPGDNL

SEQ ID NO: 13633 - protein, 532 aa, Xenopus laevis
MGATKSKPREGGPRSRSLDIAEGSHQPFTSLSASQTPSKSLDSHRPSGQPFGGNCDLTPFGGVNFSDTITSPQRTGPLAGGVTTFVALYDYESRTETDLSFRKGERLQIVNNTEGDWWLARSLSSGQTGYIPSNYVAPSDSIQAEEWYLGKITRREAERLLLSLENPRGTFLVRESETTKGAYCLSVSDYDASRGLNVKHYKIRKLDSGGFYITSRTQFSSLQQLVAYYSKHADGLCHRLTAVCPTAKPQTQGLSKDAWEIPRDSLRLELKLGQGCFGEVWMGTWNGTTRVAIKTLKPGTMSPEAFLQEAQVMKKLRHEKLVQLYAVVSEEPIYIVTEYMSKGSLLDFLKGEMGRYLRLPQLVDMAAQIASGMAYVERMNYVHRDLRAANILVGENLVCKVADFGLARLIEDNEYTARQGAKFPIKWTAPEAALYGRFTIKSDVWSFGILLTELTTKGRVPYPGMVNREVLDQVERGYRMPCPPDCPESLHDLMFQCWRKDPEERPTFEYLQAFLEDYFTATEPQYQPGDNL

SEQ ID NO: 13634 - protein, 902 aa, Xenopus laevis
HRVYVEMRFTVRDCSSLPNVPGSCKETFNLYYYETDSNIDNKISTFWNESPYLKVDTIAADESFSQVDFGGRLMKVNTEVRSFGPLTRSGFYLAFQDYGACMSLLSVRVFFKKCPSVVQNFAVFPETMTGAESTSLVIARGTCIPNAEEVDVPIKLYCNGDGEWMVPIGKCTCKAGYEPENHVVCKACPAAMFKANQGMGICAQCPANSRSTSEASPICICRNGYYRADFDTPEAPCTSVPSGPRNVISIVNETAITLEWHPPRETGGRDDVNYNIICKKCQSDRRGCSHCDDNVDFVPRQLGLTDTRVFISNLWVHTPYTFEIQAVNGVTNKSPFPPQHVSVNITTNQAAPSSVPIMHQVKATMKSITLSWPQPEQPNGIILDYEIRYYEKDHHEFNSSLARSQTNTASIEGLRPGVVYVVQVRARTVAGYGKFSSKMCFQTLTEEDYKSELREQLPLIAGSAAAGVVFIVSLVAISIVCSRKRTYSKEAVYSDKLQHYSTGRGSPGMKIYIDPFTYEDPNEAVREFAKEIDVSFVKIEEVIGAGEFGEVYKGRLKLPSKREISVAIKTLKAGYSEKQRRDFLSEASIMGQFDHPNIIRLEGVVTKSRPVMIITEFMENGALDSFLRQNDGQFTVIQLVGMLRGIAAGMKYLSEMNYVHRDLAARNILVNSNLVCKVSDFGLSRYLQDDTSDPTYTSSLGGKIPVRWTAPEAIRYRKFTSASDVWSYGIVMWEVMSYGERPYWDMSNQDVINAIEQDYRLPPPMDCPAALHQLMLDCWQKDRNSRPRFGEIVNTLDKMIRNPASLKTVATIPAVPSQPLLDRSIPDISAFTSVDDWLSAIKMGQYRDNFLSSGFTSLHVVAQMTSEDLLRIGITLAGHQKKILNSIQSMRVQISQSPTSIA

SEQ ID NO: 13635 - protein, 532 aa, Xenopus laevis
MGATKSKPREGGPRSRSLDIVEGSHQPFTSLSASQTPNKSLDSHRPPAQPFGGNCDLTPFGGINFSDTITSPQRTGPLAGGVTTFVALYDYESRTETDLSFKKGERLQIVNNTEGDWWLARSLSSGQTGYIPSNYVAPSDSIQAEEWYLGKITRREAERLLLSLENPRGTFLVRESETTKGAYCLSVSDYDANRGLNVKHYKIRKLDSGGFYITSRTQFSSLQQLVAYYSKHADGLCHRLTAVCPTAKPQTQGLSRDAWEIPRDSLRLELKLGQGCFGEVWMGTWNGTTRVAIKTLKPGTMSPEAFLQEAQVMKKLRHEKLVQLYAVVSEEPIYIVTEYMSKGSLLDFLKGEMGRYLRLPQLVDMAAQIASGMAYVERMNYVHRDLRAANILVGENLVCKVADFGLARLIEDNEYTARQGAKFPIKWTAPEAALYGRFTIKSDVWSFGILLTELTTKGRVPYPGMVNREVLDQVERGYRMPCPPDCPESLHDLMFQCWRKDPEERPTFEYLQAFLEDYFTATEPQYQPGDNL

SEQ ID NO: 13636 - protein, 537 aa, Xenopus laevis
MGATKSKPREGGPRSRSLDIAEGSHQPFTSLSASQTPSKSLDSHRPPGQPFGGNCDLTPFGGVNFSDTITSPQRTGPLAGGVTTFVALYDYESRTETDLSFRKGERLQIVNNTRPDMREGDWWLARSLSSGQTGYIPSNYVAPSDSIQAEEWYLGKITRREAERLLLSLENPRGTFLVRESETTKGAYCLSVSDYDASRGLNVKHYKIRKLDSGGFYITSRTQFSSLQQLVAYYSKHADGLCHRLTAVCPTAKPQTQGLSKDAWEIPRDSLRLELKLGQGCFGEVWMGTWNGTTRVAIKTLKPGTMSPEAFLQEAQVMKKLRHEKLVQLYAVVSEEPIYIVTEYMSKGSLLDFLKGEMGRYLRLPQLVDMAAQIASGMAYVERMNYVHRDLRAANILVGENLVCKVADFGLARLIEDNEYTARQGAKFPIKWTAPEAALYGRFTIKSDVWSFGILLTELTTKGRVPYPGMVNREVLDQVERGYRMPCPPDCPESLHDLMFQCWRKDPEERPTFEYLQAFLEDYFTATEPQYQPGDNL

SEQ ID NO: 13637 - protein, 532 aa, Xenopus laevis
MGATKSKPREGGPRSRSLDIVEGSHQPFTSLSASQTPNKSLDSHRPPAQPFGGNCDLTPFGGINFSDTITSPQRTGPLAGGVTTFVALYDYESRTETDLSFKKGERLQIVNNTEGDWWLARSLSSGQTGYIPSNYVAPSDSIQAEEWYLGKITRREAERLLLSLENPRGTFLVRESETTKGAYCLSVSDYDANRGLNVKHYKIRKLDSGGFYITSRTQFISLQQLVAYYSKHADGLCHRLTTVCPTAKPQTQGLSRDAWEIPRDSLRLELKLGQGCFGEVWMGTWNGTTRVAIKTLKPGTMSPEAFLQEAQVMKKLRHEKLVQLYAVVSEEPIYIVTEYISKGSLLDFLKGEMGRYLRLPQLVDMAAQIASGMAYVERMNYVHRDLRAANILVGENLVCKVADFGLARLIEDNEYTARQGAKFPIKWTAPEAALYGRFTIKSDVWSFGILLTELTTKGRVPYPGMVNREVLDQVERGYRMPCPPDCPESLHDLMFQCWRKDPEERPTFEYLQAFLEDYFTATEPQYQPGDNL

SEQ ID NO: 13638 - protein, 537 aa, Xenopus laevis
MGCIKSKEDKGPSIKYRTEPKPDPGSQYGADPTQATQSPGIKGPAPNFNSHSMTPFGGSSGITPFGGASSIFSPTPVPYPGGLTGGVTVFVALYDYEARTTEDLSFRKGERFQIINNTEGDWWEARSIATGKTGYIPSNYVAPADSIQAEEWYFGKMGRKDAERLLLNPGNQRGTFLVRESETTKGAYSLSIRDWDEVRGDNVKHYKIRKLDNGGYYITTRAQFESLQKLVKHYSEHADGLCYRLTTVCPTVKPQTQGLAKDAWEIPRESLRLDVKLGQGCFGEVWIGTWNGTTKVAIKTLKPGTMMPEAFLQEAQIMKKLRHDKLVPLYAVVSEEPIYIVTEYMIKGSLLDFLKEGNGKYLKLPQLVDMAAQIADGMAYIERMNYIHRDLRAANILVGDNLVCKIADFGLARLIEDNEYTARQGAKFPIKWTAPEAALYGRFTIKSDVWSFGILLTELVAKGRVPYPGMVNREVLEQVERGYRMPCPQRCPESLHELMKLCWKKDPDERPTFEYIQSFLEDYFTATEPQYQPGDNL

SEQ ID NO: 13639 - protein, 537 aa, Xenopus laevis
MGCIKSKEDKGPSIKYRTEPKPDPGSQYGADPTQATQSPGIKGPAPNFNSHSMTPFGGSSGITPFGGASSIFSPTPVPYPGGLTGGVTVFVALYDYEARTTEDLSFRKGERFQIINNTEGDWWEARSIATGKTGYIPSNYVAPADSIQAEEWYFGKMGRKDAERLLLNPGNQRGTFLVRESETTKGAYSLSIRDWDEVRGDNVKHYKIRKLDNGGYYITTRAQFESLQKLVKHYSEHADGLCYRLTTVCPSVKPQTQGLAKDAWEIPRESLRLDVKLGQGCFGEVWIGTWNGTTKVAIKTLKPGTMMPEAFLQEAQIMKKLRHDKLVPLYAVVSEEPIYIVTEYMIKGSLLDFLKEGNGKYLKLPQLVDMAAQIADGMAYIERMNYIHRDLRAANILVGDNLVCKIADFGLARLIEDNEYTARQGAKFPIKWTAPEAALYGRFTIKSDVWSFGILLTELVAKGRVPYPGMVNREVLEQVERGYRMPCPQRCPESLHELMKLCWKKDPDERPTFEYIQSFLEDYFTATEPQYQPGDNL

SEQ ID NO: 13640 - protein, 615 aa, Xenopus laevis
MRLMLLCCSWSEEHMGEEEGNVLPLCASCGQSIYDGCYLQALALDWHSDCFRCSDCGVSLSHRYYEKDGRLFCKKHYWTRFGGMCQGCSENITKGLVMVAGEHKYHPECFMCSRCKAYIGDGETYALVERSKLYCGPCYYQFSVTPVIDSPGSRSPHTVTLVSLPASDGKRGLSVSITPSCAEHSHTVRVTELDADFLGPDIQSSIHIGDRILEINGTPIRSVPLDEIDVLIQETSRLLQLTIEHDPHETPTMPSPCAEIAVRRQRPVMRSCSIDRSPGSSCVGSPSCSRRDMSRSESVRTVTGVHRIFRPSDLIPGEVLGRGCFGQAIKVTHRVTGEVMVMKELIRFDEETQRTFLKEVKVMRCLEHPHVLKFIGVLYKDKRLNFITEYIPGGTLRRVIKSMDTHCPWNQRVSFARDIAAGMTYLHSMNIIHRDLNSHNCLVREDGGLVVANFGLSRLIPEETRDLRKDRRKRYTVVGNPYWMAPEMINGRSYDESVDVFSFGIVICEIIGLVNADPDYLPRTMDFGLNVRAFLDRFCPPNCPPGFFPSAVLCCDLDPEKRPRFSQLQLWLDSLLRHLNLQLPLSSHIEQLEQNFWENYRRGDSTLHVHPEIPE

SEQ ID NO: 13641 - protein, 985 aa, Xenopus laevis
MELNVLLLLLCLSGGQVGAVEETLMDTRTATAELGWTANPSSGWEEVSGYDENLNTIRTYQVCNVFGPKQNNWLLTTFIPRRGAHRVYVEMRFTVRDCSSLPNVPGSCKETFNLYYYETDSNIENKISTFWNESPYLKVDTIAADESFSQVDFGGRLMKVNTEVRSFGPLTRSGFYLAFQDYGACMSLLSVRVFFKEMPSVVQNLLVFPETMTGAESTSLVIARGTCIPNAEEVDVPIKLYCNGDGEWMVPIGKCTCKAGYEPENHVVCKACPAAMFKANQGMGICAQCPANSRSTSEASPICICRNGYYRADFDTPEAPCTSVPSGPRNVISIVNETAITLEWHPPRETGGRDDVDYNIVCKKCRADRRACSRCDDNVDFVPRQLGLTDTRVFISNLWAHTPYTFETQAVNGVTNKSPFPPQHVSVNITTNQAAPSSVPIMHQVKATMKSITLSWPQQEQPNGIILDYEIRYYEKDHHEFNSSLARSQTNTARRTGGRVWMFMSVQVRARTVAGYGKFSSKCGFQTLTAEDYKSELREQLPLTGSAAAGVVFIVSLVAISIVCSRKRTYSKEAVYSDKLQHYSTGRGSPGMKIYIDPFTYEDPNEAVREFAKEIDVSFVKIEEVIGAGEFGEVYKGRLKLPSKREISVAIKTLKAGYSEKQRRDFLSEASIMGQFDHPNIIRLEGVVTKSRPVMIITEFMENGALDSFLRQNDGQFTVIQLVGMLRGIAAGMKYLSEMNYVHRDLAARNILVNSNLVCKVSDFGLSRYLQDDTSDPTYTSSLGGKIPVRWTAQEAIAYRKFTSASDVWSYGIVMWEVMSYGERPYWTMSNQDVINAIEQDYRLPPPMDCPAALHQLMLDCWQKDRNSRPRLAEIVNTLRPMIRNPASLKTVATIPAVPSQPLLDRSIPDISAFTSVDDWLSAIKMGQYRDNFLSSGFTSLQLVAQMTSEDLLRIGITLAGHQKKILNSIQSMRVQITQSPTSIA

SEQ ID NO: 13642 - protein, 450 aa, Xenopus laevis
MSVVQAPWQAGIECIANYDFQGKAEQDLDFSKGEVLTIVAVTKDPNWYKAKNKVGRVGFIPANYVQKREGVKSGTKLSLMPWFHGKITREQAELLLCPPETGLFLVRESTNYPGDYTLCVSCEGKVEHYRIIYSSGKLSIDEEEYFENLMQLVEHYTNDADGLCTNLIKPKLMEGTVAAQDEFSRSGWALKMRDLKLQHTIGKGEFGDVMLGEHQGVKVAVKCIKNDATAQAFIAEAMVMTQLQHKNLVQLLGVIVEDKSGLFIVTEFMAKGSLVDYLRSRGRSVLGGECLLKFSLDVSEGMEYLESNNFVHRDLAARNVLVSEENIAKVSDFGLTKEASAIQDTSKLPVKWTAPEALREKLFSTKSDVWSFGILLWEIYSFGRVPYPRIALKEVVPKVENGYKMDAPDGCPPVVYDLMKQCWHLDPKQRPTFRNLREQLEHIKAKELYH

SEQ ID NO: 13643 - protein, 658 aa, Xenopus laevis
PYREDGPVISTTLLYKPSLILTPWRSIEVPFNEKLIKLEGLEPKTEYKVCVQLRRPGEGGAGHPGPDTVFRTDPPCLPSPKGLMLLSKSQHSLNLTWMAELENNDDRAYEVECSKVNTTESPQYIQVRGIQTGIIIDGLEPRSLYQCRVRQRTNSQGEWSEMLLAWTYSDKIPPAPGNINIFNITDSSAVITWSFEEGHSISSVIIRYKIYGNTEYNHDIKIRNITIVHYQLKGLEANTPYLVEMCAENNIGQSFPNPVRELKTHEEIKGVHESKDGNMLLIAILGSAGMTCLTILLAFIIMLQLKRANFQNRMAQAFQNGVREEPVVQFNSGSLNQIRKAKNSPDPLDYPVLEWHNIKFKDVIGEGNFGQVLKARIKKDGLRMDAAIKRMKEYASKDDHRDFAGELEVLSKLGSHPNIINLLGACEHRGYLYLAIEYAPHGNLLDFLRKSRVLETDPAFAIANSTASTLSSQQLLCFAADVARGMDYLSQKQFIHRDLAARNILVGENFLAKIADFGLSRGQEVYVKKTMGRLPVRWMAIESLNYSVYTSNSDVWSFGVLLWEIVSLGGTPYCGLTCAELYEKLPQGYRLEQPLNCDDEVYDLMRQCWREKPYERPSFAKIVVSLNRMLEERKTYVNTTLYEKFTYAGIDCSAEEAA

SEQ ID NO: 13644 - protein, 806 aa, Gallus gallus
MAALSSGSSAEGASLFNGDMEPEPPPPVLGACYAGSGGGDPAIPEEVWNIKQMIKLTQEHIEALLDKFGGEHNPPSIYLEAYEEYTSKLDALQQREQQLLESMGNGTDFSVSSSASTDTVASSSSSSLSVAPSSLSVYQNPTDMSRNNPKSPQKPIVRVFLPNKQRTVVPARCGVTVRDSLKKALMMRGLIPECCAVYRIQDGEKKPIGWDTDISWLTGEELHVEVLENVPLTTHNFVRKTFFTLAFCDFCRKLLFQGFRCQTCGYKFHQRCSTEVPLMCVNYDQLDLLFVSKFFEHHPISQEETTLGETTPASGSYPSVPPSDSVGPPILPSPSPSKSIPIPQPFRPADEDHRNQFGQRDRSSSAPNVHINTIEPVNIDDLIRDQGVRGEGAPLNQLMRCLRKYQSRTPSPLLHSVPSEIVFDFEPGPVFRGSTAGLSATPPASLPGSLTNVKALQKSPGPQRERKSSSSSEDRNRMKTLGRRDSSDDWEIPDGQITVGQRIGSGSFGTVYKGKWHGDVAVKMLNVTAPTPQQLQAFKNEVGVLRKTRHVNILLFMGYSTKPQLAIVTQWCEGSSLYHHLHIIETKFEMIKLIDIARQTAQGMDYLHAKSIIHRDLKSNNIFLHEDLTVKIGDFGLATVKSRWSGSHQFEQLSGSILWMAPEVIRMQDKNPYSFQSDVYAFGIVLYELMTGQLPYSNINNRDQIIFMVGRGYLSPDLSKVRSNCPKAMKRLMAECLKKKRDERPLFPQILASIELLARSLPKIHRSASEPSLNRAGFQTEDFSLYACASPKTPIQAGGYGGFPVH

SEQ ID NO: 13645 - protein, 712 aa, Gallus gallus
KLTQEHIEALLDKFGGEHNPPSIYLEAYEEYTSKLDALQQREQQLLESMGNGTDFSVSSSASTDTVASSSSSSLSVAPSSLSVYQNPTDMSRNNPKSPQKPIVRVFLPNKQRTVVPARCGVTVRDSLKKALMMRGLIPECCAVYRIQDGEKKPIGWDTDISWLTGEELHVEVLENVPLTTHNFVRKTFFTLAFCDFCRKLLFQGFRCQTCGYKFHQRCSTEVPLMCVNYDQLDLLFVSKFFEHHPISQEETTLGETTPASGSYPSVPPSDSVGPPILPSPSPSKSIPIPQPFRPADEDHRNQFGQRDRSSSAPNVHINTIEPVNIDDLIRDQGVRGEGGSTAGLSATPPASLPGSLTNVKALQKSPGPQRERKSSSSSEDRNRMKTLGRRDSSDDWEIPDGQITVGQRIGSGSFGTVYKGKWHGDVAVKMLNVTAPTPQQLQAFKNEVGVLRKTRHVNILLFMGYSTKPQLAIVTQWCEGSSLYHHLHIIETKFEMIKLIDIARQTAQGMDYLHAKSIIHRDLKSNNIFLHEDLTVKIGDFGLATVKSRWSGSHQFEQLSGSILWMAPEVIRMQDKNPYSFQSDVYAFGIVLYELMTGQLPYSNINNRDQIIFMVGRGYLSPDLSKVRSNCPKAMKRLMAECLKKKRDERPLFPQILASIELLARSLPKIHRSASEPSLNRAGFQTEDFSLYACASPKTPIQAGGYGGFPVH

SEQ ID NO: 13646 - protein, 410 aa, Gallus gallus
PLVMAVVNRERDGQTGSGGRARGLCYTCGSPTMPVDSRIIEDAIRNHSESASPSASSGSPNNMSPTGWSQPKTPVPAQRERAPGTNTQEKNKIRPRGQRDSSYYWEIEASEVLLSTRIGSGSFGTVYKGKWHGDVAVKILKVVDPTPEQFQAFRNEVAVLRKTRHVNILLFMGYMTKDNLAIVTQWCEGSSLYKHLHVQETKFQMFQLIDIARQTAQGMDYLHAKNIIHRDMKSNNIFLHEGLTVKIGDFGLATVKSRWSESQQVEQPTGSILWMAPEVIRMQDSNPFSFQSDVYSYGIVLYELMTGELPYSHINNRDQIIFMVGRGYASPDLSKLYKNCPKAMKRLVADCLKKVREERPLFPQILSSIALLQHSLPKINRSASEPSLHRASHTEDINSCTLTSTRLPVF

SEQ ID NO: 13647 - protein, 647 aa, Gallus gallus
MEHIQGAWKTISNGFGLKDSVFDGPNCISPTIVQQFGYQRRASDDGKISDTSKTSNTIRVFLPNKQRTVVNVRNGMTLHDCLMKALKVRGLQPECCAVFRLVTEPKGKKVRLDWNTDAASLIGEELQVDFLDHVPLTTHNFARKTFLKLAFCDICQKFLLNGFRCQTCGYKFHEHCSTKVPTMCVDWSNIRQLLLFPNSNISDSGVPALPPLTMRRMRESVSRIPVSSQHRYSTPHVFTFNTSNPSSEGTLSQRQRSTSTPNVHMVSTTMPVDSRIIEDAIRNHSESASPSALSGSPNNMSPTGWSQPKTPVPAQRERAPGTNTQEKNKIRPRGQRDSSYYWEIEASEVMLSTRIGSGSFGTVYKGKWHGDVAVKILKVVDPTPEQFQAFRNEVAVLRKTRHVNILLFMGYMTKDNLAIVTQWCEGSSLYKHLHVQETKFQMFQLIDIARQTAQGMDYLHAKNIIHRDMKSNNIFLHEGLTVKIGDFGLATVKSRWSGSQQVEQPTGSILWMAPEVIRMQDSNPFSFQSDVYSYGIVLYELMTGELPYSHINNRDQIIFMVGRGYASPDLSKLYKNCPKAMKRLVADCLKKVREERPLFPQILSSIELLQHSLPKINRSASEPSLHRASHTEDINSCTLTSTRLPVF

SEQ ID NO: 13648 - protein, 420 aa, Gallus gallus
SQHRYSTPHVFTFNTSNPSSEGTLSQRQRSTSTPNVHMVSTTMPVDSRIIEDAIRNHSESASPSALSGSPNNMSPTGWSQPKTPVPAQRERAPGTNTQEKNKIRPRGQRDSSYYWEIEASEVMLSTRIGSGSFGTVYKGKWHGDVAVKILKVVDPTPEQFQAFRNEVAVLRKTRHVNILLFMGYMTKDNLAIVTQWCEGSSLYKHLHVQETKFQMFQLIDIARQTAQGMDYLHAKNIIHRDMKSNNIFLHEGLTVKIGDFGLATVKSRWSGSQQVEQPTGSILWMAPEVIRMQDSNPFSFQSDVYSYGIVLYELMTGELPYFHINNRDQIIFMVGRGYASPDLSKLYKNCPKAMKRLVADCLKKVREERPLFPQILSSIELLQHSLPKINRSASEPSLHRASHTEDINSCTLTSTRLPVF

SEQ ID NO: 13649 - protein, 536 aa, Gallus gallus
MGCVHCKEKISGKGQGGSGTGTPAHPPSQYDPDPTQLSGAFTHIPDFNNFHAAAVSPPVPFSGPGFYPCNTLQAHSSITGGGVTLFIALYDYEARTEDDLSFQKGEKFHIINNTEGDWWEARSLSSGATGYIPSNYVAPVDSIQAEEWYFGKIGRKDAERQLLCHGNCRGTFLIRESETTKGAYSLSIRDWDEAKGDHVKHYKIRKLDSGGYYITTRAQFDTIQQLVQHYIERAAGLCCRLAVPCPKGTPKLADLSVKTKDVWEIPRESLQLLQKLGNGQFGEVWMGTWNGTTKVAVKTLKPGTMSPEAFLEEAQIMKRLRHDKLVQLYAVVSEEPIYIVTEFMSQGSLLDFLKDGDGRYLKLPQLVDMAAQIAAGMAYIERMNYIHRDLRAANILVGDNLVCKIADFGLARLIEDNEYTARQGAKFPIKWTAPEAALFGKFTIKSDVWSFGILLTELVTKGRVPYPGMNNREVLEQVERGYRMQCPGGCPPSLHDVMVQCWKREPEERPTFEYLQSFLEDYFTATEPQYQPGDNQ

SEQ ID NO: 13650 - protein, 533 aa, Gallus gallus
MGSSKSKPKDPSQRRRSLEPPDSTHHGGFPASQTPNKTAAPDTHRTPSRSFGTVATEPKLFGGFNTSDTVTSPQRAGALAGGVTTFVALYDYESRTETDLSFKKGERLQIVNNTEGDWWLAHSLTTGQTGYIPSNYVAPSDSIQAEEWYFGKITRRESERLLLNPENPRGTFLVRESETTKGAYCLSVSDFDNAKGLNVKHYKIRKLDSGGFYITSRTQFSSLQQLVAYYSKHADGLCHRLTNVCPTSKPQTQGLAKDAWEIPRESLRLEVKLGQGCFGEVWMGTWNGTTRVAIKTLKPGNMSPEAFLQEAQVMKKLRHEKLVQLYAVVSEEPIYIVTEYMSKGSLLDFLKGEMGKYLRLPQLVDMAAQIASGMAYVERMNYVHRDLRAANILVGENLVCKVADFGLARLIEDNEYTARQGAKFPIKWTAPEAALYGRFTIKSDVWSFGILLTELTTKGRVPYPGMVNREVLDQVERGYRMPCPPECPESLHDLMCQCWRKDPEERPTFEYLQAFLEDYFTSTEPQYQPGENL

SEQ ID NO: 13651 - protein, 453 aa, Gallus gallus
  unsure (1)..(453): unsure at all Xaa locations
GGVTTFVALYDYESRTETDLSFKKGERLQIVNNTEGDWWLAHSLTTGQTGYIPSNYVAPSDSIQAEEWYFGKITRRESERLLLNPENPRGTFLVRESETTKGAYCLSVSDFDNAKGLNVKHYKIRKLDSGGFYITSRTQFSSLQQLVAYYSKHADGLCHRLTNVCPTSKPQTQGLAKDAWEIPRESLRLEVKLGQGCFGEVWMGTWNGTTRVAIKTLKPGNMSPEAFLQEAQVMKKLRHEKLVQLYAVVSEEPIYIVTEYMSKGSLLDFLKGEMGKYLRLPQLVDMAAQIASGMAYVERMNYVHRDLRAANILVGENLVCKVADFGLGRLIEDNEYTARQGAKFPIKWTAPEAALYGRFTIKSDVWSFGILLTELTTKGRVPYPGMVNREVLDQVERGYRMPCPPECPESLHDLMCQCWRKDPEERPTFEYLQAFLEDYFTSTEPQXQPGENL

SEQ ID NO: 13652 - protein, 533 aa, Gallus gallus
MGSSKSKPKDPSQRRRSLEPPDSTHHGGFPASQTPNKTAAPDTHRTPSRSFGTVATEPKLFGGFNTSDTVTSPQRAGALAGGVTTFVALYDYESRTETDLSFKKGERLQIVNNTEGDWWLAHSLTTGQTGYIPSNYVAPSDSIQAEEWYFGKITRRESERLLLNPENPRGTFLVRESETTKGAYCLSVSDFDNAKGLNVKHYKIRKLDSGGFYITSRTQFSSLQQLVAYYSKHADGLCHRLTNVCPTSKPQTQGLAKDAWEIPRESLRLEVKLGQGCFGEVWMGTWNGTTRVAIKTLKPGTMSPEAFLQEAQVMKKLRHEKLVQLYAVVSEEPIYIVTEYMSKGSLLDFLKGEMGKYLRLPQLVDMAAQIASGMAYVERMNYVHRDLRAANILVGENLVCKVADFGLARLIEDNEYTARQGAKFPIKWTAPEAALYGRFTIKSDVWSFGILLTELTTKGRVPYPGMVNREVLDQVERGYRMPCPPECPESLHDLMCQCWRKDPEERPTFEYLQAFLEDYFTSTEPQYQPGENL

SEQ ID NO: 13653 - protein, 534 aa, Gallus gallus
MGCVQCKDKEATKLTDERDGSLTQSSGYRYGTDPTPQHYPSFGVTSIPNYNNFHATGGQGLTVFGGVNSSSHTGTLRTRGGTGVTLFEALYDYEARTEDDLSFHKGEKFQILNSSEGDWWEARSLTTGETGYIPSNYVAPVDSIQAEEWYFGKLGRKDAERQLLSFGNPRGTFLIRESETTKGAYSLSIRDWDDMKGDHVKHYKIRKLDNGGYYITTRAQFETLQQLVQHYSEKADGLCFNLTVIATNNTPQTVGLAKDAWEVARDSLFLEQKLGQGCFAEVWRGTWNGNTKVAIKTLKPGTMSPESFLEEAQIMKKLKHDKLVQLYAVVSRRPIYIVTEYMSKGSLLDFLKDGEGRALKLPNLVDMAAQVAAGMAYIERMNYIHRDLRSANILVGNGLICKIADFGLARLIEDNEYTARQGAKFPIKWTAPEAALYGRFTIKSDVWSFGILLTELVTKGRVPYPGMNNREVLEQVERGYRMPCPQDCPISLHELMIHCWKKDPEERPTFEYLQGFLEDYFTATEPQYQPGDNL

SEQ ID NO: 13654 - protein, 533 aa, Gallus gallus
MGSSKSKPKDPSQRRRSLEPPDSTHHGGFPASQTPNKTAAPDTHRTPSRSFGTVATEPKLFGGFNTSDTVTSPQRAGALAGGVTTFVALYDYESRTETDLSFKKGERLQIVNNTEGDWWLAHSLTTGQTGYIPSNYVAPSDSIQAEEWYFGKITRRESERLLLNPENPRGTFLVRESETTKGAYCLSVSDFDNAKGLNVKHYKIRKLDSGGFYITSRTQFSSLQQLVAYYSKHADGLCHRLTNVCPTSKPQTQGLAKDAWEIPRESLRLEVKLGQGCFGEVWMGTWNGTTRVAIKTLKPGTMSPEAFLQEAQVMKKLRHEKLVQLYAVVSEEPIYIVTEYMSKGSLLDFLKGEMGKYLRLPQLVDMAAQIASGMAYVERMNYVHRDLRAANILVGENLVCKVADFGLARLIEDNEYTARQGAKFPIKWTAPEAALYGRFTIKSDVWSFGILLTELTTKGRVPYPGMVNREVLDQVERGYRMPCPPECPESLHDLMCQCWRRDPEERPTFEYLQAFLEDYFTSTEPQYQPGENL

SEQ ID NO: 13655 - protein, 534 aa, Gallus gallus
MGCVQCKDKEATKLTDERDGSLTQSSGYRYGTDPTPQHYPSFGVTSIPNYNNFHATGGQGLTVFGGVNSSSHTGTLRTRGGTGVTLFEALYDYEARTEDDLSFHKGEKFQILNSSEGDWWEARSLTTGETGYIPSNYVAPVDSIQAEEWYFGKLGRKDAERQLLSFGNPRGTFLIRESETTKGAYSLSIRDWDDMKGDHVKHYKIRKLDNGGYYITTRAQFETLQQLVQHYSEKADGLCFNLTVIATNNTPQTVGLAKDAWEVARDSLFLEQKLGQGCFAEVWRGTWNGNTKVAIKTLKPGTMSPESFLEEAQIMKKLKHDKLVQLYAVVSRRPIYIVTEYMSKGSLLIFLKDGEGRALKLPNLVDMAAQVAAGMAYIERMNYIHRDLRSANILVGNGLICKIADFGLARLIEDNEYTARQGAKFPIKWTAPEAALYGRFTIKSDVWSFGILLTELVTKGRVPYPGMNNREVLEQVERGYRMPCPQDCPISLHELMIHCWKKDPEERPTFEYLQGFLEDYFTATEPQYQPGDNL

SEQ ID NO: 13656 - protein, 541 aa, Gallus gallus
MGCIKSKEDKGPAMKYRTDNTPEPISSHVSHYGSDSSQATQSPAIKGSAVNFNSHSMTPFGGPSGMTPFGGASSSFSAVPSPYPSTLTGGVTVFVALYDYEARTTDDLSFKKGERFQIINNTEGDWWEARSIATGKTGYIPSNYVAPADSIQAEEWYFGKMGRKDAERLLLNPGNQRGIFLVRESETTKGAYSLSIRDWDEVRGDNVKHYKIRKLDNGGYYITTRAQFESLQKLVKHYREHADGLCHKLTTVCPTVKPQTQGLAKDAWEIPRESLRLEVKLGQGCFGEVWMGTWNGTTKVAIKTLKPGTMMPEAFLQEAQIMKKLRHDKLVPLYAVVSEEPIYIVTEFMTKGSLLDFLKEGEGKFLKLPQLVDMAAQIADGMAYIERMNYIHRDLRAANILVGDNLVCKIADFGLARLIEDNEYTARQGAKFPIKWTAPEAALYGRFTIKSDVWSFGILLTELVTKGRVPYPGMVNREVLEQVERGYRMPCPQGCPESLHELMKLCWKKDPDERPTFEYIQSFLEDYFTATEPQYQPGDNL

SEQ ID NO: 13657 - protein, 541 aa, Gallus gallus
MGCIKSKEDKGPAMKYRTDNTPEPISSHVSHYGSDSSQATQSPAIKGSAVNFNSHSMTPFGGPSGMIHPLRASSSFSAVPSQYPSTLTGGVTVFVALYDYEARTTDDLSFKKGERFQIINNTEGDWWEARSIATGKTGYIPSNYVAPADSIQAEEWYFGKMGRKDAERLLLNPGNQRGIFLVRESETTKGAYSLSIRDWDEVRGDNVKHYKIRKLDNGGYYITTRAQFESLQKLVKHYREHADGLCHKLTTVCPTVKPQTQGLAKDAWEIPRESLRLEVKLGQGCFGEVWMGTWNGTTKVAIKTLKPGTMMPEAFLQEAQIMKKLRHDKLVPLYAVVSEEPIYIVTEFMTKGSLLDFLKEGEGKFLKLPQLVDMAAQIADGMAYIERMNYIHRDLRAANILVGDNLVCKIADFGLARLIEDNEYTARQGAKFPIKWTAPEAALYGRFTIKSDVWSFGILLTELVTKGRVPYPGMVNREVLEQVERGYRMPCPQGCPESLHELMKLCWKKDPDERPTFEYIQSFLEDYFTATEPQYQPGDNL

SEQ ID NO: 13658 - protein, 662 aa, Gallus gallus
MRLMLLCCTWRDEPMGEEEGTDLPVCASCGQGIFDGQYLQALNADWHADCFRCGECGASLSHQYYEKDGRLYCKKDYWARFGELCHGCAEQITKGLVMVAGEQKYHPECFSCLNCRAFIGDGDTYALVERSKLYCGHCYYQMVVTPVIEQILPDSPGSRIPHTVTLVSIPACSDGKRGFSVSIDPHCGAQGCGAEHSRTVRVREVDPDCISPDVKNSIHVGDRILEINGTPIGHVPLDEIDLLIQETSRLLQLTIEHDPHEPLPRDLALPCSPLPDPHSPLRSPVPAPHGDLGTMRQRAVMRSCSTDKSPGSSSVGSPASQRKDIGRSESLRVVSRAHRIFRPSDLIHGEVLGKGCFGQAIKVTHRETGEVMVMKELIRFDEETQRTFLKEVKVMRCLEHPNVLKFIGVLYKEKRLNFITEYIKGGTLRGLIKSMDSHYPWSQRVSFAKDIAAGMAYLHSMNIIHRDLNSHNCLVRENKSVVVADFGLARLMVDEKNQPEHLQNLKKPDRKKRYTVVGNPYWMAPEMINGRSYDEKVDIFSFGIVLCEIIGRVSADPDYLPRTTDFGLNVRGFLERYCPPACPPSFFPIAACCCDLDPEKRPSFSKLEQWLETLRMHLDIRLPLSSQLEQLTCAFWETHRRGEGGLPPHPELPDTAPHLHPL

SEQ ID NO: 13659 - protein, 1002 aa, Gallus gallus
MDSNADISARRVSGMDWLWLVCFFHLVTSLEEILLDTTGETSEIGWTSHPPDGWEEVSVRDDKERQIRTFQVCNMDEPGQNNWLRTHFIERRGAHRVHVRLHFSVRDCASMRTVASTCKETFTLYYHQSDVDIASQELPEWHEGPWTKVDTIAADESFSQVDRTGKVVRMNVKVRSFGPLTKHGFYLAFQDSGACMSLVAVQVFFYKCPAVVKGFASFPETFAGGERTSLVESLGTCVANAEEASTTGSSGVRLHCNGEGEWMVATGRCSCKAGYQSVDNEQACQACPIGSFKASVGDDPCLLCPAHSHAPLPLPGSIECVCQSHYYRSASDNSDAPCTGIPSAPRDLSYEIVGSNVLLTWRLPKDLGGRKDVFFNVICKECPTRSAGTCVRCGDNVQFEPRQVGLTESRVQVSNLLARVQYTFEIQAVNLVTELSSEAPQYATINVSTSQSVPSAIPMMHQVSRATSSITLSWPQPDQPNGVILDYQLRYFDKAEDEDNSFTLTSETNMATILNLSPGKIYVFQVRARTAVGYGPYSGKMYFQTLMAGEHSEMAQDRLPLIVGSALGGLAFLVIAAIAILAIIFKSKRRETPYTDRLQQYISTRGLGVKYYIDPSTYEDPNEAIREFAKEIDVSFIKIEEVIGSGEFGEVCFGRLKHPGKREYTVAIKTLKSGYTDEQRREFLSEASIMGQFEHPNVIHLEGVVTKSRPVMIVTEFMENGSLDSFLRQKEGQFSVLQLVGMLRGIAAGMRYLSDMNYVHRDLAARNILVNSNLVCKVSDFGLSRFLEDDASNPTYTGALGCKIPIRWTAPEAVQYRKFTSSSDVWSYGIVMWEVMSYGERPYWDMSNQDVINAIDQDYRLPPPPDCPTVLHLLMLDCWQKDRVQRPKFEQIVSALDKMIRKPSALKATGTGSSRPSQPLLSNSPPDFPSLSNAHEWLDAIKMGRYKENFDQAGLITFDVISRMTLEDLQRIGITLVGHQKKILNSIQLMKVHLNQLEPVEV

SEQ ID NO: 13660 - protein, 612 aa, Gallus gallus
VRCGDNVQFEPRQVGLTESRVQVSNLLARVQYTFEIQAVNLVTELSSEAPQYATINVSTSQSVPSAIPMMHQVSRATSSITLSWPQPDQPNGVILDYQLRYFDKAEDEDNSFTLTSETNMATILNLSPGKIYVFQVRARTAVGYGPYSGKMYFQTLMAGEHSEMAQDRLPLIVGSALGGLAFLVIAAIAILAIIFKSKRRETPYTDRLQQYISTRGLGVKYYIDPSTYEDPNEAIREFAKEIDVSFIKIEEVIGSGEFGEVCFGRLKHPGKREYTVAIKTLKSGYTDEQRREFLSEASIMGQFEHPNVIHLEGVVTKSRPVMIVTEFMENGSLDSFLREKEGQFSVLQLVGMLRGIAAGMRYLSDMNYVHRDLAARNILVNSNLVCKVSDFGLSRFLEDDASNPTYTGALGCKIPIRWTAPEAVQYRKFTSSSDVWSYGIVMWEVMSYGERPYWDMSNQDVINAIDQDYRLPPPPDCPTVLHLLMLDCWQKDRVQRPKFEQIVSALDKMIRKPSALKATGTGSSRPSQPLLSNSPPDFPSLSNAHEWLDAIKMGRYKENFDQAGLITFDVISRMTLEDLQRIGITLVGHQKKILNSIQLMKVHLNQLEPVEV

SEQ ID NO: 13661 - protein, 657 aa, Gallus gallus
MASIILESIFLKRSQQKKKTSPLNFKKRLFLLTESKLSYYEYDFERGRRGSKKGSVDIEKITCVETVVPENNPPPERQVPKKGEDYNMEQISIIERFPYPFQVVYDEGPLYVFSPTEELRKRWIHQLKSVIRYNSDLVQKYHPCFWIDGQYLCCSQTAKNAMGCKILESRNGSLKAGRSHRKTKKPLPPTPEEDTMVMKPLPPEPAPSAAGEMKKVVALYNYVPMNVQDLQLQKGEDYLILEESHLPWWKARDKNGREGYIPSNYVTATSNSLEIYEWYSKNITRSQAEQLLKQEGKEGGFIVRDSTSKTGKYTVSVYAKSAVDPQGMIRHYVVCCTPQNQYYLAEKHLFNTIPELITYHQHNSAGLISRLKYPVSRHQKSAPSTAGLGYGSWEIDPKDLTFLKELGTGQFGVVKYGKWRGQYNVAIKMIREGSMSEDEFIDEAKVMMNLSHEKLVQLYGVCTKQRPIFIITEYMANGCLLNFLRETQRRFQPAELLEMCKDVCEAMEYLESKQFLHRDLAARNCLVNDQGIVKVSDFGLSRYVLDDEYTSSMGSKFPVRWSPPEVLLYSKFSSKSDVWSFGVLMWEVYSLGKMPYERFNNSETTEHVIQGLRLYRPQQASERVYAIMYSCWHEKAEERPTFSALLGSIVDITDEEP

SEQ ID NO: 13662 - protein, 456 aa, Gallus gallus
MSPPCSPLQDKLVVALYDYEPTHDGDLGLKQGEKLRVLEESGEWWRAQSLTTGQEGLIPHNFVAMVNSLEPEPWFFKNLSRKNAEARLLASGNTHGSFLIRESETSKGSYSLSVRDFDQNQGETVKHYKIRNMDNGGYYISPRVTFSSLHELVEYYSSSSDGLCTRLGKPCRTQKPQKPWWQDEWEVPRESLKLVEKLGAGQFGEVWMGFYNGHTKVAIKNLKQGSMSPSAFLAEANLMKNLQHPRLVRLYAVVTKEPIYIITEYMEKGSLVDFLKTSEGIKLSINKLLDMAAQIAEGMAFIEAKNYIHRDLRAANILVSEALCCKIADFGLARLIEDNEYTAREGAKFPIKWTAPEAINYGTFTIKSDVWSFGILLTEIVTYGRIPYPGMTNPEVIQNLERGYRMPQPDNCPQELYELMMQCWKEQPEERPTFEYMKSVLEDFFTATEGQYQQQP

SEQ ID NO: 13663 - protein, 507 aa, Gallus gallus
MGCCCSSDYDEDWIENIDICEHCNYPIDPDSKRQLIRNVSEVRDPLVSYEAMSPPCSPLQDKLVVALYDYEPTHDGDLGLKQGEKLRVLEESGEWWRAQSLTTGQEGLIPHNFVAMVNSLEPEPWFFKNLSRKNAEARLLASGNTHGSFLIRESETSKGSYSLSVRDFDQNQGETVKHYKIRNMDNGGYYISPRVTFSSLHELVEYYSSSSDGLCTRLGKPCRTQKPQKPWWQDEWEVPRESLKLVEKLGAGQFGEVWMGFYNGHTKVAIKNLKQGSMSPSAFLAEANLMKNLQHPRLVRLYAVVTKEPIYIITEYMEKGSLVDFLKTSEGIKLSINKLLDMAAQIAEGMAFIEAKNYIHRDLRAANILVSEALCCKIADFGLARLIEDNEYTAREGAKFPIKWTAPEAINYGTFTIKSDVWSFGILLTEIVTYGRIPYPGMTNPEVIQNLERGYRMPQPDNCPQELYELMMQCWKEQPEERPTFEYMKSVLEDFFTATEGQYQQQP

SEQ ID NO: 13664 - protein, 508 aa, Gallus gallus
MGCCCSSDYDEDWIENIDICEHCNYPIDPDSKRQQLIRNVSEVRDPLVSYEAMSPPCSPLQDKLVVALYDYEPTHDGDLGLKQGEKLRVLEESGEWWRAQSLTTGQEGLIPHNFVAMVNSLEPEPWFFKNLSRKNAEARLLASGNTHGSFLIRESETSKGSYSLSVRDFDQNQGETVKHYKIRNMDNGGYYISPRVTFSSLHELVEYYSSSSDGLCTRLGKPCRTQKPQKPWWQDEWEVPRESLKLVEKLGAGQFGEVWMGFYNGHTKVAIKNLKQGSMSPSAFLAEANLMKNLQHPRLVRLYAVVTKEPIYIITEYMEKGSLVDFLKTSEGIKLSINKLLDMAAQIAEGMAFIEAKNYIHRDLRAANILVSEALCCKIADFGLARLIEDNEYTAREGAKFPIKWTAPEAINYGTFTIKSDVWSFGILLTEIVTYGRIPYPGMTNPEVIQNLERGYRMPQPDNCPQELYELMMQCWKEQPEERPTFEYMKSVLEDFFTATEGQYQQQP

SEQ ID NO: 13665 - protein, 824 aa, Gallus gallus
MGFGPELWCPKGHSELLRLQDSELRLLELMKKWMSQRAKSDREYAGMLHHMFSQLEKQEGLGHLRATDHSSQIGESWWVLASQTETLSQTLRRHAEELAAGPLAKLSILIRDKQQLRKAFSEQWQQLSQEYARTTQQEMEKLKAQYRSLVRDSTQAKRKYQEASKDKEREKAKEKYVRSLWKLYALHNQYVLAVRAAALHHHHHYQRALPTLHESLYSLQQEMVLVLKEILGEYCSISSLVQEDVLAIHQEVAHAVEMIDPATEYSSFVQCHRYDSEVPPAVTFDESLLEETESLEPGELQLNELTIESVQHSLTSIEEELLASREAVSSKEQRVWELQVELRGEELALSPGERVHLLGKRQGLQEAQQQLQGLVCAQAKLQAQRDMLANKLAELGSEEPPPALPLQEDRQSVCSTDQERSGVTALETIKNHISGIFSPRFSLPPPVPLIPEVQKPLCQQAWYHGAIPRSEVQELLKCSGDFLVRESQGKQEYVLSVLWDGQPRHFIIQAADNLYRLEGDGFPTIPLLIDHLLQSQQPITRKSGIVLTRAVLKDKWVLNHEDVLLGERIGRGNFGEVFSGRLRADNTPVAVKSCRETLPPELKAKFLQEARILKQYNHPNIVRLIGVCTQKQPIYIVMELVQGGDFLSFLRSEGPHLKMKELIKMMENAAAGMEYLESKHCIHRDLAARNCLVTEKNTLKISDFGMSRQEEDGVYASTGGMKQIPVKWTAPEALNYGRYSSESDVWSFGILLWEAFSLGAVPYANLSNQQTREAIEQGVRLEPPEQCPEDVYRLMQRCWEYDPRRRPSFGAVHQDLIAIRKRHR

SEQ ID NO: 13666 - protein, 827 aa, Gallus gallus
MGLRGGGGRAGGPAPGWTCLLLCAALRSLLASPGSEVNLLDSRTVMGDLGWIAYPKNGWEEIGEVDENYAPIHTYQVCKVMEQNQNNWLLTSWISNEGRPASSFELKFTLRDCNSLPGGLGTCKETFNMYYFESDDEDGRNIRENQYIKIDTIAADESFTELDLGDRVMKLNTEVRDVGPLTKKGFYLAFQDVGACIALVSVRVYYKKCPSVIRNLARFPDTITGADSSQLLEVSGVCVNHSVTDEAPKMHCSAEGEWLVPIGKCLCKAGYEEKNNTCQAPSPVSSVKKGKITKNSISLSWQEPDRPNGIILEYEIKYFEKDQETSYTIIKSKETAITADGLKPGSAYVFQIRARTAAGYGGFSRRFEFETSPVLAASSDQSQIPIIVVSVTVGVILLAVVIGFLLSGRRCGYSKAKQDPEEEKMHFHNGHIKLPGVRTYIDPHTYEDPNQAVHEFAKEIEASCITIERVIGAGEFGEVCSGRLKLQGKREFPVAIKTLKVGYTEKQRRDFLGEASIMGQFDHPNIIHLEGVVTKSKPVMIVTEYMENGSLDTFLKKNDGQFTVIQLVGMLRGIASGMKYLSDMGYVHRDLAARNILINSNLVCKVSDFGLSRVLEDDPEAAYTTRGGKIPIRWTAPEAIAFRKFTSASDVWSYGIVMWEVMSYGERPYWEMTNQDVIKAVEEGYRLPSPMDCPAALYQLMLDCWQKDRNSRPKFDEIVSMLDKLIRNPSSLKTLVNASSRVSNLLVEHSPVGSGAYRSVGEWLEAIKMGRYTEIFMENGYSSMDSVAQVTLEDLRRLGVTLVGHQKKIMNSLQEMKVQLVNGMVPL

SEQ ID NO: 13667 - protein, 991 aa, Gallus gallus
MGLRGGGGRAGGPAPGWTCLLLCAALRSLLASPGSEVNLLDSRTVMGDLGWIAYPKNGWEEIGEVDENYAPIHTYQVCKVMEQNQNNWLLTSWISNEGRPASSFELKFTLRDCNSLPGGLGTCKETFNMYYFESDDEDGRNIRENQYIKIDTIAADESFTELDLGDRVMKLNTEVRDVGPLTKKGFYLAFQDVGACIALVSVRVYYKKCPSVIRNLARFPDTITGADSSQLLEVSGVCVNHSVTDEAPKMHCSAEGEWLVPIGKCLCKAGYEEKNNTCQVCRPGFFKASPHSPSCSKCPPHSYTLDEASTSCLCEEHYFRRESDPPTMACTRPPSAPRSAISNVNETSVFLEWIPPADTGGRKDVSYYIACKKCNSHSGLCEACGSHVRYLPQQTGLKNTSVMMVDLLAHTNYTFEIEAVNGVSDQNPGARQFVSVNVTTNQAAPSPVSSVKKGKITKNSISLSWQEPDRPNGIILEYEIKYFEKDQETSYTIIKSKETAITADGLKPGSAYVFQIRARTAAGYGGFSRRFEFETSPVLAASSDQSQIPIIVVSVTVGVILLAVVIGFLLSGRRCGYSKAKQDPEEEKMHFHNGHIKLPGVRTYIDPHTYEDPNQAVHEFAKEIEASCITIERVIGAGEFGEVCSGRLKLQGKREFPVAIKTLKVGYTEKQRRDFLGEASIMGQFDHPNIIHLEGVVTKSKPVMIVTEYMENGSLDTFLKKNDGQFTVIQLVGMLRGIASGMKYLSDMGYVHRDLAARNILINSNLVCKVSDFGLSRVLEDDPEAAYTTRGGKIPIRWTAPEAIAFRKFTSASDVWSYGIVMWEVMSYGERPYWEMTNQDVIKAVEEGYRLPSPMDCPAALYQLMLDCWQKDRNSRPKFDEIVSMLDKLIRNPSSLKTLVNASSRVSNLLVEHSPVGSGAYRSVGEWLEAIKMGRYTEIFMENGYSSMDSVAQVTLEDLRRLGVTLVGHQKKIMNSLQEMKVQLVNGMVPL

SEQ ID NO: 13668 - protein, 1013 aa, Gallus gallus
MGLRGGGGRAGGPAPGWTCLLLCAALRSLLASPGSEVNLLDSRTVMGDLGWIAYPKNGWEEIGEVDENYAPIHTYQVCKVMEQNQNNWLLTSWISNEGRPASSFELKFTLRDCNSLPGGLGTCKETFNMYYFESDDEDGRNIRENQYIKIDTIAADESFTELDLGDRVMKLNTEVRDVGPLTKKGFYLAFQDVGACIALVSVRVYYKKCPSVIRNLARFPDTITGADSSQLLEVSGVCVNHSVTDEAPKMHCSAEGEWLVPIGKCLCKAGYEEKNNTCQVCRPGFFKASPHSPSCSKCPPHSYTLDEASTSCLCEEHYFRRESDPPTMACTRPPSAPRSAISNVNETSVFLEWIPPADTGGRKDVSYYIACKKCNSHSGLCEACGSHVRYLPQQTGLKNTSVMMVDLLAHTNYTFEIEAVNGVSDQNPGARQFVSVNVTTNQAAPSPVSSVKKGKITKNSISLSWQEPDRPNGIILEYEIKYFEKDQETSYTIIKSKETAITADGLKPGSAYVFQIRARTAAGYGGFSRRFEFETSPVLAASSDQSQIPIIVVSVTVGVILLAVVIGFLLSGSCCDHGCGWASSLRAVAYPSLIWRCGYSKAKQDPEEEKMHFHNGHIKLPGVRTYIDPHTYEDPNQAVHEFAKEIEASCITIERVIGAGEFGEVCSGRLKLQGKREFPVAIKTLKVGYTEKQRRDFLGEASIMGQFDHPNIIHLEGVVTKSKPVMIVTEYMENGSLDTFLKKNDGQFTVIQLVGMLRGIASGMKYLSDMGYVHRDLAARNILINSNLVCKVSDFGLSRVLEDDPEAAYTTRGGKIPIRWTAPEAIAFRKFTSASDVWSYGIVMWEVMSYGERPYWEMTNQDVIKAVEEGYRLPSPMDCPAALYQLMLDCWQKDRNSRPKFDEIVSMLDKLIRNPSSLKTLVNASSRVSNLLVEHSPVGSGAYRSVGEWLEAIKMGRYTEIFMENGYSSMDSVAQVTLEDLRRLGVTLVGHQKKIMNSLQEMKVQLVNGMVPL

SEQ ID NO: 13669 - protein, 490 aa, Gallus gallus
YVFQIRARTAAGYGGFSRRFEFETSPVLAASSDQSQIPIIVVSVTVGVILLAVVIGFLLSGSCCDHGCGWASSLRAVAYPSLIWRCGYSKAKQDPEEEKMHFHNGHIKLPGVRTYIDPHTYEDPNQAVHEFAKEIEASCITIERVIGAGEFGEVCSGRLKLQGKREFPVAIKTLKVGYTEKQRRDFLGEASIMGQFDHPNIIHLEGVVTKSKPVMIVTEYMENGSLDTFLKKNDGQFTVIQLVGMLRGIASGMKYLSDMGYVHRDLAARNILINSNLVCKVSDFGLSRVLEDDPEAAYTTRGGKIPIRWTAPEAIAFRKFTSASDVWSYGIVMWEVMSYGERPYWEMTNQDVIKAVEEGYRLPSPMDCPAALYQLMLDCWQKDRNSRPKFDEIVSMLDKLIRNPSSLKTLVNASSRVSNLLVEHSPVGSGAYRSVGEWLEAIKMGRYTEIFMENGYSSMDSVAQVTLEDESPCEKWSLTLHPLFPTGYQT

SEQ ID NO: 13670 - protein, 984 aa, Gallus gallus
  unsure (1)..(984): unsure at all Xaa locations
ETLMDTRTATAELGWTANPPSGWEEVSGYDENLNTIRTYQVCNVFEPNQNNWLLTTFINRRGAHRIYTEMRFTVRDCSSLPNVPGSCKETFNLYYYETDSVIATKKSAFWTEAPYLKVDTIAADESFSQVDFGGRLMKGXXXXXXXXXXXXXXXXXXXXXXXXXXXXXXXXXFFKKCPSVVQNFAIFPETMTGAESTSLVTARGTCIPNAEEVDVPIKLYCNGDGEWMVPIGRCTCKAGYEPENNVACRACPAGTFKASQGAGLCARCPPNSRSSAEASPLCACRNGYFRADLDPPTAACTSVPSGPRNVISIVNETSIILEWNPPRETGGRDDVTYNIVCKKCRADRRACSRCDDNVEFVPRQLGLTETRVFISSLWAHTPYTFEIQAVNGVSNKSPFPPQHVSVNITTNQAAPSTVPIMHQVSATMRSITLSWPQPEQPNGIILDYELRYYEKLSRICTPDVSGTVGSRPAADHNEYNSSVARSQTNTARLEGLRPGMVYVVQVRARTVAGYGKYSGKMCFQTLTDDDYKSELREQLPLIAGSAAAGVVFIVSLVAISIVCSRKRAYSKEVVYSDKLQHYSTGRGSPGMKIYIDPFTYEDPNEAVREFAKEIDVSFVKIEEVIGAGEFGEVYKGRLKLPGKREIYVAIKTLKAGYSEKQRRDFLSEASIMGQFDHPNIIRLEGVVTKSRPVMIITEFMENGALDSFLRQNDGQFTVIQLVGMLRGIAAGMKYLAEMNYVHRDLAARNILVNSNLVCKVSDFGLSRYLQDDTSDPTYTSSLGGKIPVRWTAPEAIAYRKFTSASDVWSYGIVMWEVMSFGERPYWDMSNQDVINAIEQDYRLPPPMDCPAALHQLMLDCWQKDRNTRPRLAEIVNTLDKMIRNPASLKTVATITAVPSQPLLDRSIPDFTAFTSVEDWLSAVKMSQYRDNFLSAGFTSLQLVAQMTSEDLLRIGVTLAGHQKKILNSIQSMRVQMSQSPTSMA

SEQ ID NO: 13671 - protein, 952 aa, Gallus gallus
  unsure (1)..(952): unsure at all Xaa locations
ETLMDTRTATAELGWTANPPSGWEEVSGYDENLNTIRTYQVCNVFEPNQNNWLLTTFINRRGAHRIYTEMRFTVRDCSSLPNVPGSCKETFNLYYYETDSVIATKKSAFWTEAPYLKVDTIAADESFSQVDFGGRLMKGXFFKKCPSVVQNFAIFPETMTGAESTSLVTARGTCIPNAEEVDVPIKLYCNGDGEWMVPIGRCTCKAGYEPENNVACRACPAGTFKASQGAGLCARCPPNSRSSAEASPLCACRNGYFRADLDPPTAACTSVPSGPRNVISIVNETSIILEWNPPRETGGRDDVTYNIVCKKCRADRRACSRCDDNVEFVPRQLGLTETRVFISSLWAHTPYTFEIQAVNGVSNKSPFPPQHVSVNITTNQAAPSTVPIMHQVSATMRSITLSWPQPEQPNGIILDYELRYYEKLSRICTPDVSGTVGSRPAADHNEYNSSVARSQTNTARLEGLRPGMVYVVQVRARTVAGYGKYSGKMCFQTLTDDDYKSELREQLPLIAGSAAAGVVFIVSLVAISIVCSRKRAYSKEVVYSDKLQHYSTGRGSPGMKIYIDPFTYEDPNEAVREFAKEIDVSFVKIEEVIGAGEFGEVYKGRLKLPGKREIYVAIKTLKAGYSEKQRRDFLSEASIMGQFDHPNIIRLEGVVTKSRPVMIITEFMENGALDSFLRQNDGQFTVIQLVGMLRGIAAGMKYLAEMNYVHRDLAARNILVNSNLVCKVSDFGLSRYLQDDTSDPTYTSSLGGKIPVRWTAPEAIAYRKFTSASDVWSYGIVMWEVMSFGERPYWDMSNQDVINAIEQDYRLPPPMDCPAALHQLMLDCWQKDRNTRPRLAEIVNTLDKMIRNPASLKTVATITAVPSQPLLDRSIPDFTAFTSVEDWLSAVKMSQYRDNFLSAGFTSLQLVAQMTSEDLLRIGVTLAGHQKKILNSIQSMRVQMSQSPTSMA

SEQ ID NO: 13672 - protein, 450 aa, Gallus gallus
MSGMQAVWPSGTECIAKYNFHGTAEQDLPFSKGDVLTIVAVTKDPNWYKAKNKVGREGIIPANYVQKREGVKAGIKLSLMPWFHGKITREQAERLLYPPETGLFLVRESTNYPGDYTLCVSCEGKVEHYRIIYSSSKLSIDEEVYFENLMQLVEHYTTDADGLCSRLIKPKVMEGTVAAQDEFSRSGWALNMKDLKLLQIIGKGEFGDVMLGDYRGNKVAVKCIKNDATAQAFLAEASVMTQLRHSNLVQLLGVIVEEKSGLYIVTEYMAKGSLVDYLRSRGRSVLGGDCLLKFSLDVCEAMEYLEANNFVHRDLAARNVLVSEDNIAKVSDFGLTKEASSTQDTGKLPVKWTAPEALREKKFSTKSDVWSFGILLWEIYSFGRVPYPRIPLKDVVPRVEKGYKMDPPDGCPAIVYEVMKKCWTLDPGHRPSFHQLREQLVHIKEKELYL

SEQ ID NO: 13673 - protein, 1053 aa, Gallus gallus
MAAAYLDPNLNHTPSSSAKTHLGTGMERSPGAMERVLKVFHYFENSSEPTTWASIIRHGDATDVRGIIQKIVDCHKVKNVACYGLRLSHLQSEEVHWLHLDMGVSNVREKFELAHPPEEWKYELRIRYLPKGFLNQFTEDKPTLNFFYQQVKNDYMLEIADQVDQEIALKLGCLEIRRSYGEMRGNALEKKSNYEVLEKDVGLRRFFPKSLLDSVKAKTLRKLIQQTFRQFANLNREESILKFFEILSPVYRFDKECFKCALGSSWIISVELAIGPEEGISYLTDKGANPTHLADFNQVQTIQYSNSEDKDRKGMLQLKIAGAPEPLTVTAPSLTIAENMADLIDGYCRLVNGATQSFIIRPQKEGERALPSIPKLANNEKQGVRSHTVSVSETDDYAEIIDEEDTYTMPSTRDYEIQRERIELGRCIGEGQFGDVHQGIYMSPENPAMAVAIKTCKNCTSDSVREKFLQEALTMRQFDHPHIVKLIGVITENPVWIIMELCTLGELRSFLQVRKFSLDLASLILYAYQLSTALAYLESKRFVHRDIAARNVLVSATDCVKLGDFGLSRYMEDSTYYKASKGKLPIKWMAPESINFRRFTSASDVWMFGVCMWEILMHGVKPFQGVKNNDVIGRIENGERLPMPPNCPPTLYSLMTKCWAYDPSRRPRFTELKAQLSTILEEEKLQQEERMRMESRRQVTVSWDSGGSDEAPPKPSRPGYPSPRSSEGFYPSPQHMVQPNHYQVSGYSGSHGIPAMAGSIYPGQASLLDQTDSWNHRPQEVSAWQPNMEDSGTLDVRGMGQVLPTHLMEERLIRQQQEMEEDQRWLEKEERFLVMKPDVRLSRGSIEREDGGLQGPAGNQHIYQPVGKPDHAAPPKKPPRPGAPHLGSLASLNSPVDSYNEGVKIKPQEISPPPTANLDRSNDKVYENVTGLVKAVIEMSSKIQPAPPEEYVPMVKEVGLALRTLLATVDESLPVLPASTHREIEMAQKLLNSDLAELINKMKLAQQYVMTSLQQEYKKQMLTAAHALAVDAKNLLDVIDQARLKMISQSRPH

SEQ ID NO: 13674 - protein, 1028 aa, Gallus gallus
MERSPGAMERVLKVFHYFENSSEPTTWASIIRHGDATDVRGIIQKIVDCHKVKNVACYGLRLSHLQSEEVHWLHLDMGVSNVREKFELAHPPEEWKYELRIRYLPKGFLNQFTEDKPTLNFFYQQVKNDYMLEIADQVDQEIALKLGCLEIRRSYGEMRGNALEKKSNYEVLEKDVGLRRFFPKSLLDSVKAKTLRKLIQQTFRQFANLNREESILKFFEILSPVYRFDKECFKCALGSSWIISVELAIGPEEGISYLTDKGANPTHLADFNQVQTIQYSNSEDKDRKGMLQLKIAGAPEPLTVTAPSLTIAENMADLIDGYCRLVNGATQSFIIRPQKEGERALPSIPKLANNEKQGVRSHTVSVSETDDYAEIIDEEDTYTMPSTRDYEIQRERIELGRCIGEGQFGDVHQGIYMSPENPAMAVAIKTCKNCTSDSVREKFLQEALTMRQFDHPHIVKLIGVITENPVWIIMELCTLGELRSFLQVRKFSLDLASLILYAYQLSTALAYLESKRFVHRDIAARNVLVSATDCVKLGDFGLSRYMEDSTYYKASKGKLPIKWMAPESINFRRFTSASDVWMFGVCMWEILMHGVKPFQGVKNNDVIGRIENGERLPMPPNCPPTLYSLMTKCWAYDPSRRPRFTELKAQLSTILEEEKLQQEERMRMESRRQVTVSWDSGGSDEAPPKPSRPGYPSPRSSEGFYPSPQHMVQPNHYQVSGYSGSHGIPAMAGSIYPGQASLLDQTDSWNHRPQEVSAWQPNMEDSGTLDVRGMGQVLPTHLMEERLIRQQQEMEEDQRWLEKEERFLVMKPDVRLSRGSIEREDGGLQGPAGNQHIYQPVGKPDHAAPPKKPPRPGAPHLGSLASLNSPVDSYNEGVKIKPQEISPPPTANLDRSNDKVYENVTGLVKAVIEMSSKIQPAPPEEYVPMVKEVGLALRTLLATVDESLPVLPASTHREIEMAQKLLNSDLAELINKMKLAQQYVMTSLQQEYKKQMLTAAHALAVDAKNLLDVIDQARLKMISQSRPH

SEQ ID NO: 13675 - protein, 983 aa, Gallus gallus
MDRRRLPLLLLCAALGSAGRLSARPGNEVNLLDSKTIQGELGWISYPSHGWEEISGVDEHYTPIRTYQESNVMDHSQNNWLRTNWIPRNSAQKIYVELKFTLRDCNSIPLVLGTCKETFNLYYMESDDDHLAKFREHQFTKIDTIAADESFTQMDLGDRILKLNTEVREVGPVSKKGFYLAFQDVGACVALVSVRVYFKKCPFTVKNLAMFPDTVPMDSQSLVEVRGSCVNHSKEEEPPKMYCSTEGEWLVPIGKCLCNAGYEERGFACQACRPGFYKASAGNVKCAKCPPHSSTYEDASLNCRCEKNYFRSEKDPPSMACTRPPSAPRNVISNINETSVILDWSWPLDTGGRKDVTFNIICKKCGGSSKICEPCSDNVRFLPRQTGLTNTTVTVVDLLAHTNYTFEIDAVNGVSDLSTLSRQFAAVSITTNQAAPSPITVIRKDRTSRNSVSLSWQEPEHPNGIILDYEVKYYEKQEQETSYTILRAKSTNVTISGLKPDTTYVFQIRARTAARYGTSSRKFEFETSPDSFSISSENSQVVMIAISAAVAIILLTVVVYVLIGRFCGYKKSKHGTDEKRLHFGNGHLKLPGLRTYVDPHTYEDPNQAVHEFAKELDASNISIDKVVGAGEFGEVCSGRLKLPSKKEISVAIKTLKAGYTEKQRRDFLGEASIMGQFDHPNIIRLEGVVTKSKPVMIVTEYMENGSLDSFLRKHDAQFTVIQLVGMLRGIASGMKYLSDMGYVHRDLAARNILINSNLVCKVSDFGLSRVLEDDPEAAYTTRGGKIPIRWTSPEAIAYRKFTSASDAWSYGIVLWEVMSYGERPYWEMSFQDVIKAVDEGYRLPPPMDCPAALYQLMLDCWQKDRNNRPKFEQIVSILDKLIRNPSSLKIITNAAARPSNLLLDQSNIDISAFRTAGDWLNGFRTGQCKGIFTGVEYSSCDTIAKISTDDMKKVGVTVVGPQKKIVSSIKTLETHTKNSPVPV

SEQ ID NO: 13676 - protein, 452 aa, Gallus gallus
MDDIFTQCREGNAVAVRLWLDNTENDLNQGDDHGFSPLHWACREGRSNVVDMLIMRGARINVMNRGDDTPLHLAASHGHRDIVQKLIQFKADINAVNEHGNTPLHYACFWGHDTVAEDLVGNGALVSIANKYSETPIDKAKMPLREILKERAEKLGQNLTKIPYKDTFWKGTTRTRPRNGTLNKLAGIDFKQLSLSQKLNENQSGELWKGRWQGNDIVIKMLKIRDWTTRKSRDFNEEYPKLRIFSHPNVLPVLGACQSPPAPHPIVISHWMPYGSLYNVLHEGTNFVVDQMQAVKFAFDIARGMAFLHTLEPLIPRHHLNSRSIMIDEDMTARISMADVKFSFQCPGRMYAPAWVAPEALQKKPEEINRRSADMWSFAVLLWELVTREVPFADLSNMEIGMKVALEGLRPTIPPGISPHICKLMKICMNEDPAKRPKFDMIVPILEKMQDK

SEQ ID NO: 13677 - protein, 1004 aa, Gallus gallus
MGPLWFCCLPLALLPLLAAVEETLMDSTTATAELGWMVHPPSGWEEVSGYDENMNTIRTYQVCNVFESSQNNWLRTKYIRRRGAHRIHVEMKFSVRDCSSIPNVPGSCKETFNLYYYESDFDSATKTFPNWMENPWMKVDTIAADESFSQVDLGGRVMKINTEVRSFGPVSKNGFYLAFQDYGGCMSLIAVRVFYRKCPRVIQNGAVFQETLSGAESTSLVAARGTCISNAEEVDVPIKLYCNGDGEWLVPIGRCMCRPGYESVENGTVCRGCPSGTFKASQGDEGCVHCPINSRTTSEGATNCVCRNGYYRADADPVDMPCTTIPSAPQAVISSVNETSLMLEWTPPRDSGGREDLVYNIICKSCGSGRGACTRCGDNVQFAPRQLGLTEPRIYISDLLAHTQYTFEIQAVNGVTDQSPFSPQFASVNITTNQAAPSAVSIMHQVSRTVDSITLSWSQPDQPNGVILDYELQYYEKNLSELNSTAVKSPTNTVTVQNLKAGTIYVFQVRARTVAGYGRYSGKMYFQTMTEAEYQTSVQEKLPLIIGSSAAGLVFLIAVVVIIIVCNRRRGFERADSEYTDKLQHYTSGHSTYRGPPPGLGVRLFVMTPGMKIYIDPFTYEDPNEAVREFAKEIDISCVKIEQVIGAGEFGEVCSGHLKLPGKREIFVAIKTLKSGYTEKQRRDFLSEASIMGQFDHPNVIHLEGVVTKSSPVMIITEFMENGSLDSFLRQNDGQFTVIQLVGMLRGIAAGMKYLADMNYVHRDLAARNILVNSNLVCKVSDFGLSRFLEDDTSDPTYTSALGGKIPIRWTAPEAIQYRKFTSASDVWSYGIVMWEVMSYGERPYWDMTNQDVINAIEQDYRLPPPMDCPNALHQLMLDCWQKDRNHRPKFGQIVNTLDKMIRNPNSLKAMAPLSSGVNLPLLDRTIPDYTSFNTVDEWLDAIKMSQYKESFASAGFTTFDIVSQMTVEDILRVGVTLAGHQKKILNSIQVMRAQMNQIQSVEV

SEQ ID NO: 13678 - protein, 995 aa, Gallus gallus
MPGPERTMGPLWFCCLPLALLPLLAAVEETLMDSTTATAELGWMVHPPSGWEEVSGYDENMNTIRTYQVCNVFESSQNNWLRTKYIRRRGAHRIHVEMKFSVRDCSSIPNVPGSCKETFNLYYYESDFDSATKTFPNWMENPWMKVDTIAADESFSQVDLGGRVMKINTEVRSFGPVSKNGFYLAFQDYGGCMSLIAVRVFYRKCPRVIQNGAVFQETLSGAESTSLVAARGTCISNAEEVDVPIKLYCNGDGEWLVPIGRCMCRPGYESVENGTVCRGCPSGTFKASQGDEGCVHCPINSRTTSEGATNCVCRNGYYRADADPVDMPCTTIPSAPQAVISSVNETSLMLEWTPPRDSGGREDLVYNIICKSCGSGRGACTRCGDNVQFAPRQLGLTEPRIYISDLLAHTQYTFEIQAVNGVTDQSPFSPQFASVNITTNQAAPSAVSIMHQVSRTVDSITLSWSQPDQPNGVILDYELQYYEKNLSELNSTAVKSPTNTVTVQNLKAGTIYVFQVRARTVAGYGRYSGKMYFQTMTEAEYQTSVQEKLPLIIGSSAAGLVFLIAVVVIIIVCNRRRGFERADSEYTDKLQHYTSGHMTPGMKIYIDPFTYEDPNEAVREFAKEIDISCVKIEQVIGAGEFGEVCSGHLKLPGKREIFVAIKTLKSGYTEKQRRDFLSEASIMGQFDHPNVIHLEGVVTKSSPVMIITEFMENGSLDSFLRQNDGQFTVIQLVGMLRGIAAGMKYLADMNYVHRDLAARNILVNSNLVCKVSDFGLSRFLEDDTSDPTYTSALGGKIPIRWTAPEAIQYRKFTSASDVWSYGIVMWEVMSYGERPYWDMTNQDVINAIEQDYRLPPPMDCPNALHQLMLDCWQKDRNHRPKFGQIVNTLDKMIRNPNSLKAMAPLSSGVNLPLLDRTIPDYTSFNTVDEWLDAIKMSQYKESFASAGFTTFDIVSQMTVEDILRVGVTLAGHQKKILNSIQVMRAQMNQIQSVEV

SEQ ID NO: 13679 - protein, 767 aa, Coturnix coturnix
MAALSSGSSAEGASLFNGDMEPEPPPPVLGACYAGSGGGDPAIPEEVWNIKQMIKLTQEHIEALLDKFGGEHNPPSIYLEAYEEYTSKLDALQQREQQLLESMGNGTDFSVSSSASTDTVASSSSSSLSVAPSSLSVYQNPTDMSRNNPKSPQKPIVRVFLPNKQRTVVPARCGVTVRDSLKKALMMRGLIPECCAVYRIQDGEKKPIGWDTDISWLTGEELHVEVLENVPLTTHNFVRKTFFTLAFCDFCRKLLFQGFRCQTCGYKFHQRCSTEVPLMCVNYDQLDLLFVSKFFEHHPISQEETTLGETTPASGSYPSVPPSDSVGPPILPSPSPSKSIPIPQPFRPADEDHRNQFGQRDRSSSAPNVHINTIEPVNIDDLIRDQGVRGEGGSTAGLSATPPASLPGSLTNVKALQKSPGPQRERKSSSSSEDRNRMKTLGRRDSSDDWEIPDGQITVGQRIGSGSFGTVYKGKWHGDVAVKMLNVTAPTPQQLQAFKNEVGVLRKTRHVNILLFMGYSTKPQLAIVTQWCEGSSLYHHLHIIETKFEMIKLIDIARQTAQGMDYLHAKSIIHRDLKSNNIFLHEDLTVKIGDFGLATVKSRWSGSHQFEQLSGSILWMAPEVIRMQDKNPYSFQSDVYAFGIVLYELMTGQLPYSNINNRDQIIFMVGRGYLSPDLSKVRSNCPKAMKRLMAECLKKKRDERPLFPQILASIELLARSLPKIHRSASEPSLNRAGFQTEDFSLYACASPKTPIQAGGYGEFAAFK

SEQ ID NO: 13680 - protein, 807 aa, Coturnix japonica
MAALSSGSSAEGASLFNGDMEPEPPPPVLGACYAGSGGGDPAIPEEVWNIKQMIKLTQEHIEALLDKFGGEHNPPSIYLEAYEEYTSKLDALQQREQQLLESMGNGTDFSVSSSASTDTVASSSSSSLSVAPSSLSVYQNPTDMSRNNPKSPQKPIVRVFLPNKQRTVVPARCGVTVRDSLKKALMMRGLIPECCAVYRIQDGEKKPIGWDTDISWLTGEELHVEVLENVPLTTHNFVRKTFFTLAFCDFCRKLLFQGFRCQTCGYKFHQRCSTEVPLMCVNYDQLDLLFVSKFFEHHPISQEETTLGETTPASGSYPSVPPSDSVGPPILPSPSPSKSIPIPQPFRPADEDHRNQFGQRDRSSSAPNVHINTIEPVNIDDLIRDQGVRGEGAPLNQLMRCLRKYQSRTPSPLLHSVPSEIVFDFEPGPVFRGSTAGLSATPPASLPGSLTNVKALQKSPGPQRERKSSSSSEDRNRMKTLGRRDSSDDWEIPDGQITVGQRIGSGSFGTVYKGKWHGDVAVKMLNVTAPTPQQLQAFKNEVGVLRKTRHVNILLFMGYSTKPQLAIVTQWCEGSSLYHHLHIIETKFEMIKLIDIARQTAQGMDYLHAKSIIHRDLKSNNIFLHEDLTVKIGDFGLATVKSRWSGSHQFEQLSGSILWMAPEVIRMQDKNPYSFQSDVYAFGIVLYELMTGQLPYSNINNRDQIIFMVGRGYLSPDLSKVRSNCPKAMKRLMAECLKKKRDERPLFPQILASIELLARSLPKIHRSASEPSLNRAGFQTEDFSLYACASPKTPIQAGGYGEFAAFK

SEQ ID NO: 13681 - protein, 369 aa, Macaca fascicularis
MHFHNGHIKLPGVRTYIDPHTYEDPNQAVHEFAKEIEASCITIERVIGAGEFGEVCSGRLKLPGKRELPVAIKTLKVGYTEKQRRDFLGEASIMGQFDHPNIIHLEGVVTKSKPVMIVTEYMENGSLDTFLKKNDGQFTVIQLVGMLRGIAAGMKYLSDMGYVHRDLAARNILINSNLVCKVSDFGLSRVLEDDPEAAYTTRGGKIPIRWTAPEAIAFRKFTSASDVWSYGIVMWEVVSYGERPYWEMTNQDVIKAVEEGYRLPSPMDCPAALYQLMLDCWQKDRNSRPKFDEIVNMLDKLIRNPSSLKTLVNASCRVSNLLAEHSPLGSGAYRSVGEWLEAIKMGRYTEIFMENGYSSMDAVAQVTLE

SEQ ID NO: 13682 - protein, 504 aa, Macaca fascicularis
MGCMKSKFLQAGGNTFSKTETSANPHCPVYVPDPTSTIKPGPNSNNRNTPGIGEGSEDIIVVALYDYEAIHHEDLSFQKGDQMVVLEESGEWWKARSLATRKEGYIPSNYVARVDSLETEEWFFKGISRKDAERQLLAPGNMLGSFMIRDSETTKGSYSLSVRDYDPRQGDTVKHYKIRTLDNGGFYISPRSTFSTLQELVDHYKKGSDGLCQKLSVPCVSSKPQKPWEKDAWEIPRESLKLEKKLGAGQFGEVWMATYNKHTKVAVKTMKPGSMSVEAFLAEANLMKTLQHDKLVKLHAVVTKEPIYIITEFMAKGSLLDFLKSDEGSKQPLPKLIDFSAQIAEGMAFIEQRNYIHRDLRAANILVSASLVCKIADFGLARIIEDNEYTAREGAKFPIKWTAPEAINFGSSTIKSDVWSFGILLMEIVTYGRIPYPGMSNPEVIRALERGYRMPRPENCPEELYNIMMRCWKNRPEERPTFEYIQSVLDDFYTATESQYQQQP

SEQ ID NO: 13683 - protein, 301 aa, Papio hamadryas
EVMLSTRIGSGSFGTVYKGKWHGDVAVKILKVVDPTPEQFQAFRNEVAVLRKTRHVNILLFMGYMTKDNLAIVTQWCEGSSLYKHLHVQETKFQMFQLIDIARQTAQGMDYLHAKNIIHRDMKSNNIFLHEGLTVKIGDFGLATVKSRWSGSQQVEQPTGSVLWMAPEVIRMQDNNPFSFQSDVYSYGIVLYELMTGELPYSHINNRDQIIFMVGRGYASPDLSKLYKNCPKAMKRLVADCVKKVKEERPLFPQILSSIELLQHSLPKINRSASEPSLHRAAHTEDINACTLTTSPRLPVF

SEQ ID NO: 13684 - protein, 1066 aa, Homo sapiens
PLPYWTAVFEYEAAGEDELTLRLGDVVEVLSKDSQVSGDEGWWTGQLNQRVGIFPSNYVTPRSAFSSRCQPGGEDPSCYPPIQLLEIDFAELTLEEIIGIGGFGKVYRAFWIGDEVAVKAARHDPDEDISQTIENVRQEAKLFAMLKHPNIIALRGVCLKEPNLCLVMEFARGGPLNRVLSGKRIPPDILVNWAVQIARGMNYLHDEAIVPIIHRDLKSSNILILQKVENGDLSNKILKITDFGLAREWHRTTKMSAAGTYAWMAPEVIRASMFSKGSDVWSYGVLLWELLTGEVPFRGIDGLAVAYGVAMNKLALPIPSTCPEPFAKLMEDCWNPDPHSRPSFTNILDQLTTIEESGFFEMPKDSFHCLQDNWKHEIQEMFDQLRAKEKELRTWEEELTRAALQQKNQEELLRRREQELAEREIDILERELNIIIHQLCQEKPRVKKRKGKFRKSRLKLKDGNRISLPSDFQHKFTVQASPTMDKRKSLINSRSSPPASPTIIPRLRAIQLTPGESSKTWGRSSVVPKEEGEEEEKRAPKKKGRTWGPGTLGQKELASGDEGSPQRREKANGLSTPSESPHFHLGLKSLVDGYKQWSSSAPNLVKGPRSSPALPGFTSLMEMALLAASWVVPIDIEEDEDSEGPGSGESRLQHSPSQSYLCIPFPRGEDGDGPSSDGIHEEPTPVNSATSTPQLTPTNSLKRGGAHHRRCEVALLGCGAVLAATGLGFDLLEAGKCQLLPLEEPEPPAREEKKRREGLFQRSSRPRRSTSPPSRKLFKKEEPMLLLGDPSASLTLLSLSSISECNSTRSLLRSDSDEIVVYEMPVSPVEAPPLSPCTHNPLVNVRVERFKRDPNQSLTPTHVTLTTPSQPSSHRRTPSDGALKPETLLASRSPSSNGLSPSPGAGMLKTPSPSRDPGEFPRLPDPNVVFPPTPRRWNTQQDSTLERPKTLEFLPRPRPSANRQRLDPWWFVSPSHARSTSPANSSSTETPSNLDSCFASSSSTVEERPGLPALLPFQAGPLPPTERTLLDLDAEGQSQDSTVPLCRAELNTHRPAPYEIQQEFWS

SEQ ID NO: 13685 - protein, 823 aa, Canis familiaris
MGFGSDLKNSHEAVLKLQDWELRLLETVKKFMALRIKSDKEYASTLQNLCNQVDKESTVQMNYVSNVSKSWLLMIQQTEQLSRIMKTHAEDLNSGPLHRLTMMIKDKQQVKKSFIGVHQQIEAEMIKVTKTELEKLKSSYRQLIKEMNSAKEKYKEALAKGKETEKAKERYDKATMKLHVLHNQYVLALKGAQLHQNQYYDTTLPLLLDSLQKMQEEMIKALKGIFDEYSQITSLVTEEIVNVHKEIQMSVEQIDPSTEYNNFIDVHRTTAAKEQEIEFDTSLLEENENLQANEIMWNNLTAESLQVMLKTLAEELIQTQQMLVNKEEAVLELEKRIEESSKTCEKKSDIVLLLSQKQTLEELKQSVQQLRCTEAKFTAQKELLEQKVQENEGKEPPPVVNYEEDARSVTSMERKERLSKFESIRHSIAGIIRSPKSALGSSTFSDTIPISEKPLAEQDWYHGAIPRIEAQDLLKQQGDFLVRESHGKPGEYVLSVYSDGQRRHFIIQFVDNLYRFEGTGFSNIPQLIDHHYTTKQVITKKSGVVLLNPIPKDKKWVLNHEDVTLGELLGKGNFGEVYKGILKDKTAVAVKTCKEDLPQELKIKFLQEAKILKQYDHPNIVKLIGVCTQRQPIYIIMELVPGGDFLSFLRKKKDEIKLKQLVKFSLDAASGMSYLESKNCIHRDLAARNCLVGENNVLKISDFGMSRQEDGGVYSSSGLKQIPIKWTAPEALNYGRYSSESDVWSFGILLWETFSLGVCPYPGMTNQQATEQVERGYRISAPQHCPEDIFKIMMKCWDYKPENRPKFSELQKELTVIKKKVTQ

SEQ ID NO: 13686 - protein, 539 aa, Canis familiaris
MGCIKSKEDKGPAIKYRNTPEPVSVSHYGAEPTQATPWPSSSGWGTAFNFSSLSMTGFGGSSGVTPFGGASSSFSVVPSPYPAGLTGGVTIFVALYDYEARTTEDLSFKGGERFQIINNTEGDWWEARSIATGKNGYIPSNYVAPADSIAAEEWYFGKMGRKDAERLLLNPGNQRGIFLVRESETTKGAYSLSIRDWDEIRGDNVKHYKIRKLDNGGYYITTRAQFDTLQKLVKHSTEHADGLCHKLTTVCPTVKPQTQGLAKDAWEIPRESLRLEVKLGQGCFGEVWMGTWNGTTKVAIKTLKLGTMMPEAFLQEAQIMKKLRHDKLVPLYAVVSEEPIYIVTEFMSKGSLLDFLKEGDGKYLKLPQLVDMAAQIADGMAYIERMNYIHRDLRAANILVGENLVCKIADFGLARLIEDNEYTARQGAKFPIKWTAPEAALYGRFTIKSDVWSFGILQTELTTKGRVPYPGMVNREVLEQVERGYRMPCPQGCPESLHELMNLCWKKDPDERPTFEYIQSFLEDYFTAAEPQYQPGENL

SEQ ID NO: 13687 - protein, 820 aa, Felis catus
MGFSSELCSPQGHGAVQQMQEAELRLLEGMRKWMAQRVKSDREYAGLLHHMSLQDGGGRGTGPYSPISQSWAEITSQTEGLSRLLRQHAEDLNSGPLSKLGLLIRERQQLRKTYSEQWQQLQQELTKTHNQDIEKLKSQYRALARDSAQARRKYQEASKDKDRDKAKDKYVRSLWKLFAHHNRYVLGVRAAQLHHHHHHQLMLPGLLQSLQDLHQEMACILKEILQEYLEISSLVQDEVVAIHLEMAAAVARIQPEAEYQGFLRQYGSTPDVPPCVTFDESLLEEGEPLEPGELQLNELTVESVQHTLTSVTDELTVATQTVLSRQEAVAQLQRELQNEEQNTHPRERVQLLAKKQVLQEALQALQVALCSQAKLQAQRELLQAKLEQLGPGEPPPVLLLQDDRHSTSSSEQEREGGRTPTLEILKSHISGIFRPKFSLPPPLQLVPEVQKPLHEQLWYHGALPRAEVAELLTHSGDFLVRESQGKQEYVLSVLWDGQPRHFIIQSADNLYRLEGDGFASIPLLVDHLLRSQQPLTKKSGIVLNRAVPKDKWVLNHEDLVLGEQIGRGNFGEVFSGRLRADNTLVAVKSCRETLPPDIKAKFLQEAKILKQYSHPNIVRLIGVCTQKQPIYIVMELVQGGDFLTFLRTEGARLRMKTLLQMVGDAAAGMEYLESKCCIHRDLAARNCLVTEKNVLKISDFGMSREEADGIYAASGGLRQVPVKWTAPEALNYGRYSSESDVWSFGILLWETFSLGASPYPNLSNQQTREFVEKGGRLPCPELCPDAVFRLMEQCWAYEPGQRPSFSAIYQELQSIRKRHR

SEQ ID NO: 13688 - protein, 820 aa, Felis catus
MGFSSELCSPQGHGAVQQMQEAELRLLEGMRKWMAQRVKSDREYAGLLHHMSLQDGGGRGTGPYSPISQSWAEITSQTEGLSRLLRQHAEDLNSGPLSKLGLLIRERQQLRKTYSEQWQQLQQELTKTHNQDIEKLKSQYRALARDSAQARRKYQEASKDKDRDKAKDKYVRSLWKLFAHHNRYVLGVRAAQLHHHHHHQLMLPGLLQSLQDLHQEMACILKEILQEYLEISSLVQDEVVAIHLEMAAAVARIQPEAEYQGFLRQYGSTPDVPPCVTFDESLLEEGEPLEPGELQLNELTVESVQHTLTSVTDELTVATQTVLSRQEAVAQLQRELQNEEQNTHPRERVQLLAKKQVLQEALQALQVALCSQAKLQAQRELLQAKLEQLGPGEPPPVLLLQDDRHSTSSSEQEREGGRTPTLEILKSHISGIFRPKFSLPPPLQLVPEVQKPLHEQLWYHGALPRAEVAELLTHSGDFLVRESQGKQEYVLSVLWDGQPRHFIIESADNLYRLEGDGFASIPLLVDHLLRSQQPLTKKSGIVLNRAVPKDKWVLNHEDLVLGEQIGRGNFGEVFSGRLRADNTLVAVKSCRETLPPDIKAKFLQEAKILKQYSHPNIVRLIGVCTQKQPIYIVMELVQGGDFLTFLRTEGARLRMKTLLQMVGDAAAGMEYLESKCCIHRDLAARNCLVTEKNVLKISDFGMSREEADGIYAASGGLRQVPVKWTAPEALNYGRYSSESDVWSFGILLWETFSLGASPYPNLSNQQTREFVEKGGRLPCPELCPDAVFRLMEQCWAYEPGQRPSFSAIYQELQSIRKRHR

SEQ ID NO: 13689 - protein, 606 aa, Sus scrofa
MEPPRGPPANGAEPSRAVGTVKVYLPNKQRTVVTVRDGMSVYDSLDKALKVRGLNQDCCVVYRLIKGRKTVTAWDTAIAPLDGEELIVEVLEDVPLTMHNFVRKTFFSLAFCDFCLKFLFHGFRCQTCGYKFHQHCSSKVPTVCVDMSTNRRQFYHSVQDLSGGSRQHETPSNRPLNEPLTPQGPSSCTQHRDPEHFPFPAPANAPLQRIRSTSTPNVHMVSTTAPMDSGLVQLTAQSFNTDAAGNRGGGDGAPRGSPSPASVSSGRKSPHSKSPSEQRERKSLADDKKKVKNLGYRDSGYYWEVPPSEVQLLKRIGTGSFGTVFRGRWHGDVAVKVLKVAQPTAEQAQAFKNEMQVLRKTRHVNILLFMGFMTRPGFAIITQWCEGSSLYHHLHVADTRFDMVQLIDVARQTAQGMDYLHAKNIIHRDLKSNNIFLHEGLTVKIGDFGLATVKTRWSGAQPLEQPSGSVLWMAAEVIRMQDPNPYSFQSDVYAYGVVLYELMTGSLPYSHIGSRDQIIFMVGRGYLSPDLSKISSNCPKAMRRLLSDCLKFQREERPLFPQILATIELLQRSLPKIERSASEPSLHRTQADELPACLLSAARLVP

SEQ ID NO: 13690 - protein, 1367 aa, Sus scrofa
MKSGSGGGSPTSLWGLLFFSAALSLWPTSGEICGPGIDIRNDYQQLKRLENCTVIEGYLHILLISKAEDYRSYRFPKLTVITEYLLLFRVAGLESLGDLFPNLTVIRGWKLFYNYALVIFEMTNLKDIGLYNLRNITRGAIRIEKNADLCYLSTVDWSLILDAVSNNYIVGNKPPKECGDLCPGTLEEKPLCEKTTINNEYNYRCWTTNRCQKMCPSVCGKRACTENHECCHPECLGSCSAPDNDTACVACRHYYYAGVCVPSCPPNTYRFEGWRCVDRDFCANIPSAESSDSEGFVIHDGECMQECPSGFIRNGSQSMYCIPCEGPCPKVCEEEKKTKTIDSVTSAQMLQGCTIFKGNLLINIRRGNNIASELENFMGLIEVVTGYVKIRHSHALVSLSFLKNLRQILGEEQLEGNYSFYVLDNQNLQQLWDWDHRNLTIKAGKMYFAFNPKLCVSEIYRMEEVTGTKGRQSKGDINTRNNGERASCESDVLHFTSTTTWKNRIIITWHRYRPPDYRDLISFTVYYKEAPFKNVTEYDGQDACGSNSWNMVDVDLPPNKDVEPGILLHGLKPWTQYAVYVKAVTLTMVENDHIRGAKSEILYIRTNASVPSIPLDVLSASNSSSQLIVKWNPPSLPNGNLSYYIVRWQRQPQDSYLYRHNYCSKDKIPIRKYADGTIDVEEATENPKTEVCGGEKGPCCACPKTEAEKQAEKEEAEYRKVFENFLHNAIFVPRPERKRREVMQVANTTMSSRSRNTTVVDTYNVTDPEELETEYPFFESRVDNKERTVISNLRPFTLYRIDIHSCNHEAEKLGCSASNFVFARTMPAEGADDIPGPVTWEPRPENSIFLKWPEPENPNGLILMYEIKYGSQVEDQRECVSRQEYRKYGGAKLNRLNPGNYTARIQATSLSGNGSWTEPVFFYVQAKTTYENFIHLIIALPVAVLLIVGGLVIMLYVFHRKRNNSRLGNGVLYASVNPEYFSAADVYVPDEWEVAREKITMSRELGQGSFGMVYEGVAKGVVKDEPETRVAIKTVNEAASMRERIEFLNEASVMKEFNCHHVVRLLGVVSQGQPTLVIMELMTRGDLKSYLRSLRPEMENNPVLAPPSLSKMIQMAGEIADGMAYLNANKFVHRDLAARNCMVAEDFTVKIGDFGMTRDIYETDYYRKGGKGLLPVRWMSPESLKDGVFTTHSDVWSFGVVLWEIATLAEQPYQGLSNEQVLRFVMEGGLLDKPDNCPDMLFELMRMCWQYNPKMRPSFLEIISSIKDEMEPGFREVSFYYSEENKPPEPEELDLEPENMESVPLDPSASSSSLPLPDRHSGHKAENGPGPGVLVLRASFDERQPYAHMNGGRKNERALPLPQSSTC

SEQ ID NO: 13691 - protein, 1125 aa, Bos taurus
MDSLAGLVLCGVSLLLSATVDGAMDLILINSLPLVSDAETSLTCIASGWRPHEPITIGRDFEALMNQHQDPLEVTQDATREWAKKVVWKREKASKINGAYFCEGRVRGQAIRIRTMKMRQQASFLPATLTMTVDRGDNVNISFKKVLIKEEDAVIYKNGSFIHSVPRHEVPDILEVQVPHAQPQDAGVYSARYIGGNLFTSAFTRLIVRRCEAQKWGPECNRICTACMNNGICHEDTGECICPPGFMGRTCEKACEPHTFGRTCKERCSEPEGCKSFVFCLPDPYGCSCATGWKGLQCNEACQPGYYGPDCKLRCSCTNGEKCDRFQGCLCSPGRQGLQCEKEGVPRMTPKIEDLPDHIEVNSGKFNPICKASGWPRPANEEMTLVKPDGTVLRPKDFNHTGHLSVATFTINRILPPDSGVWVCSVNTVSGMVEKPFNISVKVLPKPLNAPKVIDTGHNFAVINISSEPYFGDGPIKSKKLLYKPVNHYEAWRHIQVTNEIVTLNYLEPRTEYELCVQLVRRGEGGEGHPGPVRRFTTASIGLPPPRGLSLLPKSQTTLNLTWQPIFPSSEDDFYVEVERRSVQMNSDQQNIKVPGNLTSVLLNNLHPREQYIVRARVNTKAQGEWSEDLIAWTLSDIVPPQPENIKIFNITDSSAVISWTILDGYSISAIIIRYKVQGKNEDQHIDVKIKNATITQYQLKGLEPQTVYQVDIFAENNIGSSNPTSSHELTTLSESQAPADLGGRKMLLIAILGSAGMTCLTVLLAFLIMLQLKRANVQRRMAQAFQNVREEPAVQFNSGTLALNRKAKNNPDPTIYPVLDWNDIKFQDVIGEGNFGQVLKARIKKDGLRMDAAIKRMKEYASKDDHRDFAGELEVLCKLGHHPNIINLLGACEHRGYLYLAIEYAPHGNLLDFLRKSRVLETDPAFAIANSTASTLSSQQLLHFAADVARGMDYLSQKQFIHRDLAARNILVGENYVAKIADFGLSRGQEVYVKKTMGRLPVRWMAIESLNYSVYTTNSDVWSYGVLLWEIVSLGGTPYCGMTCAELYEKLPQGYRLEKPLNCDDEVYDLMRQCWREKPYERPSFAQILVSLNRMLEERKTYVNTTLYEKFTYAGIDCSAEEAA

SEQ ID NO: 13692 - protein, 168 aa, Arabidopsis thaliana
MQEQATSSLAASSLPSSSERSSSSAPHLEIKEGIESDEEIRRVPEFGGEAVGKETSGRESGSATGQERTQATVGESQRKRGRTPAEKENKRLKRLLRNRVSAQQARERKKAYLSELENRVKDLENKNSELEERLSTLQNENQMLRHILKNTTGNKRGGGGGSNADASL

SEQ ID NO: 13693 - protein, 149 aa, Arabidopsis thaliana
MSLQRPNGNSSSSSSHKKHKTEESDEELLMVPDMEAAGSTCVLSSSADDGVNNPELDQTQNGVSTAKRRRGRNPVDKEYRSLKRLLRNRVSAQQARERKKVYVSDLESRANELQNNNDQLEEKISTLTNENTMLRKMLINTRPKTDDNH

SEQ ID NO: 13694 - protein, 203 aa, Oryza sativa (japonica cultivar-group)
MAAQEQEQEKQQVKTSTTSSLPSSSERSSSSAPNNLKEGGGVESDEEIRRVPEMGGGGGSASSGAGADERQGKEDGKQQGGGGGGAAAAGGGQEQAPPARKRGRSAGDKEQNRLKRLLRNRVSAQQARERKKAYMTELEAKAKDLELRNAELEQRVSTLQNENNTLRQILKNTTAHAGKRGGGGGGKGGDGGGGGKKHHFTKS

SEQ ID NO: 13695 - protein, 203 aa, Oryza sativa; identical to SEQ ID NO: 13694

SEQ ID NO: 13696 - protein, 88 aa, Triticum aestivum
  unsure (1)..(88): unsure at all Xaa locations
XLKRLLRNRVSAQQARERKKAYMTELEVKAKDLELRNAELEQKVSTLQNENNTLRQILKNTTAHAGKKPSGGKGGDSGKKHHHHFGKG

SEQ ID NO: 13697 - protein, 109 aa, Brassica rapa subsp. pekinensis
GTESDEEIRRVPEFGGEATGKEISGSVTGQDQTQATVGGESQRKRGRTPAEKETKRLKRLLRNRVSAQQARERKKAYLGELENRVKDLENRNSELEERLSTLQNENQML

SEQ ID NO: 13698 - protein, 618 aa, Hordeum vulgare subsp. vulgare
MKREYQDGGGSGGGGDEMGSSRDKMMVSSSEAGEGEEVDELLAALGYKVRASDMADVAQKLEQLEMAMGMGGPAPDDGFATHLATDTVHYNPTDLSSWVESMLSELNAPPPPLPPAPPQLNASTSSTVTGGGGYFDLPPSVDSSSSTYALRPIISPPVAPADLSADSVRDPKRMRTGGSSTSSSSSSSSSLGGGAARSSVVEAAPPVAAAAAAPALPVVVVDTQEAGIRLVHALLACAEAVQQENLSAAEALVKQIPLLAASQGGAMRKVAAYFGEALARRVFRFRPQPDSSLLDAAFADLLHAHFYESCPYLKFAHFTANQAILEAFAGCRRVHVVDFGIKQGMQWPALLQALALRPGGPPSFRLTGVGPPQPDETDALQQVGWKLAQFAHTIRVDFQYRGLVAATLADLEPFMLQPEGEEDPNEEPEVIAVNSVFEMHRLLAQPGALEKVLGTVRAVRPRIVTVVEQEANHNSGSFLDRFTESLHYYSTMFDSLEGGSSGGPSEVSSGGAAPAAAAGTDQVMSEVYLGRQICNVVACEGTERTERHETLGQWRNRLGNAGFETVHLGSNAYKQASTLLALFAGGDGYKVEEKEGCLTLGWHTRPLIATSAWRLAAP

SEQ ID NO: 13699 - protein, 535 aa, Madia sativa
ERKKEAKTTSSVPDSGGMDELLEVLGYKVKSTDMADVAQKLEQLEMVMGEDGVLQLSDTVHYNPSDLSGWVQSMLLVLNEDNNNTLDDDVSDHILLPGNSSTTMIDFSSSRTETVNRKHGSKMLEDDPYDLRAIAGGAIYRPESEGIGNGMKRMKTTAAGSEVVDVQPESPRPVVLVDSQEAGIRLVHTLMACAEAIQHNDLKLADALVKHVGILVASQAGAMAKVATYFAGALAQRIYNIYPQNALETSCNENLQMHFYETCPYLKFAHFTANQAILEAFAGATRVHVIDFSLNQGMQWPALMQALALRSGGPPAFRLTGIGPPQPDNSDALQQVGWKLAQLADTIGVEFEFRGFVANSIADIDANMLDIRASETEVVAVNSVFEVHRLLARPGSVEKVLSSITGMKPKIVTLVEQESNHNGAVFMERFNEALHYYSTMFDSLESSALTLPNSQDDLVMSEVYLGRQICNVVACEGTDRVERHETLTQWRVRMNSAGFEPVHLGSNAFKQASMLLALFSGGDGYRVEENDGCLM

SEQ ID NO: 13700 - protein, 380 aa, Anisocarpus madioides
MKRSRERKKEASSVPDSGGMDELLEVLGYKVKSTDMADVAQKLEQLEMVMGEDGILQLSDTVHYNPSDLSGWVQSMLLVLNDNNTTTTADDSGHILLPGDSSTTMIDFSSETVVHGKPGSKIHQDDDLRAIAGGAIYRSESESSMPGNANPNGNGVKRMKTTAAGSEVVDVQPESPRPVVLVDSQEAGIRLVHTLMACAEAIQHNDLKLADALVKHVGILVASQAGAMAKVATYFAGALAQRIYNIYPQNALETSCYEILQMHFYETCPYLKFAHFTANQAILEAFAGAKRVHVIDFSLNQGMQWPALMQALALRSGGPPAFRLTGIGPPQPDNSDALQQVGWKLAQLADTIGVEFEFRGFVANSIADIDANMLDIRLPE

SEQ ID NO: 13701 - protein, 143 aa, Anisocarpus madioides
RPGAVEKVLSAITKMKPKIVTLVEQESNHNGALFMERFNEALHYYSTMFDSLESSALTLPNSPDDLVMSEVYLGRQICNVVACEGTDRVERHETLTQWRVRMNSAGFEPVHLGSNAFKQASMLLALFADGDGYRVEENDGCLM

SEQ ID NO: 13702 - protein, 540 aa, Calycadenia multiglandulosa
ERKKEAKASTSSSSSMAPAAKAKDLQNPPDSGGMDELLEVLGYKVKSTDMDDVAQKLEQLEMVMGEDGILQLSDTVHYNPSDLSGWVQSMLSELNNSGGDSDIGIGIPAGGESSTTMIDFSNNKEKQPEDPYDLRAIAGGAIYGEGSESSGNGIKRMKMKSTAEGSGAVDVPPESPPRPVVLVDSQEAGIRLVHTLMACAEAVQNNDMKLAEALVKHVGILVASQAGAMAKVATYFAGALAQRIYKIYPQDGGLETSCWEILQMHFYESCPYLKFAHFTANQAILEAFAGAARVHVIDFSLNQGMQWPALMQALALRPGGPPAFRLTGIGPPQPDNTDALQQVGWKLAQLADTIGVEFEFRGFVAASIADIDAAMLDIRLDEVVAVNSVFELHRLLARPGAVEKVLSSITSMKPKIVTLVEQESNHNGVVFMDRFNEALHYYSTMFDSLESSALTQPNSQQDLVMSEVYLGRQICNVVACEGPDRVERHETLTQWRTRMISAGFEPVHLGSNAFKQASMLLALFAGGDGYRVEENDGCLM

SEQ ID NO: 13703 - protein, 124 aa, Gossypium herbaceum
IEKVVSSIKAMKPKIVTVVEQEANHNGPVFLDRFTEALHYYSTLFDSLEGSGVAPPSQDLAMSELYLGRQICNVVACEGMDRVERHEPLTQWRTRMETAGFSPVHLGSNAYKQASMLLALFASG

SEQ ID NO: 13704 - protein, 124 aa, Gossypium barbadense
IEKVVSSIKAMKPKIVTVVEQEANHNGPVFLDRFTEALHYYSTLFDSLEGSGVAPASQDLAMSELYLGRQICNVVACEGMDRVERHEPLTQWRTRMETAGFSTVHLGSNAYKQASMLLALFASG

SEQ ID NO: 13705 - protein, 537 aa, Gossypium hirsutum
MKRDHQEISGSGSNPAESSSIKGKLWEEDPDAGGMDDELLAVLGYKVRSSDMADVAQKLEMLEKVMGTAQEDGISQLGDTVHFNPSDLSGWVQNLLIEFNGSTTTPDPNFNDDSEYDLRAIPGVAAYPPVKSDPGLEITRKRAKTESSSSSSSTTTRPVVLIDSQEAGVRLVHTLMACAEAVQQDNLKLADALVKHIGLLASSQTGAMRKVATYFAEALARRIYRIFPPDSLDPSYNDKLQIPFYETCPYLKFAHFTANQAILEAFSMASRVHVIDFGLKQGMQWPALMQALALRPGGPPAFRLTGIGPPQPDNTDALQQVGWKLAQLAERIGIEFEFRGFVANSLADLEPEMLDIRPPEIEVVAVNAVFELHPLLARPGGIEKVVSSIKAMKPKIVTVVEQEANHNGPVFLDRFTEALHYYSTLFDSLEGSGVAPASQDLAMSELYLGRQICNVVACEGMDRVERHEPLTQWRTRMETAGVSPVHLGSNAYKQASMLLALFASGDGYRVEENNGCLMLGWHTRPLIAHLGLATRWY

SEQ ID NO: 13706 - protein, 490 aa, Arabidopsis thaliana
MYKQPRQELEAYYFEPNSVEKLRYLPVNNSRKRFCTLEPFPDSPPYNALSTATYDDTCGSCVTDELNDFKHKIREIETVMMGPDSLDLLVDCTDSFDSTASQEINGWRSTLEAISRRDLRADLVSCAKAMSENDLMMAHSMMEKLRQMVSVSGEPIQRLGAYLLEGLVAQLASSGSSIYKALNRCPEPASTELLSYMHILYEVCPYFKFGYMSANGAIAEAMKEENRVHIIDFQIGQGSQWVTLIQAFAARPGGPPRIRITGIDDMTSAYARGGGLSIVGNRLAKLAKQFNVPFEFNSVSVSVSEVKPKNLGVRPGEALAVNFAFVLHHMPDESVSTENHRDRLLRMVKSLSPKVVTLVEQESNTNTAAFFPRFMETMNYYAAMFESIDVTLPRDHKQRINVEQHCLARDVVNIIACEGADRVERHELLGKWRSRFGMAGFTPYPLSPLVNSTIKSLLRNYSDKYRLEERDGALYLGWMHRDLVASCAWK

SEQ ID NO: 13707 - protein, 597 aa, Arabidopsis thaliana
MRLSVFIIPLVESRQASGIINKQSTSLLIRFSLYLEASISTKSFFSKSQRISQTQSPICLSANYYQPDNLDMEATQKHMIQEGSSMFYHQPSSVKQMDLSVQTFDSYCTLESSSGTKSHPCLNNKNNSSSTTSFSSNESPISQANNNNLSRFNNHSPEENNNSPLSGSSATNTNETELSLMLKDLETAMMEPDVDNSYNNQGGFGQQHGVVSSAMYRSMEMISRGDLKGVLYECAKAVENYDLEMTDWLISQLQQMVSVSGEPVQRLGAYMLEGLVARLASSGSSIYKALRCKDPTGPELLTYMHILYEACPYFKFGYESANGAIAEAVKNESFVHIIDFQISQGGQWVSLIRALGARPGGPPNVRITGIDDPRSSFARQGGLELVGQRLGKLAEMCGVPFEFHGAALCCTEVEIEKLGVRNGEALAVNFPLVLHHMPDESVTVENHRDRLLRLVKHLSPNVVTLVEQEANTNTAPFLPRFVETMNHYLAVFESIDVKLARDHKERINVEQHCLAREVVNLIACEGVEREERHEPLGKWRSRFHMAGFKPYPLSSYVNATIKGLLESYSEKYTLEERDGALYLGWKNQPLITSCAWR

SEQ ID NO: 13708 - protein, 587 aa, Arabidopsis thaliana
VESRQASGIINKQSTSLLIRFSLYLEASISTKSFFSKSQRISQTQSPICLSANYYQPDNLDMEATQKHMIQEGSSMFYHQPSSVKQMDLSVQTFDSYCTLESSSGTKSHPCLNNKNNSSSTTSFSSNESPISQANNNNLSRFNNHSPEENNNSPLSGSSATNTNETELSLMLKDLETAMMEPDVDNSYNNQGGFGQQHGVVSSAMYRSMEMISRGDLKGVLYECAKAVENYDLEMTDWLISQLQQMVSVSGEPVQRLGAYMLEGLVARLASSGSSIYKALRCKDPTGPELLTYMHILYEACPYFKFGYESANGAIAEAVKNESFVHIIDFQISQGGQWVSLIRALGARPGGPPNVRITGIDDPRSSFARQGGLELVGQRLGKLAEMCGVPFEFHGAALCCTEVEIEKLGVRNGEALAVNFPLVLHHMPDESVTVENHRDRLLRLVKHLSPNVVTLVEQEANTNTAPFLPRFVETMNHYLAVFESIDVKLARDHKERINVEQHCLAREVVNLIACEGVEREERHEPLGKWRSRFHMAGFKPYPLSSYVNATIKGLLESYSEKYTLEERDGALYLGWKNQPLITSCAWR

SEQ ID NO: 13709 - protein, 526 aa, Arabidopsis thaliana
MEATQKHMIQEGSSMFYHQPSSVKQMDLSVQTFDSYCTLESSSGTKSHPCLNNKNNSSSTTSFSSNESPISQANNNNLSRFNNHSPEENNNSPLSGSSATNTNETELSLMLKDLETAMMEPDVDNSYNNQGGFGQQHGVVSSAMYRSMEMISRGDLKGVLYECAKAVENYDLEMTDWLISQLQQMVSVSGEPVQRLGAYMLEGLVARLASSGSSIYKALRCKDPTGPELLTYMHILYEACPYFKFGYESANGAIAEAVKNESFVHIIDFQISQGGQWVSLIRALGARPGGPPNVRITGIDDPRSSFARQGGLELVGQRLGKLAEMCGVPFEFHGAALCCTEVEIEKLGVRNGEALAVNFPLVLHHMPDESVTVENHRDRLLRLVKHLSPNVVTLVEQEANTNTAPFLPRFVETMNHYLAVFESIDVKLARDHKERINVEQHCLAREVVNLIACEGVEREERHEPLGKWRSRFHMAGFKPYPLSSYVNATIKGLLESYSEKYTLEERDGALYLGWKNQPLITSCAWR

SEQ ID NO: 13710 - protein, 526 aa, Arabidopsis thaliana
MEATQKHMIQEGSSMFYHQPSSVKQMDLSVQTFDSYCTLESSSGTKSHPCLNNKNNSSSTTSFSSNESPISQANNNNLSRFNNHSPEENNNSPLSGSSATNTNETELSLMLKDLETAMMEPDVDNSYNNQGGFGQQHGVVSSAMYRSMEMISRGDLKGVLYECAKAVENYDLEMTDWLISQLQQMVSVSGEPVQRLGAYMLEGLVARLASSGSSIYKALRCKDPTGPELLTYMHILYEACPYFKFGYESANGAIAEAVKNESFVHIIDFQISQGGQWVSLIRALGARPGGPPNVRITGIDDPRSSFARQGGLELVGQRLGKLAEMCGVPFEFHGAALCCTEVEIEKLGVRNGEALAVNFPLVLHHMPDESVTVENHRDRLLRLVKHLSPNVVTLVEQEANTNTAPFLPRFVETMNHYLAVFESIDVKLARDHKERINVEQHCLAREVVNLIACEGVEREERHEPLGKWRSRFHMAGFKPYPLSSYVNATIEGLLESYSEKYTLEERDGALYLGWKNQPLITSCAWR

SEQ ID NO: 13711 - protein, 411 aa, Arabidopsis thaliana
MMGPDSLDLLVDCTDSFDSTASQEINGWRSTLEAISRRDLRADLVSCAKAMSENDLMMAHSMMEKLRQMVSVSGEPIQRLGAYLLEGLVAQLASSGSSIYKALNRCPEPASTELLSYMHILYEVCPYFKFGYMSANGAIAEAMKEENRVHIIDFQIGQGSQWVTLIQAFAARPGGPPRIRITGIDDMTSAYARGGGLSIVGNRLAKLAKQFNVPFEFNSVSVSVSEVKPKNLGVRPGEALAVNFAFVLHHMPDESVSTENHRDRLLRMVKSLSPKVVTLVEQESNTNTAAFFPRFMETMNYYAAMFESIDVTLPRDHKQRINVEQHCLARDVVNIIACEGADRVERHELLGKWRSRFGMAGFTPYPLSPLVNSTIKSLLRNYSDKYRLEERDGALYLGWMHRDLVASCAWK

SEQ ID NO: 13712 - protein, 413 aa, Arabidopsis thaliana
MDNVRGSIMLQPLPEIAESIDDAICHELSMWPDDAKDLLLIVEAISRGDLKLVLVACAKAVSENNLLMARWCMGELRGMVSISGEPIQRLGAYMLEGLVARLAASGSSIYKSLQSREPESYEFLSYVYVLHEVCPYFKFGYMSANGAIAEAMKDEERIHIIDFQIGQGSQWIALIQAFAARPGGAPNIRITGVGDGSVLVTVKKRLEKLAKKFDVPFRFNAVSRPSCEVEVENLDVRDGEALGVNFAYMLHHLPDESVSMENHRDRLLRMVKSLSPKVVTLVEQECNTNTSPFLPRFLETLSYYTAMFESIDVMLPRNHKERINIEQHCMARDVVNIIACEGAERIERHELLGKWKSRFSMAGFEPYPLSSIISATIRALLRDYSNGYAIEERDGALYLGWMDRILVSSCAWK

SEQ ID NO: 13713 - protein, 529 aa, Arabidopsis thaliana
MQTSQKHHSAAGLHMLYPQVYCSPQFQAKDNKGFSDIPSKENFFTLESSTASGSLPSYDSPSVSITSGQSPFSPQGSQSCISDLHHSPDNVYGSPLSGVSSLAYDEAGVKSKIRELEVSLLSGDTKVEEFSGFSPAAGKSWNWDELLALTPQLDLKEVLVEAARAVADGDFATAYGFLDVLEQMVSVSGSPIQRLGTYMAEGLRARLEGSGSNIYKSLKCNEPTGRELMSYMSVLYEICPYWKFAYTTANVEILEAIAGETRVHIIDFQIAQGSQYMFLIQELAKRPGGPPLLRVTGVDDSQSTYARGGGLSLVGERLATLAQSCGVPFEFHDAIMSGCKVQREHLGLEPGFAVVVNFPYVLHHMPDESVSVENHRDRLLHLIKSLSPKLVTLVEQESNTNTSPFLSRFVETLDYYTAMFESIDAARPRDDKQRISAEQHCVARDIVNMIACEESERVERHEVLGKWRVRMMMAGFTGWPVSTSAAFAASEMLKAYDKNYKLGGHEGALYLFWKRRPMATCSVWKPNPN

SEQ ID NO: 13714 - protein, 306 aa, Arabidopsis thaliana
GTSPTGPELLTYMHILYEACPYFKFGYESANGAIAEAVKNESFVHIIDFQISQGGQWVSLIRALGARPGGPPNVRITGIDDPRSSFARQGGLELVGQRLGKLAEMCGVPFEFHGAALCCTEVEIEKLGVRNGEALAVNFPLVLHHMPDESVTVENHRDRLLRLVKHLSPNVVTLVEQEANTNTAPFLPRFVETMNHYLAVFESIDVKLARDHKERINVEQHCLAREVVNLIACEGVEREERHEPLGKWRSRFHMAGFKPYPLSSYVNATIKGLLESYSEKYTLEERDGALYLGWKNQPLITSCAWR

SEQ ID NO: 13715 - protein, 504 aa, Glycine max
MQASEQHRNSSMYYQPLQQIEAYCFAVSDTKSAAILPYGGHGTQFSTPSSSELYCTLESSSVALYNSPCGSCITDDLSSFNLKHKLRELESVMLGPDSDNLDSYDSAISNGNNFVPLEMDGWKQTMVAISSKNLKHILIACAKAISDDDLLMAQWLMDELRQMVSVSGDPFQRLGAYMLEGLVARLAASGSSIYKSLRCKEPESAELLSYMHILYEVCPYFKFGYMSANGAIAEAMKDEDRVHIIDFQIGQGSQWITLIQAFAARPGGPPHIRITGIDDSTSAYARGGGLHIVGRRLSKLAEHFKVPFEFHAAAISGCDVQLHNLGVRPGEALAVNFAFMLHHMPDESVSTQNHRDRLLRLVRSLSPKVVTLVEQESNTNTAAFFPRFLETLDYYTAMFESIDVTLSREHKERINVEQHCLARDLVNIIACEGVERVERHEVLGKWRSRFAMAGFTPYPLSSLVNGTIKKLLENYSDRYRLQERDGALYLGWMNRDLVASCAWK

SEQ ID NO: 13716 - protein, 522 aa, Glycine max
  unsure (1)..(522): unsure at all Xaa locations
MQTSQNHKISYGSGGFYAEPTAAKQPTXSVQTLEQYCTLESASTGNSFPNQNSPPALSFSSNNSPLSKLESNSYVLRPQHSLEIASGSPEDDSYLTHDLXXDLTHKIRELETAMLGPNADNIYGTVIPEPDSFLLEAEKWKKLMEISSRGDLKEMLYMCAKAMAVNDMETTDWLVSELRKMVSISGNPIQRLGAYILESFVARIGASGSTIYKSLKCSEPTGNELLSYMNVLYEICPYFKFGYMSANGAIAEALKEESEVHIVDFQIGQGTQWVSLIQALAHRPGGPPKIRISGVDDSYSAYARGGGLDIVGKRLSAHAQSCHVPFEFNAVRVPASQVQLEDLELLPYEAVAVNFAISLHHVPDESVNSHNHRDRLLRLAKRLSPKVVTLVEQEFNTNNAPFLQRFDETMKYYLAVFESIDTVLPREHKERINVEQHCLAREVVNLIACEGEERVERHELLNKWKMRFTKAGFTPYPLSSVINSSIKDLLQSYHGHYTLEERDGALFLGWMNQVLIASCAWS

SEQ ID NO: 13717 - protein, 522 aa, Glycine max
  unsure (1)..(522): unsure at all Xaa locations
MQTPQNHKISYGSGGFYVEPTAAKQPTXSVQTLEQYCTLESASTGNSFPSQNSPPALSFSSNNSLLSKLESNSYVLRPQHSLEIASGSPEDDSYLTHDLDXXLTHKIRELETAMLGPNADNIYGTVNPEPDSFLLEAEKWKKMMEISSRGDLKEMLYMCAKAMAVNDMETTDWLVSELRKMVSISGNPIQRLGAYILESFVARIGASGSTIYKSLKCSEPTGNELLSYMNVLYEICPYFKFGYMSANGAIAEALREESEVHIVDFQIGQGTQWVSLIQALARRPVGPPKIRISGVDDSYSAYARRGGLDIVGKRLSALAQSCHVPFEFNAVRVPATEVQLEDLELRPYEAVAVNFAISLHHVPDESVNSHNHRDRLLRLAKQLSPKVVTLVEQEFSTNNAPFLQRFVETMNYYLAVFESIDTVLPREHKERINVEQHCLAREVVNLIACEGEERVERHELLNKWRMRFTKAGFTPYPLSSVINSSIKDLLQSYHGHYTLEERDGALFLGWMNQVLVASCAWR

SEQ ID NO: 13718 - protein, 636 aa, Glycine max
  unsure (1)..(636): unsure at all Xaa locations
MQTSKKHPTSAGIHLYLQPAQDIDPYTSSQGTTISFETSKEQYFTLESSPAINDLIGCDSPSYASVSSNRSPFSPQASXXSDQHQSSDNTYGSPTSAHSRYDDDGYELKNKLRELEISLLGPDSDIVDSWHCSYKGGRHRASSPTAKHNWDQIVEMIPKLDLKEVLIRCAQAVADDDIETAVGFMNNVLAKMVSVGGDPIQRLGAYMLEGLRARLESSGSIIYKALKCEQPTSNDLMTYMHILYQICPYWKFAYTSANAVIGEAMLNESRIHIIDFQVAQGTQWLLLIQALASRPGGAPFIRVTGVDDSQSFHARGGGLHIVGKRLSDYAKSCGVPFEFHSAAMCGSELELENLVIQPGEALVVNFPFVLHHMPDESVSTENHRDRLLRLVKSLSPKVVTLVEQESNTNTSPFFQRFVETLSYYTAMFESIDVALPRDDKQRINAEQHCVARDIVNMVACEGDERLERHELLGKWRSRFSMAGFAPCPLSSSVTAAVRNMLNEFNENYRLQHRDGALYLGWKSRAMCTSSAWRCYXLIVIVIGICIFFYPQILFVSNILAFISGEFEPITSPHSHHWYMHIFLLVNFFPFYDIKSLFSGIRCFSIGLIRDLAFFQRVSFTFCGFSLVFKLSCTCQY

SEQ ID NO: 13719 - protein, 559 aa, Glycine max
  unsure (1)..(559): unsure at all Xaa locations
LPRLKTRSNNNSAVFRLSMCQDLFCSSSXYQRTGXFSMQTSQNHKISYGSGGFYAEPTAAKQPTXSVQTLEQYCTLESASTGNSFPNQNSPPALSFSSNNSPLSKLESNSYVLRPQHSLEIASGSPEDDSYLTHDLXXDLTHKIRELETAMLGPNADNIYGTVIPEPDSFLLEAEKWKKMMEISSRGDLKEMLYMCAKAMAVNDMETTDWLVSELRKMVSISGNPIQRLGAYILESFVARIGASGSTIYKSLKCSEPTGNELLSYMNVLYEICPYFKFGYMSANGAIAEALREESEVHIVDFQIGQGTQWVSLIQALARRPVGPPKIRISGVDDSYSAYARRGGLDIVGKRLSAHAQSCHVPFEFNAVRVPASQVQLEDLELLPYEAVAVNFAISLHHVPDESVNSHNHRDRLLRLAKRLSPKVVTLVEQEFNTNNAPFLQRFDETMKYYLAVFESIDTVLPREHKERINVEQHCLAREVVNLIACEGEERVERHELLNKWKMRFTKAGFTPYPLSSVINSSIKDLLQSYHGHYTLEERDGALFLGWMNQVLIASCAWS

SEQ ID NO: 13720 - protein, 634 aa, Glycine max
  unsure (1)..(634): unsure at all Xaa locations
NHKNKSPHACQFLVAFTCKSAKSLHQFSIVLASKFRSCFPFHLRISXILRTLLMSXXGIGVKCGQRSRTLNRXXYLLFVVQKKREIRKFRSVYTRQTFWCYLHIFKAPVTFQMQMSQKHKMSYDSSRFSIEPAQTMQPTXSVCIFEQYCTLESSTNNXXFPSLNSPSTVSFSPNNSPVSKLQSKPNVLSSQNSLEIVNESLENKSFLTLNDDELRHKIRELESAMLGHDTDNTYDTIIPEESDSFLKEAERWKRMMEMISRGDLKEMLCTCAKAVAGNDMETTEWLMSELRKMVSVSGNPIQRLGAYMLEALVARLASSGSTIYKVLKCKEPTGSELLSHMHLLYEICPYLKFGYMSANGAIAEVMKEESEVHIIDFQINQGIQWVSLIQAVAGRPGAPPKIRITGFDDSTSAYAREGGLEIVGARLSRLAQSYNVPFEFHAIRAAPTEVELKDLALQPGEAIAVNFAMMLHHVPDECVDSRNHRDRLVRLAKCLSPKIVTLVEQESHTNNLPFFPRFVETMNYYLAIFESIDVALPREHKERINVEQHCLAREVVNLIACEGAERVERHELLKKWRSRFTMAGFTPYPLNSFVTCSIKNLQQSYQGHYTLEERDGALCLGWMNQVLITSCAWR

SEQ ID NO: 13721 - protein, 585 aa, Glycine max
  unsure (1)..(585): unsure at all Xaa locations
ILRTLLMSSWNWSKMWTTITDLKXKYLLFVVQKKREIRKFRSVYTRQTFWCYLHIFKAPVTFQMQMSQKHKMSYDSSRFSIEPAQTMQPTXSVCIFEQYCTLESSTNNXXFPSLNSPSTVSFSPNNSPVSKLQSKSNVLSSQNSLEIVNESLENESFLTLNDDELRHKIRELESAMLGHDTDNTYDTIIPEESDSFLKEAERWKRMMEMISRGDLKEMLCTCAKAVAGNDMETTEWLMSELRKMVSVSGNPIQRLGAYMLEALVARLASSGSTIYKVLKCKEPTGSELLSHMHLLYEICPYLKFGYMSANGAIAEVMKEESEVHIIDFQINQGIQWVSLIQAVAGRPGAPPKIRITGFDDSTSAYAREGGLEIVGARLSRLAQSYNVPFEFHAIRAAPTEVELKDLALQPGEAIAVNFAMMLHHVPDECVDSRNHRDRLVRLAKCLSPKIVTLVEQESHTNNLPFFPRFVETMNYYLAIFESIDVALPREHKERINVEQHCLAREVVNLIACEGEERVERHELLKKWRSRFTMAGFAPYPLNSFITCSIKNLQRSYRGHYTLEERDGALCLGWMNQVLITSCAWR

SEQ ID NO: 13722 - protein, 548 aa, Glycine max
  unsure (1)..(548): unsure at all Xaa locations
MQTSQKHPSSAGVHFYHQPVQGIYQMLQSNLCHDSSSPCKEQYFTLESCPAPTTLDCDDSPSYASVSSKRTPFSPQGSQSCYSDHQQSSDNTYGSPISGLSSVXXDGHELKHKLRELEISLLGPDNQTVAAAASSRVASRDHLSWLNXNWDQIAENVAQFDLKGVLRVCAQAVSDDDVPTARGWMDNVLGKLVSVSGDPIQRLGAYLLEGLRARLESSGNLIYKSLKCEQPTSKELMSYMHILYQICPYWKFAYISANAVIQETMANESRIHIIDFQIAQGTQWHLLIQALAHRPGGPPSLRVTGVDDSQSIHARGGGLQIVGERLSDFARSCGVPFEFRSAAISGCEVVRGNIEVLPGEALAVSFPYVLHHMPDESVSTENHRDRLLRLVKRLSPKVVTIVEQESNTNTSPFFHRFVETLDYYTAMFESIDVACPRDDKKRISAEQHCVARDIVNMIACEGVERVERHELLGKWRSRLSMAGFKQCQLSSSVMVAIQNLLKEFSQNYRLEHRDGALYLGWMNRHMATSSAWRXNSLIREFASFLTFN

SEQ ID NO: 13723 - protein, 435 aa, Glycine max
  unsure (1)..(435): unsure at all Xaa locations
XSTADDSYELKNKLRELEISLLGPDSDIVDSCRCSYNGGSKYNWDQIVEMIPKLNLKEVLIRCAQAVADDDIETAVGFMNNAREMVSVGGDPIQRLGAYMLEGLRARLESSGSIIYKALKCEQPTSNDLMTYMHILYQICPYWKFAYTSANAVIAEAVLNDSRIRIIDVLGSSSSRWLLLIQALASRPGGPPFVHVTGVDDSQSFHARGGGLHIVGKRLSDYAKSCGVPFEFHSAAMCGSEVELENLVIQPGEALVVNFPFVLHHMPDESVSTENHRDRLLRLVKSLSPKVVTLVEQESNTNTSPFFQRFAETLSYYTAMFESIDVALPRDDKQRINAEQHCVARDIVNMVACEGDERVERHELLGKWRSRFSMAGFAPCPLSSLVTDAVRNMLNEFNENYRLGYRDGALYLGWKNRAMCTSSAWRCYXLIVIAS

SEQ ID NO: 13724 - protein, 819 aa, Pisum sativum
MAACALFNGVGGGNTTPDETNNNSTSNSSNISTEDFHNMPQQQPHHSERKLLRKRMASEMELQLHNNNNNNDYHRFSRRTNNTSSLNCSLPATTQKGVTTTTTTTLASSGNNNNNNNNNNNYHYHNNNNNSIINNNNNNVALSRDNVAIQNFPTVTVTTNYSTMLLPSSCSSNLNNSSTSAANYTHYQQPLVEEQNTLPEICGFSGLPLFPSQNNQTNRTNNNSSNNRNNTNTVVDVVSSSPSMEETSATTNWIDGILKDLIHTSNSVSIPQLINNVREIIYPCNPNLALVLEHRLRLLTEPNTCVPERKRNSTEQSGVNVNGNVLAASNVNNSSVKLMNRVDDVVPTSLHFSDSSTLLNQNQNQNMFPNWGATQINNNNNPSVSLVTLPSQPLSTQQDQQHQLQQHPEDLAPATTTTTTSAELALARKKKEEIKEQKKKDEEGLHLLTLLLQCAEAVSAENLEQANKMLLEISQLSTPFGTSAQRVAAYFSEAISARLVSSCLGIYATLPVSSHTPHNQKVASAFQVFNGISPFVKFSHFTANQAIQEAFEREERVHIIDLDIMQGLQWPGLFHILASRPGGPPYVRLTGLGTSMETLEATGKRLSDFANKLGLPFEFFPVAEKVGNIDVEKLNVSKSEAVAVHWLQHSLYDVTGSDTNTLWLLQRLAPKVVTVVEQDLSNAGSFLGRFVEAIHYYSALFDSLGSSYGEESEERHVVEQQLLSREIRNVLAVGGPSRSGEIKFHNWREKLQQCGFRGVSLAGNAATQASLLLGMFPSEGYTLVEDNGILKLGWKDLCLLTASAWRPPYHTNTIIPHHN

SEQ ID NO: 13725 - protein, 428 aa, Lycopersicon esculentum
MLGSFGSSSSQSHPHHDEESSDHHQQRRFTATATTITTTTITTSPAIQIRQLLISCAELISQSDFSAAKRLLTILSTNSSPFGDSTERLVHQFTRALSLRLNRYISSTTNHFMTPVETTPTDSSSSSSLALIQSSYLSLNQVTPFIRFTQLTANQAILEAINGNHQAIHIVDFDINHGVQWPPLMQALADRYPAPTLRITGTGNDLDTLRRTGDRLAKFAHSLGLRFQFHPLYIANNNHDHDEDPSIISSIVLLPDETLAINCVFYLHRLLKDREKLRIFLHRVKSMNPKIVTIAEKEANHNHPLFLQRFIEALDYYTAVFDSLEATLPPGSRERMTVEQVWFGREIVDIVAMEGDKRKERHERFRSWEVMLRSCGFSNVALSPFALSQAKLLLRLHYPSEGYQLGVSSNSFFLGWQNQPLFSISSWR

SEQ ID NO: 13726 - protein, 538 aa, Dubautia arborea
MKRSRERKKEAKTTSSVPDSGGMDELLEVLGYKVKSTDMADVAQKLEQLEMVMGEDGVLQLSDTVHYNPSDLSGWVQSMLSVLNENTPPSDHIVLSGDSSTTMIDFSNSSEIVVHGKQGSKMHEDDPYDLRAIAGGAIYGGESESSVRGNGNGNGIKRMKSTAVGSVDVQPESPRRVVLVDSQEAGIRLVHTLMACAEAIQHNDLKLADALVKHVGILVASQAGAMAKVATYFAGALAQRIYNIYPQNALETSCYEILQMHFYETCPYLKFAHFTANQAILEAFAGATRVHVIDFSLKQGMQWPALMQALALRSGGPPAFRLTGIGPPQPDNSDALQQVGWKLAQLADTIGVEFEFRGFVANSIADIDANMLNIRASETEVVAVNSVFEVHRLLARPGAVEKVLSGITKMKPKIVTLVEQESNHNGAVFMERFNEALHYYSTMFDSLESSALTLPNSQDDLVMSEVYLGRQICNVVACEGADRVERHETLTQWRVRMNSAGFEPVHLGSNAFKQASMLLALFAGGDGYRVEENDGCLM

SEQ ID NO: 13727 - protein, 540 aa, Dubautia arborea
MKRSRERKKEAKTTSSVPDSGGMDELLEVLGYKVKSTDMADVAQKLEQLEMVMGEDGVLQLSDTVHYNPSDLSGWVQSMLSVLNENNNTPPSDHIVLSGDSSTTMIDFSNSSEIVVHGKQGSKMHEDDPYDLRAIAGGAIYGGESESSVRGNGNGNGIKRMKSTAVGSVDVQPESPRRVVLVDSQEAGIRLVHTLMACAEAIQHNDLKLADALVKHVGILVASQAGAMAKVATYFAGALAQRIYNIYPQNALETSCYEILQMHFYETCPYLKFAHFTANQAILEAFAGATRVHVIDFSLKQGMQWPALMQALALRSGGPPAFRLTGIGPPQPDNSDALQQVGWKLAQLADTIGVEFEFRGFVANSIADIDANMLNIRASETEVVAVNSVFEVHRLLARPGAVEKVLSGITKMKPKIVTLVEQESNHNGAVFMERFNEALHYYSTMFDSLESSALTLPNSQDDLVMSEVYLGRQICNVVACEGADRVERHETLTQWRVRMNSAGFEPVHLGSNAFKQASMLLALFAGGDGYRVEENDGCLM

SEQ ID NO: 13728 - protein, 534 aa, Dubautia arborea
ERKKEAKTTSSVPDSGGMDELLEVLGYKVKSTDMADVAQKLEQLEMVMGEDGILQLSDTVHYNPSDLSGWVQSMLLVLNDNNTNNTAHDSGHILLPGDSSTTMIDFSSEIVVHGKPGSKIHLDDDLRAIAGGAIYRSESESSMPGNGNGVKRMKTTVAGSEVVDVQPESPRPVVLVDSLEAGIRLVHTLMACAEAIQHNDLKLADALVKHVGILVASQAGAMAKVATYFAGALAQRIYNIYPQNALETSCYEILQMHFYETCPYLKFAHFTANQAILEAFAGATRVHVIDFSLNQGIQWPALMQALALRSGGPAAFRLSGIGPPQPDNSDALQQVGWKLAQLADTIGVEFEFRGFVANSIADIDANILDIRAPETEVVAVNSVFEVHRLLARPGAVEKVLSSITGMKPKIVTLVEQESNHNGNVFMERFNEALHYYSTMFDSLESSALTLPNSQDDLVMSEVYLGRQICNVVACEGTDRVERHETLTQWRVRMNSAGFEPVHLGSNAFKQASMLLALFADGDGYRVEENDGCLM

SEQ ID NO: 13729 - protein, 537 aa, Dubautia menziesii
ERKKEAKTTSSVPDSGGMDVLLEVLGYKVKSTDMADVAQKLEQLEMVMGEDGILQLSDTVHYNPSDLSGWVQSMLLVLNDNNNNTAHDSGHILLPGDSSTTMIDFSSEIVVHGKPGSKIHLDDDLRAIAGGAIYRSESESSMPGNGNPNGNGVKRMKTTVAGSEVVDVQPESPRPVVLVDSQEAGIRLVHTLMACAEAIQHNDLKLADALVKHVGILVASQAGAMAKVATYFAGALAQRIYNIYPQNALETSCYEILQMHFYETCPYLKFAHFTANQAILEAFAGATRVHVIDFSLNQGMQWPALMQALALRSGGPPAFRLTGIGPPQPDNSDALQQVGWKLAQLADTIGVEFEFRGFVANSIADIDANILDIRAPETEVVAVNSVFEVHRLPRRPGAVEKVLSSITGMKPKIVTLVEQESNHNGNVFKERFNEALHYYATMFDSLESSALTLPNSQDDLVMSEVYLGRQICNVVACEGTDRVERHETLTQWRVRMNSAGFEPVHLGSNAFKQASMLLALFADGDGYRVEENDGCLM

SEQ ID NO: 13730 - protein, 536 aa, Dubautia menziesii
MKRSRERKKEAKTTSSVPDSGGMDELLEVLGYKVKSTDMADVAQKLEQLEMVMGEDGVLQLSDTVHYNPSDLSGWVQSMLSVLNDNTPPSDHIVLSGDSSTTMIDFSNSSEIVVHGKQGSKMHEDDPYDLRAIAGGAIYGGESESSVRGNGNGIKRMKSTAVGSVDVQPESPRPVVLVDSQEAGIRLVHTLMACAEAIQHNDLKLADALVKLVGILVASQAGAMAKVATYFAGALAQRIYNIYPQNALETSCYEILQMHFYETCPYLKFAHFTANQAILEAFAGATRVHVIDFSLKQGMQWPALMQALALRSGGPPAFRLTGIGPPQPDNSDALQQVGWKLAQLADTIGVEFEFRGFVANSIADIDANMLDIRASETEVVAVNSVFEVHRLLARPGAVEKVLSGITKMKPKIVTLVEQESNHNGAVFMERFNEALHYYSTMFDSLESSALTLPNSQDDLVMSEVYLGRQICNVVACEGADRVERHETLTQWRVRMNSAGFEPVHLGSNAFKQASMLLALFAGGDGYRVEENDGCLM

SEQ ID NO: 13731 - protein, 548 aa, Carlquistia muirii
MKRSRERKKEAKTTSSVPDSGGMDELLEVLGYKVKSTDMADVAQKLEQLEMVMGEDGVLQLSDTVHYNPSDLSGWVQSMLLVLNDDNNNNNTADDSDHIFLPGNSLTTMIDFSNSTETVVHGKQRSKLHEDDPYDLRAIAGGAIYRSESESSIRGNGNPNGNGMKRMKTTAAGSEVVDVQPESPRPVVLVDSQEAGIRLVHTLMACAEAIQHNDLKLADALVKHVGILVASQAGAMAKVATYFAGALAQRIYNIYPQNAIETSCYEILQMHFYETCPYLKFAHFTANQAILEAFAGATRVHVIDFSLNQGMQWPALMQALALRSGGPPAFRLTGIGPPQPDNSDVLQQVGWKLAQLADTIGVEFEFRGFVANSIADIDVSMLDIRAPDTEVVAVNSVFEVHRLLARPGAVEKVLSSITGMKPKIVTLVEQESNHNGAVFMERFNEALHYYSTMFDSLESSALTLPNNQDDLVMSEVYLGRQICNVVACEGTERVERHETLTQWRVRMNLAGFEPVHLGSNAFKQASMLLALFAGGDGYKVEENDGCLM

SEQ ID NO: 13732 - protein, 548 aa, Carlquistia muirii
MKRSREHKKEAKSTSSVPDSGGMDELLEVLGYKVKSTDMADVAQKLEQLEMVMGEDGVLQLSDTVHYNPSDLSGWVQSMLLVLNDDNNNNNTADDSDHIFLPGNSLTTMIDFSNSTETVVHGKQRSKLHEDDPYDLRAIAGGAIYRSESESSMRGNGNPNGNGMKRMKTTAAGSEVVDVQPESPRPVVLVDSQEAGIRLVHTLMACAEAIQHNDLKLADALVKHVGILVASQAGAMAKVATYFAGALAQRIYNIYPQNAIETSCYEILQMHFYETCPYLKFAHFTANQAILEAFAGATRVHVIDFSLNQGMQWPALMQALALRSGGPPAFRLTGIGPPQPDNSDVLQQVGWKLAQLADTIGVEFEFRGFVANSIADIDVSMLDIRAPDTEVVAVNSVFEVHRLLARPGAVEKVLSSITGMKPKIVTLVEQESNHNGAVFMERFNEALHYYSTMFDSLESSALTLPNNQDDLVMSEVYLGRQICNVVACEGTERVERHETLTQWRVRMNSAGFEPVHLGSNAFKQASMLLALFAGGDGYKVEENDGCLM

SEQ ID NO: 13733 - protein, 538 aa, Wilkesia gymnoxiphium
MKRSRERKKEAKTTSSVPDSGGMDELLEVLGYKVKSTDMADVAQKLEQLEMVMGEDGVLQLSDTVHYNPSDLSGWVQSMLSVLNDNNNTPPSDHIVLSGDSSTTMIDFSNSSEIVVHGKQGSKMHEDDPYDLRAIAGGAIYGGESESLVRGNGNGIKRMKSTAVGSVDVQPESPRPVVLVDSQEAGIRLVHTLMACAEAIQHNDLKLADALVKHVGILVASQAGAMAKVATYFAGALAQRIYNIYPQNALETSCYEILQMHFYETCPYLKFAHFTANQAILEAFAGATRVHVIDFSLKQGMQWPALMQALALRSGGPPAFRLTGIGPPQPDNTDALQQVGWKLAQLADTISVEFEFRGFVANSIADIDANMLDIRPSETEVVAVNSVFEVHRFLARPGDVEKVLSGITKMKPKIVTLVEQESNHNGAVFMERFNEALHYYSTMFDSLESSALTLPNSQDDLVMSEVYLGRQICNVVACEGADRVERHETLTQWRVRMNSAGFEPVHLGSNAFKQASMLLALFAGGDGYRVEENDGCLM

SEQ ID NO: 13734 - protein, 473 aa, Oryza sativa
  unsure (1)..(473): unsure at all Xaa locations
MVLILPIALHLLTASLLLAGAPCLIMIATQTTRTIPLQFNRTCASCVTEITDLQIKLRELENAILGPXXLDIAYDSPDALQPNIMATPENWRQLLGINTGDLKQVIIACGKAVAENDVRLTELLISELGQMVSVSGDPLQRLGAYMLEGLVARLSSSGSKIYKSLXXCKEPTSSELISFXHLLYEICPFFKFGYMSANGAIAEAIKGENFVHIIDFQIAQGSQWMTLIQALAARPGGPPFLRITGIDDSNSAYARGGGLDIVGMRLYKVAQSFGLPFEFNAVPAASHEVYLEHLDIRVGEVIVVNFAYQLHHTPDESVSTENHRDRILRMVKSLSPRLVTLVEQESNTNTRPFFPRYLETLDYYTAMFESIDVALPRDDKRRMSAEQHCVARDIVNLIACEGAERVERHEVFGKWKARLTMAGFRPYPLSSVVNSTIKTLLHTYNSFYRLEERDGVLYLGWKNRVLVVSSAWC

SEQ ID NO: 13735 - protein, 266 aa, Tripsacum dactyloides
ASADPSTDSAREPKRMRTGGGSTSSSSSSSSSMDGGRTRSSVVEAAPPATQASAAANGPAVPVVVVDTQEAGIRLVHALLACAEAVQQENFSAAEVLVKQIPMLASSQGGAMRKVAAYFGEALARRVYRFRPPPDSSLLDAAFADLLHAHFYESCPYLKFAHFTANQAILEAFAGCRRVHVADFGIKQGMQWPALLQALALRPGGPPSFRLTGVGPPQPDETDALQQVGWKLAQFAHTIRVDFQYRGLVAATLADLEPFMLQPEGD

SEQ ID NO: 13736 - protein, 364 aa, Triticum aestivum
  unsure (1)..(364): unsure at all Xaa locations
XGKAVAANDMYATELLISELGQLVSVSGDPMQRLGAYMLEGLVARLSFSGSKLYKSLKCKEPTSSELMSYMHLLCEICPFYKFGYMSANGAIAEAIKGENFVHIIDFQIAQGSQWITIIQALAARPGGPPFLRITGIDDSNSAYARGGGLDMVGTRLHSVSASCGLPFEFNAVHAASHEVYIQHLDTRPGEAIVVDFAYQLHPPPRESVSVENHRDRIIRMIKSLSPRVVTLVEQESNTNTSAFLPRYLETLDYYTAMFESIDVALPRDDKRRISTEQHCVARDIVNLIACEGAERVERHEVFGKWKARFAMAGFRPYPLSSVVNNTIKTLLDSYHSCYRLEERDGVLYLGWKGRVLVVSSAWC

SEQ ID NO: 13737 - protein, 365 aa, Triticum aestivum
  unsure (1)..(365): unsure at all Xaa locations
XRNAARSTPPYLPAPAAMETLLSPSALLGPLRGSCTRMPEAPAALLSFSRRELXAGFACCEPTGCGLRCYMHLLCEGCAFAEFPLALALAPAPAPVAAAEFVVLIDGPPAQGSVWVSRMRAHPASPGGPPFLRITGIDDSNSAYAXRGGGLDMVGTRLHSISASCGLPFEFNAVHAASHEVYIQHLDIRPGEAIVVNFAYQLHHTPRESVSVENHRDRIIRMIKSLSPRVVTLVEQESNTNTSAFLPRYLETLDYYTAMFESRDVALPRDDKRRISTEQHCVARDIVNLIACEGAERVERHEVFGKWKARFAMAGFRPYPLSSVVNNTIKTLLDSYHSCYRLEERDGVLYLGWKGRVLVVSSAWC

SEQ ID NO: 13738 - protein, 245 aa, Triticum aestivum
  unsure (1)..(245): unsure at all Xaa locations
XALAARASGPPYLRITGIDDSDSAYARGGGLDIVGRRLCNIAQSCCLPFEFNAVNAASHEVTLEHLDIRMGEAIAVNFAYQLHHTPDESVCIENHRDRILRMVKSLSPRVVTLVEQEANTNTAPFFSRYMETLDYYTAMFEAIDVACPRDDKVRMSTEQHCVARDIVNLIACEGAERVERHEPFGKWRSRLAMAGFRPYPLSALVNNTIRTLLNDYNSYYKLEEKDGVIYLGWKNRKLVVSSAWR

SEQ ID NO: 13739 - protein, 581 aa, Zea mays subsp. mays
MKREYQDAGGSGGDMGSSKDKMMAAAAGAGEQEEEDVDELLAALGYKVRSSDMADVAQKLEQLEMAMGMGGVGGAGATADDGFVSHLATDTVHYNPSDLSSWVESMLSELNAPPAPLPPATPAPRLASTSSTVTSGAAAGAGYFDLPPAVDSSSSTYALKPIPSPVAAPSADPSTDSAREPKRMRTGGGSTSSSSSSSSSMDGGRTRSSVVEAAPPATQASAAANGPAVPVVVVDTQEAGIRLVHALLACAEAVQQENFSAAEALVKQIPMLASSQGGAMRKVAAYFGEALARRVYRFRPPPDSSLLDAAFADLLHAHFYESCPYLKFAHFTANQAILEAFAGCRRVHVVDFGIKQGMQWPALLQALALRPGGPPSFRLTGVGPPQPDETDALQQVGWKLAQFAHTIRVDFQYRGLVAATLADLEPFMLQPEGDDTDDEPEVIAVNSVFELHRLLAQPGALEKVLGTVRAVRPRIVTVVEQEANHNSGTFLDRFTESLHYYSTMFDSLEGAGAGSGQSTDASPAAAGGTDQVMSEVYLGRQICNVVACEGAERTERHETLGQWRSRLGGSGFAPVHLSSNA

SEQ ID NO: 13740 - protein, 124 aa, Gossypioides kirkii
IEKVVSSIKAMKPKIVTVVEQEANHNGPVFLDRFTEALHYYSTLFDSLEGSGVAPPSQDLAMSELYLGRQICNVVACEGMDRVERHEPLTQWRTRMETAGFSPVHLGSNAYKQASMLLALFAGG

SEQ ID NO: 13741 - protein, 142 aa, Brassica rapa subsp. pekinensis
KNLGVRPGEALAVNFAFVLHHMSDESVSTENHRDRLLRMVKSLSPKVVTLVEQESNTNTAAFFPRFKETMDYYDAMFESIDVTLPRNHKQRINVEQHCLARDVVNIIACEGADRVERHELLGKWRSRFGMAGFTPYPLSPLV

SEQ ID NO: 13742 - protein, 538 aa, Argyroxiphium kauense
MKRSRERKKEAKTTSSVPDSGGMDELLEVLGYKVKSTDMADVAQKLEQLEMVMGEDGVLQLSDTVHYNPSDLSGWVQSMLSVLNDNNNTPPSDHIVLSGDSSTTMIDFSNSSEIVVHGKQGSKMHEDDPYDLRAIAGGAIYGGESESSVRGNGNGIKRVKSTAVGSVDVQPESPRPVVLVDSQEAGIRLVHTLMACAEAVQHNDLKLADALVKHVGILVALQAGAMAKVATYFAGALAQRIYNIYPQNALETSCYEILQMHFYETCPYLKFAHFTANQAILEAFAGATRVHVIDFSLKQGMQWPALMQALALRSGGPPAFRLTGIGPPQPDNSDALQQVGWKLAQLADTIGVEFEFRGFVANSIADIDANILDIRAPETEVVAVNSVFEVHRLLARPGAVEKVLSGITKMKPKIVTLVEQESNHNSAVFMERFNEALHYYSTMFDSLESSALTLPNSQDDLVMSEVYLGRQICNVVACEGADRVERHETLTQWRVRMNSAGFEPVHLGSNAFKQASMLLALFAGGDGYRVEENDGCLM

SEQ ID NO: 13743 - protein, 542 aa, Argyroxiphium kauense
MKRSRERKKEAKTTSSVPDSGGMDELLEVLGYKVKSTDMADVAQKLEQLEMVMGEDGILQLSDTVHYNPSDLSGWVQSMLLVLNDNNNNTAHDSGHILLPGDSSTTMIDFSSEIVVHGKPGSKIHLDDDLRAIAGGAIYRSESESSMPGNGNPNENGVKRMKTTAAGSEVVDVQPESPRPVVLVDSQEAGIRLVHTLLACAEAIQHNDLKLADALVKHVGILVALQAGAMAKVATYFAGALAQRIYNIYPQNALETSCYEILQMHFYETCPYLKFAHFTANQAILEAFADATRVHVIDFSLNQGMQWPALMQALALRSGGPPAFRLTGIGPPQPDNSDALQQVGWKLAQLADTIGVEFEFRGFVANSIADIDANILDIRAPETEVVAVNSVFEVHRLLARPGAVEKVLSSITGMKPKIVTLVEQESNHNGNVFMERFNEALHYYSTMFDSLEGSALTLPNSQDDLVMSEVYLGRQICNVVACEGTDRVERHETLTQWRVRMNSAGFEPVHLGSNAFKQASMLLALFADGDGYRVEENDGCLM

SEQ ID NO: 13744 - protein, 544 aa, Argyroxiphium kauense
MKRSRERKKEAKTTSSVPDSGGMDELLEVLGYKVKSTDMADVAQKLEQLEMVMGEDGILQLSDTVHYNPSDLSGWVQSMLLVLNDNNNNNNTAHDSGHILLPGDSSTTMIDFSSEIVVHGKPGSKIHLDDDLRAIAGGAIYRSESESSMPGNGNPNENGVKRMKTTAAGSEVVDVQPESPRPVVLVDSQEAGIRLVHTLLACAEAIQHNDLKLADALVKHVGILVALQAGAMAKVATYFAGALAQRIYNIYPQNALETSCYEILQMHFYETCPYLKFAHFTANQAILEAFADATRVHVIDFSLNQGMQWPALMQALALRSGGPPAFRLTGIGPPQPDNSDALQQVGWKLAQLADTIGVEFEFRGFVANSIADIDANILDIRAPETEVVAVNSVFEVHRLLARPGAVEKVLSSITGMKPKIVTLVEQESNHNGNVFMERFNEALHYYSTMFDSLEGSALTLPNSQDDLVMSEVYLGRQICNVVACEGTDRVERHETLTQWRVRMNSAGFEPVHLGSNAFKQASMLLALFADGDGYRVEENDGCLM

SEQ ID NO: 13745 - protein, 538 aa, Argyroxiphium sandwicense subsp. macrocephalum
MKRSRERKKEAKTTSSVPDSGGMDELLEVLGYKVKSTDMADVAQKLEQLEMVMGEDGVLQLSDTVHYNPSDLSGWVQSMLSVLNDNNNTPPSDHIVLSGDSSTTMIDFSNSSEIVVHGKQGSKMHEDDPYDLRAIAGGAIYGGESESSVRGNGNGIKRMKSTAVGSVDVQPESPRPVVLVDSQEAGIRLVHTLMACAEAIQHNDLKLADALVKHVGILVASQAGAMAKVATYFAGALAQRIYNIYPQNALETSCYEILQMHFYETCPYLKFAHFTANQAILEAFAGATRVHVIDFSLKQGMQWPALMQALALRSGGPPAFRLTGIGPPQPDNSDALQQVGWKLAQLADTIGVEFEFRGFVANSIADIDANMLDIRPSETEVVAVNSVFEVHRLLARPGAVEKVLSGITKMKPKIVTLVEQESNHNGAVFMERFNEALHYYSTMFDSLESSALTLPNSQDDLVMSEVYLGRQICNVVACEGADRVERHETLTQWRVRMNSAGFEPVHLGSNAFKQASMLLALFAGGDGYRVEENDGCLM

SEQ ID NO: 13746 - protein, 537 aa, Argyroxiphium sandwicense subsp. macrocephalum
MKRSRERKKEAKTTSSVPDSGGMDELLEVLGYKVKSTDMADVAQKLEQLEMVMGEDGVLQLSDTVHYNPSDLSGWVQSMLSVLNDNNTPPSDHIVLSGDSSTTMIDFSNSSEIVVHGKQGSKMHEDDPYDLRAIAGGAIYGGESESSVRGNGNGIKRMKSTAVGSVDVQPESPRPVVLVDSQEAGIRLVHTLMACAEAIQHNDLKLADALVKHVGILVASQAGAMAKVATYFAGALAQRIYNIYPQNALETSCYEILQMHFYETCPYLKFAHFTANQAILEAFAGATRVHVIDFSLKQGMQWPALMQALALRSGGPPAFRLTGIGPPQPDNSDALQQVGWKLAQLADTIGVEFEFRGFVANSIADIDANMLDIRPSETEVVAVNSVFEVHRLLARPGAVEKVLSGITKMKPKIVTLVEQESNHNGAVFMERFNEALHYYSTMFDSLESSALTLPNSQDDLVMSEVYLGRQICNVVACEGADRVERHETLTQWRVRMNSAGFEPVHLGSNAFKQASMLLALFAGGDGYRVEENDGCLM

SEQ ID NO: 13747 - protein, 542 aa, Argyroxiphium sandwicense subsp. macrocephalum
MKRSRERKKEAKTTSSVPDSGGMDELLEVLGYKVKSTDMADVAQKLEQLEMVMGEDGILQLSDTVHYNPSDLSGWVQSMLLVLNDNNNNTAHDSGHILLPGDSSTTMIDFSSEIVVHGKPGSKIHLDDDLRAIAGGAIYRSESESSMPGNGNPNENGVKRMKTTAAGSEVVDVQPESPRPVVLVDSQEAGIRLVHTLLACAEAIQHKDLKLADALVKHVGILVASQAGAMAKVATYFAGALAQRIYNIYPQNALETSCYEILQMHFYETCPYLKFAHFTANQAILEAFADATRVHVIDFSLNQGMQWPALMQALALRSGGPPAFRLTGIGPPQPDNSDALQQVGWKLAQLADTIGVEFEFRGFVANSIADINANILDIRAPETEVVAVNSVFEVHRLLARPGAVEKVLSSITGMKPKIVTLVEQESNHNGNVFMERFNEALHYYSTMFDSLESSALTLPNSQDDLVMSEVYLGRQICNVVACEGTDRVERHETLTQWRVRMNSAGFEPVHLGSNAFKQASMLLALFADGDGYRVEENDGCLM

SEQ ID NO: 13748 - protein, 541 aa, Argyroxiphium sandwicense subsp. macrocephalum
MKRSRERKKEAKTTSSVPDSGGMDELLEVLGYKVKSTDMADVAQKLEQLEMVMGEDGILQLSDTVHYNPSDLSGWVQSMLLVLNDNNNTAHDSGHILLPGDSSTTMIDFSSEIVVHGKPGSKIHLDDDLRAIAGGAIYRSESESSMPGNGNPNENGVKRMKTTAAGSEVVDVQPESPRPVVLVDSQEAGIRLVHTLLACAEAIQHKDLKLADALVKHVGILVASQAGAMAKVATYFAGALAQRIYNIYPQNALETSCYEILQMHFYETCPYLKFAHFTANQAILEAFADATRVHVIDFSLNQGMQWPALMQALALRSGGPPAFRLTGIGPPQPDNSDALQQVGWKLAQLADTIGVEFEFRGFVANSIADIDANILDIRAPETEVVAVNSVFEVHRLLARPGAAEKVLSSITGMKPKIVTLVEQESNHNGNVFMERFNEALHYYSTMFDSLESSALTLPNSQDDLVMSEVYLGRQICNVVACEGTDRVERHETLTQWRVRMNSAGFEPVHLGSNAFKQASMLLALFADGDGYRVEENDGCLM

SEQ ID NO: 13749 - protein, 536 aa, Dubautia ciliolata subsp. glutinosa
MKRSRERKKEAKTTSSVPDSGGMDELLEVLGYKVKSTDMADVAQKLEQLEMVMGEDGVLQLSDTVHYNPSDLSGWVQSMLSVLNDNTPPSDHMVLSGDSSTTMIDFSNSSKIVVHGKQGSKMHEDDPYDLRAIAGGAIYGGESESSVRGNGNGHKRMKSTAVGSVDVQPESPRPVVLVDSQEAGIRLVHTLMACAEAIQHNDLKLADALVKHVGILVASQAGAMAKVATYFAGALAQRIYNIYPQNALETSCYEILQMHFYETCPYLKFAHFTANQAILEAFAGATRVHVIDFSLKQGMQWPALMQALALRSGGPPAFRLTGIGPPQPDNSDALQQVGWKLAQLADTIGVEFEFRGFVANSIADIDANMLNIRASETEVVAVNSVFEVHRLLARPGAVEKVLSGITKMKPKIVTLVEQESNHNGAVFMERFNEALHYYSTMFDSLESSALTLPNSQDDLVMSEVYLGRQICNVVACEGADRVERHETLTQWRVRMNSAGFEPVHLGSNAFKQASMLLALFAGGDGYRVEENDGCLM

SEQ ID NO: 13750 - protein, 536 aa, Dubautia ciliolata subsp. glutinosa
MKRSRERKKEAKTTSSVPDSGGMDELLEVLGYKVKSTDMADVAQKLEQLEMVMGEDGVLQLSDTVHYNPSDLSGWVQSMLSVLNDNTPPSDHMVLSGDSSTTMIDFSNSSEIVVHGKQGSKMHEDDPYDLRAIAGGAIYGGESESSVRGNGNGHKRMKSTAVGSVDVQPESPRPVVLVDSQEAGIRLVHTLMACAEAIQHNDLKLADALVKLVGILVASQAGAMAKVATYFAGALAQRIYNIYPQNALETSCYEILQMHFYETCPYLKFAHFTANQAILEAFAGATRVHVIDFSLKQGMQWPALMQALALRSGGPPAFRLTGIGPPQPDNSDALQQVGWKLAQLADTIGVEFEFRGFVANSIADIDANMLNIRASETEVVAVNSVFEVHRLLARPGAVEKVLSGITKMKPKIVTLVEQESNHNGAVFMERFNEALHYYSTMFDSLESSALTLPNSQDDLVMSEVYLGRQICNVVACEGADRVERHETLTQWRVRMNSAGFEPVHLGSNAFKQASMLLALFAGGDGYRVEENDGCLM

SEQ ID NO: 13751 - protein, 537 aa, Dubautia knudsenii
ERKKEAKTTSSVPDSGGMDELLEVLGYKVKSTDMADVAQKLEQLEMVMGEDGILQLSDTVHYNPSDLSGWVQTMLLVLNDDNNNTADDSGHILLPGDSSTTMIDFSSEIVVHGKPGSKIHLDDDLRAIAGGAIYRSESESLMPGNGNPNGNGVKRMKTTVAGSEVVDVQPESPRPVVLVDSQEAGIRLVHTLMACAEAIQRNELKLADALVKHVGILVASQAGAMAKVATYFAGALAQRIYNIYPQNALETSCYEILQMHFYETCPYLKFAHFTANQAILEAFAGATRVHVIDFSLNQGMQWPAFMQALALRYGGPPAFRLTGIGPPQPDNSDALQQVGWKLAQLANTIGVEFEFRGFVANSIADIDANILDIRAPETEVLAVNSVFEVHRLLARPGAVEKVLSSITGMKPKIVTLVEQESNHNGNVFMERFNEALHYYSTMFDSLESSALTLPNSQDDLVMSEVYLGRQICNVVACEGTDRVERHETLTQWRVRMNSAGFEPVHLGSNAFKQASMLLALFADGDGYRVEENDGCLM

SEQ ID NO: 13752 - protein, 537 aa, Dubautia microcephala
ERKKEAKTTSSVPDSGGMDELLEVLGYKVKSTDMADVAQKLEQLEMVMGEDGILQLSDTVHYNPSDLSGWVQTMLLVLNDDNNNAADDSSHILLPGDSSTTMIDFSSEIVVHGKPGSKIHLDDDLRAIAGGAIYRSESESLMPGNGNPNGNGVKRMKTTVAGSEVVDVQPESPRPVVLVDSHEAGIRLVHTLMACAEAIQRNDLKLADALVKHVGILVASQAGAMAKVATYFAGALAQRIYNIYPQNALETSCYEILQMHFYETCPYLKFAHFTANQAILEAFAGATRVHVIDFSLNQGMQWPAFMQALALRSGGPPAFRLTGIGPPQPDNSDALQQVGWKLAQLANMIGVEFEFRGFVANSIADIDANILDIRAPETEVVAVNSVFEVHRLLARPGAVEKVLSSITGMKPKIVTLVEQESNHNGNVFMERFNEALHYYSTMFDSLESSALTLPNSQDDLVMSEVYLGRQICNVVACEGTDRVERHETLTQWRVRMNSAGFEPVHLGSNAFKQASMLLALFADGDGYRVEENDGCLM

SEQ ID NO: 13753 - protein, 539 aa, Dubautia raillardioides
ERKKEAKTTSSVPDSGGMDELLEVLGYKVKSTDMADVAQKLEQLEMVMGEDGILQLSDTVHYNPSDLSGWVQTMLLVLNDDNNTTADDSGHILLPGDSSTTMIDFSNSSETVVHGKPGSKIHLDDDLRAIAGGAIYRSESESSMPGNGNPNGNGVKRMKTTVAGSEVVDVQPESPRPVVLVDSQEAGIRLVHTLMACAEAIQHNDLKLADALVKHVGILVASQAGAMAKVATYFAGALAQRIYNIYPQNALETSCYEILQMHFYETCPYLKFAHFTANQAILEAFAGATRVHVIDFSLNQGMQWPALMQALALRSGGPPAFRLTGIGPPQPDNSDALQQVGWKLAQLANTIGVEFEFRGFVANSIADIDANILDIRAPETEVVAVNSVFEVHRLLARPGAVEKVLSSITGMKPKIVTLVEQESNHNGNVFMERFNEALHYYSTMFDSLESSALTLPNSQDDLVMSEVYLGRQICNVVACEGTDRVERHETLTQWRVRMNSAGFEPVHLGSNAFKQASMLLALFADGDGYRVEENDGCLM

SEQ ID NO: 13754 - protein, 538 aa, Dubautia raillardioides
MKRSRERKKEAKITSSVPDSGGMDELLEVLGYKVKSTDMADVAQKLEQLEMVMGEDGVLQLSDTVHYNPSDLSGWVQSMLSVLNDYNNTPPSDHIVLSGDSSTTMIDFSNSSEIVVHGKQGSKMHEDDPYDLRAIAGGAIYGGESESSVRGNGNGIKRMKSTAVGSVDVQPESPRPVVLVDSQEAGIRLVHTLMACAEAIQHNDLKLADALVKHVVILVASQAGAMAKVSTYFAGALAQRIYNIYPQNALETSCYEILQMHFYETCPYLKFAHFTANQAILEAFAGATRVHVIDFSLKQGMQWPALMQALALRYDGPPAFRLTGIGPPQPDNSDALQQVGWKLAQLADTIGVEFEFRGFVANSIADIDADMLDIRASETEVVTVNSVFEVHRLLARPGAVEKVLSGITKMKPKIVTLVEQESNHNGAVFMERFNEALHYYSTMFDSLESSALTLPNSQDDLVMSEVYLGRQICNVVACEGADRVERHETLTQWRVRMNSAGFEPVHLGSNAFKQASMLLALFAGGDGYRVEENDGCLM

SEQ ID NO: 13755 - protein, 447 aa, Capsella rubella
MLTSFKSSSSSSEDATTETPPPPFCQLASSSSSSAATSASHHLRRLLFTAADFVSQSNFTAARNLLSILSLNSSPYGDSTQRLAHLFTKALSLRINRLQQEQDPTVATCTTNEMTMSTNSTVFTSSVCKEQFLFRTKNNNSDFESCYYLWLNQLTPFIRFGHLTANQAILDATETNDNGALHILDLDISQGLQWPPLMQALAERSSSPNSPPPSLRITGCGRDVTGLNRTGDRLTRFANSLGLQFQFHKLVIVDEDLPGLLLQIRLLALSAVQGETIAVNCVHFLYKFFNDDADLIGHFLTVIKSLNPRIVTMAEREANHGDHSFLIRFSEALDHYVAIFDSLEATLPPNSRERLTLEQRWFGKEIMDVVAAEATERKQRHRRFEIWGEMMKRFGFVNVPIGSFALSQAKLLLRLHYPSEGYNLQFLNDSLFLGWQNRLLFSVSSWK

SEQ ID NO: 13756 - protein, 531 aa, Arabidopsis thaliana
MDTLFRLVSLQQQQQSDSIITNQSSLSRTSTTTTGSPQTAYHYNFPQNDVVEECFNFFMDEEDLSSSSSHHNHHNHNNPNTYYSPFTTPTQYHPATSSTPSSTAAAAALASPYSSSGHHNDPSAFSIPQTPPSFDFSANAKWADSVLLEAARAFSDKDTARAQQILWTLNELSSPYGDTEQKLASYFLQALFNRMTGSGERCYRTMVTAAATEKTCSFESTRKTVLKFQEVSPWATFGHVAANGAILEAVDGEAKIHIVDISSTFCTQWPTLLEALATRSDDTPHLRLTTVVVANKFVNDQTASHRMMKEIGNRMEKFARLMGVPFKFNIIHHVGDLSEFDLNELDVKPDEVLAINCVGAMHGIASRGSPRDAVISSFRRLRPRIVTVVEEEADLVGEEEGGFDDEFLRGFGECLRWFRVCFESWEESFPRTSNERLMLERAAGRAIVDLVACEPSDSTERRETARKWSRRMRNSGFGAVGYSDEVADDVRALLRRYKEGVWSMVQCPDAAGIFLCWRDQPVVWASAWRPT

SEQ ID NO: 13757 - protein, 478 aa, Arabidopsis thaliana
CFNFFMDEEDLSSSSSHHNHHNHNNPNTYYSPFTTPTQYHPATSSTPSSTAAAAALASPYSSSGHHNDPSAFSIPQTPPSFDFSANAKWADSVLLEAARAFSDKDTARAQQILWTLNELSSPYGDTEQKLASYFLQALFNRMTGSGERCYRTMVTAAATEKTCSFESTRKTVLKFQEVSSWATFGHVAANGAILEAVDGEAKIHIVDISSTFCTQWPTLLEALATRSDDTPHLRLTTVVVANKFVNDQTASHRMMKEIGNRMEKFARLMGVPFKFNIIHHVGDLSEFDLNELDVKPDEVLAINCVGAMHGIASRGSPRDAVISSFRRLRPRIVTVVEEEADLVGEEEGGFDDEFLRGFGECLRWFRVCFESWEESFPRTSNERLMLERAAGRAIVDLVACEPSDSTERRETARKWSRRMRNSGFGAVGYSDEVADDVRALLRRYKEGVWSMVQCPDAAGIFLCWRDQPVVWASAWRPT

SEQ ID NO: 13758 - protein, 580 aa, Glycine max
  unsure (1)..(580): unsure at all Xaa locations
LTHSHCLFDVGRVDTLFRLVSFHQQQQPQQQXXDPSLNSTTSRTSSSSRSSRQNYYPYSHQEEEECFNFYMDEEDLSSSSSKHYYHPYQXPSSSTTQXYPTFLQTPSAPPLTLITPTPXSFSPTQPVQDFNFEFSSPNWSHNLLLESARAVADNNSTRLHHLLWMLNELSSPYGDTEQKLAAYFLRALFSRVTEAGDRTYRSLASASEKTCSFESTRKTVLKFQEVSPWTTFGHVGIHGAILEALEGNSQMHILDISNTYCTQWPMLLEALATRSEETPHLCLTTIVTGSRIGNNVQRVMKEIGTRMEKFARLMGVPFKFNVVHHYGDLSEFNFSELDIKDDEALAVNCVNSLHSVSALGNNRDALISALQALQPRIVTVVEEEADLDVGIDDEFVKGFEESLRWFRVYFEALDESFVKTSNERLMLERAAGRAVVDLVACSPADSVERRETAARWAARLHNGGLNAAPFSDEVCDDVRALLRRYKEGWSMAACSDAGIFLSWKDTPVVWASAWRPXRKDRIIIVSFGFDMGESLARVLGFFGTCGRIYIDGVFFLLFSIINYYYYWALFPIFVLLVKYI

SEQ ID NO: 13759 - protein, 568 aa, Glycine max
  unsure (1)..(568): unsure at all Xaa locations
XDTLFRLVSFHQQQQPQQQXXDPSLNSTTSRTSSSSRSSRQNYYPYSHQEEEECFNFYMDDHASAHASAHXRPTTLINPIIINNTTYPTFLQTPSAPPLTLITPTPXSFSPTQPVQDFNFEFSSPNWSHNLLLESARAVADNNSTRLHHLLWMLNELSSPYGDTEQKLAAYFLRALFSRVTEAGDRTYRSLASASEKTCSFESTRKTVLKFQEVSPWTTFGHVASNGAILEALEGNSKLHILDISNTYCTQWPMLLEALATRSEETPHLCLTTIVTGSRIGNNVQRVMKEIGTRMEKFARLMGVPFKFNVVHHYGDLSEFNFSELDIKDDEALAVNCVNSLHSVSALGNNRDALISALQALQPRIVTVVEEEADLDVGIDDEFVKGFEESLRWFRVYFEALDESFVKTSNERLMLERAAGRAVVDLVACSPADSVERRETAARWAARLHNGGLNAAPFSDEVCDDVRALLRRYKEGWSMAACSDAGIFLSWKDTPVVWASAWRPXRKDRIIIVSFGFDMGESLARVLGFFGTCGRIYIDGVFFLLFSIINYYYYWALFPIFVLLVKYI

SEQ ID NO: 13760 - protein, 446 aa, Glycine max
  unsure (1)..(446): unsure at all Xaa locations
KAEXQYIHHNRNXASRYISPYTTPKKLSPHSNNHNNIIADEAAALLDHNNMHRSNHSHTSTSRSSDSSEPSEDGKWAPKLLRECAKAISERDSSKTHHHLWMLNELASPYGDCDQKLASYFLQALFCRATESGERCYKTLSSVAEKNHSFDSARRLILKFQEVSPWTTFGHVASNGALLEALEGEPKLHIIDLSSTLCTQWPTLLEALATRNDETPHLKLTVVAIAGSVMKEVGQRMEKFARLMGVPFEFNVISGLSQITKEGLGVQEDEAIAVNCVGALRRVQVEERENLIRVFKSLGPKVVTVVEEEADFCSXEGGXFFKCFEECLKFYTLYFEMLKESFPPTSNERLMLERECSRSIVRVLACCEFDCCERRERGIQWCERLRNAFSPSGFSDDVVDDVKALLKRYQSGWSLVVTQDISGIYLTWKEEPVVWASAWKPXNILT

SEQ ID NO: 13761 - protein, 276 aa, Glycine max
  unsure (1)..(276): unsure at all Xaa locations
MDTTLFRVVSSFQHQXXNPITINPSXNSTTSSSSRSSRQQQNYPYPQEDEECFNFFMDEEDLSSSSSKHYXXPYQPHPPSTXXPSTTPSXPTPCDFEFSGKWAQDILLETARAVADKNTTRLQQLMWMLNELSSPYGDTDQKLASYFLQAFFSRISQAGDRTYRTLASASEKTCSFESTRKTVLKFQEVSPWTTFGHVASNGAILEALEGEPKLHIIDISNTYCTQWPTLFEALATRNDDTPHLRLTSVVTADXXTAQKLMKEIGARMEKFARLMX

SEQ ID NO: 13762 - protein, 155 aa, Glycine max
AVISSLRRLKPRIVTVVEEEADLDIGLEGFEFVKGFEECLRWFRVYFEALDESFPRTSNERLMLERAAGRAVVDLVACSPADSVERREKAARWARRMRGGGFNTVAFSEEVCDDVRALLRRYREGWAMTQCSDAGIFLTWKEQPVVWASAWRALT

SEQ ID NO: 13763 - protein, 629 aa, Oryza sativa (japonica cultivar-group)
MEKASKAKAEAAKGAHTHCRCLLLLPPMDTLFRLVSLQAASEQQQQQQQSASYNSRSTTSSGSRSSSHQTNASYSYYHHSSNSGGGGGGGGGYYYGGQQPPPSQYYYLEPYQEECGNAPHHQLYMDEDFSSSSSSRHFHHGARVQQQQPPASSTPTGTAPTPPLSTSSTAAGAGHGLFEAADLSFPPDLNLDFSSPASSSGGGTASSGAVGGGGGGRWASQLLLECARSVAARDSQRVQQLMWMLNELASPYGDVEQKLASYFLQGLFARLTASGPRTLRTLAAASDRNTSFDSTRRTALRFQELSPWSSFGHVAANGAILESFLEVAAAASSETQRFHILDLSNTFCTQWPTLLEALATRSADETPHLSITTVVSAAPSAPTAAVQRVMREIGQRMEKFARLMGVPFRFRAVHHSGDLAELDLDALDLREGGATTALAVNCVNSLRGVVPGRARRRDAFAASLRRLDPRVVTVVEEEADLVASDPDASSATEEGGDTEAAFLKVFGEGLRFFSAYMDSLEESFPKTSNERLALERGAGRAIVDLVSCPASESMERRETAASWARRMRSAGFSPVAFSEDVADDVRSLLRRYREGWSMREAGTDDSAAGAGVFLAWKEQPLVWASAWRP

SEQ ID NO: 13764 - protein, 545 aa, Oryza sativa
  unsure (1)..(545): unsure at all Xaa locations
MDTLFRLVSLQAASEQQQQQQQSASYNSRSTTSSGSRSSSHQTNASYSYYHHSSNSLYMDEDFSSSSSSRHFHHGARVQQQQPPASSTPTGTAPTPPLSTSSTAAGAAACSRRRTCRSRRTSTSTSRPRRPGAVGGGGGGRWASQLLLECARSVAARDSQRVQQLMWMLNELASPYGDVEQKLASYFLQGLFARLTASGPRTLRTLAAASDRNTSFDSTRRTALRFQELSPWSSFGHVAANGAILESFLEVAAAXVVGDAAVXHILDLSNTFCTQWPTLLEALATRSADETPHLSITTVVSAAPSAPTAAVQRVMREIGQRMEKFARLMGVPFRFRAVHHSGDLAELDLDALDLREGGATTALAVNCVNSLRGVAGRARRRDAFAASLRRLDPRVVTVVEEEADLVAEEGGDTEAAFLKVFGEGLRFFSAYMDSLEESFPKTSNERLALERGAGRAIVDLVSCPASESMERRETAASWARRMRSAGFSPVAFSEDVADDVRSLLRRYREGWSMREAGTDDSAAGAGVFLAWKEQPLVWASAWRPX

SEQ ID NO: 13765 - protein, 574 aa, Oryza sativa
  unsure (1)..(574): unsure at all Xaa locations
MEKASKAKAEAAKGAHTHCRCLLLLPPMDTLFRLVSLQAASEQQQQQQQSASYNSRSTTSSGSPPSQYYYLEPYQEECGNAPHHQLYMDEDFSSSSSSRHFHHGARVQQQQPPASSTPTGTAPTPPLSTSSTAAGAAACSRRRTCRSRRTSTSTSRPRRPGAVGGGGGGRWASQLLLECARSVPARDSQRVQQLMWMLNELASPYGDVEQKLASYFLQGLFARLTASGPRTLRTLAAASDRNTSFDSTRRTALRFQELSPWSSFGHVAANGAILESFLEVAAAXVVGDAAVXHILDLSNTFCTQWPTLLEALATRSADETPHLSITTVVSAAPSAPTAAVQRVMREIGQRMEKFARLMGVPFRFRAVHHSGDLAELDLDALDLREGGATTALAVNCVNSLRGVAGRARRRDAFAASLRRLDPRVVTVVEEEADLVAEEGGDTEAAFLKVFGEGLRFFSAYMDSLEESFPKTSNERLALERGAGRAIVDLVSCPASESMERRETAASWARRMRSAGFSPVAFSEDVADDVRSLLRRYREGWSMREAGTDDSAAGAGVFLAWKEQPLVWASAWRPX

SEQ ID NO: 13766 - protein, 547 aa, Oryza sativa
  unsure (1)..(547): unsure at all Xaa locations
MDTLFRLVSLQAASEQQQQQQQSASYNSRSTTSSGSPPSQYYYLEPYQEECGNAPHHQLYMDEDFSSSSSSRHFHHGARVQQQQPPASSTPTGTAPTPPLSTSSTAAGAAACSRRRTCRSRRTSTSTSRPRRPGAVGGGGGGRWASQLLLECARSVPARDSQRVQQLMWMLNELASPYGDVEQKLASYFLQGLFARLTASGPRTLRTLAAASDRNTSFDSTRRTALRFQELSPWSSFGHVAANGAILESFLEVAAAXVVGDAAVXHILDLSNTFCTQWPTLLEALATRSADETPHLSITTVVSAAPSAPTAAVQRVMREIGQRMEKFARLMGVPFRFRAVHHSGDLAELDLDALDLREGGATTALAVNCVNSLRGVAGRARRRDAFAASLRRLDPRVVTVVEEEADLVAEEGGDTEAAFLKVFGEGLRFFSAYMDSLEESFPKTSNERLALERGAGRAIVDLVSCPASESMERRETAASWARRMRSAGFSPVAFSEDVADDVRSLLRRYREGWSMREAGTDDSAAGAGVFLAWKEQPLVWASAWRPX

SEQ ID NO: 13767 - protein, 520 aa, Oryza sativa
  unsure (1)..(520): unsure at all Xaa locations
MDTLFRLVSLXXTITTTSTXASPSPPDQPHKSYPSSRGSTSSPSSHHTHNHTYYHHSHSHYNNNSNTNYYYQASSSSRQFHSGTGAPSSAPVPPPPSATTSSAGGHGLFEAADFSFPQVDISLDFSSSGRWAAQLLMECARAVAGRDSQRVQQLMWMLNELASPYGDVDQKLASYFLQGLFARLTTSGPRTLRTLATASDRNASFDSTRRTALKFQELSPWTPFGHVAANGAILESVDAAARLHILDLSNTFCTQWPTLLEALATRSSDDTPHLSITTVVPTAAPSAAAQRVMREIGQRLEKFARLMGVPFSFRAVHHSGDLADLDLAALDLREGGATAALAVNCVNALRGVARGRDAFVASLRRLEPRVVTVVEEEADLAAPEADASSEADTDAAFVKVFGEGLRFFSAYMDSLEESFPKTSNERLSLERAVGRAIVDLVSCPASQSAERRETAASWARRMRSAGFSPAAFSEDVADDVRSLLRRYKEGWSMRDAGAAAGAFLAWKEQPVVWASAWKPX

SEQ ID NO: 13768 - protein, 520 aa, Oryza sativa; identical to SEQ ID NO: 13767
  unsure (1)..(520): unsure at all Xaa locations

SEQ ID NO: 13769 - protein, 191 aa, Triticum aestivum
  unsure (1)..(191): unsure at all Xaa locations
XGIAVNCMNSLRGVVPGGARRRGAFAASLRRLEPRVVTVVEEEADLVATDPDASDEGGDTEAAFLKVFGEGLRFFSAYMDSLEESFPKTSNERLALERGAGRAIVDLVSCPASESMERRETAAAWARRLRSAGFSPVPFSEDVADDVRSLLRRYREGWSMREAGTDDSAAGAGVFLAWKEQPLVWASAWRP

SEQ ID NO: 13770 - protein, 144 aa, Triticum aestivum
CCPLAVAYMDTLFRLVSLQASEQQQQQSASYNSRSTTSSGSRSSSHQTNASYNYYHHSSSSGGGGGGGGGQYYYSQQQPQQSYYLEPYQEECGGNAHQHHLYMDEDFSSSSSSRQHFHSHGGAAHPPTSSATPTAPTPPLSTSA

SEQ ID NO: 13771 - protein, 375 aa, Arabidopsis thaliana
MEATVKIFYYGTGVKSKIRELEVSLLSGDTKVEEFSGFSPAAGKSWNWDELLALTPQLDLKEVLVEAARAVADGDFATAYGFLDVLEQMVSVSGSPIQRLGTYMAEGLRARLEGSGSNIYKSLKCNEPTGRELMSYMSVLYEICPYWKFAYTTANVEILEAIAGETRVHIIDFQIAQGSQYMFLIQELAKHPGGPPLLRVTGVDDSQSTYARGGGLSLVGERLATLAQSCGVPFEFHDAIMSGCKVQREHLGLEPGFAVVVNFPYVLHHMPDESVSVENHRDRLLHLIKSLSPKLVTLVEQESNTNTSPFLSRFVETLDYYTAMFESIDAARPRDDKQRISAEQHCVARDIVNMIACEESERVERHEVLGNGGSE

SEQ ID NO: 13772 - protein, 351 aa, Glycine max
  unsure (1)..(351): unsure at all Xaa locations
XLMSELRKMVSVSGDPIQRLGAYMLEALVARLASSGSTIYKVLXXCKEPTGSELLSHMHLLYEICPYLKFGYMSANGAIAEAMKEESEVHIIDFQINQGIQWVSLIQALAGRPGGPPKIRITGFDDSTSAYAREGGLEIVGARLSTLAQSYNVPFEFHAIRASPTEVELKDLALQPGEAIAVNFAMMLHHVPDESVDSGNHRDRLVRLAKCLSPKIVTLVEQESHTNNLPFFPRFVETMNYYLAIFESIDVALPREHKERINVEQHCLAREVVNLIACEGEERVERHELLKKWRSRFTMAGFAPYPLNSFITCSIKNLQRSYRGHYTLEERDGALCLGWMNQVLITSCAWR

SEQ ID NO: 13773 - protein, 365 aa, Glycine max
  unsure (1)..(365): unsure at all Xaa locations
LAVSDDDVPTARGWIDNVLGKLVSVSGDPIQRLGAYLLEGLRARLESSGNLIYKSLKCEQPTSKELMSYMHILYQICPYWKFAYISANAVIQETMANESRIHIIDFQIAQGTQWHLLIQALAHRPGGPPSLRVTGVDDSQSTHARGGGLWIVGERLSDFARSCGVPFEFHSAAISGCEVVRGNIEIRAGEALXAVNFPYVLHHMPDESVSTENHRDRLLRLVKSLSPKVVTFVEQESNTNTSPFFQRFVETLDYYTAMFESIDVACPRDDKKRISAEQHCVXARDMVNMIACEGVERVERHELFGKWRSRLSMAGFKQCQLSSSVMVATQNLLKEFSQNYRLEHRDGALYLGWMNRHMATSSAWR

SEQ ID NO: 13774 - protein, 524 aa, Oryza sativa (japonica cultivar-group)
MPYYNNSVPSGGNGRFYITQNHQDAHYASSDDGSQKIGSSPQAFEAPYCTLESSSANGAHPAHSSASSHSISPISGSPLSHHDSHSDHTYNSPPSASCVTEITDLQIKLRELENAILGPELDIAYDSPESALQPNIMATPENWRQLLGINTGDLKQVIIACGKAVAENDVRLTELLISELGQMVSVSGDPLQRLGAYMLEGLVARLSSSGSKIYKSLKCKEPTSSELMSYMHLLYEICPFFKFGYMSANGAIAEAIKGENFVHIIDFQIAQGSQWMTLIQALAARPGGPPFLRITGIDDSNSAYARGGGLDIVGMRLYKVAQSFGLPFEFNAVPAASHEVYLEHLDIRVGEVIVVNFAYQLHHTPDESVSTENHRDRILRMVKSLSPRLVTLVEQESNTNTRPFFPRYLETLDYYTAMFESIDVALPRDDKRRMSAEQHCVARDIVNLIACEGAERVERHEVFGKWKARLTMAGFRPYPLSSVVNSTIKTLLHTYNSFYRLEERDGVLYLGWKNRVLVVSSAWC

SEQ ID NO: 13775 - protein, 397 aa, Oryza sativa
  unsure (1)..(397): unsure at all Xaa locations
MPYYNNSVPSGGNGRFYITQNHQDAHYASSDDGSQKIGSSPQAFEAPYCTLESSSANGAHPAHSSASSHSISPISGSPLYDSHSDHTYNSPPSASCVTEITDLQIKLRELENAILGPXXLDIAYDSPDALQPNIMATPENWRQLLGINTGDLKQVIIACGKAVAENDVRLTELLISELGQMVSVSGDPLQRLGAYMLEGLVARLSSSGTNGAIAEAIKGENFVHIIDFQIAQGSQWMTLIQALAARPGGPPFLRITGIDDSNSAYARGGGLDIVGMRLYKVAQSFGLPFEFNAVPAASHEVYLEHLDIRVGEVIVVNFAYQLHHTPDESESNTNTRPFFPRYLETLDYYTAMFESIDVALPRDDKRRMSAEQHCVARDIVNLIACEGAERVERHEAX

SEQ ID NO: 13776 - protein, 137 aa, Calycadenia multiglandulosa
MKRPRERKKEAKASTSSSSSMAPAAKAKDLQNPPDSGGMDELLEVLGYKVKSTDMDDVAQKLEQLEMVMGEDGILQLSDTVHYNPSDLSGWVQSMLSELNNSGGDSDIGIGIPAGGESSTTMIDFSNNKEKQPEDPY

SEQ ID NO: 13777 - protein, 590 aa, Vitis vinifera
MKREYHHPHHPTCSTSPTGKGKMWDADPQQDAGMDELLAVLGYNVKASDMAEVAQKLEQLEEVIVNAQEDGLSHLASETVHYNPSDLSNWLGSMLSEFNPTPNCALDNPFLPPISPLDYTNCSTQPKQEPSIFDSPSLDYDLKAIPGKALYSHIEQPPQQPPAPPLYQRDNKRLKPTTSATANSVSSVIGGWGVPTESARPVVLVDSQETGIRLVHTLMACAEAVQQENLKLAEALVKQIGFLAVSQAGAMRKVATYFAEGLARRIYRLYPDKPLDSSFSDILQMHFYETCPYLKFAHFTANQAILEAFEGKKRVHVIDFSMKQGMQWPALMQALALRPGGPPSFRLTGIGPPSTDNTDHLHEVGWKLAQLAETIHVEFEYRGFVANSLADLDASMLELRDGESVAVNSVFELHSLLARPGGIERVLSAVKDMKPDIVTIVEQEANHNGPVFLDRFTESLHYYSTLFDSLEGCGVSPVNTQDKLMSEVYLGQQICNVVACEGPERVERHETLAQWRARLGSAGFDPVNLGSNAFKQASMLLALFAGGDGYRVEENNGCLMLGWHTRPLIATSAWQLANKPALPSSTPASN

SEQ ID NO: 13778 - protein, 587 aa, Arabidopsis thaliana
MKRDHHQFQGRLSNHGTSSSSSSISKDKMMMVKKEEDGGGNMDDELLAVLGYKVRSSEMAEVALKLEQLETMMSNVQEDGLSHLATDTVHYNPSELYSWLDNMLSELNPPPLPASSNGLDPVLPSPEICGFPASDYDLKVIPGNAIYQFPAIDSSSSSNNQNKRLKSCSSPDSMVTSTSTGTQIGGVIGTTVTTTTTTTTAAAESTRSVILVDSQENGVRLVHALMACAEAIQQNNLTLAEALVKQIGCLAVSQAGAMRKVATYFAEALARRIYRLSPPQNQIDHCLSDTLQMHFYETCPYLKFAHFTANQAILEAFEGKKRVHVIDFSMNQGLQWPALMQALALREGGPPTFRLTGIGPPAPDNSDHLHEVGCKLAQLAEAIHVEFEYRGFVANSLADLDASMLELRPSDTEAVAVNSVFELHKLLGRPGGIEKVLGVVKQIKPVIFTVVEQESNHNGPVFLDRFTESLHYYSTLFDSLEGVPNSQDKVMSEVYLGKQICNLVACEGPDRVERHETLSQWGNRFGSSGLAPAHLGSNAFKQASMLLSVFNSGQGYRVEESNGCLMLGWHTRPLITTSAWKLSTAAH

SEQ ID NO: 13779 - protein, 587 aa, Arabidopsis thaliana
MKRDHHQFQGRLSNHGTSSSSSSISKDKMMMVKKEEDGGGNMDDELLAVLGYKVRSSEMAEVALKLEQLETMMSNVQEDGLSHLATDTVHYNPSELYSWLDNMLSELNPPPLPASSNGLDPVLPSPEICGFPASDYDLKVIPGNAIYQFPAIDSSSSSNNQNKRLKSCSSPDSMVTSTSTGTQIGGVIGTTVTTTTTTTTAAGESTRSVILVDSQENGVRLVHALMACAEAIQQNNLTLAEALVKQIGCLAVSQAGAMRKVATYFAEALARRIYRLSPPQNQIDHCLSDTLQMHFYETCPYLKFAHFTANQAILEAFEGKKRVHVIDFSMNQGLQWPALMQALALREGGPPTFRLTGIGPPAPDNSDHLHEVGCKLAQLAEAIHVEFEYRGFVANSLADLDASMLELRPSDTEAVAVNSVFELHKLLGRPGGIEKVLGVVKQIKPVIFTVVEQESNHNGPVFLDRFTESLHYYSTLFDSLEGVPNSQDKVMSEVYLGKQICNLVACEGPDRVERHETLSQWGNRFGSSGLAPAHLGSNAFKQASMLLSVFNSGQGYRVEESNGCLMLGWHTRPLITTSAWKLSTAAY

SEQ ID NO: 13780 - protein, 587 aa, Arabidopsis thaliana
MKRDHHQFQGRLSNHGTSSSSSSISKDKMMMVKKEEDGGGNMDDELLAVLGYKVRSSEMAEVALKLEQLETMMSNVQEDGLSHLATDTVHYNPSELYSWLDNMLSELNPPPLPASSNGLDPVLPSPEICGFPASDYDLKVIPGNAIYQFPAIDSSSSSNNQNKRLKSCSSPDSMVTSTSTGTQIGGVIGTTVTTTTTTTTAAGESTRSDILVDSQENGVRLVHALMACAEAIQQNNLTLAEALVKQIGCLAVSQAGAMRKVATYFAEALARRIYRLSPPQNQIDHCLSDTLQMHFYETCPYLKFAHFTANQAILEAFEGKKRVHVIDFSMNQGLQWPALMQALALREGGPPTFRLTGIGPPAPDNSDHLHEVGCKLAQLAEAIHVEFEYRGFVANSLADLDASMLELRPSDTEAVAVNSVFELHKLLGRPGGIEKVLGVVKQIKPVIFTVVEQESNHNGPVFLDRFTESLHYYSTLFDSLEGVPNSQDKVMSEVYLGKQICNLVACEGPDRVERHETLSQWGNRFGSSGLAPAHLGSNAFKQASMLLSVFNSGQGYRVEESNGCLMLGWHTRPLITTSAWKLSTAAY

SEQ ID NO: 13781 - protein, 587 aa, Arabidopsis thaliana
MKRDHHQFQGRLSNHGTSSSSSSISKDKMMMVKKEEDGGGNMDDELLAVLGYKVRSSEMAEVALKLEQLETMMSNVQEDGLSHLAADTVHYNPSELYSWLDNMLSELNPPPLPASSNGLDPVLPSPEICGFPASDYDLEVIPGNAIYQFPAIDSSSSSNNQNKRLKSCSSPDSMVTSTSTGTQIGGVIGTTVTTTTTTTTAAAESTRSVILVDSQENGVRLVHALMACAEAIQQNNLTLAEALVKQIGCLAVSQAGAMRKVATYFAEALARRIYRLSPPQNQIDHCLSDTLQMHFYETCPYLKFAHFTANQAILEAFEGKKRVHVIDFSMNQGLQWPALMQALALREGGPPTFRLTGIGPPAPDNSDHLHEVGCKLAQLAEAVHVEFEYRGFVANSLADLDASMLELRPSDTEAVAVNSVFELHKLLGRPGGIEKVLGVVKQIKPVIFTVVEQESNHNGPVFLDRFTESLHYYSTLFDSLEGVPNSQDKVMSEVYLGKQICNLVACEGPDRVERHETLSQWGNRFGSSGLAPAHLGSNAFKQASMLLSVFNSGQGYRVEESNGCLMLGWHTRPLITTSAWKLSTAAY

SEQ ID NO: 13782 - protein, 532 aa, Arabidopsis thaliana
MKRDHHHHHQDKKTMMMNEEDDGNGMDELLAVLGYKVRSSEMADVAQKLEQLEVMMSNVQEDDLSQLATETVHYNPAELYTWLDSMLTDLNPPSSNAEYDLKAIPGDAILNQFAIDSASSSNQGGGGDTYTTNKRLKCSNGVVETTTATAESTRHVVLVDSQENGVRLVHALLACAEAVQKENLTVAEALVKQIGFLAVSQIGAMRKVATYFAEALARRIYRLSPSQSPIDHSLSDTLQMHFYETCPYLKFAHFTANQAILEAFQGKKRVHVIDFSMSQGLQWPALMQALALRPGGPPVFRLTGIGPPAPDNFDYLHEVGCKLAHLAEAIHVEFEYRGFVANTLADLDASMLELRPSEIESVAVNSVFELHKLLGRPGAIDKVLGVVNQIKPEIFTVVEQESNHNSPIFLDRFTESLHYYSTLFDSLEGVPSGQDKVMSEVYLGKQICNVVACDGPDRVERHETLSQWRNRFGSAGFAAAHIGSNAFKQASMLLALFNGGEGYRVEESDGCLMLGWHTRPLIATSAWKLSTN

SEQ ID NO: 13783 - protein, 533 aa, Arabidopsis thaliana
MKRDHHHHHHQDKKTMMMNEEDDGNGMDELLAVLGYKVRSSEMADVAQKLEQLEVMMSNVQEDDLSQLATETVHYNPAELYTWLDSMLTDLNPPSSNAEYDLKAIPGDAILNQFAIDSASSSNQGGGGDTYTTNKRLKCSNGVVETTTATAESTRHVVLVDSQENGVRLVHALLACAEAVQKENLTVAEALVKQIGFLAVSQIGAMRKVATYFAEALARRIYRLSPSQSPIDHSLSDTLQMHFYETCPYLKFAHFTANQAILEAFQGKKRVHVIDFSMSQGLQWPALMQALALRPGGPPVFRLTGIGPPAPDNFDYLHEVGCKLAHLAEAIHVEFEYRGFVANTLADLDASMLELRPSEIESVAVNSVFELHKLLGRPGAIDKVLGVVNQIKPEIFTVVEQESNHNSPIFLDRFTESLHYYSTLFDSLEGVPSGQDKVMSEVYLGKQICNVVACDGPDRVERHETLSQWRNRFGSAGFAAAHIGSNAFKQASMLLALFNGGEGYRVEESDGCLMLGWHTRPLIATSAWKLSTN

SEQ ID NO: 13784 - protein, 532 aa, Arabidopsis thaliana
MKRDHHHHHQDKKTMMMNEEDDGNGMDELLAVLGYKVRSSEMADVAQKLEQLEVMMSNVQEDDLSQLATETVHYNPAELYTWLDSMLTDLNPPSSNAEYDLKAIPGDAILNQFAIDSASSSNQGGGGDTYTTNKRLKCSNGVVETTTATAESTRHVVLVDSQENGVRLVHALLACAEAVQKENLTVAEALVKQIGFLAVSQIGAMRQVATYFAEALARRIYRLSPSQSPIDHSLSDTLQMHFYETCPYLKFAHFTANQAILEAFQGKKRVHVIDFSMSQGLQWPALMQALALRPGGPPVFRLTGIGPPAPDNFDYLHEVGCKLAHLAEAIHVEFEYRGFVANTLADLDASMLELRPSEIESVAVNSVFELHKLLGRPGAIDKVLGVVNQIKPEIFTVVEQESNHNSPIFLDRFTESLHYYSTLFDSLEGVPSGQDKVMSEVYLGKQICNVVACDGPDRVERHETLSQWRNRFGSAGFAAAHIGSNAFKQASMLLALFNGGEGYRVEESDGCLMLGWHTRPLIATSAWKLSTN

SEQ ID NO: 13785 - protein, 547 aa, Arabidopsis thaliana
MKRGYGETWDPPPKPLPASRSGEGPSMADKKKADDDNNNSNMDDELLAVLGYKVRSSEMAEVAQKLEQLEMVLSNDDVGSTVLNDSVHYNPSDLSNWVESMLSELNNPASSDLDTTRSCVDRSEYDLRAIPGLSAFPKEEEVFDEEASSKRIRLGSWCESSDESTRSVVLVDSQETGVRLVHALVACAEAIHQENLNLADALVKRVGTLAGSQAGAMGKVATYFAQALARRIYRDYTAETDVCAAVNPSFEEVLEMHFYESCPYLKFAHFTANQAILEAVTTARRVHVIDLGLNQGMQWPALMQALALRPGGPPSFRLTGIGPPQTENSDSLQQLGWKLAQFAQNMGVEFEFKGLAAESLSDLEPEMFETRPESETLVVNSVFELHRLLARSGSIEKLLNTVKAIKPSIVTVVEQEANHNGIVFLDRFNEALHYYSSLFDSLEDSYSLPSQDRVMSEVYLGRQILNVVAAEGSDRVERHETAAQWRIRMKSAGFDPIHLGSSAFKQASMLLSLYATGDGYRVEENDGCLMIGWQTRPLITTSAWKLA

SEQ ID NO: 13786 - protein, 547 aa, Arabidopsis thaliana
MKRGYGETWDPPPKPLPASRSGEGPSMADKKKADDDNNNSNMDDELLAVLGYKVRSSEMAEVAQKLEQLEMVLSNDDVGSTVLNDSVHYNPSDLSNWVESMLSELNNPASSDLDTTRSCVDRSEYDLRAIPGLSAFPKEEEVFDEEASSKRIRLGSWCESSDESTRSVVLVDSQETGVRLVHALVACAEAIHQENLNLADALVKRVGTLTGSQAGAMGKVATYFAQALARRIYRDYTAETDVCAAVNPSFEEVLEMHFYESCPYLKFAHFTANQAILEAVTTARRVHVIDLGLNQGMQWPALMQALALRPGGPPSFRLTGIGPPQTENSDSLQQLGWKLAQFAQNMGVEFEFKGLAAESLSDLEPEMFETRPESETLVVNSVFELHRLLARSGSIEKLLNTVKAIKPSIVTVVEQEANHNGIVFLDRFNEALHYYSSLFDSLEDSYSLPSQDRVMSEVYLGRQILNVVAAEGSDRVERHETAAQWRIRMKSAGFDPIHLGSSAFKQASMLLSLYATGDGYRVEENDGCLMIGWQTRPLITTSAWKLA

SEQ ID NO: 13787 - protein, 511 aa, Arabidopsis thaliana
MKREHNHRESSAGEGGSSSMTTVIKEEAAGVDELLVVLGYKVRSSDMADVAHKLEQLEMVLGDGISNLSDETVHYNPSDLSGWVESMLSDLDPTRIQEKPDSEYDLRAIPGSAVYPRDEHVTRRSKRTRIESELSSTRSVVVLDSQETGVRLVHALLACAEAVQQNNLKLADALVKHVGLLASSQAGAMRKVATYFAEGLARRIYRIYPRDDVALSSFSDTLQIHFYESCPYLKFAHFTANQAILEVFATAEKVHVIDLGLNHGLQWPALIQALALRPNGPPDFRLTGIGYSLTDIQEVGWKLGQLASTIGVNFEFKSIALNNLSDLKPEMLDIRPGLESVAVNSVFELHRLLAHPGSIDKFLSTIKSIRPDIMTVVEQEANHNGTVFLDRFTESLHYYSSLFDSLEGPPSQDRVMSELFLGRQILNLVACEGEDRVERHETLNQWRNRFGLGGFKPVSIGSNAYKQASMLLALYAGADGYNVEENEGCLLLGWQTRPLIATSAWRINRVE

SEQ ID NO: 13788 - protein, 662 aa, Arabidopsis thaliana
MEEVSSEMEVEVQNRQLSDSSPAQNVKKFGLKNSIQTNFGSDYVFQIVPKIDWTAIAVSLSTNTVKLYSPVTGQYYGECKGHSDTVNQIAFSSDSAASPHVLHSCSSDGTIRSWDTRSFQQVSRIDTGNDQEIFSFSYGGAADNLLAGGCKEQREHNHRESSAGEGGSSSMTTVIKEEAAGVDELLVVLGYKVRSSDMADVAHKLEQLEMVLGDGISNLSDETVHYNPSDLSGWVESMLSDLDPTRIQEKPDSEYDLRAIPGSAVYPRDEHVTRRSKRTEIESELSSTRSVVVLDSQETGVRLVHALLACAEAVQQNNLKLADALVKHVGLLASSQAGAMRKVATYFAEGLARRIYRIYPRDDVASSSFSDTLQIHFYESCPYLKFAHFTANQAILEVFATAEKVHVIDLGLNHGLQWPALIQALALRPNGPPDFRLTGIGYSLTDIQEVGWKLGQLASTIGVNFEFKSIALNNLSDLKPEMLDIRPGLESVAVNSVFELHRLLAHPGSIDKFLSTIKSIRPDIMTVVEQEANHNGTVFLDRFTESLHYYSSLFDSLEGPPSQDRVMSELFLGRQILNLVACEGEDRVERHETLNQWRNRFGLGGFKPVSIGSNAYKQASMLLALYAGADGYNVEENEGCLLLGWQTRPLIATSAWRINRVE

SEQ ID NO: 13789 - protein, 523 aa, Arabidopsis thaliana
MKRSHQETSVEEEAPSMVEKLENGCGGGGDDNMDEFLAVLGYKVRSSDMADVAQKLEQLEMVLSNDIASSSNAFNDTVHYNPSDLSGWAQSMLSDLNYYPDLDPNRICDLRPITDDDECCSSNSNSNKRIRLGPWCDSVTSESTRSVVLIEETGVRLVQALVACAEAVQLENLSLADALVKRVGLLAASQAGAMGKVATYFAEALARRIYRIHPSAAAIDPSFEEILQMNFYDSCPYLKFAHFTANQAILEAVTTSRVVHVIDLGLNQGMQWPALMQALALRPGGPPSFRLTGVGNPSNREGIQELGWKLAQLAQAIGVEFKFNGLTTERLSDLEPDMFETRTESETLVVNSVFELHPVLSQPGSIEKLLATVKAVKPGLVTVVEQEANHNGDVFLDRFNEALHYYSSLFDSLEDGVVIPSQDRVMSEVYLGRQILNLVATEGSDRIERHETLAQWRKRMGSAGFDPVNLGSDAFKQASLLLALSGGGDGYRVEENDGSLMLAWQTKPLIAASAWKLAAELRR

SEQ ID NO: 13790 - protein, 601 aa, Glycine max
  unsure (1)..(601): unsure at all Xaa locations
MGFPQSKPEXRPRHGHCSGEPNGKAKMWEEEQQQQQGMDELLAALGYKVRASDMADVAQKLEQLEMVMGCAQEEGISHLASDTVHYDPTDLYSWVQTMLTELNPEPNNNLDXHLLSXSTTTTTSSTAQPXVFNDDSEYDLRAIPGIAAYXSSSSSRQQQQQQPPRRNXKRLTTSTSASSXSPAESADSAASEPTRHVVLVDHQEAGVRLVHTLLACAEAVQQENLKLADALVKHVGILAASQAGAMRKVASYFAQALARRIYGIFPEETLDSSFSDVLHMHFYESCPYLKFAHFTANQAILEAFATAGKVHVIDFGLKQGMQWPALMQALALRPGGPPTFRLTGIGPPQPDNTDALQQVGLKLAQLAQIIGVQFEFRGFVCNSLADLDPNMLEIRPGEAVAVNSVFELHRMLARSGSVDKVLDTVKKINPQIVTIVEQEANHNGPGFLDRFTEALXHYYSSLFDSLEGSSSSSTGLGSPSQDLLMSELYLGRQICNVVAYEGPDRVERHETLTQWRGRLDSAGFDPVHLGSNAFKQASMLLALFAGGDGYRVEENNGCLMLGWHTRPLIATSAWKLPSSSESSGLTQXMXNYRLIGLVPVN

SEQ ID NO: 13791 - protein, 543 aa, Glycine max
  unsure (1)..(543): unsure at all Xaa locations
MKRERQXXLGSNAGTSSCGYSSGKSNLWEEEGGMDELLAVVGYKVRSSDMAEVAQKLERLEEAMGNVQDDLTDLSNDAVHYNPSDISNWLQTMLSNFDPLPSEEPEKDSASSDYDLKAIPGKAIYGGGSDALPNPKXRENRXXSTRAVVVVDLQENGIRLVHSLMACAEAGENNNLALAEALVKQIGFLALSQVGAMRKVATYFAEALARRIYRVFPQQXXSLSDSLQIHFYETCPYLKFAHFTANQAILEAFQGKNRVHVIDFGINQGMQWPALMQALALRNDGPPVFRLTGIGPPAADNSDHLQEVGWKLAQLAERIHVQFEYRGFVANSLADLDASMLDLREDESVAVNSVFEFHKLLARPGAVEKVLSVVRQIRPEILTVVEQEANHNGLSFVDRFTESLHYYSTLFDSLEGSPVNPNDKAMSEVYLGKQICNVVACEGMDRVERHETLNQWRNRFGSTGFSPVHLGSNAYKQASMLLSLFGGGDGYRVEENNGCLMLGWHTRPLIATSVWQLATKSVVAAHXVDSPIPQPAFSFYFLF

SEQ ID NO: 13792 - protein, 554 aa, Glycine max
  unsure (1)..(554): unsure at all Xaa locations
MKREREXXLGSIAGTSSCGYSSGKSNLWEEEGGMDELLAVVGYKVRSSDMAEVAQKLERLEEAMGNVQDDLPEISNDVVHYNPSDISNWLETMLSNFDPLPSEEPEKDSASSDYDLKAIPGKAIYGASDALPNXXKRVKXXDESRRAVVVVDSQENGIRLVHSLMACAEAVENNNLAVAEALVKQIGFLAVSQVGAMRKVAIYFAEALARRIYRVFPLQHSLSDSLQIHFYETCPYLKFAHFTANQVILEAFQGKNRVHVIDFGINQGMQWPALMQALAVRTGGPPVFRLTGIGPPAADNSDHLQEVGWKLAQLAEEINVQFEYRGFVANSLADLDASMLDLREGEAVAVNSVFEFHKLLARPGAVEKVLSVVRQIRPEIVTVVEQEANHNRLSFVDRFTESLHYYSTLFDSLEGSPVNPNDKAMSEVYLGKQICNVVACEGMDRVERHETLNQWRNRFVSTGFSSVHLGSNAYKQASMLLALFAGGDGYRVEENNGCLMLGWHTRPLIATSAWQLAATRXVDSPIPQPAFFFCFNFIIISIHAHRKKKGNLWG

SEQ ID NO: 13793 - protein, 536 aa, Glycine max
  unsure (1)..(536): unsure at all Xaa locations
MKREREXXLGSIAGTSSCGYSSGKSNLWEEEGGMDELLAVVGYKVRSSDMAEVAQKLERLEEAMGNVQDDLPEISNDVVHYNPSDISNWLQTMLSNFDPLPSEEPEKDSASSDYDLKAIPGKAIYGASDALPNXXKRVKXXDESRRAVVVVDSQENGIRLVHSLMACAEAVENNNLAVAEALVKQIGFLAVSQVGAMRKVATYFAEALARRIYRVFPQQXXSLSDSLQIHFYETCPYLKFAHFTANQAILEAFQGKNRVHVIDFGINQGMQWPALMQALALRNDGPPVFRLTGIGPPAADNSDHLQEVGWKLAQLAERIHVQFEYRGFVANSLADLDASMLDLREDESVAVNSVFEFHKLLARPGAVEKVLSVVRQIRPEILTVVEQEANHNGLSFVDRFTESLHYYSTLFDSLEGSPVNPNDKAMSEVYLGKQICNVVACEGMDRVERHETLNQWRNRFVSTGFSSVHLGSNAYKQASMLLALFAGGDGYRVEENNGCLMLGWHTRPLIATSAWQLAATRXVDSPIPQPAFFFLF

SEQ ID NO: 13794 - protein, 588 aa, Glycine max
  unsure (1)..(588): unsure at all Xaa locations
TSLSLETPQPHFPFCSSMPSNGKANMWEEQQQQQQGMDELLAALGYKVRACDMADVAHKLELVXEMVMGCSHVEASFFPPVTPHGXRSPRSFPXXATHLFTELNPEPNNNNNSSLGPFSPYTTTTPSLVPTSIPNMTSEPILLXXSLPLNSXXRGTTKIAAAPDEIETANNINKRLKPSPVESADSASEPTRTVLLVDHQEAGVRLVHTLLACAEAVQQENLKLADALVKHVGILAASQAGAMRKVASYFAQALARRIYGIFPEETLDSSFSDVLHMHFYESCPYLKFAHFTANQAILEAFATAGRVHVIDFGLRQGMQWPALMQALALRPGGPPTFRLTGIGPPQPDNTDALQQVGWKLAQLAQNIGVQFEFRGFVCNSLADLDPKMLEIRPGEAVAVNSVFELHRMLARPGSVDKVLDTVKKIKPKIVTIVEQEANHNGXPGFLDRFTEALHYYSSLFDSLEGSSSSTGSNQDLLMSELYLGRQICNVVANEGADRVERHETLSQWRGRLDSAGFDPVHLGSNAFKQASMLLALFAGGDGYRVEENNGCLMLGWHTRPLIATSAWKLPSPNDLHCKLXINWLLDGW

SEQ ID NO: 13795 - protein, 438 aa, Glycine max
  unsure (1)..(438): unsure at all Xaa locations
RTRGRTRGRTRGRTRGLISDNPNTSVSGGNFGGDAVAVVGGNREANGGFGXVTLPNLALYLPTSQPTMAMATQASLFTPPLSGLKPSDRATAPWKQSSTLSFSTSKPLKKKATYFAEALARRIYRVFPQQHSLSDSLQIHFYETCPYLKFAHFTANQAILEAFQGKNRVHVIDFGINQGXMQWPALMQALALRNDGPPVFRLTGIGPPAADNSDHLQEVGWKLAQLAERIHVQFEYRGFVANSLADLDASMLXXLREDESVAVNSVFEFHKLLARPGAVEKVLSVVRQIRPEILTVVEQEANHNGLSFVDRFTESLHYYSTLFDSLEGSPVNPNDKAMSEVYLGKQICNVVACEGMDRVERHETLNQWRNRFGSTGFSPVHLGSNAYKQASMLLSLFGGGDGYRVEENNGCLMLGWHTRPLIATSVWQLATKSVVAAH

SEQ ID NO: 13796 - protein, 625 aa, Oryza sativa (japonica cultivar-group)
MKREYQEAGGSSGGGSSADMGSCKDKVMAGAAGEEEDVDELLAALGYKVRSSDMADVAQKLEQLEMAMGMGGVSAPGAADDGFVSHLATDTVHYNPSDLSSWVESMLSELNAPLPPIPPAPPAARHASTSSTVTGGGGSGFFELPAAADSSSSTYALRPISLPVVATADPSAADSARDTKRMRTGGGSTSSSSSSSSSLGGGASRGSVVEAAPPATQGAAAANAPAVPVVVVDTQEAGIRLVHALLACAEAVQQENFAAAEALVKQIPTLAASQGGAMRKVAAYFGEALARRVYRFRPADSTLLDAAFADLLHAHFYESCPYLKFAHFTANQAILEAFAGCHRVHVVDFGIKQGMQWPALLQALALRPGGPPSFRLTGVGPPQPDETDALQQVGWKLAQFAHTIRVDFQYRGLVAATLADLEPFMLQPEGEADANEEPEVIAVNSVFELHRLLAQPGALEKVLGTVHAVRPRIVTVVEQEANHNSGSFLDRFTESLHYYSTMFDSLEGGSSGQAELSPPAAGGGGGTDQVMSEVYLGRQICNVVACEGAERTERHETLGQWRNRLGRAGFEPVHLGSNAYKQASTLLALFAGGDGYRVEEKEGCLTLGWHTRPLIATSAWRVAAA

SEQ ID NO: 13797 - protein, 136 aa, Dubautia arborea
MKRSRERKKEAKTTSSVPDSGGMDELLEVLGYKVKSTDMADVAQKLEQLEMVMGEDGILQLSDTVHYNPSDLSGWVQSMLLVLNDNNNNNTAHDSGHILLPGDSSTTMIDFSSEIVVHGKPGSKIHLDDDLRAIAG

SEQ ID NO: 13798 - protein, 625 aa, Oryza sativa; identical to SEQ ID NO: 13796

SEQ ID NO: 13799 - protein, 623 aa, Triticum aestivum
MKREYQDAGGSGGGGGGMGSSEDKMMVSAAAGEGEEVDELLAALGYKVRASDMADVAQKLEQLEMAMGMGGVGAGAAPDDSFATHLATDTVHYNPTDLSSWVESMLSELNAPPPPLPPAPQLNASTSSTVTGSGGYFDLPPSVDSSSSIYALRPIPSPAGATAPADLSADSVRDPKRMRTGGSSTSSSSSSSSSLGGGARSSVVEAAPPVAAAANATPALPVVVVDTQEAGIRLVHALLACAEAVQQENLSAAEALVKQIPLLAASQGGAMRKVAAYFGEALARRVFRFRPQPDSSLLDAAFADLLHAHFYESCPYLKFAHFTANQAILEAFAGCRRVHVVDFGIKQGMQWPALLQALALRPGGPPSFRLTGVGPPQPDETDALQQVGWKLAQFAHTIRVDFQYRGLVAATLADLEPFMLQPEGEEDPNEEPEVIAVNSVFEMHRLLAQPGALEKVLGTVRAVRPRIVTVVEQEANHNSGTFLDRFTESLHYYSTMFDSLEGGSSGGGPSEVSSGAAAAPAAAGTDQVMSEVYLGRQICNVVACEGAERTERHETLGQWRNRLGNAGFETVHLGSNAYKQASTLLALFAGGDGYKVEEKEGCLTLGWHTRPLIATSAWRLAGP

SEQ ID NO: 13800 - protein, 623 aa, Triticum aestivum; identical to SEQ ID NO: 13799

SEQ ID NO: 13801 - protein, 406 aa, Triticum aestivum
ARSLAALLSLLLLPPSSSPTPRPPTLDPNPDSFATHLATDTVHYNPTDLSSWVESMLSELNAPPPPLPPAPQQLNASTSSTVTGGGYFDLPPSVDSSCSTYALRPIPSPAGAVAPADLSADSVVRDPKRMRTGGSSTSSSSSSSSSLGGGARSSVVEAAPPVAAGASAPALPVVVVDTQEAGIRLVHALLACAEAVQQENFSAAEALVKQIPLLAASQGGAMRKVAAYFGEALARRVFRFRPQPDSSLLDAAFADLLHAHFYESCPYLKFAHFTANQAILEAFAGCRRVHVVDFGIKQGMQWPALLQALALRPGGPSSFRLTGVGPPQPDETDALQQVGWKLAQFAHTIRVDFQYRGLVAATLADLEPFMLQPEGEEDPNEEPEVIAVNSVLEMHRLLAQTGALEK

SEQ ID NO: 13802 - protein, 581 aa, Zea mays subsp. mays
MKREYQDAGGSGGDMGSSKDKMMAAAAGAGEQEEEDVDELLAALGYKVRSSDMADVAQKLEQLEMAMGMGGVGGAGATADDGFVSHLATDTVHYNPSDLSSWVESMLSELNAPPAPLPPATPAPRLASTSSTVTSGAAAGAGYFDLPPAVDSSSSTYALKPIPSPVAAPSADPSTDSAREPKRMRTGGGSTSSSSSSSSSMDGGRTRSSVVEAAPPATQASAAANGPAVPVVVVDTQEAGIRLVHALLACAEAVQQENFSAAEALVKQIPMLASSQGGAMRKVAAYFGEALARRVYRFRPPPDSSLLDAAFADLLHAHFYESCPYLKFAHFTANQAILEAFAGCRRVHVVDFGIKQGMQWPALLQALALRPGGPPSFRLTGVGPPQPDETDALQQVGWKLAQFAHTIRVDFQYRGLVAATLADLEPFMLQPEGDDTDDEPEVIAVNSVFELHRLLAQPGALEKVLGTVRAVRPRIVTVVEQEANHNSGTFLDRFTESLHYYSTMFDSLEGAGAGSGQSTDASPAAAGGTDQVMSEVYLGRQICNVVACEGAERTERHETLGQWRSRLGGSGFAPVHLGSNA

SEQ ID NO: 13803 - protein, 581 aa, Zea mays subsp. mays
MKREYQDAGGSGGDMGSSKDKMMAAAAGAGEQEEEDVDELLAALGYKVRSSDMADVAQKLEQLEMAMGMGGVGGAGATADDGFVSHLATDTVHYNPSDLSSWVESMLSELNAPPAPLPPATPAPRLASTSSTVTSGAAAGAGYFDLPPAVDSSSSTYALKPIPSPVAAPSADPSTDSAREPKRMRTGGGSTSSSSSSSSSMDGGRTRSSVVEAAPPATQASAAANGPAVPVVVVDTQEAGIRLVHALLACAEAVQQENFSAAEALVKQIPMLASSQGGAMRKVAAYFGEALARRVYRFRPPPDRSLLDAAFADLLHAHFYESCPYLKFAHFTANQAILEAFAGCRRVHVVDFGIKQGMQWPALLQALALRPGGPPSFRLTGVGPPQPDETDALQQVGWKLAQFAHTIRVDFQYRGLVAATLADLEPFMLQPEGDDTDDEPEVIAVNSVFELHRLLAQPGALEKVLGTVRAVRPRIVTVVEQEANHNSGTFLDRFTESLHYYSTMFDSLEGAGAGSGQSTDASPAAAGGTDQVMSEVYLGRQICNVVACEGAERTERHETLGQWRSRLGGSGFAPVHLGSNA

SEQ ID NO: 13804 - protein, 581 aa, Zea mays subsp. mays
MKREYQDAGGSGGDMGSSKDKMMAAAAGAGEQEEEDVDELLAALGYKVRSSDMADVAQKLEQLEMAMGMGGVGGAGATADDGFVSHLATDTVHYNPSDLSSWVESMLSELNAPPAPLPPATPAPRLASTSSTVTSGAAAGAGYFDLPPAVDSSSSTYALKPIPSPVAAPSADPSTDSAREPKRMRTGGGSTSSSSSSSSSMDGGRTRSSVVEAAPPATQASAAANGPAVPVVVVDTQEAGIRLVHALLACAEAVQQENFSAAEALVKQIPMLASSQGGAMRKVAAYFGEALARRVYRFRPPPDSSLLDAAFADLLHAHFYESCPYLKFAHFTANQAILEAFAGCRRVHVVDFGIKQGMQWPALLQALALRPGGPPSFRLTGVGPPQPDETDALQQVGWKLAQFAHTIRVDFQYRGLVAATLADLEPFMLQPEGDDTDDEPEVIAVNSVFELHRLLAQPGALEKVLGTVRAVRPRIVTVVEQEANHDSGTFLDRFTESLHYYSTMFDSLEGAGAGSGQSTDASPAAAGGTDQVMSEVYLGRQICNVVACEGAERTERHETLGQWRSRLGGSGFAPVHLGSNA

SEQ ID NO: 13805 - protein, 581 aa, Zea mays subsp. mays
MKREYQDAGGSGGDMGSSKDKMMAAAAGAGEQEEEDVDELLAALGYKVRSSDMADVAQKLEQLEMAMGMGGVGGAGATADDGFVSHLATDTVHYNPSDLSSWVESMLSELNAPPAPLPPATPAPRLASTSSTVTSGAAAGAGYFDLPPAVDSSSSTYALKPIPSPVAAPSADPSTDSAREPKRMRTGGGSTSSSSSSSSSMDGGRTRSSVVEAAPPATQASAAANGPAVPVVVVDTQEAGIRLVHALLACAEAVQQENFSAAEALVKQIPMLASSQGGAMRKVAAYFGEALARRVYRFRPPPDSSLLDAAFADLLHAHFYESCPYLKFAHFTANQAILEAFAGCRRVHVVDFGIKQGMQWPALLQALALRPGGPPSFRLTGVGPPQPDETDALQQVGWKLAQFAHTIRVDFQYRGLVAATLADLEPFMLQPEGDDTDDEPEVIAVNSVFELHRLLAQPGALEKVLGTVRAVRPRIVTVVEQEANHNSGTFLDRFTESLHHYSTMFDSLEGAGAGSGQSTDASPAAAGGTDQVMSEVYLGRQICNVVACEGAERTERHETLGQWRSRLGGSGFAPVHLGSNA

SEQ ID NO: 13806 - protein, 581 aa, Zea mays subsp. mays
MKREYQDAGGSGGDMGSSKDKMMAAAAGAGEQEEEDVDELLAALGYKVRSSDMADVAQKLEQLEMAMGMGGVGGAGATADDGFVSHLATDTVHYNPSDLSSWVESMLSELNAPPAPLPPATPAPRLASTSSTVTSGAAAGAGYFDLPPAVDSSSSTYALKPIPSPVAAPSADPSTDSAREPKRMRTGGGSTSSSSSSSSSMDGGRTRSSVVEAAPPATQASAAANGPAVPVVVVDTQEAGIRLVHALLACAEAVHQENFSAAEALVKQIPMLASSQGGAMRKVAAYFGEALARRVYRFRPPPDSSLLDAAFADLLHAHFYESCPYLKFAHFTANQAILEAFAGCRRVHVVDFGIKQGMQWPALLQALALRPGGPPSFRLTGVGPPQPDETDALQQVGWKLAQFAHTIRVDFQYRGLVAATLADLEPFMLQPEGDDTDDEPEVIAVNSVFELHRLLAQPGALEKVLGTVRAVRPRIVTVVEQEANHNSGTFLDRFTESLHYYSTMFDSLEGAGAGSGQSTDASPAAAGGTDQVMSEVYLGRQICNVVACEGAERTERHETLGQWRSRLGGSGFAPVHLGSNA

SEQ ID NO: 13807 - protein, 581 aa, Zea mays subsp. mays
MKREYQDAGGSGGDMGSSKDKMMAAAAGAGEQEEEDVDELLAALGYKVRSSDMADVAQKLEQLEMAMGMGGVGGAGATADDGFVSHLATDTVHYNPSDLSSWVESMLSELNAPPAPLPPATPAPRLASTSSTVTSGAAAGAGYFDLPPAVDSSSSTYALKPIPSPVAAPSADPSTDSAREPKRMRTGGGSTSSSSSSSSSMDGGRTRSSVVEAAPPATQASAAANGPAVPVVVVDTQEAGIRLVHALLACAEAVQQENFSAAEALVKQIPMLASSQGGAMRKVAAYFGEALARRVYRFRPPPDSSLLDAAFADLLHAHFYESCPYLKFAHFTANQAILEAFAGCRRVHVVDFGIKQGMQWPALLQALALRPGGPPSFRLTGVGPPQPDETDALQQVGWKLAQFAHTIRVDFQYRGLVAATLADLEPFMLQPEGDDTDDEPEVIAVNSVFELHRLLAQPGALEKVLGTVRAVRPRTVTVVEQEANHNSGTFLDRFTESLHYYSTMFDSLEGAGAGSGQSTDASPAAAGGTDQVMSEVYLGRQICNVVACEGAERTERHETLGQWRSRLGGSGFAPVHLGSNA

SEQ ID NO: 13808 - protein, 581 aa, Zea mays subsp. mays
MKREYQDAGGSGGDMGSSKDKMMAAAAGAGEQEEEDVDELLAALGYKVRSSDMADVAQKLEQLEMAMGMGGVGGAGATADDGFVSHLATDTVHYNPSDLSSWVESMLSELNAPPAPLPPATPAPRLASTSSTVTSGAAAGAGYFDLPPAVDSSSSTYALKPIPSPVAAPSADPSTDSAREPKRMRTGGGSTSSSSSSSSSMDGGRTRSSVVEAAPPATQASAAANGPAVPVVVVDTQEAGIRLVHALLACAEAVQQENFSAAEALVKQIPMLASSQGGAMRKVAAYFGEALARRVYRFRPPPDSSLLDAAFADLLHAHFYESCPYLKFAHFTANQAILEAFAGCRRVHVVDFGIKQGMQWPALLQALALRPGGPPSFRLTGVGPPQPDEIDALQQVGWKLAQFAHTIRVDFQYRGLVAATLADLEPFMLQPEGDDTDDEPEVIAVNSVFELHRLLAQPGALEKVLGTVRAVRPRIVTVVEQEANHNSGTFLDRFTESLHYYSTMFDSLEGAGAGSGQSTDASPAAAGGTDQVMSEVYLGRQICNVVACEGAERTERHETLGQWRSRLGGSGFAPVHLGSNA

SEQ ID NO: 13809 - protein, 581 aa, Zea mays subsp. mays
MKREYQDAGGSGGDMGSSKDKMMAAAAGAGEQEEEDVDELLAALGYKVRSSDMADVAQKLEQLEMAMGMGGVGGAGATADDGFVSHLATDTVHYNPSDLSSWVESMLSELNAPPAPLPPATPAPRLASTSSTVTSGAAAGAGYFDLPPAVDSSSSTYALKPIPSPVAAPSADPSTDSAREPKRMRTGGGSTSSSSSSSSSMDGGRTRSSVVEAAPPATQASAAANGPAVPVVVVDTQEAGIRLVHALLACAEAVQQENFSAAEALVKQIPMLASSQGGAMRKVAAYFGEALARRVYRFRPPPDSSLLDAAFADLLHAHFYESCPYLKFAHFTANQAILEAFAGCRRVHVVDFGIKQGMQWPALLQALALRPGGPPSFRLTGVGPPQPDETDALQQVGWKLAQFAHTIRVDFQYRGLVAATLADLEPFMLQPEGDDTDDEPEVIAVNSVFELHRLLAQPGALEKVLGTVRAVRPRIVTVVEQEANHNSGTFLDRFTESLHYYSTMFDSLEGAGAGSGQSTDASPAAAGGTDQVKSEVYLGRQICNVVACEGAERTERHETLGQWRSRLGGSGFAPVHLGSNA

SEQ ID NO: 13810 - protein, 581 aa, Zea mays subsp. mays
MKREYQDAGGSGGDMGSSKDKMMAAAAGAGEQEEEDVDELLAALGYKVRSSDMADVAQKLEQLEMAMGMGGVGGAGATADDGFVSHLATDTVHYNPSDLSSWVESMLSELNAPPAPLPPATPAPRLASTSSTVTSGAAAGAGYFDLPPAVDSSSSTYALKPIPSPVAAPSADPSTDSAREPKRMRTGGGSTSSSSSSSSSMDGGRTRSSVVEAAPPATQASAAANGPAVPVVVVDTQEAGIRLVHALLACAEAVQQENFSAAEALVKQIPMLASSQGGAMRKVAAYFGEALARRVYRFRPPPDSSLLDAAFADLLHAHFYESCPYLKFAHFTANQAILEAFAGCRRVHVVDFGIKQGMQWPALLQALALRPGGPPSFRLTGVGPPQPDETDALQQVGWKLAQFAHTIRVDFQYRGLVAATLADLEPFMLQPEGDDTDDEPEVIAVNSVFELHRLLAQPGALEKVLGTVRAVRPRIVTVVEQEANHNSGTFLDRFTESLHYYSTMSDSLEGAGAGSGQSTDASPAAAGGTDQVMSEVYLGRQICNVVACEGAERTERHETLGQWRSRLGGSGFAPVHLGSNA

SEQ ID NO: 13811 - protein, 581 aa, Zea mays subsp. mays
MKREYQDAGGSGGDMGSSKDKMMAAAAVAGEQEEEDVDELLAALGYKVRSSDMADVAQKLEQLEMAMGMGGVGGAGATADDGFVSHLATDTVHYNPSDLSSWVESMLSELNAPPAPLPPATPAPRLASTSSTVTSGAAAGAGYFDLPPAVDSSSSTYALKPIPSPVAAPSADPSTDSAREPKRMRTGGGSTSSSSSSSSSMDGGRTRSSVVEAAPPATQASAAANGPAVPVVVVDTQEAGIRLVHALLACAEAVQQENFSAAEALVKQIPMLASSQGGAMRKVAAYFGEALARRVYRFRPPPDSSLLDAAFADLLHAHFYESCPYLKFAHFTANQAILEAFAGCRRVHVVDFGIKQGMQWPALLQALALRPGGPPSFRLTGVGPPQPDETDALQQVGWKLAQFAHTIRVDFQYRGLVAATLADLEPFMLQPEGDDTDDEPEVIAVNSVFELHRLLAQPGALEKVLGTVRAVRPRIVTVVEQEANHNSGTFLDRFTESLHYYSTMFDSLEGAGAGSGQSTDASPAAAGGTDQVMSEVYLGRQICNVVACEGAERTERHETLGQWRSRLGGSGFAPVHLGSNA

SEQ ID NO: 13812 - protein, 582 aa, Zea mays subsp. mays
MKREYQDAGGSGGGDMGSSKDKMMAAAAGAGEQEEEDVDELLAALGYKVRSSDMADVAQKLEQLEMAMGMGGVGGAGATADDGFVSHLATDTVHYNPSDLSSWVESMLSELNAPPAPLPPATPAPRLASTSSTVTSGAAAGAGYFDLPPAVDSSSSTYALKPIPSPVAAPSADPSTDSAREPKRMRTGGGSTSSSSSSSSSMDGGRTRSSVVEAAPPATQASAAANGPAVPVVVVDTQEAGIRLVHALLACAEAVQQENFSAAEALVKQIPMLASSQGGAMRKVAAYFGEALARRVYRFRPPPDSSLLDAAFADLLHAHFYESCPYLKFAHFTANQAILEAFAGCRRVHVVDFGIKQGMQWPALLQALALRPGGPPSFRLTGVGPPQPDETDALQQVGWKLAQFAHTIRVDFQYRGLVAATLADLEPFMLQPEGDDTDDEPEVIAVNSVFELHRLLAQPGALEKVLGTVRAVRPRIVTVVEQEANHNSGTFLDRFTESLHYYSTMFDSLEGAGAGSGQSTDASPAAAGGTDQVMSEVYLGRQICNVVACEGAERTERHETLGQWRSRLGGSGFAPVHLGSNA

SEQ ID NO: 13813 - protein, 581 aa, Zea mays subsp. mays
MKREYQDAGGSGGDMGSSKDKMMAAAAVAGEQEEEDVDELLAALGYKVRSSDMADVAQKLEQLEMAMGMGGVGGAGATADDGFVSHLATDTVHYNPSDLSSWVESMLSELNAPPAPLPPATPAPRLASTSSTVTSGAAAGAGYFDLPPAVDSSSSTYALKPIPSPVAAPSADPSTDSAREPKRMRTGGGSTSSSSSSSSSMDGGRTRSSVVEAAPPATQASAAANGPAVPVVVVDTQEAGIRLVHALLACAEAVQQENFSAAEALVKQIPMLASSQGGAMRKVAAYFGEALARRVYRFRPPPDSSLLDAAFADLLHAHFYESCPYLKFAHFTANQAILEAFAGCRRVHVVDFGIKQGMQWPALLQALALRPGGPPSFRLTGVGPPQPDETDALQQVGWKLAQFAHTIRVDFQYRGLVAATLADLEPFMLQPEGDDTDDEPEVIAVNSVFELHRLLAQPGALEKVLGTVRAVRPRIVTVVKQEANHNSGTFLDRFTESLHYYSTMFDSLEGAGAGSGQSTDASPAAAGGTDQVMSEVYLGRQICNVVACEGAERTERHETLGQWRSRLGGSGFAPVHLGSNA

SEQ ID NO: 13814 - protein, 581 aa, Zea mays subsp. mays
MKREYQDAGGSGGDMGSSKDKMMAAAAVAGEQEEEDVDELLAALGYKVRSSDMADVAQKLEQLEMAMGMGGVGGAGATADDGFVSHLATDTVHYNPSDLSSWVESMLSELNAPPAPLPPATPAPRLASTSSTVTSGAAAGAGYFDLPPAVDSSSSTYALKPIPSPVAAPSADPSTDSAREPKRMRTGGGSTSSSSSSSSSMDGGRTRSSVVEAAPPATQASAAANGPAVPVVVVDTQEAGIRLVHALLACAEAVQQENFSAAEALVKQIPMLASSQGGAMRKVAAYFGEALARRVYRFRPPPDSSLLDAAFADLLHAHFYESCPYLKFAHFTANQAILEAFAGCRRVHVVDFGIKQGMQWPALLQALALRPGGPPSFRLTGVGPPQPDETDALQQVGWKLAQFAHTIRVDFQYRGLVAATLADLEPFMLQPEGDDTDDEPEVIAVNSVFELHRLLAQPGALEKVLGTVRAVRPRIVTVVEQEASHNSGTFLDRFTESLHYYSTMFDSLEGAGAGSGQSTDASPAAAGGTDQVMSEVYLGRQICNVVACEGAERTERHETLGQWRSRLGGSGFAPVHLGSNA

SEQ ID NO: 13815 - protein, 166 aa, Brassica rapa subsp. pekinensis
HFTANQAILEAFEGKKRVHVIDFSMNQGLQWPALMQALALREGGPPVFRLTGIGPPAADNSDHLHEVGCKLAQLAEAIHVEFEYRGFVANSLADLDASMLELRPSEIEAVAVNSVFELHKLLGRTGGIEKVLGVVKQIKPVIFTVVEQESSHNGPVFLDRFTESLH

SEQ ID NO: 13816 - protein, 593 aa, Arabidopsis thaliana
MVEQTVVREHIKARVMSLVRSAEPSSYRNPKLYTLNENGNNNGVSSAQIFDPDRSKNPCLTDDSYPSQSYEKYFLDSPTDEFVQHPIGSGASVSSFGSLDSFPYQSRPVLGCSMEFQLPLDSTSTSSTRLLGDYQAVSYSPSMDVVEEFDDEQMRSKIQELERALLGDEDDKMVGIDNLMEIDSEWSYQNESEQHQDSPKESSSADSNSHVSSKEVVSQATPKQILISCARALSEGKLEEALSMVNELRQIVSIQGDPSQRIAAYMVEGLAARMAASGKFIYRALKCKEPPSDERLAAMQVLFEVCPCFKFGFLAANGAILEAIKGEEEVHIIDFDINQGNQYMTLIRSIAELPGKRPRLRLTGIDDPESVQRSIGGLRIIGLRLEQLAEDNGVSFKFKAMPSKTSIVSPSTLGCKPGETLIVNFAFQLHHMPDESVTTVNQRDELLHMVKSLNPKLVTVVEQDVNTNTSPFFPRFIEAYEYYSAVFESLDMTLPRESQERMNVERQCLARDIVNIVACEGEERIERYEAAGKWRARMMMAGFNPKPMSAKVTNNIQNLIKQQYCNKYKLKEEMGELHFCWEEKSLIVASAWR

SEQ ID NO: 13817 - protein, 352 aa, Arabidopsis thaliana
LSMVNELRQIVSIQGDPSQRIAAYMVEGLAARMAASGKFIYRALKCKEPPSDERLAAMQVLFEVCPCFKFGFLAANGAILEAIKGEEEVHIIDFDINQGNQYMTLIRSIAELPGKRPRLRLTGIDDPESVQRSIGGLRIIGLRLEQLAEDNGVSFKFKAMPSKTSIVSPSTLGCKPGETLIVNFAFQLHHMPDESVTTVNQRDELLHMVKSLNPKLVTVVEQDVNTNTSPFFPRFIEAYEYYSAVFESLDMTLPRESQERMNVERQCLARDIVNIVACEGEERIERYEAAGKWRARMMMAGFNPKPMSAKVTNNIQNLIKQQYCNKYKLKEEMGELHFCWEEKSLIVASAWR

SEQ ID NO: 13818 - protein, 616 aa, Glycine max
  unsure (1)..(616): unsure at all Xaa locations
KIQQDYITERLCLVYYFSSQKFTXVASNRRIMSLVRSADLAPTSYENAKLFSLKGTDVRPGLSSQIFGPDKHRSMYMTDAYSGEGYEKYFHDSQTEELIEPSSSSISGSSIHPDVASSYQLRASSGASMVANNPSDSSFMSTRHHDAYQSNSGSDLMDLDSRDDEGLMRLRLKALERALLDDEEEDIFEAAQSMEIDPDIAEWADSIHNMLLHGSPKESSSSDSNTSSISSTKEISQTSQTPKKLLYECAIALSEGNEVEGSSMINNLRQMVSIQGEPSQRIAAYMVEGLAARLAESGKSIYKALRCKEPPTSDRLAAMQILFEVCPCFKFGFIAANNAITEAVKDDMKIHIIDFDINQGSQYINLIQTLASRSSKPPHVRLTGVDDPESVQRSVGGLRNIGQRLEKLAEALGLPFEFRAVASRTSIVTPSMLNCSPDEALVVNFAFQLHHMPDESVSTVNERDQLLRLVKSLNPKLVTVVEQDVNTNTTPFLPRFVEAYNYYSAVFESLDATLPRESQDRMNVERQCLARDIVNVVACEGEDRIERYEVAGKWRARMTMAGFTSSPMSTNVTDEIRKLIKTVYCDRYKIKEEMGALHFGWEDKNLIVASAWKLPR

SEQ ID NO: 13819 - protein, 606 aa, Glycine max
KVQQDFISEHFKRRTMSLVISTELADTSYGNAKLYTLKGTDVTPDLSSHNFAPDKHRNMYMTKSYSCESYEKYFHDSPTEELIEPSSSSISGNSVHPDGASSYLLRASSGASVIVNNPFDTSIWSTRHRDAYQSNSVSDFVENGSPDGLDFDGEMRLKLQELERALLSDEEEEEQGIFETVQSMEIDPDMVEWANPLQDMLLHDSPKESSSSDSSNLSSISSTTKDTSQNSPQTPKQLLYDCARILSEGNEQEATSMINKLRQMVSIQGDPSQRIAAYMVEGLAARVATSGKCIYQALRCKEPPSNDRLAAMQILFEVCPCFKFGYIAANGAIAEAVRDEKKVHIIDFDISQGTQYITLIQTLASMPGRPPHVRLTGVDDPESVQRSIGGINIIGQRLEKLAEELGLPFEFRAVASGTSNVTQSMLDCRPGEALVVNFAFQLHHMRDETVSTVNERDQLLRMVKSLNPKLVTVVEQDMNTNTSPFLPRFVEAYNYYSAVFNTLDATLPRESQDRMNVERQCLAKDIVNIVACEGEERIERYEVAGKWRARLSMAGFTPSPMSTNVREAIRKLIIKQYCDKFKIKEEMGGLHFGWEDKNLIVASAWK

SEQ ID NO: 13820 - protein, 623 aa, Glycine max
  unsure (1)..(623): unsure at all Xaa locations
KVQQDFISEHLFYYFSRYILKVCLSXVNKRRTMSLVISAELADTSYGNAKLYTLKGTDVTPDLSSHNFAPDKHRNMYMTKSYSCESYEKYFHDSPTEELIEPSSSSISGNSVHPDGASSYLLRASSGASVIVNNPFDTSIWSTRHRDAYQSNSVSDFVENGSPDGLDFDGEMRLKLQELERALLSDEEEEEQGIFETVQSMEIDPDMVEWANPLQDMLLHDSPKESSSSDSSNLSSISSTTKDTSQNSPQTPKQLLYDCARILSEGNEQEATSMINKLRQMVSIQGDPSQRIAAYMVEGLAARVATSGKCIYQALRCKEPPSNDRLAAMQILFEVCPCFKFGYIAANGAIAEAVRDEKKVHIIDFDISQGTQYITLIQTLASMPGRPPHVRLTGVDDPESVQRSIGGINIIGQRLDSSRSSRFGSSEFRAVASGTSNVTQSMLDCRPGEALVVNFAFQLHHMRDETVSTVNERDQLLRMVKSLNPKLVTVVEQDMNTNTSPFLPRFVEAYNYYSAVFNTLDATLPRESQDRMNVERQCLAKDIVNIVACEGEERIERYEVAGKWRARLSMAGFTPSPMSTNVREAIRKLIIKQYCDKFKIKEEMGGLHFGWEDKNLIVASAWK

SEQ ID NO: 13821 - protein, 553 aa, Oryza sativa (japonica cultivar-group)
MSFIRRADPSTTYADNLYIHKFGTPNSNFAARRYASDTQLFRYGPEPYNPENSFYNQQASPMPYMVTADGHSPSSADNSCSDVAKDSPLVSNVSQQNSQSISDNQSSELEVEFDEDDIRMKLQELEHALLDDSDDILYEISQAGSINDEWADPMKNVILPNSPKESESSISCAGSNNGEPRTPKQLLFDCAMALSDYNVDEAQAIITDLRQMVSIQGDPSQRIAAYLVEGLAARIVASGKGIYKALSCKEPPTLYQLSAMQILFEICPCFRFGFMAANYAILEACKGEDRVHIIDFDINQGSQYITLIQFLKNNANKPRHLRITGVDDPETVQRTVGGLKVIGQRLEKLAEDCGISFEFRAVGANIGDVTPAMLDCCPGEALVVNFAFQLHHLPDESVSIMNERDQLLRMVKGLQPKLVTLVEQDANTNTAPFQTRFREVYDYYAALFDSLDATLPRESPDRMNVERQCLAREIVNILACEGPDRVERYEVAGKWRARMTMAGFTPCPFSSNVISGIRSLLKSYCDRYKFEEDHGGLHFGWGEKTLIVSSAWQ

SEQ ID NO: 13822 - protein, 477 aa, Oryza sativa
  unsure (1)..(477): unsure at all Xaa locations
MSFIRRADPSTTYADNLYQNSQSISDNQSSELEVEFDEDDIRMKLQELEHALLDDSDDILYEISQAGSINDEWADPMKNVILPNSPKESESSISCAGSNNGEXXRTPKQLLFDCAMALSDYNVDEAQAXITDLRQMXXNPGDPSQRIAAYLVEGLAARIVASGKGIYKALSCKEPPTLYQLSAMQILFEICPCFRFGFMAANYAILEACKGEDRVHIIDFDINQGSQYITLIQFLKNNANKPRHLRITGVDDPETVQRTVGGLKVIGQRLEKLAEDCGISFEFRAVGANIGDVTPAMLDCRPGEALVVNFAFQLHHLPDESVSIMNERDQLLRMVKGLQPKLVTLVEQDANTNTAPFQTRFREVYDYYAALFDSLDATLPRESPDRMNVERQCLAREIVNILACEGPDRVERYEVAGKWRARMTMAGFTPCPFSSNVISGIRSLLKSYCDRYKFEEDHGGLHFGWGEKTLIVSSAWQ

SEQ ID NO: 13823 - protein, 525 aa, Triticum aestivum
  unsure (1)..(525): unsure at all Xaa locations
MSFVGRVDPSTTYADNIYVHKFGAPNSNFAARRFGSDTQLFRYGPEPFNSEDYGHMGFPEAPSAAFQNSFYNQQASLTPCSDAEKDSPVCSNISQQLSAKITNSRRTMWGIASSGERDRSXRRLRDALLDDGDDRVALALLAFSISDERDCNMSENFGAISAKSYQILGGCAAGYCGLADRPGEPCCAAAAAGAVVVVGDALATCPLRPLLVSIHGDPSHRIAAYLEEGLAARIVASGTGIYKALTCKDPPTLYQLSAMQILFEICPCYRFGFMAANYAILEACKGEXKPRHLRITGVDDHDTVHTTVGGLKVIGQRLEKLAEDCGISFEFRAVGADIGDVTPAMLDCRPGEALVVNFAFQLHHLPDESVSIMNERDQLLRMVKGLQPKLVTLVEQDANTNTAPFQTRFREVYDYYSALFDSLDATLPRESPDRMNVERQCLAREIVNILACEGPDRVERYEVAGKWRARMTMAGFAPCPFSSNVVGGIRSLLSSYCDRDECEEDHGGLHFGWGEKTLIVASAWQ

SEQ ID NO: 13824 - protein, 578 aa, Zea mays subsp. mays
MKREYQDAGGSGGDMGSSKDKMMAAAAGAGEQEEEDVDELLAALGYKVRSSDMADVAQKLEQLEMAMGMGGVGGAGATADDGFVSHLATDTVHYNPSDLSSWVESMLSELNAPPAPLPPATPAPRLASTSSTVTSGAAAGAGYFDLPPAVDSSSSTYALKPIPSPVAAPSADPSTDSAREPKRMRTGGGSTSSSSSSSSSMDGGRTRSSVVEAAPPATQASAAANGPAVPVVVDTQEAGIRLVHALLACAEAVQQENFSAAEALVKQIPMLASSQGGAMRKVAAYFGEALARRVYRFRPPPDSSLLDAAFADLLHAHFYESCPYLKFAHFTANQAILEAFAGCRRVHVVDFGIKQGMQWPALLQALALRPGGPPSFRLTGVGPPQPDETDALQQVGWKLAQFAHTIRVDFQYRGLVAATLADLEPFMLQPEGDDTDDEPEVIAVNSVFELHRLLAQPGALEKVLGTVRAVRPRIVTVVEQEANHNSGTFLDRFTESLHYYSTMFDSLEGAGSGQSADASPAAAGGTDQVMSEVYLGRQICNVVACEGAERTERHETLGQWRSRLGGSGFAPVHLGSNA

SEQ ID NO: 13825 - protein, 579 aa, Zea mays subsp. mays
MKREYQDAGGSGGDMGSSKDKMMAAAAGAGEQEEEDVDELLAALGYKVRSSDMADVAQKLEQLEMAMGMGGVGGAGATADDGFVSHLATDTVHYNPSDLSSWVESMLSELNAPPAPLPPATPAPRLASTSSTVTSGAAAGAGYFDLPPAVDSSSSTYALKPIPSPVAAPSADPSTDSAREPKRMRTGGGSTSSSSSSSSSMDGGRTRSSVVEAAPPATQASAAANGPAVPVVVVDTQEAGIRLVHALLACAEAVQQENFSAAEALVKQIPMLASSQGGAMRKVAAYFGEALARRVYRFRPPPDSSLLDAAFADLLHAHFYESCPYLKFAHFTANQAILEAFAGCRRVHVVDFGIKQGMQWPALLQALALRPGGPPSFRLTGVGPPQPDETDALQQVGWKLAQFAHTIRVDFQYRGLVAATLADLEPFMLQPEGDDTDDEPEVIAVNSVFELHRLLAQPGALEKVLGTVRAVRPRIVTVVEQEANHNSGTFLDRFTESLHYYSTMFDSLEGAGSGQSADASPAAAGGTDQVMSEVYLGRQICNVVACEGAERTERHETLGQWRSRLGGSGFAPVHLGSNA

SEQ ID NO: 13826 - protein, 579 aa, Zea mays subsp. mays
MKREYQDAGGSDGDMGSSKDKMMAAAAGAGEQEEEDVDELLAALGYKVRSSDMADVAQKLEQLEMAMGMGGVGGAGATADDGFVSHLATDTVHYNPSDLSSWVESMLSELNAPPAPLPPATPAPRLASTSSTVTSGAAAGAGYFDLPPAVDSSSSTYALKPIPSPVAAPSADPSTDSAREPKRMRTGGGSTSSSSSSSSSMDGGRTRSSVVEAAPPATQASAAANGPAVPVVVVDTQEAGIRLVHALLACAEAVQQENFSAAEALVKQIPMLASSQGGAMRKVAAYFGEALARRVYRFRPPPDSSLLDAAFADLLHAHFYESCPYLKFAHFTANQAILEAFAGCRRVHVVDFGIKQGMQWPALLQALALRPGGPPSFRLTGVGPPQPDETDALQQVGWKLAQFAHTIRVDFQCRGLVAATLADLEPFMLQPEGDDTDDEPEVIAVNSVFELHRLLAQPGALEKVLGTVRAVRPRIVTVVEQEANHNSGTFLDRFTESLHYYSTMFDSLEGAGSGQSADASPAAAGGTDQVMSEVYLGRQICNVVACEGAERTERHETLGQWRSRLGGSGFAPVHLGSNA

SEQ ID NO: 13827 - protein, 266 aa, Zea mays subsp. mays
PSADPSTDSAREPKRMRTGGGSTSSSSSSSSSMDGGRTRSSVVEAAPPATQASAAANGPAVPVVVVDTQEAGIRLVHALLACAEAVQQENFSAAEALVKQIPMLASSQGGAMRKVAAYFGEALARRVYRFRPPPDSSLLDAAFADLLHAHFYESCPYLKFAHFTANQAILEAFAGCRRVHVVDFGIKQGMQWPALLQALALRPGGPPSFRLTGVGPPQPDETDALQQVGWKLAQFAHTIRVDFQYRGLVAATLADLEPFMLQPEGD

SEQ ID NO: 13828 - protein, 244 aa, Oryza sativa (indica cultivar-group)
MQKALTTLNSEETIYASYCTLTNSFFASQVRAITYSKASLGLDQLAAIGSLYQFIRGGGEGKEAASQEEEQTPKLRSVIAHLVSRKRRRDRINEKLKALQELLPNCTKTDKVSMLDEAIDYLKSLQLQLQMLVMGKGMAPVVPPELQQYMHYITADPSQIPPIRPSEPRPFQITHATQQRQSNVESDFLSQMQNLHPSEPPQNFLRPPKLQLYTPEQQRRGLASSSGHNSGWITERNSSYNFLE

SEQ ID NO: 13829 - protein, 895 aa, Oryza sativa (japonica cultivar-group)
MRTATNCSSAYTCPAPEKCQSLVEVCGTCVTRGGAALFIIEWKQGLAVVLLLLPCCECETVSVVLEPSHHRSASHTARQSCCHARTWSTWAGSPPSKSCFGSSNHRRFCLSRSSLHLHAPQTRTNQTNPRGTAVTRHTVLAIVSLMSCHASALRSALSRRMPELDLAGEYHQVHTSAAAAAAAASAMPTAGHGMEEYPVVFIMMHAAIHRSVCERKRELTSRCPAGRGGEHGFAFGWSSRLCTRSTAANSSFLDFFTLSPRTAQMSDGNDFAELLWENGQAVVHGRKKHPQPAFPPFGFFGGTGGGGGGSSSRAQERQPGGIDAFAKVGGGFGALGMAPAVHDFASGFGATTQDNGDDDTVPWIHYPIIDDEDAAAPAALAAADYGSDFFSELQAAAAAAAAAAPPTDLASLPASNHNGATNNRNAPVATTTTREPSKESHGGLSVPTTRAEPQPQPQLAAAKLPRSSGSGGGEGVMNFSLFSRPAVLARATLESAQRTQGTDNKASNVTASNRVESTVVQTASGPRSAPAFADQRAAAWPPQPKEMPFASTAAAPMAPAVNLHHEMGRDRAGRTMPVHKTEARKAPEATVATSSVCSGNGAGSDELWRQQKRKCQAQAECSASQDDDLDDEPGVLRKSGTRSTKRSRTAEVHNLSERRRRDRINEKMRALQELIPNCNKACYVLQIDKASMLDEAIEYLKTLQLQVQMMSMGTGLCIPPMLLPTAMQHLQIPPMAHFPHLGMGLGYGMGVFDMSNTGALQMPPMPGAHFPCPMIPASSVPPFASLAGLPVRPSGVPQVSGAMANMVQDQQQGIANQQQQCLNKEAIQGANPGDSQMQIIMQRFLVQIMMNYYDTVVYAYKFVSLVRSQDVIFKSVSNYVCPDHLQYGEIVDSDV

SEQ ID NO: 13830 - protein, 417 aa, Oryza sativa (japonica cultivar-group)
MDAGATARSSSSSAMMMNQKKPLSDGELVELLWQDGGVVAHAQTRHRSSDVLARSGVTGEEETASAWFADGGGGGGGDDDALGLGMGRDIYSQLWHSFANVDGHAAGALALATPTPTPRAAARSDDVSSRLDEADLSICGSNAVVAPALPADDDDDIDAAAPREEEEEEEEGPGAARAAGASSSGGSGSGSGSYPLFKRGREELVDSLSEVADETRPSKRPAAKRRTRAAEVHNLSERRRRDRINEKLRALQELVPHCNKTDKASILDEAIEYLKSLQMQVQIMWMTTGIVPMMFPGTHQLMPPMGMGLNTACMPGAQAQGLNQMQRTTYYMNNSLPNQMPQIPSPAMNAPSVPDDMQNDNRIRGPRNPFLHCNDTLTATAQVPGLFTYGSQIAEQNEIQELLSGAVIPSSSDGTIK

SEQ ID NO: 13831 - protein, 217 aa, Oryza sativa
  unsure (1)..(217): unsure at all Xaa locations
KKALRTLHLXASLGLDQLAAIGSLYQFIRGGGEGKEAASQEEEQTPKLRKVNFHNFSERRRRDRINEKLKALQELLPNCTKTDKVSMLDEAIDYLKSLQLQLQMLVMGKGMAPVVPPELQQYMHYITADPSQIPPIRPSEPRPFQITHATQQRQSNVESDFLSQMQNLHPSEPPQNFLRPPKLQLYTPEQQRRGLASSSGHNSGWITERNSSYNFLE

SEQ ID NO: 13832 - protein, 244 aa, Oryza sativa; identical to SEQ ID NO: 13828

SEQ ID NO: 13833 - protein, 171 aa, Oryza sativa
MVEADDRSKQEIPRPASLGLDQLAAIGSLYQFIRGGGEGKEAASQEEEQTPKLRKRRRDRINEKLKALQELLPNCTKTDKVSMLDEAIDYLKSLQLQLQITHATQQRQSNVESDFLSQMQNLHPSEPPQNFLRPPKLQLYTPEQQRRGLASSSGHNSGWITERNSSYNFLE

SEQ ID NO: 13834 - protein, 96 aa, Oryza sativa
MEARRPTPTRRSRSAEFHNFSERRRRDRINEKLKALQELLPNCTKTDKVSMLDEAIDYLKSLQLQLQEQQRRGLASSSGHNSGWITERNSSYNFLE

SEQ ID NO: 13835 - protein, 208 aa, Triticum aestivum
  unsure (1)..(208): unsure at all Xaa locations
GAVEAKGSSARRPRIPKKKKKKKXAGLDKRRKVKKLIKIVDGRRQGSEXRMSIPTRRSRSADFHNFSERRRRDKINEKLKALQELLPNCTKTDKVSMLDEAIDYLKSLQLQLQMLVMGKGMAPVVPPELQQYMHYITTDPAAQLMQMPPSEPPRPFQITHATPQRESDVLSSQQHHLHPSADPPQIFFLPXKLQLYTPEQRGXVGSSX

SEQ ID NO: 13836 - protein, 114 aa, Triticum aestivum
  unsure (1)..(114): unsure at all Xaa locations
GGVKARGSPGQQGDLRYQEERKVKKLIKIADGRRQGFEEDVYPYPQHAGLDQRSRSADFHNFSERRRRDKINEKLKALQELLPNCTKTDKVSMLDEAIDYLKSLQLQLQMLVMX

SEQ ID NO: 13837 - protein, 544 aa, Oryza sativa (japonica cultivar-group)
MADTPTSRMIHPFSNIPSQNLKQFQYSDNPQHPCHPYRAPSDTHVVPHHYGLKSHSPDAGYESQATPNKYTLDSSEGAGCMRHDSPSSQSFTTRSGSPLSQEDSHSDSTDGSPVGASCVTEDPNDLKQKLKDLEAVMLGPDSEIVNSLENSVANQLSLEPEKWVRMMGIPRGNLKELLIACARAVEEKNSFAIDMMIPELRKIVSVSGEPLERLGAYMVEGLVARLASSGISIYKALKCKEPKSSDLLSYMHFLYEACPYFKFGYMSANGAIAEAVKGEDRIHIIDFHISQGAQWISLLQALAARPGGPPTVRITGIDDSVSAYARGGGLELVGRRLSHIASLCKVPFEFHPLAISGSKVEAAHLGVIPGEALAVNFTLELHHIPDESVSTANHRDRLLRMVKSLSPKVLTLVEMESNTNTAPFPQRFAETLDYYTAIFESIDLTLPRDDRERINMEQHCLAREIVNLIACEGEERAERYEPFGKWKARLTMAGFRPSPLSSLVNATIRTLLQSYSDNYKLAERDGALYLGWKSRPLVVSSAWH

SEQ ID NO: 13838 - protein, 721 aa, Petunia x hybrida
MIAIPQGAKGVLGVSSFMPSISSEEQICKKDANFARNDPQICKKDGNFARNEPQICKKEGNFTRNEPVSVLDTRSPSPSSSSCSYAGKVEGQKEELVKELQPFPLVGLEPEKCSLGFGDLDNLLPELCGADQTLLRWISGDMEDPSVSLKQLLLGGNANGFHGSSGFEASAAGSLVHTDNVSFSGSDVSLNANIEKIGSVIDSNGRPSNGFDYLNANLYAKSLPLPPASSFQEQKLGQKPQSFSPNQALFQNASYGNMFDSSSYDDTNQEQPPSKRHNSGTLGSSVGGLLPKVPFFDPSGDLSMRRQLLGEMQQHFNLLPPQQFQPKPLIVPKLEAACGGGNGSLMVPRHQQQEQQFIYDQIFQASELLLAGHFSNAQMILARLNQQLSPIGKPFKRAAFYFKEALQLPFLLPCTSTFLPPRSPTPFDCVLKMDAYKSFSEVSPLIQFMNFTSNQAILEALGDVERIHIIDFDIGFGAQWSSFMQELPSSNRKATSLKITAFASPSTHHSVEIAIMHESLTQFANDAGIRFELEVINLDTFDPKSYPLSSLRSSDCEAIAINFPIWSISSCLFAFPSLLHYMKQLSPKIIVSLERGCERTELPLKHHLLHALQYYEILLASIDAANVTPEIGKKIEKSLLLPSIENMVLGRLRSPDRMPQWRNLFASAGFSPVAFSNLTEIQAECVVKRTQVGGFHVEKRQSSLVLCWKQQELLSALTWRC

SEQ ID NO: 13839 - protein, 469 aa, Oryza sativa
  unsure (1)..(469): unsure at all Xaa locations
MADTPTSRMIHPFSNIXEPKPEAVPVFXXSTAPLPPLCASCVTEDPNDLKQKLKDLEAVMLGPDSEIVNSLENSVANQLSLEPEKWVRMMGIPRGNLKELLIACARAVEEKNSFAIDMMIPELRKIVSVSGEPLERLGAYMVEGLVARLASSGISIYKALXXCKEPKSSDLLSYMHFLYEACPYFKFGYMSANGAIAEAVKGEDRIHIIDFHISQGAQWISLLQALAARPGGPPTVRITGIDDSVSAYARGGGLELVGRRLSHIASLCKVPFEFHPLAISGSKVEAAHLGVIPGEALAVNFTLELHHIPDESVSTANHRDRLLRMVKSLSPKVLTLVEMESNTNTAPXFPQRFAETLDYYTAIFESIDLTLPRDDRERINMEQHCLAREIVNLIACEGEERAERYEPFGKWKARLTMAGFRPSPLSSLVNATIRTLLQSYSDNYKLAERDGALYLGWKSRPLVVSSAWH

SEQ ID NO: 13840 - protein, 458 aa, Oryza sativa
  unsure (1)..(458): unsure at all Xaa locations
MADTPTSRMIHPFSNIPSQNLKQFQYYSHSDSTDGSPVGASCVTEDPNDLKQKLKDLEAVMLGPDSEIVNSLENSVANQLSLEPEKWVRMMXXIPRGNLKELLIACARAVEEKNSFAIDMMIPELRKIVSVSGEPLERLGAYMVEGLVARLASSGISIYKALKCKEPKSSDLLSYMHFLYEACPYFKFGYMSANGAIAEAVKGEDRIHIIDFHISQGAQWISLLQALAARPGGPPTVRITGIDDSVSAYARGGGLELVGRRLSHIASLCKVPFEFHPLAISGSKVEAAHLGVIPGEALAVNFTLELHHIPDEXXMVKSLSPKVLTLVEMESNTNTAPFPQRFAETLDYYTAIFESIDLTLPRDDRERINMEQHCLAREIVNLIACEGEERAERYEPFGKWKARLTMAGFRPSPLSSLVNATIRTLLQSYSDNYKLAERDGALYLGWKSRPLVVSSAWH

SEQ ID NO: 13841 - protein, 291 aa, Triticum aestivum
  unsure (1)..(291): unsure at all Xaa locations
XEACPYFKFGYMSANGAIAEAVKGEDRIHIIDFHIAQGAQWISLLQALAARPGGPPTVRITGLDDSVSAYARGGGLDLVGRRLSHIAGLCNVHVEFHSVAMAGEEVDEGHLGVVRGEALAVNFTLELHHIPDATVSTANHRDRILRLVKCRATRVPTSSPQGTGRSTSAWQQQAPETLDYYAAIFESIDLTLPRDDRERVNMEQHCLAREVVNLIACEGAERVERHEVFGKWKARLTMAGFRPSPLSALVNATISTLLQSYSENYKLAERDGXALYLGWKNKPLVVSSAWH

SEQ ID NO: 13842 - protein, 338 aa, Triticum aestivum
  unsure (1)..(338): unsure at all Xaa locations
MADTPTSRMIHPFSNMQGQNPKQFQFQYSDNPQHPCRPYQPSPDTHVVPQHHYSLKSHSSDASYQLINASYENQVAQMKHTLDSSAAAGCMRHDSPSSHSFTPPSIGSGSGSPSSHDDSHSDSTNGSPVSASCVTVTTEDPNDLKQKLKDLEAEMLGPDAEXXVNSLESSVAKQLSLEPEKWAQMMDFPRGDLKELLLACARAVEEKNMYAVDVMVPELRKMVSVSGTPLERLGAYMVEGLVARLAFXXHFIXKSLXRCKAQXXSDLXLSYMHFLYEACPYFKFXYMSGNGAIXEAXKGXXQVHIIXFHYPXKEQWXSFFKAXQXSPGGXPXXRITRL

SEQ ID NO: 13843 - protein, 181 aa, Triticum aestivum
HLGVIPGEALAVNFTLELHHIPDETVSTANHRDRILRLVKSLRPKVLTLVEQESNTNTAPFPQRFAETLEYYTAIFESIDLTLPRDDKERVNMEQHCLAREVVNLIACEGAERVERHEVFGKWKARLTMAGFRPSPLSSLVNATISTLLQSYSENYKLAERDGALYLGWKNKPLVVSSAWH

SEQ ID NO: 13844 - protein, 449 aa, Glycine max
SPSRPEQPLLHVTYVFIQNHSTTSKKNETRHALLELETALMAPDGEDQITTSSTSLGVGSRSTTNQWRKTLQGFPSCNLKQLLIVCAKALSENNMQHFDQLIEKARSAVSITGEPIQRLGAYLVEGLVARKEASGNNIYHALRCREPEGEELLTYMQLLFEICPYLKFGYMAANGAIAEACRNEDHIHIIDFQIAQGTQWMTLLQALAARPGGAPHVRITGIDDPVSKYARGDGLEVVGKRLALMSEKFGIPVEFHGVPVFAPDVTREMLDIRPGEALAVNFPLQLHHTADESVHVSNPRDGLLRLVRSLSPKVTTLVEQESNTNTTPFFNRFIETLDYYLAIFESIDVTLPRESKERINVEQHCLARDIVNIIACEGKERVERHELLGKWKSRLTMAGFRQYPLSSYMNSVIRSLLRCYSKHYNLVEKDGAMLLGWKDRNLISTSAWY

SEQ ID NO: 13845 - protein, 449 aa, Glycine max
SPTRPKQPLLHVTYVFIQNHSTTSKKNETRHALLELETALMAPDGEDQITTSSTSLGVGSRSTTNQWRKTLQGFPSCNLKQLLIVCAKALSENNMQHFDQLIEKARSAVSITGEPIQRLGAYLVEGLVARKEASGNNIYHALRCREPEGKDLLSYMQLLYEICPYLKFGYMAANGAIAEACRNEDQIHIIDFQIGQGTQWVTLLQALAARPGGAPHVRITGIDDPLSKYVRGDGLEAVGKRLAAISQTFNIRVEFHGVPVLAPDVTKDVLDVRPGEALAVNFPLQLHHTADESVDMSNPRDGLLRLVKSLSPKVTTLVEQESNTNTTPFFNRFIETLDYYLAMFESIDVSLPRKSKVQINMEQHCLARDIVNIIACEGKERVERHELLGKWKSRLTMAGFRQYPLSSYMNSVIRSLLRCYSKHYNLVEKDGAMLLGWKDRNLISTSAWY

SEQ ID NO: 13846 - protein, 397 aa, Glycine max
  unsure (1)..(397): unsure at all Xaa locations
XAAQINIQHSQAFHFQTLHFPPNNLKQLLIACAKALSENNTKDFDQLVGKAKDAVSINGEPIQRLGAYMVEGLVARMQASGNSIYHALRCREPEGEELLTYMQLLFEICPYLKFGYMAANGAIAQACRNEDHIHIIDFQIAQGTQWMTLLXQALAARPGGAPHVRITGIDDPVSKYARGDGLEVVGKRLALMSEKFGIPVEFHGVPVFAPNVTREMLDIRPGEALAVNFPLQLHHTADESVHVSNPRDGLLRLVRSLSPKVTTLVEQESNTNTTPFFNRFIETLDYYLAIFESIDVTLPRDSKERINVEQHCLARDIVNIIACEGKERVERHELFGKWKSRLKMAGFQQCPLSSYVNSVIRSLLRCYSEHYTLVEKDGAMLLGWKDRNLISASAWHC

SEQ ID NO: 13847 - protein, 454 aa, Glycine max
  unsure (1)..(454): unsure at all Xaa locations
PTRPKPQKHSDTTNTNTIDSFPLYSDRNSLLQNASSNQKIQHALLELETALMAPDDDQVTTPNTLALMEEEATLEAFPPNNLKQLLIACAKALSENNMNDFDQLVGRAKDAVSINGEPIQRLGAYMVEGLVARTQASGNSIYKSLRCREPEGEELLTYMQLLXFEICPYLKFGYMAANGAIAQACRNEDHIHIIDFQIAQGTQWMTLLQALSKYGSSIPVIRTXGIDDPVSKYARGDGPEVVGKRLALMSEKFGIPVEFHGVPVFAPNVTREMLDIRPGEALAVNFPLQLHHTADESVHVSNPRDGLLRLVRSLSPKVTTLVEQESNTNTTPFFNRFIETLDYYLAIFESIDVTLPRDSKERINVEQHCLARDIVNIIACEGKERVERHELFGKWKSRLTMAGFRQCPLSSYVNSVIRSLLMCYSEHYTLVEKDGAMLLGWKDRNLISASAWHC

SEQ ID NO: 13848 - protein, 572 aa, Oryza sativa (japonica cultivar-group)
MDLHQLLKYRLTGANVVYEIPTENNLQNSPWQANPLKYEFSDSPYTPLSSQFECDNLSALTNTPDNQSSTETISAQPISPLEADSSYRQAGILLQENIQVGADPLYATSRHNMQHALREIETVLMAPDTDDATTSTKHEFEEIKPAQLVRQRSRTWSHESRQPLPGVGRSQFASGGYPTASYEFRPEKRQRELREDPQIIVKQLLTRCAEALSEDRTEEFHKLVQEARGVVSINGEPIQRLGAYLLEGLVARHGNSGTNIYRALKCREPESKELLSYMRILYNICPYFKFGYMAANGAIAEALRTENNIHIIDFQIAQGTQWITLIQALAARPGGPPRVRITGIDDPVSEYARGEGLDIVGKMLKSMSEEFKIPLEFTPLSVYATQVTKEMLEIRPGEALSVNFTLQLHHTPDESVDVNNPRDGLLPDGERAVPEGDYFGRAGVTHQHNAFLDEVWGDHGVLLRHVRVDRLPTCRGTTRRGSAWSSTASPRHIVNIIACEGKDRVERHELLGKWKSRLTMAGFRPYPLSSYVNSVIRKLLACYSDKYTLDEKDGAMLLGWRSRKLISASAWH

SEQ ID NO: 13849 - protein, 313 aa, Oryza sativa
  unsure (1)..(313): unsure at all Xaa locations
XYRALXXCREPESKELLSYMRILYNICPYFKFGYMAANGAIAEALRTENNIHIIDFQIAQGTQWITLIQALAARPGGPPRVRITGIDDPVSEYARGEGLDIVGKMLKSMSEEFKIPLEFTPLSVYATQVTEEMLEIRPGEALSVNFTLQLHHTPDESVDVNNPRDGLLRMVKGLCPKVTTLVEQESHTNTTPFLMRFGETMEYYSAMFESIDANLPRDNKERISVEQHCLAKDIVNIIACEGKDRVERHELLGKWKSRLTMAGFRPYPLSSYVNSVIRKLLACYSDKYTLDEKDGAMLLGWRSRKLISASAWH

SEQ ID NO: 13850 - protein, 733 aa, Mus musculus
MSGSRQAGSGSAGTSPGSSAASSVTSASSSLSSSPSPPSVAASAATLVSGGVAPAAGSGGLGGPGRPVLVAAAVSGSASAGGAVSAGQSRLSCAARPSAGVGGSSSSLGSSSRKRPLLVPLCNGLLNSYEDKSNDFVCPICFDMIEEAYMTKCGHSFCYKCIHQSLEDNNRCPKCNYVVDNIDHLYPNFLVNELILKQKQRFEEKRFKLDHSVSSTNGHRWQIFQDLLGTDQDNLDLANVNLMLELLVQKKKQLEAESHAAQLQILMEFLKVARRNKREQLEQIQKELSVLEEDIKRVEEMSGLYSPVSEDSTVPQFEAPSPSHSSIIDSTEYSQPPGFSGTSQTKKQPWYNSTLASRRKRLTAHFEDLEQCYFSTRMSRISDDSRTASQLDEFQECLSKFTRYNSVRPLATLSYASDLYNGSSIVSSIEFDRDCDYFAIAGVTKKIKVYEYGTVIQDAVDIHYPENEMTCNSKISCISWSSYHKNLLASSDYEGTVILWDGFTGQRSKVYQEHEKRCWSVDFNLMDPKLLASGSDDAKVKLWSTNLDNSVASIEAKANVCCVKFSPSSRYHLAFGCADHCVHYYDLRNTKQPIMVFKGHRKAVSYAKFVSGEEIVSASTDSQLKLWNVGKPYCLRSFKGHINEKNFVGLASNGDYIACGSENNSLYLYYKGLSKTLLTFKFDTVKSVLDKDRKEDDTNEFVSAVCWRALSDGESNVLIAANSQGTIKVLELV

SEQ ID NO: 13851 - protein, 662 aa, Rosa hybrid cultivar
MEECSTGALVPAVKVEPILSSIGGSVDPCSSDLGRLTEEKGMSEVDKDLLCPICMQIVKDAFLTACGHSFCYMCIITHLSNKSDCPCCAQSLSKNQLFPNFLLDKLLKKTSAQQISKSAPPVEHFRQALQQGCEVSIKELDTLLALLAEKKRKMEQEEAERNMQILLDFLNCLRKQKVQELNEVQSHLQFLKEDISVVERRRMELYRARDRYSVRQRMLGGDDSVNGARNSWPSSIDNNTSALRVRGGTSSWNIQGRGLQRNDALSASDSQYVNQSGLAVARKKRVHALFDELQECYLQKRRQMNQPYSQLERDRTVIPREGYSTGLADFQSVLTTLTRYSRMRVIAELRHEDLFHSANIVSSIEFDRDYELFATAGVSKCIKVFDFSSVVNDPADMHTAVVEMPTRSKLSCLSWNKFTKNHIASTDYEGIVTVWDVDTRQSVMEYEEHEKRAWSVDFSCTEPSMLVSGSDDCKVKVWCTRQEASVLNIDMKANICCVKYNPGSSNCIAVGSADHHIHYYDLRNVSQPLHVFTGHRKAVSYVKFLSNYELASASTDSTLRLWNVKDNIPVRTFKGHTNEKNFVGLTVNSEYIACGSETNEVFVYHKEISKPVTWHRFGSPDMEDTEDDAGSYFISAVCWKSDSPTMLTANSQGTIKVLVLAA

SEQ ID NO: 13852 - protein, 644 aa, Anopheles gambiae str. PEST
SVDDKTNDFLCPICFDIINEAYITRCGHTFCHQCIARSIDVAKKCPKCNYPLASHEHIVPNFLLNELITKHRLKGGGGGGDTLKHFLATESKKLSLSDVNVMLEILTQRKTLLEAESCAAQNRLLHEFLKHLLKQKEQQQLQIANEIALIRSDLLDVEKVLKDVQSSCPTVAEVEQSVRDEKDEHVVAIKREIIQIIDTIDNITVPSNRSLVDDTCSNVTESYEGFNLHGTRRGGHGGSISGGSLSSNPSSFLARKQRMYQHFDDFVQCYFAARSEDLYFGKDRSCSSDSLGVGERSTSNTTRSSGRSSLDTFRESLIKFSKYSALRPLATLNYSNDSNYVSTIVSSIEFDKDSEYFAIAGVTKRIKIFDYYTAIRDAAVDINYPINEMTCNSKISCVIWNSYFKQVLASSDYEGIVTIWDVLTRTRTKTFEEHDKRCWCVDFNEVDTRLLASGSDDARVKLWSLNVDHSVATIEARANVCCVKFNPKSSCHLAFGTADHCVNYYDLRNLKQPLCLFKGHRKAVSYVKFLNTDEIVSASTDGQLKLWNINSPPFCLRSFTGHINEKNFAGLATNNDYLACGSEDNSLCVYYKGLSKQLFNLNGLQSTDMERSNSEGNEFVSAVCWRKQSNIIIAGNSEGVIKIL

SEQ ID NO: 13853 - protein, 1029 aa, Arabidopsis thaliana
MPVMERVAEETVATNNIQLKARVDDVPCNKLDARHNDMVIQSETANSDCPGSSAHRNVDLTKPPPPEEAAGAKLSVEELTLGNYRIVQGSNNTNVDSPRAGKFEHLYRLARGSAFRAGDGDLDSQPRDMDQMLSRIRQQLAGAPSERQNLKPFMSRRSDQNLEAFSERLRAAGENSIMNAPALISEGVQMKTPVSSSNFSQLLLKRAMKGKGVVGKNQETPPEFVSDQDLGSKEKKLDISKSPTPHDVLPLKSSPKGNGMVSHGDGNHSKSSIGISLREFLRSSYAKREKRHGLCLFRQLVELVDSAHSKRLFLLDLRPSLFTLVPSKKLRYIGNFGKNDLESDVDEDLNRRRPVVEESSSGGRDSKKRKMDLHLNSPGNQLQATSTGRPFKRKSPVIDLNMVDARNPDSCELQQQDYIKNLSVSSVSRKQSMSTWLEEQWYTCPEEINGEDIGEKSNIYALGVLLFELLCHCESGEMHAAMMADLRHRILPPTFLSKYPKEAGFCLWLLHPEPSSRPSARDILKSELICEDDSVKSTAAAEEISELLLHFLSSLEVQKKKKASKLLQDIQTLEDDIKEAERRYSSNVSLVRSHGAIEKRVQSSPLDEHCTTSSALFVPTANTDRLMSNIRQLEDAYFFMRSQINLSSSAATARSDKTLKDRDRCSENQNENQDMSTKGKSSDQLEVFFEGLCKFARYSKFETCGTIRSGDLLNSASVVCSLSFDPDEEHIAAAGISKKIKIFDFNAFMNESVGVHYPLVEMVNKSKLSCVCWNSYIKNYLASTDYDGVVQIWDAGTGQGFSQYTEHQKRAWSVDFSPSDPTKFVSGSDDCSVKLWSINEKRSLGTIWSPANVCCVQFSSYSNHLLAFGSADYKVYCYDLRYVKTPWCTLAGHEKAVSYVKFMDSETIVSASTDNSLKLWNLNKTNSSGLSPGACSLTYKGHTNQKNFVGLSVLDGYIACGSETNEVYSYYKSLPMPMTSYKFGSVDPISGNEYFDDNGQFVSSVCWRKKSNMLVAANSTGNMKLLKLV

SEQ ID NO: 13854 - protein, 1040 aa, Arabidopsis thaliana
MDEGSVGDVSRIDEADVAHLQFKNSEQSFKPENIEVREVKEVQVQREADGKNGGDHVELIGNEPCSSRQNTNDEGDVVEELTVKTCEGSSMAIVGRPSSRARLEMNRSQFLHRFPLDGDLPGSSSMSKKVIDRGTVSILRNAGKMSLPETSNGQLAIIAVNGEANEHLTNVERNPVPVEALSHEGIKTKMLSQSGFSQFFVRKTLKGKGVTFRGPPNNRSKARNMDQQTVASSGSALVIANTSAKISSSIPLAAYDDTHRGCGGEGLSLREWLKSERQEVNKAECMYIFRQIVDHVDCSHSQGVVLCDLRPSSFKIFKENAVKYVVSGSQRESFDSNMNKETLSQLENPLVRRRLGDTSSLSIPAKKQKSSGPSSRQWPMFQRAGGVNIQTENNDGAIQEFHFRSSQPHCSTVACPFTSVSEQLEEKWYASPEELRGDMRSASSNIYSLGILLYELLSQFQCERAREAAMSDIRHRILPPKFLSENPKEAGFCLWDILQSEVVNGIPDLYAEGLSLSIEQEDTESELLQHFLFLSQEKRQKHAGNLMEEIASVEADIEEIVKRRCAIGPPSLEEASSSSPASSVPEMRLIRNINQLESAYFAARIDAHLPEARYRLRPDRDLLRNSDNTVAEVENSETWSSDDRVGAFFDGLCKYARYSKFETRGVLRTSELNNTSNVICSLGFDRDEDYFATAGVSKKIKIYEFNSLFNESVDIHYPAIEMPNRSKLSGVCWNNYIRNYLASSDYDGIVKVFEPLKFYVDCLSLDYPFISFGQAISHFIEHEKRAWSVDFSEACPTKLASGSDDCSVKLWNINEACSSILDFVVLIATPTEISGIYTYEYINSTLDYSVNRNCLGTIRNIANVCCVQFSPQSSHLLAFGSSDFRTYCYDLRNLRTPWCILSGHNKAVSYAKFLDNETLVTASTDNTLKLWDLKKTTHGGLSTNACSLTFGGHTNEKNFVGLSTSDGYIACGSETNEVYAYHRSLPMPITSYKFGSIDPISGKEIEEDNNLFVSSVCWRKRSNMVVSASSNGSIKVLQLV

SEQ ID NO: 13855 - protein, 532 aa, Arabidopsis thaliana
MACYCVNYLLVSFSVLILFSLCDRDILKSELICEDDSVKSTAAAEEISELLLHFLSSLEVQKKKKASKLLQDIQTLEDDIKEAERRYSSNVSLVRSHGAIEKRVQSSPLDEHCTTSSALFVPTANTDRLMSNIRQLEDAYFFMRSQINLSSSAATARSDKTLKDRDRCSENQNENQDMSTKGKSSDQLEVFFEGLCKFARYSKFETCGTIRSGDLLNSASVVCSLSFDPDEEHIAAAGISKKIKIFDFNAFMNESVGVHYPLVEMVNKSKLSCVCWNSYIKNYLASTDYDGVVQIWDAGTGQGFSQYTEHQKRAWSVDFSPSDPTKFVSGSDDCSVKLWSINEKRSLGTIWSPANVCCVQFSSYSNHLLAFGSADYKVYCYDLRYVKTPWCTLAGHEKAVSYVKFMDSETIVSASTDNSLKLWNLNKTNSSGLSPGACSLTYKGHTNQKNFVGLSVLDGYIACGSETNEVYSYYKSLPMPMTSYKFGSVDPISGNEYFDDNGQFVSSVCWRKKSNMLVAANSTGNMKLLKLV

SEQ ID NO: 13856 - protein, 589 aa, Glycine max
  unsure (1)..(589): unsure at all Xaa locations
XPEVLNDGVCTFSSNIYSLGVLLFELLCNIEPWEAHSTAMLDLCQRILPPKFLAENPKEAGFCLWLLHPEPSSRPNARMILESEVMRESEESNSVADDEAETEQLLDFLILIKEAKKKREAKLEEELNLLNEDIKEVEKSYSFVTDSVXSFGANEQSXEVRGDNLYFHSDISRSIRRSFGDEERFMSNLNQLENSYFSMRFRVLPKEASSVSSNEKNVMDRWRLPQVENVNKESRRIQSSVGCVGSFFEGLCKFARYSKFEECGRLRNRDLLSSANVMCALSFDRDEDHIAAGGVSKKIKIFDLNAIASDSVDIQYPVIEMSNKSKLSCVCWNTYIKNHLASTDYDGAVQMWDADTGQPLSQYMEHQKRAWSVHFSLSDPKMFASGSDDCSVKLWSISERNSLGTIWKPANICCVQFSAYSTNLLFFGSADYKVYGYDLRHTRIPWCTLAGHGKAVSYVKFIDSEAVVSASTDNSLKLWDLNKTSSSGLSSDACAMTFKGHSNEKNFVGLSVLDGYIACGSESNEVYCYHKSLPVPIATHKFESIDHISGHLNSGDNNGQFVSSVCWRKKSNMLVAANSVGIVKLLQMV

SEQ ID NO: 13857 - protein, 451 aa, Glycine max
  unsure (1)..(451): unsure at all Xaa locations
RRHTFPHGCIESVAKEVAWMHDLGXSXFRTCLQYASSISLQNASIKXSIILNANELESAXFCMRTKILFPESDTATLPDKDILINHDNXSGAIKKKQQHKAKDAIRAVFDSLCKYARYSKFEVRGILRNTDFLQXTKNVLCSLSFDRDEDXYFAAAGISKKIKIFEFNALLNDSIDIHYPVVEMSNRSRLSCVCWNNYIQNYLASTDYDGAVKLWDANTGQGFSRFTEHEKRAWSVDFSLLCPTKFASGSDDCSVKLWNINEKNSLATIRNVANVCCVQFSTHSSHLLAFGSADYSAYCYDLRNLRNPWCVLAGHRKAVSYVKFLDSETLVSASTDNILKIWDLNKTSPVGPSTSACSLTLSGHTNEKNFVGLSVADGYIACGSETNEVYVYHKSLPMPVTSHRFGSIDNWFGDREDALYLCXACPGRWRGYSGMLIAANSSGCVKVLQMV

SEQ ID NO: 13858 - protein, 287 aa, Glycine max
PRVRALFNDSIDIHYPVVEMSNRSRLSCVCWNNYIQNYLASTDYDGAVKLWDANTGQGFSRFTEHEKRAWSVDFSLLGPTKFASGSDDCSVKLWSISERNCLGTIRNAANVCCVQFSAHSSHLLAFGSADYSTYCYDLRNLRSPWCVLAGHRKAVSYVKFLDSETLVSASTDNTLKIWDLNKTSPVGASINACSLTLSGHTNEKNFVGLSVADGYIACGSETNEVYTYYRSLPMPVTSHKFGSIDPISGKDTDDDNGQFVSSVCWRGKSGMLIAANSSGCVKVLQMV

SEQ ID NO: 13859 - protein, 675 aa, Pisum sativum
MEEHSVGPLVPAVVKPEPSKNFSTDTTAAGDVSPVPTMSDLDKDFLCPICMQIIKDAFLTACGHSFCYMCIITHLRNKSDCPCCGHYLTNSNLFPNFLLDKLLKKTSDRQISKTASPVEHFRQAVQKLKQGCEVTMKELDTLLLLLTEKKRKMEQEEAERNMQILLDFLHCLRKQKVDELKKVQTDLQFIKEDIGAVEKHRMDLYRARDRYSVKLRMLDDSGGRKSRHSSMDLNSSGLASSPLNLRGGLSSGSHTKKNDGKSQISSHGHGIQRRDPITGSDSQYINQSGLALVRKKRVHTQFNDLQECYLQKRRQAADKPHGQQERDTNFISREGYSCGLDDFQSVLTTFTRYSRLRVIAEIRHGDIFHSANIVSSIEFDRDDDLFATAGVSRRIKVFDFSAVVNEPTDAHCPVVEMTTRSKLSCLSWNKYAKNQIASSDYEGIVTVWDVTTRKSLMEYEEHEKRAWSVDFSRTDPSMLVSGSDDCKVKVWCTNQEASVLNIDMKANICCVKYNPGSGNYIAVGSADHHIHYYDLRNISRPVHVFTGHKKAVSYVKFLSNDELASASTDSTLRLWDVKQNLPVRTFRGHANEKNFVGLTVSSEYIACGSETNEVFVYHKEISKPLTWHRFGTLDMEDAEDEAGSYFISAVCWKSDRPTILTANSQGTIKVLVLAA

SEQ ID NO: 13860 - protein, 672 aa, Pisum sativum
MEEHSVGPLVPAVVKPEPSKNFSTDTTAAGTFLLVPTMSDLDKDFLCPICMQIIKDAFLTACGHSFCYMCIITHLRNKSDCPCCGHYLTNSNLFPNFLLDKLLKKTSDRQISKTASPVEHFRQAVQKGCEVTMKELDTLLLLLTEKKRKMEQEEAERNMQILLDFLHCLRKQKVDELKEVQTDLQFIKEDIGAVEKHRMDLYRARDRYSVKLRMLDDSGGRKSRHSSMDLNSSGLASSPLNLRGGLSSGSHTKKNDGKSQISSHGHGIQRRDPITGSDSQYINQSGLALVRKKRVHTQFNDLQECYLQKRRQAADKPHGQQERDTNFISREGYSCGLDDFQSVLTTFTRYSRLRVIAEIRHGDIFHSANIVSSIEFDRDDDLFATAGVSRRIKVFDFSAVVNEPTDAHCPVVEMTTRSKLSCLSWNKYAKNQIASSDYEGIVTVWTMTTRKSLMEYEEHEKRAWSVDFSRTDPSMLVSGSDDCKVKVWCTNQEASVLNIDMKANICCVKYNPGSGNYIAVGSADHHIHYYDLRNISRPVHVFTGHKKAVSYVKFLSNDELASASTDSTLRLWDVKQNLPVRTFRGHANEKNFVGLTVRSEYIACGSETNEVFVYHKEISKPLTWHRFGTLDMEDAEDEAGSYFISAVCWKSDRPTILTANSQGTIKVLVLAA

SEQ ID NO: 13861 - protein, 970 aa, Pisum sativum
MEEHSVGPLVPAVVKPEPSKNFSTDTTAAGTFLLVPTMSDLDKDFLCPICMQIIKDAFLTACGHSFCYMCIITHLRNKSDCPCCGHYLTNSNLFPNFLLDKLLKKTSDRQISKTASPVEHFRQAVQKGCEVTMKELDTLLLLLTEKKRKMEQEEAERNMQILLDFLHCLRKQKVDELKEVQTDLQFIKEDIGAVEKHRMDLYRARDRYSVKLRMLDDSGGRKSRHSSMDLNSSGLASSPLNLRGGLSSGSHTKKNDGKSQISSHGHGIQRRDPITGSDSQYINQSGLALVRKKRVHTQFNDLQECYLQKRRQAADKPHGQQERDTNFISREGYSCGLDDFQSVLTTFTRYSRLRVIAEIRHGDIFHSANIVSSIEFDRDDDLFATAGVSRRIKVFDFSALLKKTSDRQISKTASPVEHFRQAVQKGCEVTMKELDTLLLLLTEKKRKMEQEEAERNMQILLDFLHCLRKQKVDELKEVQTDLQFIKEDIGAVEKHRMDLYRARDRYSVKLRMLDDSGGRKSRHSSMDLNSSGLASSPLNLRGGLSSGSHTKKNDGKSQISSHGHGIQRRDPITGSDSQYINQSGLALVRKKRVHTQFNDLQECYLQKRRQAADKPHGQQERDTNFISREGYSCGLDDFQSVLTTFTRYSRLRVIAEIRHGDIFHSANIVSSIEFDRDDDLFATAGVSRRIKVFDFSAVVNEPTDAHCPVVEMTTRSKLSCLSWNKYAKNQIASSDYEGIVTVWTMTTRKSLMEYEEHEKRAWSVDFSRTDPSMLVSGSDDCKVKVWCTNQEASVLNIDMKANICCVKYNPGSGNYIAVGSADHHIHYYDLRNISRPVHVFTGHKKAVSYVKFLSNDELASASTDSTLRLWDVKQNLPVRTFRGHANEKNFVGLTVRSEYIACGSETNEVFVYHKEISKPLTWHRFGTLDMEDAEDEAGSYFISAVCWKSDRPTILTANSQGTIKVLVLAA

SEQ ID NO: 13862 - protein, 968 aa, Pisum sativum
MEEHSVGPLVPAVVKPEPSKNFSTDTTAAGDVSPVPTMSDLDKDFLCPICMQIIKDAFLTACGHSFCYMCIITHLRNKSDCPCCGHYLTNSNLFPNFLLDKLLKKTSDRQISKTASPVEHFRQAVQKGCEVTMKELDTLLLLLTEKKRKMEQEEAERNMQILLDFLHCLRKQKVDELKEVQTDLQFIKEDIGAVEKHRMDLYRARDRYSVKLRMLDDSGGRKSRHSSMDLNSSGLASSPLNLRGGLSSGSHTKKNDGKSQISSHGHGIQRRDPITGSDSQYINQSGLALVRKKRVHTQFNDLQECYLQKRRQAADKPHGQQERDTNFISREGYSCGLDDFQSVLTTFTRYSRLRVIAEIRHGDIFHSANIVSSIEFDRDDDLFATAGVSRRIKVFDFSALLKKTSDRQISKTASPVEHFRQAVQKGCEVTMKELDTLLLLLTEKKRKMEQEEAERNMQILLDFLHCLRKQKVDELKEVQTDLQFIKEDIGAVEKHRMDLYRARDRYSVKLRMLDDSGGRKSRHSSMDLNSSGLASSPLNLRGGLSSGSHTKKNDGKSQISSHGHGIQRRDPITGSDSQYINQSGLALVRKKRVHTQFNDLQECYLQKRRQAADKPHGQQERDTNFISREGYSCGLDDFQSVLTTFTRYSRLRVIAEIRHGDIFHSANIVSSIEFDRDDDLFATAGVSRRIKVFDFSAVVNEPTDAHCPVVEMTTRSKLSCLSWNKYAKNQIASSDYEGIVTVWDVTTRKSLMEYEEHEKRAWSVDFSRTDPSMLVSGSDDCKQVKVWCTNQEASVLNIDMKANICCVKYNPGSGNYIAVGSADHHIHYYDLRNISRPVHVFTGHKKAVSYVKFLSNDELASASTDSTLRLWDVKQNLPVRTFRGHANEKNFVGLTVSSEYIACGSETNEVFVYHKEPLTWHRFGTLDMEDAEDEAGSYFISAVCWKSDRPTILTANSQGTIKVLVLAA

SEQ ID NO: 13863 - protein, 519 aa, Oryza sativa (indica cultivar-group)
ESETNMQILLVFLHCLRKQKLEELNEIQTDLQYIKEDISAVERHRLELYRTKERYSMKLRMLLDEPAASKMWPSPMDKPSGLFPPNSRGPLSTSNPGGLQNKKLDLKGQISHQGFQRRDVLTCSDPPSAPIQSGNVIARKRRVQAQFNELQEYYLQRRRTGAQSRRLEERDIVTINKEGYHAGLEDFQSVLTTFTRYSRLRVIAELRHGDLFHSANIVSSIEFDRDDELFATAGVSKRIKVFEFSTVVNEPSDVHCPVVEMATRSKLSCLSWNKYSKNVIASSDYEGIVTVWDVQTRQSVMEYEEHEKRAWSVDFSRTEPSMLVSGSDDCKVKVWCTKQEASAINIDMKANICSVKYNPGSSHYVAVGSADHHIHYFDLRNPSAPVHVFGGHKKAVSYVKFLSTNELASASTDSTLRLWDVKENCPVRTFRGHKNEKNFVGLSVNNEYIACGSETNEVFVYHKAISKPAANHRFVSSDLDDADDDPGSYFISAVCWKSDSPTMLTANSQGTIKVLVLAP

SEQ ID NO: 13864 - protein, 336 aa, Oryza sativa
  unsure (1)..(336): unsure at all Xaa locations
CPGRASLSGLPPSLCRSSIYEERVMRNLEQLENAYYSMRSTIDTSEANIIKRVDNDALRVRQNFHELHSDANAIDEQADPLGCFFDGLCKYARYSRFEVRGILKNADILNSPNVICSLSFDRDEEYFAAAGVSKKIKIFPGLPLFGERVDIHYPLIEMPSKSKLSWVCWNSYIKNYLASTDYDGTVQLWDASSGQGFTQFTEHRKRAWSVSFSEVXSPTKLASGSDDCCVXKVWSINQKNCTDTIRNVANVCCVQFSPYSSRMLAFGSADYKIYCYDLRNTRIPWCTISGHGKAVSYVRFLDPETLISASTDNTLKIWDLNRANSSGLSTDACSMX

SEQ ID NO: 13865 - protein, 276 aa, Triticum aestivum
  unsure (1)..(276): unsure at all Xaa locations
HSDADAMNGPTDRLGCFFDGLCKYARHSRFEVRGILKNADILNSPNVICSLSFDRDEEYFAAAGVSKKIKIFEFDALLNDHVDIHYPIVEMPSKSKLSCVCWNNYIKNYLASTDYDGTVQLWDASTGQGFTQFTEHXRKRAWSVSFSEVDPTKLASGSDDCCVKVWNINQKNSVDTIRNVANVCCVQFSPYSSRMLAFGSADYKTYCYDLRHTRIPWCTISGHGKAVSYVRFLDAETLISASTDNTLKIWDLNRTNPNGLSTNACSLTLSGHTNEK

SEQ ID NO: 13866 - protein, 731 aa, Homo sapiens
MSGSRQAGSGSAGTSPGSSAASSVTSASSSLSSSPSPPSVAVSAAALVSGGVAQAAGSGGLGGPVRPVLVAPAVSGSGGGAVSTGLSRHSCAARPSAGVGGSSSSLGSGSRKRPLLAPLCNGLINSYEDKSNDFVCPICFDMIEEAYMTKCGHSFCYKCIHQSLEDNNRCPKCNYVVDNIDHLYPNFLVNELILKQKQRFEEKRFKLDHSVSSTNGHRWQIFQDWLGTDQDNLDLANVNLMLELLVQKKKQLEAESHAAQLQILMEFLKVARRNKREQLEQIQKELSVLEEDIKRVEEMSGLYSPVSEDSTVPQFEAPSPSHSSIIDSTEYSQPPGFSGSSQTKKQPWYNSTLASRRKRLTAHFEDLEQCYFSTRMSRISDDSRTASQLDEFQECLSKFTRYNSVRPLATLSYASDLYNGSSIVSSIEFDRDCDYFAIAGVTKKIKVYEYDTVIQDAVDIHYPENEMTCNSKISCISWSSYHKNLLASSDYEGTVILWDGFTGQRSKVYQEHEKRCWSVDFNLMDPKLLASGSDDAKVKLWSTNLDNSVASIEAKANVCCVKFSPSSRYHLAFGCADHCVHYYDLRNTKQPIMVFKGHRKAVSYAKFVSGEEIVSASTDSQLKLWNVGKPYCLRSFKGHINEKNFVGLASNGDYIACGSENNSLYLYYKGLSKTLLTFKFDTVKSVLDKDRKEDDTNEFVSAVCWRALPDGESNVLIAANSQGTIKVLELV

SEQ ID NO: 13867 - protein, 491 aa, Homo sapiens
MLWTILTICILISWESHAAQLQILMEFLKVARRNKREQLEQIQKELSVLEEDIKRVEEMSGLYSPVSEDSTVPQFEAPSPSHSSIIDSTEYSQPPGFSGSSQTKKQPWYNSTLASRRKRLTAHFEDLEQCYFSTRMSRISDDSRTASQLDEFQECLSKFTRYNSVRPLATLSYASDLYNGSSIVSSIEFDRDCDYFAIAGVTKKIKVYEYDTVIQDAVDIHYPENEMTCNSKISCISWSSYHKNLLASSDYEGTVILWDGFTGQRSKVYQEHEKRCWSVDFNLMDPKLLASGSDDAKVKLWSTNLDNSVASIEAKANVCCVKFSPSSRYHLAFGCADHCVHYYDLRNTKQPIMVFKGHRKAVSYAKFVSGEEIVSASTDSQLKLWNVGKPYCLRSFKGHINEKNFVGLASNGDYIACGSENNSLYLYYKGLSKTLLTFKFDTVKSVLDKDRKEDDTNEFVSAVCWRALPDGESNVLIAANSQGTIKVLELV

SEQ ID NO: 13868 - protein, 506 aa, Homo sapiens
MEFLKVARRNKREQLEQIQKELSVLEEDIKRVEEMSGLYSPVSEDSTVPQFEAPSPSHSSIIDSTEYSQPPGFSGSSQAGVQWRYLGSLQPPPPRYKRFSCLTLPSSWDYRRLPPHLTKKQPWYNSTLASRRKRLTAHFEDLEQCYFSTRMSRISDDSRTASQLDEFQECLSKFTRYNSVRPLATLSYASDLYNGSSIVSSIEFDRDCDYFAIAGVTKKIKVYEYDTVIQDAVDIHYPENEMTCNSKISCISWSSYHKNLLASSDYEGTVILWDGFTGQRSKVYQEHEKRCWSVDFNLMDPKLLASGSDDAKVKLWSTNLDNSVASIEAKANVCCVKFSPSSRYHLAFGCADHCVHYYDLRNTKQPIMVFKGHRKAVSYAKFVSGEEIVSASTDSQLKLWNVGKPYCLRSFKGHINEKNFVGLASNGDYIACGSENNSLYLYYKGLSKTLLTFKFDTVKSVLDKDRKEDDTNEFVSAVCWRALPDGESNVLIAANSQGTIKVLELV

SEQ ID NO: 13869 - protein, 310 aa, Homo sapiens
MLELLVQKKKQLEAESHAAQLQNLIQFLKVARRNRREQLGHFQKELSVLEEDIKRVEEMSGLHSPVSEDSTVPQLEAPPASHSSIMDSTEYSQYPDNSVASIEAKADVCCVKFSRSSRCHLAFGCADHCVHYYDLRSTKQPIMVFKGRQKAVSYAKFASGEEIVFASTDSQLTLWNVGKLYCLHSFKGHINEKNFVGLASRGEYIACGSENNSLNLCYKALSKTLLTFKFDTVKSVLDKEGKEDDTNEFVGAACWRAQPDGEFNMLIAANSEGTIKVLELVRRVYSTLNVLDPADIPLQLTMIEETENVM

SEQ ID NO: 13870 - protein, 524 aa, Arabidopsis thaliana
MPLFELFRLTKAKLESAQDRNPSPPVDEVVELVWENGQISTQSQSSRSRNIPPPQANSSRAREIGNGSKTTMVDEIPMSVPSLMTGLSQDDDFVPWLNHHPSLDGYCSDFLRDVSSPVTVNEQESDMAVNQTAFPLFQRRKDGNESAPAASSSQYNGFQSHSLYGSDRARDLPSQQTNPDRFTQTQEPLITSNKPSLVNFSHFLRPATFAKTTNNNLHDTKEKSPQSPPNVFQTRVLGAKDSEDKVLNESVASATPKDNQKACLISEDSCRKDQESEKAVVCSSVGSGNSLDGPSESPSLSLKRKHSNIQDIDCHSEDVEEESGDGRKEAGPSRTGLGSKRSRSAEVHNLSERRRRDRINEKMRALQELIPNCNKVDKASMLDEAIEYLKSLQLQVQIMSMASGYYLPPAVMFPPGMGHYPAAAAAMAMGMGMPYAMGLPDLSRGGSSVNHGPQFQVSGMQQQPVAMGIPRVSGGGIFAGSSTIGNGSTRDLSGSKDQTTTNNNSNLKPIKRKQGSSDQFCGSS

SEQ ID NO: 13871 - protein, 524 aa, Arabidopsis thaliana
MPLFELFRLTKAKLDSAQDRNPSPPVDEVVELVWENGQISTQSQSSRSRNIPPPQANSSRAREIGNGSKTTMVDEIPMSVPSLMTGLSQDDDFVPWLNHHPSLDGYCSDFLRDVSSPVTVNEQESDMAVNQTAFPLFQRRKDGNESAPAASSSQYNGFQSHSLYGSDRARDLPSQQTNPDRFTQTQEPLITSNKPSLVNFSHFLRPATFAKTTNNNLHDTKEKSPQSPPNVFQTRVLGAKDSEDKVLNESVASATPKDNQKACLISEDSCRKDQESEKAVVCSSVGSGNSLDGPSESPSLSLKRKHSNIQDIDCHSEDVEEESGDGRKEAGPSRTGLGSKRSRLAEVHNLSERRRRDRINEKMRALQELIPNCNKVDKASMLDEAIEYLKSLQLQVQIMSMASGYYLPPAVMFPPGMGHYPAAAAAMAMGMGMPYAMGLPDLSRGGSSVNHGPQFQVSGMQQQPVAMGIPRVSGGGIFAGSSTIGNGSTRDLSGSKDQTTTNNNSNLKPIKRKQGSSDQFCGSS

SEQ ID NO: 13872 - protein, 531 aa, Glycine max
  unsure (1)..(531): unsure at all Xaa locations
XVRRSPSCKSLPSHCLPSHSPKARDKDVGYGSYTRLVNEIPMSVPSSEVDFCQDEDVLPWLDYPSIDGSCSDFLPASNSFTLLDKKSNDMAFRDSQKTSEEQGNVFNSSAGQVETARPKASSTSQLFPPSLHQCQTSFVSSRSRASDITENNNTSNASTIMNFSHFARPAAMVRANLHSIGQSKADVNSLLPKSVEQNAVPSKQSEPAGKESAAKIDLTPNQVPGDSGTKGQTAAEKSMEPAVASSSVCSGNGTLLASARPRQNLKRKTKDTDDSECHSEDVEEESAGAKKTAGGRGGAGSKRSRAAEVHNLSERKRRDRINEKMRALQELIPNCNKVDEASMLDEAIEYLKTLQLQVQIMSMGAGLYMPPMIMHAPHMAPFSPMGVGMHMGYGMGFGMGMPDMNGGSSRFPMIQVPQMQGTHIPMPMPPASVFPFSGGPLMNSPAQGLHARGSSGLVETVDSASASGLKDQMQNVDPQVKQSTGGCDSTSQMPTQCEAAAVGFEQSALAHSRGHASKANDNGAVNPDPGR

SEQ ID NO: 13873 - protein, 895 aa, Oryza sativa; identical to SEQ ID NO: 13829

SEQ ID NO: 13874 - protein, 543 aa, Oryza sativa
  unsure (1)..(543): unsure at all Xaa locations
XAGAGPGGGVSPSTHXSAAAAAAAASAMPTAGHGMEESDGNDFAELLWENGQAVVHGRKKHPQPAFPPFGFFGGTGGGGGGSSSRAQERQPGGIDAFAKVGGGFGALGMAPAVHDFASGFGATTQDNGDDDTVPWIHYPIIDDEDAAAPAALAAADYGSDFFSELQAAAAAAAAAAPPTDLASLPASNHNGATNNRNAPVATTTTREPSKESHGGLSVPTTRAEPQPQPQLAAAKLPRSSGSGGGEGVMNFSLFSRPAVLARATLESAQRTQGTDNKASNVTASNRVESTVVQTASGPRSAPAFADQRAAAWPPQPKEMPFASTAAAPMAPAVNLHHEMGRDRAGRTMPVHKTEARKAPEATVATSSVCSGNGAGSDELWRQQKRKCQAQAECSASQDDDLDDEPGVLRKSGTRSTKRSRTAEVHNLSERRRRDRINEKMRALQELIPNCNKIDKASMLDEAIEYLKTLQLQVQMMSMGTGLCIPPMLLPTAMQHLQIPPMAHFPHLGMGLGYGMGVFDMSNTGALQMPPMPGAHFPCPMIPX

SEQ ID NO: 13875 - protein, 197 aa, Oryza sativa
  unsure (1)..(197): unsure at all Xaa locations
XIHRRESYENTLSNKIQSKHALSNQSQAPSQSKARGCSTVQGVQCHREQPRRVDGRADGERASTGVSTKRSRTAEVHNLSERRRRDRINEKMRALQELIPNCNKIDKASMLDEAIEYLKTLQLQVQMMSMGTGLCIPPMLLPTAMQHLQIPPMAHFPHLGMGLGYGMGVFDMSNTGSXXASSVPPFAXLAGLPVRPX

SEQ ID NO: 13876 - protein, 158 aa, Triticum aestivum
  unsure (1)..(158): unsure at all Xaa locations
XSGRDRINEKMRALQELIPNCNKIDKASMLEEAIEYLKTLQLQVQMMSTMGTAGLCMPPMMAMQHMQMPPMAHFHHHHLGAMGFGMGPFDXXASSPPPAXAQFPYPMMPGAPIFGGHAMPPPPPFHQAAVAGAHMAAGPVTNDAATAAQAEQCWSKKK

SEQ ID NO: 13877 - protein, 160 aa, Physcomitrella patens
MSSRGGSDDEDEGTTRKKLRLSKEQSALLEESFKEHSTLNPKQKNALAKQLGLRPRQVEVWFQNRRARTKLKQTEVDCELLKRCYESLKEENRRLQKELLELRAIKVAPPCVISHDYYMPLPAATLTMCPSCERVATVDNRSLTFAKPGFSHLSQSSAAC

SEQ ID NO: 13878 - protein, 173 aa, Physcomitrella patens
IVQDYSSGNMGSCDCEESSLSSILTLQDQREMFRSVFPGRSSDNSQEYDEDDEGSSQKLRFTKAQLRVLEDTFERLQRPNAHQKSTLAMELGVQPRQVEVWFQNRRARGKAKRNESDCEVLRQRCQDLLVENHHLSYLIQTERMGYDSRQLSNEGGPLLQMALCNNCKKLRNC

SEQ ID NO: 13879 - protein, 110 aa, Zinnia elegans
KIWFQNRRARTKLKQTEVDCEFLKRCCENLTEENRRLQKELQELKALKLSPQFYMQMAPPTTLTMCPSCERVGAPPSQKSIDHQHRKLPFYPWPTSASQVVQRQMGALHH

SEQ ID NO: 13880 - protein, 284 aa, Arabidopsis thaliana
MMFEKDDLGLSLGLNFPKKQINLKSNPSVSVTPSSSSFGLFRRSSWNESFTSSVPNSDSSQKETRTFIRGIDVNRPPSTAEYGDEDAGVSSPNSTVSSSTGKRSEREEDTDPQGSRGISDDEDGDNSRKKLRLSKDQSAILEETFKDHSTLNPKQKQALAKQLGLRARQVEVWFQNRRARTKLKQTEVDCEFLRRCCENLTEENRRLQKEVTELRALKLSPQFYMHMSPPTTLTMCPSCEHVSVPPPQPQAATSAHHRSLPVNAWAPATRISHGLTFDALRPRS

SEQ ID NO: 13881 - protein, 284 aa, Arabidopsis thaliana
MMFEKDDLGLSLGLNFPKKQINLKSNPSVSVTPSSSSFGLFRRSSWNESFTSSVPNSDSSQKETRTFIRGIDVNRPPSTAEYGDEDAGVSSPNSTVSSSTGKRSEREEDTDPQGSRGISDDEDGDNSRKKLRLSKDQSAILEETFKDHSTLNPKQKQALAKQLGLRARQVEVWFQNRRARTKLKQTEVDCEFLRRCCENLTEENRRLQKEVTELRVLKLSPQFYMHMSPPTTLTMCPSCEHVSVPPPQPQAATSAHHRSLPVNAWAPATRISHGLTFDALRPRS

SEQ ID NO: 13882 - protein, 283 aa, Arabidopsis thaliana
MMMGKEDLGLSLSLGFSQNHNPLQMNLNPNSSLSNNLQRLPWNQTFDPTSDLRKIDVNSFPSTVNCEEDTGVSSPNSTISSTISGKRSEREGISGTGVGSGDDHDEITPDRGYSRGTSDEEEDGGETSRKKLRLSKDQSAFLEETFKEHNTLNPKQKLALAKKLNLTARQVEVWFQNRRARTKLKQTEVDCEYLKRCVEKLTEENRRLQKEAMELRTLKLSPQFYGQMTPPTTLIMCPSCERVGGPSSSNHHHNHRPVSINPWVACAGQVAHGLNFEALRPRS

SEQ ID NO: 13883 - protein, 282 aa, Arabidopsis thaliana
MMMGKEDLGLSLSLGFAQNHPLQLNLKPTSSPMSNLQMFPWNQTLVSSSDQQKQQFLRKIDVNSLPTTVDLEEETGVSSPNSTISSTVSGKRRSTEREGTSGGGCGDDLDITLDRSSSRGTSDEEEDYGGETCRKKLRLSKDQSAVLEDTFKEHNTLNPKQKLALAKKLGLTARQVEVWFQNRRARTKLKQTEVDCEYLKRCVEKLTEENRRLEKEAAELRALKLSPRLYGQMSPPTTLLMCPSCERVAGPSSSNHNQRSVSLSPWLQMAHGSTFDVMRPRS

SEQ ID NO: 13884 - protein, 282 aa, Arabidopsis thaliana
MMMGKEDLGLSLSLGFAQNHPLQLNLKPTSSPMSNLQMFPWNQTLVSSSDQQKQQFLRKIDVNSLPTTVDLEEEIGVSSPNSTISSTVSGKRRSTEREGTSGGGCGDDLDITLDRSSSRGTSDEEEDYGGETCRKKLRLSKDQSAVLEDTFKEHNTLNPKQKLALAKKLGLTARQVEVWFQNRRARTKLKQTEVDCEYLKRCVEKLTEENRRLEKEAAELRALKLSPRLYGQMSPPTTLLMCPSCERVAGPSSSNHNQRSVSLSPWLQMAHGSTFDVMRPRS

SEQ ID NO: 13885 - protein, 315 aa, Arabidopsis thaliana
MSERDDGLGLSLSLSLGFNQKDPSSRLNPMPLASYASSSHMQHMQQSNYNHPQKIQNTWINMFQSSERNSDMRSFLRGIDVNRAPSTVVVDVEDEGAGVSSPNSTVSSVMSGKKSERELMAAAGAVGGGRVEDNEIERASCSLGGGSDDEDGSGNGDDSSRKKLRLSKEQALVLEETFKEHSTLNPKQKMALAKQLNLRTRQVEVWFQNRRARTKLKQTEVDCEYLKRCCENLTDENRRLQKEVSELRALKLSPHLYMHMKPPTTLTMCPSCERVAVTSSSSSVAPPVMNSSSPMGPMSPWAAMPLRQRPAAGSH

SEQ ID NO: 13886 - protein, 315 aa, Arabidopsis thaliana
MSERDDGLGLSLSLSLGFNQKDPSSRLNPMPLASYASSSHMQHMQQSNYNHPQKIQNTWINMFQSSERNSDMRSFLRGIDVNRAPSTVVVDVEDEGAGVSSPNSTVSSVMSGKKSERELMAAAGAVGGGRVEDNEIERASCSLGGGSDDEDGSGNGDDSSRKKLRLSKEQALVLEETFKEHSTLNPKQKMALAKQLNLRTRQVEVWFQNRRQRTKLKQTEVDCEYLKRCCENLTDENRRLQKEVSELRALKLSPHLYMHMKPPTTLTMCPSCERVAVTSSPSSVAPPVMNSSSPMGPMSPWAAMPLRQRPAAGSH

SEQ ID NO: 13887 - protein, 318 aa, Arabidopsis thaliana
MGERDDGLGLSLSLGNSQQKEPSLRLNLMPLTTSSSSSSFQHMHNQNNNSHPQKIHNISWTHLFQSSGIKRTTAERNSDAGSFLRGFNVNRAQSSVAVVDLEEEAAVVSSPNSAVSSLSGNKRDLAVARGGDENEAERASCSRGGGSGGSDDEDGGNGDGSRKKLRLSKDQALVLEETFKEHSTLNPKQKLALAKQLNLRARQVEVWFQNRRARTKLKQTEVDCEYLKRCCDNLTEENRRLQKEVSELRALKLSPHLYMHMTPPTTLTMCPSCERVSSSAATVTAAPSTTTTPTVVGRPSPQRLTPWTAISLQQKSGR

SEQ ID NO: 13888 - protein, 208 aa, Arabidopsis thaliana
NSTISSTISGKRSEREGISGTGVGSGDDHDEITPDRGYSRGTSDEEEDGGETSRKKLRLSKDQSAFLEETFKEHNTLNPKQKLALAKKLNLTARQVEVWFQNRRARTKLKQTEVDCEYLKRCVEKLTEENRRLQKEAMELRTLKLSPQFYGQMTPPTTLIMCPSCERVGGPSSSNHHHNHRPVSINPWVACAGQVAHGLNFEALRPRS

SEQ ID NO: 13889 - protein, 131 aa, Arabidopsis thaliana
EDTDPQGSRGISDDEDGDNSRKKLRLSKDQSAILEETFKDHSTLNPKQKQALAKQLGLRARQVEVWFQNRRARTKLKQTEVDCEFLRRCCENLTEENRRLQKEVTELRALKLSPQFYMHMSPPTTLTMCPS

SEQ ID NO: 13890 - protein, 224 aa, Phaseolus vulgaris
EQMPEKKHRLSSEQVHLLEKSFEEENKLEPERKTQLAKKLGLQPRQVAVWFQNRRARWKTKQLERDFDVLKSSYDTLLSSYDSLMKDNEKLKSEVVSLNEKLQDQAKEVPEEPFYDKKVDPLPVEDIATIFSTRVEDHQSSGSVGSAVVDEGSPQLVVDSVDSYLPADNPGGCVGPVERIQSEEEDGSDDGRSYMDVFVVSETENQNHEEGEALVWWTNMYYVE

SEQ ID NO: 13891 - protein, 311 aa, Oryza sativa (indica cultivar-group)
MEMMVHGRRDEQYGGLGLGLGLGLSLGVAGGAADDEQPPPRRGAAPPPQQQLCGWNGGGLFSSSSSDHRGRSAMMACHDVIEMPFLRGIDVNRAPAAETTTTTARGPSCSEEDEEPGASSPNSTLSSLSGKRGAPSAATAAAAAASDDEDSGGGSRKKLRLSKDQAAVLEDTFKEHNTLNPKQKAALARQLNLKPRQVEVWFQNRRARTKLKQTEVDCELLKRCCETLTDENRRLHRELQELRALKLATAAAAPHHLYGARVPPPTTLTMCPSCERVASAATTTRNNSGAAPARPVPTRPWPPAAAQRSSA

SEQ ID NO: 13892 - protein, 308 aa, Oryza sativa (indica cultivar-group)
MMDLGLSLGLGLASQGSLTSSTTTTSSPGAGSSSPWAAALNSIVGDVRRDQAAAHAAAAVGVGVGGEEMYQGRASTSPDSAAALSSASGKRERELERSGSGVDDDDGADGAGGRKKLRLSKDQAAVLEECFKTHSTLNPKQKVALANRLGLRPRQVEVWFQNRRARTKLKQTEVDCEYLKRWCERLADENKRLEKELADLRALKAAPSPASASAMQPSSSAAATLTMCPSCRRVATAGAPHQPNHQQCHPKSNTTISSSSTAAAAVAVAGGNVLPSHCQFFPAAAAAADRTSQSTWNAAAPLVTRELF

SEQ ID NO: 13893 - protein, 287 aa, Oryza sativa (indica cultivar-group)
TTTTSSPGAGSSSPWAAALNSIVGDVRRDQAAAHAAAAVGVGVGGEEMYQGRASTSPDSAAALSSASGKRERELERSGSGVDDDDGADGAGGRKKLRLSKDQAAVLEECFKTHSTLNPKQKVALANRLGLRPRQVEVWFQNRRARTKLKQTEVDCEYLKRWCERLADENKRLEKELADLRALKAAPSPASASAMQPSSSAAATLTMCPSCRRVATAGAPHQPNHQQCHPKSNITISSSSTAAAAVAVAGGNVLPSHCQFFPAAAAAADRTSQSTWNAAAPLVTRELF

SEQ ID NO: 13894 - protein, 311 aa, Oryza sativa (japonica cultivar-group)
MEMMVHGRRDEQYGGLRLGLGLGLSLGVAGGAADDEQPPPRRGAAPPPQQQLCGWNGGGLFSSSSSDHRGRSAMMACHDVIEMPFLRGIDVNRAPAAETTTTTARGPSCSEEDEEPGASSPNSTLSSLSGKRGAPSAATAAAAAASDDEDSGGGSRKKLRLSKDQAAVLEDTFKEHNTLNPKQKAALARQLNLKPRQVEVWFQNRRARTKLKQTEVDCELLKRCCETLTDENRRLHRELQELRALKLATAAAAPHHLYGARVPPPTTLTMCPSCERVASAATTTRNNSGAAPARPVPTRPWPPAAAQRSSA

SEQ ID NO: 13895 - protein, 282 aa, Craterostigma plantagineum
LGLSLGSFGPSSSGGSHPPPALPLPSNLFRPSLQEIDRTQRSIGAFLQAPTAAAVCREPASAFRGIDVNRPPTIVDCGEENNNPIASPSPNSTVCSSSGKRTSGEREEKEDGDRAASSSFEVEDDDGGGGDASARKKLRLSKEQAVVLEETFKEHSTLNPKEKIALAKQLNLMPRQVEVWFQNRRARTKLKQTEVDCEYLRRCCENLTEENRRLQKEVNELRALKLSPQFYMSPPTTLTMCPQCERVAAQPSSAAAIRPPSHHQRPAAGMNSWAAMISPRPS

SEQ ID NO: 13896 - protein, 236 aa, Helianthus annuus
MDFHGFAEHALELRLSTTSSVAENTTNPIKKPSPSSDHCLEPSLTLALSGDSCGGSSFSIASAKREREVPSEESERGGENTSGEEDEDGGVNGKKKLRLTKAQSGLLEEAFKLHTTLNPKQKQELARDLKLRPRQVEVWFQNRRARTKLKQTEVDCEYLKRCCNTLTDENQRLRQEVQELKAQKVSPALYMQLPTTTLTVCPSCEQIGDTKSATSKNPCTKKPSFFNPFTSSSAAC

SEQ ID NO: 13897 - protein, 302 aa, Pimpinella brachycarpa
MMIHQREDHLGLSLSLSSPAHRPSSSSSPLQLNLAPSMPTPSTPPFNLFHKKETSDGYILDACRVETRSFLKGIDVNRLPATTVDMEEEAGVSSPNSTISSVSGKRSLERSENGNGDDLLDCSRGLINSDEEDGDNSRKKLRLSKDQSAILEDSFKEHNTLNPKQKLALAKRLGLRPRQVEVWFQNRRARTKLKQTEVDCEFLKRCCENLTDENRRLMKEVQELRALKLSPQFYMQMTPPTTLTMCPSCERVSAPPSSSTGPSSTPVETPRPHHSGSSHHRVAFNPWAIAPAGHRSFDAVPH

SEQ ID NO: 13898 - protein, 319 aa, Pimpinella brachycarpa
MMVQERDELGLSLSLSFPGSSHEQNKSNTTNNKHNQMPHASTPLELNLMPSQPLNLLHNNTTTTWTHPASHDRKMEACRVDRRSLLTGIDVNRIPAMTVDMEEETGVSSPNSTISSLSGNKRSLVNERSELANGDEILECSRSDDEDGDNSRKKLRLTKDQSAILEESFKEHNTLNPKQKIALAKRLGLRPRQVEVWFQNRRARTKLKQTEVDCEFLKRCCQTLTEENRKLQKEVQELRALKSSPQFYMQMTPPTTLTMCPSCERVGGLQSATTTSSAGPSITQAEPLRSHPMNSNHHRLPFNPWASPQRPLDALHPRS

SEQ ID NO: 13899 - protein, 318 aa, Pimpinella brachycarpa
MMVQQRDELGLSLSLSFPGSSHEQNKSNTTNNKHNQMPHASTPLELNLMPSQPLNLLHNNTTTWTHPASHDRKMEACRVDRRSLLTGIDVNRIPAMTVDMEEETGVSSPNSTISSLSGNKRSLVNERSELANGDEILESSRSDDEDGDNSRKKLRLTKDQSAILEESFKEHNTLNPKQKIALAKRLGLRPRQVEVWFQNRRARTKLKQTEVDCEFLKRCCQTLTEENRKLQKEVQELRALKSSPQFYMQMTPPTTLTMCPSCERVGGLQSATTTLSAGPSITQAEPLRSHPMSSNHHRLPFNPWASPQRPLDALHPRS

SEQ ID NO: 13900 - protein, 311 aa, Oryza sativa; identical to SEQ ID NO: 13891

SEQ ID NO: 13901 - protein, 314 aa, Oryza sativa
EESMEMMVHGRRDEQYGGLGLGLGLGLSLGVAGGAADDEQPPPRRGAAPPPQQQLCGWNGGGLFSSSSSDHRGRSAMMACHDVIEMPFLRGIDVNRAPAAETTTTTARGPSCSEEDEEPGASSPNSTLSSLSGKRGAPSAATAAAAAASDDEDSGGGSRKKLRLSKDQAAVLEDTFKEHNTLNPKQKAALARQLNLKPRQVEVWFQNRRARTKLKQTEVDCELLKRCCETLTDENRRLHRELQELRALKLATAAAAPHHLYGARVPPPTTLTMCPSCERVASAATTTRNNSGAAPARPVPTRPWPPAAAQRSSA

SEQ ID NO: 13902 - protein, 203 aa, Oryza sativa
  unsure (1)..(203): unsure at all Xaa locations
MERAEDLRLSLSLSCLRGGGGSDEEDGGCGIDGSRKKLRLSKDQSAVLEDSFREHPTLNPRQKATLAQQLGLRPRQVEVWFQNRRARTKLKQTEVDCEFLKRCCETLTEENRRLQKEVQELRALKLVSPHLYMNMSPPTTLTMCPSCERVSNTNNNSXAPPPPPTAAASGLLLPQAAAASSTPPPTGASSATARSPSGRSSHX

SEQ ID NO: 13903 - protein, 292 aa, Triticum aestivum
  unsure (1)..(292): unsure at all Xaa locations
MELGLSLGEAMADAGRELVLGLGVGVGVGPGAAREGEGRRDHDVAAAARGGLALGCGSSPEPAMRLALLPMVPSLGFPWPSESRHLEASTRGFDVNQAPSSGGSAWGACAAAEEEQEDTAAAARAAVSSSPNDSGGSFPMDFSARGASDAAPGAGGSRGSDEDDGRSARKKLRLSKEQAAFLEESFKEHSTLNPRQKVALAKQLNLRPRQVEVWFQNRRAXTKLKQTEVDCEYLKRCCETLTEENRRLQKXLAELRALKTVHPFYMHLPATTLSMCPSCERVASNSAPASAA

SEQ ID NO: 13904 - protein, 295 aa, Triticum aestivum
  unsure (1)..(295): unsure at all Xaa locations
HHITSPPPSTATVPSSILYTGVLSDRARQRSMMHHAAGLDLDLGPGLGLASQGSLTSSTTTTSSSPASMSRERHQCRDQEGDEDDGGGDGAGGRKNLRMSKDQSAVLEECFKTHSALNPKQNKALANRLGLRPQQVEVWFHNRRARTKLKQTXVDCEYMKRXCEQLTEXNKRLEKEVAELRALKAAPQAHNGASEGPLTTLTMSLSRKRVASTSSPMPAPACQCHPSSNSSVRSETPERCMVVLRGSRRWSSHRRSYVCDTAMISMPSKLTEMTALSQLTNLSKSSRKFKKKKKK

SEQ ID NO: 13905 - protein, 227 aa, Triticum aestivum
  unsure (1)..(227): unsure at all Xaa locations
LVQYNGASEPGSWXXEPWPGXLVSRPSQPSFWYSGGNVAADQEVGPTPTAAAVEERRCSPGSPASSGSGSGLKRGAERSAGSGDEDQDDDGGNARKKLRLSKDQAAVLEECFKTHHTLTPKQKLALANSLGLRPRQVEXVWFQNRSXARTKLKQTXEVDCEYMKRXWCEQLAEQNRRLEKEVAELRALKAAPAGAXXTAPRRGPFTTLTMCLSCKRVASTSGGPVPN

SEQ ID NO: 13906 - protein, 325 aa, Zea mays
  unsure (1)..(325): unsure at all Xaa locations
MDIMAHARDEEQYGNNHLGLGLSLSLGLGVATAAPVEVEPPPPPAAAAAPAPQWWKWNGPGLFFGTTMDHQQQQQPAAARHGHEMPFLRGVDVNRAPAGETRRGSCSEDDEEPGASSPNSTLSSSLSGKRAAPARSGGEVADHTPRAGGGSDDEDSGGGSRKKLRLSKDQAAVLEESFKEHNTLNPKQKAALAKQLNLKPRQVEVWFQNRRARTKLKQTEVDCEFLKRCCETLTEENRRLQREVAELRVLKLVAPHHYARMPPPTTLTMCPSCERLASASASADQAGRAGPCWGPLPVFVDGPARRPXSTTTIWHEMDALANRYR

SEQ ID NO: 13907 - protein, 324 aa, Zea mays
  unsure (1)..(324): unsure at all Xaa locations
MDIMAHARDEEQYGNNHLGLGLSLSLGLGVATAAPVEVEPPPRRAHHLPPRAXQWWKWNGPGLFFGTTMDQQQQPAAARHGHEMPFLRGVDVNRAPAGDTRRGSCSEDDEEPGASSPNSTLSSSLSGKRAAPARSGGEVADHTPRAGGGSDDEDSGGGSRKKLRLSKDQAAVLEESFKEHNTLNPKQKAALAKQLNLKPRQVEVWFQNRRARTKLKQTEVDCEFLKRCCETLTEENRRLQREVAELRVLKLVAPHHYARMPPPTTLTMCPSCERLASASASADQAGRAGPCWGPLPVFVDGPARRPXSTTTIWHEMDALANRYR

SEQ ID NO: 13908 - protein, 310 aa, Brassica rapa subsp. pekinensis
MMKRLSSSDSVGGLISLCPTTSTDQPSPRRYGREFQSMLEGYEEEEEEAVTEERGQTGLAEKKRRLSINQVKALEKNFELENKLEPERKVKLALELGLQPRQVAVWFQNRRARWKTKQLEKDYGVLKTQYDSLRHNFDSLRRDNESLLQEIGKLKAKLNGEEEVEKMMKMENNAVTMECDVSVKEEEVSLPEELTDPPSSPPQALEHSDSFNYRSFTDLRDLLSLKAAASSVAAAGSSDSSDSRAVLNEESSSNVTAGPVTVPQGGFLQFVKMEQTEDHDDFLSGEEACGFFSEEQPPSLHWYSTVDQWN

SEQ ID NO: 13909 - protein, 139 aa, Arabidopsis lyrata subsp. petraea
STGKRSEREEDTDPQGSRGISDDEDGDNSRKKLRLSKDQSVILEETFKDHSTLNPKQKQALAKQLGLRARQVEVWFQNRRARTKLKQTEVDCEFLRRCCENLTEENRRLQKEVTELRALKLSPQFYMHMSPPTTLTMCP

SEQ ID NO: 13910 - protein, 113 aa, Arabidopsis lyrata subsp. petraea
STGKRSEREEDTDPQGSRGISDDEDGDNSRKKLRLSKDQSVILEETFKDHSTLNPKQKQALAKQLGLRARQVEVWFQNRRARTKLKQTEVDCEFLRRCCENLTEENRRLQKEV

SEQ ID NO: 13911 - protein, 289 aa, Capsella rubella
MMLEKDDLGLSLGLNYPKKQMNLNSNPSVSVTPSSSSFGLLRRSSLNESFTSSVPNSDSSQKETRTFIRGIDVNRPPSTAEYGEEDAGVSSPNSTVSSSTGKRSEREEDTDPQGSRGGISDDEDGDNSRKKLRLSKDQSAILEETFKDHSTLNPKQKQALAKQLGLRARQVEVWFQNRRARTKLKQTEVDCEFLRRCCENLTEENRRLQKEVTELRALKLSPQFYMHMSPPTTLTMCPSCEHVSAPPPQQPPQAATSAQHHRGSLPVNAWAQGTRISHGLTFDALRPRS

SEQ ID NO: 13912 - protein, 561 aa, Arabidopsis thaliana
MSGRSAFSRTGGFRPENLGQNAVSLIGSIGFSVLVIGVVVFTIIAATYEPEDPLFHPSDKITTFLTSNSNATLKSDDSIVKTGEDFMAANQTAFGGFINIADVETSENDSDGNQLDCDTNIPIDCKDPEVFHLMMKATMEKFKDSHFYKFGKPVIVEGSSSSCDMAWRYRPKDGKAAAFYKDYRRFVIEKSGNCSVSVMGIGEYHSGVNARKRKRPGFRNSSGGKVDDFALPVVGEAVNDSLPVVESENVFKEGHYLVYSGGGDRCKSMNHFLWSFLCALGEAQYLNRTLVMDLTLCLSSVYTLSGQNEEGKDFRFYFDFEHLKEAASMLDQVQFWADWGKWYKKNGLKLHLVEDFRVTPMKLVDVKDTLIMRKFGTVEPDNYWYRVCEGETESVVQRPWNLLWKSKRLMEIVSAIASRLNWDYDAIHIERGDKARNKEVWPNLEKDTSPSSILSTLQDKIEQGRNLYIATNEPELSFFNPLKDKYKPHFLDEFKDLWDESSEWYSETTKLNGGNPVEFDGYMRASVDTEVFLRGKKQIETFNDLTNDCRDGIGTCNVAAS

SEQ ID NO: 13913 - protein, 568 aa, Arabidopsis thaliana
MFGRSAIRGGGFRAENLGQNALTLIGNIGFSLFVFGVLIFTIIAATYEPEDPLFHPSDKITTFLTSTSNATLRSDDSVVKTGEDFMLANQTAFAEFININDVEASTNETTTEEEGNKLECDVNTPIDCKDQQVFHLMMRATIDKFKDIHFYKFGKPVTGEEGVNSCDMAWRYRPRDGKSAAFYKDYRRFVVAKSENCSVSVVGIGEYHSGLNARKRKKNQKAGFEKTGGKKDDFSLPVVGELVNDSLPMVESDSVFKTGKYLVYVGGGDRCKSMNHFLWSFLCALGEAQYLNRTLVMDLTLCLSSIYTSSGQNEEGKDFRFYFDFEHLKEAASVLDEAQFWAQWGKLRKKRRNRLNLHLVEDFRVTPMKLAAVKDTLIMRKFGSVEPDNYWYRVCEGDAESVVKRPWHLLWKSRRLMEIVSAIASRLNWDYDAVHIERGEKARNKEVWPNLEADTSPSALLSTLQDKVEEGRHLYIATNEGELSFFNPLKDKYATHFLYDYKDLWDESSEWYSETTKLNGGNPVEFDGYMRASVDTEVFLRGKKQIETFNDLTNDCKDGVGTCNAATS

SEQ ID NO: 13914 - protein, 560 aa, Glycine max
MLGRAAFSRTGSFRPENLGQNAMAMIGNVCFSFFVIGVLVFTIMAATYEPEDPLFHPSTKITTFLTSKSNATFKSDNSVVRTGEDFMAANETAFGSIINSTDVDTSAEIIDAGDAECDVSGPIDCKDPEVFHLMMRATIDKFQDIHFYRFGKPAPGSNDSTCDMAWRFRPKEGKAAAFYKDYRRFVIDRSANCSLSVVSIGEYHTGVNARKRKKPGLEKTPLDMYQANTLPVVGEIVNDSLPVVESESSFSHGKYLLYEGGGDRCKSMNHYLWSFLCALGEAQYLNRTLIMDLSICLSSIYTSSKQDEEGKDFRFYFDFEHLKEAASVLDKEQFWADWNQWQQKDGMSLHLVEDFRVTPMKLMDVKDALIMRKFGSVEPDNYWYRVCEGETESVVQRPWHLLWKSRRLMDIVSAISSKLNWDYDSVHVVRGEKARNKELWPNLDAHTSPDALLSTLRDKIDEGRNLYIATNEPDTSFFDPLKDKYTTHFLDEYTELWDENSEWYSETTKLNNGIPVEFDGYMRVSIDTEVFFRGKKQLETFNDLTSDCKDGINTCNVAAN

SEQ ID NO: 13915 - protein, 561 aa, Glycine max
MLGRAAFSRTGSFRPENLGQNAMAMIGNVCFSFFVIGVLVFTIMAATYEPEDPLFHPSTKITTFLTSKSNATFKSDNSVVRTGEDFMAANETAFGSIINSTDVDTSAEIIDAGDAECDVSGPIDCKDPEVFHLMMRATIDKFQDIHFYRFGKPAPGSNDSTSCDMAWRFRPKEGKAAAFYKDNRRFVIDRSANCSLSVVSIGEYHTGVNARKRKKPGLEKTPLDMYQANTLPVVGEIVNDSLPVVESESSFSHGKYLLYEGGGDRCKSMNHYLWSFLCALGEAQYLNRTLIMDLSICLSSIYTSSKQDEEGKDFRFYFDFEHLKEAASVLDKEQFWADWNQWQQKDGMSLHLVEDFRVTPMKLMDVKDALIMRKFGSVEPDNYWYRVCEGETESVVQRPWHLLWKSRRLMDIVSAISSKLNWDYDSVHVVRGEKARNKELWPNLDAHTSPDALLSTLRDKIDEGRNLYIATNEPDTSFFDPLKDKYTTHFLDEYTELWDENSEWYSETTKLNNGIPVEFDGYMRVSIDTEVFFRGKKQLETFNDLTSDCKDGINTCNVAAN

SEQ ID NO: 13916 - protein, 161 aa, Glycine max
  unsure (1)..(161): unsure at all Xaa locations
SSXLRRPPPRKFGNFEPDNYWSRVCEGETEGIIKRPWHFLWKSRRLMEIVSAIASRMNWDFDSVHVVRGEKAQNTQLWPNLDRDTSPDSLLMALNDKVGAGRYLYIATNEPEKSFFNPLKEKYKTHFLDDFKYLWDENSEWFTETKELSNGQPVEFDGYMX

SEQ ID NO: 13917 - protein, 571 aa, Oryza sativa
  unsure (1)..(571): unsure at all Xaa locations
AGPGGGAVRGAVARRRRDRDRDRDRPARRAALRGXNLLFALFVAAVLAFTLLAAVHSPDDPLLHPSSHQLTAFLTSATSNSTFLADDSVLRTGEDFAAAIGANSSDAAAAAEATVAEENPIVEAVSCDTEAPVDCRDKDLFNLLMRTAIEKFSDLHFYRFGRPVAVPGSPMECDLAWRFRPADNGRTTYYKDYRRFTLTRDVNTCNLVVGNVGEYHSGTGAKRSGRRKGKKGKKGKREAPPELVVGEAVNDNLPVVESESEFSRGKYLIYMGGGERCKSMNHYVWGFLCALGEAQYLNRTLVMDLNVCLNSRYTSSGKDEERDFRLYFDFEHLKQSASVIDQSQFWTDWGKWHKKDRLKNHYTEDIKVTPMQLRDVKDTLIMRKFGNVEPDNFWSRVCEGETEAVIKRPWYLLWKSRRLMEIVSAISSRMDWDFDSVHVVRGEKAQNKQLWPNLDRDTSPDSLLTTLNDKVGAGRHLYIATNEPDKSFFDPMKGKYRTHFLDDFKDLWDENSEWYTETKELSNGNAVEFDGYMRVAVDTEVFLRGKRKLETFSDLTRDCKNGVNTCPASSX

SEQ ID NO: 13918 - protein, 534 aa, Oryza sativa
  unsure (1)..(534): unsure at all Xaa locations
AGPGGGAVRGAVARRRRDRDRDRDRPARRAALRGXNLLFALFVAAVLAFTLLAAVHSPDDPLLHPSSHQLTAFLTSATSNSTFLADDSVLRTGEDFAAAIGANSSDAAAAAEATVAEENPIVEAVSCDTEAPVDCRDKDLFNLLMRTAIEKFSDLHFYRFGRPVAVPGSPMECDLAWRFRPADNGRTTYYKDYRRFTLTRDVNTCNLVVGNVGEYHSGTGAKRSGRRKGKKGKKGKREAPPELVVGEAVNDNLPVVESESEFSRGKYLIYMGGGERCKSMNHYVWGFLCALGEAQYLNRTLVMDLNVCLNSRYTSSGKDEERDFRLYFDFEHLKQSASVIDQSQFWTDWGKWHKKDRLKNHYTEDIKVTPMQLRDVKDTLIMRKFGNVEPDNFWSRVCEVHVVRGEKAQNKQLWPNLDRDTSPDSLLTTLNDKVGAGRHLYIATNEPDKSFFDPMKGKYRTHFLDDFKDLWDENSEWYTETKELSNGNAVEFDGYMRVAVDTEVFLRGKRKLETFSDLTRDCKNGVNTCPASSX

SEQ ID NO: 13919 - protein, 391 aa, Oryza sativa
  unsure (1)..(391): unsure at all Xaa locations
NCGSPGCRVGEYHSRSGAXPCGRRKGKKGKKGKREAPVTDFPELVVGEAVNDNLPVVESESEFSRGKYLIYMGGGERCKSMNHYVWGFLCALGEAQYLNRTLVMDLNVCLNSRYTSSGKDEERDFRLYFDFEHLKQSASVIDQSQFWTDWGKWHKKDRLKNHYTEDIKVTPMQLRDVKDTLIMXRKFGNVEPDNFWSRVCEGETEAVIKRPWYLLWXKSRRLMXRLASAIXSSRMERDFGSVHVGXRGEKAQNKQLWPNLDRDTSPDSLLTTLNDKVGAGPPSGPSHHEPDKSFFDPMKGKYRTHFLDDFKDLWDENSEWYTETKELSNGNAVEFDGYMRVAVDTEVFLRGKRKLETFSDLTRDCKNGVNTCPASSXTSRELCALSLKCCA

SEQ ID NO: 13920 - protein, 311 aa, Triticum aestivum
  unsure (1)..(311): unsure at all Xaa locations
XXIYMGGGERCKRMNHYIWGFLCALGEAQFLNRTLVMDFNVCLNSRYTASGKDGEXXDYRLYFDFEHLKESASVIDQSQFWTDWGKWHKKDRLKNHYTEDXYKVTPMKLRDVKDTLIMRKFGHVEPDNYWSRVCEGETEAMIKRPWHFLWKSGRLMEIVSAIASRMSWDFDSMHVVRGEKAQNTQLWPNLDADTSPENLLTTLNDKVGAGRYLYIATDESDKSFFDPLKNKYKTRFXLDDFKDLWDENSEWYVETKELNNGNPVEFDGYMRVAVDTEVFLRGKRKLETFNDLTRDCKDGVNTCAAASXIPD

SEQ ID NO: 13921 - protein, 532 aa, Mus musculus
MLLLWLLLLLLLLVPLLAILWQQRSRGARPCWLISLQHRVAWGMLGWAAAWQQWRLDRSTLNVGQSQQQALMWCLKKAQGSCCLPREDTDMRTFRNHLPLTQTSHTQEQESEETLPSPASPQYHGDASLQATLLGLITLNKAYPEALAPGSTACVTPTSPWPCSVPWLGHALGRVSPDGAKDPRTLLLEALISPGLRVLEARTAVELLDVFVGLEADGEELAEAIAAGILGTLLPKRAAELKEALEQGPRGLARRLWPKLQVVVTLDSGGQAEAVAALRVLWCQGLAFFSPAYAASGGVVALNLWPERPQGSYLLPPGVPFIELLPIKEGTQEEAASTLLLTDAQREKEYELVLTNHTSLTRCRLGDVVQVVGTYNQCPVVRFTCRLGQTLNVRGEVTDETVFSVALAQAVGQWPGAKLLDHVCVESRVLDSCEGSAPHYEVFVELRGLRNLSEENRDKLDNCLQEASAQYKSLRFRGSVGPAKVHLVRPGSFRVLREALAAFSSSSCRPPEMPRVIRLRHLAQLLQKRVIS

SEQ ID NO: 13922 - protein, 532 aa, Mus musculus
MLLLWLLLLLLLLVPLLAILWQQRARGARPCWLISLQHRVAWGMLGWAAAWQQWRLDRSTLNVGQSQQQALMWCLKKAQGSCCLPREDTDMRTFRNHLPLTQTSHTQEQESEETLPSPASPQYHGDASLQATLLGLITLNKAYPEALAPGSTACVTPTSPWPCSVPWLGHALGRVSPDGAKDPRTLLLEALISPGLRVLEARTAVELLDVFVGLEADGEELAEAIAAGILGTLLPKRAAELKEALEQGPRGLARRLWPKLQVVVTLDSGGQAEAVAALRVLWCQGLAFFSPAYAASGGVVALNLWPERPQGSYLLPPGVPFIELLPIKEGTQEEAASTLLLTDAQREKEYELVLTNHTSLTRCRLGDVVQVVGTYNQCPVVRFTCRLGQTLNVRGEVTDETVFSVALAQAVGQWPGAKLLDHVCVESRVLDSCEGSAPHYEVFVELRGLRNLSEENRDKLDNCLQEASAQYKSLRFRGSVGPAKVHLVRPGSFRVLREALAAFSSSSCRPPEMPRVIRLRHLAQLLQKRVIS

SEQ ID NO: 13923 - protein, 510 aa, Rattus norvegicus
MLCQQRSPGARPCWLISLQHRVACVVLSWAAAWQRRKLEQSTLNVSQSQQQALMGCLKEAQGSCCLPRENTDMTTFRNLPLTKTSHTQQKESEEKLLPPTLPQYHGDASLQATLLGLMTLNKAYPEVLAPGSTACVTPTSPWPYSVPWLGHALGRVSPIGAKDARTLLLEALISPGLRVLEARTAVELLDVFVGLEADGEELAEVIASGSLGKLPRRAAELQEALEQGPRGLALRLWPKLQVVVTLDAGGQAEAVAALRVLWCQGLAFFSPAYAASGGVMALNLWPEQPQGSYLLSPGVPFIELLPIKEGTQEEAASTLLLTDVRREEKYELVLTDSTSLTRCRLGDVVQVIGTYNQCPVVRFTCRLGQTLSVRGEVTDENVFSVALAQAVGQWPGAKLLDHVCVESHILDSYEGSAPHYEVFVELRGLRNLSEENRDKLDHCLQEASPRYKSLRFWGSVGPAKVHLVRPGSFRVLREALAACPSSSCPEMPRVLRLRHLAQLLQKRVIP

SEQ ID NO: 13924 - protein, 563 aa, Clostridium acetobutylicum
MSKVIYKISIDLGGIVKRNFEKETKNCGKVNEEVLFKILKSNDKSEIGIKFKFKDIKSIRQFKDSVPITEYKDYEKYINRMADGEGNVLMSEKVEYFGHTSGTTGKQKLVPCTKNSRRRASKYMALLVNRFCYDNFKENWNYARGMMIADIVMTTYTKGKIPICSATSGGMKGIKHLLPYLYTSPIEVMEIKDKETALYLHLLFGLEEEELLYISGVFISNILDLFRTLEKNNKALVRDIQKGSISEELNIDEGLRKVLNKKLKPNNKRAMELEKEFKKGFKGIAKRIWPNLLYIASVTGANFSIYNDKVYYYIDSIPIYSAAYGSTEAMIGINPYASKVLYVITPSAVFYEFIPIGEKGEESFDTLLLSELKLGGRYEVVITNYAGLYRYKIGDVVKVVGFYNKCPEIEFLYRKNQVLNMAAEKTNEEHLTYAIKNTIKKLNLDLVDYTTEPDNSITPGRYIFYFEFRNNMYGFSTEKLQNILDDELRVSNLAYNRARNNKKLGMLKVEVLAPNTFDLIKEALFNKGISKNQIKIPRVIINNKIVMDIINRNKIKFVKKSVI

SEQ ID NO: 13925 - protein, 503 aa, Bacteroides thetaiotaomicron VPI-5482
MNITKIISKTFDSRLKQIDLYASQASEIQHRVLSRLVNQAAQTEWGKKYDYASIRSYEDFRNRLPIQTYEEIKPYVERLRAGEQNLLWPSEIRWFAKSSGTTNDKSKFLPVSKEALEDIHYRGGKDAAALYFRINPDSHFFSGKGLILGGSHSPNLNSNHSLVGDLSAILIQNVNPLINFIRVPSKKIALMSEWETKIEAIANSTIPVNVTSLSGVPSWMLVLIKRILEKTGKQTLEEVWPNLEVFFHGGVAFTPYREQYKQVIHSKMMHYVETYNASEGYFGTQNDLSDPAMLLMIDYGIFYEFVPLEEVDKENPRAYCLEEVELNKNYAMVISTSCGLWRYMIGDTVKFTNKNPYKFVITGRTKHFINAFGEELIVDNAEKGLAKACAETGAQVCEYSAAPVFMDEHAKCRHQWLIEFAKMPDSVEKFAAILDATLKEVNSDYEAKRWKDIALQPLEVIVARPGLFHDWLARKGKLGGQHKVPRLSNTREYIESMLVLNNE

SEQ ID NO: 13926 - protein, 599 aa, Physcomitrella patens
MALRIENPYYKLLDTDEEIVEDFELMSRNARETQLELLRKILERNANVEYLQRQGLNGRTDEASFKACVPVSTYANIEADVDRIADGDTSPICCVDPPTSFALSSGTTGGKCKLIPRTDALLAQAMKAGQIGSVYRRRAFPRKHEGPPVVMSFQYAGRQFDTKSGLKAGTGTTNFYRSAAFKNAKSAPFSATSPVDIVLGYDVPQQMYCHLLCGLYRCQEVEQMSAIFAYMIVEPFRLLERVWRDICKDIREGTVNERVSDPELRSSVLKVLSPNPELADLIERECAKGWSGIIERLFPNINYIMSIFSGSMLPYVAPMRQYAGSVPLMNADYGASEAWIGINLDPRCPAEDASFTIIPNFAYFEFIPVNRDSAGYDSVEGDEIVGLTDVKVGQEYEIVLTTVGGLYRYRLGDIVKVTGFFNSTPKVAFVCRKGVVLSVNTDKTDEEELRLVVGKASLLLKESNMELADYSSYTDQDSQPGHYVIFWELRSHEHLDMDLLSECCKVLDQSFNNPYMRGRAARTIGPLELAIVKEGAFARLMEQFVRKNGVGASQYKVSRCFKNPATLKHFRDETIATLRSPDFPPELLAAWRPSTKIVG

SEQ ID NO: 13927 - protein, 590 aa, Arabidopsis thaliana
MAVDSNLSSPLGPPACEKDAKALRFIEEMTRNADTVQENLLAEILARNADTEYLRRFNLCGATDRDTFKTKIPVITYEDLQPEIQRIADGDRSPILSAHPISEFLTSSGTSAGERKLMPTIKEELDRRQLLYSLLMPVMNLYVPGLDKGKGMYFLFVKSETKTPGGLPARPVLTSYYKSEHFRSRPYDPYNVYTSPNEAILCPDSFQSMYTQMLCGLLDRLSVLRVGAVFASGLLRAIRFLQLHWSRFAHDIELGCLDSEITDPSIRQCMSGILKPDPVLAEFIRRECKSDNWEKIITRIWPNTKYLDVIVTGAMAQYIPTLEYYSGGLPMACTMYASSECYFGLNLNPMSKPSEVSYTIMPNMAYFEFIPLGGTKAVELVDVNIGKEYELVVTTYAGLCRYRVGDILRVTGFHNSAPQFHFVRRKNVLLSIDSDKTDESELQKAVENASSILHEECGSRVAEYTSYADTSTIPGHYVLYWELLVRDGARQPSHETLTRCCLGMEESLNSVYRQSRVADNSVGPLEIRVVRNGTFEELMDYAISRGASINQYKVPRCVNFTPIVELLDSRVVSAHFSPSLPHWTPERRRR

SEQ ID NO: 13928 - protein, 595 aa, Arabidopsis thaliana
MTVDSALRSPMMHSPSTKDVKALRFIEEMTRNVDFVQKKVIREILSRNSDTEYLKRFGLKGFTDRKTFKTKVPVVIYDDLKPEIQRIANGDRSMILSSYPITEFLTSSGTSAGERKLMPTIDEDMDRRQLLYSLLMPVMNLYVPGLDKGKALYFLFVKTESKTPGGLPARPVLTSYYKSEQFKRRPNDPYNVYTSPNEAILCPDSSQSMYTQMLCGLLMRHEVLRLGAVFASGLLRAIGFLQTNWKELADDISTGTLSSRISDPAIKESMSKILTKPDQELADFITSVCGQDNSWEGIITKIWPNTKYLDVIVTGAMAQYIPMLEYYSGGLPMACTMYASSESYFGINLKPMCKPSEVSYTIMPNMAYFEFLPHHEVPTEKSELVELADVEVGKEYELVITTYAGLNRYRVGDILQVTGFYNSAPQFKFVRRKNVLLSIESDKTDEAELQSAVENASLLLGEQGTRVIEYTSYAETKTIPGHYVIYWELLVKDQTNPPNDEVMARCCLEMEESLNSVYRQSRVADKSIGPLEIRVVKNGTFEELMDYAISRGASINQYKVPRCVSFTPIMELLDSRVVSTHFSPALPHWSPERRR

SEQ ID NO: 13929 - protein, 603 aa, Arabidopsis thaliana
MAVDSPLQSRMVSATTSEKDVKALKFIEEMTRNPDSVQEKVLGEILTRNSNTEYLKRFDLDGVVDRKTFKSKVPVVTYEDLKPEIQRISNGDCSPILSSHPITEFLTSSGTSAGERKLMPTIEEDLDRRQLLYSLLMPVMNLYVPGLDKGKGLYFLFVKSESKTSGGLPARPVLTSYYKSDHFKRRPYDPYNVYTSPNEAILCSDSSQSMYAQMLCGLLMRHEVLRLGAVFASGLLRAISFLQNNWKELARDISTGTLSSRIFDPAIKNRMSKILTKPDQELAEFLVGVCSQENWEGIITKIWPNTKYLDVIVTGAMAQYIPTLEYYSGGLPMACTMYASSESYFGINLKPMCKPSEVSYTIMPNMAYFEFLPHNHDGDGAAEASLDETSLVELANVEVGKEYELVITTYAGLYRYRVGDILRVTGFHNSAPQFKFIRRKNVLLSVESDKTDEAELQKAVENASRLFAEQGTRVIEYTSYAETKTIPGHYVIYWELLGRDQSNALMSEEVMAKCCLEMEESLNSVYRQSRVADKSIGPLEIRVVRNGTFEELMDYAISRGASINQYKVPRCVSFTPIMELLDSRVVSAHFSPSLPHWSPERRR

SEQ ID NO: 13930 - protein, 597 aa, Arabidopsis thaliana
MAVDSLLQSGMASPTTSETEVKALKFIEEITRNPDSVQEKVLGEILSRNSNTEYLKRFDLNGAVDRKSFKSKVPVVIYEDLKTDIQRISNGDRSPILSSHPITEFLTSSGTSAGERKLMPTIEEDINRRQLLGNLLMPVMNLYVPGLDKGKGLYFLFVKSESTTSGGLPARPALTSYYKSDYFRTSDSDSVYTSPKEAILCCDSSQSMYTQMLCGLLMRHEVNRLGAVFPSGLLRAISFLQNNWKELSQDISTGTLSSKIFDHAIKTRMSNILNKPDQELAEFLIGVCSQENWEGIITKIWPNTKYLDVIVTGAMAEYIPMLEYYSGGLPMASMIYASSESYFGINLNPMCKPSEVSYTIFPNMAYFEFLPHNHDGDGGVEATSLVELADVEVGKEYELVITTYAGLYRYRVGDILRVTGFHNSAPQFKFIRRENVLLSIESDKTDEADLQKAVENASRLLAEQGTRVIEYTSYADTKTIPGHYVIYWELLSRDQSNALPSDEVMAKCCLEMEESLNAVYRQSRVSDKSIGPLEIRVVQNGTFEELMDFSISRGSSINQYKVPRCVSLTPIMKLLDSRVVSAHFSPSLPHWSPERRH

SEQ ID NO: 13931 - protein, 612 aa, Arabidopsis thaliana
MPEAPKIAALEVSDESLAEKNKNKLQFIEDVTTNADDVQRRVLEEILSRNADVEYLKRHGLEGRTDRETFKHIMPVVTYEDIQPEINRIANGDKSQVLCSNPISEFLTSSGTSGGERKLMPTIEEELDRRSLLYSLLMPVMDQFVPGLDKGKGMYFLFIKSESKTPGGLPARPVLTSYYKSSHFKNRPYDPYTNYTSPNQTILCSDSYQSMYSQMLCGLCQHKEVLRVGAVFASGFIRAIKFLEKHWPELARDIRTGTLSSEITDSSVREAVGEILKPDPKLADFVESECRKTSWQGIITRLWPNTKYVDVIVTGTMSQYIPTLDYYSNGLPLVCTMYASSECYFGVNLRPLCKPSEVSYTLIPNMAYFEFLPVHRNSGVTSSISLPKALTEKEQQELVDLVDVKLGQEYELVVTTYAGLYRYRVGDVLSVAGFKNNAPQFSFICRKNVVLSIDSDKTDEVELQNAVKNAVTHLVPFDASLSEYTSYADTSSIPGHYVLFWELCLNGNTPIPPSVFEDCCLTIEESLNSVYRQGRVSDKSIGPLEIKMVESGTFDKLMDYAISLGASINQYKTPRCVKFAPIIELLNSRVVDSYFSPKCPKWSPGHKQWGSN

SEQ ID NO: 13932 - protein, 612 aa, Arabidopsis thaliana
MPEAPKIAALEVSDESLAEKNKNKLQFIEDVTTNADDVQRRVLEEILSRNADVEYLKRHGLEGRTDRETFKHIMPVVTYEDIQPEINRIANGDKSQVLCSNPISEFLTSSGTSGGERKLMPTIEEELDRRSLLYSLLMPVMDQFVPGLDKGKGMYFLFIKSESKTPGGLPARPVLTSYYKSSHFKNRPYDPYTNYTSPNQTILCSDSYQSMYSQMLCGLCQHKEVLRVGAVFASGFIRAIKFLEKHWPELARDIRTGTLSSEITDSSVREAVGEILKPDPKLADFVESECRKTSWQGIITRLWPNTKYVDVIVTGTMSQYIPTLDYYSNGLPLVCTMYASSECYFGVNLRPLCKPSEVSYTLIPNMAYFEFLPVHRNSGVTSSISLPKALTEKEQQELVDLVDVKLGQEYELVVTTYAGLYRYRVGDVLSVAGFKNNAPQFSFICRKNVVLSIDSDKTDEVELQNAVKNAVTHLVPFDASLSEYTSYADTSSIPGHYVLFWELCLNGNTPIPPSVFEDCCLTIEESLNSVYRQGRVSDKSIGPLEIKMVESGTFDKLMDYAISLGASINQYKTPRCVKFAPIIELLNSRVVDSYFSPKCPKWSHGHKQWGSN

SEQ ID NO: 13933 - protein, 612 aa, Arabidopsis thaliana
MPEAPKKESLEVFDLTLDQKNKQKLQLIEELTSNADQVQRQVLEEILTRNADVEYLRRHDLNGRTDRETFKNIMPVITYEDIEPEINRIANGDKSPILSSKPISEFLTSSGTSGGERKLMPTIEEELDRRSLLYSLLMPVMSQFVPGLENGKGMYFLFIKSESKTPGGLPARPVLTSYYKSSHFKERPYDPYTNYTSPNETILCSDSYQSMYSQMLCGLCQHQEVLRVGAVFASGFIRAIKFLEKHWIELVRDIRTGTLSSLITDPSVREAVAKILKPSPKLADFVEFECKKSSWQGIITRLWPNTKYVDVIVTGTMSQYIPTLDYYSNGLPLVCTMYASSECYFGVNLRPLCKPSEVSYTLIPSMAYFEFLPVHRNNGVTNSINLPKALTEKEQQELVDLVDVKLGQEYELVVTTYAGLCRYRVGDLLRVTGFKNKAPQFSFICRKNVVLSIDSDKTDEVELQNAVKNAVTHLVPFDASLSEYTSYADTSSIPGHYVLFWELCLDGNTPIPPSVFEDCCLAVEESFNTVYRQGRVSDKSIGPLEIKIVEPGTFDKLMDYAISLGASINQYKTPRCVKFAPIIELLNSRVVDSYFSPKCPKWVPGHKQWGSN

SEQ ID NO: 13934 - protein, 549 aa, Arabidopsis thaliana
MAVDSPLQSRMVSATTSEKDVKALKFIEEMTRNPDSVQEKVLGEILTRNSNTEYLKRFDLDGVVDRKTFKSKVPVVTYEDLKPEIQRISNGDCSPILSSHPITEFLTSSGTSAGERKLMPTIEEDLDRRQLLYSLLMPVMNLYVPGLDKGKGLYFLFVKSESKTSGGLPARPVLTSYYKSDHFKRRPYDPYNVYTSPNEAILCSDSSQSMYAQMLCGLLMRHEVLRLGAVFASGLLRAISFLQNNWKELARDISTGTLSSRIFDPAIKNRMSKILTKPDQELAEFLVGVCSQENWEGIITKIWPNTKYLDVIVTGAMAQYIPTLEYYSGGLPMACTMYASSESYFGINLKPMCKPSEVSYTIMPNMAYFEFLPHNHDGDGAAEASLDETSLVELANVEVGKEYELVITTYAGLYRYRVGDILRVTGFHNSAPQFKFIRRKNVLLSVESDKTDEAELQKAVENASRLFAEQGTRGIEYTSYAETKTIPGHYVIYWELLGRDQSNALMSEEVMAKCCLEMEESLNSVYRQSRVADKSIGPLGDTCGTERYV

SEQ ID NO: 13935 - protein, 614 aa, Oryza sativa (japonica cultivar-group)
MAPAAVAAAEAGSKAAAVAGKAVAACERDAEKLEFIEEMTRGFDAVQERVLAAILARNNGAEYLRRHGMEGRTDREAFKARVPVVTYEDLRPEIERIANGDRSNIISSHPITEFLTSSGTSAGERKLMPTIEDELDRRQMLYSLLMPVMNLYVPGLDKGKGLYFLFIKSETKTPGGLPARPVLTSYYKSDHFKHRPFDPYNVYTSPTAAILCTDAFQSMYAQMLCGLVARAEVLRVGAVFASGLLRAIRFLQLHWRELAHDIRTGTLSAKVTEPSIRDAVAEVLAAPDAELAAFVEAECGKDKWEGIITRMWPNTKYLDVIVTGAMAQYIPTLKFYSGGLPMACTMYASSECYFGLNLRPMCDPSEVSYTIMPNMGYFELMPHDPDAPPLPRDAPPPRLVDLADAEVGREYELVITTYAGLCRYRVGDILQVTGFHNAAPQFRFVRRKNVLLSIDSDKTDEAELQAAVERASALLSPYGASIVEYTSQADATTIPGHYVVYWELMVREGGAWPPPAEEEGRGVFERCCLEMEEALNAVYRQGRNGEAIGPLEIRVVRAGTFEEVMDYAISRGASINQYKAPRCVSFGPIIELLNSRVISKHFSPACPKYSPHKK

SEQ ID NO: 13936 - protein, 623 aa, Oryza sativa (japonica cultivar-group)
MAVMTDVSTTGTALRTPAAGAVKEGDVEKLRFIDEMTTNVDAVQERVLGEILGRNAGTEYLTKCGLDGATDRAAFRAKVPVVSYDDLQPYIQRIANGDRSPILSTHPVSEFLTSSGTSAGERKLMPTIMDELDRRQLLYSLLMPVMNFTHTYKKQMMINGHESLHRYVPGLDKGKGLYFLFVKSETKTPGGLTARPVLTSYYKSDHFKNRPYDPYHNYTSPTAAILCADAFQSMYAQMVCGLCQRNDVLRLGAVFASGLLRAIRFLQLNWEQLADDIESGELTPRVTDPSVREAVAAILLPDPELAKLIRAECSKGDWAGIITRVWPNTKYLDVIVTGAMAQYIPTLEFYSGGLPMACTMYASSECYFGLNLRPMCDPSEVSYTIMPNMGYFEFLPVDETGAASGDATQLVDLARVEVGREYELVITTYAGLNRYRVGDVLRVTGFHNAAPQFRFVRRKNVLLSIESDKTDEAELQRAVERASALLRPHGASVVEYTSQACTKRIPGHYVIYWELLTKGAGATVVDADTLGRCCLEMEEALNTVYRQSRVADGSIGPLEIRVVRPGTFEELMDYAISRGASINQYKVPRCVTFPPIVELLDSRVVSSHFSPALPHWTPARRSE

SEQ ID NO: 13937 - protein, 610 aa, Oryza sativa (japonica cultivar-group)
MPEAPTAKTAPAYGYAPGAHAEALEFIEHVTANAGQVQRRVLGEILAQNAPAEYLRRYGIPGSPDVVDAFRRLVPLVTYEGLQPDILRIANGDTSPIFSGKPISEFLTSSGTSGGERKLMPTIADEMNRRSLLYSLLMPVMSQSVSGLDKGKAMYLLFVKAESRTPGGLAARPVLTSYYRSRQFLDRPRDPYTSYTSPDEAILCVDSYQSMYAQLLCGLVHRADVLRVGAVFASGFLRAIHFLEKHWARLCHDIRTGELDPEITDRVVRDAVGRVLRADPALADAIEDECARASWEGIIRRLWPRTKYIDVIVTGTMSQYIPTLEFYGGGLPLTCTMYASSECYFGLNLNPMCKPSDVAYTLIPTMCYYEFLPVNCNNATAEASHRDLVDLVDVKLGHEYELVVTTYSGLYRYRVGDVLRVAGFKNKAPMFSFVRRQNVALSVDSDKTDETELHAAVSGAVQHLAPFGASLVEYTSYADAATIPGHYVLFWELRAGSTAVPASVFEECCLSVEEALNSVYRQGRACDRSIGPLEIRVVAEGTFDKLMDYAISRGASINQYKAPRCVRPGPVVELLDARVQGKYFSPKCPKWSPGNKQWNKSKDLVGKGDA

SEQ ID NO: 13938 - protein, 614 aa, Oryza sativa; identical to SEQ ID NO: 13935

SEQ ID NO: 13939 - protein, 604 aa, Oryza sativa
MAVMTDVSTTGTALRTPAAGAVKEGDVEKLRFIDEMTTNVDAVQERVLGEILGRNASTEYLTKCGLDGATDRAAFRAKVPVVSYDDLQPYIQRIANGDRSPILSTHPVSEFLTSSGTSAGERKLMPTIMDELDRRQLLYSLLMPVMNLYVPGLDKGKGLYFLFVKSETKTPGGLTARPVLTSYYKSDHFKNRPYDPYHNYTSPTAAILCADAFQSMYAQMVCGLCQRNDVLRLGAVFASGLLRAIRFLQLNWEQLAEDIESGELTPRVTDPSVREAVAAILLPDPELAKLIRAECSKGDWAGIITRVWPNTKYLDVIVTGAMAQYIPTLEFYSGGLPMACTMYASSECYFGLNLRPMCDPSEVSYTIMPNMGYFEFLPVDESAASGDATQLVDLARVEVGREYELVITTYAGLNRYRVGDVLRVTGFHNAAPQFRFVRRKNVLLSIESDKTDEAELQRAVERASALLRPHGASVVEYTSQACTKRIPGHYVIYWELLTKGAGATVVDADTLGRCCLEMEEALNTVYRQSRVADGSIGPLEIRVVRPGTFEELMDYAISRGASINQYKVPRCVTFPPIVELLDSRVVSSHFSPALPHWTPARRSE

SEQ ID NO: 13940 - protein, 593 aa, Oryza sativa
  unsure (1)..(593): unsure at all Xaa locations
GARASDVADQAAPACERDAEKLEFIEEMTRGFDAVQERVLAAILARNNGAEYLRRHGMEGRTDREAFKARVPVVTYEDLRPEIERIANGDRSNIISSHPITEFLTSSGTSAGERKLMPTIEDELDRRQMLYSLLMPVMNLYVPGLDKGKGLYFLFIKSETKTPGGLPARPVLTSYYKSDHFKHRPFDPYNVYTSPTAAILCTDAFQSMYAQMLCGLVARAEVLRVGAVFASGLLRAIRFLQLHWRELAHDIRTGTLSAKVTEPSIRDAVAEVLAAPDAELAAFVEAECGKDKWEGIITRMWPNTKYLDVIVTGAMAQYIPTLKFYSGGLPMACTMYASSECYFGLNLRPMCDPSEVSYTIMPNMGYFELMPHDPXXRLVDLADAEVGREYELVITTYAGLCRYRVGDILQVTGFHNAAPQFRFVRRKNVLLSIDSDKTDEAELQAAVERASALLSPYGASIVEYTSQADATTIPGHYVVYWELMVREGGAWPPPAEEEGRGVFERCCLEMEEALNAVYRQGRNGEAIGPLEIRVVRAGTFEEVMDYAISRGASINQYKAPRCVSFGPIIELLNSRVISKHFSPACPKYSPHKK

SEQ ID NO: 13941 - protein, 598 aa, Oryza sativa
  unsure (1)..(598): unsure at all Xaa locations
MAVMTDVSTTGTALRTPAAGAVKEGDVEKLRFIDEMTTNVDAVQERVLGEILGRNAGTEYLTKCGLDGATDRAAFRAKVPVVSYDDLQPYIQRIANGDRSPILSTHPVSEFLTSSGTSAGERKLMPTIMDELGRRQLLYSLLMPVMNLYVPGLDKGKGLYFLFVKSETKTPGGLTARPVLTSYYKSDHFKNRPYDPYHNYTSPTAAILCADAFQSMYAQMVCGLCQRNDVLRLGAVFASGLLRAIRFLQLNWEQLADDIESGELTPRVTDPSVREAVAAILLPDPELAKLIRAECSKGDWAGIITRVWPNTKYLDVIVTGAMAQYIPTLEFYSGGLPMACTMYASSECYFGLNLRPMCDPSEVSYTIMPNMGYFEFLPVDESAASGDATQLVDLARVEVGREYELVITTYAGLNRYRVGDVXLRVTXFRFVRRKNVLLSIESDKTDEAELQRAVERASALLRPHGASVVEYTSQACTKRIPGHYVIYWELLTKGAGATVVDADTLGRCCLEMEEALNTVYRQSRVADGSIGPLEIRVVRPGTFEELMDYAISRGASINQYKVPRCVTFPPIVELLDSRVVSSHFSPALPHWTPARRSE

SEQ ID NO: 13942 - protein, 802 aa, Oryza sativa
MAVMTDVSTTGTALRTPAAGAVKEGDVEKLRFIDEMTTNVDAVQERVLGEILGRNAGTEYLTKCGLDGATDRAAFRAKVPVVSYDDLQPYIQRIANGDRSPILSTHPVSEFLTSSGTSAGERKLMPTIMDELGRRQLLYSLLMPVMNLYVPGLDKGKGLYFLFVKSETKTPGGLTARPVLTSYYKSDHFKNRPYDPYHNYTSPTAAILCADAFQSMYAQMVCGLCQRNDVLRLGAVFASGLLRAIRFLQLNWEQLADDIESGELTPRVTDPSVREAVAAILLPDPELAKLIRAECSKGDWAGIITRVWPNTKYLDVIVTGAMAQYIPTLEFYSGGLPMACTMYASSECYFGLNLRPMCDPSEVSYTIMPNMGYFEFLPVDESAASGDATQLVDLARVEVGREYELVITTYAGLNRFVRRKNVLLSIESDKTDEAELQRAVERASALLRPHGASVVEYTSQACTKRIPGHYVIYWELLTKGAGATVVDADTLGRCCLEMEEALNTVYRQSRVADGSIGPLEIRVVRPGTFEELMDYAISRGASINQYKVPRCVTFPPIVELLDSRVVSSHFSPALPHWTPARRTTSPAHPSRTVPSRPRVNHLPRAHHDVGPCVLVLAVVVDWAGWLPRWRHAVQVKEAGVRGFNGCSPVSRLTRTRARALRRKRGRVAETQPHRGREGGRGRGATCRGTAVPVRAGGRCAFDHKNRRFAWEIRPQGFMDTSKMVLDRNACKEVPLFPRSKRKAHIAAGARLASKVESEAHTHARRRETVRKRCGGAWFMWARPVKGEPRQSSSSRCLPDSSS

SEQ ID NO: 13943 - protein, 593 aa, Oryza sativa
  unsure (1)..(593): unsure at all Xaa locations
SAIGAALRSXXAATVSEADVEKLRLIEELTSDVDAVQERVLSEILGRNAGAEYLTRCGHDAGDTGRATFRAKVPVVSYDDLKPYIQRVADGDCSPVLSTHPITEFLTSSGTSAGECKLILVAMDDSGRRQALHGLIGPVLKLYVPGLEKGKGLYFMFVKSETKTRGGLTAWFALTSVYKSEQFKSMAIAYTSPTAAILCEDAFQSMYAQMVCGLCQRHDVVRFGAVFAAALVRAIRFLQLNWGQLAADIEAGELGPHVADPSVREAVSGILRSDAELAEFVRIECSKGDWAGIITRIWPNTKYVDAIVTGAMAQYIRTLQYYSGGLPIVSTSYASSECFFGINLRPVCDPSEVSYTIMPNTAYFEFLPVGEXXVDATNLVDLARVEVGREYEVVITTYAGLSRYRVGDVLRVTGFHNAAPQFRFVRRQSVLLSVELDKTDEAELHRAVERASSALLRPRGVSVAEYTSRACTERIPGHYVVYWELLTESPVGAGDGEETLGRCCLEMEEALSAVYRQGRVADGSIGPLEIRIVRPGTFEEVMDLAVSRGTSIGQYKVPQCVTVPSVVELLDSRVVSSQFSPALPHWIPTPRSD

SEQ ID NO: 13944 - protein, 436 aa, Triticum aestivum
  unsure (1)..(436): unsure at all Xaa locations
XGLTARPVLTSYYKSEQFKNRPYDPYHNYTSPTAAILCADAFQSMYAQMVCGLCQRHEVLRVGAVFASGLLRAIRFLQLNWKELAADIEAGALSPRVTDASVREAVAGILRPDPELAQFVRDECCNDDWAGIVRRIWPNTKYLDVIVTGAMAQYIGTLKYYSGDLPMACTMYASSECYFGLNLRPLCDPSEVSYTIMPNMGYFEFLPVDSATGAASCVDAGNLVDLARVEAGREYELVITTYAGLNRYRVGDVLRVTGFHNAAPQFQFVRRKNVLLSIESHKTDEAELQRAVERASALLRPHGASVAEYTSQACTKSIPGHYVIYWELLTTGAGAATAVDKGTLDACCLEMEEALNTVYRQSRVADAIGPLEIRVVRAGTFEELMDYAISRGASINQYKAPRCVTFPPIIELLDSRVVSSHFSPALPHWTPARRSD

SEQ ID NO: 13945 - protein, 468 aa, Triticum aestivum
  unsure (1)..(468): unsure at all Xaa locations
FRTSLSVFSLPLDPNRGLYFLFVKSETKTPSGLTARPVLTSYYKSEQFKNRPYDPYHNYTSPTAAILCADAFQSMYAQMVCGLCERPGLPRAGAVPAPGLLRAVRLLPRAGAAPAADAAPGARCPRVADAPVPVAXGRAASRPAPSAPSSSGSAGRARSWSPRIRRLPPRPQHLDVIVTGAMAQYIGTLKYYSGDLPMACTMYASSECYFGLNLRPLCDPSEVSYTIMPNMGYFEFLPVDSATGAASCVDAGNLVDLARVEAGREYELVITTYAGLNRYRVGDVLRVTGFHNAAPQFQFVRRKNVLLSIESHKTDEAELQRAVERASALLRPHGASVAEYTSQACTKSIPGHYVIYWELLTTGAGAATAVDKGTLDACCLEMEEALNTVYRQSRVADGSIGPLEIRVVRGGTFEELMDYAISRGASINQYKAPRCVTFPPIIELLDSRVVSSHFSPALPHWTPARRSD

SEQ ID NO: 13946 - protein, 435 aa, Triticum aestivum
  unsure (1)..(435): unsure at all Xaa locations
MPEAPSAQPAPASGYAPGAHREALDFIEHVTANAGKVQQRVLAEILAQNETAEYLRRYGVSSSSSPLDPVDAFRRCVPLVTYEDLQPDILRIANGDSSPILSGKPISEFLTSSGTSGGERKLMPTIADELDRRSLLYSLLMPVMSQSLPGLDKGKAMYLLFVKAESRTPGGLAARPVLTSYYRSRQFLDRPHDPSSAYTSPNKAILCVDSYQSMYAQLLCGLVHRTDVLRVGAVFASGLLRAIRFLEKHWPLLCHDIRTGELDPEITDHAVRDAVGRLLHANPALASEIEAECSKPSWEGIIRRLWPRTKYIDVIVTGAMSQYIQTLEFYGGGLPLICTMYASSECYFGLNLNPMCKPGDVAYTLIPTMCHFEFLPVHCSNANAEPSHRDLVDLVDVKLGHDYELVVTTFSGLCRYRVGDVLRVAGFKNEAPMFX

SEQ ID NO: 13947 - protein, 226 aa, Triticum aestivum
  unsure (1)..(226): unsure at all Xaa locations
XHERRCXMDDPPPRLVDLADAEVGKEYELVITTYAGLCRYRVGDILQAAGPGNAAPQFRFVRRKNVLLSIDSDKTDEAELQAAVERAARLLAPYGASIVEYTSEADATTIPGHYVVYWELMLKDCREGLWPEAAVFERCCLEMEEALNSVYRQGRNGDAIGPLEIRVVRGGTFEEVMDYAISRGASINQYKAPRCVSFGPIIELLNSRVLSKHFSPACPKYGPPKK

SEQ ID NO: 13948 - protein, 221 aa, Triticum aestivum
MAPATADAAGAAVGGRVKTALGVAACERDAEKLELIEQLTKGFDDEQQRVLAAILARNNGAEYLRRHGMEGCTDRDAFKARVPVVTYEDLRPEIERIANGDRSNIISSHPISEFLTSSGTSAGERKLMPTIEDELDRRQMLYSLLMPVMNLFVPGLDKGKGLYFLFIKSETKTPGGLPARPVLTSYYKSDHFKYRPFDAYQVYTSPTPAILCTDSFQSMYS

SEQ ID NO: 13949 - protein, 616 aa, Zea mays
  unsure (1)..(616): unsure at all Xaa locations
MAVMAEVVSTTGAALRSPATQQPAAAGAAKGTDAEKLQFIEDMTSNVDAVQERVLGEILARNADTEYLSSRCGLAGATDRATFRAKVPMATYEDLQPYIRRIADGDRSPILSGHPVSEFLTSSGTSGGERKLMPTIEDELNRRQLLYSLQMPVMNLYVPGMDKGKALHFLFVKSETKTPGGLAARPVLTSYYKSNHFRNRPFDAYNNYTSPTAAILCADAFQSMYAQMLCGLCQRQDVLRVGAVFASGLLRAIRFLQLNWEQLAEDIEAGSLTPRVTDPSVREAVAGILRADPELAALVRSECSKGDWAGIITRIWPSTKYLDVIVTGAMAQYIPTLKYYSGGLPMACTMYASSECYFGLNLRPMCDPSEVSYTLMPNMCYFEFLPMDSAAXXSGGDASQLVDLARVEVGREYELVITTYAGLNRYRVGDVLQVTGFHNSAPQFRFVRRKNVLLSIESDKTDEAELQRAVERASALLRPHGAAVVEYTSQAYTKSIPGHYVIYWELLAKGPAAGGAVGEGTLERCCLEMEEALNTVYRQSRVADAIGPLEIRVVRPGTFEELMDYAISRGASINQYKVPRCVTFPPIIELLDSRVVSSHFSPALPHWTPGQRSDSD

SEQ ID NO: 13950 - protein, 614 aa, Zea mays
  unsure (1)..(614): unsure at all Xaa locations
MAVMAEVVSTTGAALRSPASQPLPAAVKNADAEKLQFIEEMTSNVDAVQERVLGEILARNAGTEYLAKYGLAAATTDRATFRAKVPMATYEDLQPYIRRIADGDRSPILSGHPVSEFLTSSGTSAGERKLMPTIEDELNRRQLLYSLQMPVMNLYVPGMDKGKALHFLFVKSETKTPGGLAARPVLTSYYKSNHFKNRPFDAYNNYTSPTAAILCADAFQSMYAQMLCGLCQRQDVLRVGAVFASGLLRAIRFLQLNWEQLAEDIEAGSLTPRVTDPSVREAVAGILRADPELAALVRSECSKGDWAGIITRIWPSTKYLDVIVTGAMAQYIPTLKYYSGGLPMACTMYASSECYFGLNLRPMCDPSEVSYTLMPNMCYFEFLPMDSAAXXSGGDASQLVDLARVEVGREYELVITTYAGLNRYRVGDVLQVTGFHNSAPQFRFVRRKNVLLSIESDKTDEAELQRAVERASALLRPHGAAVVEYTSQAYTKSIPGHYVIYWELLAKGPAGGAAVGEGTLERCCLEMEEALNTVYRQSRVADAIGPLEIRVVRPGTFEELMDYAISRGASINQYKVPRCVTFPPIIELLDSRVVSSHFSPALPHWTPGQRSDSD

SEQ ID NO: 13951 - protein, 614 aa, Zea mays
  unsure (1)..(614): unsure at all Xaa locations
MAVMAEVVSTTGAALRSPASQPLPAAVKNADAEKLQFIEEMTSNVDAVQERVLGEILARNAGTEYLAKYGLAAATTDRATFRAKVPMATYEDLQPYIRRIADGDRSPILSGHPVSEFLTSSGTSAGERKLMPTIEDELNRRQLLYSLQMPVMNLYVPGMDKGKALHFLFVKSETKTPGGLAARPVLTSYYKSNHFKNRPFDAYNNYTSPTAAILCADAFQSMYAQMLCGLCQRQDVLRVGAVFASGLLRAIRFLQLNWEQLAEDIEAGSLTPRVTDPSVREAVAGILRADPELAALVRSECSKGDWAGIITRIWPSTKYLDVIVTGAMAQYIPTLKYYSGGLPMACTMYASSECYFGLNLRPMCDPSEVSYTLMPNMCYFEFLPMDSAAXXSGGDASQLVDLARVEVGREYELVITTYAGLNRYRVGDVLQVTGFHNSAPQFRFVRRKNVLLSIESDKTDEAELQRAVERASALLRPHGAAVVEYTSQAYTKSIPGHYVIYWELLAKGPAAGAAVGEGTLERCCLEMEEALNTVYRQSRVADAIGPLEIRVVRPGTFEELMDYAISRGASINQYKVPRCVTFPPIIELLDSRVVSSHFSPALPHWTPGQRSDSD

SEQ ID NO: 13952 - protein, 614 aa, Zea mays
MAVMAEVVSTTGAALRSPATQQPAAAGAAKGTDAEKLQFIEDMTSNVDAVQERVLGEILARNADTEYLSSRCGLAGATDRATFRAKVPMATYEDLQPYIRRIADGDRSPILSGHPVSEFLTSSGTSGGERKLMPTIEDELNRRQLLYSLQMPVMNLYVPGMDKGKALHFLFVKSETKTPGGLAARPVLTSYYKSNHFRNRPFDAYNNYTSPTAAILCADAFQSMYAQMVCGLCQRQDVLRVGAVFASGLLRAIRFLQLNWEQLAEDIEAGSLTPRVTDPSVREAVAGILRPDPAVAELVRSECSGGDWAGIVTRIWPNTKYLDVIVTGAMAQYIPTLKHYSGGLPMACTMYASSECYFGLNLRPMCDPSEVSYTLMPNMCYFEFLPMGGAVDASQLVDLGRVERGREYELVITTYAGLNRYRVGDVLQVTGFHNSAPQFRFVRRKNVLLSIESDKTDEAELQRAVERASALLRPHGAAVVEYTSQAYTKSIPGHYVVYWELLQAKGGAAVDGETLEGCCLEMEEALNAVYRQSRVADGSIGPLEIRVVRPGTFEELMDYAISRGASINQYKVPRCVTFPPIIELLDSRVVSSHLSPALPHWTAGQRSGSGSGSD

SEQ ID NO: 13953 - protein, 418 aa, Zea mays
  unsure (1)..(418): unsure at all Xaa locations
XTRPLPRTSXIEKSPTAAILCAXAFQSMYAQMVCGLCQRQDVLRVGAVFASGLLRAIRFLQLNWEQLAEDIEAGSLTPRVTDPSVREAVAGILRPDPAVAELVRSECSGGDWAGIVTRIWPNTKYLDVIVTGAMAQYIPTLKHYSGGLPMACTMYASSECYFGLNLRPMCDPSEVSYTLMPNMCYFEFLPMGGAVDASQLVDLGRVERGREYELVITTYAGLNRYRVGDVLQVTGFHNSAPQFRFVRRKNVLLSIESDKTDEAELQRAVERASALLRPHGAAVVEYTSQAYTKSIPGHYVVYWELLQAKGGAAVDGETLEGCCLEMEEALNAVYRQSRVADGSIGPLEIRVVRPGTFEELMDYAISRGASINQYKVPRCVTFPPIIELLDSRVVSSHLSPALPHWTAGQRSGSGSGSD

SEQ ID NO: 13954 - protein, 530 aa, Homo sapiens
MLLWPLLLLLLLLPTLALLRQQRSQDARLSWLAGLQHRVAWGALVWAATWQRRRLEQSTLHVHQSQQQALRWCLQGAQRPHCSLRRSTDISTFRNHLPLTKASQTQQEDSGEQPLPPTSNQDLGEASLQATLLGLAALNKAYPEVLAQGRTARVTLTSPWPRPLPWPGNTLGQVGTPGTKDPRALLLDALRSPGLRALEAGTAVELLDVFLGLETDGEELAGAIAAGNPGAPLRERAAELREALEQGPRGLALRLWPKLQVVVTLDAGGQAEAVAALGALWCQGLAFFSPAYAASGGVLGLNLQPEQPHGLYLLPPGAPFIELLPVKEGTQEEAASTLLLAEAQQGKEYELVLTDRASLTRCRLGDVVRVVGAYNQCPVVRFICRLDQTLSVRGEDIGEDLFSEALGRAVGQWAGAKLLDHGCVESSILDSSAGSAPHYEVFVALRGLRNLSEENRDKLDHCLQEASPRYKSLRFWGSVGPARVHLVGQGAFRALRAALAACPSSPFPPAMPRVLRHRHLAQCLQERVVS

SEQ ID NO: 13955 - protein, 474 aa, Homo sapiens [sequence omitted]

SEQ ID NO: 13956 - protein, 2549 aa, Mus musculus
MLGTGPAVATASAATSSNVSVLQQFASGLKSRNEETRAKAAKELQHYVTMELREMSQEESTRFYDQLNHHIFELVSSSDANERKGGILAIASLIGVEGGNSTRIGRFANYLRNLLPSSDPVVMEMASKAIGRLAMAGDTFTAEYVEFEVKRALEWLGADRNEGRRHAAVLVLRELAISVPTFFFQQVQPFFDNIFVAVWDPKQAIREGAVAALRACLILTTQREPKEMQKPQWYRHTFEEAEKGFDETLAKEKGMNRDDRIHGALLILNELVRISSMEGERLREEMEEITQQQLVHDKYCKDLMGFGTKPRHITPFTSFQAVQPQQPNALVGLLGYSSPQGLMGFGTSPSPAKSTLVESRCCRDLMEEKFDQVCQWVLKCRSSKNSLIQMTILNLLPRLAAFRPSAFTDTQYLQDTMNHVLSCVKKEKERTAAFQALGLLSVAVRSEFKVYLPRVLDIIRAALPPKDFAHKRQKTVQVDATVFTCISMLARAMGPGIQQDIKELLEPMLAVGLSPALTAVLYDLSRQIPQLKKDIQDGLLKMLSLVLMHKPLRHPGMPKGLAHQLASPGLTTLPEASDVASITLALRTLGSFEFEGHSLTQFVRHCADHFLNSEHKEIRMEAARTCSCLLTPSIHLISGHAHVVSQTAVQVVADVLSKLLVVGITDPDPDIRYCVLASLDERFDAHLAQAENLQALFVALNDQVFEIRELAICTVGRLSSMNPAFVMPFLRKMLIQILTELEHSGIGRIKEQSARMLGHLVSNAPRLIRPYMEPILKALILKLKDPDPDPNPGVINNVLATIGELAQVSGLEMRKWVDELFIIIMDMLQDSSLLAKRQVALWTLGQLVASTGYVVEPYRKYPTLLEVLLNFLKTEQNQGTRREAIRVLGLLGALDPYKHKVNIGMIDQSRDASAVSLSESKSSQDSSDYSTSEMLVNMGNLPLDEFYPAVSMVALMRIFRDQSLSHHHTMVVQAITFIFKSLGLKCVQFLPQVMPTFLNVIRVCDGAIREFLFQQLGMLVSFVKSHIRPYMDEIVTLMREFWVMNTSIQSTIILLIEQIVVALGGEFKLYLPQLIPHMLRVFMHDNSQGRIVSIKLLAAIQLFGANLDDYLHLLLPPIVKLFDAPEVPLPSRKAALETVDRLTESLDFTDYASRIIHPIVRTLDQSPELRSTAMDTLSSLVFQLGKKYQIFIPMVNKVLVRHRINHQRYDVLICRIVKGYTLADEEEDPLIYQHRMLRSSQGDALASGPVETGPMKKLHVSTINLQKAWGAARRVSKDDWLEWLRRLSLELLKDSSSPSLRSCWALAQAYNPMARDLFNAAFVSCWSELNEDQQDELIRSIELALTSQDIAEVTQTLLNLAEFMEHSDKGPLPLRDDNGIVLLGERAAKCRAYAKALHYKELEFQKGPTPAILESLISINNKLQQPEAASGVLEYAMKHFGELEIQATWYEKLHEWEDALVAYDKKMDTNKEDPELMLGRMRCLEALGEWGQLHQQCCEKWTLVNDETQAKMARMAAAAAWGLGQWDSMEEYTCMIPRDTHDGAFYRAVLALHQDLFSLAQQCIDKARDLLDAELTAMAGESYSRAYGAMVSCHMLSELEEVIQYKLVPERREIIRQIWWERLQGCQRIVEDWQKILMVRSLVVSPHEDMRTWLKYASLCGKSGRLALAHKTLVLLLGVDPSRQLDHPLPTAHPQVTYAYMKNMWKSARKIDAFQHMQHFVQTMQQQAQHAIATEDQQHKQELHKLMARCFLKLGEWQLNLQGINESTIPKVLQYYSAATEHDRSWYKAWHAWAVMNFEAVLHYKHQNQARDEKKKLRHASGANITNATTAATTAASAAAATSTEGSNSESEAESNENSPTPSPLQKKVTEDLSKTLLLYTVPAVQGFFRSISLSRGNNLQDTLRVLTLWFDYGHWPDVNEALVEGVKAIQIDTWLQVIPQLIARIDTPRPLVGRLIHQLLTDIGRYHPQALIYPLTVASKSTTTARHNAANKILKNMCEHSNTLVQQAMMVSEELIRVAILWHEMWHEGLEEASRLYFGERNVKGMFEVLEPLHAMMERGPQTLKETSFNQAYGRDLMEAQEWCRKYMKSGNVKDLTQAWDLYYHVFRRISKQLPQLTSLELQYVSPKLLMCRDLELAVPGTYDPNQPIIRIQSIAPSLQVITSKQRPRKLTLMGSNGHEFVFLLKGHEDLRQDERVMQLFGLVNTLLANDPTSLRKNLSIQRYAVIPLSTNSGLIGWVPHCDTLHALIRDYREKKKILLNIEHRIMLRMAPDYDHLTLMQKVEVFEHAVNNTAGDDLAKLLWLKSPSSEVWFDRRTNYTRSLAVMSMVGYILGLGDRHPSNLMLDRLSGKILHIDFGDCFEVAMTREKFPEKIPFRLTRMLTNAMEVTGLDGNYRTTCHTVMEVLREHKDSVMAVLEAFVYDPLLNWRLMDTNTKGNKRSRTRTDSYSAGQSVEILDGVELGEPAHKKAGTTVPESIHSFIGDGLVKPEALNKKAIQIINRVRDKLTGRDFSHDDTLDVPTQVELLIKQATSHENLCQCYIGWCPFW

SEQ ID NO: 13957 - protein, 2549 aa, Mus musculus
MLGTGPAVATASAATSSNVSVLQQFASGLKSRNEETRAKAAKELQHYVTMELREMSQEESTRFYDQLNHHIFELVSSSDANERKGGILAIASLIGVEGGNSTRIGRFANYLRNLLPSSDPVVMEMASKAIGRLAMAGDTFTAEYVEFEVKRALEWLGADRNEGRRHAAVLVLRELAISVPTFFFQQVQPFFDNIFVAVWDPKQAIREGAVAALRACLILTTQREPKEMQKPQWYRHTFEEAEKGFDETLAKEKGMNRDDRIHGALLILNELVRISSMEGERLREEMEEITQQQLVHDKYCKDLMGFGTKPRHITPFTSFQAVQPQQPNALVGLLGYSSPQGLMGFGTSPSPAKSTLVESRCCRDLMEEKFDQVCQWVLKCRSSKNSLIQMTILNLLPRLAAFRPSAFTDTQYLQDTMNHVLSCVKKEKERTAAFQALGLLSVAVRSEFKVYLPRVLDIIRAALPPKDFAHKRQKTVQVDATVFTCISMLARAMGPGIQQDIKELLEPMLAVGLSPALTAVLYDLSRQIPQLKKDIQDGLLKMLSLVLMHKPLRHPGMPKGLAHQLASPGLTTLPEASDVASITLALRTLGSFEFEGHSLTQFVRHCADHFLNSEHKEIRMEAARTCSRLLTPSIHLISGHAHVVSQTAVQVVADVLSKLLVVGITDPDPDIRYCVLASLDERFDAHLAQAENLQALFVALNDQVFEIRELAICTVGRLSSMNPAFVMPFLRKMLIQILTELEHSGIGRIKEQSARMLGHLVSNAPRLIRPYMEPILKALILKLKDPDPDPNPGVINNVLATIGELAQVSGLEMRKWVDELFIIIMDMLQDSSLLAKRQVALWTLGQLVASTGYVVEPYRKYPTLLEVLLNFLKTEQNQGTRREAIRVLGLLGALDPYKHKVNIGMIDQSRDASAVSLSESKSSQDSSDYSTSEMLVNMGNLPLDEFYPAVSMVALMRIFRDQSLSHHHTMVVQAITFIFKSLGLKCVQFLPQVMPTFLNVIRVCDGAIREFLFQQLGMLVSFVKSHIRPYMDEIVTLMREFWVMNTSIQSTIILLIEQIVVALGGEFKLYLPQLIPHMLRVFMHDNSQGRIVSIKLLAAIQLFGANLDDYLHLLLPPIVKLFDAPEVPLPSRKAALETVDRLTESLDFTDYASRIIHPIVRTLDQSPELRSTAMDTLSSLVFQLGKKYQIFIPMVNKVLVRHRINHQRYDVLICRIVKGYTLADEEEDPLIYQHRMLRSSQGDALASGPVETGPMKKLHVSTINLQKAWGAARRVSKDDWLEWLRRLSLELLKDSSSPSLRSCWALAQAYNPMARDLFNAAFVSCWSELNEDQQDELIRSIELALTSQDIAEVTQTLLNLAEFMEHSDKGPLPLRDDNGIVLLGERAAKCRAYAKALHYKELEFQKGPTPAILESLISINNKLQQPEAASGVLEYAMKHFGELEIQATWYEKLHEWEDALVAYDKKMDTNKEDPELMLGRMRCLEALGEWGQLHQQCCEKWTLVNDETQAKMARMAAAAAWGLGQWDSMEEYTCMIPRDTHDGAFYRAVLALHQDLFSLAQQCIDKARDLLDAELTAMAGESYSRAYGAMVSCHMLSELEEVIQYKLVPERREIIRQIWWERLQGCQRIVEDWQKILMVRSLVVSPHEDMRTWLKYASLCGKSGRLALAHKTLVLLLGVDPSRQLDHPLPTAHPQVTYAYMKNMWKSARKIDAFQHMQHFVQTMQQQAQHAIATEDQQHKQELHKLMARCFLKLGEWQLNLQGINESTIPKVLQYYSAATEHDRSWYKAWHAWAVMNFEAVLHYKHQNQARDEKKKLRHASGANITNATTAATTAASAAAATSTEGSNSESEAESNENSPTPSPLQKKVTEDLSKTLLLYTVPAVQGFFRSISLSRGNNLQDTLRVLTLWFDYGHWPDVNEALVEGVKAIQIDTWLQVIPQLIARIDTPRPLVGRLIHQLLTDIGRYHPQALIYPLTVASKSTTTARHNAANKILKNMCEHSNTLVQQAMMVSEELIRVAILWHEMWHEGLEEASRLYFGERNVKGMFEVLEPLHAMMERGPQTLKETSFNQAYGRDLMEAQEWCRKYMKSGNVKDLTQAWDLYYHVFRRISKQLPQLTSLELQYVSPKLLMCRDLELAVPGTYDPNQPIIRIQSIAPSLQVITSKQRPRKLTLMGSNGHEFVFLLKGHEDLRQDERVMQLFGLVNTLLANDPTSLRKNLSIQRYAVIPLSTNSGLIGWVPHCDTLHALIRDYREKKKILLNIEHRIMLRMAPDYDHLTLMQKVEVFEHAVNNTAGDDLAKLLWLKSPSSEVWFDRRTNYTRSLAVMSMVGYILGLGDRHPSNLMLDRLSGKILHIDFGDCFEVAMTREKFPEKIPFRLTRMLTNAMEVTGLDGNYRTTCHTVMEVLREHKDSVMAVLEAFVYDPLLNWRLMDTNTKGNKRSRTRTDSYSAGQSVEILDGVELGEPAHKKAGTTVPESIHSFIGDGLVKPEALNKKAIQIINRVRDKLTGRDFSHDDTLDVPTQVELLIKQATSHENLCQCYIGWCPFW

SEQ ID NO: 13958 - protein, 1083 aa, Mus musculus
MDTNKEDPELMLGRMRCLEALGEWGQLHQQCCEKWTLVNDETQAKMARMAAAAAWGLGQWDSMEEYTCMIPRDTHDGAFYRAVLALHQDLFSLAQQCIDKARDLLDAELTAMAGESYSRAYGAMVSCHMLSELEEVIQYKLVPERREIIRQIWWERLQGCQRIVEDWQKILMVRSLVVSPHEDMRTWLKYASLCGKSGRLALAHKTLVLLLGVDPSRQLDHPLPTAHPQVTYAYMKNMWKSARKIDAFQHMQHFVQTMQQQAQHAIATEDQQHKQELHKLMARCFLKLGEWQLNLQGINESTIPKVLQYYSAATEHDRSWYKAWHAWAVMNFEAVLHYKHQNQARDEKKKLRHASGANITNATTAATTAASAAAATSTEGSNSESEAESNENSPTPSPLQKKVTEDLSKTLLLYTVPAVQGFFRSISLSRGNNLQDTLRVLTLWFDYGHWPDVNEALVEGVKAIQIDTWLQVIPQLIARIDTPRPLVGRLIHQLLTDIGRYHPQALIYPLTVASKSTTTARHNAANKILKNMCEHSNTLVQQAMMVSEELIRVAILWHEMWHEGLEEASRLYFGERNVKGMFEVLEPLHAMMERGPQTLKETSFNQAYGRDLMEAQEWCRKYMKSGNVKDLTQAWDLYYHVFRRISKQLPQLTSLELQYVSPKLLMCRDLELAVPGTYDPNQPIIRIQSIAPSLQVITSKQRPRKLTLMGSNGHEFVFLLKGHEDLRQDERVMQLFGLVNTLLANDPTSLRKNLSIQRYAVIPLSTNSGLIGWVPHCDTLHALIRDYREKKKILLNIEHRIMLRMAPDYDHLTLMQKVEVFEHAVNNTAGDDLAKLLWLKSPSSEVWFDRRTNYTRSLAVMSMVGYILGLGDRHPSNLMLDRLSGKILHIDFGDCFEVAMTREKFPEKIPFRLTRMLTNAMEVTGLDGNYRTTCHTVMEVLREHKDSVMAVLEAFVYDPLLNWRLMDTNTKGNKRSRTRTDSYSAGQSVEILDGVELGEPAHKKAGTTVPESIHSFIGDGLVKPEALNKKAIQIINRVRDKLTGRDFSHDDTLDVPTQVELLIKQATSHENLCQCYIGWCPFW

SEQ ID NO: 13959 - protein, 2549 aa, Rattus norvegicus
MLGTGPATATAGAATSSNVSVLQQFASGLKSRNEETRAKAAKELQHYVTMELREMSQEESTRFYDQLNHHIFELVSSSDANERKGGILAIASLIGVEGGNSTRIGRFANYLRNLLPSSDPVVMEMASKAIGRLAMAGDTFTAEYVEFEVKRALEWLGADRNEGRRHAAVLVLRELAISVPTFFFQQVQPFFDNIFVAVWDPKQAIREGAVAALRACLILTTQREPKEMQKPQWYRHTFEEAEKGFDETLAKEKGMNRDDRIHGALLILNELVRISSMEGERLREEMEEITQQQLVHDKYCKDLMGFGTKPRHITPFTSFQAVQPQQSNALVGLLGYSSHQGLMGFGASPSPTKSTLVESRCCRDLMEEKFDQVCQWVLKCRSSKNSLIQMTILNLLPRLAAFRPSAFTDTQYLQDTMNHVLSCVKKEKERTAAFQALGLLSVAVRSEFKVYLPRVLDIIRAALPPKDFAHKRQKTVQVDATVFTCISMLARAMGPGIQQDIKELLEPMLAVGLSPALTAVLYDLSRQIPQLKKDIQDGLLKMLSLVLMHKPLRHPGMPKGLAHQLASPGLTTLPEASDVASITLALRTLGSFEFEGHSLTQFVRHCADHFLNSEHKEIRMEAARTCSRLLTPSIHLISGHAHVVSQTAVQVVADVLSKLLVVGITDPDPDIRYCVLASLDERFDAHLAQAENLQALFVALNDQVFEIRELAICTVGRLSSMNPAFVMPFLRKMLIQILTELEHSGIGRIKEQSARMLGHLVSNAPRLIRPYMEPILKALILKLKDPDPDPNPGVINNVLATIGELAQVSGLEMRKWVDELFVIIMDMLQDSSLLAKRQVALWTLGQLVASTGYVVEPYRKYPTLLEVLLNFLKTEQNQGTRREAIRVLGLLGALDPYKHKVNIGMIDQSRDASAVSLSESKSSQDSSDYSTSEMLVNMGNLPLDEFYPAVSMVALMRIFRDQSLSHHHTMVVQAITFIFKSLGLKCVQFLPQVMPTFLNVIRVCDGAIREFLFQQLGMLVSFVKSHIRPYMDEIVTLMREFWVMNTSIQSTIILLIEQIVVALGGEFKLYLPQLIPHMLRVFMHDNSQGRIVSIKLLAAIQLFGANLDDYLHLLLPPIVKLFDAPEVPLPSRKAALETVDRLTESLDFTDYASRIIHPIVRTLDQSPELRSTAMDTLSSLVFQLGKKYQIFIPMVNKVLVRHRINHQRYDVLICRIVKGYTLADEEEDPLIYQHRMLRSSQGDALASGPVETGPMKKLHVSTINLQKAWGAARRVSKDDWLEWLRRLSLELLKDSSSPSLRSCWALAQAYNPMARDLFNAAFVSCWSELNEDQQDELIRSIELALTSQDIAEVTQTLLNLAEFMEHSDKGPLPLRDDNGIVLLGERAAKCRAYAKALHYKELEFQKGPTPAILESLISINNKLQQPEAASGVLEYAMKHFGELEIQATWYEKLHEWEDALVAYDKKMDTNKDDPELMLGRMRCLEALGEWGQLHQQCCEKWTLVNDETQAKMARMAAAAAWGLGQWDSMEEYTCMIPRDTHDGAFYRAVLALHQDLFSLAQQCIDKARDLLDAELTAMAGESYSRAYGAMVSCHMLSELEEVIQYKLVPERREIIRQIWWERLQGCQRIVEDWQKILMVRSLVVSPHEDMRTWLKYASLCGKSGRLALAHKTLVLLLGVDPSRQLDHPLPTVHPQVTYAYMKNMWKSARKIDAFQHMQHFVQTMQQQAQHAIATEDQQHKQELHKLMARCFLKLGEWQLNLQGINESTIPKVLQYYSAATEHDRSWYKAWHAWAVMNFEAVLHYKHQNQARDEKKKLRHASGANITNATTTATTAASAAAATSTEGSNSESEAESNESSPTPSPLQKKVTEDLSKTLLLYTVPAVQGFFRSISLSRGNNLQDTLRVLTLWFDYGHWPDVNEALVEGVKAIQIDTWLQVIPQLIARIDTPRPLVGRLIHQLLTDIGRYHPQALIYPLTVASKSTTTARHNAANKILKNMCEHSNTLVQQAMMVSEELIRVAILWHEMWHEGLEEASRLYFGERNVKGMFEVLEPLHAMMERGPQTLKETSFNQAYGRDLMEAQEWCRKYMKSGNVKDLTQAWDLYYHVFRRISKQLPQLTSLELQYVSPKLLMCRDLELAVPGTYDPNQPIIRIQSIAPSLQVITSKQRPRKLTLMGSNGHEFVFLLKGHEDLRQDERVMQLFGLVNTLLANDPTSLRKNLSIQRYAVIPLSTNSGLIGWVPHCDTLHALIRDYREKKKILLNIEHRIMLRMAPDYDHLTLMQKVEVFEHAVNNTAGDDLAKLLWLKSPSSEVWFDRRTNYTRSLAVMSMVGYILGLGDRHPSNLMLDRLSGKILHIDFGDCFEVAMTREKFPEKIPFRLTRMLTNAMEVTGLDGNYRTTCHTVMEVLREHKDSVMAVLEAFVYDPLLNWRLMDTNAKGNKRSRTRTDSYSAGQSVEILDGVELGEPAHKKTGTTVPESIHSFIGDGLVKPEALNKKAIQIINRVRDKLTGRDFSHDDTLDVPTQVELLIKQATSHENLCQCYIGWCPFW

SEQ ID NO: 13960 - protein, 2360 aa, Cryptococcus neoformans var. grubii
MSSQSDVLDNIFQRLSARSEDVRAQAGQDLAEHVVAYTQEYPGHDASKGVWAQVFHKTFEFTRSNNQLERLGAIIAISQLLQLTKDDTPDRAQQKVLRLYEYLRPLTTCGDSTVMLPASLVVEDMVRNSPTLHTDTFLGKEVGQALVMIDDSRQEVGRFSGALLLYAFARAAPGVFHQYISKVLEKIWIPLRDSRSVVRERASMLLSTCLDTLKTRGDRPSTDTYRKIFEEARLGLLKASSTESILGSLLAFNSMLQNQQLSMAEYYRSICELTFKYRDSKEVSIRKAVIALIPSMATYDSDDFEAHYLHRGMAYLLQALNRPADRDISYVALGHMAVHLGSKMKPFIDDIMRIIRDHLRMRGKKNAPYEAPIFQCLAMLATSVGPMLTRQMHEILDLMFPWGLSEPLCTALQATASHIPPLLRTIQDRLLEMLSQTLTGQSYRPLGAPAPRGGAQMDLNLLQSTTNAQSTDTLKLALRLLARFDFVGHTLSEFVRDAALPYLEHDSVEVRREAVLATTTLFMTDPICQQTSSNSVEIVNDVLSKLLTVAITDPNAGIRRTVLDHLEDKFDRHLAQAADIRCLFIALNDEVFGNRERTISIIGRLAHHNPAYVMPHLRKSLINIVTELEYSTNARQKEESAKLLCLMIGAAAGLVKSYAPTILSVLLRTASSPESSIGVQAECLKCIGELARVAGEELVPSVRAILDLVIEMLNDQSSPAKRDTALKTLGQIASNTGEVIKPYTDYPQLMGVLFKFLRMEANSSVRQETIKTIGMLGALDPFKHKTLLGDVDDPIDEGTTSRVNDIVLLNQHNSSVNDEFFQTVVIHSLVNVLHDSTYKDHYQAVEAIMMIFRTQRLRCVNFLPQIVPAFLNVIRIAHSSRTELYLKQLAQFITIVKLHIRNYLNDVFDLIHEFWNPNSTLQITIISLVEAIAKAVEGEFKAYLPKLLQQILRSFDGDLSAKHLPELKLNTLLQILKAFYVFGESIEDYLHLVLPVIVRSFENPAAPDSLRIAALRTTGQLCRKVNFSDHASQIIHPLVRTLGNSSEELRQTAMETLCVLVLQFGPDYAIFIPMVNKALVENKISHPGYEALITKLLNRERLPPDLGPVERYASDSAAEASAPEPVALKVNQQALKLAWDCSHLLNTSSRTEWISWIIGLGHEMMRESPSQAIRAARSLALSSVAFTKELFNVAFYSCWQELFESYQEDLWHNLDRAIKKDDVPGDVVNMILGATQFLEHDEKEVAIESRVLGSVAANYQALAVALHYKEQEFFLDPSKEVIEDLIDVNQKLQQSDAAWGTLEWAQTEMGMTTEVEWYEKLGRWEEALQVWNERDADASTTFSEWEITEGKVTCLHAMGEWEQLSDFVQARWANRTAEEKKLLSPLAAAASWSLKQWDLMDDYISAMKGDGADRAFFKAILAVHRNQIPAALKQISKARERLDPELTTLTGDSYGRAYDTVVRIQMLAELEEIIAYKDHADEPARQEMQRQTWKKRLAGCQRDVEVWQRILQVRSLVLKPNEDMDTWIEFADLCRTSDRLNLAEKTLTSLVGFQYPSMEDTRGRAPPPIIFAYLRMAWAKNLQIDSREERYETLQHLRDFTDQLTDDVGIGARGPNGRLMLPDQKLYGSYTKLLAQCHVELGQWQATLRESQGSADPSGILHDYCLATELDPEWYQAWHTWALANFEVITQLEVSQQGLSPVHFTTYIIPAVEGFLKSISLSPGNSLQDTLRLLTLWFTYGYSSGVTAAVSQGLPTVNIDVWLEVIPQIIARIQTPRQSIQQLIVQLLHDIGKAHPQALIYPLTVASKSTVAARRTVAQNITHKMREHSPKIVDQAELVSTELIRAAILWHEMWYDGLEEASKHYFGDHDIPGMLGVLEPLHEIVENGPQTLRETSFIQSFGHDLRIAREHLKRYRITQDGTEIQQAWDVYYSVFQRLGKQLKLLNVIELQYVSPKLMAVRDLDIAVPGTYQSGKPIIGIKNVIPTFKVIASKQKPRQCSMRGMDGKEYAYCLKGHEDLRQDERVMQLFGLVNTLLNNDHESAKRHLSIQRFSVTPLSPSAGLLGWVTHSDTIHVLIKQYRDQRKILVDIEHKLMQQMSDESYDSLPLLHKVEIFQYALDNTTGQDLYRILWLKSRNSDIWLERRTTYTRSLGLNSMVGYILGLGDRHPSNLLLDQITGKMVHIDFGDCFEVAQQRDKYPEKVPFRLTRMLIHAMEVCGITGNFSRSCEVSMEVLRDNRESLMAVLEAFVYDPLIAWRLTATDKRPGGVGEVKDLDDPAVYGKQRKNKANETEILNDVENTEVKNDKGLQVIERVRRKLTGRDFKPDVVLDVKSQVEKLVVEATKTENLCVAFLGWCSFW

SEQ ID NO: 13961 - protein, 2383 aa, Anopheles gambiae str. PEST
LKSRNKDVQNKAIKDLSLYVKTELRETPDDMFFEDFNHHIFEMLTSTDNNEKKGGILAIDCLINGDVVNTTNKISRYSNNLRNLLPMSDVCVMQLAANVLVKLALLPGSNGASSFEFDIKRAFEWLSEDRVENKRHAAVLVLRELAVAMPTFFYQQVGSFFDHIFVAIKDPKAAIREGAGQALRAVLIVTSQREGTKQNNNTQWHMNCYDQAFDSRYYDVVTDMKFFRQNSSVQESALYRALVKEKYDTICQAVLDQRSSKSPYVIQTLLAIFPRLAAFNREEFVRLHLRTVANYLLTLLRSKEKERNAAFVSLGYIAVAVEKEIEPYTKRIMELIGSALPLKDTPSKRKAPVDPSVFMCVMLLGHALKGGITHEIKEIIAPMLSTGLSPALIVCLRELCETVPQAQQEITAGLLKILSYVLMNRPLPQFIVPKSHSVVSPAFLSSLEQQPQSQPPQQQVHDTATIVLALQTLGKFSFEGCSLLQFVQRCADHFLNSEQQEIRIEAVHTCTFLLKLALQAAESNGNDVSETLTQTLSSVLEKILVVGITDVDPAVRLRVLKSLDESFDTQLAQPWFLSSLLVTIHDEVFEIRELAIIIIGRLSTINPAYVMPSLRKTMVQLLTELEHSGVSRNKEQSARMLDHLIVSTPRLVASYMRPILTILVPKLKEPDQNPSVVLNVLRAIGDLAEVIGGHHVLQKWSDELLQLLLDMLSDAGSTEKRAVALWTFGQLVSATGQVVVPYNKYPNLIDILINFLKTEQQLYVRRETIRVLGLLGALDPYKHKMNRGLIDSQTSANILISVDTKTDEHTDLSTSEMLINMSTQLDEYYPAVVISTLMKILRDPTLSNHHLSVVQAITFTFTSLGIKGVPYLSQVLPCLLRNIVTAEMSLKEYLFQQLSTLISIVKQHIIGFMDDIFELIKTFWTTGGAGVPGGGGSSSSTASAASLQPTIINLVEKIAIALGCEFKVYLPQLMPQILRVLLHDTSKDRAVTVKLLGAMRNFGNNLDDYLHLIIPAIVKLFEPLDIPLNVSITALQTINYLAEVLDFTDFSSRIVHPLVRVLDFYPELRPVALTTLCSIMIQLGRKYLVFVPLVNRVMIKHKIPSVEYTKLLTKLQNNSTLAMDDEFRIRQARNRNREISLPSDSTIKKFPVSMSDLEAMFKANRRVSKDDWLEWLRRLSIILLKESKNPALRSCATLAQNYPQLLKDLFNAAFVSCWSDLSEKLKQDLAHSLTQALTVQDLPEITQTVLNLAEFMEHCESYPLKIDSKILGERAMECRAYAKALHYKEDEFHRTDDPPQSLFESLILINNKLQQKEAAEGLLEYAGRHRSSAEEMKVQVRWYEKLHSWEQARSLYSEKLKSNPNDLESRLGEMRCLEALGEWSALNAVTTQNWDALGSEGQSKAGRLAAAAAWGLQDWDGMHRFVRCIPEDTQDGAFYRAVLAVHNEQYALAQSLIDSTRDLLDTELTAMAGESYERAYGAMVCVQMLAELEEVIQYKLIPERRETIKSMWWDRLLGGQRLVEDWQRVIQVHSLVLSPKEDIRTWLKFASLCRKNGSLKLSEKTLTMLLEYDPMENLSEPLPIDKPHVTFAYTKHLHMAGYTKEAYDHLNRFVASFSPQAFTASSGAGGQDDLKDENRRLLARCFLKLGMWQSSSTGGNLVKDHLINGILVCYSRATKHDPNWYKAWHNWAYMNFEVVQAKKQQEEYTKNPGSAAERNLIKHYAVPAVRGFFQSINLSQGNSLQDTLRLLTLWFDHAQYEEVYEALVEGMRVIDKNTWLQVIPQLIARIDTPRNLVGQLINYLLTEIGKTHPQALVYPLTVASKSAPGTRKQAAHKILNNMCEHSNTLVNQVLLISEELIRVAILWHEQWHEGLEEASRLYFGEQNVEGMFATLEPLHAMLQRGPQTLKESSFNQAYGRDLTEAQEWCKHYKNSKNTRDLNQAWDLYYHVFRRISRQLVQLTSLELQYVSPKLLACRNLELAVPGSYTPGQQLICIASIETNLTIISSKQRPRKLCIRGSNGKNYMFLLKGHEDLRQDERVMQLFGLVNTLLLNDRDTFRRNLTIQRYAVIPLSTNSGLIGWVPHCDTLHKLIRDYRDSKKTMLNIEHRIMLRMAPDYDHLTVMQKVEVFEHALDQTKGDDLAKLLWLKSPSSEQWFDRRTNYIRSLAVMSMVGYILGLGDRHPSNLMLDRLSGKILHIDFGDCFEVAMTREKFPEKIPFRLTRMLINAMEVTGIEGTYRRTCESVMNVLRRNKDSLMAVLEAFVYDPLLNWRLLDSDRLRRSKNAGDMDSVSGSMHEDSLLSYNARRDARLNELNATTGPAAGGQPSATVNVPSGVKDKLTGKDFGKAEPVAVNRQIDLLIQQATSNENLCQCYIGWCPFW

SEQ ID NO: 13962 - protein, 2593 aa, Anopheles gambiae str. PEST
RKAPYPTRAPDVAAGIRDEPPCPLTKEHVPLSAPGRHDAGQTMGGKGDTKPSQQQCAAKRRTKKKPATDQQRQPKTIPSGGGGSGLVRASSGDRQEQEMSAGGGKRYQTARTQAASQRRVRRLASDGPAGPGGGGAVPHELAANVPADMRISKLLRRLVGETSGGPLFVELCDRLELVILDPSNASYVRKSFDLLAHTVAQILEGGLRECQDRVAQLFGMLLHVLVGGAGPDCGAVLRGWTDRYLNQSKRIRRPALVALRQLVVLDRTERGLEPVADWLVGYLQQILEQTDVLDVFLLVTDVMVRLADGYGHAFAPHFSDIVDIVVGWQLESTQPTAVKLHCARVLLAFRPFWCEQRDVTFNLLEQFSEDIDGHCGDVEYADRAQADDANRLFGALLTAFNSVFKCLQDAAGDGTFLLQPDELARFDCCCCTIVAIVVRLLEAPPTGLAVAAICEFIMLKLMLPATTLTPLGEDELLEIVGRLVQHGSGYSDEQIGAVLHLLLQYADAGGNTERQHARALALRPLIFAESGPFYAFRYRQSAAVKRALLLLYHRMLTLKHAEVLQGAYRSILADIDDALGRLRAVGNRTPSPGTLVRLQYRIQFNLLLLSPLAMARSSIFITWTLREDPVLHVLLERLAPADGRLWDRRTHAPLHYAVLLTAFHHCSANNHFISSSGLLRPAGRTVVERFRRDTSDTDAPPESPTADHFGLVLRFLGTILRQWGTRQQSGGRLYGAVRGTELLPLLLDWCVAIVTQTTRYHDVLHECDDFNQLLVHVGTVAVERGSESETIGLRCADCLDAACRFASLHPSAYQAIAEACCVHLCSVYGSLRTRYTVIFSKLPLRHSLRQVNEFTGVNRRRWEQIGELKNGLYHQGGYALQHSATLRMADLRTLFNRIAFSRDGSEYAGGYLHELLTRSFNQPSRYGEMALRDLRCLIPWAQWEAAQLCVNQKLRTPFGKPQSTFLRIESIVKQCARILALTDRFPVRDIRTSIANQRHARILLGFLEALEKSIYNAAEGTAYALPAPEKPARTFFRVNQSTCAEWFTRIRTAVDLVALHCMEPEMVIRYSEAVLRELVAAGKTGDPIFEHMLMSLVWALVRNWESDALYGVYVWSKRLTGRKYSWIRMAAEEASGHRETAASGFRSILADPGSAGMDRHIRDFIVDQTILSLLFTGDYRQLYEFLLAEESSGTPRATIPLITVTAAQIRSIIRYEETHDVSVIDISQWELVDVGTNIPNDFSCHKAICAVENSLSGIILQEQIEQRQRMIDASTELIQCYLQECLLTRCREYLFQLTITNHILYKIAQRIRAPDATAAAGEAAGATASATADGSGGLGSLNVEKFYGTLTLMRLLAWSEFLLADAGAGEQQQNIDLRLDLVSIGRKEKNYALCRRELEKYYHKSNLIGRLGAAGDEPPKQQRLTLEQVAAALTARSAGAAVWDENLSRAVYEHCKWLHCQPGKRLEAINFAACATAAIDGVLRERRGSEPRLAERVGRFLLTISDWMAGEAGEPTANELASVRRLGQLLPAVGAKPLAADHAHMFRASDRLIGTLLQGAVDRCPSLAKAWFALGSWLYRWGKRLVEHSAADGSPSSSPVRISVDQVAGIVAGPAVSLADCERIVEILNEHEPARMMAGPDGGEGDEPDELELDSSATIGSIGLLDALHRAMPRLERNVPPDRLHAIIDIWRSNHRAVYGHYEAAAEAYFRFLQLSSGRNEAVEEEGVDSERARSVTVTLRLLRLIVKHALGLKEVLEEGLATTPSEPWRVITPQLFSRLAHHEPYVRRRVSELLCRVAKDAPHLIIFPAVVGSVQEEPGQLAVVDVLRDGVEEVSNRLEGEGESAQSAQDGGAGLSFCFNALLDILSREIPDTVKQVQTLVHELRRISLLWEELWVVSLQQIYADYTKRIPTFEAEYRRLYASGQLTDQRRALLAEKHRLLLRPLLFVLEQLYGITSRPAETNHERHFQERYHRYIRNMLAKLREPADFSRPIEGWNRFRTLYAQLQQRSQKRFSFFLRLADVSPNLLRLSNTAIAMPGIDTTLAGSRQPILIRTVDNNIQILPTKTRPKKLTFCGNDGRRFGYLSKGLEDLHLDERIMQFLSIANLMMTKSIDCNGNVTHYRAEHYSVIPLGPRSGLITWVDHTVPIFSLYKKWQQREALQKKEGKGAGSSATLRPSELFYNKLTPLLQSHGLKANASRREWPLPVLKQVLAELQQETPRDLLAKELWCHSATASSWRQVIRSYSLSLAVMSVIGYIIGLGDRHLDNVLVKLATGEIVHIDYNVCFEKGKTLRVPEKVPFRMTPNLEEALGMTGIEGTFRLACEHVLKSLKKGRETLLTLLEAFVYDPLVDWAVGEEIGSGLPMTATDITVSTAAAASHAPGSVATTRSISQAKKQLDREVTRDTLAVRFAECRTDWYQNRDELLQHLLCLQKLVRELGEVRRETAESERLRSLYSQMLQLIGEVGYLDTAFGSHPLASLAQRLEMRAQLQEVYGVQRTQMAQQADRLAQQLAQYERVRRAVEEQKQKEQKEQKRNAYAVSVWRRIRMKLEGRDPDPGRRCGVSDQVGWMIDEAMDPNNLAVLYEGWTPWV

SEQ ID NO: 13963 - protein, 2604 aa, Giardia lamblia ATCC 50803
MSEDHFEKIRRGKHSQYKSMTIKAEDCHSWAGSTLGEAPTPSGGATIIPPAVVSNQSFATTISPKTRHIRTHSSSHLDDMSSTSFCINQDCILSQDILKSSDLGTDGFFNSGPYRHMLISDTLRQIIIIGTTDIDPEVRMSIIQALTTTNRYDIYLVHESSLRTLFIALYDDNIEIRILAVKLIGRLCSLNPALVTPEIRHLILVLLTELRLTTENNKRATSNELIVKIFKFCGSIVLPYVPMVYSAVMGLISKDCDDEYLLITSLTTLAELFTIGSTSMVHCLAEVIPLLITCIKEETSKTLRLTTTRCFVRIVEATSFVVFPWFIYHDLFTIVFGILKNDTSQEIRLEAAKLITTIGAIDPIFYQNGKPDLSALVPPTNLTCKCQSTDVFSLDYIMDESNIWVCHKGEGGAAQEASIKSHGKAVVSPITGHVVENVYIMKLDSGSEVSANVSDFELTLNVIMSTLYSILSESTLDMYHYDAVVVFRTIIQTECTAISLPMVPKIISLILENIQNCKVFMQETMLRELILIISSIGHHAHSYVSDIFDIIEVLWANQQLIELILALLEEVSIVLDLSLGNYGSQFFLKFVGLFTVLKSSQEISDSAKKLLIRACRSVVALSSLFSNHIHLIVDLLCSGIRKQKLGKELRFALLDTLSRLTICTNLSRFGASIIHPILEVIMEADPCTSVEHNKNANPEKGLNPMNIVSYKAFEVLHFICAQFGVSVTLYIPVITECLLKVGFTSGLLDSIFSLLLRREEVDPVTFYRLICEWKKKQAKKFSEYTSLASLLAMYETPVTQDTLLYMESISNKVPGDDKDAMILVVKDINFDDIGSVINYLHTSSTWFGDDMRPLPAGAIGVHSLSIQENDMLNKHVTIPQQIWRADTCKKNEEWRHWLSNLSLTLLQCSPLKCLRACHKLATSYPRVARDLFNYSFLACLSETYPSNNEHRNYIVESIRSVFLSQNCPLDVLQILLDLAEFWENRSREFSTTFSHNFLGEVAERCHAYTRSLRYKETEYAQHPIEAVGRLIAINYSLGYEETAIGTLRVECKRLNFISTNLIYDILLRCLYTGLDDVFTMMQREGGLEPGAAVNCSAESTLERIINKVVSKIVTKALTEAKKISNLNQSIPQQLVSYGSIGGIFVEGRPVMSGPEGSVLQVDYNEIGIYLSALARRMLKSKLTYQYPTFLMYEENLFQSVLKTLRYKAQGHMQDLYGPSPKWFENVCLWDKALSGYNRQIDQLKLSLKSNTSEARTLLPMLVNLTKDKIRCLFALADYSAVQEEADQLLNYLSSESKEEAGLTTVKHTLIKGFQADIATYAAWSLLEQDQEDVEIWLRVLPEDNIDGTIIRATSYIKANKMLEAHKLLCKLRLRIDPDLIGLSAESYTRAYNLCILLQTITELQNIISYKLALNGLKLDAPSTLIKEGGNPYENIFETTLISFNPPPGFADTEKERLRLMWSRKISMIRWDCESWEALLRVRRLIIFPIEDQEVWIRFSVLCLQSGRVQLARKTLETFINSSSVHHIKVSKSRGLYTLLGLTSFGTPRRYLKHGSGDVSTGGSVTPIGSALGAEMGVVQDLSAVGSSLAKYLLKDGVVKDAFTAQQHVALPTSDVLSIASHSVAKPTLQMIANASTHQGQSIEKETPLSIVGQQCDDAKRNAQRDLFNALIPPLNHVYPHVLYAYCKHLWVSSNENVLEKLVAFTHLIRLCNDVSIQKTEPKLVCRMLIRLGAWYSDLLTPLDHKSCSMIGTISPSEGYVNIPVQDTVTSCSAIWNSIVNNCDADASVCSTTYEATEHSAERLELSSASTLDKAVAKLVDNILLAYDELSNVSLEECNQYNTVGMSRIGLIALEWFQVAADRDETSNHIWKCISHTTYAIVNSFAAYIDKLNDRPGVDGGLQIVTRRSSVDATSDAVGSTSEALSQSVQDSDRPLVCPEHLGFVQNRQVLLEKAKLEYLVESIIAHFKCIETGRSIEALPTTLRLMTLWFRYGSYDEVETEIINGLAAVPINIWLDVIPQLIARLHSPQHKIRLLVHQLLVLIGTEHPQALIYPLVVASKSTILNRRVESLSIVDQIRRTNEAMILESLNINKELQRVAILWPEIAYDLITQASTAFCEEPRDLVKFFNYACQLQLLASRTPETQSESVFIQMFSSQLQAAWDSCRQFPVTNDLVCLNIVMKHYKEIYDRIHSELPFLNTIDLLQTSPLLYNISNTNLCVPGSYHPARAITTIVKFYQKVFVIRSKQRPRKVGLVASDGEYYAFLLKGHEDLRQDERVMQLFTLINNLLMNDSYCSRRGLMVMKYPITPLSQNSGLLYWVPGCDTIISLIKEFRQLKRIHLETEMQQIKYRAPAFMNMALHYKVDAFKYMLTTSDAIDLCRSLWNKASSAEDWLLKRMNYTRSIAVSSIVGYILGLGDRHPANLMIERTTGMVLHIDYGDCFEVAMHREQLPEKVPFRLTSIMMKAFESCGTEGSFRMTGEATMSILRSNKDSLVSVLETFIYDPLMSMKVLSGENTMGGKENIDGNTEFYGTRRPVQESYLEGNERNPKAVKIVQRIYDKLTGYDIKYIDRSLSVSEQIQSLIHSATNAENLCQLYIGWCPYW

SEQ ID NO: 13964 - protein, 1525 aa, Giardia lamblia ATCC 50803
MMQREGGLEPGAAVNCSAESTLERIINKVVSKIVTKALTEAKKISNLNQSIPQQLVSYGSIGGIFVEGRPVMSGPEGSVLQVDYNEIGIYLSALARRMLKSKLTYQYPTFLMYEENLFQSVLKTLRYKAQGHMQDLYGPSPKWFENVCLWDKALSGYNRQIDQLKLSLKSNTSEARTLLPMLVNLTKDKIRCLFALADYSAVQEEADQLLNYLSSESKEEAGLTTVKHTLIKGFQADIATYAAWSLLEQDQEDVEIWLRVLPEDNIDGTIIRATSYIKANKMLEAHKLLCKLRLRIDPDLIGLSAESYTRAYNLCILLQTITELQNIISYKLALNGLKLDAPSTLIKEGGNPYENIFETTLISFNPPPGFADTEKERLRLMWSRKISMIRWDCESWEALLRVRRLIIFPIEDQEVWIRFSVLCLQSGRVQLARKTLETFINSSSVHHIKVSKSRGLYTLLGLTSFGTPRRYLKHGSGDVSTGGSVTPIGSALGAEMGVVQDLSAVGSSLAKYLLKDGVVKDAFTAQQHVALPTSDVLSIASHSVAKPTLQMIANASTHQGQSIEKETPLSIVGQQCDDAKRNAQRDLFNALIPPLNHVYPHVLYAYCKHLWVSSNENVLEKLVAFTHLIRLCNDVSIQKTEPKLVCRMLIRLGAWYSDLLTPLDHKSCSMIGTISPSEGYVNIPVQDTVTSCSAIWNSIVNNCDADASVCSTTYEATEHSAERLELSSASTLDKAVAKLVDNILLAYDELSNVSLEECNQYNTVGMSRIGLIALEWFQVAADRDETSNHIWKCISHTTYAIVNSFAAYIDKLNDRPGVDGGLQIVTRRSSVDATSDAVGSTSEALSQSVQDSDRPLVCPEHLGFVQNRQVLLEKAKLEYLVESIIAHFKCIETGRSIEALPTTLRLMTLWFRYGSYDEVETEIINGLAAVPINIWLDVIPQLIARLHSPQHKIRLLVHQLLVLIGTEHPQALIYPLVVASKSTILNRRVESLSIVDQIRRTNEAMILESLNINKELQRVAILWPEIAYDLITQASTAFCEEPRDLVKFFNYACQLQLLASRTPETQSESVFIQMFSSQLQAAWDSCRQFPVTNDLVCLNIVMKHYKEIYDRIHSELPFLNTIDLLQTSPLLYNISNTNLCVPGSYHPARAITTIVKFYQKVFVIRSKQRPRKVGLVASDGEYYAFLLKGHEDLRQDERVMQLFTLINNLLMNDSYCSRRGLMVMKYPITPLSQNSGLLYWVPGCDTIISLIKEFRQLKRIHLETEMQQIKYRAPAFMNMALHYKVDAFKYMLTTSDAIDLCRSLWNKASSAEDWLLKRMNYTRSIAVSSIVGYILGLGDRHPANLMIERTTGMVLHIDYGDCFEVAMHREQLPEKVPFRLTSIMMKAFESCGTEGSFRMTGEATMSILRSNKDSLVSVLETFIYDPLMSMKVLSGENTMGGKENIDGNTEFYGTRRPVQESYLEGNERNPKAVKIVQRIYDKLTGYDIKYIDRSLSVSEQIQSLIHSATNAENLCQLYIGWCPYW

SEQ ID NO: 13965 - protein, 1104 aa, Giardia lamblia ATCC 50803
MSTDAITSSRFYPYLADLKSIDPNIYTRAAMAIRMQVEKDSRQMLADPRTLFISDLMSFIRNLATSSSYEDRLASLWVMRELIQSRPTISMIPLTYFEEIALELVNDPSEVIILTNCVFIGRLINAEGHGIDFVPKLFVISIDKIKSGDSTKVYTGMLLFNDLTEVETSFAIDISSEEFLEPIWHVITETRNSNIKEVGFKAINKFISYQKKATKHDVLVRLITMIRAALDGKNISEQLIALHLLLNMLNLSVKDKSIADYFQENYSSFFSLVANIFRSKTSEGRMLVASIISLFAKLDPERFCTTERLQMILTFYKKMIPTQQELFIPLGEFVIVIGEKHVKPIFNDLINLITSSFKSQNFTKAGSILPPEPLKCIQYITKGAPNLVQKHVTSILECIFSVGLCESLTSALQDLSANLHNRLLDIQGLLLYLVANELGGINLFLSNAYGVIDGSEDYYLVLTENQSQAVADGHDSGVLDSQTSIIPGTRPSTTQATTHVEDTRTNEDAIELAHDLSITGLKEESEQCDFKNSLSVYQTVTTSAGITALYKLSDRIATALGTSKLRPRRHSTSEAILLAFQALYDFDFSLFDLTIFAADYLTRYLRNDSSTLRIKAAQTILKLMSEDHFEKIRRGKHSQYKSMTIKAEDCHSWAGSTLGEAPTPSGGATIIPPAVVSNQSFATTISPKTRHIRTHSSSHLDDMSSTSFCINQDCILSQDILKSSDLGTDGFFNSGPYRHMLISDTLRQIIIIGTTDIDPEVRMSIIQALTTTNRYDIYLVHESSLRTLFIALYDDNIEIRILAVKLIGRLCSLNPALVTPEIRHLILVLLTELRLTTENNKRATSNELIVKIFKFCGSIVLPYVPMVYSAVMGLISKDCDDEYLLITSLTTLAELFTIGSTSMVHCLAEVIPLLITCIKEETSKTLRLTTTRCFVRIVEATSFVVFPWFIYHDLFTIVFGILKNDTSQEIRLEAAKLITTIGAIDPIFYQNGKPDLSALVPPTNLTCKCQSTDVFSLDYIMDESNIWVCHKGEGGAAQEASIKSHGKAVVSPITGHVVENVYIMKLDSGSEVSANVSDFELTLNVIMSTLYSILSESTLEHVPL

SEQ ID NO: 13966 - protein, 651 aa, Glomus mosseae
  unsure (1)..(651): unsure at all Xaa locations
GILTHAQQNPNLQDLQLKENWYEKLNRWEDALTAYEKRRTDDPNDNEATLGVMRCLHSLGDMDGLSELVQEKWPEAETEMRKSIATYAAAGAWSLGQWGLMEDYIKNIKSDNYYRPFYQAIIALHKNQYSEAVRYIDKTRDLLDTELTALVGESYNRAYNVVVRVQMLAELEEIITYKQYAQGVPRNVDVWQQILKVRALVISPKENMEMWIKFANLCRKSDRLEFAEKTLKLLLVGDQKLELIHPSILARXSPQVVYAHLKWMWASXVREEALEFLRDFTTRMSNNDRVGNNGLLARCYLKKGEWQKVLQDDWDRETVPDILQSYLLATQYDKDWYKAWHAWALANLEVISFYEKLKSAENNTPADQTITSVTEEISGDIQQEVLRYVYRPFKGFFRSIALSRGNCLQDTLRLLTLWFKYGYQEEVCSAIKEGYGSVNIDTWLEVIPQLIARIHAPDQKVRRLIHDLLAEVGKEHPQALIYPLTVASKSQSFNRQTAASSVMDKLRAHSAVLVEQALLVSQELIRVAILWHEIWMENLEEASRLFFIERNFEAMFNILDELQERLDRGPETLREVAFVQAYGRELQEAGGWCKKYKQTGDMTFLSQAWQIYHEMFKKITAQVGTITTLELQYVSPKLLAARDLELAVPGP

SEQ ID NO: 13967 - protein, 2481 aa, Arabidopsis thaliana
MSTSSQSFVAGRPASMASPSQSHRFCGPSATASGGGSFDTLNRVIADLCSRGNPKEGAPLAFRKHVEEAVRDLSGEASSRFMEQLYDRIANLIESTDVAENMGALRAIDELTEIGFGENATKVSRFAGYMRTVFELKRDPEILVLASRVLGHLARAGGAMTSDEVEFQMKTAFDWLRVDRVEYRRFAAVLILKEMAENASTVFNVHVPEFVDAIWVALRDPQLQVRERAVEALRACLRVIEKRETRWRVQWYYRMFEATQDGLGRNAPVHSIHGSLLAVGELLRNTGEFMMSRYREVAEIVLRYLEHRDRLVRLSITSLLPRIAHFLRDRFVTNYLTICMNHILTVLRIPAERASGFIALGEMAGALDGELIHYLPTIMSHLRDAIAPRKGRPLLEAVACVGNIAKAMGSTVETHVRDLLDVMFSSSLSSTLVDALDQITISIPSLLPTVQDRLLDCISLVLSKSHYSQAKPPVTIVRGSTVGMAPQSSDPSCSAQVQLALQTLARFNFKGHDLLEFARESVVVYLDDEDAATRKDAALCCCRLIANSLSGITQFGSSRSTRAGGRRRRLVEEIVEKLLRTAVADADVTVRKSIFVALFGNQCFDDYLAQADSLTAIFASLNDEDLDVREYAISVAGRLSEKNPAYVLPALRRHLIQLLTYLELSADNKCREESAKLLGCLVRNCERLILPYVAPVQKALVARLSEGTGVNANNNIVTGVLVTVGDLARVGGLAMRQYIPELMPLIVEALMDGAAVAKREVAVSTLGQVVQSTGYVVTPYKEYPLLLGLLLKLLKGDLVWSTRREVLKVLGIMGALDPHVHKRNQQSLSGSHGEVPRGTGDSGQPIPSIDELPVELRPSFATSEDYYSTVAINSLMRILRDASLLSYHKRVVRSLMIIFKSMGLGCVPYLPKVLPELFHTVRTSDENLKDFITWGLGTLVSIVRQHIRKYLPELLSLVSELWSSFTLPGPIRPSRGLPVLHLLEHLCLALNDEFRTYLPVILPCFIQVLGDAERFNDYTYVPDILHTLEVFGGTLDEHMHLLLPALIRLFKVDAPVAIRRDAIKTLTRVIPCVQVTGHISALVHHLKLVLDGKNDELRKDAVDALCCLAHALGEDFTIFIESIHKLLLKHRLRHKEFEEIHARWRRREPLIVATTATQQLSRRLPVEVIRDPVIENEIDPFEEGTDRNHQVNDGRLRTAGEASQRSTKEDWEEWMRHFSIELLKESPSPALRTCAKLAQLQPFVGRELFAAGFVSCWAQLNESSQKQLVRSLEMAFSSPNIPPEILATLLNLAEFMEHDEKPLPIDIRLLGALAEKCRVFAKALHYKEMEFEGPRSKRMDANPVAVVEALIHINNQLHQHEAAVGILTYAQQHLDVQLKESWYEKLQRWDDALKAYTLKASQTTNPHLVLEATLGQMRCLAALARWEELNNLCKEYWSPAEPSARLEMAPMAAQAAWNMGEWDQMAEYVSRLDDGDETKLRGLASPVSSGDGSSNGTFFRAVLLVRRAKYDEAREYVERARKCLATELAALVLESYERAYSNMVRVQQLSELEEVIEYYTLPVGNTIAEERRALIRNMWTQRIQGSKRNVEVWQALLAVRALVLPPTEDVETWLKFASLCRKSGRISQAKSTLLKLLPFDPEVSPENMQYHGPPQVMLGYLKYQWSLGEERKRKEAFTKLQILTRELSSVPHSQSDILASMVSSKGANVPLLARVNLKLGTWQWALSSGLNDGSIQEIRDAFDKSTCYAPKWAKAWHTWALFNTAVMSHYISRGQIASQYVVSAVTGYFYSIACAANAKGVDDSLQDILRLLTLWFNHGATADVQTALKTGFSHVNINTWLVVLPQIIARIHSNNRAVRELIQSLLIRIGENHPQALMYPLLVACKSISNLRRAAAQEVVDKVRQHSGALVDQAQLVSHELIRVAILWHEMWHEALEEASRLYFGEHNIEGMLKVLEPLHDMLDEGVKKDSTTIQERAFIEAYRHELKEAHECCCNYKITGKDAELTQAWDLYYHVFKRIDKQLASLTTLDLESVSPELLLCRDLELAVPGTYRADAPVVTISSFSRQLVVITSKQRPRKLTIHGNDGEDYAFLLKGHEDLRQDERVMQLFGLVNTLLENSRKTAEKDLSIQRYSVIPLSPNSGLIGWVPNCDTLHHLIREHRDARKIILNQENKHMLSFAPDYDNLPLIAKVEVFEYALENTEGNDLSRVLWLKSRSSEVWLERRTNYTRSLAVMSMVGYILGLGDRHPSNLMLHRYSGKILHIDFGDCFEASMNREKFPEKVPFRLTRMLVKAMEVSGIEGNFRSTCENVMQVLRTNKDSVMAMMEAFVHDPLINWRLFNFNEVPQLALLGNNNPNAPADVEPDEEDEDPADIDLPQPQRSTREKEILQAVNMLGDANEVLNERAVVVMARMSHKLTGRDFSSSAIPSNPIADHNNLLGGDSHEVEHGLSVKVQVQKLINQATSHENLCQNYVGWCPFW

SEQ ID NO: 13968 - protein, 2513 aa, Arabidopsis thaliana
MSTSSQSFVAGRPASMASPSQSHRFCGPSATASGGGSFDTLNRVIADLCSRGNPKEGAPLAFRKHVEEAVRDLSGEASSRFMEQLYDRIANLIESTDVAENMGALRAIDELTEIGFGENATKVSRFAGYMRTVFELKRDPEILVLASRVLGHLARAGGAMTSDEVEFQMKTAFDWLRVDRVEYRRFAAVLILKEMAENASTVFNVHVPEFVDAIWVALRDPQLQVRERAVEALRACLRVIEKRETRWRVQWYYRMFEATQDGLGRNAPVHSIHGSLLAVGELLRVYSLMLEFVCRNTGEFMMSRYREVAEIVLRYLEHRDRLVRLSITSLLPRIAHFLRDRFVTNYLTICMNHILTVLRIPAERASGFIALGEMAGALDGELIHYLPTIMSHLRDAIAPRKGRPLLEAVACVGNIAKAMGSTVETHVRDLLDVMFSSSLSSTLVDALDQITISIPSLLPTVQDRLLDCISLVLSKSHYSQAKPPVTIVRGSTVGMAPQSSDPSCSAQVQLALQTLARFNFKGHDLLEFARESVVVYLDDEDAATRKDAALCCCRLIANSLSGITQFGSSRSTRAGGRRRRLVEEIVEKLLRTAVADADVTVRKSIFVALFGNQCFDDYLAQADSLTAIFASLNDEDLDVREYAISVAGRLSEKNPAYVLPALRRHLIQLLTYLELSSADNKCREESAKLLGCLVRNCERLILPYVAPVQKALVARLSEGTGVNANNNIVTGVLVTVGDLARVGGLAMRQYIPELMPLIVEALMDGAAVAKREVAVSTLGQVVQSTGYVVTPYKEYPLLLGLLLKLLKGDLVWSTRREVLKVLGIMGALDPHVHKRNQQSLSGSHGEVPRGTGDSGQPIPSIDELPVELRPSFATSEDYYSTVAINSLMRILRDASLLSYHKRVVRSLMIIFKVLPELFHTVRTSDENLKDFITWGLGTLVSIVRQHIRKYLPELLSLVSELWSSFTLPGPIRPSRGLPISYGEYFASLTDNQVLHLLEHLCLALNDEFRTYLPVILPCFIQVLGDAERFNDYTYVPDILHTLEVFGGTLDEHMHLLLPALIRLFKVDAPVAIRRDAIKTLTRVIPCVQVTGHISALVHHLKLVLDGKNDELRKDAVDALCCLAHALGEDFTIFIESIHKLLLKHRLRHKEFEEIHARWRRREPLIVATTATQQLSRRLPVEVIRDPVIENEIDPFEEGTDRNHQVNDGRLRTAGEASQRSTKEDWEEWMRHFSIELLKESPSPALRTCAKLAQLQPFVGRELFAAGFVSCWAQLNESSQKQLVRSLEMAFSSPNIPPEILATLLNLAEFMEHDEKPLPIDIRLLGALAEKCRVFAKALHYKEMEFEGPRSKRMDANPVAVVEALIHINNQLHQHEAAVGILTYAQQHLDVQLKESWYEKLQRWDDALKAYTLKASQTTNPHLVLEATLGQMRCLAALARWEELNNLCKEYWSPAEPSARLEMAPMAAQAAWNMGEWDQMAEYVSRLDDGDETKLRGLASPVSSGDGSSNGTFFRAVLLVRRAKYDEAREYVERARKCLATELAALVLESYERAYSNMVRVQQLSELEEVIEYYTLPVGNTIAEERRALIRNMWTQRIQGSKRNVEVWQALLAVRALVLPPTEDVETWLKFASLCRKSGRISQAKSTLLKLLPFDPEVSPENMQYHGPPQVMLGYLKYQWSLGEERKRKEAFTKLQILTRELSSVPHSQSDILASMVSSKGANVPLLARVNLKLGTWQWALSSGLNDGSIQEIRDAFDKSTCYAPKWAKAWHTWALFNTAVMSHYISRGQIASQYVVSAVTGYFYSIACAANAKGVDDSLQDILRLLTLWFNHGATADVQTALKTGFSHVNINTWLVVLPQIIARIHSNNRAVRELIQSLLIRIGENHPQALMYPLLVACKSISNLRRAAAQEVVDKVRQHSGALVDQAQLVSHELIRVAILWHEMWHEALEEASRLYFGEHNIEGMLKVLEPLHDMLDEGVKKDSTTIQERAFIEVGNFNPGFLAYRHELKEAHECCCNYKITGKDAELTQAWDLYYHVFKRIDKQLASLTTLDLESVSPELLLCRDLELAVPGTYRADAPVVTISSFSRQLVVITSKQRPRKLTIHGNDGEDYAFLLKGHEDLRQDERVMQLFGLVNTLLENSRKTAEKDLSIQRYSVIPLSPNSGLIGWVPNCDTLHHLIREHRDARKIILNQENKHMLSFAPDYDNLPLIAKVEVFEYALENTEGNDLSRVLWLKSRSSEVWLERRTNYTRSLAVMSMVGYILGLGDRHPSNLMLHRYSGKILHIDFGDCFEASMNREKFPEKVPFRLTRMLVKAMEVSGIEGNFRSTCENVMQVLRTNKDSVMAMMEAFVHDPLINWRLFNFNEVPQLALLGNNNPNAPADVEPDEEDEDPADIDLPQPQRSTREKEILQAVNMLGDANEVLNERAVVVMARMSHKLTGRDFSSSAIPSNPIADHNNLLGGDSHEVEHGLSVKVQVQKLINQATSHENLCQNYVGYVPLHFYTPKPRLL

SEQ ID NO: 13969 - protein, 374 aa, Arabidopsis thaliana
MQLFGLVNTLLENSRKTAEKDLSIQRYSVIPLSPNSGLIGWVPNCDTLHHLIREHRDARKIILNQENKHMLSFAPDYDNLPLIAKVEVFEYALENTEGNDLSRVLWLKSRSSEVWLERRTNYTRSLAVMSMVGYILGLGDRHPSNLMLHRYSGKILHIDFGDCFEASMNREKFPEKVPFRLTRMLVKAMEVSGIEGNFRSTCENVMQVLRTNKDSVMAMMEAFVHDPLINWRLFNFNEVPQLALLGNNNPNAPADVEPDEEDEDPADIDLPQPQRSTREKEILQAVNMLGDANEVLNERAVVVMARMSHKLTGRDFSSSAIPSNPIADHNNLLGGDSHEVEHGLSVKVQVQKLINQATSHENLCQNYVGWCPFW

SEQ ID NO: 13970 - protein, 494 aa, Glycine max
  unsure (1)..(494): unsure at all Xaa locations
XARARLYYGDGNVEAMFATLDPLHDMLERGPETLREIAFQQSFGRDLQDARESCRRFQQYGELNDLNQAWDLYYQIFKRIARILPSFSILELQQVSPKLLAARDLELAVPGTYHSGKPIIRISKFAESLDVLTSKQRPRKLKVAGSDGKDHAFLLKGHEDLRQDERVMQLFGLVNTLLSKDPETFKRHLMTIPYPIIPLAPNSGLLGWVDNTDTLHVLVKNYRDSRKILLNIEHRIMLQMAPDYDHMMLIQKMEVFEYALDNTTGQDLYRVLWLKSRNSEAWLDRRTQYTRTLAVMSMVGHILGLGDRHPSNLLLERISGSVVHVDFGDCFEVAMVRDKYPERVPFRLTRMLIQAMEVSGIEGTFRITCENSMRVLRDHKESIMAVLEAFVHDPLINWRLXSILVEEVERGXXMSVVHXKRVGVDESNPLDDETNEALNQRALQVVDRVQQKLTGRDFKPTQVLDVSEQVQKLILQSTSVENLCQTFIGWCAFW

SEQ ID NO: 13971 - protein, 340 aa, Glycine max
  unsure (1)..(340): unsure at all Xaa locations
XESATXNSPPSNLRKAAAQEVVDKVRQHSGVLVDQAQLVSKELIRVAILWHEMWHEALEEASRLYFGEHNIEGMLNVLEPLHEMLEEGAMKNNVTIKERIFIEAYRQELLEAYECCMNYKRTGKDAELTQAWDIYYHVFRKIDKQLQSLTTLDLESVSPELLECRNLELAVPGSYRADAPVVTIASFARQLVVITSKQRPRKLTIHGSDGDDYAFLLKGHEDLRQDERVMQLFGLVNTLLENSPKTAEKDLSIQRYAVIPLSPNSGLIEWVPNCDTLHHLIREYRDARKITLNQEHKCMXLSFAPDYDHLPLIAKVEVIDXSSAHPQGNXPSTALWFWKX

SEQ ID NO: 13972 - protein, 154 aa, Glycine max
  unsure (1)..(154): unsure at all Xaa locations
XQPFVGRELFAAGFVSCWAQLNETSQKQLVRNLEMAFSSPNIPPEILATLLNLAEFMEHDEKPLPIXLRLLGALAEKCRAFAKALHYKEMEFEGARSKKMDANPVAVVEALIHINNQLHQHEAAVGILTYAQQHLDFQLKESWYEKLQRWDDAL

SEQ ID NO: 13973 - protein, 416 aa, Glycine max
  unsure (1)..(416): unsure at all Xaa locations
PSDMFYGKIIPALKEKGIKRVISRRDWPHEVKCKVLLDLMKEVPRHLLYQELWCASEGYKAFSSKMKRYSGSVAAMSMVGHVLGLGDRHLDNILIDFCNGDIVHIDYNVCFDKGQRLKIPEIVPFRLTQMIEAALGLTGIEGSFKSNCETVIGVLRKNKDILLMLLEVFVWDPLVEWTRGDFHDEAAIGGEERKGMELAVSLSLFASRVQEIRVPLQEHHDQLLTSLPAVESALESFADVMDAFGLISQVRGSIETALEQLVEVEMERASLIELEQNYFVKVGLITEQQLALEEAAVKGRDHLSWEEAEELASQEEACRAQLDQLHQTWNQRDVRTSSLIKREADIKNALMAKLFSFCHPFDFXAFLLAELLFSTLQRACLHLSFHVISQGSPWLPAGLVRDEKASPCLQFCWFKR

SEQ ID NO: 13974 - protein, 220 aa, Glycine max
  unsure (1)..(220): unsure at all Xaa locations
XHASDIFLHNHCIWAKLVLVFCXVGYLLGLGDRHPSNLMLHRFSGKILHIDFGDCFEASMNREKFPEKAFVHDPLINWRLFNFNEVPQMSMLTSNHVPPVVNSEESAPNRELPHPQRGARERELLQAVNQLGDANEVLNERAVVVMARMSNKLTGRDFSTCSSVSNNSLQHAVDHSSLISGDTREVDHALSVKLQVQKLIIQASSHENLCQNYVGWCPFW

SEQ ID NO: 13975 - protein, 2585 aa, Oryza sativa (japonica cultivar-group)
MKRNETILCRICNPSTVQEQEQENGATFHPSPSSARIDIVSLELKQSAWDDDAREGWRPHLWIDLCWPRRRFATLTLTPMATSRDADEIIEKLSSDRARTRDEGVKLLGTWLQGDRAFSFCRLLARNTANLKPAHLPASATWPFLIMALTKCVIADISGKKRSPKSAAARMLRLAVQCAQDFRLSGRSLLLISVAKKLFSHIWEVVKDAPSFLIEYSIILRQLLTVKEYRYQMKPRTYSSFVVLYMKKVATGFDEKISNQASSKEESFRCTLTLHVLLENPPGDYPDIMREESLFITYAKVQLELARAIPEILEKLLDVIIKELDQNFNTGAGLVWCEAPRDEKAGSLRCFQEELMDLSATALYLAYKCTPRTSHNKKKLKTEHVMTAIMDSLLRGSLVWSGSICCLIHKYGYRVDKSLLINWFKATCKGLKRVLKEFSALLMSSARDAPPFWLTNDEMSILEGYWQDTWNSLIHALPLFSTTALVDQVHASFVSEDTWDLQIFKQLPSSYGFSLLNEQSVLMIPETIFSLCAGFSSPVINSADTSQLFGECKNLSKAMSEKCSRAHLPRHIQQPLLLELLEFTKGFMSSNKQFEKVDLPNLVYACSLVCNLIHCSLLSRVFEEKSSFLQVMLDYVTNAIKHIVSVVMKEHAELSHGLTNLGSVFDTTGSALSSFKSFMHSPLFSLWRVNNKTSSVLGVTELLDELLEAISELFAQFSSLMNNFDGDNPSKMLPVPFVSLSEDLHPDNRSSFVDMDLDMTGSGEVDPVTAGGSGSMGISPRPLECKLELVCIISTFFSVVPLHTWEVLYNLADKEVNIKNQDVFLDLLNKATEISFTDWFFRIRLINCISNFIYLFPDVAQDMIGHLLSMLHDTDYRVRLYLARKIVVLFQIWEGHSELFHDVCSSIGVKMVQFSNENPVRAREVLAIGPQPVPIIETALITLAHLSLQSEDIEVERLNYASRSKYLDQLIGPILFRWVACEVKEMFGFKSDEPKNFIEHCCSWLLSFLILRGETADLNWLSKILSQPLSAVIKGYFVPIFGLCIAARYGSGPEKDLAETVLCESLLQLGEISEPERDDLIKKHMVSIVGFLLSVSSSSRQPEIPHFSKEAVAHSVKTVVDGFMDAMDGNLAETVVIDKINIFRSDRVFKFLLAIHQQIADASHPRHIRHRLCAIEVLIDVLGHRVALYSTWFYIICIVGSYIQRQPLQDQCCNILSKLLAAFNSNCSTETDAALGKQLQFVSRAPHLPPELFLLSLRMHHKKLLLGEIIYRGDVSVDNADTISCWHSDPDVVSAVWTLVDLCSSSSVANEASSVLADFISRAGISDVHQVIFHVPNLTEKYPIQPHISKEDKLPSDYGISDDILVGLLKLLKACLSDESAEIIDVTSRTLRGVLSTARGLNALHCLDSLDRSLLMVHSRGINAQVVEQTLLGMEKVSGVSLEDSDLWRTDGRTYKQWLCTLVGSLICHCDDIILRLCRSIAFLKVEVAELLLASALVNIAGNLDSNAGICRLISSMVEEKIFCDSNHLMKSVYLFLDALNVVRSYYVAEKARGCPSNTLKDGRSVRSKSRSPTTTPSSSWKKVYWLSVDYLVAARAANLPPHIDLLVASFTRINELDSIYGITLANEITSQIIRYEHEGDWSSALEYHDLLVRSTRKENHGSLAGTALTGPSDVPSKAEEKMLNWQMHKGLMRSLQKTGCSHVLDVYCQGLSNQKSCLQQDSEFIDMQDLVLALSNASKESTKYIHSTVIKLQMLDHLTMAWDLRWKFCLNQTSKSYVGNKDFSPVPTVPTRMQLELLNKEWTFILCQTERNLDLLEPFLAFRSAVLKILGSEEHLREHLFQSASALRKGARFSLAAAALYELKELRYHMDHQAMPNSYFLFKLEEAKLLRAQGQHDMAINLGKYILKNHPDKKNVSDVYRLVGKWLAETRSSNSRTIIDDYLRHSVDFTELHKCPDKKYKSRQCRTYFHLAHYTDGLFKSYEERLSSNEWQAALRLRKYKSKELDTLMKRLKSSSKSEKTDYSVKIQELQKQLALDEEEAGKIQCTHAKFSAKIQKSSKDDRDKFLNLALQGYQRSLVVGGKYDLQVVQSYKFIPLVYQIASRLGSSKDAQGSTNFQNALASLLKKMAIDHPYHTIFQLLALANGDRVKDKQRSRSSFIVDMDKKLAAENLLKDLSSSHGALIRQMKQMVEIYIKLAELETKKEDTNKRIPLPREIRSICQLELVPVVTASIPVDPNCQYEEGSFPHFNGLADSIMVMNGINAPKVIECIGSDGNKYRQLAKSGNDDLRQDAVVPFTPSAGVVEWVNGTVPLAEYLVGSTRSGGAHGRYGTGDWTYHQCRETMTNVGYIVGLGDRHSQNILIDQETAEVVHIDLGVAFEQGLMLKTPERVPFRLTRDMIDGMGVTGVEGVFRRCCEKTLSVMRANKEALVTIIEVFVHDPLYKWALSPLKALQRQKESEDIDSCLDDSQEACEGNKDAARAILRVKQKLDGYEDGEMRSVQGQVQQLIQDAVDADRLCQMFPGWGAWLVLSHTYIHTVWDGMGSLIDALTQTAVELMTRQWHLVVERFKGHVYIHQTADAFRS

SEQ ID NO: 13976 - protein, 1083 aa, Cryptococcus neoformans var. neoformans
EFGTSEDLIDVNQKLQQSDAAWGTLEWAQTEMGMTTEVEWYEKLGRWEEALQVWNERDADASTTFSEWEITEGKVTCLHAMGEWEQLSDFVQARWANRTAEEKKLLSPLAAAASWSLKQWDLMDDYISAMKGDGADRAFFKAILAVHRNQIPAALKQISKARERLDPELTTLTGDSYGRAYDTVVRIQMLAELEEIIAYKDHADEPARQEMQRQTWKKRLAGCQRDVEVWQRILQVRSLVLKPNEDMDTWIEFADLCRTSDRLNLAEKTLTSLVGFQYPSMEDTRGRAPPPIIFAYLRMAWAKNLQIDSREERYETLQHLRDFTDQLTDDVGIGARGPNGRLMLPDQKLYGSYTKLLAQCHVELGQWQATLRESQGSADPSGILHDYSLATELDPEWYQAWHTWALANFEVITQLEVSQQGLSPIHFTTYIIPAVEGFLKSISLSPGNSLQDTLRLLTLWFTYGYSSGVTAAVSQGLPTVNIDVWLEVIPQIIARIQTPRQSIQQLIVQILHDIVKAHPQALIYPLTVASKSTVAARSTVAQNITHKMREHSPKIVDQAELVSTELIRAAILWHEMWYDGLEEASKHYFGDHDIPGMLGVLEPLHEIVENGPQTLRETSFIQSFGHDLRIAREHLKRYRITQDGTEIQQAWDVYYSVFQRLGKQLKLLNVIELQYVSPKLMAVRDLDIAVPGTYQSGKPIIGIKNVIPTFKVIASKQKPRQCSMRGMDGKEYAYCLKGHEDLRQDERVMQLFGLVNTLLNNDHESAKRHLSIQRFSVTPLSPIAGLLGWVTHSDTIHVLIKQYRDQRKILVDIEHKLMQQMSDESYDSLPLLQKVEIFQYALDNTTGQDLYRILWLKSRNSDIWLERRTTYTRSLGLNSMVGYILGLGDRHPSNLLLDQITGKMVHIDFGDCFEVAQQRDKYPEKVPFRLTRMLIHAMEVCGITGNFSRQCEVSMEVLRDNRESLMAVLEAFVYDPLIAWRLTATDKRPGGVGEVKDLDDPAVYGKQRKNKANETEILNDVENTEVKNDKGLQVIERVRRKLTGRDFKPDVVLDVKSQVEKLVVEATKTENLCVAFLGWCSFW

SEQ ID NO: 13977 - protein, 2380 aa, Dictyostelium discoideum
MSQHEQPSIWADALTKLLNDLKSKKEEDRVKASKNLKSYVISQSREMTNENFTKFMNELNNNLIFELVNSSVIPEKIGGIMAIDELIDVDYDENATKITRLANYLRIGLGFNDFTVMLMASKALGRLARSSGTLTAEFVEFEVTRALEWLSGDRIEARRHAAVLVLKELAQNAPTLFYVHASSFVDLIWVALKDPKVAIREGAVEALRACLELISERESRLRLQWYQKIYDEAQKSFKQNGSPESIHGSLITVSELLRNTGDFMLSKFKDICETVLKYKDHRDKLVKKTVLALFPRLAVFCSRDFVLNYFNACMNHLLAALRNQNERPTAFIALGEIAMAVGGSIKPYLDSIVVMIKQGLMTKGKQFCPEVLTCISMLASAVGQSMYPHMQVILPQMIVSSGLTVVLTDALRDLTINLPTLIPNIQYKLLNLISQVLANKPFSEPGAPSPYRKSATPFQGGSIPQLGQNSDVDPQMIALALKTLGSFDFSKHNLLEFVRECVVNYLDDDNIEIRREAAITCAQLMVGTEEPTPTRGHSAVIVGEVLEKLLVVGIADPDPSIRKTVLSSLEARFDHYLAQAENLRSLFIALNDELFEIRELAITVIGRLTIRNPAYVMPSLRKTLIQLLTELEFSGDGRNKEESARLLGHLISASEKLIKPYVEPILKALLPKLRDSNPRVASCVLAALGELSVVGGEEMVQHIDSLLPLIIDTLQDQSSTSKREVALKTLAQLASSTGYVIKPFSKYPMLLDTLLNAIKTERIGSIRREVIKVLGILGSLDPYKHKMNELGKRREDPKANDDKNNNMTNEVITISPSNEDYYPTVALTALMKILRDPSLSSHHTSVIQAVMYIFKSLSLKSIPFLPQIMPPFLHAMNTGEPLFREFLFQQLGSLVSIVKQHIRDYLVNVFALIEKYWNSNLLIPIIKLVEEISSALNDEFKVYLPNLIPQMLNVLHTDRSPKRSPTTKVLRALEVFGTNLDDYLHLVIPAIVKLFEQVDVTTQVRTLAIQTIGRLCKKLNFSDYASRIIHPLARVLDSTESELREETLNTLCALVYQLGSDYAIFIPMVGKVLARREIQSTNYELLISKLLKNQQLMLTPGSGDDGGMGANRFGGDHNGHHLGEDHNNTSTPLDIGVKKLKANEQHLKNAWETSQRSTKEDWGEWIRRFSVELLRESPSPALRSCLSLAQDYHPLVKELFNAGFVSCWTELHEQFQEELVRSLETALLSPNIPPEILQTLLNLAEFMELHEKPLPIDIRTLGALAEKCHAYAKALHYKESEFSQSPSSTIEALISINNQLQQPEAAIGILIYAQKNHSVELKEGWYEKLRRWEDALAAYEKKQKDDPNGGTIENTMGILRCLHALGEWERLSALSSETWKSDINDHTRATIAPLAAAAAWNLVNWDKMDEYVCAMNKDTVEGSFYRAILEVHHDNFTLAHGFIDHARTLVDTELTALLGESYNRAYKVVVRLQQLSELEEIIEYKKCVDSPERRNMIKNTWKTRLRGCQHNVDIWQSILAVHSLVISPHEELDMWLKFVGLCRKGSRLGLAQKTLTMLMGKDPSTTSQFGSVLPNTHPRITFAYIKQLWSAGAKQPAFEKLRTFVQALRDTDDLPLQGRAYLKLGEWQLALGDTLSEASIPHIISSFKAATECDPNWYKAWHSWALINFEVVSHYEQNGGTPEQIGAHLLPAVHSFFKSISLGPDRSLQDTLRLLTLWFKHGAQKEVEAALMQGFNTISIDTWLHVIPQIIARIHAPVLPVRRLLHELIDTIGKEHPQALVYPLTVATKSHSPARLAAAKSLMDKMRKHSATLVDQALPVSQELVRTAILWLEMWYEGLEEASRQYFGDHNPEAMLATLAPLHQILEKGPETTSETSFLQAFGRDLQEALEWSKKYEKTRKEGDLNQAWDLYYQVFRRIYKQLPQMSSLELQYVSPKLLNSNNMELAVPGTYKASENVIRIQSFSQALSVIPSKQRPRKLTIIGSDGLEYTFLLKGHEDLRQDERVMQLFSLVNNLLSANHETAKSHLSIRRFSVIPLSPNSGLIGWVPHSDTLHTLIKDFRDSNKILLSIEHRLMLQMCSDYDNLTLLQKVEVFQYALENSNGLDLHKVLWLKSRNSEVWLDRRTNYTRSLAVMSMVGYILGLGDRHPSNLMLDRHTGHILHIDFGDCFEVAMHRDKYPEKIPFRLTRMLINAMEVSGIEGNFRLTCEAVMNVLRNNKESLMAVLEAFVHDPLINWRLLTPNENNTKHKATNIASNNSTSNSTTKIEGDLNTIDNPINKESPDHEAVAGSLKSSPVHGRQIARNQRVGVDAEQVEAEIVPEALNERALSVINRVNKKLTGRDFSSNETLDVPEQVQKLIDQATSHENLCLSYVGWCPFW

SEQ ID NO: 13978 - protein, 2344 aa, Dictyostelium discoideum
MNDSNSSNDSCNTENNTLTATKNSINNTTTTTTTPNNNVNCLKTSGSIKLSASSVPFIPGSSASLPSILSNQYKLAASNNVSNNIMMISTPIISSAQQQQQQVPPPQQTTTTTTATATAITPTPITTSQSTSSSMLNLPLKVGKESIETLFRNRFHPKNNIRETVLSSLQSILIPDLSDTINNTKENIEYFYNMIIDENNYILKLLLLNIINDTKRNLVVYNYNQQHQLPIQNTSSPNTPSSTTTTTTTSTKPSKRGDKERERGRRNKDKINEKQLQQQQLQQLQLQQQLDHEGSSLYLPFSSLLSFIKPDKQQQPQQSQQSQLNEIDQMVRPKSLPKDDNDSDNFNIRVLEYNLKLLIKIYFKVSMYQDSIKTHIFDLYIQINQAISEQQRQLQEKEKESKTSKPIPQPIISLVIPTVLVSIGDIIKYKYATPSPPNLTPTTTTKMEEEERIINTILINEFKKTDVSIIESNLYLFECILSISVSNEPTIVVPNTTTATTATTATTSNTSTAAAATTTTPTLSTSSSSLSPPASTQSSLSLSSSSSAVIAPTTVGYIFKFNKELFRKLIALVYSTVVQHQITLSTVFTTLVLKGYLNEDQIQKLLNITLFKLSDPSEQVKLSYLTLLSKMVSYFDLNHQKNLNHKVNDISLPYKLLIMGSTSQPFFNGQIFKKIFDWIMGIGKDQPSFDSLTKYLIDLFDSFNVISILFNEQNKILSQQYLAAQSTMITPPLSLHQIDDRRKFETLISKSDELIWFWTVWECSKFCIANRLKSPYGSAFQTFEIFEKLLLQLNKDRRDFKKIKILLHFMESMEKLIFSTVNGSVLVQSLNNKETQFFRHNVRVCEDWFSRIRVNLLKASILSSSTPDIIRHASLRVQDIQANRFVLDSNTAHFELEFCILHLANALQQLNETESLQGLSNWSDINLNNSDNNNNNNNKNNNNNNNSTFFNNGNINKYTLKLPWMKGVILRSKQKFEESISSLLSVPPMLESNSISFPFVLEQIIKSYLDISNFTEVEQFLQNYQNQIQQQSNSLIIYKDTFIKTLGSFYRGEMEEAHAFAKRTESQNHILQREQLGLGLLGNQIMTDELLLSIMVNQKDLFNNTNIINNNNSGGSSSGTATATAVTTTTTTTTTTTTTTTTTTNTNNDIIGFSNNINSMLKLTKNNILKALNYLGLESNVQTFQYLTQLKIMDEIENGVYNSRVVPINNQIGFLERLRRVRGHISNTKQRSDILLSNIPLTEKMIKLSRKFENYKFSSKLLDTILESHSSSYYLERCKLKYLNGKQTEATLDLIKYAHRDITIPSSSTTTTTTTTTTTPPSTSSNTATTTNNINIDELSTQKFKVYTEIIKYLNSNPSIITELSSSNYSIPQEQLNPEYYFKKATLTKPENSKLWITYADWILNEKSNISEQNDEESLNGGGSGGNENSSNEMLRLKNTNTNELKTAVEAYFQFLKYSMLDGNSNGGLNIRATLKILNILVCSGNKLVETFERCLNELTSTRPFTIIIPQLFARLSHPDTFVQKYVVEILNRIGRDNPNKIVYQTIVGSLNFTNTNNNNNSSCAAATTDDGLDIELLQKQYPNYLQILNIKENLLKHSELLVKETETLIYQLGKLTTLWDDNWQYFIEQIQGWVYINTKQWNDDYQQLKATIKNPTILKHTLKKKNQELLQPIYEKLKRLTAATVLSVCKTPHEKWFTKCHFETINKTIRAFEKQNKPTSPFDVLHDLIAEFQQYRLISLSLSSVNPSLALFRPTITQMPGTDLNYFNINHIHHHHHHHNHHGNNNNQHSTSSGNLPIQNQVTIQLIKPTIYLLPTKTKPKKMAMLGSDGNLYYYLLKGREDLHLDERIMQLLNVVDQLLMNDKKPTLKLLRTRNYSVIPLSQSSGLIQWVEGAVPLFSIYKNWYKNDQVYKQQQQQQQQLQHQQQQQRQQQQQQPPPQQQPQQQPQQQPQQQPQPQQNSTTTSNIVNKPIIARPVDIFYAKITPLLEKAGLNFMTPRSEWPKEILIQVLNELMQETPKWILQRELWFSSSSSSELFLKTQSYSRSLALMSVIGYMIGLGDRHLDNILLDLKTGEIVHIDYNICFEKGAELKIPERVPFRMTQIFEYALGLTGVQGTFRETSIQIMHLLRKNKDILLNLLETFIYDPLFDWKHSNKQTNNNNNNNNNNNMNQAAGEQESIEKKQSSNNSSNPIISTPTKLQQQQKLPNSPLSISSNNTNSTNNNNNNNNNNNNNNNNNNNNNNKDQDSDSSQSQEDEDNNVVEGEGGEGGEGDIDELNLVQDSSNGKDAFKSIQGLTVVNQVRLKLEGTEKKLSIPDQIDLIIRESMNVENLSSTYEGWSPWV

SEQ ID NO: 13979 - protein, 872 aa, Oryza sativa
  unsure (1)..(872): unsure at all Xaa locations
XTRRDTWIKFANXCWKSGRISQAKSTLVKLLQLDPESSPELTLYHGHPQVVLAYLKYQYAVGDELKRRDAFCRLQDLSVQLATTTNSYSGTLASQVATSNAGVPLIARVYLTLASWKRALSPGLDDDSIQEILVSYKNATLNAKDWGKAWHLWALFNTEVMSRYTLRGRPDIAGKYVVAAVTGYFYSIACASTTKGVDDSLQDILRLLTLWFNHGATSEVQMALQKGFSLVNIEMWLVVLPQIIARIHSNNKIVRELIQSLLVRIGKDHPQALMYPLLVACKSISILRQRAAQEVVDKIRQHSGGLVDQAQLVSKELIRVAILWHEMWHEALEEASRMYFGEHNIEGMLAVLEPLHAMLERGXXETIKENTFIQAYGHELLEAHECCLKYRATGEDAELTKAWDLYYHVFRRIDKQLPSLTTLDLHSVSPELLXCRKLELAVPGTYSADAPLVTIEYFVPQLIXITSKQRPTDAWVHGSDGNDYAFLLKGHEDLRQDERVMQLFGLVNTLLENSRKTSEKDLSIQRYAVIPLSPNSGLIGWVPNCDTLHALIREYRDARKIFLNQEHRCMLSFAPDYDHLPLIAKVEVFQHALENSEGNDLAKVLWLKSRTSEVWLERRTNYTRSLAVMSMVGYLLGLGDRHPGNLMLDRYSGKILHIDFGDCFEASMNREKFPEKVPFRLTRMLVKAMEVSGIEGTFRTTCENVMQVLRTNKDSVMAMMEAFVHDPLINWRLFNFNEVPQVTNYGNAHSHTVVNSEEAANRELMQPPRGARERELLQAVNQLGDANEVLNERAVAVMARMSHKLTGRDFSSGSSLSGAGSSTQHGNEHLASGDTREVEPGLSVKVQVQRLILQATSHENLCQNYVGWCPFW

SEQ ID NO: 13980 - protein, 217 aa, Oryza sativa
  unsure (1)..(217): unsure at all Xaa locations
XDAWVHGSDGNDYAFLLKGHEDLRQDERVMQLFGLVNTLLENSRKTSEKDLSIQRYAVIPLSPNSGLIGWVPNCDTLHALIREYRDARKIFLNQEHRCMLSFAPDYDHLPLIAKVEVFQHALENSEGNDLAKVLWLKSRTSEVWLERRTNYTRSLAAMSMVGYLLGLGDRHPSNLMLDRYSGKILHIDFGDCFEASMNREKFPEKVRIRVWHFIIXM

SEQ ID NO: 13981 - protein, 355 aa, Oryza sativa
  unsure (1)..(355): unsure at all Xaa locations
XPGLQEFGTRLVRLFNSGAXVDIRRCAIVTLTKLIPTVQVGTHVSVLVHHLKLVLDGNNDDLRKDAAEALCCLAHALGEDFTIFVSSIHKLLVKHHMRYRKWDEIENRLLRREPLISENLSVQKYTQCPPEVISDPLDDFGGVPSEEGQPRSHQVNDVXRLRSAGEASQRSTREDWAEWMRHFSIALLKESPSPALRTCARLAQLQPSVGRELFAAGFASCWAQMNETSQEQLVRSLKTAFSSQNIPPEILATLLNLAEFMEHDEKPLPIDTRLLGALAEKCRAFAKALHYKEMEFEAVCSKKMGANPVTVVESLIHINNQLHQHEAAIGILTYSQQHLEVQLKESWYEKLHRWX

SEQ ID NO: 13982 - protein, 534 aa, Triticum aestivum
  unsure (1)..(534): unsure at all Xaa locations
YFGEHNIDGMLAVLEPLHAMLERGAETIKENTFIQAYGHELLEAHECCLKYRATGEDAELTKAWDLYYHVFRRIDKQLPSLTTLDLHSVSPELLKCRKLELAVPGTYSADSPLVTIEYFVPQLIVITSKQRPRKLTIHGSDGEDYAFLLKGHEDLRQDERVMQLFGLVNTLLENSRKTSEKDLSIQRYAVIPLSPNSGLIGWVPNCDTLHALIREYRDARKIFLNQEHRLMLAFAPDYDHLPLIAKVEVFQHALQNTEGNDLAKVLWLKSRTSEVWLERRTNYTRSLAVMSMAGYLLGLGDRHPSNLMLDRFSGKILHIDFGDCFEASMNREKFPEKVPFRLTRMLVKAXEVSGIEGTFRTTCENVXMQVLRTNKDSVMAMMXEAFVHDPLINWRLFNFNEVPQVSNYGNAHTHTVVSSEEAAPSEXXLMQPPRGAREKELLQAVNQLGDANEVLNERAVAVMARMSHKLTGRDFSSGSALSGXPAAQVNNLASVDAREVEPGLSVKVQVQKLILQATSHENLCQNYVGWCPFW

SEQ ID NO: 13983 - protein, 303 aa, Triticum aestivum
AGIAGDQHRDATAVHIFILTPPARRGLLGERPESPPARLEMAPMAANAAWHMGEWDQMSEYVSRLDDGDENKLRSLGNTTASGDGSSNGAFFRAVLSVRCKKYEEARVYVERARRCLATELAPLVLESYERAYNNMVRVQQLSELEEVIDYCTLLMESPIADGRRAHAPADAWERIKGTKRNVEVWQALLAVRELVLPPNEDRDTWIKFAKLCWKSGRISQAKSTLVKLLQFDPESSPELTLYHGHPQVVLAYLKYQYAVGDELKRKDAFSRLQDLAVQIATATNSYSGMLASHGAITSAGVP

SEQ ID NO: 13984 - protein, 753 aa, Zea mays
  unsure (1)..(753): unsure at all Xaa locations
XRPIPALDDDSIQEILISYHNATLSAKDWGKAWHIWALFNTEVMSRYTFRGRPDIAGKYVVAAVTGYFYSIAWASTTKGVDDSLQDILRLLTLWFNHGDTSEVQTALQKGFSLVKIEMWLVVLPQIIARIHSNNRVVRELIQSLLVRIGKGHPQALMYPLLVACKSISILRQRAAQEVVDKIRQHSGGLVDQAQLVSKELIRVAILWHEMWHEALEEASRMYFGEHNIEGMLAVLEPLHAMLERGXXETIKENAFIQAYGHELLEAHECCLKYRATGEDAELTKAWDLYYHVFRRIDKQLPSLTTLDLHSVSPELLKCRKLELAVPGTYAADSPLVTIEYFVPQLIVITSKQRPRKLTIHGSDGNDYAFLLKGHEDLRQDERVMQLFGLVNTLLENSRKTSEKDLSIQRYAVIPLSPNSGLIGWVPNCDTLHALIREYRDARKIFLNQEHRLMLAFAPDYDHLPLIAKVEVFQHALQNTEGNDLAKVLWLKSRTSEVWLERRTNYARSLAVMSMVGYLLGLGDRHPSNLMLDRYSGKILHIDFGDCFEASMNREKFPEKVPFRLTRMLVKAMEVSGIEGTFRTTCENVMQVLRTNRDSVMAMMEAFVHDPLINWRLFNFNEVPQVSNYGNVHAHTVVSSEEAVANRELMQPQRGARERELLQAVNQLGDANEVLNERAVAVMARMSDKLTGRDFSSGSALAGAXVALSNNLASGDARDAQPGLSVKVQVQKLILQATSHENLCQNYVGWCPFW

SEQ ID NO: 13985 - protein, 2337 aa, Schizosaccharomyces pombe
MKEFPGLKSRNEEIRNKAANDLYEYVIAYSRELSGEALVQFNNDVNKYVYTLIHSTDPLDRLAGVTAINRLIDYEGEDTTRITRFANYLRIILPGTDQKATVLAAKALGRLAVPGGALTSEFVNFEVKRALEWLQGERNENRRYAAVLILKELAKNTSTLIYAHIDSIFELLWHGLRDPKVTIRIASADALSEFLKIVRQRDSSIRLQWYTSILNEAQRGVAQGSSDYIHGSLLVYRQLFLKAGMFMHERYREVSDIILQFRDHKDLLIRKTVTELIATLAAYNPDEFVSNYLHVCMLHLLNLLKKENVKMLAFATIGKVAVAITNSIIPYLDPICDSIKESLKIHIRNKSASDAAIFQCISLLSIALGQAFSNYAYDLFDLIFASGLSEASYRALSDLAHNIPPLLPVIQERLLDMLSKILSGRPFIPPGCPPQYVARSLKSSKSASLKTGFFPNDVYILALKVLGNFDFSGYILNEFVKDCVVVYLENNDPEVRKTASITCSQLFARDPILSQTSDHAIQVVAEVLEKLLTVGICDTVPDIRLTVLNSLDSRFNKHLAQADKIRLLFIAINDENFAVRESALRIIGRLNVYNPAYVMPYLRKIMLKTLTILDYSTIIRTKEENAKLLCLLIAAAPRLIESHVEPILQILLPKAKDSSSIVAASIVNSLGEICQISGEVIVPFIKDLMPLIIEALQDQSSPIRRAAALKALGNLSSSTGYVIDPYIEFPSLLDILIGITKTEQDITIRRETIKLIGTLGALDPNRHRVLEKGTEKVVPEQKNIPPDISLLMSGIGPSSDEYYPTVVITALMSILKDPSLTIHHTAVIQAVMYIFKTMGLRCAPFLSQIIPEFIAVMRTCPTNILEFYFQQLSILVLIVRQHIRSFLPDLFKLIKDFWNPHSNLQFTILSLIESLARAMQGEFKPYLPSLLVMMLQIFDSDVSVDSVSTKKVLHAFIVFGDTLADYFHMLLDPILRLYERNDVSIGIKESIMITIGRLSMVINLSEYASRIIHPVMRMLSCNNASLIRVSMDTVCALIYQLNVDFAIFIPMIDKCLKMNGVTHETYSILVEQFLQEQPLPIKLNPYEKYDKPKLDVVASAADITSKKLPVNQEILRNAWEASQRSTKDDWQEWIRRLGVALLRESPSHALRACAALAAAYQPLARDLFNASFVSCWSELYDHFQEELVKSIEIALTSPHISPEIIQILLNLAEFMEHDDKPLPIDIRTLGAYAAKCHAFAKALHYKELEFIEEELVTKPSVDTIEALISINNQLQQPDAAIGILKHAQQHDKMNLKETWYEKLQRWEDALSAYEKREAAGAGNFEITMGKLRCLHALGEWDRLSQLAQENWIHAGHDARRYIAPLSVAAAWGLGQWEQMDEYISVMKSESPDKAFFNAIVALHRSQFEEAASYITRARDLLDTELTALVGESYNRAYSVAVRVQMLSELEEIITYKKAEDKPEVREMIKKTWVRRLKGCQRNVDVWQRMLRIRSLVISPRDNMEMWIKFANLCRKSGRISLAKKSLNLLLEDDENLDNSLVLKKTHPSIVYANLKFLWAVDDKRKALNSMQEFTSQLISDINVDPALFVQSTSVNTQKSQEEIQYYFHLLARCYHKQGQWQQEIENNWSEGSFDGVLQSYMYATQFDSKWYKAWHSWALANFEAVKFLEQSEEQIPSAAYEQYIIPAVKGFFKSIALSKGNLQDTLRLLNLWFKFGNNSNVINTLNVGISTVNIDIWLDVIPQLIARIHASSLSVRKSVHQLLSDVGRAHPQALVYPLTVAAKSQSSARQNAALAIMDSLKTHSPRLVEQARLVSHELIRAAILWHEQWHEGLEEASRLYFGDHNIEGMFAVLRPLHEMLERGPETLREISFQQAFGRDLVEARDCCIRFEQTGDISDLNQAWDLYYQVFKKIRKQLPQLTTLDLQYVSPKLLHVHDLELAVPGTYVSGKPVIRIVKFYPTFNVITSKQRPRRLSIKGSDGKDYQYVLKGHEDIRQDERVMQLFGLCNNLLLADPETFKRLLSIQRYPVIPLSPDSGLLGWVLDSDTLHVLIRDYRESRKILLNIEHRLIIQMAPDYDRLTLLQKVEVFEYALLSTTGQDLYRVLWLKSRSSEAWLNRRTNYSRTLAVMSMVGYILGLGDRHPSNLMLDRYTGNIIHIDFGDCFEVAMHREKFPEKIPFRLTRMLVNAMEVSGIEGTFRITCEHVMRVLRTNKESVMAVLEAFVYDPLINWRLAPAYSPSIDEKQSNEPNTLLGETIDGLHRKRLNEEGITLEERQKPEILNQRAITVLNRVSNKLTGRDFKPQQQLDVPSQVEKLILQATSIENLCLCYIGWCSFW

SEQ ID NO: 13986 - protein, 1973 aa, Schizosaccharomyces pombe
SIALGQAFSNYAYDLFDLIFASGLSEASYRALSDLAHNIPPLLPVIQERLLDMLSKILSGRPFIPPGCPPQYVARSLKSSKSASLKTGFFPNDVYILALKVLGNFDFSGYILNEFVKDCVVVYLENNDPEVRKTASITCSQLFARDPILSQTSDHAIQVVAEVLEKLLTVGICDTVPDIRLTVLNSLDSRFNKHLAQADKIRLLFIAINDENFAVRESALRIIGRLNVYNPAYVMPYLRKIMLKTLTILDYSTIIRTKEENAKLLCLLIAAAPRLIESHVEPILQILLPKAKDSSSIVAASIVNSLGEICQISGEVIVPFIKDLMPLIIEALQDQSSPIRRAAALKALGNLSSSTGYVIDPYIEFPSLLDILIGITKTEQDITIRRETIKLIGTLGALDPNRHRVLEKGTEKVVPEQKNIPPDISLLMSGIGPSSDEYYPTVVITALMSILKDPSLTIHHTAVIQAVMYIFKTMGLRCAPFLSQIIPEFIAVMRTCPTNILEFYFQQLSILVLIVRQHIRSFLPDLFKLIKDFWNPHSNLQFTILSLIESLARAMQGEFKPYLPSLLVMMLQIFDSDVSVDSVSTKKVLHAFIVFGDTLADYFHMLLDPILRLYERNDVSIGIKESIMITIGRLSMVINLSEYASRIIHPVMRMLSCNNASLIRVSMDTVCALIYQLNVDFAIFIPMIDKCLKMNGVTHETYSILVEQFLQEQPLPIKLNPYEKYDKPKLDVVASAADITSKKLPVNQEILRNAWEASQRSTKDDWQEWIRRLGVALLRESPSHALRACAALAAAYQPLARDLFNASFVSCWSELYDHFQEELVKSIEIALTSPHISPEIIQILLNLAEFMEHDDKPLPIDIRTLGAYAAKCHAFAKALHYKELEFIEEELVTKPSVDTIEALISINNQLQQPDAAIGILKHAQQHDKMNLKETWYEKLQRWEDALSAYEKREAAGAGNFEITMGKLRCLHALGEWDRLSQLAQENWIHAGHDARRYIAPLSVAAAWGLGQWEQMDEYISVMKSESPDKAFFNAIVALHRSQFEEAASYITRARDLLDTELTALVGESYNRAYSVAVRVQMLSELEEIITYKKAEDKPEVREMIKKTWVRRLKGCQRNVDVWQRMLRIRSLVISPRDNMEMWIKFANLCRKSGRISLAKKSLNLLLEDDENLDNSLVLKKTHPSIVYANLKFLWAVDDKRKALNSMQEFTSQLISDINVDPALFVQSTSVNTQKSQEEIQYYFHLLARCYHKQGQWQQEIENNWSEGSFDGVLQSYMYATQFDSKWYKAWHSWALANFEAVKFLEQSEEQIPSAAYEQYIIPAVKGFFKSIALSKGNLQDTLRLLNLWFKFGNNSNVINTLNVGISTVNIDIWLDVIPQLIARIHASSLSVRKSVHQLLSDVGRAHPQALVYPLTVAAKSQSSARQNAALAIMDSLKTHSPRLVEQARLVSHELIRAAILWHEQWHEGLEEASRLYFGDHNIEGMFAVLRPLHEMLERGPETLREISFQQAFGRDLVEARDCCIRFEQTGDISDLNQAWDLYYQVFKKIRKQLPQLTTLDLQYVSPKLLHVHDLELAVPGTYVSGKPVIRIVKFYPTFNVITSKQRPRRLSIKGSDGKDYQYVLKGHEDIRQDERVMQLFGLCNNLLLADPETFKRLLSIQRYPVIPLSPDSGLLGWVLDSDTLHVLIRDYRESRKILLNIEHRLIIQMAPDYDRLTLLQKVEVFEYALLSTTGQDLYRVLWLKSRSSEAWLNRRTNYSRTLAVMSMVGYILGLGDRHPSNLMLDRYTGNIIHIDFGDCFEVAMHREKFPEKIPFRLTRMLVNAMEVSGIEGTFRITCEHVMRVLRTNKESVMAVLEAFVYDPLINWRLAPAYSPSIDEKQSNEPNTLLGETIDGLHRKRLNEEGITLEERQKPEILNQRAITVLNRVSNKLTGRDFKPQQQLDVPSQVEKLILQATSIENLCLCYIGWCSFW

SEQ ID NO: 13987 - protein, 2335 aa, Schizosaccharomyces pombe
MEYFSDLKNKNESIQLAAADQLKEFVHSSTKELSGESLARFNNDINRRIFELIHSHDSHERFGGILAIGKLIEFESEGDVTNLSRYANYLRMTLPSTDWHSMELSAKVLGHLAASGGTLAAEFVEFEVQRAFEWLQGDRQEQKRMAAILIIKALAQNSPTLVYLYISEIFQNLWTGLRDPKPLIRETAADALGASLDVVCQREAKVQLQCFNEVLLQAEHGLRQSSVEYLHGSLLAYKELFEKSGSFIREHYTEFCDLALRLREHRDNSIRRCIVFLLPTLSEYNPKKFQQRYLDSFMVYLLSHIRKDKEKSLAFEAIGRIAMAVNEAMIPYLQNILKVIRDTLTAKVREKTQYEKPVFECIGMLAAAVKLELLEDSRSLLGLIFSCELSVHLRQALVKMAENIPPLLAPIQERLLNMVSQILTGKNFEIRTNDTYTPSFTNIYSAREPDQRSKSTESIILALETLGTFNFTGYSLISFIQESVLSYLENDNSEIRIAAARTCCQVFARDPICRKTNPLAVESVAEVLEKLLTLGIADSDPKIRETVLSLLDERFDRHLAHPDNIRCLFIALNDEVFSIREIAIIIIGRLALYNPAHVMPSLRKTIIQLLSDMEYSGNSRQKEESAQLLKLLVSKARTLIKPYIQSIIHVILPKAADTSPGVSSAIISALGELASVEGEDMPVDVRGSFMKLILVNLQDQSSTLKRLASLKCLRKLCGRSGYVIQPYLDYPPLLGALIGILQSEQPTPIRREVLRTLGVLGALDPYTYLTTEEVSDDLQSSHNNAHGVPQISAAQYPSLENYAMVAVVTLIGILKDSSLSMHHSSVVQAVMHICSQMGSKSTVFLPQVVPTFLQVMQSLSASSAEFYFQQLTTLTSIIGPNIRDYVSDIFNLSKVFWESTTSLLLVILELIDAIAIALQDEFKFYLPQILSCMLKAFSLDNTSSRSVSYKVLQSFVIFGSNIEEYMHLVLPVIIRSFERDTIPLGFRKSALKCIAQLFQSVNFSDHASRIIHPLVRMLGKSNGDLRAVIMDTLCAIVSQLGYDYSIFIPMVNKVLVSHKISHPAYELLVSRLLKGEPLPKDVVVKEFKPRPSTKPFSTQDEVLTKLPVDQASLKAAWESSQKLTRDDWQDWIRRISIELLKESPSSALRSCSTLAGIYHPLARDLFNVSFLSCWDELTESNKKNLVKSIELAMNAPNISVEILQTLLNLAEYMEREDHTLPIPIKVISAHASKCNVYAKALHYTELQFVQETKEEVSISTIESLITINNHLQQSDAAVGMLQYTKEHKQFSLKETWYEKLHRWDDALAAYEHREREGDSSFEINIGKLRCYYALGDWDHLSELAQKAWVTSEQEHREAIAPLAAAAAWGLGQWNLISEYVSAMDRDPQDKEFFSAISAVHLGQYNKAYGHIERHRDILVNDLSSIIGESYNRAYGIMVKSQMLSELEEIIDYKKNMQYENNLDSLKKTWRKRLEGCQKNVDVWHNTLRFRALVLSPQDSPEMWIKLADLCRRSDRLKLSNQCLTYLMGRDPSNAYPLDSLKLLNPHVVYTYLKYLWATDQKNIAVSELEEFTSYLSSKHGYKMGDSSKLVDILASSSVSSEERSFLARCFHKLGKWKKSLQDSVNQESVRDILNCYFYATLFDKSWYKAWHSWALANFEVVGYYEQTEHGVTQDMYEQYIVPAIKGFFHSSVLNQKNSLQDILRLLNLWFKFGEHSDVAAAIVEGFSNVPMDTWLEVIPQLIARIHTSSSSVRASVHQLLSDIGRVHPQALVYSLTVSSKSTNPQQKHSAKSIMDSMLSHSDTLVRQALLVSQELIRVAILWHELWYEGLEEASQAYFSDHDISLMIDIVKPLHETLEKGPSTLSEISFAQTFGYDLRKARSYWQKFLQDGDPTELNQSWDLYYQVFRRIQKQLPRIKHLELQYVSPKLLDACDLELAVPGTYGHNKPVIRISHFHHTFEVISSKQRPRRLTIHGSDGKDYQYVLKGHEDLRQDERVMQLFGLCNTLLTTDSETFKRRLNIERYTVIPLSPNSGLLGWVPHSDTLHFLIKEFRSKRNILLNLEHRMMLQMAPDCDSLTLLQKLEVFEYVMANTDGYDLYHVLWLKSRSSEAWLDRRTSYTQSLAVMSMVGYILGLGDRHPSNLMMDRYSGKIIHIDFGDCFEVAMHREKFPEKIPFRLTRMLINAMEVSGIQGTYKITCELVMRVLRSNTESLMAVLEAFVYDPLINWRLMTKSSFGASTTLRPTSSSVEEKGRSYTHRARHADYAALSETNGVNAEGLNERSIQVLKRVSNKLTGKDFDLKEQLPVKAQVEKLIQQATAPENLCRCYVGWCSFW

SEQ ID NO: 13988 - protein, 398 aa, Schizosaccharomyces pombe
MKEFPGLKSRNEEIRNKAANDLYEYVIAYSRELSGEALVQFNNDVNKYVYTLIHSTDPLDRLAGVTAINRLIDYEGEDTTRITRFANYLRIILPGTDQKATVLAAKALGRLAVPGGALTSEFVNFEVKRALEWLQGERNENRRYAAVLILKELAKNTSTLIYAHIDSIFELLWHGLRDPKVTIRIASADALSEFLKIVRQRDSSIRLQWYTSILNEAQRGVAQGSSDYIHGSLLVYRQLFLKAGMFMHERYREVSDIILQFRDHKDLLIRKTVTELIATLAAYNPDEFVSNYLHVCMLHLLNLLKKENVKMLAFATIGKVAVAITNSIIPYLDPICDSIKESLKIHIRNKSASDAAIFQCISLLSIALGQAFSNYAYDLFDLIFASGLSEASYRALSD

SEQ ID NO: 13989 - protein, 2509 aa, Neurospora crassa
MSLTKEQAAATLETYIRDVRNRTSSDDARKRAARQIRDLVNVAKQGKSTNSEFLLRFLSDIGTHANIQGCIEMGAEQFTAFFNTVNQRTMALIQGTDTCDRMGGVYILDALVDFDGIDLALKYSRFEQHIGYILRSKDVTPMQPAAVVLGKLCKPGGSLISELVDAEVKLALEWLQSERVEERRYAAVLILRELARNAPTLMYPYVNFVFEQSWIGLRDQRLLIRATSAETVSACFKIIRERDQAMKQEWMDKMFHEAVRGLKTNTVESVHASLLVLKELLEQGGMYMQTHYGEACDIVFRHKDAKDPAIRKTVVLLIPDLANYAPNDFASTYLHKFMIHLSHMLKKEKERNDAFLAIGNVANSVKSAIAPYLDDVLIYVRDGLSIQSRKRGSVDPVFDCISRLAVAVGQTLSKYMEALLDPIFACELTPKLTQALVDMAFYIPPVKATIQERLLDMLSKVLCGEPFRPLGAPHPNTLTSIPAIPKDPKDPSVQERGKAEVKLALNTLGSFDFSGHVLNEFVRDVAIKYVEDDDPEIREAAALTCCQLYVRDPIVNQTSYHALQVVADVIEKLLTVGVSDPDPGIRRTVLAALDERFDQHLAKAENIRTLFFALHDEQFAIREVAVSIIGRLARYNPAYVIPQLRKTIIQMLTELEYTDVARSKEESSKLLSLLTQHAQDLVKPYVNSITEVLLPKARDPTPSVAATVLQAIGELCTVGGESMLAYKDTLMPIIIDALQDQSAPIKREAALHTLGQLASNAGYVIKPYLEYPQLLEILQSIIRGEPQHGTLRQETIKLMGILGALDPYKHQASPAKDSMASQVANVASARSGNPSNKTPDSLKTALTNLMQVEERTDDNKRNNEAAQLTDVSLMMGGLTPSNEDYYPTVVINALLQILKDQSLVQWHGNVVDAIMSIFITLGLKCVQFLDRVVPAFISVIRASSNARLEFYFNHLSRLVSIVRQHIRVYLKDIIDVLQEYWHTTLALQSTILGLIESISRSLEGEFKIYLAKLLPLMLGVLEKDVSTKRQPSEKVFHAFLVFGSSAEEYMHLIIPVIVRLFDSHSQPLFLRKSAIETIGKLSSMVNLNDYASKIIHPLTRVLASGEPSLRVAALDTLCALMLQLGRDYLHFEHTVDKAISMYAIQHSNYEKAIEKLKKGEALPQNLAPRFEDISMEGFAAENNPPKKLTLNPVHLKQVWETKGKSTKDDWHEWFRKFSTTLLTESPNHSLRACASLASNYQPLARELFNSAFVSCWSELYEQFQEDLITNIENTIKSENVPPDLLGQLLNLAEFMEHDDKALPIDIRVLGREAARCHAYAKALHYKELEFLQDHNSGAVEALIVINNQLQQSDAAIGILRKVKTYREGIQLRESWFEKLERWDEALNFYCQREREIPEDQPVPVDIVMGKMRCYHALGEWDSLATLAGKTWANSAPEIQRRIAPLATTAAWGLGKWDSMDSYLQSMKRFSPDRAFFGAILALHRNQFREAMACIEQAREGLDTELSALVSESYNRAYQVVVRVQMLAELEELIVYKQCDGEKQATMRRTWETRLKGCQRNVEVWQRMLRLRSLVMTPQENMHMWTKFANLCRKSGRMGLAEKSLKQLIGTDSPLDSVIPYWHDRHPGSVGNRIASPILYAVLKFQWEIGQSPGFRNSEHRVAEKTLYCLQRFTQETAHRVETSRMHMAAHAQNGMEVQNQPGFAEFNEEMMHPQAQKHWLEQTVLLAKCYLRQGEWMVSLNKDDWQQRYRAEVLDCYYKATHYNNKWYKAWHAWALANFEVVQYLTGNREVDVRNNGEQNYIIQYVVPAVRGFFESIALSSGSSLQDTLRLLALWLTHGGHIDVHNAVTEGFTRVSVDTWLEVIPQLIARINQPHKRVQQSVHGLLADVGRAHPQALVYPLTVARKSWHNTRRVRSANQILESMRQHSLRLVEQAEIVSGELIRVAVLWHELWHEALEEASRLYFGDHNIEGMFATLEPLHELLEAGPQTLREISFAQTFGRDLSEARDWCRQYQETQDSNDLNQAWDLYYTVFRRITRQLPQMTSLELAYCSPNLLNAKDLELAVPGTYRSGQEVVRIMSFDATFSVISSKQRPRKLDIVGSDGKTYTFLLKGHEDIRQDERVMQLFGLCNTLLANDSECFKRHLNIQRYPAIPLSQNSGLLGWVPNSDTVHQLIREYRDSRKILLNIEHRIMLQMAPDYDNLTLMQKVEVFGYALDNTTGQDLYRVLWLKSKSSEAWLDRRTNYTRSLGVMSMVGYILGLGDRHPSNLMLDRITGKIIHIDFGDCFEVAMKREKYPERVPFRLTRMLTYAMEVSNIEGSFRTTCEHVMRVLRENKESVMAVLEAFIHDPLLNWRLTNPTSPPGPNFNAEREVAMPGGPGPRARRPSILDAPVAPTEFLAAQAAPGADGHGMGMSANPGRSRARTNSSAIYPTGSSMVNGHGNNQQEQQEVQNARALEVLDRVQQKLTGRDFKPHEELNVTDQVNKLIIEATKLENLCQHYIGWCSFW

SEQ ID NO: 13990 - protein, 1583 aa, Trypanosoma brucei
SVAAVQVIVGIFSLEVLSPGCLVSFYGEVISSIQKQARVQVRKREEILVHLISLVRILKGHLRPHLKEITSTVDSFISVTDLSVLRQVLALLKELCCSLRRRFRPYMSSLLGPIIVLVEENVEETSEIVLDFFSAMGSLLEDHLHTVLPVVCNIIVDTSVPSRCRIVAVKTLICFTKRLPDLCFHASRCVHCLCRVLRESDGGDGVGDEGRLGCSAMEALCTLAGSLGKNFENFVLVVLPAVADRYGETSGEYCRFCHDIYEAIDGKRAPEVSSNGVGKAGGGGAPSLPFTAGTSASPLKDRADAYASLRFHLRKRDQASDEDWNHWLPQLAVNLLRSSSSPSHGRALTLAELHEPFARQMLHSAFAACYADMDEHTQREVIGLLTEVLRGLRVPSEVMQELLNLSEHMERQGIRLSAGGKASIKHSSNFCPFDRQVLMESSANCNLYSKALHYAEIEFLETVREYERSILRGCPKPLPVEDWQNLIKLCEKSIYFCNLLGQRESANGILKFIRQNLPLLTGKKVTELSQMMDAHLFDKLRWWSQSLQAYERRLQQEPNKVSNMVGLLRALDALGEYPRVLEMWRQFSKRVSKREVSKLASMGAHAAWLLRRWDDMEHITSFMSDEDYTGTTALFYKATLAARKKRFREAEKLIDMCRKRVDSKLSALVAESYDRAYDLFVGIQQLSELEELAMATSDPQSAMHWRQLWERRLSVMAYEGWPGTLANHTLLVPPSSEIDMWLRFVSLSRAHGQGSVSTEVLRELLGNQSIESAIENGIPTPAVAMGSFQHLYETNQRDSAIARLQLYVSKVEGSGAQHVSREREDMAVCHAKLAEWLVHQKKAHRTEDELQKIFHHLRRATELDKSNGSIWRTLARVHREAATKPADGSDSSGASGHIMEALSAYLRSVSLSEELEDALGFLSLWFMYGPLLAVQVGSTLKEEIEEVNPTVWLKVIPQIIARISSSNGTVADSVYNLLVLVARRHPQAILYSLNVAHSSYQGKGTADGVEPLKGSHRVLARIAEIHQNGKAMVEDSALVCRELVRCAVLWPELWFNELGRALYQWERQRSAENLLLAMGPLLEQLKRPETMAEAQFAAELRQPLENACCHVERAVSSRHEQFMEEARRIFVSIERRIREQISGMSSLALQLVSPKLHQNGRNLSLVVPGQYREDGNYPLIASFQNVLKVLNSKQRPRRIYINGSNGEIYKFLLKGHEDLRLDERVMQLLGFVNTILEKHSVPKRHDCLIQTYSVTPLSDNAGLVGWVDHCDTLNKIIEDYRVNPRCIRMELDLMRSMCDNLYYLTAIQRVEPFEFPLERTEGVDLVRSFWVKAPSAETWLERRTTYVCSLATMSMVGHILGLGDRHPSNLMIHAFSGRVVHIDFGDCFEVAQQRSIHPEKVPFRLTRMLVKAMEMGGIEGLFRHGCHTVMNVLREEGGSLLALLEAFVHDPLVSWWRDEAEGFSGNGQAASSVQTISVIGSMTNVAEEGSVGSLQLSQLSVQRRATTQQRVNANIEKDTSQTRKPKSVVKRIKRKLRGLEFPQSQEGKSSDGFTVEEQVSRLIEEATSNENLCVHFLGWCPFW

SEQ ID NO: 13991 - protein, 2903 aa, Trypanosoma brucei
MPRYTAMRRLGPVGHSGGISSNGVTTVGAVTASNVGNGVVNIGGDGSQGVAMGPGATDVASARPLLIVPNTTSAAGGSADVSDEEVDQLLRELERSVDSPQAAAVMRDAVWAIERRAFSSCDPHSRDYFLESRVRIILMSLSTTSDVKQLLLAVDFIEALLAVPYTNLQHRFTRLCRSLMNILRCGIEEPAREAQRVLKRMLVTDSQFGAYHTPLRSFITKELRDNCKVALMRLYGRAQQANVSFTPDFLSTMLAAEATAEISPRFITGTLRQQVLELASMLAGFSDLLLRRAAYRCMVVLFKNTSAMRRKEVVLENRRIINEAIRSLNLSHNSESSIISTLETLRALLSSRGVHCMDKQVNTLPQLCVLVTEQHRISKTTAVRNAVCDLVPVIAETDISSAARRTTYCAIIMEPVKNVRDDSNKDLELRNLAIFIQNVGYEVLDSTNRVNLDSIIQRYITRRGTEEECWHILAAICSSRARPETQRTHMCSKTSYIAMSSSSAMQKGCETIQGHQSGGEISLSAQELRSASAEAHSVCQLVAGESQNSCNSHELMQPVEALVRRCLPHMVHAVLSDEFVRYITIIQDHLPSLSSDLQTYLDQLVNRTLRNDKRKYCGGEVEDGALVAQVFAGDRLSTELGNSQPQEDIIQSSTLAYVTAMGRLAQYLLPTTLPEGGAINWQQSQGATSTTATDGNGQGYSLGSVETFCKSVVAGQPQLVSPESTLSSAAGATTAEVCSGAAPDSVGASELKIALEVFSKRQITSSDQLREVSDIIIQYQRHPDKRVRQQCCTTVIEALKCWARYSQSDRTSAYSSLVPDLLEVYLKNVAMELDPKVRLVEVTLLADAVELRMFLREKRIIDTLISFLHDISHVREKTMELLVTLAQDNHTGPSVETVQYSLLIVVESSVAALEYSSDPRILIRHMSDLQTVAKFSLRPLMGHLDRTFVACRRRLVEEVVPDTIALSTLKTLRTILEAIKREEAVLLKYKDVALELYAPVAVALRASTASPLSHAAIGVLVCMHEIGASPLNWDARQLHELLQSVTAVYIEAANSTEEELGRALTLFGQIGAVDPATKPDTAAMKKKDDEAAIQDEADLELTYDYTKIVYRNLSRMLDLSLSESVCVQSMCTLLHLVRLTTDRKELIGGMHAIKAILQIARRANDAPLLRIEALHILAAITSLRHEKVCKTLLPELVTLFEQLWYPQDHALFRAVLNLVSALKPGNLTGKEQSEVWPWLYPRLVDVALQDHTETREFCLRVVGIIQHAKYIPPHCIPIVFPMLTQFVQQMDQLAELRSLSLCAAIRIVCNLQAVQHLPSLMHTICTLTRHCDLTENLGPRLSTPTLHRSLRLLSNTHPNGEADVNALCERLCATGSEGSADAGGCFTNEGGETLPTSTQPNSSFHCGNGDYASAPYLGQYTQKCQQQQQGGTYLDPNDDEAYDTLPQGQQDITAFMKHVEFGLRAKDNKWREWFAEFQKNMIVASPHPVFRIMVDLFDKHEPLRRKLFHPSFKCFYESLNAEHMKKVKDVLNLALRSSDTEVVSKCIGLADYLDHNPPNISESVLQQLRHLEGNEPMDVGKFTKHSNLHVGNVIAGSRSPTPACRHEPGGYYASHHGQLYRNISDNYNFESVLHSLNSPKTEGPVFNEGVRPPSHKVQDVGNGEHEVTDNGGTDSGCGVERNGKEGRSESESGDVNGSARRQTMLPVAKSIEGDTNEGLSFLAGPVARRITVSAHHTTNVNASDGTCPNTGDAEVHIRATAIPSTVNPLFTNDSLVEAALRTRMPDKAMSYLENKLLPVMQKYRYAHSVPKEAVQAVVLPLASLYSRLEMQDSVVGLFHAMRYKSDNEDGFAYELLQWWDVAQGVYATKVHDCCGSSARDIDGYVRMLCLCGEWERALQVVKDTYKSLDQPSSTIAQSGAMAAWILGKWDDVKMLIERLPNKEKGNITLRHFFQNATLFHQEFGCRAQWDCGVQDGQRRLETSPQVEALRASIMRAKMEVDESLKTLLPLSYAHAYENLTMLQHFTEMEEHIAYMESRTEEFRGQLRERWNRRFAALKPDSLMPNLRSLMLHSLVLNASEMSVMVVNFCERTGTNYPQLSKWAMEWLKQGKFPRANHLSQSCHVLPATPVSLEPCVAITYIGQVWSGGQRQKAVQLMENFLEETHSTLEEQQPAAYGVAQLRLGMWKQEMFADSFWKVEHRQEVLRHFHEAVRAVPGSCEAWHSWGLMNYRVQQRDCSLSRYEQRLFVEAAHQGFVAAICRSASPSTALPGVMRLLQLWVFHNGMSLLKESVADSVARIPTDYWVQAIPQLIGHLRSASHDVRDVVSMILQRLCVAHSQAVVFPLLVVLMSADGGGGETHSRRKELARSIINNLPKRIRAEAELVATLLINASATPIERIGESLSAVATAWNPNAEYEEDKEEVRRKLRYVLDVFNTNRRQLLYNVGDIGQYVRIVMEEDACGRREKASGILTQLVEEITKHISEKLGKEPQKAMEPLLNLRNLSIAVFGEYDIQYTNFPTIASFSSKLDVIPSKKRPRRIRLSGSNGCMYTYCLKGNEDIRMDERVMQLFGMVNVLLSDAKTAKSAFIHRFPVIPISDNVGLLGWVEHANTINNTICTHRNTISKVRTHHESNTLRAYVETIGSWEKLSMIRRTEILDYVMSQKDCEAVDVARAMWHRSNTAEQWLERRTAFTQSLATMSMVGYVLGLGDRHLGNILLSMSTGKIVHIDFGDSFDVGRLRHVLPETVPFRLTRMLTNAMEVFGVDGVFRASCNRTQSTLHKNADSIMALLTAFVHDPIVQHKGKMRNMMEKSRTPQNIVERIRNKLRGTEMAVRNADTVIFNTVLESSRRPDLLYMSHAFNDVAKRTVVNGRTTEEQVSMLIDEATRLENYAALYFGWGPLW

SEQ ID NO: 13992 - protein, 1935 aa, Encephalitozoon cuniculi
MSCIPRRMAFPSSDISCFTKSLHTTSADVTRTTFLISSPDCTRPKSKDETISEVNLLMSSEARSLLIDSTSSGPIFFNLFIIESFFLSGEFLFFATRKMPKVLSSSSQFMQGNVSSKGFYCGQEGPKPLDMNRDYLKNLYLQRLESERYSDVFRESMSSLVSTEIINAVISLAVQDDDETMLVDLLELFLQNLESNVVFHEKLTKSSFHLLLFKRPLGIQSYTKLKSIYDRVGSRRVVPGFEHTEFLSKNFYNYCLYKHAYKDYQFDLELDAGSLGPVETNLFKDLLKAVCIENRENEHLANYIKTLPMDVSVFLAIVMPDFRIDASRLGPEDVFLVCPSQVRGYDPKQFTKAFLCSLNSEGGLCRVCGRRVLGCGFEEIDREEYLDSVSGNIEEMCFGVSHWEKIRTPRMLTTILRSLFKRPGCLECYKCLRYFPIEEQGEMEDIVLRFLRYAASILSIGNIQVSLRMFPFIRHTPRVVFSYFVILFEGFLKYSGNLFLKNVIRNVSTRNKAKFMGVRAMIFEYYLKGSIESASSTEENTKNEGGSGAVENPGRKRADDLGDLFAPLSEFFDEERKAFVRNNMFYIYPIMYSLSFPYYTPDLAFTQANNHFLIISLFLRGEESRIDEIGYGKDELYRMGVDVMIPLLCNGYFKYDVLSRFFGNVQEYIRAHLPKFLFALKKVYVERPFEFRVCVFKILKCIIEAISGNVRMLFNYLFPFVEFFMRSHEESCGTDCKMIFIEYYSSFFKNDCLVRNMSRIFPYLDAEKIARWSNVKSEDDYLDIVIGLLDTRGHFSQEMAAKKAVELLARVFGDPGKGKGFDEESFVENVLRRFFKSREFRMKIGNVYGKLKELGNDAAFLIGCISQEFLDANPLPSVCSVLIEECTPEAIARVMVEKYLFEMDPGKQDLHFFIIQETLRFIKGPLSDRMEEVVEQFRSTQYFYEYVPVHPVEGVYEKTYTFKRFLGRLYRYSLNEIAKSEMQEYFSLLKYGNLLDTLFLEFHCLCLCRLLLEAGDHKVLGMVREIANNLQEGVDKRIARFVLKLHGFTSGKHIEDQQILRISFFLKDHHNAIQTLEKMIRKERKSELFDLLQYCYYSIKDYDKVLGINSVFARPSLINLFFRFCVDKNFAAARRCLEPKPGHDGVKEESGEDHKGQAPRELDVKILMEEIIDECQDDEVTKFMNDCKKIEGDFSEWKRLESRNEVFKHFIKDCELVSKSKNLLKTLDLIAGRRELAGDNRMLLECHESLVASIRSMMDARDDMSCDEMFESLLTAEKQDTIGNSSQGLHSREYFDDFASVDMVRAERRSERIGYMDRSKSGSTSGYSSLEEFERDLKLAIIRNYRGDDDVGRCIQEIGGMLLKREWCVLYELAELNVLQGKIGDAKTSLKKVLEIFPKTSMLYKKALIRYSELLDTKTAYTSALSILKDSGKLFLLGAKKFESTEPVKAMEMYINSVIHDNQCSDEAVPRIFHLFSEMMPPGDINAGAVLLKKFLESSISLLPPYYNQILSRLSHPNQDVANVVSRIVFELMENYPSKTFWRSLIMMNSQVPSTRKRMEGIVSGLTLDNKVALSNVKRISEELTCISRSKKNELTMEEDFPAFAKMFPAGVTVPNTKVLISGVRNEVKVFNSLQRPKRICFVGSDGKNYYWLCKNQDDLRKDSRFMDLNLIINSILKKQSSRKYIRTYAVIPFSHESGIIEWIGGLSSLKAICDTYYARDGISISETACRFVHNKKIGMREWHRVASKFHPKFHLWFHDSFPHPFSWLVARNNYTQTYAIMNIVGWFMGLGDRHAENILFDSNTGDTVHVDLNCIFGKGKELQVPERVPYRLTQNIVDAFGVLGLEGSYNTSLCTTLDLFLKNKNILVSNLLSFVYDPLFEWRRKSATTPKKIIEDLWHKMDDLDACSKCDVLNEEATNDENLCMMYIGWLPFI

SEQ ID NO: 13993 - protein, 2692 aa, Caenorhabditis elegans
MLQQHGISFQMNADRQNKAATTSNRIVSAPATNEFDERHRKQGIDAARALASQYRSRITENRDANQRQAARELSRYVRSELKDEPNTFSDAFLNAIDGRTDIASQSAIYNCMKSNSNIDQKRAGIYLIVCLAETHSGNVIRYANYLLKMLNNGNGLDEDTVKMASKALAFLIATCKSYAAELVDRCLDHCHEWLGQNVPHSQQPKNQQEIDQIRRLAASHLSRELALATPTAFFLRVNLFFKYIFNAVRDKNPAVRIAGIDALHVVLTIVSQREAKNKTEWFKKCFDEALEGQPNPSQKDDLDRWHAVALILNELLRISDQRFELIRCESSQFIKQKFLKEDEEEGVEWLVLTKQQTIVESVTARKLVLERFPKILDCVRQIIPLANKTSSTKQQSSIYLNTVLMQLLPRICAFPQCDRTFQTISFDTSFTILQRNAVAAPAIGMMMLSNPDVHATHIEKTISFISAAIKKTTNSDVLDNYFTFLFLFVDAYHEQVTTQIKAIIPQLMDITLSRSLANVLKMIMMRIPKLRLNVQDGVMASVYQTLTGSLIPPKSEPIGRPASPKAILQKAETDPKELQRIVLAVDVLGEFYFSRGALQRIMQYVADYYLTADNVEIRLAAVSSCCEMVVPFVGVYKKVTSDKRNSLLQTIYGVLRAVCSVIVNDQDVRVRMQVISCFGQMPRPFLAHLAQPEMLEVQFMALHDEKLEMQQACVTLLGRLAELNPALVLPRLRLMLLETLSQMQQSGQARLEQHSAKMIAQLAKQSPKFMRPYVGSLMIAMIPKLRNDQKYAEVTAQVLNAVSEIAVIGGAEIVKNLKPLFEKLTHMINDSSSLHKREAALRAIGGICRSTAYVVDPYRDYPSLLDDLLRILKTVMSNTMRREAIKTLGILGAIDPYTHKVFTGSVQSSTAISTALSLPISETDSKDPRQDIIHWFNYEKCTLEEFYPAITIANLMLMMQDEDSQSYAEIAQAIVTIFRSLGDMAPLYTEQVIPRLIEVCRRATESSNRANLREFFLQQLANFVAIIRKHAAPYMPAIFTIIADAWKEDISVKMVVIEVLTDMGTAIGNDFSKYTGELIPYLLTVLQTDKTKERVLTVKVMESIQKLTHCIVQHLHLVLPPLLIILDDFSLKLSIRNTALSTVLHMTQQVDVSAYAPRMMQSWHHNISTAEMRDKLLLLLIEIIKQLGKFFDIFKRGVDQKLRDYNLDKSVHYEQYRKLAQRAQMSRDVLTSSVFAGSNGNIQYSSTQAGMRGQANNVYANNDLHERLMNGSIDSGASRQDNRDDYYRYGVEEKISEEVPKVAPTTARPTSELVTVQITKQRLNKDALMPQWKNENLTSKDEWLQWLMKIRIGFLTYGSSPSLRAASSLGDQHPHLARDLFPAAFMSVWTELDSDVQNDLTSCLLRAISTGIPELIQTILNLAEFMDHSEKGPLPISHDVLGRWAEQTKAFAKACRYKEMSVLKKSGSMQTTFTRKVKLEPNDCQSLITYANKLNVQEEAAGVVRYAERNEMNFQMRGRWYEKLNEWEKALGAYELEEKKKSSCPNLQVYDEKDHLMTPEEAATAEEARMHEMRCLEALGRWDELNSKSVVWADQRGNRNDSVRDEINKKQLDHKMAVIAARGAWAVDNWERMADYVSVISENTQDGAMLRAVVAVHNDENTKAMGLIEKVREMIDSELTAMANESYERAYIPMVSVQQMAELEEAIEYKTRPERRPRIALLWSRRLQGCRRNVEQWQRLIMLRGLVLSPQEMHPLRVKFSSMCRKQGKNSMSRAVLRELLSLPANSDLVRAKAPFDKPLLVLALAKQLYQDDHKDEAIRALEDLANHWNKRINPIPKATGRELIPPSTKEPARICAKVLLKLGEWTELKSKTSNNMQVGELSFVRQQVSPQYRTKESRTPETIAFENTINYYQQATQYDPGWHKVWHKLASTHFYAVCRERPHPTTVISPPQQPQQPKKMHIPPVTRATSPPPPAQKSPQPAPFHSITEPLSDYPVPPPLGSLVGLPPMPAYLSSNSSLPPQHHHVSPLSNDSPSNSAENKLYLKHAAHAVRCFAKALMCSPGSRLEDTLRLMQLWFDHGDDKDQDVYFALTETIFDLPVTTWLEAIPQLMARLDCPDDQKSVQLVLRVLCEIARHRPQAVIYALTVASRSKDVHRSKNAGTVLEKMMEYHSKLVREASLVTEELVRCAILWHEQWHDALDDASRVYFHDNNVQAMFDALRNMNDLMQKGAPTTMKEHSFQQTYSSDLKEAGRYVQAFESSGNVKDLNQAWEIYCSVFKKLRDQLATLNSLDLVYVSPNLVSAKDLELVVPGTYDPSAPIVSIQSFSSKMNVITSKQRPRKMVIRGSNGLDYQFLLKGHEDPRQDERVMQLFGLVNTLLANNSETCRRNLTIQRYSIVALSKDSGLIGWVPNCDTLHTLVKEYREKKAKIPLSIEHKTLQKLSLETEHLTLMQKLQLFESALSVTQGEDLRHVLWLKSPSSEVWFDRRTNYTRSVACMSMVGYILGLGDRHPSNLMLDRLTGKVVHIDFGDCFEVAMLREKFPERVPFRLTRMLINAMEVTGLDGVYNYTAERVLKMLRTNQESLLAVLEAFVYDPVINWRLVEGMKKDPKTRKDTGGRQNMAGAVLPSSSTTDSIMETIKRKLDGTEFVHTDGSTPPEPLQVTEQLAMLTEQATSPLNLCQSYIGWCPFW

SEQ ID NO: 13994 - protein, 2695 aa, Caenorhabditis elegans
MLQQHGISFQMNADRQNKAATTSNRIVSAPATNEFDERHRKQGIDAARALASQYRSRITENRDANQRQAARELSRYVRSELKDEPNTFSDAFLNAIDGRTDIASQSAIYNCMKSNSNIDQKRAGIYLIVCLAETHSGNVIRYANYLLKMLNNGNGLDEDTVKMASKALAFLIATCKSYAAELVDRCLDHCHEWLGQNVPHSQQPKNQQEIDQIRRLAASHLSRELALATPTAFFLRVNLFFKYIFNAVRDKNPAVRIAGIDALHVVLTIVSQREAKNKTEWFKKCFDEALEGQPNPSQKDDLDRWHAVALILNELLRISDQRFELIRCESSQFIKQKFLKEDEEEGVEWLVLTKQQTIVESVTARKLVLERFPKILDCVRQIIPLANKTSSTKQQSSIYLNTVLMQLLPRICAFPQCDRTFQTISFDTSFTILQRNAVAAPAIGMMMLSNPDVHATHIEKTISFISAAIKKTTNSDVLDNYFTFLFLFVDAYHEQVTTQIKAIIPQLMDITLSRSLANVLKMIMMRIPKLRLNVQDGVMASVYQTLTGSLIPPKSEPIGRPASPKAILQKAETDPKELQRIVLAVDVLGEFYFSRGALQRIMQYVADYYLTADNVEIRLAAVSSCCEMVVPFVGVYKKVTSDKRNSLLQTIYGVLRAVCSVIVNDQDVRVRMQVISCFGQMPRPFLAHLAQPEMLEVQFMALHDEKLEMQQACVTLLGRLAELNPALVLPRLRLMLLETLSQMQQSGQARLEQHSAKMIAQLAKQSPKFMRPYVGSLMIAMIPKLRNDQKYAEVTAQVLNAVSEIAVIGGAEIVKNLKPLFEKLTHMINDSSSLHKREAALRAIGGICRSTAYVVDPYRDYPSLLDDLLRILKTVMSNTMRREAIKTLGILGAIDPYTHKVFTGSVQSSTAISTALSLPISETDSKDPRQDIIHWFNYEKCTLEEFYPAITIANLMLMMQDEDSQSYAEIAQAIVTIFRSLGDMAPLYTEQVIPRLIEVCRRATESSNRANLREFFLQQLANFVAIIRKHAAPYMPAIFTIIADAWKEDISVKMVVIEVLTDMGTAIGNDFSKYTGELIPYLLTVLQTDKTKERVLTVKVMESIQKLTHCIVQHLHLVLPPLLIILDDFSLKLSIRNTALSTVLHMTQQVDVSAYAPRMMQSWHHNISTAEMRDKLLLLLIEIIKQLGKFFDIFKRGVDQKLRDYNLDKSVHYEQYRKLAQRAQMSRDVLTSSVFAGSNGNIQYSSTQAGMRGQANNVYANNDLHERLMNGSIDSGASRQDNRDDYYRYGVEEKISEEVPKVAPTTARPTSELVTVQITKQRLNKDALMPQWKNENLTSKDEWLQWLMKIRIGFLTYGSSPSLRAASSLGDQHPHLARDLFPAAFMSVWTELDSDVQNDLTSCLLRAISTGIPELIQTILNLAEFMDHSEKGPLPISHDVLGRWAEQTKAFAKACRYKEMSVLKKSGSMQTTFTRKVKLEPNDCQSLITYANKLNVQEEAAGVVRYAERNEMNFQMRGRWYEKLNEWEKALGAYELEEKKKSSCPNLQVYDEKDHLMTPEEAATAEEARMHEMRCLEALGRWDELNSKSVVWADQRGNRNDSVRDEINKKQLDHKMAVIAARGAWAVDNWERMADYVSVISENTQDGAMLRAVVAVHNDENTKAMGLIEKVREMIDSELTAMANESYERAYIPMVSVQQMAELEEAIEYKTRPERRPRIALLWSRRLQGCRRNVEQWQRLIMLRGLVLSPQEMHPLRVKFSSMCRKQGKNSMSRAVLRELLSLPANSDLVRAKAPFDKPLLVLALAKQLYQDDHKDEAIRALEDLANHWNKRINPIPKATGRELIPPSTKEPARICAKVLLKLGEWTELKSKTSNNMQVGELSFVRQQVSPQYRTKESRTPETIAFENTINYYQQATQYDPGWHKVWHKLASTHFYAVCRERPHPTTVISPPQQPQQPKKMHIPPVTRATSPPPPAQKSPQPAPFHSITEPLSVIIDYPVPPPLGSLVGLPPMPAYLSSNSSLPPQHHHVSPLSNDSPSNSAENKLYLKHAAHAVRCFAKALMCSPGSRLEDTLRLMQLWFDHGDDKDQDVYFALTETIFDLPVTTWLEAIPQLMARLDCPDDQKSVQLVLRVLCEIARHRPQAVIYALTVASRSKDVHRSKNAGTVLEKMMEYHSKLVREASLVTEELVRCAILWHEQWHDALDDASRVYFHDNNVQAMFDALRNMNDLMQKGAPTTMKEHSFQQTYSSDLKEAGRYVQAFESSGNVKDLNQAWEIYCSVFKKLRDQLATLNSLDLVYVSPNLVSAKDLELVVPGTYDPSAPIVSIQSFSSKMNVITSKQRPRKMVIRGSNGLDYQFLLKGHEDPRQDERVMQLFGLVNTLLANNSETCRRNLTIQRYSIVALSKDSGLIGWVPNCDTLHTLVKEYREKKAKIPLSIEHKTLQKLSLETEHLTLMQKLQLFESALSVTQGEDLRHVLWLKSPSSEVWFDRRTNYTRSVACMSMVGYILGLGDRHPSNLMLDRLTGKVVHIDFGDCFEVAMLREKFPERVPFRLTRMLINAMEVTGLDGVYNYTAERVLKMLRTNQESLLAVLEAFVYDPVINWRLVEGMKKDPKTRKDTGGRQNMAGAVLPSSSTTDSIMETIKRKLDGTEFVHTDGSTPPEPLQVTEQLAMLTEQATSPLNLCQSYIGWCPFW

SEQ ID NO: 13995 - protein, 2697 aa, Caenorhabditis elegans
MLQQHGISFQMNADRQNKAATTSNRIVSAPATNEFDERHRKQGIDAARALASQYRSRITENRDANQRQAARELSRYVRSELKDEPNTFSDAFLNAIDGRTDIASQSAIYNCMKSNSNIDQKRAGIYLIVCLAETHSGNVIRYANYLLKMLNNGNGLDEDTVKMASKALAFLIATCKSYAAELVDRCLDHCHEWLGQNVPHSQQPKNQQEIDQIRRLAASHLSRELALATPTAFFLRVNLFFKYIFNAVRDKNPAVRIAGIDALHVVLTIVSQREAKNKTEWFKKCFDEALEGQPNPSQKDDLDRWHAVALILNELLRISDQRFELIRCESSQFIKQKFLKEDEEEGVEWLVLTKQQTIVESVTARKLVLERFPKILDCVRQIIPLANKTSSTKQQSSIYLNTVLMQLLPRICAFPQCDRTFQTISFDTSFTILQRNAVAAPAIGMMMLSNPDVHATHIEKTISFISAAIKKTTNSDVLDNYFTFLFLFVDAYHEQVTTQIKAIIPQLMDITLSRSLANVLKMIMMRIPKLRLNVQDGVMASVYQTLTGSLIPPKSEPIGRPASPKAILQKAETDPKELQRIVLAVDVLGEFYFSRGALQRIMQYVADYYLTADNVEIRLAAVSSCCEMVVPFVGVYKKVTSDKRNSLLQTIYGVLRAVCSVIVNDQDVRVRMQVISCFGQMPRPFLAHLAQPEMLEVQFMALHDEKLEMQQACVTLLGRLAELNPALVLPRLRLMLLETLSQMQQSGQARLEQHSAKMIAQLAKQSPKFMRPYVGSLMIAMIPKLRNDQKYAEVTAQVLNAVSEIAVIGGAEIVKNLKPLFEKLTHMINDSSSLHKREAALRAIGGICRSTAYVVDPYRDYPSLLDDLLRILKTVMSNTMRREAIKTLGILGAIDPYTHKVFTGSVQSSTAISTALSLPISETDSKDPRQDIIHWFNYEKCTLEEFYPAITIANLMLMMQDEDSQSYAEIAQAIVTIFRSLGDMAPLYTEQVIPRLIEVCRRATESSNRANLREFFLQQLANFVAIIRKHAAPYMPAIFTIIADAWKEDISVKMVVIEVLTDMGTAIGNDFSKYTGELIPYLLTVLQTDKTKERVLTVKVMESIQKLTHCIVQHLHLVLPPLLIILDDFSLKLSIRNTALSTVLHMTQQVDVSAYAPRMMQSWHHNISTAEMRDKLLLLLIEIIKQLGKFFDIFKRGVDQKLRDYNLDKSVHYEQYRKLAQRAQMSRDVLTSSVFAGSNGNIQYSSTQAGMRGQANNVYANNDLHERLMNGSIDSGASRQDNRDDYYRYGVEEKKEVPKVAPTTARPTSELVTVQITKQRLNKDALMPQWKNENLTSKDEWLQWLMKIRIGFLTYGSSPSLRAASSLGDQHPHLARDLFPAAFMSVWTELDSDVQNDLTSCLLRAISTGIPELIQTILNLAEFMDHSEKGPLPISHDVLGRWAEQTKAFAKACRYKEMSVLKKSGSMQTTFTRKVKLEPNDCQSLITYANKLNVQEEAAGVVRYAERNEMNFQMRGRWYEKLNEWEKALGAYELEEKKKSSCPNLQVYDEKDHLMTPEEAATAEEARMHEMRCLEALGRWDELNSKSVVWADQRGNRNDSVRDEINKKQLDHKMAVIAARGAWAVDNWERMADYVSVISENTQDGAMLRAVVAVHNDENTKAMGLIEKVREMIDSELTAMANESYERAYIPMVSVQQMAELEEAIEYKTRPERRPRIALLWSRRLQGCRRNVEQWQRLIMLRGLVLSPQEMHPLRVKFSSMCRKQGKNSMSRAVLRELLSLPANSDLVRAKAPFDKPLLVLALAKQLYQDDHKDEAIRALEDLANHWNKRINPIPKATGRELIPPSTKEPARICAKVLLKLGEWTELKSKTSNNMQVGELSFVRQQVSPQYRTKESRTPETIAFENTINYYQQATQYDPGWHKVWHKLASTHFYAVCRERPHPTTVISPPQQPQQPKKMHIPPVTRATSPPPPAQKSPQPAPFHSITEPLSVIIDYPVPPPLGSLVGLPPMPAYLSSNSSLPPQHHHVSPLSNDSPSNSAENKLYLKHAAHAVRCFAKALMCSPGSRLEDTLRLMQLWFDHGDDKDQDVYFALTETIFDLPVTTWLEAIPQLMARLDCPDDQKSVQLVLRVLCEIARHRPQAVIYALTVASRSKDVHRSKNAGTVLEKMMEYHSKLVREASLVTEELVRCAILWHEQWHDALDDASRVYFHRRLQDNNVQAMFDALRNMNDLMQKGAPTTMKEHSFQQTYSSDLKEAGRYVQAFESSGNVKDLNQAWEIYCSVFKKLRDQLATLNSLDLVYVSPNLVSAKDLELVVPGTYDPSAPIVSIQSFSSKMNVITSKQRPRKMVIRGSNGLDYQFLLKGHEDPRQDERVMQLFGLVNTLLANNSETCRRNLTIQRYSIVALSKDSGLIGWVPNCDTLHTLVKEYREKKAKIPLSIEHKTLQKLSLETEHLTLMQKLQLFESALSVTQGEDLRHVLWLKSPSSEVWFDRRTNYTRSVACMSMVGYILGLGDRHPSNLMLDRLTGKVVHIDFGDCFEVAMLREKFPERVPFRLTRMLINAMEVTGLDGVYNYTAERVLKMLRTNQESLLAVLEAFVYDPVINWRLVEGMKKDPKTRKDTGGRQNMAGAVLPSSSTTDSIMETIKRKLDGTEFVHTDGSTPPEPLQVTEQLAMLTEQATSPLNLCQSYIGWCPFW

SEQ ID NO: 13996 - protein, 687 aa, Caenorhabditis elegans
MPAYLSSNSSLPPQHHHVSPLSNDSPSNSAENKLYLKHAAHAVRCFAKALMCSPGSRLEDTLRLMQLWFDHGDDKDQDVYFALTETIFDLPVTTWLEAIPQLMARLDCPDDQKSVQLVLRVLCEIARHRPQAVIYALTVASRSKDVHRSKNAGTVLEKMMEYHSKLVREASLVTEELVRCAILWHEQWHDALDDASRVYFHRRLQDNNVQAMFDALRNMNDLMQKGAPTTMKEHSFQQTYSSDLKEAGRYVQAFESSGNVKDLNQAWEIYCSVFKKLRDQLATLNSLDLVYVSPNLVSAKDLELVVPGTYDPSAPIVSIQSFSSKMNVITSKQRPRKMVIRGSNGLDYQFLLKGHEDPRQDERVMQLFGLVNTLLANNSETCRRNLTIQRYSIVALSKDSGLIGWVPNCDTLHTLVKEYREKKAKIPLSIEHKTLQKLSLETEHLTLMQKLQLFESALSVTQGEDLRHVLWLKSPSSEVWFDRRTNYTRSVACMSMVGYILGLGDRHPSNLMLDRLTGKVVHIDFGDCFEVAMLREKFPERVPFRLTRMLINAMEVTGLDGVYNYTAERVLKMLRTNQESLLAVLEAFVYDPVINWRLVEGMKKDPKTRKDTGGRQNMAGAVLPSSSTTDSIMETIKRKLDGTEFVHTDGSTPPEPLQVTEQLAMLTEQATSPLNLCQSYIGWCPFW

SEQ ID NO: 13997 - protein, 2322 aa, Caenorhabditis elegans
MITSRNNDIGNLIEQFRQRDTPQKERKAILARIEEILQTTKNVESLCVKWTYLLDNLCWPSLTKHDRNDMKTLAGKVIRLVGVLLFDTESYPEFLIYLGTLYQSVTKKSEETRADIVFSVYFIVGVISQKTENRLIATDTENVEKSLDWIIKVLPNSSISVYNHCLKGFVLVANTFPNVYAAMFESTLRAILTNLPDFNSHEKNFELLIDTVMRFSDQLNEKPHLAEEMVRIIRPDIKKNGLGNMRELKKRMKLTMALVKMAKSQKMLEETNQMISEMSIELEENGGKWSSASLITIVCDVFNELLILGKDDVKLQKGVEESLCNVLKDLNLSNQSTMEKQAFFNSLAKIVKQLPAESQVKTRVHQIVFNTETGLFTPKNRDNRMFGHNMIYKDLINLVSVLLTPTSLNHLQATYTDLRKIMIDSMSRLKQSEDTPYSDNIRWNESILLLFFSSLQSISCAKSSLIVMMGIRPSIFEFFSSELPLTEYWLASNHPEVYHLFITIFVGHLKAHDFYIVQSDYIVRGDSIGQSIGQTKRDYARKQVVALQKIINNFGDKLWKKTRLMISSWLHSLIATACEHQIGSDSFSQREWVRLRNTVIHQSVLTWNNECVNQALTILSTATKWSELTSDIHRDIADKTKKAKWKEATTIWESGDCNTYIRQSMSTVYQMSQERQQKTITSTSFGAEEFIIITNFLLKQATPTTFKKGQNSWMDEVLETFTQGCRTLEKPDSYVPETFIEKWDWIINQTANFCIVNKMKTPLGKPMQTFAAFENEIKRLAKEVIVRKNSDKKLNKSSTEDPNQSPPLKYSVQWLRVHLLLKLIVVLEKLMNSAIHGGSSVFNLTEIPVSSRQFFTVNAASCEVWLNRVYYPALLVAYFNGYYGLVIRFGSNALSHFARQKDGDNDKKIVNGVCTASLMSLSMAVLGEPMEIVGLRRKVREEFGTDMGQSLMEALGEMANARYETALVALEAVLVTDAATNETLKMIIQLAMVDILNRIRLPQATDYYKVVLFGEESNDSTITEDFRSVELLTKFEKLNNTVNEKRQVVDWSARERFQFVESAFSQTMRRTELLDIQKDFSAMGALALSADSSCKLYSDISSTSLIIANLVNKMTGVSQWKNKLTDTEIFDRNEEGNDGDKLAICRKLMHWGRHTKSNRGQSCAAHSEIIRLSRKTSNCELAFFHINSAIRGEKLAAWQRLEVERQRLKLVKTQNLDVRIREMNEVFGSLAEVFTTSCQLKSDFQMVDGMIKEKMISEGYNEDIAKREEHMSRASIQLADFFQSLPELENVLAPNLFPTIIWSELQRRSDSLSAGYHGIVGSLFHLASEMCPSLAKAHLKMARWAYEIAKIKNFPAENLSFYKFGKDETENEELLKSLEATSLVNLEKLVRAAISDDLRANNILAPNSHFMHIWKMVRDHRTKFLSIAVTSYFQFIQNMSGDCDNLPYSKKEETTLATLRILELLVKHGDVLIDVINDGLNKTNVHIWKEILPQLFARLSHPSEHIRKTLVDLISKICTAAPHAVVFQVVSGAASSSTDGEELEEQQNDDRNRVRACCEKLETNMSQSYPNLVKDVRQFVAELERINLLNEEKWSVVMGTMEHEMEKRLSLIRTENAKTESALHLTASVKNDIIVKRTQLLTRQIFDVLDELYQQTVIEPPKSKNEEEFVTAFAEVLTNAFQESRISRTTSPEKSWIPFKNLIANFVHRNSKKGMQTFETEDISPYLASLSNSCVPMPGQESVEFDRVVSISRVARQVTILPTKTRPKKLGFVGSDGKQVAFLFKGREDLHLDERVMQFLRLCNVMLQPGKGKHRQSVAAYQAHHYAVIPLGPRSGLIKWVEGATPMFHIYRKWQMKEKALKQATKKNGETVPEIERPSNMYHNMIRLAFADHKIDSSITSDRSKWPAEILEEVFESLTAKTPTDLISRELWMRANDATTWWSVTKRYSRSLAVMSMVGSVLGLGDRHLDNLLVDLKWGHVVHIDYNICFDKGKNLRIPETVPFRLTRNMRHALGPSEMYGTFRESCVHVLSTLRSGHQVLTMLLDAFVFDPLVDWTSHEHTATSGVSLALQLAVYGSNWKTKAKERLTDAMELLNLRMSEVQTLWLANRDDLLHWMKQVTECLLIENSMLGANAIYAQQRVKAGTELREAVTRHHALAKELRPLIRVIGKEREEFADYLKFYKQALFDPLLKGHSALRNELDIDTCVYNFNIVMQNIDNVFGALVNLSFTPIETITSRTSQQEFKPPPGLENVWVVKQDQQENSQAREVVRRVERRLNGWLDGSAGPDRKLSPREEADILIAEATSTPNLSQMYEGWTAWV

SEQ ID NO: 13998 - protein, 1663 aa, Caenorhabditis elegans
MSTVYQMSQERQQKTITSTSFGAEEFIIITNFLLKQATPTTFKKGQNSWMDEVLETFTQGCRTLEKPDSYVPETFIEKWDWIINQTANFCIVNKMKTPLGKPMQTFAAFENEIKRLAKEVIVRKNSDKKLNKSSTEDPNQSPPLKYSVQWLRVHLLLKLIVVLEKLMNSAIHGGSSVFNLTEIPVSSRQFFTVNAASCEVWLNRVYYPALLVAYFNGYYGLVIRFGSNALSHFARQKDGDNDKKIVNGVCTASLMSLSMAVLGEPMEIVGLRRKVREEFGTDMGQSLMEALGEMANARYETALVALEAVLVTDAATNETLKMIIQLAMVDILNRIRLPQATDYYKVVLFGEESNDSTITEDFRSVELLTKFEKLNNTVNEKRQVVDWSARERFQFVESAFSQTMRRRVSRVTELLDIQKDFSAMGALALSADSSCKLYSDISSTSLIIANLVNKMTGVSQWKNKLTDTEIFDRNEEGNDGDKLAICRKLMHWGRHTKSNRGQSCAAHSEIIRLSRKTSNCELAFFHINSAIRGEKLAAWQRLEVERQRLKLVKTQNLDVRIREMNEVFGSLAEVFTTSCQLKSDFQMVDGMIKEKMISEGYNEDIAKREEHMSRASIQLADFFQSLPELENVLAPNLFPTIIWSELQRRSDSLSAGYHGIVGSLFHLASEMCPSLAKAHLKMARWAYEIAKIKNFPAENLSFYKFGKDETENEELLKSLEATSLVNLEKLVRAAISDDLRANNILAPNSHFMHIWKMVRDHRTKFLSIAVTSYFQFIQNMSGDCDNLPYSKKEETTLATLRILELLVKHGDVLIDVINDGLNKTNVHIWKEILPQLFARLSHPSEHIRKTLVDLISKICTAAPHAVVFQVVSGAASSSTDGEELEEQQNDDRNRVRACCEKLETNMSQSYPNLVKDVRQFVAELERINLLNEEKWSVVMGTMEHEMEKRLSLIRTENAKTESALHLTASVKNDIIVKRTQLLTRQIFDVLDELYQQTVIEPPKSKNEEEFVTAFAEVLTNAFQESRISRTTSPEKSWIPFKNLIANFVHRNSKKGMQTFETEDISPYLASLSNSCVPMPGQESVEFDRVVSISRVARQVTILPTKTRPKKLGFVGSDGKQVAFLFKGREDLHLDERVMQFLRLCNVMLQPGKGKHRQSVAAYQAHHYAVIPLGPRSGLIKWVEGATPMFHIYRKWQMKEKALKQATKKNGETVPEIERPSNMYHNMIRLAFADHKIDSSITSDRSKWPAEILEEVFESLTAKTPTDLISRELWMRANDATTWWSVTKRYSRSLAVMSMVGSVLGLGDRHLDNLLVDLKWGHVVHIDYNICFDKGKNLRIPETVPFRLTRNMRHALGPSEMYGTFRESCVHVLSTLRSGHQVLTMLLDAFVFDPLVDWTSHEHTATSGVSLALQLAVYGSNWKTKAKERLTDAMELLNLRMSEVQTLWLANRDDLLHWMKQVTECLLIENSMLGANAIYAQQRVKAGTELREAVTRHHALAKELRPLIRVIGKEREEFADYLKFYKQALFDPLLKGHSALRNELDIDTCVYNFNIVMQNIDNVFGALVNLSFTPIETITSRTSQQEFKPPPGLENVWVVKQDQQENSQAREVVRRVERRLNGWLDGSAGPDRKLSPREEADILIAEATSTPNLSQMYEGWTAWV

SEQ ID NO: 13999 - protein, 2470 aa, Drosophila melanogaster
MSTTSVVQQFVNGLKSRNRNVQNKATQDLLFYVKTELREMSQEELAQFFDEFDHHIFTMVNATDINEKKGGALAMKCLINCEGSLTARKGISPYLNRLRDLLLINDVSVMEIAARSLVKLANMPTSKGADSFDFDIKKAFEVLRGERQEYRRHSAVFILRELAIALPTYFYQHILTFFEVIFNAIFDPKPAIRESAGEALRAALIVTAQRESTKQSSEPQWYRICYDEANGSFNADLGSSKDQKGVTRDDRIHGGLVVFNELFRCANATWERRYTSLKTLFPKTQHNKFLEASSSSSMGSQLNTLVPRLKVPFIDKLGSTQTHLGEGEHHKGVAKFASHNVLESAYAQEILQEHYTSICDNVLEQRTSKSPYVQQALLQILPRLAAFNRAVFVEKYLQTCVSHLMQILRGKEKDRTVAYITIGYMAVAVQSAIEVHLSSIMTSVKVALPSKDLTSKRKVPVDPAVFACITLLAHAVKSEIADDVKDILEQMFYTGLSPALTVCLRELSENVPQLKSAITEGLIGILSQVLMNKAAILPYTALPTIAIDGSLMQNGDGATTVLALKTLGTFNFEEQNMLDFVQRCADYFIVHEQQEIRLEAVQTCTRLLKLAVQSSESMENSKTLSDTVSHVIERLLMVAITDMDCNVRIRILRSLDETFDGKLAQPESLNSLFITLHDEIFEIRELAMVTIGRLSSINPAYVMPKLRTTMIELITDLKYSGMSRNKEQSAKMLDHLVISTPRLISSYMNPILKALVPKLHEPESNPGVILNVLRTIGDLAEVNGGSDEMELWADDLLSILLEMLGDAGSPDKRGVALWTLGQLISATGRVVTPYHKYPVLIDILINFLKTEQRRSIRRETIRVLGLLGAMDPYKHKMNKGLIDSQKDNVLIAYSDGKVDESQDISTAELLVNMGNALDEYYPAVAIAALMRILRDPTLSTRHTSVVQAVTFIFQSLGIKCVPYLAQVLPNLLDNVRTADNNLREFLFQQLAILVAFVKLHIISYMGDIFKLIKEFWTINTPLQNTLINLIEQIAVALGCEFRDYLAELIPQILRVLQHDNSKDRMVTRRLLQALQKFGSTLGYYLPLILPPIVKLFDSPYVPQQVSMVALETINNLACQLDFTDFSSRIIHPLVRVLDAEPELRDQAMTTLRSLAKQLGKKYLVFVPMVQRTLNKHRIVDPEYEELLSKIKSCSTLADSYGAGESELRPSRFKNNEPFVTDRNSNNKNLQVTTNELRTAWQVTRRVSKDDWVEWLKRLSIGLLKESPSHALRACRSLAQEYDTLLRDLFNAAFISCWTELSPDLKNELTQSLIQALQVTDMPEITQTILNLAEFMEHCDRDPIPIETKLLGTRAMACRAYAKALRYKEEEFLLREDSQVFESLILINNKLQQREAAEGLLTRYRNAANELNVQGRWYEKLHNWDEALEHYERNLKTDSSDLEARLGHMRCLEALGDWSELSNVTKHEWENFGTEAKSRAGPLAAVAAWGLQDWEAMREYVRCIPEDTQDGSYYRAVLAVHHDDFETAQRLIDETRDLLDTELTSMAGESYERAYGAMVCVQMLAELEEVIQYKLIPERREPLKTMWWKRLQGGQRLVEDWRRIIQVHSLVVKPHEDIHTWLKYASLCRKSGSLHLSHKTLVMLLGTDPKLNPNQPLPCNQPQVTYAYTKYMAANNQLQEAYEQLTHFVSTYSQELSCLPPEALKQQDQRLMARCYLRMATWQNKLQDSIRPDAIQGALECFEKATSYDPNWYKAWHLWAYMNFKVVQAQKSALDKQQPPGASMGMTMGSGLDSDLMIIQRYAVPAVQGFFRSISLIKGNSLQDTLRLLTLWFDYGNHAEVYEALLSGMKLIEINTWLQVIPQLIARIDTHRQLVGQLIHQLLMDIGKNHPQALVYPLTVASKSASLARRNAAFKILDSMRKHSPTLVEQAVMCSEELIRVAILWHEQWHEGLEEASRLYFGDRNVKGMFEILEPLHAMLERGPQTLKETSFSQAYGRELTEAYEWSQRYKTSAVVMDLDRAWDIYYHVFQKISRQLPQLTSLELPYVSPKLMTCKDLELAVPGSYNPGQELIRISIIKTNLQVITSKQRPRKLCIRGSNGKDYMYLLKGHEDLRQDERVMQLFSLVNTLLLDDPDTFRRNLAIQRYAVIPLSTNSGLIGWVPHCDTLHTLIRDYRDKKKVPLNQEHRTMLNFAPDYDHLTLMQKVEVFEHALGQTQGDDLAKLLWLKSPSSELWFERRNNYTRSLAVMSMVGYILGLGDRHPSNLMLDRMSGKILHIDFGDCFEVAMTREKFPEKIPFRLTRMLIKAMEVTGIEGTYRRTCESVMLVLRRNKDSLMAVLEAFVYDPLLNWRLLDVDKKGNDAVAGAGAPGGRGGSGMQDSLSNSVEDSLPMAKSKPYDPTLQQGGLHNNVADETNSKASQVIKRVKCKLTGTDFQTEKSVNEQSQVELLIQQATNNENLCQCYIGWCPFW

SEQ ID NO: 14000 - protein, 760 aa, Drosophila melanogaster
MARCYLRMATWQNKLQDSIRPDAIQGALECFEKATSYDPNWYKAWHLWAYMNFKVVQAQKSALDKQQPPGASMGMTMGSGLDSDLMIIQRYAVPAVQGFFRSISLIKGNSLQDTLRLLTLWFDYGNHAEVYEALLSGMKLIEINTWLQVIPQLIARIDTHRQLVGQLIHQLLMDIGKNHPQALVYPLTVASKSASLARRNAAFKILDSMRKHSPTLVEQAVMCSEELIRVAILWHEQWHEGLEEASRLYFGDRNVKGMFEILEPLHAMLERGPQTLKETSFSQAYGRELTEAYEWSQRYKTSAVVMDLDRAWDIYYHVFQKISRQLPQLTSLELPYVSPKLMTCKDLELAVPGSYNPGQELIRISIIKTNLQVITSKQRPRKLCIRGSNGKDYMYLLKGHEDLRQDERVMQLFSLVNTLLLDDPDTFRRNLAIQRYAVIPLSTNSGLIGWVPHCDTLHTLIRDYRDKKKVPLNQEHRTMLNFAPDYDHLTLMQKVEVFEHALGQTQGDDLAKLLWLKSPSSELWFERRNNYTRSLAVMSMVGYILGLGDRHPSNLMLDRMSGKILHIDFGDCFEVAMTREKFPEKIPFRLTRMLIKAMEVTGIEGTYRRTCESVMLVLRRNKDSLMAVLEAFVYDPLLNWRLLDVDKKGNDAVAGAGAPGGRGGSGMQDSLSNSVEDSLPMAKSKPYDPTLQQGGLHNNVADETNSKASQVIKRVKCKLTGTDFQTEKSVNEQSQVELLIQQATNNENLCQCYIGWCPFW

SEQ ID NO: 14001 - protein, 455 aa, Drosophila melanogaster
MDLDRAWDIYYHVFQKISRQLPQLTSLELPYVSPKLMTCKDLELAVPGSYNPGQELIRISIIKTNLQVITSKQRPRKLCIRGSNGKDYMYLLKGHEDLRQDERVMQLFSLVNTLLLDDPDTFRRNLAIQRYAVIPLSTNSGLIGWVPHCDTLHTLIRDYRDKKKVPLNQEHRTMLNFAPDYDHLTLMQKVEVFEHALGQTQGDDLAKLLWLKSPSSELWFERRNNYTRSLAVMSMVGYILGLGDRHPSNLMLDRMSGKILHIDFGDCFEVAMTREKFPEKIPFRLTRMLIKAMEVTGIEGTYRRTCESVMLVLRRNKDSLMAVLEAFVYDPLLNWRLLDVDKKGNDAVAGAGAPGGRGGSGMQDSLSNSVEDSLPMAKSKPYDPTLQQGGLHNNVADETNSKASQVIKRVKCKLTGTDFQTEKSVNEQSQVELLIQQATNNENLCQCYIGWCPFW

SEQ ID NO: 14002 - protein, 3218 aa, Drosophila melanogaster
MKNAIHPENCNGAGTEEEASSAFHAEIDRVLLNNNGNHGDSSNEGGGGNGSGRGGATGSGNIAGLGGSESMWSPGGGKSHDVAQAFANALLLRNMNHVVGKGQPVVQNHRKAYQCKGDTINPMANGEDLRLSKIIRRLINENNPTVSLELCSKLDQAVRTPINMGYMTCSFVWILDNMLTLYKQCPPPVLEECSKTLGLIGFINRKSYPIYEEFIVKNYKSSKRMQKYMIMALRATLSCDTKCELHMYADKIMLLLKDFLENAESADIFIVVSNTLVQFAASYAETFECHFTDVVDIVIGWQLEAGQPTDLKTHCAQVLEQLTPFFSKQIDFSYGLLDQFVEDITTLEEGEPANTAERVGAFVGAFNTLLKCLARMQIFVGMPTCECIVKMAVDHLIKIMPTLHLNTEALVNINELICICLLNNFTGLDPILLEQVLLDQVKRMISLTELQRQSVLYLLLCTVRRLRARLTPSLVHFIFQSNPYMTKVRLRSPGETSYKLLLRTCQETLLIRNVPLLQQAYKYLVDDIDACLEKLLITAPRSKARKASVLLVFHLSALAALAKQTSSIIGMYACKPSILELLLTNCRAHELKFWSKYPAAQQAIFGLLVVHCQANHNFRTNSSLLRDQELSAENTSPTANSFASILRFLDSVLGQAHQLAPQNLRVLLQWIQMLLRECREKIDLLMEQENFRGICRNIAATASKLVPLESAACIQTVLDYGLERLEKYPKLLILYRDTALQQLQMLSTNYHAPYFQIYAQLPLHLTLTGGESSMPGMASRRVSVWQQRISQYSAVRDNVFRDFFDRVQKPEQDSLIHCLRELFVRSCQVAPQDERQMNLSQCTKRCQRLAIAWLQFEAARYCVDQRLRTTVGKPQETFLGFEAIIMRHARLLSGCAKEIERSALDDLSLEELLSMQSNLSLLLGFLDALEKLIYNAAEGSAFALRPPEKQVAAFFRLNNPTCQSWFNRIRIGVVIIAMHVQQPELVIRYAQQILVNSKTQDPTYSQAIVYMAWSLVSCQEADSLRGLRLWARGKSCKSYKWLKYAADQAAGKRESALAGYRTILAEKELQSELEPHTRQFVVSQMMQCLQDLGQWSQLVELKQQQMTRPEDRELNPFLQRSNVEVNALERLLAKSEESCSSMDALGGVFQQLSLWPSNWDESVSSSGLSERASFSSIHMRQRTEDIVLHKLLEDRCVPDQAKNLLDTQWRDSLLNPSFDQRSCKELTLLRHIVQGVSGGQELSLLPVSSGRCQNRSKFISSAILMRCLAWTQLLRQHCAPGSWETLCLDAAAAAREEGNLQLAETLLTQFFGQPIGEIAALFSLEQGVQTDNPEMLRGYSELVKCLHLQQQQSQTHSGDLSSSIDVCAALCLNIQKSNNQPAAGADLLLNLADWIAVRTCNGLTTNQSPVLIQLLDQLPECPLTCDSSQPLAIPQAERMVARLVHSCLQQRPNYAEALIAYGNWCYRWGKKVADSCCVLTQADATAISQALDIPQPLESEKLDELLQALSTEQPPANCVEVCPDAARARDDEAAKNRLRRLTFLADKTPEALDAILQIWRRAIANTYDYYKDAARSYFQYLSFKSGSGPEKPEGEGVVSQRERLHVDDSNLVTTTLRLLRLIVKHASGLQEVLEQGLHTTPIAPWKVIIPQLFSRLNHHEPYVRKSVCDLLCRLAKSRPQLVIFPAVVGANREQQDATAPPATARPTTEDACCYGYLLGELSKQAPEAVQHVKLMVKELRRVCLLWDEYWIHSLAHIYNTYVSRVSALATDFRPDDHEGKNNRFNVWRPQLLADLEALVAVTSRPPETTYERSFRKRFDAPIRLTVDALRHRRYPEAWDKLKQLYHILQSNMIRGSGSTLKMQSISPVLCGIGRMRISMPGLDAHGPDGDQVYIESVESSVCVLPTKTKPKKVAFYGSNGQRYTFLFKGMEDLHLDERIMQFLSISNAIMACRSDAPGNGCYRAHHYSVIPLGPQSGLISWVDGVTPVFALYKKWQQRRSQVAGNAGAGAVANVPRRFTDLFYNKLSPLLAKHNMQVSDPRRQWPISVLLQVLDELSQETPNDLLARELWCQAGNAAEWRQSVRRFVRCMSVMSMIGYVIGLGDRHLDNVLINLGSGDIVHIDYNVCFEKGRTLRIPEKVPFRLTQNLVQAMGITGIEGPFRLGCEYVLKVMRKERETLLTLLEAFVYDPLVDWTTNDDAQALRRSLNAKLQESADGGGAGGLGVGDLKYHKKDKNKGKPLDSDVKRQPFLSKLGMLQKYWSTNKTELMPQLEEMEQEVGNLQAAQAKQVVAEEELVKLNQRSALIAEIKSLGTAIESHSFNTASLRNAVRRGHSEALALLSTERLPDFGRVQCILRSYGQCLQLYHLLDLQGQLVKLQMESNSENAREFSALTEALQLSGLDSMRSQLNELLGRMDMVAQKSSKHLQEYAGVMNFYPEQSHRQNLFVRFHDSFATYIQNGYTADSTTNTNSPSSSIICKADVVGVAEAMEYSWERLGCQLHEASKLYAANQAQALTLGAPTTALLSMIVQSGCSQLLLKASLVRTLDRAGGAFAAYEQVALASHDDGLLHHQLLFIHLVRTMLQGVLVMTKEEDQHLAQLESLLSALSHLKKMFEYDLPANLYRLLLLQPNLGKLSALCHLSASSLAQLFLEATMENGHKPPDQFPVERRFLLTLQPVYDQFLLASTSLDSLVSSMQSMLEDVHDVQTQQIMELGLMRSCHTELNDECFFGLVSEALESSRTCDVREMARPMLGFIHRLQVEKLAGLLPILTRNFYTAVGPQCLPTASCGDPAQADHLCESLFISLQSDGALLQQQAEIALLSQQVDLHTLAASAQYWAYSEALGSQLRCGPHIVSRPKLTAAIGECWLELDQKLTALQQLQAGLESQLSQLQTQRSNWNRNHIDNLLRMEQCNKQRTMSHVALLQKMTDGAGAVARLEQNAIVVGEEGQALVDHLEQWLAAHGQWQASSSRISAVEQSMVELLDPEGAIDHYWLENVQGLLEEQTCKVHREIAAIEGEQQSKHRFICTLLKETLRLLENMPRFHVQSLCSEAQAQGQGKMEYANVQLLSDHLREGQGLMQSLYMRLQELRKDICSDRRVLQPSMLQNWRHQLEMILTLAKQEVNEFFKGLEDFMQHAGETDSYEIFTHAKGSGNVHEQKRNAYGVSVWKKIRMKLEGRDPDSNQRSTVAEQVDYVIREACNPENLAVLYEGWTPWV

SEQ ID NO: 14003 - protein, 249 aa, Carassius auratus
PEAASGVLEYAMKHFGELEIHATWYEKLHEWEDALVAYDKKIDMNKDDPELILGCMICLEALGEWGQLHQQCCEEWTLVSEETQAKMARMAAAAAWGLATGTVWKSILAWSQETPMMEPFTGQCLLYIRISSHWLNSALTKPETYWMLSSTAMAGESYSRAYGAMVSCQMLSELEEVIQYKLVPGRRDIIRETWWERLQGCQRIVEDWQRILMVRSLVISPHEDMRTWLKYASLCGKSGRIALAHKTLV

SEQ ID NO: 14004 - protein, 2549 aa, Homo sapiens
MLGTGPAAATTAATTSSNVSVLQQFASGLKSRNEETRAKAAKELQHYVTMELREMSQEESTRFYDQLNHHIFELVSSSDANERKGGILAIASLIGVEGGNATRIGRFANYLRNLLPSNDPVVMEMASKAIGRLAMAGDTFTAEYVEFEVKRALEWLGADRNEGRRHAAVLVLRELAISVPTFFFQQVQPFFDNIFVAVWDPKQAIREGAVAALRACLILTTQREPKEMQKPQWYRHTFEEAEKGFDETLAKEKGMNRDDRIHGALLILNELVRISSMEGERLREEMEEITQQQLVHDKYCKDLMGFGTKPRHITPFTSFQAVQPQQSNALVGLLGYSSHQGLMGFGTSPSPAKSTLVESRCCRDLMEEKFDQVCQWVLKCRNSKNSLIQMTILNLLPRLAAFRPSAFTDTQYLQDTMNHVLSCVKKEKERTAAFQALGLLSVAVRSEFKVYLPRVLDIIRAALPPKDFAHKRQKAMQVDATVFTCISMLARAMGPGIQQDIKELLEPMLAVGLSPALTAVLYDLSRQIPQLKKDIQDGLLKMLSLVLMHKPLRHPGMPKGLAHQLASPGLTTLPEASDVGSITLALRTLGSFEFEGHSLTQFVRHCADHFLNSEHKEIRMEAARTCSRLLTPSIHLISGHAHVVSQTAVQVVADVLSKLLVVGITDPDPDIRYCVLASLDERFDAHLAQAENLQALFVALNDQVFEIRELAICTVGRLSSMNPAFVMPFLRKMLIQILTELEHSGIGRIKEQSARMLGHLVSNAPRLIRPYMEPILKALILKLKDPDPDPNPGVINNVLATIGELAQVSGLEMRKWVDELFIIIMDMLQDSSLLAKRQVALWTLGQLVASTGYVVEPYRKYPTLLEVLLNFLKTEQNQGTRREAIRVLGLLGALDPYKHKVNIGMIDQSRDASAVSLSESKSSQDSSDYSTSEMLVNMGNLPLDEFYPAVSMVALMRIFRDQSLSHHHTMVVQAITFIFKSLGLKCVQFLPQVMPTFLNVIRVCDGAIREFLFQQLGMLVSFVKSHIRPYMDEIVTLMREFWVMNTSIQSTIILLIEQIVVALGGEFKLYLPQLIPHMLRVFMHDNSPGRIVSIKLLAAIQLFGANLDDYLHLLLPPIVKLFDAPEAPLPSRKAALETVDRLTESLDFTDYASRIIHPIVRTLDQSPELRSTAMDTLSSLVFQLGKKYQIFIPMVNKVLVRHRINHQRYDVLICRIVKGYTLADEEEDPLIYQHRMLRSGQGDALASGPVETGPMKKLHVSTINLQKAWGAARRVSKDDWLEWLRRLSLELLKDSSSPSLRSCWALAQAYNPMARDLFNAAFVSCWSELNEDQQDELIRSIELALTSQDIAEVTQTLLNLAEFMEHSDKGPLPLRDDNGIVLLGERAAKCRAYAKALHYKELEFQKGPTPAILESLISINNKLQQPEAAAGVLEYAMKHFGELEIQATWYEKLHEWEDALVAYDKKMDTNKDDPELMLGRMRCLEALGEWGQLHQQCCEKWTLVNDETQAKMARMAAAAAWGLGQWDSMEEYTCMIPRDTHDGAFYRAVLALHQDLFSLAQQCIDKARDLLDAELTAMAGESYSRAYGAMVSCHMLSELEEVIQYKLVPERREIIRQIWWERLQGCQRIVEDWQKILMVRSLVVSPHEDMRTWLKYASLCGKSGRLALAHKTLVLLLGVDPSRQLDHPLPTVHPQVTYAYMKNMWKSARKIDAFQHMQHFVQTMQQQAQHAIATEDQQHKQELHKLMARCFLKLGEWQLNLQGINESTIPKVLQYYSAATEHDRSWYKAWHAWAVMNFEAVLHYKHQNQARDEKKKLRHASGANITNATTAATTAATATTTASTEGSNSESEAESTENSPTPSPLQKKVTEDLSKTLLMYTVPAVQGFFRSISLSRGNNLQDTLRVLTLWFDYGHWPDVNEALVEGVKAIQIDTWLQVIPQLIARIDTPRPLVGRLIHQLLTDIGRYHPQALIYPLTVASKSTTTARHNAANKILKNMCEHSNTLVQQAMMVSEELIRVAILWHEMWHEGLEEASRLYFGERNVKGMFEVLEPLHAMMERGPQTLKETSFNQAYGRDLMEAQEWCRKYMKSGNVKDLTQAWDLYYHVFRRISKQLPQLTSLELQYVSPKLLMCRDLELAVPGTYDPNQPIIRIQSIAPSLQVITSKQRPRKLTLMGSNGHEFVFLLKGHEDLRQDERVMQLFGLVNTLLANDPTSLRKNLSIQRYAVIPLSTNSGLIGWVPHCDTLHALIRDYREKKKILLNIEHRIMLRMAPDYDHLTLMQKVEVFEHAVNNTAGDDLAKLLWLKSPSSEVWFDRRTNYTRSLAVMSMVGYILGLGDRHPSNLMLDRLSGKILHIDFGDCFEVAMTREKFPEKIPFRLTRMLTNAMEVTGLDGNYRITCHTVMEVLREHKDSVMAVLEAFVYDPLLNWRLMDTNTKGNKRSRTRTDSYSAGQSVEILDGVELGEPAHKKTGTTVPESIHSFIGDGLVKPEALNKKAIQIINRVRDKLTGRDFSHDDTLDVPTQVELLIKQATSHENLCQCYIGWCPFW

SEQ ID NO: 14005 - protein, 2549 aa, Homo sapiens [sequence omitted]

SEQ ID NO: 14006 - protein, 2548 aa, Homo sapiens [sequence omitted]

SEQ ID NO: 14007 - protein, 1188 aa, Homo sapiens
EFMEHSDKGPLPLRDDNGIVLLGERAAKCRAYAKALHYKELEFQKGPTPAILESLISINNKLQQPEAAAGVLEYAMKHFGELEIQATWYEKLHEWEDALVAYDKKMDTNKDDPELMLGRMRCLEALGEWGQLHQQCCEKWTLVNDETQAKMARMAAAAAWGLGQWDSMEEYTCMIPRDTHDGAFYRAVLALHQDLFSLAQQCIDKARDLLDAELTAMAGESYSRAYGAMVSCHMLSELEEVIQYKLVPERREIIRQIWWERLQGCQRIVEDWQKILMVRSLVVSPHEDMRTWLKYASLCGKSGRLALAHKTLVLLLGVDPSRQLDHPLPTVHPQVTYAYMKNMWKSARKIDAFQHMQHFVQTMQQQAQHAIATEDQQHKQELHKLMARCFLKLGEWQLNLQGINESTIPKVLQYYSAATEHDRSWYKAWHAWAVMNFEAVLHYKHQNQARDEKKKLRHASGANITNATTAATTAATATTTASTEGSNSESEAESTENSPTPSPLQKKVTEDLSKTLLMYTVPAVQGFFRSISLSRGNNLQDTLRVLTLWFDYGHWPDVNEALVEGVKAIQIDTWLQVIPQLIARIDTPRPLVGRLIHQLLTDIGRYHPQALIYPLTVASKSTTTARHNAANKILKNMCEHSNTLVQQAMMVSEELIRVAILWHEMWHEGLEEASRLYFGERNVKGMFEVLEPLHAMMERGPQTLKETSFNQAYGRDLMEAQEWCRKYMKSGNVKDLTQAWDLYYHVFRRISKQLPQLTSLELQYVSPKLLMCRDLELAVPGTYDPNQPIIRIQSIAPSLQVITSKQRPRKLTLMGSNGHEFVFLLKGHEDLRQDERVMQLFGLVNTLLANDPTSLRKNLSIQRYAVIPLSTNSGLIGWVPHCDTLHALIRDYREKKKILLNIEHRIMLRMAPDYDHLTLMQKVEVFEHAVNNTAGDDLAKLLWLKSPSSEVWFDRRTNYTRSLAVMSMVGYILGLGDRHPSNLMLDRLSGKILHIDFGDCFEVAMTREKFPEKIPFRLTRMLTNAMEVTGLDGNYRITCHTVMEVLREHKDSVMAVLEAFVYDPLLNWRLMDTNTKGNKRSRTRTDSYSAGQSVEILDGVELGEPAHKKTGTTVPESIHSFIGDGLVKPEALNKKAIQIINRVRDKLTGRDFSHDDTLDVPTQVELLIKQATSHENLCQCYIGWCPFW

SEQ ID NO: 14008 - protein, 895 aa, Homo sapiens
EIQATWYEKLHEWEDALVAYDKKMDTNKDDPELMLGRMRCLEALGEWGQLHQQCCEKWTLVNDETQAKMARMAAAAAWGLGQWDSMEEYTCMIPRDTHDGAFYRAVLALHQDLFSLAQQCIDKARDLLDAELTAMAGESYSRAYGAMVSCHMLSELEEVIQYKLVPERREIIRQIWWERLQGCQRIVEDWQKILMVRSLVVSPHEDMRTWLKYASLCGKSGRLALAHKTLVLLLGVDPSRQLDHPLPTVHPQVTYAYMKNMWKSARKIDAFQHMQHFVQTMQQQAQHAIATEDQQHKQELHKLMARCFLKLGEWQLNLQGINESTIPKVLQYYSAATEHDRSWYKAWHAWAVMNFEAVLHYKHQNQARDEKKKLRHASGANITNATTAATTAATATTTASTEGSNSESEAESTENSPTPSPLQKKVTEDLSKTLLMYTVPAVQGFFRSISLSRGNNLQDTLRVLTLWFDYGHWPDVNEALVEGVKAIQIDTWLQVIPQLIARIDTPRPLVGRLIHQLLTDIGRYHPQALIYPLTVASKSTTTARHNAANKILKNMCEHSNTLVQQAMMVSEELIRVAILWHEMWHEGLEEASRLYFGERNVKGMFEVLEPLHAMMERGPQTLKETSFNQAYGRDLMEAQEWCRKYMKSGNVKDLTQAWDLYYHVFRRISKQLPQLTSLELQYVSPKLLMCRDLELAVPGTYDPNQPIIRIQSIAPSLQVITSKQRPRKLTLMGSNGHEFVFLLKGHEDLRQDERVMQLFGLVNTLLANDPTSLRKNLSIQRYAVIPLSTNSGLIGWVPHCDTLHALIRDYREKKKILLNIEHRIMLRMAPDYDHLTLMQKVEVFEHAVNNTAGDDLAKLLWLKSPSSEVWFDRRTNYTRSLAVMSMVGYILGLGD

SEQ ID NO: 14009 - protein, 367 aa, Homo sapiens
FRRISKQLPQLTSLELQYVSPKLLMCRDLELAVPGTYDPNQPIIRIQSIAPSLQVITSKQRPRKLTLMGSNGHEFVFLLKGHEDLRQDERVMQLFGLVNTLLANDPTSLRKNLSIQRYAVIPLSTNSGLIGWVPHCDTLHALIRDYREKKKILLNIEHRIMLRMAPDYDHLTLMQKVEVFEHAVNNTAGDDLAKLLWLKSPSSEVWFDRRTNYTRSLAVMSMVGYILGLGDRHPSNLMLDRLSGKILHIDFGDCFEVAMTREKFPEKIPFRLTRMLTNAMEVTGLDGNYRITCHTVMEVLREHKDSVMAVLEAFVYDPLLNWRLMDTNTKGNKRSRTRTDSYSAGQSVEILDGVELGEPAHKKTGTT

SEQ ID NO: 14010 - protein, 4144 aa, Canis familiaris
MFSSSQIPRVFLIPSRRELRLVLQLQESLSAGDRCSAAMASYQLTRGLGQECVLSSDPAVLALQTSLVFSKDFGLLVFVRKSLSIDEFRDCREEVLKFLYIFLEKIGQKITPYSLDIKTTCTSVYTKDKAAKCKIPALDLLIKLLQTLRSSRLMDEFSIGELFNKFYGELALKTKIQDTVLEKIYELLGVLAEVHPSEMINNSEKLFRAFLGELKIQMTSAIREPKLPVLAGCLKGLSSLMCNFTKSMEEDPQTSREIFDFALKAIRPQIDLKRYAVPLAGLCLFTLHASQFSTCLLDNYVSLFEVLSKWCSHTNVEMKKAAHSALESFLKQVSFMVAKDAEMHKSKLQYFMEQFYGIIRNMDSNSKDLSIAIRGYGLFAGPCKVINAKDVDFMYIELIQRCKQLFLTQIDTVDDHVYHMPSFLQSIASVLLYLDRVPEVYTPVLEHLMVAQIDSFPQYSPKMQSVCCKALVKVFLALGGKGPVLWNCISTVVHQGLIRICSKPVILQKGVESEPEEYRASGEVRTGKWKVPTYKDYLDLFRSLLSCDQMMDSLLADEAFLFVNSSLQNLNRLLYDEFVKSVLKIIEKLDLTLEKRNVGEHEDENEATGVWVIPTSDPAANLHPAKPKDFSAFINLVEFCRDILPEKHIEFFEPWVYSFAYELILQSTRLPLISGFYKLLSVAVRNAKKIKYFEGVGMKSQTQAPKDPEKYSCFALFAKFGKEVTVKMKQYKDELLASCLTFILSLPHDIIELDIRAYIPALQMAFKLGLSYTPLAEVGLNALEEWSVCICKHIIQPHYKDILPSLDGYLKTSALSDETKNSWEVSAPSQAAQKGFNQVVLKHLKKTKNISSNEALSLEEIRIRVVQMLGFLGGQINKNLLTATSSDEMMKKCVAWDREKRLSFAVPFIEMKPVIYLDVFLPRVTELALSASDRQTKVAACELLHSMVMFTLGKATQMPECGQGFPPMYQLYKRTFPALLRLACDVDQVTRQLYEPLVMQLIHWFTNNKKFESQDTVALLETILDGIVDPVDSTLRDFCGRCIREFLKWSIKQTTPQQQEKSPVNTKSLFKRLYSFALHPNAFKRLGASLAFNNIYREFREEESLVEQFVFEALVTYLESLALAHTDEKPLGTIRQCCDAIDHLRHIIEKKHVSLNKVKKRRRPRGFPPSASLCLLDMVQWLLAHCGRPQTECRHKSIELFYKFVPLLPGNKSPSLWLKDILKNKDTSFLINTFEGGGGSCDRPSGILVQPTLFHLQGPFSLRAALQWMDMLLAALECYNTFIEEKTLKAPDVLGTETQSSLWKAVAFFLDNIAMHDITAAEKCFGTGAAGHRPSPQEGERYNYSKCTIVVRIMEFTTTLLNTSPDGWKLLEEDLCNNKNFMTLLVKILCQPSSIGFNIGDVLVMNHLPDVCVNLMKALKKSPYKDTLEMCLKEKITVQSIEELCAVDLYGPDAYVDRATLASVVSACKQLHRAGVLHVVLPSQSADQRHSVGIKLLFLVYKSIAPGDEREYFPSLDPSCKRLASGLLELAFAFGGLCEHLVDLLLDTAVLSMPASGESQRNMVSFSHGEYFYSLFSEIINTELLRNLDMTVLKLMKSSVDNPKMVSAILNGMLDQSFRDRASRKQQGLKLASTILHNWKKWDSWWAKDSAPESKTAVLTLLAKILQIDSSVSFNTNHSAFPEVFTTYTSLLADSNLGLHLMGQAVILLPFFTNLTGGNLEDLEHVLEKLIVSNFPMKSEEFPVGTLRYSNYVDCMKKFLDALELSQSPVLLQLMAEILCREQQHVMEELFQSTFKKIARKSSCVTQLALLESVYRMFKRDDLLSNVTRQAFVDRSLLTLLWHCGLNALREFFGKIVVETIDVLKSRFTKLNESTFDTQITKKMGFYKMLDVMYSRLSKDDVHSKESKINQVFHGSCITEGNELTKTLIKLCYDAFTENMAGENQLLERRRLYHCAAYNCAISVICCVFTELKFYQGFLFSEKPEKNLLILENLIDLKRCYTFPIEVEVPMERRKKYIEIRKEAREAVNGDSDGPHYLSSLSYLADSSLSEEMSQFDFSTGVQSYSYGSQDPKSTHGHFRRREHKDPMVQDAVLELEMDELNQHECMATMTALIKHMQRNQILSKDEGSVPRNLPPWMKFLHDKLGNPSVSLNIRLFLAKLVINTEEVFRPYAKYWLSPLLQLVVSENNGGEGIHYMVVEIVVTVLSWTGLATPVGVPKDEVLANRLLHFLMEHVFHQKRAVFRHNLEIIKTLVECWKDCLSVPYRLIFEKFSSKDPNSKDNSVGIQLLGIVMANNLPPYDPKCGIERIKYFEALVSNMSFVKYKEVYAAAAEVLGLTLRYITERENILENVVYELVIKQLKQHQNTMEDKFIVCLNKVVKNFPPLADRFMNAVFFLLPKFHGVMKTLCLEVVLCRAEEITNIYLELKSKDFIQVMRHRDDERQKVCLDIIYKMMAKLKPVELRDLLNSVVEFISHPSPVCREQMYNILMWIHDNYRDPESQADDDSREVFKLAKDVLIQGLIDENAGLQLIIRNFWSHETRLPSNTLDRLLALNSLYSPKIEVHFLSLATDFLLEMTSLSPDYANPVFEHPLSECEFQEYTIDSDWRFRSTVLTPMFIETQASQSTLQTRTQERSLPAQGVMARQIRATQQQYDFTPTQTADGRSSFNWLTGSSIDPLVDYTVSSSDSSSSSLLFAQKRNEKSQRAPLKSVGPDFGEKKLGLPGDKVDNKAKGIDNRTEILRLRRRFIKDQEKLSLIYARKGIAEQKREKEIKSELKMKHDAQVILYRSYRQGDLPDIQIKYSSLVTPLQAVAQRDPVVAKQLFGSLFSGIIKEMDKYKTMSEKNNITQKLLQDFSHFLNSTFSFFPPFVSCIQEISCQHTDLLSLDPGSIRASCLASLQQPVGVRLLEEALLHLGPQEPPAKQFKGRMRVSPDVVRWMELAKLYRSIGEYDILRGIFSSEIGTKQITQSAIFAEARSDYSEAAKQYNEALNKEEWVDGEPTEAEKDFWELASLDCYNQLAEWKSLAYCSIVSVDNENPPDLNKMWSEPFYRETYLPYMIRSKLKLLLQGEADQSLLTFIDEAVNKDLQKALIELHYSQELSLLYILQDDIDRAKYYIENCIQIFMQNYSSIDVLLHRSRLTKLQSVQTMIEIQEFISFISRQGNLSSQAPLKRLLKSWTNRYPDARMDPVHIWDDIITNRCFFLSKIEEKLTLPLGDHSLSMDEERDSSDKMEVQEQGEEVCSLIKNCMFSMKMKMVESARKQHNFSLAMKLLKELRRESKTRDDWQVKWVHTYCRLSHSRIQGQSCLQQILSALKTVSLLAGESTSSYFSKNVLAFHDQNILLGTTYSIIANALRREPACLAEIEESRARRILDLSGSSLENAEKVIAVLYQRAFHHLSEAVRTAEEEAQPSLRGQGPVASLTDAYMTLADFCDQQLRKEEESASVTESVELQTYPGLVVDNMLKALKLHSSEARLKFPRLLQIIELYPEETLSLMTKEISSTPCWQFIGWISHMVALLDQEEAVAVQCTVEEIADNYPQAIVYPFIISSESYSFKDTSTGHKNKEFVARIKTKLDLGGVIQDFISALEQLSNPEMLFKDWTDDMKAELAKNPVSKKNIEKMYERMYAALGDLRAPGLGAFRRRFIQVFGKEFDKHFGKGGSKLPGMKLRDFGSITDSLFYKMCTDSKPPGNLKECSPWMSDFKVEFLRNELEIPGQYDGKGKPLPEYHARIAGFDERIKVMASIRKPKRIIIRGRDEKEYPLLVKGGEDLRQDQRIEQLFEVMNVLLSQDTACSQRNMQLKTYHVIPMTSRLGLIEWIENTLTLKDFLLSNMSREEKAAYTSDPKAPPCEYRDWLAKMSGKYDVGAYMSMFKAASRTETVTSFRRRESRVPADLLKRAFLKMSTGPAAFLALRSHFASSHALMCISHWILGIGDRHLNNFMVSMETGGLIGIDFGHAFGSATQFLPVPELMPFRLTRQFINLMLPMKEAGVVYSIMVHALRAFRSHSDLLTNTMDVFVKEPSFDWKNFEQKMLKKGGSWIQEINVTEKNWYPRQKIHYAKRKLAGANPAVITCDELFLGHEKALAFGDYVAVARGSKDHNIRAQQPENGLSEEAQVKCLIDQATDPNILGRTWIGWEPWM

SEQ ID NO: 14011 - protein, 4106 aa, Equus caballus
AVAGYQLIRGLGQECMLSTGPAVLALQTSLVFSKDFGLLVFVRKSLSIDEFRDCREEILKFLYIFLEKIGQKITPYSLDIKNTCTSVYTKDKAAKCKIPALDLLIKLLQTLRSSRLMDEFRVGELFTKFYGELALKTKIPDTVLEKIYELLGVLGEVHPSEMISNSEQLFRAFLGELKSQMTSTVREPKLPVLAGCLKGLSSLMCNFTKSMEEDPQTSREIFDFALKAIRPQIDLKRYAVPLAGLCLFTLHASQFSTCLLENYVSLFEVLSKWCGHTNIELKKAAHSALESFLKQVSFMVAKDAERHKNKLQYFMEQFYGIIRNMDSNSKDLSIAIRGYGLFAGPCKVINAKDVDFMYVELIQRCKQLFLTQTDTVDDHIYQMPSFLQSIVSVLLYLDTIPEVYTPVLEHLMVVQIDSFPQYSPKMQPVCCRAIVKLFLALAEKGPVLWNCISTVVHQGLIRICSKPVVFQKGAGSESEDYHTSEEARTGKWKMPTYKDYLDLFRYLLSCDQMMDSLLADEAFLFVNSSLHSLNRLLYDEFVKSVLKIVEKLDLTLEKQNVGEQEDETEATGVWVIPTSDPAANLHPAKPKDFSAFINLVEFCREILPEKHVEFFEPWVYSFAYELILQSTRLPLISVFYKLLSVAVRNAKKMKYFEGVGPKSQKQSPEDLEKYSCFALFAKFSKEVSIKMKQYKDELLASCLTFILSLPHDIIELDVRAYVPALQMAFKLGLSYTPLAEVGLNALEEWSGYICKHVIQPYYKDILPSLDGYLKTSVLSDETKNSWQVSALSRAAQKGFNKVVLKHLTKTKSISSNEALSLEEVRIRVVRILGSLGGQINKNLVTAASSDEMMKKCVAWDREKRLRFAVPFMEMKPVIYLDLFLPRVTELALSASDRQTTVAACELLHSMVMFMLGKATQMPEDGQGSPPMYQLYKRTFPVLLRLACDVDQVTRQLYEPLVMQLIHWFTNNKKFESQDTVALLETILDGIVDPVDSTLRDFCGQCIQEFLKWSIKQTTPQQQEKSPVNTKSLFKRLYSFALHPNAFKRLGASLAFNNIYREFREEESLVEQFVFEALVTYMESLALAHTDEKSLGTIQQCCDAIDHLSLIIEKKHVSLNKAKKRRLPRGFPPATSLCLLDVVQWLLANCGRPQTECRHKSIELFYKFVTLLPGNKSPFLWLKDIIKKEDISFLINTFEGGGSGRPSGILAQPTLFHLQGPFSLRAALQWMDMLLAALECYNTFIEEKTLEAPKVLGTETQSSLWKAVAFFLESIAMHDIMAAEKYFGTGATGNRPSPQEGERYNYSKCTIVVRIMEFTTTLLSTSPEGWKLLEKDVCNTNLMKLLVKTLCEPSSIGFNIGDVAVMNYLPSVCTNLMKALKKSPYKDILEMHLKEKITAQSIEELCAVDLYCPDACVDRARLASVVSACKQLHRAGVLCVIIPSQSADQHHSIGTKLLSLVYKSIAPGDEQQCLPSLDPNCKRLASGLLELAFAFGGLCEHLVSLLLDTTVLSMPSRGGSQKNIVSFSHGEYFYSLFSETINTELLKNLDLAVLELMKSSVDNPKMVSNVLNGMLDQSFRDRTSEKHQGLKLATIILQNWKKCDSWWAKDSAPESKMAVLTLLAKIFQIDSSVCFNTNHCMFPEVFTTYVSLLADSKLDLHLKGQAIILLPFFTSLTGGSLEDLKVVLENLIVSNFPMKSEEFPPGTLQYNNYVDCMKKFLDALELSKSPMLLQLMTEILCREQQHVMEELFQSTFKKIARKSSCITQLGLLESVYRMFRRDDLLSNITRQAFVDRSLLTLLWHCSLNALREFFSKIVVEAINVLKSRFIKLNESAFDTQITKKMGYYKMLDVMYSRLPKDDVHSKESKINQVFHGSCITEGSELTKTLIKLCYDAFTENMAGENQLLERRRLYHCAAYNCAISVVCCVFNELKFYQGFLFTEKPEKNLLIFENLIDLKRCYTFPIEVEVPMERKKKYLEIRKEAREAAASGDSDGPRYISSLSYLADSSLSEEMSQFDFSTGVQSYSYSSQDPKSTTAHFRRQKHKESMIQDDILELEMDELNQHECMATMTALIKHMQRNQILPKEEEGSVPRNLPPWMKFLHDKLGNPSISLNIRLFLAKLVINTEEVFRPYARYWLSPLLQLVVSGNNGGEGIHYMVVEIVVIILSWTGLATPIGVPKDEVLANRLLHFLMKHVFHQKRAVFRHNLEIIKTLVECWKDCLSIPYRLIFEKFSSTDPNSKDNSVGIQLLGIVMANNLPPYDPKCGIESIKYFQALVNNMSFVRYREVYAAAAEVLGLVLRYITERENILEESVCELVIKQLKQHQNTMEDKFIVCLNKAVKNFPPLADRFMNTVFFLLPKFHGVMKTLCLEVVLCRAEEITDLYLQLKSKDFIQVMRHRDDERQKVCLDIIYKMMARLKPVELRELLNPVVEFISHPSPVCREQMYNILMWIHDNYRDPEGQTDDDSQEIFKLAKDVLIQGLIDENPGLQLIIRNFWSHETRLPSNTLDRLLALNSLYSPKIEAHFLSLATDFLLEMTSVSPDYSNPMFDHPLSECKFQEYTIDSDWRFRSTVLTPMFIETQASQSALQTRTQEGSLSARGVMTGQIRATQQQYDFTPTQNTDGRSSFNWLTGNSIDPLVDFTVSSSSDSLSSSLLFAHKRSEKSQRGPLKSVGPDFGKKRLGLPGDEVDNKAKGTDNRAEILRLRRRFLKDREKLSLIYARKGVAEQKREKEIKSELKMKHDAQVILYRSYRQGDLPDIQIKYSSLITPLQAVAQRDPIIAKQLFGSLFSGIIKEMDKYKTMSEKNNITQKLLQDFNNFLNTTVSFFPPFISCIQEISCQHADLLSLDPASVSASCLASLQQPVGVRLLEEALLHLLPEEPPAKRVRGRPCLYPDFVRWMELAKLYRSIGEYDILRGIFNSEIGTKQVTQNALLAEARNDYSEAVKQYNEALNKQDWVDGEPMEAEKDFWELASLDCYNQLAEWKSLAYCSTVSVDSANPPDLNKMWNEPFYQETYLPYMIRSKLKLLLQGEGDQSLLTFIDEAVSKELQKVLVELHYSQELSLLYILQDDVDRAKYYIENCIRIFMQSYSSIDVLLERSRLTKLQSLQALIEIQEFISFIRKQGNLSSQIPLKRLLKTWTNRYPDAKMDPMNIWDDIITNRCFFLSKIEEKLTIPPDDHSMNTDGDEDSSDRMKVQEQEEDIYSLIKSGKFSMKMKMIESARKQKNFSLAMKLLKELHKESKTRDDWLVKWVQSYCRLSHSRSQTQNRPEQILTVLKTVSLLDENTSSYLSKNIPVSRDHNILLGTTYRIIANALSSDPTCLAEIGESKARRILELSGSSLENAEEVIAGLYQRVLHHLSEAVRIAEEEAQPFTRGQEPAVGVIDAYMTLVDFCDQQLRKEEESSSVTESVQLQMYPALVVDKMLKALRLDSNEARLKFPRLLQIIERYPEETLSLMTKEISSIPCWQFIGWISHMVALLDKEEAVAVHRTVEEIADNYPQAMVYPFIISSESYSFKDTSTGYKNKEFVERIKIKLDQGGVIQDFINALEQLSHPEMLFKDWTDDIKVELEKNPVNRKNIEKMYEKMYATLGDPQAPGLGAFRRRCIQGFGKEFDKHFGRGGSKLPGMKSREFSDITNSLFSKMCEVSKPPGNLKECSPWMSDFKVEFLRSELEIPGQYDGKGKPVPEYHARIAGFDERIKVMASMRKPKRIIIRGHDEREYPFLVKGGEDLRQDQRIEQLFEVMNVILSQDATCSQRSMQLKTYQVIPMTSRLGLIEWIENTFTLKELLLSNMSQEEKAACTRDPKAPPFEYRDWLTKMSGKCDVGAYMLMYKGASRTETVTSFRKRESKVPADLLKRAFVKMSTSPEAFLTLRSHFAGSHALICISHWIPGIGDRHLNNFLVSMETGGVIGIDFGHAFGSATQFLPVPELMPFRLTRQFINLMLPMKETGVMYSIMVHALRAFRSQSNLLANTMDVFVKEPSFDWKNFEQKMRKKGGSWIQEINVTEKNWYPRQKIHYAKRKLAGANPAVITCDELLLGHEKAAAFGDYVAVARGSEDHNIRAQELESDLSEEAQVKCLIDQATDPNILGRTLVGWEPWM

SEQ ID NO: 14012 - protein, 255 aa, Rattus norvegicus
MDDREDLVYQAKLAEQAERYDEMVESMKKVAGMDVELTVEERNLLSVAYKNVIGARRASWRIISSIEQKEENTGGEDKLKMIREYRQMVETELKLICCDILDVLDKHLIPAANTGESKVSYYYMKGDYHRYLAEFATGNDRKEAAENSLVAYKAASDIAMTELPPTHPIRLGLALNFSVFYYEILNSPDRACRLAKAAFDDAIAELDTLSEESYKDSTLIMQLLRDNLTLWTSDMQGDGEEQNKEALQDVEDENQ

SEQ ID NO: 14013 - protein, 262 aa, Fritillaria cirrhosa
MSSAESREENVYLAKLAEQAERYEEMVEFMEKVAKTVETEELTVEERNLLSVAYKNVIGARRASWRIMSSIEQKEESKGNDQNVKLIKGYRHKVEEELAKICNDILTVIDKHLIPSSGSGEATVFYYKMKGDYYRYLAEFKNEHERKEAADQSMKAYQAASNTANTDLPSTHPIRLGLALNFSVFYYEIMNSPERACHLAKQAFDEAIAELDTLSEESYKDSTLIMQLLRDNLTLWTSDLPEDGGDEGFKGEEAKAAGDDEH

SEQ ID NO: 14014 - protein, 261 aa, Emericella nidulans
MGHEDAVYLAKLAEQAERYEEMVENMKVVAASDVELTVEERNLLSVAYKNVIGARRASWRIVTSIEQKEESKGNKSQVALIKEYRQKIEGELAKICQDILDVLDQHLIKSAQSGESKVFYHKMKGDYHRYLAEFAVGDNRKAAADASLEAYKSATEVAQTDLAPTHPIRLGLALNFSVFYYEILNSPDQACHLAKLAFDDAIAELDTLSEESYKDSTLIMQLLRDNLTLWTSSEAEPAAENAPAEKKEEAPAAEGEEKPAE

SEQ ID NO: 14015 - protein, 248 aa, Giardia lamblia ATCC 50803
MAEAFTREDYVFMAQLNENAERYDEMVETMRKISGMEGELSDKERNLLSVAYKNVIGPRRAAWRIVSSIEAKEKGRQKPNAKRIEQIRVYRQKIEKELSDICNDILKLLQEQFVPRSTNADAKVFYYKMQGDYYRYLAEYSSGEDKEKIAGSALNAYNSAFEISQQLPPTHPIRLGLALNFSVFYYEILASPDRACELARKAFDAAITDLDKLTEESYKDSTLIMQLLRDNLNLWVTDSAGDDNAEEK

SEQ ID NO: 14016 - protein, 266 aa, Neospora caninum
MAEEIKNLRDEYVYKAKLAEQAERYDEMAEAMKNLVENCLDEQQPKDELSVEERNLLSVAYKNAVGARRASWRIISSVEQKELSKQHMQNKALAAEYRQKVEEELNKICHDILQLLTDKLIPKTSDSESKVFYYKMKGDYYRYISEFSGEEGKKQAADQAQESYQKATETAEGHSPATHPIRLGLALNYSVFFYEILNLPQQACEMAKRAFDDAITEFDNVSEDSYKDSTLIMQLLRDNLTLWTSDLQADQQQQEGGEKPAEQADQ

SEQ ID NO: 14017 - protein, 259 aa, Picea glauca
MVESSREENVYMAKLAEQAERYEEMVEFMEKVTKGVEVEELTVEERNLLSVAYKNVIGARRASWRIISSIEQKEESRGNDEHVVTIREYRSKVESELSKICEGILRLLDSHLIPSSTAAESKVFYLKMKGDYHRYLAEFKTGAERKEAAENTLLAYKSAQDIAAAELAPTHPIRLGLALNFSVFYYEILNSPDRACNLAKQAFGEAIAELDTLGEDSYKDSTLIMQLLRDNLTLWTSDMQEDAGDEIKETSKRDEGEEQ

SEQ ID NO: 14018 - protein, 94 aa, Picea glauca
  unsure (1)..(94): unsure at all Xaa locations
DICRIXLAEQAERYEEMVEFMEKVTKGVEVEELTVEERNLLSVAYKNVIGARRASWRIIWSIEQKEESRGNDEHVVTIREYRSKVESYLSACSA

SEQ ID NO: 14019 - protein, 220 aa, Spinacia oleracea
RNLLSVAYKNVVGARRASWRIISSIEQKEESRGNEDHVSVIRDYRSRIEKELSDNCDGILKLLDTKLVPAASSGDSKVFYLKMKGDYHRYLAEFKTGAQRKEAAESTLTAYKAAQDIANAELAPTHPIRLGLALNFSVFYYEILNSPDRACNLAKQAFVEAIAELDTLGEDSYKDSTLIMQLLRDNLTLWTSDMQDEAADEITEEAAKQQKAVNNNKIAY

SEQ ID NO: 14020 - protein, 300 aa, Plasmodium falciparum 3D7
MNQYIDNDISVSNKEELIYYIKILNHLGSYDGKNIYEYYLFLIKYDILFIVSYILLTIETVTLIKSVNVENYNFNYTESLSVGFAFKNALNVKRKEKTILENIITNEKSSEREKICAELLKSKLNTDIRSIEKNTYAVLKNKCISRTTDDKILMLYWHILGDMSRYCADTFHGTDKEKMHEKSMKSYSYALHYANKMKIPPSSPKMLELLVSWTVLHKDMNKDINYSIELAAEAFRNAIQNMHLLENDDECSKTIRILGILRDNINKWCEISGRKNVNALFEINGENLDKYKDIMNSTHT

SEQ ID NO: 14021 - protein, 275 aa, Cucurbita pepo
MAGRSSPREEFVYLAKLAEQAERYEEMVEFMEKVSAAVDNEELTVEERNLLSVAYKNVIGARRASWRIISSIEQKEESRGNDDHVSIIRDYRSKIETELSNICGFRILNLLDSRLIPSAASGDSKVFYLKMKGDYHRYLAEFKTGAERKEAAESTLTAYKSAQDIANAELPPTHPIRLGLALNFSVFYYEILNSPDRACSLAKQAFDEAIAELDTLGEESYKDSTLIMQLLRDNLTLWTSDIRGSRDDIKEAAPKRDCTNSSEQIDLHVQDSTSP

SEQ ID NO: 14022 - protein, 286 aa, Arabidopsis thaliana
MSSSGSDKERETFVYMAKLSEQAERYDEMVETMKKVARVNSELTVEERNLLSVGYKNVIGARRASWRIMSSIEQKEESKGNESNVKQIKGYRQKVEDELANICQDILTIIDQHLIPHATSGEATVFYYKMKGDYYRYLAEFKTEQERKEAAEQSLKGYEAATQAASTELPSTHPIRLGLALNFSVFYYEIMNSPERACHLAKQAFDEAIAELDTLSEESYKDSTLIMQLLRDNLTLWTSDLPEDGGEDNIKTEESKQEQAKPADATEVVIHFKMRTDQRAWKLNEI

SEQ ID NO: 14023 - protein, 268 aa, Arabidopsis thaliana
MSSSGSDKERETFVYMAKLSEQAERYDEMVETMKKVARVNSELTVEERNLLSVGYKNVIGARRASWRIMSSIEQKEESKGNESNVKQIKGYRQKVEDELANICQDILTIIDQHLIPHATSGEATVFYYKMKGDYYRYLAEFKTEQERKEAAEQSLKGYEAATQAASTELPSTHPIRLGLALNFSVFYYEIMNSPERACHLAKQAFDEAIAELDTLSEESYKDSTLIMQLLRDNLTLWTSDLPEDGGEDNIKTEESKQEQAKPADATEN

SEQ ID NO: 14024 - protein, 253 aa, Arabidopsis thaliana
MAKLSEQAERYDEMVETMKKVARVNSELTVEERNLLSVGYKNVIGARRASWRIMSSIEQKEESKGNESNVKQIKGYRQKVEDELANICQDILTIIDQHLIPHATSGEATVFYYKMKGDYYRYLAEFKTEQERKEAAEQSLKGYEAATQAASTELPSTHPIRLGLALNFSVFYYEIMNSPERACHLAKQAFDEAIAELDTLSEESYKDSTLIMQLLRDNLTLWTSDLPEDGGEDNIKTEESKQEQAKPADATEN

SEQ ID NO: 14025 - protein, 260 aa, Brassica napus
MAVSAREEFVYMAKLAEQAERYEEMVEFMEKVSAAVDGDELTVEERNLLSVAYKNVIGARRASWRIISSIEQKEESRGNDDHVTAIRDYRSKIETELSGICDGILKLLDSRLVPAAASGDSKVFYLKMKGDYHRYLAEFKTGQERKDAAENTLSAYKAAQDIANAELAPTHPIRLGLALNFSVFYYEILNSPDRACSLAKQAFDDAIAELDTLGEGSYKDSTLIMQLLRDNLTLWTSDMQDDAADEIKEASAPKPTEEQQ

SEQ ID NO: 14026 - protein, 261 aa, Maackia amurensis
MASSKERETFVYVAKLAEQAERYEEMVDSMKNVATLDVELTVEERNLLSVGYKNVIGARRASWRILSSIEQKEEAKGNEVNAKRIKEYRQKVESELTNICNDVMRVIDEHLIPSASAGESTVFYYKMKGDYYRYLAEFKTGNEKKEAGDQSMKAYESATAAAEAELPPTHPIRLGLALNFSVFYYEILNSPERACHLAKQAFDEAISELDTLNEESYKDSTLIMQLLRDNLTLWTSDIPEDGEDAQKANGTAKLGGGEDAE

SEQ ID NO: 14027 - protein, 260 aa, Pisum sativum
MAAAHTPREENVYMAKLAEQAERYEEMVEFMEKVSANADSEELTVEERNLLSVAYKNVIGARRASWRIISSIEQKEESRGNEDHVAVIRDYRSKIESELSNICDGILKLLDTRLIPSASSGDSKVFYLKMKGDYHRYLAEFKTGAERKEAAESTLTGYKSAQDIANAELPPTHPIRLGLALNFSVFYYEILNSPDRACNLAKQAFDEAIAELDTLGEESYKDSTLIMQLLRDNLTLWTSDMQDDGADEIKEAAPKADEQQ

SEQ ID NO: 14028 - protein, 260 aa, Pisum sativum
MAAAHTPREENVYMAKLAEQAERYEEMVEFMEKVSANADSEELTVEERNLLSVAYKNVIGARRASWRIISSIEQKEESRGNEDHVDVIRDYRSKIESELSNICDGILKLLDTRLIPSASSGDSKVFYLKMKGDYHRYLAEFKTGAERKEAAESTLAAYKSAQDIANAELPPTHPIRLGLALNFSVFYYEILNSPDRACNLAKQAFDEAIAELDTLGEESYKDSTLIMQLLRDNLTLWTSDMQDDGADEIKEAAPKADEQQ

SEQ ID NO: 14029 - protein, 261 aa, Vicia faba
MASTKDRENFVYIAKLAEQAERYEEMVDSMKNVANLDVELTIEERNLLSVGYKNVIGARRASWRILSSIEQKEESKGNDVNAKRIKEYRHKVETELSNICIDVMRVIDEHLIPSAAAGESTVFYYKMKGDYYRYLAEFKTGNEKKEAGDQSMKAYESATTAAEAELPPTHPIRLGLALNFSVFYYEILNSPERACHLAKQAFDEAISELDTLNEESYKDSTLIMQLLRDNLTLWTSDIPEDGEDSQKANGTAKFGGGDDAE

SEQ ID NO: 14030 - protein, 257 aa, Vicia faba
MASSKETFVYTAKLAEQAERYEEMVEAMKNVAKLDVELTVEERNLLSVAYKNVVGGRRASWRILSSIEQREETKGNEVNVNRIKEYRKKVESELSDICTDIMAVIDEHLIPNSSGESNVFYYKMKGDYYRYLAEFKSGDDRKEAADQSLKAYQEASTAAETELPPTHPVRLGLALNFSVFYYEILNSPERACHLAKQAFDVAIAELDSLNEESYKDSTLIMQLLRDNLTLWTSDIPEEGVEEQKAESARAPVGDNAE

SEQ ID NO: 14031 - protein, 259 aa, Vigna angularis
MAAAPTPREENVYMAKLAEQAERYEEMVEFMEKVSAAADNEELNVEERNLLSVAYKNVIGARRASWRIISSIEQKEESRGNEDHVTVIRDYRSKIESELSNICDGILKLLDSRLIPSASSGDSKVFYLKMKGDYHRYLAEFKTGAERKEAAESTLAAYKSAQDIANAELPPTHPIRLGLALNFSVFYYEILNSPDRACNLAKQAFDEAIAELDTLGEESYKDSTLIMQLLRDNLTLWTSDMQDDGADEIKEAAPKQDDQ

SEQ ID NO: 14032 - protein, 165 aa, Capsicum annuum
MASQREENVYMAKLAEQAERYEEMVEFMEKVVAALDGGDELTVEERNLLSVAYKNVIGARRASWRIISSIEQKEESRGNEDHVTSIKNYRSKIEIELTSICNGILKLLDSKLIGSAATGDSKVFYLKMKGDYYRYLAEFKTGAERKEAAENTLSLISLLRILLMP

SEQ ID NO: 14033 - protein, 252 aa, Lycopersicon esculentum
MEKEREKQVYLARLAEQAERYDEMVEAMKAIAKMDVELTVEERNLVSVGYKNVIGARRASWRILSSIEQKEESKGHEQNVKRIKTYRQRVEDELTKICSDILSVIDEHLVPSSTTGESTVFYYKMKGDYYRYLAEFKAGDDRKEASEQSLKAYEAATATASSDLAPTHPIRLGLALNFSVFYYEILNSPERACHLAKQAFDEAIAELDSLSEESYKDSTLIMQLLRDNLTLWTSDLEEGGEHSKGDERQGEN

SEQ ID NO: 14034 - protein, 252 aa, Lycopersicon esculentum
  unsure (1)..(252): unsure at all Xaa locations
MEKEREKQVYLARLAEQAERYDEMVEAMKAIAKMDVELTVEERNLVSVGYKXVIGARRASWRILSSIEQKEESKGHEQNVKRIKTYRQRVEDELTKICSDILSVIDEHLVPSSTTGESTVFYYKMKGDYYRYLAEFKAGDDRKEASEQSLKLYEAATATASSDLAPTHPIRLGLALNFSVFYYEILNSPERACHLAKQAFDEAIAELDSLSEESYKDSTLIMQLLRDNLTLWTSDLEEGGEHSKGDERQGEN

SEQ ID NO: 14035 - protein, 251 aa, Nicotiana tabacum
MDKEREKQVYLARLAEQAERYDEMVEAMKTVAKMDVELTVEERNLVSVGYKNVIGARRASWRILSSIEQKEESKGHDQNVKRIKTYQQRVEDELTKYALTLSVIDEHVVPSSTSGESTVFYYKMKGDYYRYLAEFKSGDDRKEAADQSLKAYEAATATASADLAPTHPIRLGLALNFSVFYYEILNSPERACHLAKQAFDEAIAELDSLSEESYKDSTLIMQLLRDNFTLWTSDLEEGGEHSKGDERQGEN

SEQ ID NO: 14036 - protein, 261 aa, Nicotiana tabacum
MASSKERENFVYVAKLAEQAERYDEMVDAMKSVANMDVELSVEERNLLSVGYKNVVGSRRASWRILSSIEQKEESRGNEQNVKRIKEYRQKVETELTSICNDIMVVIDQHLIPSCTAGESTVFYHKMKGDYYRYLAEFKSGNDKKEVAELSLKAYQSATTAAEAELPPTHPIRLGLALNFSVFYYEIMNSPERACHLAKQAFDEAISELDSLNEDSYKDSTLIMQLLRDNLTLWTSDLPEDAEDAQKGDATNKAGGGEDAE

SEQ ID NO: 14037 - protein, 254 aa, Solanum tuberosum
MAREENVYMAKLAEQAERYEEMVQFMEKVSTSLGSEELTVEERNLLSVAYKNVIGARRASWRIISSIEQKEESRGNEEHVKCIKEYRSKIESELSNICDGILKLLDSNLIPSASNGDSKVFYLKMKGDYHRYLAEFKTGAERKEAAESTLSAYKAAQDIANTELAPTHPIRLGLALNFSVFYYEILNSPDRACNLAKQAFDEAIAELDTLGEESYKDSTLIMQLLRDNLTLWTSDMQDDGADEIKETKPDNEQQ

SEQ ID NO: 14038 - protein, 259 aa, Solanum tuberosum
MAVAPTAREENVYMAKLAEQAERYEEMVEFMEKVSNSLGSEELTVEERNLLSVAYKNVIGARRASWRIISSIEQKEESRGNEEHVNSIREYRSKIENELSKICDGILKLLDSKLIPSATSGDSKVFYLKMKGDYHRYLAEFKTGAERKEAAESTLTAYKAAQDIASAELAPTHPIRLGLALNFSVFYYEILNSPDRACNLAKQAFDEAIAELDTLGEESYKDSTLIMQLLRDNLTLWTSDMQDDGADEIKEDPKPEEKN

SEQ ID NO: 14039 - protein, 259 aa, Helianthus annuus
MAAASSPREENVYLAKLAEQAERYEEMVEFMEKVVAAADGGEELTIEERNLLSVAYKNVIGARRASWRIISSIEQKEESRGNEGHVSTIRDYRSKIESELSSICDGILKVLDSKLIGSASGGDSKVFYLKMKGDYYRYLAEFKTGDERKLAAENTLSAYKAAQDIANAELAPTHPIRLGLALNFSVFYYEILNSPDRACNLAKQAFDEAIAELDTLGEDSYKDSTLIMQLLRDNLTLWTSDMQDDTAEEVKEAPKPDDQ

SEQ ID NO: 14040 - protein, 130 aa, Pimpinella brachycarpa
GTRESKVFYLKMKGDYHRYMAEFKVGDERKNAAEDTMNSYKAAQDIALADLAPTHPIRLGLALNFSVFYYEILNSSDKACSMAKQAFEEAIAELDTLGEESYKDSTLIMQLLRDNLTLWTSDSQDQLDEP

SEQ ID NO: 14041 - protein, 259 aa, Lilium longiflorum
MSPAEPSREENVYMAKLAEQAERYEEMVEFMEKVARTVDTEELTVEERNLLSVAYKNVIGARRASWRIISSIEQKEESRGNEDHVALIKDYRGKIEAELSKICDGILKLLDSHLVPSSTAPESKVFYLKMKGDYHRYLAEFKSGAERKEAAESTLLAYKSAQDIALAELAPTHPIRLGLALNFSVFYYEILNSPDRACNLAKQAFDEAISELDTLGEESYKDSTLIMQLLRDNLTLWTSDINEEAGDEIKEASKAVEGQ

SEQ ID NO: 14042 - protein, 268 aa, Pneumocystis carinii
MTSRENLVYLAKLAEQAERYEEMVESMKKVASSDQELTVEERNLLSVAYKNVIGARRASWRIVSSIEQKEENKGNLSQAGLIKEYRSKIESELTSICNDILAVLDAHLIASASTGESKVFYYKMKGDYYRYLAEFAVGDKRKAPSDASLAAYKEASDIAGTDLPPTHPIRLGLALNFSVFYYEILNSPDCACHLAKQAFDDAIAELDTLSEESYKDSTLIMQLLRDNLTLWTSDMQDSNEKNDSKEAVSEVPDPGKPSETEASKTDDI

SEQ ID NO: 14043 - protein, 249 aa, Phytophthora infestans
MDRDSLVFLAKLAEQAERYDEMVDHMKAVANNHNVELTVEERNLLSVAYKNVIGSRRASWRVISSIENKGDSERSEHIKAYRQKIEGELVDICNDILTIIENNLIPNSSSEEGKVFYYKMKGDYHRYLAEFQVDDERKESSDKALESYKQASTIAMAELPPTHPIRLGLALNFSVFYYEILNSPDRACNLAKQAFDDAIAELDTLSEESYKDSTLIMQLLRDNLTLWTSDQEPDNADANQGDMNVQDVE

SEQ ID NO: 14044 - protein, 233 aa, Entodinium caudatum
YLAMLAEQCSRYKEMVQFLEDMVKQRDKDLNSDERNLLSIAYKNSISGGRSAVRTIMAYEAKEKKKENSTFLPYITEYKKQVEDELTKLCQGVLKTTDEQLLKKAEDDEAKVFYIKMKGDYNRYIAEYAEGDLKKQVSDDALKAYDEATEIAKTLPVLNPIALGLALNFSVFYYEVINDHKKAIEIAKAAVEKADKELPNIDEDADENRDTVSIYNLLKENLDMWVSEEEGDQ

SEQ ID NO: 14045 - protein, 234 aa, Entodinium caudatum
DKYEKQVYLAMLAEQCSRYEDMMTFLEDMVKAKAEDLSSDERNLLSIAYKNTISLDRQAIRTLLAYESKEAKKAESPYLDYIKEYKAKVQKELEDLCNKINRTIDDNLLPKATTDEAKVFYHKMKGDYCRYIAENVDGDTKKKYSDEGLAAYNAALEAAKNIDYKNPVKLGLALNLSVFYYEVVGNKDEACKLAEDTLSKSKEALNGADEEEDEVKDAMSIVNLLEENLGMGER

SEQ ID NO: 14046 - protein, 199 aa, Entodinium caudatum
YEKNVYLAMLAEQCSRYKEMVQFLEDMVKQRDKDLNSDERNLLSIAYKNSISGGRSAVRTIMAYEAKEKKKENSTFLPYITEYKKQVEDELTKLCQGVLKTTDEQLLKKAEDDEAKVFYIKMKGDYNRYIAEYAEGDLKKQVSDDALKAYDEATEIAKTLPVLNPIALGLALNFSVFYYEVINDHKKAIEIAKARCRKS

SEQ ID NO: 14047 - protein, 277 aa, Entodinium caudatum
DKEELLNRCKLNDLIENYGEMFEYLKELSHIKIDLQPDELDLITRCTKCYIGHKRGQYRKILTLIDKDKIVDNQKNSALLEILRKKLSEEILLLCNSTIELSQNFLNNNVFPKKTQLFFTKIIADHYRYIYEINGKEDIKLKAKEYYEKGLQTIKTCKYNSTETAYLTFYLNYSVFLHDTMRNTEESIKVSKACLYEALKDTEDIVDNSQKDIVLLCQMLKDNISLWKTETNEDNDNDNNNSTNNGKNNIENNSLNNINIKESTENNINEIKTNSDK

SEQ ID NO: 14048 - protein, 270 aa, Schizosaccharomyces pombe
MSTTSREDAVYLAKLAEQAERYEGMVENMKSVASTDQELTVEERNLLSVAYKNVIGARRASWRIVSSIEQKEESKGNTAQVELIKEYRQKIEQELDTICQDILTVLEKHLIPNAASAESKVFYYKMKGDYYRYLAEFAVGEKRQHSADQSLEGYKAASEIATAELAPTHPIRLGLALNFSVFYYEILNSPDRACYLAKQAFDEAISELDSLSEESYKDSTLIMQLLRDNLTLWTSDAEYSAAAAGGNTEGAQENAPSNAPEGEAEPKADA

SEQ ID NO: 14049 - protein, 271 aa, Schizosaccharomyces pombe
MSTTSREDAVYLAKLAEQAERYEGMVENMKSVASTDQELTVEERNLLSVAYKNVIGARRASWRIVSSIEQKEESKGNTAQVELIKEYRQKIEQELDTICQDILTVLEKHLIPNAASAESKVFYYKMKGDYYRYLAEFAVGEKRQHSADQSLEGYKAASEIATAELAPTHPIRLGLALNFSVFYYEILNSPDRACYLAKQAFDEAISELDSLSEESYKDSTLIMQLLRDNLTLWTSDAEYSAAAAGGNTEGAQENAPSNAPEGEREPKATHR

SEQ ID NO: 14050 - protein, 270 aa, Schizosaccharomyces pombe
MSTTSREDAVYLAKLAEQAERYEGMVENMKSVASTDQELTVEERNLLSVAYKNVIGARRASWRIVSSIEQKEESKGNTAQVELIKEYRQKIEQELDTICQDILTVLEKHLIPNAASAESKVFYYKMKGDYYRYLAEFAVGEKRQHSADQSLEGYKAASEIATAELAPTHPIRLGLALNFSVFYYEILNSPDRACYLAKQAFDEAISELDSLSEESYKDFTLIMQLLRDNLTLWTSDAEYSAAAAGGNTEGAQENAPSNAPEGEAEPKADA

SEQ ID NO: 14051 - protein, 270 aa, Schizosaccharomyces pombe
MSNSRENSVYLAKLAEQAERYEEMVENMKKVACSNDKLSVEERNLLSVAYKNIIGARRASWRIISSIEQKEESRGNTRQAALIKEYRKKIEDELSDICHDVLSVLEKHLIPAATTGESKVFYYKMKGDYYRYLAEFTVGEVCKEAADSSLEAYKAASDIAVAELPPTDPMRLGLALNFSVFYYEILDSPESACHLAKQVFDEAISELDSLSEESYKDSTLIMQLLRDNLTLWTSDAEYNQSAKEEAPAAAAASENEHPEPKESTTDTVKA

SEQ ID NO: 14052 - protein, 251 aa, Fucus vesiculosus
MASRDDLVYMAKLAEQAERFDEMVDHMKAVAQQPKELSVEERNLLSVAYKNVIGSRRASWRVISSIEGKDTVSDQLPLIRDYKSKIETELTDICADILKIIEAELIPNSTSEEGKVFYYKMKGDYHRYLAEFQSADERKTSASDALDAYQLASDHANQDLPPTHPIRLGLALNFSVFYYEILNSPDRACGLAKAAFDDAIAELDTLSEESYKDSTLIIMQLLRDNLTLWTSDQGEAEEAPGNADGTVVEDL

SEQ ID NO: 14053 - protein, 273 aa, Saccharomyces cerevisiae
MSQTREDSVYLAKLAEQAERYEEMVENMKAVASSGQELSVEERNLLSVAYKNVIGARRASWRIVSSIEQKEESKEKSEHQVELIRSYRSKIETELTKISDDILSVLDSHLIPSATTGESKVFYYKMKGDYHRYLAEFSSGDAREKATNSSLEAYKTASEIATTELPPTHPIRLGLALNFSVFYYEIQNSPDKACHLAKQAFDDAIAELDTLSEESYKDSTLIMQLLRDNLTLWTSDISESGQEDQQQQQQQQQQQQQQQQQAPAEQTQGEPTK

SEQ ID NO: 14054 - protein, 273 aa, Saccharomyces cerevisiae
MSQTREDSVYLAKLAEQAERYEEMVENMKAVASSGQELSVEERNLLSVAYKNVIGARRASWRIVSSIEQKEESKEKSEHQVELIRSYRSKIETELTKISDDILSVLDSHLIPSATTGECKVFYYKMKGDYHRYLAEFSSGDAREKATNSSLEAYKTASEIATTELPPTHPIRLFLALNFSVFYYEIQNSPDKACHLAKQAFDDAIAELDTLSEESYKDSTLIMQLLRDNLTLWTSDISESGQEDQQQQQQQQQQQQQQQQQAPAEQTQGEPTK

SEQ ID NO: 14055 - protein, 267 aa, Saccharomyces cerevisiae
MSTSREDSVYLAKLAEQAERYEEMVENMKTVASSGQELSVEERNLLSVAYKNVIGARRASWRIVSSIEQKEESKEKSEHQVELICSYRSKIETELTKISDDILSVLDSHLIPSATTGESKVFYYKMKGDYHRYLAEFSSGDAREKATNASLEAYKTASEIATTELPPTHPIRLGLALNFSVFYYEIQNSPDKACHLAKQAFDDAIAELDTLSEESYKDSTLIMQLLRDNLTLWTSDMSESGQAEDQQQQQQHQQQQPPAAAEGEAPK

SEQ ID NO: 14056 - protein, 267 aa, Saccharomyces cerevisiae; identical to SEQ ID NO: 459

SEQ ID NO: 14057 - protein, 194 aa, Saccharomyces cerevisiae
ISDDILSVLDSHLIPSATTGESKVFYYKMKGDYHRYLAEFSSGDAREKATNASLEAYKTASEIATTELPPTHPIRLGLALNFSVFYYEIQNSPDKACHLRKQAFDDAIAELDTLSEESYKDSTLIMQLLRDNLTLWTSDMSESGQAEDQQQQQQHQQQQPPAAAEVKHQSKYSDKSKEKLLKKRKKKERGCNNL

SEQ ID NO: 14058 - protein, 276 aa, Yarrowia lipolytica
MSSERETKTFLARLCEQADRYDEMVNYMKDVAKSGEELTVDERNLLSVAYKNVIGARRASWRVIFPIEQKEEAKGATHHLELLKTYRAKIEAELEDICSDVLDILTNHLLPKAENAESKVFYYKMKGDYHRYLAEFTSGEKRKEAATAAHESYKSATDVAQTELSSTHPIRLGLALNFSVFYYEILNSPDRACHLAKQAFDDAIAELDTLSEESFRDSTVIMQLLRDNLTLWKNDLEESLQAQQSEETPATDAAAASTEAAAPKEEAKPAAEEPKE

SEQ ID NO: 14059 - protein, 256 aa, Yarrowia lipolytica
MTREDNIYLARLSEQAGRYEDMVEYMKEIATGDQELSVEERNLLSVAYKNVIGAHRAWWRVVSSCEQKEEQKGKETKIIDDFRQKIEAGLQDICHDILNVLEKHLIPKLEKPSAEATEAAAKDGADPSELSESIVFYYKMKGDYYRYLAEFTTDDKRKEAAEKSLQAYQFASDEATSKLPPTHHIRLGLALNFSVFYYEILNSPERACQLAKQAFDDAIADIDSITEERSKDYALIMQLLRDNLTLWTNNDEPEQA

SEQ ID NO: 14060 - protein, 67 aa, Heterodera glycines
NSPDKACQLAKQAFDDAIAELDTLNEDSYKDSTLIMQLLRDNLTLWTSDTAGDEQEAGGEAGEAGGN

SEQ ID NO: 14061 - protein, 90 aa, Brassica rapa subsp. pekinensis
  unsure (1)..(90): unsure at all Xaa locations
MKGDYHRYLAEFKAGDERKETAESTLVAYKSAQDIATAELAPTHPIRLGLALNFSVFYYXILNSPDRACTLAXQAFDEAIAELDTLGEES

SEQ ID NO: 14062 - protein, 262 aa, Neurospora crassa
MGHEDAVYLAKLAEQAERYEEMVENMKIVASEDRDLTVEERNLLSVAYKNVIGARRASWRIVTSIEQKEESKGNSTQVSLIKEYRQKIESELAKICEDILSVLDQHLIPSATTGESKVFYHKMKGDYHRYLAEFAVGDKRKDSADKSLDAYKNATDVAQTELPPTHPIRLGLALNFSVFYYEILNAPDQACHLAKQAFDDAIAELDTLSEESYKDSTLIMQLLRDNLTLWTSSEAEAPAAQGEAAPEEPKADAPAAEEPKAE

SEQ ID NO: 14063 - protein, 270 aa, Neurospora crassa
MANERERCVKTFLARLCEQAERYDEMVTFMKEVAKLGGELTVDERNLLSVAYKNVVGTRRASWRIISSIEQKEESKGSDKHVAIIKEYRQKIETELETVCKDVLEVLDEALIPHAATGESKVFYHKMKGDYHRYLAEFASGEKRKNAATAAHEAYKNATDVAQTELTPTHPIRLGLALNFSVFYYEILNSPDRACHLAKQAFDDAIAELDSLSEESYRDSTLIMQLLRDNLTLWTSSDNGEPEAAAEAPKAEEKAEEKAEAAEEKAPEEQ

SEQ ID NO: 14064 - protein, 264 aa, Candida albicans
MPASREDSVYLAKLAEQAERYEEMVENMKAVASSGQELSVEERNLLSVAYKNVIGARRASWRIVSSIEQKEEAKGNESQVALIRDYRAKIEAELSKICEDILSVLSDHLITSAQTGESKVFYYKMKGDYHRYLAEFAIAEKRKEAADLSLEAYKAASDVAVTELPPTHPIRLGLALNFSVFYYEILNSPDRACHLAKQAFDDAVADLETLSEDSYKDSTLIMQLLRDNLTLWTDLSEAPAATEEQQQSSQAPAAQPTEGKADQE

SEQ ID NO: 14065 - protein, 262 aa, Trichoderma harzianum
MGHEDAVYLAKLAEQAERYEEMVENMKIVASEDRDLTVEERNLLSVAYKNVIGARRASWRIVTSIEQKEESKGNSSQVTLIKEYRQKIENELAKICDDILEVLDQHLIPSAKSGESKVFYHKIKGDYHRYLAEFAIGDRRKDSADKSLEAYKAATEVAQTELPPTHPIRLGLALNFSVFYYEILNAPDQACHLAKQAFDDAIAELDTLSEESYKDSTLIMQLLRDNLTLWTSSEAETPARLMPLLRRRPLLRLPSRRRRAQG

SEQ ID NO: 14066 - protein, 184 aa, Trypanosoma brucei brucei
EERNLLSVAYKNVIGARRACWRSISALEQKEDLKKEKNVTLIKAFKRQIEKELSDICIDILELIEKHLLPNAETDETKVYYLKMKGDYHRYYAEIETNTEEQKDKALEAYTQAMQYNASLKPTSPIRLGLALNFSVFYYEILKSPDRGCQLAREAFEEALSDPDVLDEEQHKEAALIMQLLRDN

SEQ ID NO: 14067 - protein, 239 aa, Entamoeba histolytica
MASREDCVYTAKLAEQSERYDEMVQCMKQVAEMEAELSIEERNLLSVAYKNVIGAKRASWRIISSLEQKEQAKGNDKHVEIIKGYRAKIEKELSTCCDDVLKVIQENLLPKASTSESKVFFKKMEGDYYRYFAEFTVDEKRKEVADKSLAAYTEATEISNAELAPTHPIRLGLALNFSVFYFEIMNDADKACQLAKQAFDDAIAKLDEVPENMYKDSTLIMQLLRDNLTLWTSDACDEE

SEQ ID NO: 14068 - protein, 236 aa, Entamoeba histolytica
SEDCVFLSKLAEQSERYDEMVQYMKQVAALNTELSVEERNLLSVAYKNVIGSRRASWRIITSLEQKEQAKGNDKHVEIIKGYRAKIEDELAKYCDDVLKVIKENLLPNASTSESKVFYKKMEGDYYRYYAEFTVDEKRQEVADKSLAAYTEATEISNADLAPTHPIRLGLALNFSVFYYEIMNDADKACQLAKQAFDDSIAKLDEVPESSYKDSTLIMQLLRDNLTLWTSDTADEE

SEQ ID NO: 14069 - protein, 238 aa, Entamoeba histolytica
MTSREDLVYLSKLAEQSERYEEMVQYMKQVAEMGTELSVEERNLISVAYKNVVGSRRASWRIISSLEQKEQAKGNTQRVELIKTYRAKIEQELSQKCDDVLKIITEFLLKNSTSIESKVFFKKMEGDYYRYYAEFTVDEKRKEVADKSLAAYQEATDTAASLVPTHPIRLGLALNFSVFYYQIMNDADKACQLAKEAFDEAIQKLDEVPEESYKESTLIMQLLRDNLTLWTSDMGDDE

SEQ ID NO: 14070 - protein, 277 aa, Eimeria tenella
MIEDIKTLREEHVYRAKLAEQAERYDEMAEAMKNLVENCLDQNNSPPGAKGDELTVEERNLLSVAYKNAVGARRASWRIISSVEQKEANRNHMANKALAASYRQKVENELNKICQEILTLLTDKLLPRTTDSESRVFYFKMKGDYYRYISEFSNEEGKKASAEQAEESYKRATDTAEAELPSTHPIRLGLALNYSVFYYEILNQPQKACEMAKLAFDDAITEFDSVSEDSYKDSTLIMQLLRDNLTLWTSDLQTQEQQQQPVGEGAEAPKVEATEQQ

SEQ ID NO: 14071 - protein, 266 aa, Toxoplasma gondii
MAEEIKNLRDEYVYKAKLAEQAERYDEMAEAMKNLVENCLDEQQPKDELSVEERNLLSVAYKNAVGARRASWRIISSVEQKELSKQHMQNKALAAEYRQKVEEELNKICHDILQLLTDKLIPKTSDSESKVFYYKMKGDYYRYISEFSGEEGKKQAADQAQESYQKATETAEAELPSTHPIRLGLALNYSVFFYEILNLPQQACEMAKRAFDDAITEFDNVSEDSYKDSTLIMQLLRDNLTLWTSDLQADQQQQEGGEKPAEQADQ

SEQ ID NO: 14072 - protein, 256 aa, Plasmodium falciparum
MATSEELKQLRCDCTYRSKLAEQAERYDEMADAMRTLVEQCVNNDKDELTVEERNLLSVAYKNAVGARRASWRIISSVEQKEMSKANVHNKNVAATYRKKVEEELNNICQDILNLLTKKLIPNTSESESKVFYYKMKGDYYRYISEFSCDEGKKEASNCAQEAYQKATDIAENELPSTHPIRLGLALNYSVFFYEILNQPHQACEMAKRAFDDAITEFDNVSEDSYKDSTLIMQLLRDNLTLWTSDLQGDQTEGNK

SEQ ID NO: 14073 - protein, 234 aa, Plasmodium falciparum
LAEQAERYDEMADAMRTLVEQCVNNDKDELTVEERNLLSVAYKNAVGARRASWRIISSVEQKEMSKANVHNKNVAATYRKKVEEELNNICQDILNLLTKKLIPNTSESESKVFYYKMKGDYYRYISEFSCDEGKKEASNFAQEAYQKDTDIAENELPSTHPIRLGLALNYSVFFYEILNQLHQACEMAKRAFDDAITEFDNVSEDSYKDSTLIMQLLRDNLTLWTSDLQGDQTE

SEQ ID NO: 14074 - protein, 262 aa, Plasmodium knowlesi
MATSEDLKQLRSDCTYRSKLAEQAERYDEMADAMRTLVEQCVNNDKDELTVEERNLLSVAYKNAVGARRASWRIISSVEQKEMSKANVHNKNIAATYRKKVEEELNNICQDILNLLTKKLIPNTSESESKVFYYKMKGDYYRYISEFSCDEGKKEASNFAQEAYQKATDIAENELPSTHPIRLGLALNYSVFFYEILNQPHQACEMAKRAFDDAITEFDNVSEDSYKDSTLIMQLLRDNLTLWTSDLQGDQTEEKSKDEGLE

SEQ ID NO: 14075 - protein, 244 aa, Tetrahymena pyriformis
MSLSREELIYMAKIAEQTERFEDMLEYMKKVVQTGQELSVEERNLLSVAYKNTVGSRRSAWRSISAIQQKEESKGSKHLDLLTNQKKKIETELNLYCDDILKLLNDFLIKNATNAEAQVFFLKMKGDYYRYIAEYAQGDEHKKAADGALDSYNKACEIANSELRPTHPIRLGLALNFSVFHYEVLNDPSKACTLAKTAFDEAIGDIERIQEDQYKDATTIMQLIRDNLTLWTSEFQDDAEEQQE

SEQ ID NO: 14076 - protein, 258 aa, Encephalitozoon cuniculi
MASKQYEEALQKANLSDMAERYDDMAKEMRLAVTLAHEDKHILNVMARNLFSVAYKNLVSSRRSSWRMLCSERQKLEGKDPSVVHVINEKIKVVEEELLRFCDEVLDIITTYILSLEEAQKNIEYNIFFLKMKGDYYRYKAEVVTGPEHSEVSKHAAESYKEATEKAKTLPPTNPIKLGLALNYSVFHYEILNDSEKACSIAKGAFDEAIKELDTLSEEHYRDSTLIMQLLRDNLTLWTSREEGNVMGDEGKGDPDEN

SEQ ID NO: 14077 - protein, 249 aa, Hydra vulgaris
MSHLSEQELVDMAKLAEQAERYDDMVKFMKELTVKSKKLSDEHRNLLSVAFKNVVGARRSAWRIISSIESKQEEKGDSTELTTKYKKEIEHELQERCREVLDLLDNHLLVEVDSGCNGENGNYEGKVFYQKMKGDYYRYLVEVSSSEKRNELAAKSQQAYDEATKTAEKLPNTHPISLGLALNFSVFHYEIMNDSPKACALAKKAFDGAIAELDSLKEESYKDSTLIMQLLRDNLTLWTSETEQDEQNE

SEQ ID NO: 14078 - protein, 254 aa, Schistosoma japonicum
MRDSFVLQQKDLSPSDLVQIAKLAEQAERYDDMAAAMKAYAELPAELGSEERNLFSVAYKNVVGARRSAWRVISAVEHKHDENSKKRQLTKEYRVKMEEELNEICREVLTLLSKYLTPKSNGFESQVFYRKMEGDYYRFLAEVATGDARKEVVEKSQAAYEKATEIAEEMLPSTHPIRLGLALNFSMFYYEIKCDPTQACNLAKRAFDTSIGELDSLQDDSYKDSTLIMQLLRDNLTLWASDQPEAEDVDGNDG

SEQ ID NO: 14079 - protein, 246 aa, Schistosoma japonicum
MCDESWINKSKIQDRESLVALAKISDQSERYNDMACAMKKVVEMPSKLNNEERNLFSAAYKNVVGCRRSAWRIVSSIEQKLEEEKKKRATEYRTFIENELQSVCQEVLDILDKFLIKSDDAPEDIVFYRKMKGDYYRYLAEFQTGDKRAEAIKHSKEAYEAATAKATSDLPPTHPIRLGLALNFSVFYYEIENNPEKACTIAQNAFNESIELLDQPDSGSLKDSTLVMQLLRDNLTLWTSEREAAQ

SEQ ID NO: 14080 - protein, 250 aa, Schistosoma japonicum
MVSDRECSVECAKLCEQAERYDDMVKAVIEIVKISEGELTIEERNLLSVAYKNAVGARRSSWRILNSLETKRDRYRTLQCTNIHAVSKQCEKKLDEICTNILDLLHDYLVPKAASDESKVFLHKMRGDYHRYRAEFAVHDKRKEAAESSLLAYKEAMKYAENLTVTHPIRLGLGLNFSVLYYEILNNPAKACDVAKTAFDLAIAELDTLSEESYKDSTLIMQLLRDNLNLWNPFNDGEKDTAASPKGEEK

SEQ ID NO: 14081 - protein, 249 aa, Schistosoma mansoni
MTEREALVYRAKLAEQLERYDEMVDAMKEVVEMAEELTVEERNLLSVAYKNVIGSRRSSWRVFSAVEQTEGNRGNAEKQACAKKFREVLESELDRVSKDILELIDKYLIKSATKSDSKVFYLKMKGDYFRYMAEFSVDPQRKKAAEESNKAYQEASEIAATQLFPTHPIRLGLALNYSVYFYEIMNDPDEACRLAQAAFDDAIAKLDQLSEESYKDSTLIMQLLRDNLTLWTSDPERDDNVKKDTDEKA

SEQ ID NO: 14082 - protein, 248 aa, Echinococcus granulosus
MAAITSWITDSGCKDHASLVSIAKLAEQAERYEDMAVAMKTIAEMGNELNNEERNLLSVAYKNVVGARRSSWRIMSSIAKKQAGTPLADQTDIYLKKVEEELTKICNDVLALLSKNLITEKIGAEAKIFYYKMMGDYYRYLAEVQEGEQNDKSTEAAEEAYQKATSLAEAELSVTHPIRLGLALNFSVFYYEIKNMPEKACSLAKAAFDAAITEVDSIKDETYKDSTLIMQLLRDNLTLWSSECETDS

SEQ ID NO: 14083 - protein, 244 aa, Echinococcus granulosus
MSRLAECTISDTVDELVQRAKLAEQAERYDDMAGACKTMAKMRNELNNEEANLLSVAYKNVVGARRSSWRIMSSIAKKQAGTPLAHQHDIYLKKVEEELIQICNDVLALPVLPITEKIGAEAKIFYYKMMGDYYRYSAEVQEGEQNDKSTEAAEEANQKATSLAEAELSVTHPIRLGLALNFSVFYYEIKNMPEKACSLAKAAFDAAITEVDSIKDETYKDSTLIMQLLRDNLTLWNSECETDS

SEQ ID NO: 14084 - protein, 248 aa, Echinococcus multilocularis
MAAITSWITDSGCKDHASLVSIAKLAEQAERYEDMAVAMKTIAEMGNELNNEERNLLSVAYKNVVGARRSSWRIMSSIAKKQAGTPLADQTDIYLKKVEEELTKICNDVLALLSKNLITEKIGAEAKIFYYKMMGDYYRYLAEVQEGEQNDKSTEAAEEAYQKATSLAEAELSVTHPIRLGLALNFSVFYYEIKNMPEKACSLAKAAFDAAITEVDSIKDETYKDSTLIMQLLRDNLTLWNSECETDS

SEQ ID NO: 14085 - protein, 244 aa, Echinococcus multilocularis
MSRLAECTISDTVDELVQRAKLAEQAERYDDMAGACKTMAEMGNELNNEERNLLSVAYKNVLGARRSSWRIMSSIAKKQAGTPLADQTDIYLKKVEEELIPICNDVLALPVLPITEKIGAEAKIFYYKMMGDYYRYLAEVQEGEQNDKSTEAAEEANQKATSLAEAELSVTHPIRLGLALNFSVFYYEIKNMPEKACSLAKAAFDAAITEVDSIKDETYKDSTLIMQLLRDNLTLWNSECETDS

SEQ ID NO: 14086 - protein, 81 aa, Boltenia villosa
  unsure (1)..(81): unsure at all Xaa locations
YEILNSPDLACRLAKAAFDDAIAELDTLSEDSYKDSTLIMQLLXFNLTLWTSDLNPPEGEGEDVKGEQEILQDVEATDEAS

SEQ ID NO: 14087 - protein, 111 aa, Penaeus monodon
GDARAGLVDDSQKSYQEAFDIAKAEMQPTHPIRLGLALNFSVFFYEILNSPDKACQLAKQAFDDAIAELDTLNEDSYKDSTLIMQLLRDNLTLWTSDTQGEGDEANEGDQN

SEQ ID NO: 14088 - protein, 111 aa, Penaeus monodon
GDARAGVVDDSQKSYQEAFDIAKAEMQPTHPIRLGLALNFSVFFYEILNSPDKACQLAKQAFDDAIAELDMLNEDSYKDSTLIMQLLRDNLTLWTSDTQGEGDEANEGDQN

SEQ ID NO: 14089 - protein, 262 aa, Plasmodium yoelii yoelii
MATPEELKQLRSDCTYRSKLAEQAERYDEMADAMRTLVEQCVNNDKDELTVEERNLLSVAYKNAVGARRASWRIISSVEQKEMSKANVHNKNVAATYRKKVEEELNSICQDILNLLTKKLIPNTSESESKVFYYKMKGDYYRYISEFSCDEGKKEASNFAQEAYQKATDIAENELPSTHPIRLGLALNYSVFFYEILNQPHQACEMAKRAFDDAITEFDNVSEDSYKDSTLIMQLLRDNLTLWTSDLQGDQTEEKSKDEGLE

SEQ ID NO: 14090 - protein, 117 aa, Plasmodium yoelii yoelii
EFSCDEGKKEASNFAQEAYQKATDIAENELPSTHPIRLGLALNYSVFFYEILNQPHQACEMAKRAFDDAITEFDNVSEDSYKDSTLIMQLLRDNLTLWTSDLQGDQTEEKSKDEGLE

SEQ ID NO: 14091 - protein, 183 aa, Paracentrotus lividus
VAYKNVVGSRRAALHTVSIIEQKDETKTKNEENKLQLLKNYRGLIEKELTELCRDGLDILENFVIPSAKDPETKVFYLKMMGDYYRYLAEIFVDSERKTASDNSLDAYKKAAELAEAELNPTDPIRLGLALNFSEFYHEILKMPNDACRLAKAAFDDAIAGLDNINLPEDSYKDSTLIMQLLR

SEQ ID NO: 14092 - protein, 256 aa, Ciona intestinalis
MSTEREDFVYQAKLAEQAERYDEMVEQMKKIAQLGISLTVEERNLLSVAYKNVIGARRASWRIISSIEMKEGSKAQMPSDYRQQVEEELKNICHDILSVIDEHLLPPSQTDQDIESQVFYHKMKGDYHRYLAEFETGDERKSAAEDSLTAYKAASDAAGKLPTTHPIRLGLALNFSVFYYEILNSPDRACRLAKEAFDQAIAELDTLSEESYKDSTLIMQLLRDNLTLWTSDMQGDADGHEGNTDEVQEMHATEAS

SEQ ID NO: 14093 - protein, 260 aa, Oenothera elata subsp. hookeri
MATAPSPREENVYLAKLAEQAERYEEMVEFMEKVCAAADSEELTVEERNLLSVAYKNVIGARRASWRIISSIEQKEESRGNDDHVSTIRDYRSKIETELSNICGGILKLLDSRLIPSAASGDSKVFYLKMKGDYHRYLAEFKTGAERKEAAESTLSAYKAAQDIANAELAPTHPIRLGLALNFSVFYYEILNSPDRACNLANEAFDEAIAELDTLEEESYKDSTLIMQLLRDNLTLWTSDMQDDGGDEIKEAAPKPDEQY

SEQ ID NO: 14094 - protein, 272 aa, Thellungiella halophila
MATQPPSSSSAREEFVYMAKLAEQAERYEEMVEFMEKVAKAVDKEELTVEERNLLSVAYKNVIGARRASWRIISSIEQKEESRGNNDHVSLIRDYRTKIETELSGICDGILKLLDTMLIPAAASGDSKVFYLKMKGDYHRYLAEFKTSQERKDAAEHTLNAYKAAQDIANAELAPTHPIRLGLALNFSVFYYEILNSPDRACNLAKQAFDDAIAELDTLGEESYKDSTLIMQLLRDNLTLWTSDMQDDDDVIKEAAAAAPAAPKPAEEQQQS

SEQ ID NO: 14095 - protein, 231 aa, Ovis aries
YDEMVESMKKVAGMDVELTVEERNLLSVAYKNVIGARRASWRIISSIEQKEENKGGEDKLKMIREYRQMVETELKLICCDILDVLDKHLIPAANTGESKVFYYKMKGDYHRYLAEFATGNDRKEAAENSLVAYKAASDIAMTELPPTHPIRLGLALNFSVFYYEILNSPDRACRLAKAAFDDAIAELDTLSEESYKDSTLIMQLLRDNLTLWTSDMQGDGEEQNKEALQDV

SEQ ID NO: 14096 - protein, 263 aa, Arabidopsis thaliana
MGSGKERDTFVYLAKLSEQAERYEEMVESMKSVAKLNVDLTVEERNLLSVGYKNVIGSRRASWRIFSSIEQKEAVKGNDVNVKRIKEYMEKVELELSNICIDIMSVLDEHLIPSASEGESTVFFNKMKGDYYRYLAEFKSGNERKEAADQSLKAYEIATTAAEAKLPPTHPIRLGLALNFSVFYYEIMNAPERACHLAKQAFDEAISELDTLNEESYKDSTLIMQLLRDNLTLWTSDISEEGGDDAHKTNGSAKPGAGGDDAE

SEQ ID NO: 14097 - protein, 263 aa, Arabidopsis thaliana
MGSGKERDTFVYLAKLSEQAERYEEMVESMKSVAKLNVDLTVEERNLLSVGYKNVIGSRRASWRIFSSIEQKEAVKGNDVNVKRIKEYMEKVELELSNICIDIMSVLDEHLIPSASEGESTVFFNKMKGDYYRYLAEFKSGNERKEAADQSLKAYEIATTAAEAKLPPTHPIRLGLALNFSVFYYEIMNAPERACHLAKQAFDEAISELDTLSEESYKDSTLIMQLLRDNLTLWTSDISEEGGDDAHKTNGSAKPGAGGDDAE

SEQ ID NO: 14098 - protein, 259 aa, Euphorbia esula
MDSSKDRETFVYLAKLAEQAERYDEMVESMKKVANLDVELTVEERNLLSVGYKNVVGSRRASWRILSSIEQKEESKGNEINAKRIKEYRNKVESELSTICSDIMTVIDEHLIPSCNAGESTVFYYKMKGDYYRYLAEFKAGNDKKEAADQSLKAYQTASTTAETDLPPTHPIRLGLALNFSVFYYEIMNSPERACHLAKQAFDEAISELDTLSEESYKDSTLIMQLLRDNLTLWTSDIPEDGDQKMETSGKASGGEDAE

SEQ ID NO: 14099 - protein, 261 aa, Lycopersicon esculentum
MASSKERENFVYVAKLAEQAERYDEMVEAMKNVANMDVELTVEERNLLSVGYKNVVGSRRASWRILSSIEQKEESRGNEQNVKRIKEYLQKVESELTNICNDIMVVIDQHLIPSCSAGESTVFYHKMKGDYYRYLAEFKAGNDKKEVAELSLKAYQAATTAAEAELAPTHPIRLGLALNFSVFYYEIMNSPERACHLAKQAFDEAISELDSLNEDSYKDSTLIMQLLRDNLTLWTSDLPEDAEDAQKGDATNKAGGGEDAE

SEQ ID NO: 14100 - protein, 261 aa, Lycopersicon esculentum
MASSKERESLVYIARLAEQAERYDEMVDAMKNVANLDVELTVEERNLLSVGYKNVVGSRRASWRILSSIEQKEDARGNEQNVKRIQGYRQKVESELTDICNNIMTVIDEHLIPSCTAGESTVFYYKMKGDYYRYLAEFKTGDDKKEVSDLSLKAYQTATTTAEAELPITHPIRLGLALNFSVFYYEIMNSPERACQLAKQVFDEAISELDSLNEDNYKDGTLILQLLRDNLTLWTSDIPEDGEEAPKGDAANKVGAGEDAE

SEQ ID NO: 14101 - protein, 262 aa, Zea mays; identical to SEQ ID NO: 456

SEQ ID NO: 14102 - protein, 248 aa, Hydra vulgaris
MASTDSKEILIQRAKLAEQAERYDDMAAAMKQVTKMTDEPLTGEERNLLSVAYKNIVGAKRSSWRVITSIEQKANDKQALAAQYRSNIEKELKGVCEEVLELLAKYLVNKSIERVDPANKKTLESAVFYLKMKGDYYRYLAEVAVDEERKRVIFEADAAYKQASEISENLISTDPIRLGLALNYSVFHYEIRNKPSEACTLAKKAFDDAIVELDSLAEDSYKDSTLIMQLLRDNLTLWTADADATTEE

SEQ ID NO: 14103 - protein, 36 aa, Spodoptera frugiperda
SKAKMQPTHPIRLGLALNFSVFYYEILNSPDKACQL

SEQ ID NO: 14104 - protein, 260 aa, Populus x canescens
MDSSKDRENFVYVAKLAEQAERYDEMVDAMKKVAKLDVELTVEERNLLSVGYKNVIGARRASWRILSSIEQKEESKGNETNVKRIKEYRQKVEAELTGICHDIMTVIDEHLIPSCTAGESTVFYYKMKGDYYRYLAEFKSGNERKEAADQSLKAYETATTTAASDLSPTHPIRLGLALNFSVFYYEIMNSPERACHLAKQAFDEAISELDTLSEESYKDSTLIMQLLRDNLTLWTSDIPEDGEDQKMETSARTGEGEDAE

SEQ ID NO: 14105 - protein, 260 aa, Populus x canescens
MDSSKDRENFVYVAKLAEQAERYDEMVDAMKKVAKLDVELTVEERNLLSVGYKNVIGARRASWRILSSIEQKEESKGNETNVKRIKEYRKKVEAELTGVCNDIMTVIDEHLIPSSIPGESAVFYYKMKGDYYRYLAEFKSGNERKEAADQSLKAYETATSTAARDLSPTHPIRLGLALNFSVFYYEIMNSPERACHLAKQSFDEAISELDTLSEESYKDSTLIMQLLRDNLTLWTSDIPEDGEDQKMETSAKAGGGEDAE

SEQ ID NO: 14106 - protein, 255 aa, Mus musculus
MDDREDLVYQAKLAEQAERYDEMVESMKKVAGMDVELTVEERNLLSVAYKNVIGARRASWRIISSIEQKEENKGGEDKLKMIREYRQMVETELKLICCDILDVQDKHLIPAANTGESKVFYYKMKGDYHRYLAEFATGNDRKEAAENSLVAYKAASDIAMTELPPTHPIRLGLALNFSVFYYEILNSPDRACRLAKAAFDDAIAELDTLSEESYKDSTLIMQLLRDNLTLWTSDMQGDGEEQNKEALQDVEDENQ

SEQ ID NO: 14107 - protein, 273 aa, Anopheles gambiae str. PEST
GRPTELQHRTSYSRTATMSERENNIYKAKLAEQAERYDEMVEAMKKVASMDVELTVEERNLLSVAYKNVIGARRASWRIISSIEQKEENKGVEEKLEMIKNYRSQVEKELRDICSDILEVLDKHLIPCATTGESKVFYYKMKGDYHRYLAEFATGGDRKDAAENSLVAYKAASDIAMTDLPPTHPIRLGLALNFSVFYYEILNSPDRACRLAKAAFDDAIAELDTLSEESYKDSTLIMQLLRDNLTLWTSDMQADGEGEQKEQIQDVEDQDVS

SEQ ID NO: 14108 - protein, 259 aa, Chlamydomonas reinhardtii
MAVDREECVYMAKLAEQAERYDEMVEEMKKVAKLVHDQELSVEERNLLSVAYKNVIGARRASWRIISSIEQKEEAKGNEEHVQRIRKYRTVVEEELSKICASILQLLDDHLIPTASTGESKVFYLKMKGDYHRYLAEFKTGADRKEAAEHTLLAYKAAQDIALVDLPPTHPIRLGLALNFSVFYYEILNSPERACHLAKQAFDEAIAELDSLGEESYKDSTLIMQLLRDNLTLWTSDMQDPAAGDDREGADMKVEDAEP

SEQ ID NO: 14109 - protein, 264 aa, Mesembryanthemum crystallinum
MSSESSREENVYMAKLAEQAERYEEMVEFMEKVAKMTDTEELSVEERNLLSVAYKNVIGARRASWRIISSIEQKEESRGNEDHVSTIKEYRGKIETELSKICDGILNLLESHLIPSASTAESKVFYLKMKGDYHRYLAEFKTGAERKEAAENTLLAYKSAQDIALAELAPTHPIRLGLALNFSVFYYEILNSPDRACNLAKQAFDEAISELDTLGEESYKDSTLIMQLLRDNLTLWTSDNAEEGGDEIKEAAAKRESGEEKPQQ

SEQ ID NO: 14110 - protein, 40 aa, Mesembryanthemum crystallinum
LIMQLLRDNLTLWTSDMQEDGADEIKEAAAKPDEEAKPMS

SEQ ID NO: 14111 - protein, 259 aa, Arabidopsis thaliana
MASGREEFVYMAKLAEQAERYEEMVEFMEKVSAAVDGDELTVEERNLLSVAYKNVIGARRASWRIISSIEQKEESRGNDDHVTAIREYRSKIETELSGICDGILKLLDSRLIPAAASGDSKVFYLKMKGDYHRYLAEFKTGQERKDAAEHTLAAYKSAQDIANAELAPTHPIRLGLALNFSVFYYEILNSPDRACNLAKQAFDEAIAELDTLGEESYKDSTLIMQLLRDNLTLWTSDMQDDAADEIKEAAAPKPTEEQQ

SEQ ID NO: 14112 - protein, 259 aa, Arabidopsis thaliana
MASGREELVYMAKLAEQAERYEEMVEFMEKVSAAVDGDELTVEERNLLSVAYKNVIGARRASWRIISSIEQKEESRGNDDHVTAIREYRSKIETELSGICDGILKLLDSRLIPAAASGDSKVFYLKMKGDYHRYLAEFKTGQERKDAAEHTLAAYKSAQDIANAELAPTHPIRLGLALNFSVFYYEILNSPDRACNLAKQAFDEAIAELDTLGEESYKDSTLIMQLLRDNLTLWTSDMQDDAADEIKEAAAPKPTEEQQ

SEQ ID NO: 14113 - protein, 267 aa, Arabidopsis thaliana
MATPGASSARDEFVYMAKLAEQAERYEEMVEFMEKVAKAVDKDELTVEERNLLSVAYKNVIGARRASWRIISSIEQKEESRGNDDHVSLIRDYRSKIETELSDICDGILKLLDTILVPAAASGDSKVFYLKMKGDYHRYLAEFKSGQERKDAAEHTLTAYKAAQDIANSELAPTHPIRLGLALNFSVFYYEILNSPDRACNLAKQAFDEAIAELDTLGEESYKDSTLIMQLLRDNLTLWTSDMQDDVADDIKEAAPAAAKPADEQQS

SEQ ID NO: 14114 - protein, 267 aa, Arabidopsis thaliana
MATPGASSARDEFVYMAKLAEQAERYEEMVEFMEKVAKAVDKDELTVEERNLLSVAYKNVIGARRASWRIISSIEQKEESRGNDDHVSLIRDYRSKIETELSDICDGILKLLDTILVPAAASGDSKVFYLKMKGDYHRYLAEFKSGQERKDAAEHTLTAYKAAQDIANSELAPTHPIRLGLALNFSVFYYEILNSPDRACNLAKQAFDEAIAELDTLGEESYKDSTLIMQLLRDNLTLWASDMQDDVADDIKEAAPAAAKPADEQQS

SEQ ID NO: 14115 - protein, 262 aa, Arabidopsis thaliana
MTSARDEFVYMAKLAEQAERYEEMVEFMEKVAKAVDKDELTVEERNLLSVAYKNVIGARRASWRIISSIEQKEESRGNDDHVSLIRDYRSKIETELSDICDGILKLLDTILVPAAASGDSKVFYLKMKGDYHRYLAEFKSGQERKDAAEHTLTAYKAAQDIANSELAPTHPIRLGLALNFSVFYYEILNSPDRACNLAKQAFDEAIAELDTLGEESYKDSTLIMQLLRDNLTLWASDMQDDVADDIKEAAPAAAKPADEQQS

SEQ ID NO: 14116 - protein, 267 aa, Arabidopsis thaliana
MAAPPASSSAREEFVYLAKLAEQAERYEEMVEFMEKVAEAVDKDELTVEERNLLSVAYKNVIGARRASWRIISSIEQKEESRGNDDHVTTIRDYRSKIESELSKICDGILKLLDTRLVPASANGDSKVFYLKMKGDYHRYLAEFKTGQERKDAAEHTLTAYKAAQDIANAELAPTHPIRLGLALNFSVFYYEILNSPDRACNLAKQAFDEAIAELDTLGEESYKDSTLIMQLLRDNLTLWTSDMQDESPEEIKEAAAPKPAEEQKEI

SEQ ID NO: 14117 - protein, 267 aa, Arabidopsis thaliana
MAAPPASSSAREEFVYLAKLAEQAERYEEMVEFMEKVAEAVDKDELTVEERNLLSVAYKNVIGARRASWRIISSIEQKEESRGNDDHVTTIRDYRSKIESELSKICDGILKLLDTRLVPASANGDSKVFYLKMKGDYHRYLAEFKTGQERKDAAEHTLTAYKAAQDIANAELAPTHPIRLGLALNFSVFYYEILNSPDRACNLAKQAFDEAIAELDTLGEESYKDSTLIMQLLRDNLTLWTSDMQDESPEEIKEAAAPKPAEELKEI

SEQ ID NO: 14118 - protein, 261 aa, Vicia faba
MATAPTPREEFVYMAKLAEQAERYEEMVEFMEKVTAAVESEELTVEERNLLSVAYKNVIGARRASWRIISSIEQKEESRGNDEHVSVIRDYRSKIETELSNICNGILKLLDSRLIPSAALGDSKVFYLKMKGDYHRYLAEFKSGAERKDAAESTLTAYKSAQDIANTELPPTHPIRLGLALNFSVFYYEILNSPDRACGLAKQAFDEAIAELDTLGEESYKDSTLIMQLLRDNLTLWTSDMQDDGADEIKEAAPKGNDEPQ

SEQ ID NO: 14119 - protein, 260 aa, Oryza sativa (japonica cultivar-group); identical to SEQ ID NO: 573

SEQ ID NO: 14120 - protein, 264 aa, Oryza sativa (japonica cultivar-group)
MAAAAGGGTREEMVYMAKLAEQAERYEEMVEFMEKVVTAAAAGGGGELTVEERNLLSVAYKNVIGARRASWRIVSSIEQKEEGRGAAGHAAAARSYRARVEAELSNICAGILRLLDERLVPAAAAVDAKVFYLKMKGDYHRYLAEFKTGAERKDAADATLAAYQAAQDIAMKELSPTHPIRLGLALNFSVFYYEILNSPDRACTLAKQAFDEAISELDTLGEESYKDSTLIMQLLRDNLTLWTSDMQDDGGDEMRDATKPEDEH

SEQ ID NO: 14121 - protein, 254 aa, Lycopersicon esculentum
MAREENVYMAKLAEQAERYEEMVQFMEKVSTSLGSEELTVEERNLLSVAYKNVIGARRASWRIISSIEQKEESRGNEEHVKCIKEYRSKIESELSDICDGILKLLDSNLIPSASNGDSKVFYLKMKGDYHRYLAEFKTGAERKEAAESTLSAYKAAQDIANTELAPTHPIRLGLALNFSVFYYEILNSPDRACNLAKQAFDEAIAELDTLGEESYKDSTLIMQLLRDNLTLWTSDMQDDGADEIKETKNDNEQQ

SEQ ID NO: 14122 - protein, 258 aa, Lycopersicon esculentum
MASPREENVYMAKLAEQAERYEEMVEFMEKVVAAADGAEELTVEERNLLSVAYKNVIGARRASWRIISSIEQKEESRGNEDHVASIKEYRSKIESELTSICNGILKLLDSKLIGSAATGDSKVFYLKMKGDYHRYLAEFKTGAERKEAAENTLSAYKAAQDIANAELAPTHPIRLGLALNFSVFYYEILNSPDRACNLAKQAFDEAIAELDTLGEESYKDSTLIMQLLRDNLTLWTSDMQDDGTDEIKEATPKPDDNE

SEQ ID NO: 14123 - protein, 260 aa, Lycopersicon esculentum
MAVVAPTAREENVYMAKLADRAESDEEMVEFMEKVSNSLGSEELTVEERNLLSVAYKNVIGARRASWRIISSIEQKEESRGNEEHVNSIREYRSKIENELSKICDGILKLLDSKLIPSATSGDSKVFYLKMKGDYHRYLAEFKTGAERKEAAESTLTAYKAAQDIASAELAPTHPIRLGLALNFSVFYYEILNSPDRACNLAKQAFDEAIAELDTLGEESYKDSTLIMQLLRDNLTLWTSDMQDDGADEIKEDPKPEEKN

SEQ ID NO: 14124 - protein, 254 aa, Lycopersicon esculentum
MAREENVYMANVAEQAERYEEMVQFMEKVSTSLGSEELTVEERNLLSVAYKNVIGARTLAWRIISSIEQKEESRGNEEHVKCIKEYRSKIESELSDICDGILKLLDSNLIPSASNGDSKVFYLKMKGDYHRYLAEFKTGAERKEAAESTLSAYKAAQDIANTELAPTHPIRLGLALNFSVFYYEILNSPDRACNLAKQAFDEAIAELDTLGEESYKDSTLIMQLLRDNLTLWTSDMQDDGADEIKETKNDNEQQ

SEQ ID NO: 14125 - protein, 258 aa, Lycopersicon esculentum
MAFAREENVYMANVAEQRRSYEEMVEFMEKVVAAADGAEELTVEERILLSVAYKNVMGARRASWRIISSIEQKEESRGNEDHVASIKEYRSKIESELTSICNGILKLLDSKLIGSAATGDSKVFYLKMKGDYHRYLAEFKTGAERKEAAENTLSAYKAAQDIANAELAPTHPIRLGLALNFSVFYYEILNSPDRACNLAKQAFDEAIAELDTLGEESYKDSTLIMQLLRDNLTSWTSDMQDDGTDEIKEATPKPDDNE

SEQ ID NO: 14126 - protein, 255 aa, Lycopersicon esculentum
MASPREENVYMANVADEAERYEEMVEFMEKVVAALNGEELTVEERNLLSVAYKNVIGARRASWRIISSIEQKEESRGNEDHVASIKKYRSQIENELTSICNGILKLLDSKLIGSAATGDSKVFYLKMKGDYYRYLAEFKTGTERKEAAENTLSAYKSAQDIANGELAPTHPIRLGLALNFSVFYYEILNSPDRACNLAKQAFDEAIAELDTLGEESYKDSTLIMQLLRDNLTLWTSDMQDDGTDEIKEPSKADNE

SEQ ID NO: 14127 - protein, 260 aa, Nicotiana tabacum
MAVAPTAREENVYMAKLAEQAERYEEMVEFMEKVSNSLGSEELTVEERNLLSVAYKNVIGARRASWRIISSIEQKEESRGNEEHVNSIREYRSKIENELSKICDGILKLLDAKLIPSAASGDSKVFYLKMKGDYHRYLAEFKTGAERKEAAESTLTAYKAAQDIATTELAPTHPIRLGLALNFSVFYYEILNSPDRACNLAKQAFDEAIAELDTLGEESYKDSTLIMQLLRDNLTLWTSDMQDDGADEIKEDPKPDEAKN

SEQ ID NO: 14128 - protein, 255 aa, Nicotiana tabacum
MAREENVYMAKLAEQAERYEEMVSFMEKVSTSLGTSEELTVEERNLLSVAYKNVIGARRASWRIISSIEQKEESRGNEDHVKCIQEYRSKIESELSNICDGILKLLDSCLIPSASAGDSKVFYLKMKGDYHRYLAEFKTGAERKEAAESTLSAYKAAQDIANAELAPTHPIRLGLALNFSVFYYEILNSPDRACNLAKQAFDEAIAELDTLGEESYKDSTLIMQLLRDNLTLWTSDMQDDGADEIKETKADNEQQ

SEQ ID NO: 14129 - protein, 255 aa, Nicotiana tabacum
MAREENVYMAKLAEQAERYEEMVSFMEKVSTSLGTSEELTVEERNLLSVAYKNVIGARRASWRIISSIEQKEESRGNEDHVKCIQEYRSKIESELSNICDGILKLLDSCLIPSASAGDSKVFYLKMKGDYHRYLAEFKTGAERKEAAESTLSAYKAAQDIANAELAPTHPIRLGLALNFSVFYYEILNSPDRACNLAKQAFDEAIAELDTLGEESYKDSTLIMQLLRDNLTLWTSDMQDDGADEIKETKTDNEQQ

SEQ ID NO: 14130 - protein, 258 aa, Nicotiana tabacum
MASPREENVYMAKLAEQAERYEEMVEFMEKVVAAADGAEELTVEERNLLSVAYKNVIGARRASWRIISSIEQKEESRGNEDHVASIKEYRSKIETELTSICNGILKLLDSKLIGAAATGDSKVFYLKMKGDYHRYLAEFKTGAERKEAAENTLSAYKSAQDIANTELAPTHPIRLGLALNFSVFYYEILNSSDRACNLAKQAFDEAIAELDTLGEESYKDSTLIMQLLRDNLTLWTSDMQDDGTDEIKEAAKPDNEQQ

SEQ ID NO: 14131 - protein, 258 aa, Nicotiana tabacum
MSSSRDEFVYMAKLAEQAERYEEMVDFMEKVVTAADGGEELTIEERNLLSVAYKNVIGARRASWRIISSIEQKEESRGNEDHVTSIKTYRSKIESELTSICNGILKLLDSNLIRAASTGDSKVFYLKMKGDYHRYLAEFKTGAERKEAAENTLSSYKSAQDIANAELAPTHPIRLGLALNFSVFYYEILNSPDRACNLAKQAFDEAIAELDTLGEESYKDSTLIMQLLRDNLTLWTSDMQDEGTEEMKEVAKPDNEEH

SEQ ID NO: 14132 - protein, 255 aa, Nicotiana tabacum
MASPREENVYLAKLAEQAERYEEMVEFMEKVVGAGDDELTIEERNLLSVAYKNVIGARRASWRIISSIEQKEESRGNEDHVASIKTYRSKIESELTSICNGILKLLDSKLIGTAATGDSKVFYLKMKGDYYRYLAEFKTGAERKEAAENTLSAYKSAQDIANGELAPTHPIRLGLALNFSVFYYEILNSPDRACNLAKQAFDEAIAELGTLGEESYKDSTLIMQLFCDNLTLWTSDMQDDGTDEIKEPSKAEEQQ

SEQ ID NO: 14133 - protein, 258 aa, Solanum tuberosum
MASPREENVYMAKLAEQAERYEEMVEFMEKVVAAADGAEELTVEERNLLSVAYKNVIGARRASWRIISSIEQKEESRGNEDHVASIKEYRSKIESELTSICNGILKLLDSKLIGSAATGDSKVFYLKMKGDYHRYLAEFKTGAERKEAAENTLSAYKAAQDIANAELAPTHPIRLGLALNFSVFYYEILNSPDRACNLAKQAFDEAIAELDTLGEESYKDSTLIMQLLRDNLTLWTSDMQDDGTDEIKEAAPKPDNNE

SEQ ID NO: 14134 - protein, 254 aa, Solanum tuberosum
MASPREENVYMANVAARAERYEEMVEFMEKVVAALDTELTVEERNLLSVAYKNVIGARRASWRIISSIEQKEESRGNEDHVASIKKYRSQIENELTSICNGILKLLDSKLIGSAATGDSKVFYLKMKGDYYRYLAEFKTGTERKEAAENTLSAYKSAQDIANGELAPTHPIRLGLALNFSVFYYEILNSPDRACNLAKQAFDEAIADVDTLGEESYKDSTLIMQLLRDNLTLWTSDMQDDGADEIKEPSKADNE

SEQ ID NO: 14135 - protein, 252 aa, Dictyostelium discoideum
MTREENVYMAKLAEQAERYEEMVETMKKVAELDVELTVEERNLLSVAYKNVIGARRASWRIISSIEQKEESKGNENHVKKIKEYKCKVEKELTDICNDILEVLESHLIVSSASGESKVFYYKMKGDYFRYLAEFATGNPRKTSAESSLIAYKAASDIAVTELPPTHPIRLGLALNFSVFYYEILNSPDRACNLAKTAFDDAIAELDTLSEDSYKDSTLIMQLLRDNLTLWTSDVHNMEKNQDGDDDQNEPGM

SEQ ID NO: 14136 - protein, 261 aa, Hordeum vulgare
MSTAEATREENVYMAKLAEQAERYEEMVEFMEKVAKTADVGELTVEERNLLSVAYKNVIGARRASWRIISSIEQKEESRGNEAYVASIKEYRTRIETELSKICDGILKLLDSHLVPSATAAESKVFYLKMKGDYHRYLAEFKAGAERKEAAENTLVAYKSAQDIALADLPTTHPIRLGLALNFSVFYYEILNSPDRACNLAKQAFDEAIAELDSLGEESYKDSTLIMQLLRDNLTLWTSDNAEEGGDEIKEAASKPEGEGH

SEQ ID NO: 14137 - protein, 262 aa, Hordeum vulgare
MSTAEATREENVYMAKLAEQAERYEEMVEFMEKVAKTADVGELTVEERNLLSVAYKNVIGARRASWRIISSIEQKEESRGNEAYVASIKEYRTRIETELSKICDGILKLLDSHLVPSATAAESKVFYLKMKGDYHRYLAEFKAGAERKEAAENTLVAYKSAQDIALADLPTTHPIRLGLALNFSVFYYEILNSPDRACNLAKQAFDEAIAELDSLGEESYKDSTLIMQLLRDNLTLWTSDNAEEGGDEIKEAASKPEGEGHS

SEQ ID NO: 14138 - protein, 262 aa, Hordeum vulgare
MAQPAELSREENVYMAKLAEQAERYEEMVEFMEKVAKTVDSEELTVEERNLLSVAYKNVIGARRASWRIISSIEQKEESRGNEDRVTLIKDYRGKIEVELTKICDGILKLLDSHLVPSSTAPESKVFYLKMKGDYYRYLAEFKSGTERKDAAENTMVAYKAAQEIALAELPPTHPIRLGLALNFSVFYYEILNSPDRACDLAKQAFDEAISELDSLSEESYKDSTLIMQLLRDNLTLWTSDISEDAAEEMKDAPKGESGDGQ

SEQ ID NO: 14139 - protein, 263 aa, Hordeum vulgare
MSAPGELSREENVYMAKLAEQAERYEEMVEFMEKVAKTVDSEELTVEERNLLSVAYKNVIGARRASWRIISSIEQKEESRGNEDRVTLIKEYRGKIETELSKICDGILKLLETHLVPSSTAPESKVFYLKMKGDYYRYLAEFKSGPERKDAAENTMVAYKAAQDIALAELAPTHPIRLGLALNFSVFYYEILNSPDRACNLAKQAFDEAISELDTLSEESYKDSTLIMQLLRDNLTLWTSDITEDTAEEEIREAPKHDSSEGQ

SEQ ID NO: 14140 - protein, 256 aa, Oryza sativa
MSREENVYMAKLAEQAERYEEMVEYMEKVAKTVDVEELTVEERNLLSVAYKNVIGARRASWRIVSSIEQKEEGRGNEEHVTLIKEYRGKIEAELSKICDGILKLLDSHLVPSSTAAESKVFYLKMKGDYHRYLAEFKTGAERKEAAESTMVAYKAAQDIALADLAPTHPIRLGLALNFSVFYYEILNSPDKACNLAKQAFDEAISELDTLGEESYKDSTLIMQLLRDNLTLWTSDLTEDGGDEVKEASKGDACEGQ

SEQ ID NO: 14141 - protein, 256 aa, Oryza sativa; identical to SEQ ID NO: 14140

SEQ ID NO: 14142 - protein, 256 aa, Oryza sativa; identical to SEQ ID NO: 14140

SEQ ID NO: 14143 - protein, 262 aa, Oryza sativa
MSAQAELSREENVYMAKLAEQAERYEEMVEFMEKVAKTVDSEELTVEERNLLSVAYKNVIGARRASWRIISSIEQKEESRGNEDRVTLIKDYRGKIETELTKICDGILKLLESHLVPSSTAPESKVFYLKMKGDYYRYLAEFKTGAERKDAAENTMVAYKAAQDIALAELPPTHPIRLGLALNFSVFYYEILNSPDRACNLAKQAFDEAISELDTLSEESYKDSTLIMQLLRDNLTLWTSDISEDTAEEIREAPKRDSSEGQ

SEQ ID NO: 14144 - protein, 262 aa, Oryza sativa; identical to SEQ ID NO: 14143

SEQ ID NO: 14145 - protein, 262 aa, Oryza sativa; identical to SEQ ID NO: 14143

SEQ ID NO: 14146 - protein, 262 aa, Oryza sativa
MSQPAELSREENVYMAKLAEQAERYEEMVEFMEKVAKTVDSEELTVEERNLLSVAYKNVIGARRASWRIISSIEQKEESRGNEDRCTLIKEYRGKIETELSKICDGILKLLDSHLVPSSTAPESKVFYLKMKGDYYRYLAEFKTGAERKDAAENTMVAYKAAQDIALAELPPTHPIRLGLALNFSVFYYEILNSPDRACNLAKQAFDEAISELDTLSEESYKDSTLIMQLLRDNLTLWTSDISEDAAEEIKEAPKGESGDGQ

SEQ ID NO: 14147 - protein, 262 aa, Oryza sativa; identical to SEQ ID NO: 14146

SEQ ID NO: 14148 - protein, 260 aa, Oryza sativa; identical to SEQ ID NO: 573

SEQ ID NO: 14149 - protein, 263 aa, Oryza sativa
  unsure (1)..(263): unsure at all Xaa locations
MSQPAELSREENVYMAKLAEQAERYEEMVEFMEKVAKTVDSEELTVEERNLLSVAYKNVIGARRASWRIISSIEQKEESRGNEDRXCTLIKEYRGKIETELSKICDGILKLLDSHLVPSSTAPESKVFYLKMKGDYYRYLAEFKTGAERKDAAENTMVAYKAAQDIALAELPPTHPIRLGLALNFSVFYYEILNSPDRACNLAKQAFDEAISELDTLSEESYKDSTLIMQLLRDNLTLWTSDISEDAAEEIKEAPKGESGDGQ

SEQ ID NO: 14150 - protein, 260 aa, Oryza sativa
MSPAEASREENVYMAKLAEQAERYEEMVEFMEKVAKTTDVGELTVEERNLLSVAYKNVIGARRASWRIISSIEQKEESRGNEAYVASIKEYRSRIETELSKICDGILKLLDSHLVPSATAAESNVFYLKMKGDYHRYLAEFKSGAERKEAAENTLVAYKSAQDIALADLPTTHPIRLGLALNLSVFYYEILNSPDRACNLAKQAFDDAIAELDTLGEESYKDSTLIMQLLRDNLTLWTSDNAEDGGDEIKEAAKPEGEGH

SEQ ID NO: 14151 - protein, 265 aa, Oryza sativa
MSPAEPTREESVYKAKLAEQAERYEEMVEYMERVARAAGGASGGEELTVEERNLLSVAYKNVIGARRASWRIISSIEQKEEGRGNDAHAATIRSYRGKIEAELARICDGILALLDSHLVPSAGAAESKVFYLKMKGDYHRYLAEFKSGDERKQAAESTMNAYKAAQDIALADLAPTHPIRLGLALNFSVFYYEILNSPDRACNLAKQAFDEAISELDSLGEESYKDSTLIMQLLRDNLTLWTSDANDDGGDEIKEAAAPKEPGDQ

SEQ ID NO: 14152 - protein, 265 aa, Oryza sativa; identical to SEQ ID NO: 14151

SEQ ID NO: 14153 - protein, 492 aa, Oryza sativa
MKFRSDSSGGDEPRAPAAGDGGGGGDEPAKRQRTDPSSSSSQGEASSSSQPPPQQQQEEQPPEDAGEGEQPRVPDLGEDLVFEVLRRAEARTLAAAACVSRGWRQLAEDERLWEAACVREWANLGFSERQLRAVVLSLGGFRRLHAVYIRPLQWRGAGVPRQQGRRQPPVRLGRDQVQLSLSLFSIGFFQNMPCPKKDKGNDSDKNGGGQCGKTQTVKMSQPAELSREENVYMAKLAEQAERYEEMVEFMEKVAKTVDSEELTVEERNLLSVAYKNVIGARRASWRIISSIEQKEESRGNEDRCTLIKEYRGKIETELSKICDGILKLLDSHLVPSSTAPESKVFYLKMKGDYYRYLAEFKTGAERKDAAENTMVAYKAAQDIALAELPPTHPIRLGLALNFSVFYYEILNSPDRACNLAKQAFDEAISELDTLSEESYKDSTLIMQLLRDNLTLWTSDISEDCQNVCFKCPKGRSGPRNIILSVKVKTAWF

SEQ ID NO: 14154 - protein, 886 aa, Oryza sativa
MSMVNWALEILNQDRNQSVLKDYLTFHCFIHIAHLYICLQVDIAAGGWHSTALTKEGEVYAWGRGEHGRLGFGDDKSSHMVPQKVELLAGEDIIQVSCGGTHSVALTRDGRMFSYGRGDHGRLGYGRKVTTGHPMEVPIDLPPPGTSGGDSGGQWQASPYPTPTTSCPWSIWAAKLRSDGAYRVCFVHTARASESHSRRSDLAGDAVAATPPPCASSSALLNPLAAFARSVTLTPASTEGRVGSGGCRDGRDGRRRGAAGVSLPSDCCPPSSYAPPPAHSPREDDALPSLRSQCICVVYVVDNSKTQATKPRSKSISSAESVQAMRSSEESSSDEDDEILSELKEKWDAIENKSSVLFYGGGAIIAVWLSSIVVKAVDSVPVLPNILELVGLGYSGWFVYRYLLFKLHPKSIPFVFILEKSYTPTTYHLNVKYDLVQLTVARPTCHHTKKRVSHELGGGRVYPPPTARTEANQTRQLYPPLTRGPRRDPSPTCHPLSSLARRTRGATPLAPVPSLPAIKAPVFPTPPLRRTKSIRIHETTRTRPASPPPPPKENVYMAKLAEQAERYEEMVEYMEKVAKTVDVEELTVEERNLLSVAYKNVIGARRASWRIVSSIEQKEEGRGNEEHVTLIKEYRGKIEAELSKICDGILKLLDSHLVPSSTAAESKVFYLKMKGDYHRYLAEFKTGAERKEAAESTMVAYKAAQDIALADLAPTHPIRLGLALNFSVFYYEILNSPDKACNLAKQAFDEAISELDTLGEESYKDSTLIMQLLRDNLTLWTSDLTGGSGRISSSHCFAFGASVVVLRCRSCPRKVDAQVPNSESTHKKKKWAHLVPCDMNNVPYIYNLLSYWKKPDRRFNRKKPEPEIFVVRFKTLNRTGHARDSL

SEQ ID NO: 14155 - protein, 243 aa, Oryza sativa
  unsure (1)..(243): unsure at all Xaa locations
XHASGYEEMVEYMEKVAKTVDVEELTVEERNLLSVAYKNVIGARRASWRIVSSIEQKEEGRGNEEHVTLIKEYRGKIEAELSKICDGILKLLDSHLVPSSTAAESKVFYLKMKGDYHRYLAEFKTGAERKEAAESTMVAYKAAQDIALADLAPTHPIRLGLALNFSVFYYEILNSPDKACNLAKQAFDEAISELDTLGEESYKDSTLIMQLLRDNLTLWTSDLTEDGGDEVKEASKGDACEGQ

SEQ ID NO: 14156 - protein, 266 aa, Oryza sativa
  unsure (1)..(266): unsure at all Xaa locations
MAAAAGGGTREEMVYMAKLAEQAERYEEMVEFMEKVVTAAAAGGGGELTVEERNLLSVAYKNVIGARRASWRIVSSIEQKEEGRGAAGHAAAARSYRARVEAELSNICAGILRLLDERLVPAAAAVDAKVFYLKMKGDYHRYLAEFKTGAERKDAADATLAAYQAAQDIAMKELSPTHPIRLGLALNFSVFYXYEILNSPDGAWTVXAKQAFDEAISELDTLGEESYKDSTLIMQLLRDNLTLWTSDMQDDGGDEMRDATKPEDEH

SEQ ID NO: 14157 - protein, 262 aa, Oryza sativa
  unsure (1)..(262): unsure at all Xaa locations
MLPAEAWREENVYMVKLAEQAERYXVNGRIMEKVAKTTDVAELTVEERNLLCVAYKNVIGARRASXRIISSIEQKEESRVNDAYVASINEHRNKIETDLINICDGILKLLDSHLVPSATAAESKXVFYLTMKGDYHMYLAEFQSXAERNEAADNTLVAYKAAQDIRLGDLSTTHPIRLGLALSFSAFYYEILNXPDRACNLAKQAFDDAIAELDTLGEESYKDSPLXIMQLLRDNLTLWTSDNAEDGGDEIKEAAKPEGEGP

SEQ ID NO: 14158 - protein, 224 aa, Oryza sativa
  unsure (1)..(224): unsure at all Xaa locations
MAAAAGGGTREEMVYMAXXGGQAERYEEMVEFMEKVVTAAAAGGGGELTVEERNLLSVAYKNVIGARRASWRIVSSIEQKEEXRGAAGHVVXLKMKGDYHRYLAEFKTGAERKDAADATLAAYQAAQDIAMKELSPTHPIRLGLALNFSVFYYEILNSPDRACTLAKQAFDEAISELDTLGEESYKDSTLIMQLLRDNLTLWTSDMQDDGGDEMRDATKPEDEH

SEQ ID NO: 14159 - protein, 261 aa, Triticum aestivum; identical to SEQ ID NO: 14136

SEQ ID NO: 14160 - protein, 267 aa, Triticum aestivum
  unsure (1)..(267): unsure at all Xaa locations
MSTAEATREENVYMAKLAEQAERYEEMVEFMEKVAKTADVGELTVEERNLLSVAYKNVIGARRASWRIISSIEQKEESRGNEAYVASIKEYRTRIETELSKICDGILKLLDSHLVPSATAAESKVFYLKMKGDYHRYLAEFKAGAERKEAAENTLVAYKSAQDIALADLPTTHPIRLGLALNFSVFYYEILNSPDRACNLAKQAFDEAIAELDSXLGEESYKDSTLIMQLLRDNLTLWTSDNAEEGGDEIKEAASKPEGEGHXLAGP

SEQ ID NO: 14161 - protein, 262 aa, Triticum aestivum
MAQPAELSREENVYMAKLAEQAERYEEMVEFMEKVAKTVDSEELTVEERNLLSVAYKNVIGARRASWRIISSIEQKEESRGNEDRVTLIKDYRGKIEVELTKICDGILKLLDSHLVPSSTAPESKVFYLKMKGDYYRYLAEFKSGTERKDAAENTMVAYKAAQEIALEELPPTHPIRLGLALNFSVFYYEILNSPDRACDLAKQAFDEAISELDSLSEESYKDSTLIMQLLRDNLTLWTSDISEDAAEEMKDAPKGESGDGQ

SEQ ID NO: 14162 - protein, 263 aa, Triticum aestivum
MTAPAELSREENVYMAKLAEQAERYEEMVEFMEKVAKTVDSEELTVEERNLLSVAYKNVIGARRASWRIISSIEQKEESRGNEDRVTLIKEYRGKIETELSKICDGILKLLETHLVPSSTAPESKVFYLKMKGDYYRYLAEFKSGPERKDAAENTMVAYKAAQDIALAELAPTHPIRLGLALNFSVFYYEILNSPDRACNLAKQAFDEAISELDTLSEESYKDSTLIMQLLRDNLTLWTSDITEDTAEEEIREAPKNDSSEGQ

SEQ ID NO: 14163 - protein, 263 aa, Triticum aestivum; identical to SEQ ID NO: 14162

SEQ ID NO: 14164 - protein, 263 aa, Triticum aestivum
MTAPAELSREENVYMAKLAEQAERYEEMVEFMEKVAKTVDSEELTVEERNLLSVAYKNVIGARRASWRIISSIEQKEESRGNEDRVTLIKEYRGKIETELSKICDGILKLLETHLVPSSTAPESKVFYLKMKGDYYRYLAEFKSGPERKDAAENTMVAYKAAQDIALAELAPTHPIRLGLALNFSVFYYEILNSPDRACNLAKQAFDEAISELDTLSEESYKDSTLIMQLLRDNLTLWTSDITEDTAEEEIREAPKHDSSEGQ

SEQ ID NO: 14165 - protein, 266 aa, Triticum aestivum
MSPAEPTRDESVYMAKLAEQAERYEEMVEFMERVAKATGGAGPGEELSVEERNLLSVAYKNVIGARRASWRIISSIEQKEEGRGNDAHAATIRSYRSKIEAELAKICDGILALLDSHLVPSAGAAESKVFYLKMKGDYHRYLAEFKSGGERKEAAESTMNAYKAAQDIALADLAPTHPIRLGLALNFSVFYYEILNSPDRACNLAKQAFDEAISELDSLGEESYKDSTLIMQLLRDNLTLWTSDTNEDDVDEIKEAPAPKESGDGQ

SEQ ID NO: 14166 - protein, 266 aa, Triticum aestivum; identical to SEQ ID NO: 14165

SEQ ID NO: 14167 - protein, 259 aa, Triticum aestivum
MAKAAATREEMVYLAKLAEQAERYEEMVEFMEKVVAAAGTVELTIEERNLLSVAYKNVIGARRASWRIVSSIEQKEEGRGAAGHAAAARGYRALVEAELSNICAGILRLLDERLVPAAAAVDAKVFYLKMKGDYHRYLAEFKSAAERKDAADSTLGAYQAAQDIAMKELPPTHPIRLGLALNFSVFYYEILNSPDRACSLAKQAFDEAIAELDSLGEDSYKDSTLIMQLLRDNLTLWTSDMQDDAGDEMRDSSKPEDEQ

SEQ ID NO: 14168 - protein, 261 aa, Triticum aestivum
MAKAAAAGTREEMVYLAKLAEQAERYEEMVEFMEKVVAAAGTVELTIEERNLLSVAYKNVIGARRASWRIVSSIEQKEEGRGAAGHAAAARGYRALVEAELSNICAGILRLLDERLVPAAAAVDAKVFYLKMKGDYHRYLAEFKSAAERKDAADSTLGAYQAAQDIAMKELPPTHPIRLGLALNFSVFYYEILNSPDRACSLAKQAFDEAIAELDSLGEDSYKDSTLIMQLLRDNLTLWTSDMQDDAGDEMRDSSKPEDEQ

SEQ ID NO: 14169 - protein, 290 aa, Triticum aestivum
  unsure (1)..(290): unsure at all Xaa locations
MSTAEATREENVYMAKLAEQAERYEEMVEFMEKGGKXTADVGELTVEERNLLSVAYKNVIGARRASWRIISSIEQKEESRGNEAYVASIKEYRTRIETELSKICDGILKLLDSHLVPSATAAESKVFYLKMKGDYHRYXLAEFKAGAERKEAAENTLVAYKSAQDIALADLPTTHPIRXLGLALNFSVFYYEILNSPDRACNLAKQAFDEAIAELDSLGEESYKDSTLIMQLLRDNLTLWTSDNAEEGGXDEIKEAASKPEGEGHXLAGPRACPSLFPSPFTQLPVSFGS

SEQ ID NO: 14170 - protein, 262 aa, Triticum aestivum
  unsure (1)..(262): unsure at all Xaa locations
MAKAAAAGTREEMVYMAKLAEQAERYEEMVEFMEKVVAAAGTGELTVEEXRNLLSVAYKNVIGARRASWRIVSSIEQKEEGRGAAGHAAAARGYRALVEAELSNICAGILRLLDERLVPAPAEGSXLLSSLTLKLDYHRYLAEFKSAAERKDAADSTLGAYQAAQDIAMKELPPTHPIRLGLALNFSVFYYEILNSPDRACSLAKQAFDEAIAELDSLGEDSYKDSTLIMQLLRDNLTLWTSDMQDDAGDEMRDSSKPEDEQ

SEQ ID NO: 14171 - protein, 254 aa, Triticum aestivum
  unsure (1)..(254): unsure at all Xaa locations
MSTAEATREENVYMAKLAEQAERYEEMVEFMEKVAKTADVGELTVEERNLLSVAYKNVIGARRASWRIISSIEQKEESRGNEAYVASIKEYRTRIETELSKICDGILKLLDSHLVPSATAAESKVFYLKMKGDYHRYLAEFKAGADALADLPTTHPIRLGLALNFSVFYYEILNSPDRACNLAKQAFDEAIAELDSLGEESYKDSTLIMQLLRDNLTLWTSDNAEEGGDEIKEAASKPEGEGHXLALERAQVYF

SEQ ID NO: 14172 - protein, 264 aa, Hypocrea jecorina
MGHEDAVYLAKLAEQAERYEEMVENMKIVASEDRDLTVEERNLLSVAYKNVIGARRASWRIVTSIEQKEESKGNSSQVALIKEYRQKIEAELAKICDDILEVLDQHLIPSAKSGESKVFYHKMKGDYHRYLAEFAIGDRRKDSADKSLEAYKAATEVAQTELPPTHPIRLGLALNFSVFYYEILNAPDQACHLAKQAFDDAIAELDTLSEESYKDSTLIMQLLRDNLTLWTSSEAETSAGQVEAPPKEDTPAEAAAPAEEPKAE

SEQ ID NO: 14173 - protein, 272 aa, Hypocrea jecorina
MATERESKTFLARLCEQAERYDEMVTYMKEVAQLGGELSVDERNLLSVAYKNVVGTRRASWRIISSIEQKEESKGSDKHVATIKEYRSKIELELEKVCEDVLNVLDTSLIPNAATGESKVFYHKMKGDYHRYLAEFASGEKRKVAATAAHEAYKNATDVAQTELTPTHPIRLGLALNFSVFYYEILNSPDRACHLAKQAFDDAIAELDSLSEESYRDSTLIMQLLRDNLTLWTSSDSGEAEQAGEAKKDEGEAAKPAEEEPKAEEPAPEATS

SEQ ID NO: 14174 - protein, 257 aa, Schizophyllum commune
MPESREDSVYLAKLAEQAERYEEMVENMKRVASSDQELTVEERNLLSVAYKNVIGARRASWRIVSSIEQKEESKGNEAQVSMIKGYREKIEGELAKICEDILDVLEKHLIPSAASGESKVFYHKMMGDYHRYLAEFATGDKRKDSADKSLEAYKAASDVAVTELPPTHPIRLGLALNFSVFYYEILNSPDRACHLAKQAFDDAIAELDTLSEESYKDSTLIMQLLRDNLTLWTSDMQDSGEKPADSKDEAPEAPGDE

SEQ ID NO: 14175 - protein, 256 aa, Lentinula edodes
MPETREDSVYLAKLAEQAERYEEMVENMKRVASSDQELTVEERNLLSVAYKNVIGARRASWRIVSSIEQKEESKGNEAQVSMIKGYREKIETELAEICEDILDVLDKHLIPSAASGESKVFYHKMMGDYHRYLAEFATGDKRKESADKSLEAYKAASDVAVTELPPTHPIRLGLALNFSVFYYEILNSPDRACHLAKQAFDDAIAELDTLSEESYKDSTLIMQLLRDNLTLWTSDMQDSADKPAEKDEAADAPADE

SEQ ID NO: 14176 - protein, 249 aa, Schistosoma mansoni
MDELRERNIVLAKLCEQAERYDEMVKAMIEIATNTETELTVEERNLLSVAYKNVIGARRSSWRIINSKESQDEAKGSDEIHITKRFRKEVEKELDEICTSILNLLDNCLLPKAVSDESKVFLNKMRGDYHRYRAEYSVGNQRKDAAENSLCAYKKAAEDAEKLPVTHPIRLGLALNFSVFYYEILNNSEQACKCARVAFDSAIAELDTLSEESYKDSTIIMQLLRDNLTLWTSNSEGEKDTASPKGDKK

SEQ ID NO: 14177 - protein, 256 aa, Drosophila melanogaster
MTERENNVYKAKLAEQAERYDEMVEAMKKVASMDVELTVEERNLLSVAYKNVIGARRASWRIITSIEQKEENKGAEEKLEMIKTYRGQVEKELRDICSDILNVLEKHLIPCATSGESKVFYYKMKGDYHRYLAEFATGSDRKDAAENSLIAYKAASDIAMNDLPPTHPIRLGLALNFSVFYYEILNSPDRACRLAKAAFDDAIAELDTLSEESYKDSTLIMQLLRDNLTLWTSDMQAEGDGEPKEQIQDVEDQDVS

SEQ ID NO: 14178 - protein, 262 aa, Drosophila melanogaster
MTERENNVYKAKLAEQAERYDEMVEAMKKVASMDVELTVEERNLLSVAYKNVIGARRASWRIITSIEQKEENKGAEEKLEMIKTYRGQVEKELRDICSDILNVLEKHLIPCATSGESKVFYYKMKGDYHRYLAEFATGSDRKDAAENSLIAYKAASDIAMNDLPPTHPIRLGLALNFSVFYYEILNSPDRACRLAKAAFDDAIAELDTLSEESYKDSTLIMQLLRDNLTLWTSDMQAEEVDPNAGDGEPKEQIQDVEDQDVS

SEQ ID NO: 14179 - protein, 261 aa, Drosophila melanogaster
MTERENNVYKAKLAEQAERYDEMVEAMKKVASMDVELTVEERNLLSVAYKNVIGARRASWRIITSIEQKEENKGAEEKLEMIKTYRGQVEKELRDICSDILNVLEKHLIPCATSGESKVFYYKMKGDYHRYLAEFATGSDRKDAAENSLIAYKAASDIAMNDLPPTHPIRLGLALNFSVFYYEILNSPDRACRLAKAAFDDAIAELDTLSEESYKDSTLIMQLLRDNLTLWTSDMQAEVDPNAGDGEPKEQIQDVEDQDVS

SEQ ID NO: 14180 - protein, 260 aa, Drosophila melanogaster
MTERENNVYKAKLAEQAERYDEMVEAMKKVASMDVELTVEERNLLSVAYKNVIGARRASWRIITSIEQKEENKGAEEKLEMIKTYRGQVEKELRDICSDILNVLEKHLIPCATSGESKVFYYKMKGDYHRYLAEFATGSDRKDAAENSLIAYKAASDIAMNDLPPTHPIRLGLALNFSVFYYEILNSPDRACRLAKAAFDDAIAELDTLSEESYKDSTLIMQLLRDNLTLWTSDMQAEDPNAGDGEPKEQIQDVEDQDVS

SEQ ID NO: 14181 - protein, 255 aa, Danio rerio
MGDREDLVYQAKLAEQAERYDEMVDSMKKVAGMDVELTVEERNLLSVAYKNVIGARRASWRIISSIEQKEENKGGEDKLKMIREYRQTVENELKSICNDILDVLDKHLIPAANSGESKVFYYKMKGDYHRYLAEFATGNDRKEAAENSLVAYKAASDIAMTDLQPTHPIRLGLALNFSVFYYEILNSPDRACRLAKAAFDDAIAELDTLSEESYKDSTLIMQLLRDNLTLWTSDMQGDGEEQNKEALQDVEDENQ

SEQ ID NO: 14182 - protein, 261 aa, Populus x canescens
MAATPSAREESVYMAKLAEQAERYEEMVEYMEKVSASLENEELTVEERNLLSVAYKNVIGARRASWRIISSIEQKEESRGNEDHVSVIRDYRAKIETELSSICDGILKLLDSRLIPTASAGDSKVFYLKMKGDYHRYLAEFKTGAERKEAAESTLTAYKAAQDIANAELAPTHPIRLGLALNFSVFYYEILNSPDRACSLAKQAFDEAIAELDTLGEESYKDSTLIMQLLRDNLTLWTSDMQDDGADEIKEAAPKPGDEQQ

SEQ ID NO: 14183 - protein, 255 aa, Xenopus laevis
MEEREDLVYRAKLAEQAERYDEMVESMKKVAGMDVELTVEERNLLSVAYKNVIGARRASWRIISSIEQKEENKGGEDKLKMIREYRQMVETELKSICNDILDVLDKHLIPAASSGESKVFYYKMKGDYHRYLAEFAQGNDRKEAAENSLVAYKAASDIAMTELPPTHPIRLGLALNFSVFYYEILNSPDRACRLAKAAFDDAIAELDTLSEESYKDSTLIMQLLRDNLTLWTSDMQGDGEDQNKEALQDVEDENQ

SEQ ID NO: 14184 - protein, 255 aa, Homo sapiens
MDDREDLVYQAKLAEQAERYDEMVESMKKVAGMDVELTVEERNLLSVAYKNVIGARRASWRIISSIEQKEENKGGEDKLKMIREYRQMVETELKLICCDILDVLDKHLIPAANTGESKVFYYKMKGDYHRYLAEFATGNDRKEAAENSLVAYKAASDIAMTELPPTHPIRLGLALNFSVFYYEILNSPDRACRLAKAAFDDAIAELDTLSEESYKDSTLIMQLLRDNLTLWTSDMQGDGEEQNKEALQDVEDENQ

SEQ ID NO: 14185 - protein, 1114 aa, Mus musculus
MAEAPPVSGTFKFNTDAAEFIPQERKTSGLNCGTQRRLDSSRIGRRNYSSSPPCHLPRHIPYEDISAVHQHSYASGSKPKSPQGFFQSSNKSLKNHGLQNQPWQKARNEKHQNRNKKAQGLSEQTSDTSSLESVARSESGTNPREHSPSESEKEVVIADPRGAKPKKAAQLTYNYGRGPKAKGRLRSEWGNRMSPKSEDEIPDPWRFPTLTLQIASCRKPVVDPCVCRRNEQRRYPQKRPPLGSGRARPRPGRNPPKQESQRHINAGPKTNMSPIPKDNLRERPTKSACDTGNLAVVSKSSRRVNQEKTAVRRQDPQVLSPFPRGKQNHMLKNVETHTGSLIEQLTTEKYECMVCCELVQVTAPVWSCQSCFHVFHLNCIKKWARSPASHADGQSGWRCPACQNVSAHVPNTYTCFCGKVKNPEWSRNEIPHSCGEVCRKKQPGQDCPHSCNLLCHPGPCPPCPAFTTKTCECGRTRHTVRCGQPVSVHCSNACENILNCGQHHCAELCHGGQCQPCRIILNQVCYCGSTSRDVLCGTDVGKSDGFGDFSCLKICGKDLKCGSHTCSQVCHPQPCQPCPRLPHLVRYCPCGQTPLSQLLEHGSNARKTCMDPVPSCGKVCGKPLACGSSDFIHTCEKLCHEGDCGPCSRTSVISCRCSFRTKELPCTSLKSEDATFMCDKRCNKKRLCGRHKCNEICCVDKEHKCPLICGRKLRCGLHRCEEPCHRGNCQTCWQASFDELTCHCGASVIYPPVPCGTRPPECTQTCARIHECDHPVYHSCHSEEKCPPCTFLTQKWCMGKHELRSNIPCHLVDISCGLPCSAMLPCGMHKCQRLCHKGECLVDEACKQPCTTPRGDCGHPCMAPCHPSLPCPVTACKAKVELQCECGRRKEMVICSEASGTYQRIVAISMASKITDMQLGDSVEISKLITKKEVQQARLQCDEECAALERRKRLAEAFDITDDSDPFNVRSSASKFSDSLKDDARKDLKFVSDVEKEMETLVEAVNKGKNNKKSHCFPPMNRDHRRIIHDLAQVYGLESISYDSEPKRNVVVTAVRGKSVCPPTTLTSVIERETQTRPPPPIPHHRHQADKAPGSSTLQKIVKEAVIDYFDVQD

SEQ ID NO: 14186 - protein, 818 aa, Mus musculus
MAEAPPVSGTFKFNTDAAEFIPQERKTSGLNCGTQRRLDSSRIGRRNYSSSPPCHLPRHIPYEDISAVHQHSYASGSKPKSPQGFFQSSNKSLKNHGLQNQPWQKARNEKHQNRNKKAQGLSEQTSDTSSLESVARSESGTNPREHSPSESEKEVVIADPRGAKPKKAAQLTYNYGRGPKAKGRLRSEWGNRMSPKSEDENTRPVAISHTDSSDASCRKPVVDPCVCRRNEQRRYPQKRPPWEVEGARPRPGRNPPKQESQRHINAGPKTNMSPIPKDNLRERPTKSACDTGNLAVVSKSSRRVNQEKTAVRRQDPQVLSPFPRGKQNHMLKNVETHTGSLIEQLTTEKYECMVCCELVQVTAPVWSCQSCFHVFHLNCIKKWARSPASHADGQSGWRCPACQNVSAHVPNTYTCFCGKVKNPEWSRNEIPHSCGEVCRKKQPGQDCPHSCNLLCHPGPCPPCPAFTTKTCECGRTRHTVRCGQPVSVHCSNACENILNCGQHHCAELCHGGQCQPCRIILNQVCYCGSTSRDVLCGTDVGKSDGFGDFSCLKICGKDLKCGSHTCSQVCHPQPCQPCPRLPHLVRYCPCGQTPLSQLLEHGSNARKTCMDPVPSCGKVCGKPLACGSSDFIHTCEKLCHEGDCGPCSRTSVISCRCSFRTKELPCTSLKSEDATFMCDKRCNKKRLCGRHKCNEICCVDKEHKCPLICGRKLRCGLHRCEEPCHRGNCQTCWQASFDELTCHCGASVIYPPVPCGTRPPECTQTCARIHECDHPVYHSCHSEEKCPPCTFLTQKWCMGKHEELTIKKLWTFKETLDF

SEQ ID NO: 14187 - protein, 818 aa, Mus musculus
MAEAPPVSGTFKFNTDAAEFIPQERKTSGLNCGTQRRLDSSRIGRRNYNSSPPCHLPRHIPYEDISAVHQHSYASGSKPKSPQGFFQSSNKSLKNHGLQNQPWQKARNEKHQNRNKKAQGLSEQTSDTSSLESVARSESGTNPREHSPSESEKEVVIADPRGAKPKKAAQLTYNYGRGPKAKGRLRSEWGNRMSPKSEDENTRPVAISHTDSSDASCRKPVVDPCVCRRNEQRRYPQKRPPWEVEGARPRPGRNPPKQESQRHINAGPKTNMSPIPKDNLRERPTKSACDTGNLAVVSKSSRRVNQEKTAVRRQDPQVLSPFPRGKQNHMLKNVETHTGSLIEQLTTEKYECMVCCELVQVTAPVWSCQSCFHVFHLNCIKKWARSPASHADGQSGWRCPACQNVSAHVPNTYTCFCGKVKNPEWSRNEIPHSCGEVCRKKQPGQDCPHSCNLLCHPGPCPPCPAFTTKTCECGRTRHTVRCGQPVSVHCSNACENILNCGQHHCAELCHGGQCQPCRIILNQVCYCGSTSRDVLCGTDVGKSDGFGDFSCLKICGKDLKCGSHTCSQVCHPQPCQPCPRLPHLVRYCPCGQTPLSQLLEHGSNARKTCMDPVPSCGKVCGKPLACGSSDFIHTCEKLCHEGDCGPCSRTSVISCRCSFRTKELPCTSLKSEDATFMCDKRCNKKRLCGRHKCNEICCVDKEHKCPLICGRKLRCGLHRCEEPCHRGNCQTCWQASFDELTCHCGASVIYPPVPCGTRPPECTQTCARIHECDHPVYHSCHSEEKCPPCTFLTQKWCMGKHEELTIKKLWTFKETLDF

SEQ ID NO: 14188 - protein, 842 aa, Mus musculus
MRPEIARLLTPHIYQDLENHPSVLKYEQIKGVSSNLFFVEHNFPEQEIQEGKSHQNQHEAHFVVELCQYLLCQEYLPSQITILTTYTGQLFCLRKLMPVKTFAGIKVHVVDKYQGEENDIILLSLVRSNQEGKVGFLQIPNRICVALSRAKKGMYCIGNMQMLAKVPLWSRIIHTLRENNQIGPSLRLCCQNHPETHTLVSKASDFQKVPEGGCSRPCEFRLACGHVCTRACHPYDSSHKEFQCMKPCQKVLCQDGHRCPNVCFQECQPCQVKVPKIILKCGHKQMVPCSMSESEFCCQEPCSKILRCGHRCSHLCGEDCVRLCSERVTVELKCGHSQLVKCGNVEDIKYGLPVKCTTKCDTTLDCGHPCPGSCHSCFEGRFHERCQQPCKRLLICSHKCQEPCTGECPPCQRTCQNRCVHSQCKKKCGELCSPCVEPCVWRCQHYQCTKLCSEPCNRPPCYVPCTKLLACGHPCIGLCGEPCPKKCRVCQPDEVTQIFFGFEDEPDARFVQLEDCSHIFEVQALDRFMNEQKDDEVAIKLKVCPICQVPIRKNLRYGTSIKQRLEEIEIVKEKIQGSAGEISTSQEQLKALLKSKTLFHQLRPEEFLILQEKLAQKNLSVKDLGLVENSIRFYDHLANLEGSLEKVHCGEQQSVRTRLEQVHEWLAKKRLSFSSQELSDLQSEIQRLTYLVNLLMRCKMAEKVKGSIAEEVSSIRNILEKTSKFTQEDEQLVQKKMDALKTTLPCSGLGISDEERVQIVTAMGVPRGHWFKCPNGHIYVITECGGAMQRSTCPECQEVIGGENHTLERSNHLASEMDGAQHPAWSNTANNFMNFEEIHRMM

SEQ ID NO: 14189 - protein, 598 aa, Mus musculus
HASGQKVLCQDGHRCPNVCFQECQPCQVKVPKIILKCGHKQMVPCSMSESEFCCQEPCSKILRCGHRCSHLCGEDCVRLCSERVTVELKCGHSQLVKCGNVEDIKYGLPVKCTTKCDTTLDCGHPCPGSCHSCFEGRFHERCQQPCKRLLICSHKCQEPCTGECPPCQRTCQNRCVHSQCKKKCGELCSPCVEPCVWRCQHYQCTKLCSEPCNRPPCYVPCTKLLACGHPCIGLCGEPCPKKCRVCQPDEVTQIFFGFEDEPDARFVQLEDCSHIFEVQALDRFMNEQKDDEVAIKLKVCPICQVPIRKNLRYGTSIKQRLEEIEIVKEKIQGSAGEISTSQEQLKALLKSKTLFHQLRPEEFLILQEKLAQKNLSVKDLGLVENSIRFYDHLANLEGSLEKVHCGEQQSVRTRLEQVHEWLAKKRLSFSSQELSDLQSEIQRLTYLVNLLMRCKMAEKVKGSIAEEVSSIRNILEKTSKFTQEDEQLVQKKMDALKTTLPCSGLGISDEERVQIVTAMGVPRGHWFKCPNGHIYVITECGGAMQRSTCPECQEVIGGENHTLERSNHLASEMDGAQHPAWSNTANNFMNFEEIHRMM

SEQ ID NO: 14190 - protein, 245 aa, Mus musculus
MLRCQNHTCMKECHKVTEVDSSTGKNKAGPECFHCEEGCSKSRPAGCPHPCVLPCHPGKCPPCVQMLRIKCHCKITSLYVECRKITTADVSEKNLLSCCKNQCPKELPCGHRCKEMCHPGECPFNCNQKVKLRCPCKRIKRELPCNKVRENQVSVECDATCKEMKRKASEVKEAEANAALEEEKRRQQAELEAFENRLKGRRKKSRKRDEVAVELSPWQKYKSYLLPVCAVVVAVLMWYIFHGVD

SEQ ID NO: 14191 - protein, 994 aa, Rattus norvegicus
MERSPKCRFEYKRSETPSRYYCYCGKVEDPPLDPWLVPHSCGQVCEREFKPSCGHKCLLLCHPGPCPPCPKMVTTTCYCKKAKPIPRRCSAKQWSCQLPCGRKLLCGQHSCENPCHAGNCQPCPRVSRQKCVCGKKVAERSCASPVWHCDQVCRKTLPCGNHTCEQVCHVGACGECPRSGKRSCPCQKSKFSLPCTEDVPTCGDSCDKILECGIHRCSQRCHRGPCETCRQEVEKQCRCGKHTKRMPCHKTYLCETKCVKMRDCQKHQCRRKNYTGTPRERCLPHTGGEYVRTGYRVHLSAGHCSCYPCPETVDVKCNCGNAKVTVPCGRERTTRPPKCKELCRECLGKHEVSPLPCHAVGPYSCKRLCGRMLNCQNHTCTKECHKVTEVDGCPGRHKAGPECLQCEEGCSKSRPAGCPHPCVLPCHPGKCPPCVQMLRIKCHCKITNLYVECRKITTADVSEKNLLSCCKNQCPKELPCGHRCKEMCHPGECPYNCNQKVKLRCPCKRIKRELPCNKIRGNQVSVECDAACKEMKRKASEIKEAEANAALEEEKRRQQAELEAFENRLKGRRKKNRKRDEVAVQLSPWQKYKSYLFPVGQDVLVFSEPAVPGPVRYCTVIMAAGRNSCWLRGEPLQGWFRLGLGGTEETASSSGCKHWGLVQLRGTLATGMKMLQKFEKNGGMPGGTEHLLQGQLPQLHQGAELGKETHLRLQERTPICRLLNSGPQVELADVSPGLWILRQGPCEWRSVSEHRLLSGSLSALQLVPKRTVLHSRGLESEARTVMGRVSFNVRVSSVRRARCSCPGRCYLSCRVPPTTALHALNGFGRAGVLGETAGGTVGLGPSGTRGFLSGSKFQASGSLKDCFGAPPAPDGLGVRWLPPGSLLRKAGTGPASAGRERACLGRRPEVLSYQVLLELSAGLLCRSSRGGRMIVGALCAASQFWGPSSLFPEGVSIATRDFEVLLWGIWNRESYKLMEDSIIVSVPSWLVLQA

SEQ ID NO: 14192 - protein, 744 aa, Anopheles gambiae str. PEST
QEKFNQVQRQHAETAKKYAAEYVSSEEEEEGEDASGQEAGAAASNDAATRNILGDVLKNYHGAEADVGKTQEYLQHLLESRNAVCLICIETVKRADRIWSCAACYTFFHLMCIQRWANDSMSMKRINHEQQEGYYNNRGEYIPKPALDVHWDCPKCRREYEPEAIPRHYECFCGKEREPNAHPWLIPHSCGEPCEKQLNPACGHTCRLLCHPGPCPPCPQTVNVSCRCGSSPVKTIRCAQKSWTCARKCKRKLACGIHECGAQCHDAGQCPPCQNRSKQPCLCGAQTKEVNCHESRWQCDSVCNKPFPCGLHHCESVCHAGPCGPSICEGRCKRTRTCGKHQCNRKCCDGQCPPCDRVCGKTLPCGKHKCSSLCHQGPCYPCNQKSTIKCRCGGTVAEVACGRERKANAPKCKLPCRAASKCHHPNTHTCHPGDCPACVLPCGQPNDTTNCEHPCRAKCHDAVQVVTREKNFKPVGPWDVPKETVEVKTLPHPACTVKVPVMCLGGHETADWPCSSSKPSSCGRQCGRLLKCGVHRCPLACHKVTHRASTTQDSRCEPCSAGCTLPRPEGCVHSCALRCHKPPCDPCLVSIKSQCYCGLTQVFYKCHEFYPTGMEGKEPEELAELARRRESFLSCGQKCIKNFPCGHRCTSICHPGRCPNPEQCSKKVKVACKCGQRKVEVSCKVARATPTLDCDQQCEAVRAQKQEEQERKEREARAEEELQNQRELEEYERKFGKRKHRERK

SEQ ID NO: 14193 - protein, 1015 aa, Anopheles gambiae str. PEST
MATSDGNAASSGSSNTFDDFISQFNARVQIQQQLQYLRTHHTTNTNEHHQQQPATFQYYGFTSNLTPTAAEFVPRKYQTEANDGNGGGAPPQTMVSMATTMPAGSVRPAAVADNEDDYDGDDRENIHRAGSSNHYGGGGGTGVGGAGGSRSSGGGRPRRNESLKPRNGWHTRDDRPVARQGKWKANQQTAGSGRFRPHDDDYAAGDAPPRNGETNSRRNGQRQWGNRTIQPDPDERRTNGQSKGAGAAPQPESPSATPLSKCSQREKLMREIECYRLECLVCCEIVKPMQSTWSCGNCYHILHLGCVTKWATSSQSEDGSGWRCPACQHVSKKVPREYFCFCGKQKNPAYNREDLAHSCGEVCGRRDVCEHACTLLCHPGPCPPCQASVQRRCGCGRLEKTVQCCQKEELLCEAVCEKPLNCGLHRCGRQCHAGSCDTCTEQVQHSCHCGKGERSVVCSVENLAVQRYGCGKACERPLGCGNHRCARLCHEGECEACADAPDRVRSCPCGREPIVPGSRQSCLDPVPTCSGPCGRKLACGPPGANHCCEAACHRGACPPCKKSTTVKCRCGGMDQPMRCKELTTRADDARCKKRCVRRRSCAKHKCNQVCCIDLDHICPKTCSLPLSCGRHRCDKPCHKGNCRPCHRVSFDELACDCGANVIYPPVPCGTRKPACDRPCGRRHACDHPALHNCHAEAECPPCVVLTTKYCHGRHEQRKTIPCYQESFSCGMPCAKPLACGRHKCIRACHEDECAPEGAAGVCKQSCTRTREACPHPCNAPCHEGECPDVPCKIVVEVTCECGNRKQQRTCHDFSKEYRRIATAQLASSVQEMQRGGSVELSDILGPVRPKNNKTLECNEECRMLERNRRLAIALQIRNPDLPSKLQPNYSETLRAYAKKDPALVQMIHDKLTELVKLAKESKQKSRSYSFPVMNREKRAIVHEMCHMFGVESVAYDAEPNRNVVATADRFTSWLPSMSLMEVLQRENGQRRIVVPSLNAWGKTTLTGAAASSSSK

SEQ ID NO: 14194 - protein, 251 aa, Enchytraeus buchholzi
MASHAHAEAHCGCGTECHCPKGSCGSGCGTSTTAGSCGVAGCPCGSHCKCEKGECRRGCSKGCCTPKCGVEGCPCGSQCKCEKGECKKGCKEGCCAPKCGVAGCSCGSGCKCEKGECKPGCTKRCCGTKCGVEDCPCGPSCKCEKGDCKVNCSKGCCTPKCGVVGCPCGSQCTCEKGSCKKGCSKGCCTPKCGMQDCPCGSHCKCEKGSCEKGCTQGCCAPKCDNVNCKCGSSCRCEKGTCTPSCAQTCCA

SEQ ID NO: 14195 - protein, 820 aa, Arabidopsis thaliana
MTNMAGTATTEFRWKSPPQPPSQEQPISDSDSDSGSDSENHQHRHNDLSNSIFEAYLDCHSSSSPSSIDLAKIQSFLASSSSGAVSCLICLERIKRTDPTWSCTSSCFAVFHLFCIQSWARQCLDLQAARAVTRPSSNPTEPEAVWNCPKCRSSYQKSKIPRRYLCYCGKEEDPPADNPWILPHSCGEVCERPLSNNCGHCCLLLCHPGPCASCPKLVKAKCFCGGVEDVRRCGHKQFSCGDVCERVLDCNIHNCREICHDGECPPCRERAVYKCSCGKVKEEKDCCERVFRCEASCENMLNCGKHVCERGCHAGECGLCPYQGKRSCPCGKRFYQGLSCDVVAPLCGGTCDKVLGCGYHRCPERCHRGPCLETCRIVVTKSCRCGVTKKQIWDDMTNKIVYCKISTHARGMTLFVACSLQRSMCSLSNNGNNILCLWCHGPRPPPNREFILKPTKKMLHIQAESTPGSPCPRCPEPVWRPCVGHHLAAEKRMICSDRTQFACDNLCGNPLPCGNHYCSYFCHALDIRSSSLDKRSESCEKCDLRCQKERTPRCQHPCPRRCHPEDCPPCKTLVKRSCHCGAMVHAFECIYYNTMSEKDQMKARSCRGPCHRKLPNCTHLCPEICHPGQCPLPEKCGKKVSICQFISIWDAVSVTSEILLVSILSWIKVVVRCKCLTLKKEWVCQDVQAAHRATGSDPKEVPKNQFGVGLLPCDSNCKSKLQVAESVLTQRNVKEIEEKEEPSGKNASKRRKRRGRGQDIQETTRLQKLAVTTKRILMVVMLVAMLAAVSYYGYKGLLWLSDWMNEVEEQRQKSRRYPRI

SEQ ID NO: 14196 - protein, 1188 aa, Arabidopsis thaliana
MSFQVRRDRSDDRSHRFNHQQTWIPRNSSTSSVVVNEPLLPPNTDRNSETLDAGSASRPVYLQRQHNASGPPSYNHHQRSSNIGPPPPNQHRRYNAPDNQHQRSDNIGPPQPNQHRRYNAPDNQHQRSDNSGPPQPYRHRRNNAPENQHQRSDNIGPPPPNRQRRNNASGTLPDNRQRVASRTRPVNQGKRVAKEENVVLTDPNLPQLVQELQEKLVKSSIECMICYDKVGRSANIWSCSSCYSIFHINCIKRWARAPTSVDLLAEKNQGDNWRCPGCQSVQLTSSKEISYRCFCGKRRDPPSDPYLTPHSCGEPCGKPLEKEFAPAETTEEDLCPHVCVLQCHPGPCPPCKAFAPPRSCPCGKKMVTTRCSERRSDLVCGQRCDKLLSCGRHQCERTCHVGPCDPCQVLVNATCFCKKKVETVICGDMNVKGELKAEDGVYSCSFNCGKPLGCGNHFCSEVCHPGPCGDCDLLPSRVKTCYCGNTRLEEQIRQSCLDPIPSCSNVCRKLLPCRLHTCNEMCHAGDCPPCLVQVNQKCRCGSTSRAVECYITTSSEAEKFVCAKPCGRKKNCGRHRCSERCCPLLNGKKNDLSGDWDPHVCQIPCQKKLRCGQHSCESLCHSGHCPPCLEMIFTDLTCACGRTSIPPPLSCGTPVPSCQLPCPIPQPCGHSDTHGCHFGDCPPCSTPVEKKCVGGHVVLRNIPCGLKDIRCTKICGKTRRCGMHACARTCHPEPCDSFNESEAGMRVTCRQKCGAPRTDCRHTCAALCHPSAPCPDLRCEFSVTITCSCGRITATVPCDAGGRSANGSNVYCAAYDEASVLQKLPAPLQPVESSGNRIPLGQRKLSCDDECAKLERKRVLQDAFDITPPNLEALHFSENSAMTEIISDLYRRDPKWVLAVEERCKFLVLGKARGSTSALKVHIFCPMQKDKRDTVRLIAERWKLGVSNAGWEPKRFTVVHVTAKSKPPTRIIGARGGAISIGGPHPPFYDSLVDMDPGLVVSFLDLPREANISALVLRFGGECELVWLNDKNALAVFHDHARAATAMRRLEHGSVYHGAVVVQSGGQSPSLNNVWGKLPGSSAWDVDKGNPWRRAVIQESDDSWGAEDSPIGGSSTDAQASALRSAKSNSPIVTSVNRWSVLEPKKASTSTLEPIAQIEESSSSKTTGKQPVEGSGEEVVDDWEKVCE

SEQ ID NO: 14197 - protein, 695 aa, Glycine max
  unsure (1)..(695): unsure at all Xaa locations
XHASVHLFCIQSWARQASDLAAARAATRLPISPATASASALWNCPKCRSEYPKSHIPKTYFCFCGKIENPPNDPWILPHSCGEVCGRPLKHSCGHHCLLLCHPGPCPSCPKLVKVRCFCGCLEDVRRCGFKEFSCNKPCSKFLDCGVHRCIELCHPGACPPCRTRGVHACQCAKVKEERECCDRVFQCGNPCEKRLGCGKHVCERGCHSGKCGECPLKGKRTCPCGKRVYEGMPCDAPVQLCGATCDKMLPCGYHRCPERCHRGQCVETCRVVVKKSCRCGSLKKDVMAIALPALRYAAGSFDVRTINALLHAXXRALCSLPNNGDNFMCMWCHGAKPPPNPEFTLKPKKKKIIQQSESVPGTPCPPCPELVWRSCVGKHIGAERMMVCSDKSQFSCENLCGNPLPCGNHYCTKTCHALENQLQXXSQPCEDCYLSCQKRXPACPHHCPRRCHPGDCPPCKVLIKRSCHCGAMVHVFECLYYNGLSAKGQETVRSCGGPCHRKLPNCTHLCPETCHSGQCTNAEKCCKKVTVRCKCHTLKKEWVCQDVQAAYHLAGCHPRDIPKNQFGIGLIPCNSDCNSKVQVVESELQLRKTRVTEVQEPDVEKSVRKRRKRREQVLESKETSKLQKIISRMKRLLLFVFILVILLAATYYGYKGLLWLNDWMNEVDERRQRYSRIKXLFISLIAPFIHHFFH

SEQ ID NO: 14198 - protein, 999 aa, Glycine max
  unsure (1)..(999): unsure at all Xaa locations
XARAARAARAARAILQESNLPQLLQEIQDKLVKGAVECMICYDMVRRSAPIWSCSGCFSIFHLTCIKKWARAPISVDLSVEKNQGGFNWRCPGCQSVQLTSSKDIRYLCFCGKRPDPPSDLYLMPHSCGEPCGKPLERDLQGDKELLCPHLCVLQCHPGPCPPCKAFAPPRLCPCGKKNITTRCSDRQSVLTCGQRCQKLLQCGRHRCQQICHLGPCHPCQVPINASCFCAQKMEVILCGEMAVKGEIRADGGVFSCGSTCQKKLNCGNHICIETCHPGSCGDCELLPSRIKTCCCGKTRLEEKRHSCLDPIPTCSQVCGKYLPCGIHHCEEPCHAGDCSPCLVLVSQKCRCGSTSRTVECCKTKMENEKFTCERPCGQKKNCGRHRCSERCCPLSNPNNILNADWDPHFCQLPCGKKLRCGQHACESLCHSGHCPPCLETIFTDLTCACGKTSIPPPLPCGTPPPSCQLPCSVPQPCSHPASHSCHFGDCPPCSMPIAKECIGGHVVLRNIPCGSKDIKCNKLCGKTRQCGLHACGRTCHLPPCDNLSAVPGIRASCGQTCGAPRRDCRHTCTAPCHPSTPCPDTRCKFPVTITCSCGRITENVPCDAGGSCANYDAXYCTXEASIIQKLPVLLQPVAANGKKVPLGQRKLMCNDDCAKLERKRVLADAFEITAPNLDSLHFGENSVASELLADMLRRDSKWVLSVEERCKFLVLGKSRGNAHGPKVHVFCPMLKDKRDAVRVIAERWKLAVNAAGREPKHFVVVHVTPKSRAPARVLGFKGTTTVNVPLPPAFDPLVDMDPRLVVSFIDLPMDADISALVLRFGGECELVWLNDKNALAVFNDPARAATAMRRLDHGTVYQGAVVVVVPXMSGHQXPSATNAWGGSGTMKGGALAALKSNPWKKDVIQEPGWREDAWGDEEWATGSANVXXLPIQKKEARISASVNPWSVLNQESSSSSSVEPLKLMEHSESSVITKLEPRDGGSSDVVDDWEKACE

SEQ ID NO: 14199 - protein, 316 aa, Glycine max
  unsure (1)..(316): unsure at all Xaa locations
PRVRKKSCRCGSLKKDXLACERKCQRMRDCGRHACKRRCCDGDCPPCSEPHKCHYGACHPCRLPCAKEYQCGHTCKLRCHGAKPPPNPEFTLKPKKKKIIQQSESIPGTPCPPCPELVWRSCVGKHIGAERMMVCSDNHSSXCEIYVVILYHVGIVIEKVNLPYISNXXDWXXRFMVSDAKLLTPKLYCFSMFSLNXEEVCFYXSALQWXCLLXXLLKVQEPDVEXXSVRKRRKRREQVLESKETSKLQKIISRMKRLLLFVFILVILLAATYYGYKGLLWLNDWMNEVDERRQRYSRIKXLFISLIAPFIHHFFH

SEQ ID NO: 14200 - protein, 708 aa, Oryza sativa (japonica cultivar-group); identical to SEQ ID NO: 457

SEQ ID NO: 14201 - protein, 378 aa, Triticum aestivum
  unsure (1)..(378): unsure at all Xaa locations
MPSSYAAAAAAASSSRKPAPFTTATATTRKPAPLXXAPAPPPSNPSHVSDSDPSSYSSSGEETDLSACDPATASVLSTYLSVAGXNGADLSKVGIFLNSAARRRSPPCLICLDPIRPSDPVWSCSASCFALLHLPCIQSWAHQSASAAPSPTWGCPKCRVAYPKSQTPTSYHCFCSKTEDPPADPWILPHSCGDVCGRRLNSNPDSGCEHTCLLLCHPGPCPPCPAVVPNARCFCGAHRRPRRCAHQRYSCKGKCNKRLSCELHRCPVDCHDGPCPPCAVRGNHKCECGETMVERLCSERVFQCKRECSGMLECGKHMCERGCHGGKCGECPLRGQRTCPCGKKDYSRLECYVEAATCGSTCEKVLGCGLHKFPERCX

SEQ ID NO: 14202 - protein, 167 aa, Triticum aestivum
  unsure (1)..(167): unsure at all Xaa locations
NYQIAPICAQKYVTLVNVRCACNTLKKEWVCQDVLKEYRRSXGRDPKEVAKGQFGVGLIACGGDCVKKVNVPAAELHQRKVQENKNPAAEVANVPKRRKKRDRGAQEPVQVSMWQRIKXXYLVVITALAGLVVLGLVIWKGVYQISDWMNEMEEQKARERLLRAGRL

SEQ ID NO: 14203 - protein, 184 aa, Triticum aestivum
  unsure (1)..(184): unsure at all Xaa locations
XGVFSCSEVCSHNLACGNHACQDVCHPGPCGECELLPGKVTTCHCGKTRLQEKRASCLDPIPTCDKVCDKRLPCGVHRCKVACHEGECPPCLVRVEQRCRCGSSGQMVECYKVLKEEFRCNKPCGRKKNCGRHRCSELCCPLSKPFAQHQGDSMDPHFCQIPCGKKLRCGQHGCQHLCHSGHCX

SEQ ID NO: 14204 - protein, 144 aa, Triticum aestivum
  unsure (1)..(144): unsure at all Xaa locations
XLPCHQDLTCXRKCQRLRACXRHACKRRCCVGDCPPCAETCDRRLRCGNHKCLSPCHRGACSPCPLMKTISCFCGKTYFEVPXCGTEKNQKPPKCSKRCNIDRAXCRHKLECRPHKCHYGACPPCKLXLXGNNFXCGHKCKERC

SEQ ID NO: 14205 - protein, 262 aa, Zea mays
  unsure (1)..(262): unsure at all Xaa locations
MPSSYAAAAAGSSSRKPNRTSSAAAPTLRPPAPSPSPAPAPLAVNPSVISDSDPSSYSSSSADEADFAASDSATASVVSAYLSVAGEGADLSKVGIFLSSAARRRSPPCLICFDPIRPSDPVWSCSSSCFAILHLPCIQSWAHQSASGPAVPCPTWGCPKCRFAYPKSEIPSSYVCFCSKTIDPAPDPWILPHSCGDVCGRRLDANLDSGCEHTCLLLCHPGPCPPCPXXVVPKATCFCGAHRXPRRCAHQRYSLXXKCTNX

SEQ ID NO: 14206 - protein, 194 aa, Zea mays
  unsure (1)..(194): unsure at all Xaa locations
XGRVCSERIFQCKRECGGMLDCGKHKCERGCHGGKCGECPLRGRRTCPCGKKNYPRLECDAEAATCGSTCEKVLGCGRHRCPERCHRGPCDGTCRLVVTKACRCGGLKKEVPCYQELTCERKCQRLRNCGRHACKRRCCAGDCPPCSEPHKCHYGACPPCKLICXERFPCXHTCKERCHGPISPPTXEXTLKPX

SEQ ID NO: 14207 - protein, 527 aa, Zea mays
  unsure (1)..(527): unsure at all Xaa locations
XACLQRRPLGDMGLPQLVQEIQDKLSRGAVECMICYEMVRRSAAIWSCGSCFSIFHLPCIRKWVRYPASAAAPAAEPASPSWRCPGCQFVYATPARELTYSCFCGRRRDPPNDHFLTPHSCGEPCSKPLDRAEPPGAKGEDVDATRCPHVCVLQCHPGPCPPCKAFAPDRPCPCGKQIIVRRCADRSTPVTCGRPCEQMLPCKRHRCKKVCHTGSCGDCAVLISVCCFCRNKNETLLCGDLMVKGELSEEDGVFSCNEVCGRTLACGNHACKDMCHPGPCGECELMPRKVSTCHCGKTRLQERRASCLDAIPTCDKICDKKLPCGVHKCKVNCHEGECPPCLVLVEQKCRCGSSGQMVECXTSSQXEEFRCKKPCGLKKNCGRHRCSEICCPLSRKVAHLEGGNWDPHLCQISCGKKLRCGQHACQLLCHSGHCPPCLETIFTDLTCACGRTSLLPPLPCGTPTPSCPHQCSVPQPCGHPASHSCHFGDCPPCIVPVMRECIGGHVMLKNIPCXSKDIRCTQPCGKE

SEQ ID NO: 14208 - protein, 291 aa, Zea mays
  unsure (1)..(291): unsure at all Xaa locations
XTRPLLCGNHYCTKSCHVLEVPLNHLNALAMPCEQCNLPCQRVREPPCSHPCPLPCHLNDCPSCKVLVKRPCHCGAMVHAFECVFYNILNAKDQIKIRSCGGPCHRKLPNCPHLCSEVCHPGVCPSVDQCMKKVNTRCACSTLKQEWRCQDVLKEYRKSGRDPKEVPKSQFGVGLLACGEDCKKKLKAPDSELHLRKSQENKIPAVEVVNAPKRRKRRDRGQEVXXISKFQEVKTFVLRALLIILLSIIVAAGLYLLWKGIFWLSDWMNEMEEQRASQRYPEGCNVVKKKR

SEQ ID NO: 14209 - protein, 186 aa, Zea mays
  unsure (1)..(186): unsure at all Xaa locations
XLICFDPIRPSDSEWTCSLLCFALLHLPCMQXWAPRSGPVEPCPTWGCPKCRLVYPKGEIHSYYVMIMXSRTVKRVSHPWILPHCCGDVCGRRLDANVEYGCEHICLVVGHPWLXTPCHVVDLKATXSCXSDRQPLCXGHNRYSCGGKCKRRISCGLHHCTDNCHDGPCPTGAVLSRHKCECAEIX

SEQ ID NO: 14210 - protein, 1077 aa, Schizosaccharomyces pombe
METSKNPSDLPKKPANVKKNRRRFQKSQKKSISPSSGSELPNFKTTISQNNEEVKTSLKEDSSKFHPSASAPIFVPTSSVQLNVSKNNGHKASDIVDAVSSKDEELRKHAKGEGKRSKNRKRSSKHSEKQAVDLKSSNSSQETSSSKGSVNNKSERSREAKSRMPKNSKEIKKGLDLSKLDMTSRMIVELKNRLYECSVCTDTINPSTSIWSCGTCYHVFHLSCIRKWCKNSIEQRNEDAWRCPYCQSNQTETSLHYLCWCGKQEKPEFVKNLVPHSCGDPCGKTRGQDCEHPCPLLCHPGPCPPCTATVEKFCLCGKESIHARCSNISKVNTEPFRCENVCDELLPCGEHTCKKRCHSGLCGACFEPINAKCYCGLHSKTYPCSSLPSPSISKKDENGSVKEWFGYYSCNNPCTLFFDCGLHKCSKTCHPISETRAHCPFATDVLTKCPCGKEDISFLLKGHERKSCSDPIPTCENICGKLLSCGHRCKYKCHLGSCGTCSETLTIPCRCTANEVQVTCEQLQNGFIPTCERLCTILLSCGRHQCNKKCCSGYSKAQTRLARRPKGAKLRYHLLTEEFEEEHICFRPCNKKLSCGNHFCQHMCHRGPCPRCLEASFEELPCTCGRTRLYPPVACGTPIPDCPYLCVLPKSCHHPQVKHNCHPTSEPCPPCPYFVKKRCLCGKHILENQPCYRENVRCGELCNKLLSCKTHFCEKLCHPDGECESSCKKECGKRRMYCEHVCQSPCHAGHPCDERIPCKAPLEVSCECGRIRKKVTCDASYDNPDPQHKVSCTLECSQQQRNKLFAEALNIKTDRRSNDVAQYTKSLLVFYGKHSDFADEVESLLRNFVNNKASSFRFPSMRREQRAFVHMFAKLLGLESVSFDPEPKRNVMVYNKGEAKLPNMLLKEANLYHLQHPEIPLKPDSLLGPEEENATASHIDGSSNASDSGYNAFVLKELLKEVNDESAIFSVLDDIVDFNHLTWSILFGENYIILKPLNTDLIVNKTGKLVALRPLVNRRLADAGIASRCEICEINDKNEIVKTRSQRIHSKKKAFLSLVPDKSIGVINRYKELATEL

SEQ ID NO: 14211 - protein, 965 aa, Saccharomyces cerevisiae
MTEHESLGLEQNQDGGDTYRHHNLSDGCISSVEDANEQPSSYEEESDDDMQYYERAIQEISSGDSYVCMICTVEMDYTCQMFACKRCYRVFDYGCIREWALKSTEKTVDRIWKCPNCYYVSKRVPVKNRPTCWCGKVVNPDPNPLDPNSCGQTCNASTCMHGCSKICHLGPHPECTRMVEIMCHCGKHSKSIFCYQSKVMKKNFNCQEVCGLPLSCSIHTCKKKCHPGLCGPCPEMIISKDSPKKQIKCYCGNHTRANIKCSETKFPKSGKSSKDENGNRWIGVFACADNRVVDYSCRKHSFIESCISPPTINGEKACPFLPSSLKTCPCGRTALEELTKPRKHCDDPIPTCDSRCGKPLKCGKHSCPFTCHDKACMEPCLQIDSVKCACEQSTFSVPCGFQGRPRCNIKCESLMSCRRHRCTDRCCSGRPSAIRRKKNLFRTQDLLDESLVEAKHICLKPCNLTLSCGIHKCQRKCHPGKCPPCLESDSNDLVCPCGNTVVPAPVRCGTKLPTCNHPCIKVVRGESTCGHKPMPHTCHSLDVSCPPCTETVFKPCKCGKKTKVRTVCFQTDVSCGIKCGIPLSYCYHTCQKTCHLPGNCQKVCKQTCGQKRLNCNHECPKPCHGKTECPDLPCATLVKIYCKCGRIKKSVTCGAKSDRVSVTESSVLDCNEECEALKRLKELKEAFGIKEETNNFTSNELDALKKLVSVATTFEELQLPFTEAALSVYSKQERWCSQIEAILNKLMDDKTRSSLHFKPMRPPQRHFIRELAKAYGLYSESQDREPMRSVFIKKEDNGASNKPVLSLAEAYPLYESFKQLQKERKAQEFQARTTAKLINFEVQDTEPKVEVAKKNGFLVQNLVAGNTAEDLRRFFEPHLKHTLVVNPQYLILDDGKTALVYPENYETASVNTERDMELLVGHFDFMAKEAFLADSISLCSTEEELERRLDTPVIQEDSPVMDNNT

SEQ ID NO: 14212 - protein, 909 aa, Neurospora crassa
MADVQPATHEGGSDRGGRGGRGGRGRGRGRGGRPRRGHHGSERPNPGGDASQPVQSAESSRNLLETANANVPPPLVLTPDAPSGHSREEGEGRRRRGGGGGGPRRGRGVSSAQRSIVVSHRGRAPPPGTAAAPSTAEEHDTASGAGLSADAPAFVPGQPLAVPTQQPRAAAAKRQKEHRPAPSNTSKSSAPDLTTRIHEDIASGLYECVICTNELTRNTRIWSCSVCWTVTHLSHECGERCCPGEKKAAERRKKKNRGPNENYEAEHICLQVCGRTLKCGQHTCQQLCHKGQCPSCVEAVFDEISCSCGRTVLYPPQPCGTRPPECRFPCRRRQPCGHPTVPHSCHPDDTPCPKCPSLMDKLCICGKEIMKNRPCWNNEVHCGLPCGKKLKCGSHVCKKTCHKPGDCEDAGIPGSHCTQACGKVRKSCDHTCAEQCHAPYPCKEDKPCQSKTFITCPCQNRKQEVRCMATMLSPSSARESSLKCDDECLRLQRNRKLANALKIDDTHTDDHIPYSDKTLKMFKENVNWSQTQEREFRVFASSPDEKRLRFKPMPSSQRAFLHSLAEDFGLDSESQDPEPHRHVCIFKTPRFVAAPSKTLAQCARIAKPTASLLRPAAAAPVVAPPKQESFNALLLKEPRFGLTIEELDQALAADIRSVAKSGLTAVGFTTNFLPTEEILIKAVPASTAAAIANSPIAPTPQAIESALMTLKSAVTKTVSLSKLATGGVVLCHADDSLNVVRREAESAKGGAGGWNAVASRGSWRRLGGGSKTSTAEPEKAAAPLTRSFVTLRKIMEKKPVVEAKKRPEVVEEDWEAAAEKEEEQEQEKEKSGTSGSDSEGEAEGQSKIASVDGDVQEGNGVTSDTERSVDTAVHEEKEPEQSLVDGGSSSASGEQAETETGTATATMIA

SEQ ID NO: 14213 - protein, 1119 aa, Caenorhabditis elegans [sequence omitted]

SEQ ID NO: 14214 - protein, 840 aa, Drosophila melanogaster
MEKFNKAQAKNLAAAQKLVDTYASSSEDEGELDENHILELLYKNYKPSDNAGSSKEAARTSTFLENTLHSGAATCLICIGSIRRVEAIWSCESCYCFFHLKCIQRWANDSMMQMKVKAAEQQNGQGHYNHLGEFVPPKRQKSLHWCCPKCRRDYQPADKPTQYNCFCGKEVNPENQPFLVPHSCGEHCGKLLQPKCGHDCKLLCHPGPCPPCAQQAQVSCLCGKSSPRSVRCIDKQWTCQQTCKELLACGKHKCNQVCHQPGKCPPCTSKSLQPCECQRESKMVNCSDRKWKCQNVCGAPFACGLHICEKVCHAGPCGDGECPLQVRSCPCGKNTQVRPCNETEETCGDTCQKLLSCGQHTCTQRCHRGPCISCPIRTKKKCRCGLHEKELPCSKEFACETKCKQMRDCGKHACNRKCCGDQCPPCEKICGKQLSCNKHKCQSVCHNGPCYPCKLESQINCRCGKTKKSVPCGRERSARIVCLELCRITPKCHHAIKHRCHKGDCPPCGQVCGLPNDTSKCGHICKARCHEAVRVNKPKEARPQAKKYEYKALPHPRCEEGVIVTCIGGHEVATWPCWNSKPTSCQRSCARQLKCGNHKCSLVCHFVPLPQDMSAQTGCANCEEGCTVPRPTGCIHACPKGCHPPPCAPCNFVIKTKCHCGLNQLVYKCNEYYDETGSVQEIIERREKLRSCGNRCLKNYPCGHRCTAICHTGKCPNPELCRKKVRIFCACKRLKQEIACDKHRAGQTFLDCDSNCKAEQIRVQAAEQLQLEQKRRDEEERNRLELEKFEAKFGKRKHKERKTVGSGPAKTKIDWQRRAIYAVSILTVVGAIVVAFYADS

SEQ ID NO: 14215 - protein, 1106 aa, Drosophila melanogaster
MAEYWQQLTNGPGEAGPGNESSAMVDCNGGHESAAVGGSCNRHSNNNYVNFNQFIMQHNLGGGAPSNATSTMQHPVGSSYTNFSLGGGGGAFGLNPPVASASTSHFANVSHQSPNFYSQAMIPTYQNGDGIARVTVTSSYGSVNPSNSNFSSFYTPFGNNPFDFSASKLQASAPEFVPNFAKLSLEETPAAATTNGNSTASLETAINETRPRTLRAQEPAERGANNQCSNHNYERERERERDRDRDRERDRDRDRDRDRDRDRDRDRDSRPGNTRQQRRSDYRDDREDRYERSDRRRPQKQQRYDNHRSNKRRDDWNRNRDRINGFPRAVDDLDTSNESAHPSPEKQSQLQQISPRRGPPLPPADNEKLSQREKLVRDIEQRRLECLVCVEAIKSHQPTWSCRNCYHMLHLKCTITWASSSKSEVGWRCPACQNVLQDLPRDYLCFCGKLKNPPVSRTELAHSCGEVCCRIEGCSHACTLLCHPGPCPPCQANVVRSCGCGRSTKTMQCAMKEEVLCGEICDKLLNCGEHRCQAECHSGKCAACSEQVVQQCHCGKQERKVPCTRESQDKRTYSCKDSCGQPLPCGHHKCKDSCHAGSCRPCKLSPEQITSCPCGKIPVPAGQRSSCLDPIPTCEGICSRTLRCGKPAHPHQCGSKCHLGQCPPCPKQTGVKCRCGHMDQMIKCRQLCNRADDARCKRRCTKKRSCGKHKCNVECCIDIDHDCPLPCNRTLSCGKHKCDQPCHRGNCPPCYRSSFEELYCECGAEVIYPPVPCGTKKPICKLPSSRIHPCDHPPQHNCHSGPTCPPCMIFTTKLCHGNHDWRKTIPCSQPNFSCGMACGKPLPCGGHKCIKPCHEGPCQSAGEICRQSCTKPRPTCGHKCAAACHEGACPETPCKELVEVQCECGNRKQNRSCQELAREHSRIATIQLASSMAEMSRGNYMELSEILAPAKKSNKTLDCNDECRLLERNRRLAAALSSGNSDTKQKCLTKYSEFVRGFAKKNPALTKSVYETLTDLVKLAKESKQRSRSHSFPTMNREKRQLVHELCEVFGIESVSYDKEPNRNVVATAHKDRCWFPATSIMEVLARESGQRRVPVPSNNAWGLKK

SEQ ID NO: 14216 - protein, 1099 aa, Drosophila melanogaster
MAEYWQQLTNGAGEAGPGNESSAMADCNGGHESAAVGGSCNRHSNNNYVNFNQFIMQHNLGGGAPSNATSTMQHPVGSSYTNFSLGGGGGAFGLNPPVASASTSHFANFYSQAMIPTYQNGDGIARVTVTSSYGSVNPSNSNFSSFYTPFGNNPFDFSASKLQASAPEFVPNFAKLSLEETPAAATTNGNSTASLETAINETRPRTLRAQEPAERGANNQCSNHNYERERERERDRDRDRERDRDRDRDRDRDRDRDRDRDSRPGNTRQQRRSDYRDDREDRYERSDRRRPQKQQRYDNHRSNKRRDDWNRNRDRINGFPRAVDDLDTSNESAHPSPEKQSQLQQISPRRGPPLPPADNEKLSQREKLVRDIEQRRLECLVCVEAIKSHQPTWSCRNCYHMLHLKCTITWASSSKSEVGWRCPACQNVLQDLPRDYLCFCGKLKNPPVSRTELAHSCGEVCCRIEGCSHACTLLCHPGPCPPCQANVVRSCGCGRSTKTMQCAMKEEVLCGEICDKLLNCGEHRCQAECHSGKCAACSEQVVQQCHCGKQERKVPCTRESQDKRTYSCKDSCGQPLPCGHHKCKDSCHAGSCRPCKLSPEQITSCPCGKMPVPAGQRSSCLDPIPTCEGICSRTLRCGKPAHPHQCGSKCHLGQCPPCPKQTGVKCRCGHMDQMIKCRQLCNRADDARCKRRCTKKRSCGKHKCNVECCIDIDHDCPLPCNRTLSCGKHKCDQPCHRGNCPPCYRSSFEELYCECGAEVIYPPVPCGTKKPICKLPCSRIHPCDHPPQHNCHSGPTCPPCMIFTTKLCHGNHELRKTIPCSQPNFSCGMACGKPLPCGGHKCIKPCHEGPCQSAGEICRQSCTKPRPTCGHKCAAACHEGACPETPCKELVEVQCECGNRKQNRSCQELAREHSRIATIQLASSMAEMSRGNYMELSEILAPAKKSNKTLDCNDECRLLERNRRLAAALSSGNSDTKQKCLTKYSEFVRGFAKKNPALTKSVYETLTDLVKLAKESKQRSRSHSFPTMNREKRQLVHELCEVFGIESVSYDKEPNRNVVATAHKDRCWFPATSIMEVLARESGQRRVPVPSNNAWGLKK

SEQ ID NO: 14217 - protein, 1106 aa, Drosophila melanogaster [sequence omitted]

SEQ ID NO: 14218 - protein, 733 aa, Homo sapiens
MEASWRQVAGGRGRSRGRATAAPSGNGVHLRGAGGGREKGSVGAVPSGTSPGGVATTAAAGSRHSPAGSQALQTTAASELMSQKKFEEIKKANQAAARKLVEEQFSSSSEEGDEDFEGKQGKILANTFITYTTQTDGDTRELERTKQYVNEAFQAGAMTCLICIASVKRNQAVWSCSGCFCIFHMPCIQKWAKDSQFLVSSVTDDDFGKKDCPWPCPKCRFEYKRSETPSRYYCYCGKVEDPPLDPWLVPHSCGQVCEREFKPPCGHKCLLLCHPGPCPPCPKMVTTTCYCKKAKPIPRRCSAKEWSCQLPCGQKLLCGQHKCENPCHAGSCQPCPRVSRQKCVCGKKVAERSCASPLWHCDQVCGKTLPCGNHTCEQVCHVGACGECPRSGKRFCPCQKSKFSLPCTEDVPTCGDSCDKVLECGIHRCSQRCHRGPCETCRQEVEKHCRCGKHTKRMPCHKPYLCETKCVKMRDCQKHQCRRKCCPGNCPPCDQNCGRTLGCRNHKCPSVCHRGSCYPCPETVDVKCNCGNTKVTVPCGRERTTRPPKCKEQCSRPPTCHHTSQEKHRCHFGSCPPCHQPCQKVLEKCGHLCPAPCHDQALIKQTGRHQPTGPWEQPSEPAFIQTALPCPPCQVPIPMECLGKHEVSPLPCHAVGPYSCKRVCGRILDCQNHTCMKECHKVTKTDGCTGKNKIGKLKLCDLSMILQQESSKSESTVPDLLTPSPMCSSTHVI

SEQ ID NO: 14219 - protein, 1120 aa, Homo sapiens
MAEAPPVSGTFKFNTDAAEFIPQEKKNSGLNCGTQRRLDSNRIGRRNYSSPPPCHLSRQVPYDEISAVHQHSYHPSGSKPKSQQTSFQSSPCNKSPKSHGLQNQPWQKLRNEKHHIRVKKAQSLAEQTSDTAGLESSTRSESGTDLREHSPSESEKEVVGADPRGAKPKKATQFVYSYGRGPKVKGKLKCEWSNRTTPKPEDAGPESTKPVGVFHPDSSEASSRKGVLDGYGARRNEQRRYPQKRPPWEVEGARPRPGRNPPKQEGHRHTNAGHRNNMGPIPKDDLNERPAKSTCDSENLAVINKSSRRVDQEKCTVRRQDPQVVSPFSRGKQNHVLKNVETHTGSLIEQLTTEKYECMVCCELVRVTAPVWSCQSCYHVFHLNCIKKWARSPASQADGQSGWRCPACQNVSAHVPNTYTCFCGKVKNPEWSRNEIPHSCGEVCRKKQPGQDCPHSCNLLCHPGPCPPCPAFMTKTCECGRTRHTVRCGQAVSVHCSNPCENILNCGQHQCAELCHGGQCQPCQIILNQVCYCGSTSRDVLCGTDVGKSDGFGDFSCLKICGKDLKCGNHTCSQVCHPQPCQQCPRLPQLVRCCPCGQTPLSQLLELGSSSRKTCMDPVPSCGKVCGKPLPCGSLDFIHTCEKLCHEGDCGPCSRTSVISCRCSFRTKELPCTSLKSEDATFMCDKRCNKKRLCGRHKCNEICCVDKEHKCPLICGRKLRCGLHRCEEPCHRGNCQTCWQASFDELTCHCGASVIYPPVPCGTRPPECTQTCARVHECDHPVYHSCHSEEKCPPCTFLTQKWCMGKHEFRSNIPCHLVDISCGLPCSATLPCGMHKCQRLCHKGECLVDEPCKQPCTTPRADCGHPCMAPCHTSSPCPVTACKAKVELQCECGRRKEMVICSEASSTYQRIAAISMASKITDMQLGGSVEISKLITKKEVHQARLECDEECSALERKKRLAEAFHISEDSDPFNIRSSGSKFSDSLKEDARKDLKFVSDVEKEMETLVEAVNKGKNSKKSHSFPPMNRDHRRIIHDLAQVYGLESVSYDSEPKRNVVVTAIRGKSVCPPTTLTGVLEREMQARPPPPIPHHRHQSDKNPGSSNLQKITKEPIIDYFDVQD

SEQ ID NO: 14220 - protein, 1024 aa, Homo sapiens
MAEAPPVSGTFKFNTDAAEFIPQEKKNSGLNCGTQRRLDSNRIGRRNYSSPPPCHLSRQVPYDEISAVHQHSYHPSGSKPKSQQTSFQSSPCNKSPKSHGLQNQPWQKLRNEKHHIRVKKAQSLAEQTSDTAGLESSTRSESGTDLREHSPSESEKEVVGADPRGAKPKKATQFVYSYGRGPKVKGKLKCEWSNRTTPKPEDAGPESTKPVGVFHPDSSEASSRKGVLDGYGARRNEQRRYPQKRPPWEVEGARPRPGRNPPKQEGHRHTNAGHRNNMGPIPKDDLNERPAKSTCDSENLAVINKSSRRVDQEKCTVRRQDPQVVSPFSRGKQNHVLKNVETHTGSLIEQLTTEKYECMVCCELVRVTAPVWSCQSCYHVFHLNCIKKWARSPASQADGQSGWRCPACQNVSAHVPNTYTCFCGKVKNPEWSRNEIPHSCGEVCRKKQPGQDCPHSCNLLCHPGPCPPCPAFMTKTCECGRTRHTVRCGQAVSVHCSNPCENILNCGQHQCAELCHGGQCQPCQIILNQVCYCGSTSRDVLCGTDVGKSDGFGDFSCLKICGKDLKCGNHTCSQVCHPQPCQQCPRLPQLVRCCPCGQTPLSQLLELGSSSRKTCMDPVPSCGKVCGKPLPCGSLDFIHTCEKLCHEGDCGPCSRTSVISCRCSFRTKELPCTSLKSEDATFMCDKRCNKKRLCGRHKCNEICCVDKEHKCPLICGRKLRCGLHRCEEPCHRGNCQTCWQASFDELTCHCGASVIYPPVPCGTRPPECTQTCARVHECDHPVYHSCHSEEKCPPCTFLTQKWCMGKHEFRSNIPCHLVDISCGLPCSATLPCGMHKCQRLCHKGECLVDEPCKQPCTTPRADCGHPCMAPCHTSSPCPVTACKAKVELQCECGRRKEMVICSEASSTYQRIAAISMASKITDMQLGGSVEISKLITKKEVHQARLECDEECSALERKKRLAEAFHISEDSDPFNIRSSGSKFSDSLKEDARKDLKFVSDVEKEMETLVEAVNKVEVETSHWTFL

SEQ ID NO: 14221 - protein, 833 aa, Homo sapiens
MAEAPPVSGTFKFNTDAAEFIPQEKKNSGLNCGTQRRLDSNRIGRRNYSSPPPCHLSRQVPYDEISAVHQHSYHPSGSKPKSQQTSFQSSPCNKSPKSHGLQNQPWQKLRNEKHHIRVKKAQSLAEQTSDTAGLESSTRSESGTDLREHSPSESEKEVVGADPRGAKPKKATQFVYSYGRGPKVKGKLKCEWSNRTTPKPEDAGPESTKPVGVFHPDSSEASSRKGVLDGYGARRNEQRRYPQKRPPWEVEGARPRPGRNPPKQEGHRHTNAGHRNNMGPIPKDDLNERPAKSTCDSENLAVINKSSRRVDQEKCTVRRQDPQVVSPFSRGKQNHVLKNVETHTGSLIEQLTTEKYECMVCCELVRVTAPVWSCQSCYHVFHLNCIKKWARSPASQADGQSGWRCPACQNVSAHVPNTYTCFCGKVKNPEWSRNEIPHSCGEVCRKKQPGQDCPHSCNLLCHPGPCPPCPAFMTKTCECGRTRHTVRCGQAVSVHCSNPCENILNCGQHQCAELCHGGQCQPCQIILNQVCYCGSTSRDVLCGTDVGKSDGFGDFSCLKICGKDLKCGNHTCSQVCHPQPCQQCPRLPQLVRCCPCGQTPLSQLLELGSSSRKTCMDPVPSCGKVCGKPLPCGSLDFIHTCEKLCHEGDCGPCSRTSVISCRCSFRTKELPCTSLKSEDATFMCDKRCNKKRLCGRHKCNEICCVDKEHKCPLICGRKLRCGLHRCEEPCHRGNCQTCWQASFDELTCHCGASVIYPPVPCGTRPPECTQTCARVHECDHPVYHSCHSEEKCPPCTFLTQKWCMGKHEQSHYWASTQKKRSHYMKKIPAHACL

SEQ ID NO: 14222 - protein, 1104 aa, Homo sapiens
MEFSSICIEFKSTLRQEAPPPSRAAEPRSSCTVHHLPVTFPGRSLMMKSLLFISIVIIRQEGKPKSQQTSFQSSPCNKSPKSHGLQNQPWQKLRNEKHHIRVKKAQSLAEQTSDTAGLESSTRSESGTDLREHSPSESEKEVVGADPRGAKPKKATQFVYSYARGPKVKEKLKCEWSNRTTPKPEMLDPKVPNLWGFSTLTLQRHPLEKEYWMGMEPDEMSREDTHRKGLPGKWRGPGHDQAEIHQNRRATDIQTQDTETTWAPFQSDDLNERPAKSTCDSENLAVINKSSRRVDPEKCTVRRQDPQVVSPFSRGKQNHVLKNVETHTGSLIEQLTTEKYECMVCCELVRVTAPVWSCQSCYHVFHLNCIKKWARSPASQADGQSGWRCPACQNVSAHVPNTFSCFCGKVKNPEWSRNEIPHSCGEVCRKKQPGQDCPHSCNLLCHPGPCPPCPAFMTKTCECGRTRHTVRCGQAVSVHCSNPCENILNCGQHQCAELCHGGQCQPCQIILNQVCYCGSTSRDVLCGTDVGKSDGFGDFSCLKTCGKDLKCGNHTCSQVCHPQPCQQCPRLPQLVRCCPCGQTPLSQLLELGSSSRKTCMDPVPSCGKVCGKPLPCGSLDFIHTCEKLCHEGDCGPVSRTSVISCRCSFRTKELPCTSLKSEDATFMCDKRCNKKRLCGRHKCNEICCVDKEHKCPLNCGRKLRCGLHRCEEPCHRGNCQTCWQASFDELTCHCGASVIYPPVPCGTRPPECTQTCARVHECDHPVYHSGHSEEKCPPCTFLTQKWCMGKHEFRSNIPCHLVDISCGLPCSATLPCGMHKCQRLCHKGECLVDEPCKQPCTTPRADCGHPCMAPCHTSSPCPVTACKAKVELQCECGRRKEMVICSEASSTYQRIAAISMASKITDMQLGGSVEISKLITKKEVHQARLECDEECSALERKKRLAEAFHISEDSDPFNIRSSGSKFSDSLKEDARKDLKFVSDVEKEMETLVEAVNKGKNSKKSHSFPPMNRDHRRIIHDLAQVYGLESVSYDSEPKRNVVVTAIRGKSVCPPTTLTGVLEREMQARPPPPIPHHRHQSDKNPGSSNLQKITKEPIIDYFDVQD

SEQ ID NO: 14223 - protein, 340 aa, Mus musculus
MAASEDELLLPRLPELFETSKKLLEDVEVATEPTGSRTIQDKVSKGLELLEKAAGMLSQLDLFSRNEDLEEIASTDLKYLMVPALQGALTMKQVNPSKRLDHLQRAREHFVHFLTQCHCYHVAEFQLPQTKTNSAENNTASSSMAYPNLVAMASQRQAKIERYKQKKEVEHRLSALKSAVESGQADDERVREYHLLHLRRWIAVSLEELESIDQEIKILKEKDSPREETACHSSLPEKPPMKPFILTRNKAQAKVFGTGYPSLATMTVSDWYEQHQKYGVLPDRGIAKPASADFQRAAQQQEDQEQKDEESEEKALHRMREWDDWKDTHPRGYGNRQNMG

SEQ ID NO: 14224 - protein, 355 aa, Mus musculus
MAASEDELLLPRLPELFETSKKLLEDVEVATEPTGSRTIQDKVSKGLELLEKAAGMLSQLDLFSRNEDLEEIASTDLKYLMVPALQGALTMKQVNPSKRLDHLQRAREHFVHFLTQCHCYHVAEFQLPQTKTNSAENNTASSSMAYPNLVAMASQRQAKIERYKQKKEVEHRLSALKSAVESGQADDERVREYHLLHLRRWIAVSLEELESIDQEIKILKEKDSPREETACHSSLPEKPPMKPFILTRNKAQAKVFGTGYPSLATMTLISKEQLSSRKIKSKRMRRVRRKPCTGCESGTTGRTPIPGATATDRTWASHARRPKDSVVHTFTPRTTSGGCSEGSRVESCFAFDSVK

SEQ ID NO: 14225 - protein, 340 aa, Rattus norvegicus
MAASEEELLLPRLPELFETSKKLLEELEVATEPTGSRTIQDKVSKGLELLEKAAGMLSQLDLFSRNEDLEEIASIDLKYLMVPALQGALTMKQVNPSKRLDHLQRAREHFIHFLTQCHCYHVAEFQLPQTKNNSAENNTARSSMAYPNLVAMASQRQAKIERYKQKKEVEHRLSALKSAVESGQADDERVREYYLLHLRRWIGISLEEIESIDQEIKILKDKDSPREESACQSSLPEKPPMKPFILTRNKAQAKVFGTGYPSLATMTVSDWYEQHQKYGALPDRGIAKPPSADFQRAAQQQEDQEQKDEENEEKALHRMREWDDWKDTHPRGYGNRQNMG

SEQ ID NO: 14226 - protein, 375 aa, Anopheles gambiae str. PEST
LAKKTSVRSSEMSEATNEIPLDRKLNEIFDEGYSAMNRLDENAALPSNAPEFQVAVKKTIGHFEDATRLVSLVGMFSTNESYEEVPTENLRYFLLPFFLGKMTLRLCNTNREEVVEVAEVYFKDFLARCENYKLYETPDRDTGELAIVPGGQSDKIRELQRMGAQRNEKIRKFQEKKELDEKVKQLRYVVEQPEAKIDDETKREFFLSLLKSAVLEAQEELESVAREKQMLQYRAAAKLRGEEELEEASHGAFGGGTNKRPPVQPLKPIIITRDAVQKAVYGRGYPSLPTMTVAEFYEQRVAEGIFPDPERMKEVNKNSLMNRVHMDNAAEQDREDEQQEQLIERDDEEYLARQRAKDEFKDEHRRGEGNRYNRS

SEQ ID NO: 14227 - protein, 405 aa, Arabidopsis thaliana
MGGLAMEEMPLSVLFEQARKIHLAASESGVDQDVVKKGCEMFQKCEDMIGKLALFSSNETKEDISTNNLKYLLVPYYLAELTEKIIQEDRIQIVKASYAKLKEFFSFCEAMELVPDEELEASSRGGSGAPADRRALKIARFKRQKAAEAKLLEIKERKERRGRSTKASALSTPVESGEDDIPDDDSEEEREAWLSSINLAICKAIDLLEMLKREEEMLSAIKERQLKDGEGGFSRDALDDRTKKAETWHRDAAARIQYSKPAQPITCATFAQDVLEGRASVSQGHEHKNQPLIFGPASIVGGPLSTERERMIAQVFQPSHRMPTMCIEDAGLTEMNIMNDWQEQTKKAIEEATTSWYNDKPLRRKEEDEEDDDEDEEAVMKARAFDDWKDDNPRGAGNKKLTPCG

SEQ ID NO: 14228 - protein, 405 aa, Arabidopsis thaliana
MGGLAMEEMPLSVLFEQARKIHLAASESGVDQDVVKKGCEMFQKCEDMIGKLALFSSNETKEDISTNNLKYLLVPYYLAELTEKIIQEDRIQIVKASYAKLKEFFSFCEAMELVPDEELEASSRGGSGAPADRRALKIARFKRQKAAEAKLLEIKERKERRGRSTKASALSTPVESGEDDIPDDDSEEEREAWLSSINLAICKAIDLLEMLKREEEMLSAIKERQLKDGEGGFSRDALDDRTKKAETWHRDAAARIQYSKPAQPITCATFAQDVLEGRASVSQGHEHKNQPLIFGPASIVGGPLSTERERMIAQVFQPSHRMPTMCIEDAGLTEMNIMNDWQEQTKKAIEEATTSWYNDKPLRRKEEDEEDDDEDDEPVMKARAFDDWKDDNPRGAGNKKLTPCG

SEQ ID NO: 14229 - protein, 413 aa, Arabidopsis thaliana
MGGLAMEEMPLSVLFEQARKIHLAASESGVDQDVVKKGCEMFQKCEDMIGKLALFSSNETKEDISTNNLKYLLVPYYLAELTEKIIQEDRIQIVKASYAKLKEFFSFCEAMELVPDEELEASSRGGSGAPADRRALKIARFKRQKAAEAKLLEIKERKERRGRSTKASALSTPVESGEDDIPDDDSEEERELSCLIAFLCRPGSPQLTWLFAIDLLEMLKREEEMLSAIKERQLKDGEGGFSRDALDDRTKKAETWHRDAAARIQYSKPAQPITCATFAQDVLEGRASVSQGHEHKNQPLIFGPASIVGGPLSTERERMIAQVFQPSHRMPTMCIEDAGLTEMNIMNDWQEQTKKAIEEATTSWYNDKPLRRKEEDEEDDDEDEEAVMKARAFDDWKDDNPRGAGNKKLTPCG

SEQ ID NO: 14230 - protein, 422 aa, Glycine max
  unsure (1)..(422): unsure at all Xaa locations
TRCFRFAHNRRESNRIERKGKCRMDDMPLPALFEQARKIHAAATDSGADQEVVKKGCEALHRCEDMVNNLGLFSPNETKEDISTTNLKYILVPFYLAELTEKIAQDDRIQILKSSQAKLKEFISFCEAMELVPKEELESYIDGAPKTVADQRARKIARFKRQRAAESKLLEIKERKERRGRSTKAAALSTPVEAGEEEVLDDDGEEEREAWITTISLAICKALDMLDMLKKEEEMLSAVKDRQSKDGDKGXFSKDVLDERAKKAEAWHRDSAVRAQYTRPSPPITCATFAQDVLEGRAKASQEHDHKHQPLIFGPASLVNGNITTERERMAAQVFQPSHRMPTMSIEEAGLKEMEIMNKWQERNVKLMEEVNSSWHNDRKSKLGEDDDDEDDDAAQEKARAWDDWKDDNPRGAGNKKLTPCG

SEQ ID NO: 14231 - protein, 410 aa, Glycine max
ATGCFIIESKGSCRMEDVPLPALFEQARKIHNSATATASAADVVKKGCEALHRCEDMVNNLGLFSPNETKEDISTTNLKYILVPFYLAELTEKLAQDDRIHILKASQAKLKEFISFCEAMELVPKEELESYIEGASKTVADQRARKIARFKRQRAAESKLLEIKEQKERRGRSTKAAALSTPVEAGEEEVLDDDGEEEREAWITTISLAICKALDLLDMLKKEEEMLSAVKDRQSKDGDKEFSKDVLDERAKKAEAWHHDSAVRARYTKPSSPITCATFAQDVLEGRAKASQAHDHKHQPLIFGPASLVNGNITTERERMAAQVFQPSHRMPTMSIEEAGLKEMEIMNKWQERNVRLMEEANSSWHNDRKSKPGEDDDEDDAAQEKARAWDDWKDDNPRGAGNKRLTPCG

SEQ ID NO: 14232 - protein, 291 aa, Glycine max
  unsure (1)..(291): unsure at all Xaa locations
TRCFRFAHNRRESNRIESKGKCRMDDMPLPALFEQARKIHAAATDSGADQEVVKKGCEALHRCEDMVNNLGLFSPNETKEDISTTNLKYILVPFYLAELTEKIAQDDRIQILKSSQAKLKEFISFCEAMELVPKEELESYIDGAPKTVADQRARKIARFKRQRAAESKLLEIKERKERRGRSTKAAALXXSAVKDRQSKDGDKEFSKDVLDERAKKAEAWHHDSAVRAXRYTRPSSPITCANFRQDVLEGRAKASQAHDHKHQPLIFGPASLVNGNITTERERMAAQGLPT

SEQ ID NO: 14233 - protein, 419 aa, Triticum aestivum
  unsure (1)..(419): unsure at all Xaa locations
MGEMEDVSNRMEAQLRVRRGGXDDADLPLPALFDRASHLHSLASSSSLDQEGIRKGVDLLRRCDDMVSKLGLFSSNETKEDVSTANLKYLLVPYYLGEMTEQVEQEDRIPVLKASQDHLKEFISVCEALELIPEDELQLYRQGQSETGANRRAQKVARFKRQKAAETKLQEIKERKERRGRSLRATALSAPIEAGEEDDLEADGEEEREAWLATISLALCKAFDLVDMLKKEEEMLLAVKERKEKDGNAFAREMLDERRQKAEAWHQNAASRAPYSKPAAPITCATFAQDVIEGRASVSQAHDHKHQPLIFGPASLVGGGLTSERERMAAQVFQPSFRMPTMSIEQAGLAEMKMMEQWQERTAKMIQEASSSWHKDDTXXLAQDDEDAEEXXKARAFDDWKDENPRGAGXNKKLTPXCG

SEQ ID NO: 14234 - protein, 423 aa, Zea mays
MVDVEEVGNKMQSQMRLHAEPDDAAADLPLPALFDRASRLHALASSSALDQDGIRTGVELLRRCDEMVGRLGLFSPNETKDDVSTANLKYLLVPYYLAEMTEKMAQEDRIPVLKASQDHLKEFIALCEVLELIPEDELELSRQKQSDTMANRRAQKVARFKRQKAAETKLQEIRERKERRGRSLRATALSAPVEAGEEDDLEDDGEEEREAWLATISLAICKAFDLLDMLKKEEEMLLAVKERKAKDGNAFAREMLDERTKKAEAWHHKAASRVAYSKPADPITCATFAQDVIEGRASVSQAHEHKHQPLIFGPASLVGGGLTSERERMAAQVFQPSYRMPTMSIEEAGLREMKMMERWQERTAEMMREANSAWHKGGDSSSSSMPQGEGGDEDAEEAKARAWDDWKDDNPRGAGNKKLTPCG

SEQ ID NO: 14235 - protein, 469 aa, Zea mays
  unsure (1)..(469): unsure at all Xaa locations
IFRGVQRPPGDDASRALSFPRPSPLPRSTRVLPQTSRSLPVPRGNRPTGRNGGCGGDREQVAIADAPPRGAGGRRXADLPLPALFDRASRLHALASSSALDQDGIRTGVDLLRRCDDMVSKLGLFSPNETKEDVSTANLKYLLVPYYLAEMTEKIAQEDRIPVLKTSQDHLKEFIALCEVLELIPEDELELSRQKQPDTMTNRRAQKVARFKRQKAAETKLQEIRERKERXRARSLRAAALSAPIEAGEEDDLENDGEEEREAWLATISLALCKAFDLLDMLKKEEEMLQAVKERKAKDGNAFAREMLDERTKKAETWHHNAANRVAYSKPADPITCATFAQDVIEGRASVSQAHEHKHQPLIFGPASIVGGGLTSERERMTAQVFQPSYRMPTMSIEEAGLREMKMMEKWQERTAELMKESTSAWHKDXXSSSAQEDEDAEEEKARAWDDWKDDNPRGAGNKKLTPCG

SEQ ID NO: 14236 - protein, 171 aa, Zea mays
  unsure (1)..(171): unsure at all Xaa locations
MAEVEDVSNRMEAQLRVHAAEDDADLPLPALFDRASHLHSLASSSSLDQEGIRKGVDLLRRCDDMVSKLGLFSSNETKEDVSTANLKYLLVPYYLGEMTEQVEQEDRIPVLKASQDHLKEFISVCEALELIPEDELQLYRQGXSLKQGQTEEHKRLPGSSGKRLQKRRLQE

SEQ ID NO: 14237 - protein, 323 aa, Schizosaccharomyces pombe
MESKSLRELWEETEKLKDSSSTDEKTRSEIVEGYEKCLKLVLQLRIFSSNEEVDEIKTSELRYLMIDYELAKCVEQWTKGDRLKAVQYAKTHYETFLSICDDYGLKPMQDEKPKTEADTRTLKIARYRMRQNLEKELKALSKDSETNEEQERKFWLTKLQIAVEDTLDSLPHIEMEIDLLKRAQAELMKSEDSPEKDEETLRREERKQKEGSSWRLDLNTRDKILDKNNRPLQPFTIVSDRNETRKNVFGFGYNLPTMTVDEYLDEEMKRGNIISQKDNPPKSDSDDEDDYEKLDAKTMKDRYWDEFKEANPRGSGNTMVNRG

SEQ ID NO: 14238 - protein, 327 aa, Caenorhabditis elegans
MSELSDEEISLQALYDPSKKVIGDIEDGIFSTPELQPRIKTGIDNLQLVTKLVNQMRLFSSNEQIEDVPTNSLPYLLVPCFLGILHQNLMTEPGLKLDELRKSKIYMRNFLDRLRDLCLITTRLPWEDEDTEEQNLKEKPKLAVEEIRRLKLERHKKKQELKMAELRIQKQLEAVSIDEQNLRELYITQLLFWSERCYEELQAIDDELPLLKMMAERASHPHRHPAPPPATKTVPTLKPFIITRDAQQKQVFGLGYPGIPAMSVDEWYHQKFGHNPQNAPQSSAPAGAEAQESEEEVDDDEARAKAMRWDEYKDDHRRGWGNMHNKG

SEQ ID NO: 14239 - protein, 339 aa, Homo sapiens
MAAEDELQLPRLPELFETGRQLLDEVEVATEPAGSRIVQEKVFKGLDLLEKAAEMLSQLDLFSRNEDLEEIASTDLKYLLVPAFQGALTMKQVNPSKRLDHLQRAREHFINYLTQCHCYHVAEFELPKTMNNSAENHTANSSMAYPSLVAMASQRQAKIQRYKQKKELEHRLSAMKSAVESGQADDERVREYYLLHLQRWIDISLEEIESIDQEIKILRERDSSREASTSNSSRQERPPVKPFILTRNMAQAKVFGAGYPSLPTMTVSDWYEQHRKYGALPDQGIAKAAPEEFRKAAQQQEEQEEKEEEDDEQTLHRAREWDDWKDTHPRGYGNRQNMG

SEQ ID NO: 14240 - protein, 290 aa, Homo sapiens
MAAEDELQLPRLPELFETGRQLLDEVEVATEPAGSRIVQEKVFKGLDLLEKAAEMLSQLDLFSRNEDLEEIASTDLKYLLVPAFQGALTMKQVNPSKRLDHLQRAREHFINYLTQCHCYHVAEFELPKTMNNSAENHTANSSMAYPSLVAMASQRQAKIQRYKQKKELEHRLSAMKSAVESGQADDERVREYYLLHLQRWIDISLEEIESIDQEIKILRERDSSREASTSNSSRQERPPVKPFILTRNMAQAKVFGAGYPSLPTMTVSDWYEQHRKYGALPDQGIAKAAP

SEQ ID NO: 14241 - protein, 245 aa, Mus musculus
MDKNELVQKAKLAEQAERYDDMAACMKSVTEQGAELSNEERNLLSVAYKNVVGARRSSWRVVSSIEQKTEGAEKKQQMAREYREKIETELRDICNDVLSLLEKFLIPNASQPESKVFYLKMKGDYYRYLAEVAAGDDKKGIVDQSQQAYQEAFEISKKEMQPTHPIRLGLALNFSVFYYEILNSPEKACSLAKTAFDEAIAELDTLSEESYKDSTLIMQLLRDNLTLWTSDTQGDEAEAGEGGEN

SEQ ID NO: 14242 - protein, 245 aa, Mus musculus
MDKNELVQKAKLAEQAERYDDMAACMKSVTEQGAELSNEERNLLSVAYKNVVGARRSSWRVVSSIEQKTEGAEKKQQMAREYREKIETELRDICNDVLSLLEKFLIPNASQPESKVFYLKMKGDYYRYLAEVAAGDDKKGIVDQSQQAYQEAFEISKKEMQPTHPIRLGLALNFSVFYYEILNSPEKACSLAKTAFDEAIAELDTLSEESYKDSTLIMQLLRDNLTLWTSDTQGDDAEAGEGGEN

SEQ ID NO: 14243 - protein, 245 aa, Mus musculus
MDKNELVQKAKLAEQAERYDDMAACMKSVTEQGAELSNEERNLLSVAYKNVVGARRSSWRVVSSIEQKTEGAEKKQQVAREYREKIETELRDICNDVLSLLEKFLIPNASQPESKVFYLKMKGDYYRYLAEVAAGDDKKGIVDQSQQAYQEAFEISKKEMQPTHPIRLGLALNFSVFYYEILNSPEKACSLAKTAFDEAIAELDTLSEESYKDSTLIMQLLRDNLTLWTSDTQGDDAEAGEGGEN

SEQ ID NO: 14244 - protein, 245 aa, Mus musculus
MDKNELVQKAKLAEQAERYDDMAACMKSVTEQGAELSNEERNLLSVAYKNVVGARRSSWRVVSSIEQKTEGAEKKQQMAREYREKIETELRDICNDVLSLLEKFLIPNASQPESKVFYLKMKGDYYRYLAEVAAGDDKKGIVDQSQQAYQEAFEISKKEMQPTHPIRLGLALNFSVFYYEILNSPEKACSLAKTAFDEAIAELDTLSEESYKDSTLIIELLRDNLTLWTSDTQGDEAEAGEGGEN

SEQ ID NO: 14245 - protein, 246 aa, Mus musculus
MTMDKSELVHKAKLAEQAERYDDMAAAMKAVTEQGHELSNEERNLLSVAYKNVVGARRSSWRVISSIEQKTERDEKKQQMGKEYREKIEAELQDICNDVLELLDKYLILNATQAESKVFYLKMKGDYFRYLSEVASGENKQTTVSNSQQAYQEAFEISKKEMQPTHPIRLGLALNFSVFYYEILNSPEKACSLAKTAFDEAIAELDTLNEESYKDSTLIMQLLRDNLTLWTSENQGDEGDAGEGEN

SEQ ID NO: 14246 - protein, 246 aa, Mus musculus
MTMDKSELVQKAKLAEQAERYDDMAAAMKAVTEQGHELSNEERNLLSVAYKNVVGARRSSWRVISSIEQKTERNEKKQQMGKEYREKIEAELQDICNDVLELLDKYLILNATQAESKVFYLKMKGDYFRYLSEVASGENKQTTVSNSQQAYQEAFEISKKEMQPTHPIRLGLALNFSVFYYEILNSPEKACSLAKTAFDEAIAELDTLNEESYKDSTLIMQLLRDNLTLWTSENQGDEGDAGEGEN

SEQ ID NO: 14247 - protein, 247 aa, Mus musculus
MVDREQLVQKARLAEQAERYDDMAAAMKNVTELNEPLSNEERNLLSVAYKNVVGARRSSWRVISSIEQKTSADGNEKKIEMVRAYREKIEKELEAVCQDVLSLLDNYLIKNCSETQYESKVFYLKMKGDYYRYLAEVATGEKRATVVESFEKAYSEAHEISKEHMQPTHPIRLGLALNYSVFYYEIQNAPEQACHLAKTAFDDAIAELDTLNEDSYKDSTLIMQLLRDNLTLWTSDQQDDDGGEGNN

SEQ ID NO: 14248 - protein, 246 aa, Mus musculus
MGDREQLLQRARLAEQAERYDDMASAMKAVTELNEPLSNEDRNLLSVAYKNVVGARRSSWRVISSIEQKTMADGNEKKLEKVKAYREKIEKELETVCNDVLALLDKFLIKNCNDFQYESKVFYLKMKGDYYRYLAEVASGEKKNSVVEASEAAYKEAFEISKEHMQPTHPIRLGLALNFSVFYYEIQNAPEQACLLAKQAFDDAIAELDTLNEDSYKDSTLIMQLLRDNLTLWTSDQQDEEAGEGN

SEQ ID NO: 14249 - protein, 245 aa, Mus musculus
MEKTELIQKAKLAEQAERYDDMATCMKAVTEQGAELSNEERNLLSVAYKNVVGGRRSAWRVISSIEQKTDTSDKKLQLIKDYREKVESELRSICTTVLELLDKYLIANATNPESKVFYLKMKGDYFRYLAEVACGDDRKQTIENSQGAYQEAFDISKKEMQPTHPIRLGLALNFSVFYYEILNNPELACTLAKTAFDEAIAELDTLNEDSYKDSTLIMQLLRDNLTLWTSDSAGEECDAAEGAEN

SEQ ID NO: 14250 - protein, 248 aa, Mus musculus
MERASLIQKAKLAEQAERYEDMAAFMKSAVEKGEELSCEERNLLSVAYKNVVGGQRAAWRVLSSIEQKSNEEGSEEKGPEVKEYREKVETELRGVCDTVLGLLDSHLIKGAGDAESRVFYLKMKGDYYRYLAEVATGDDKKRIIDSARSAYQEAMDISKKEMPPTNPIRLGLALNFSVFHYEIANSPEEAISLAKTTFDEAMADLHTLSEDSYKDSTLIMQLLRDNLTLWTADSAGEEGGEAPEEPQS

SEQ ID NO: 14251 - protein, 246 aa, Mus musculus
MGDREQLLQRARLADEAERYDDMASAMKAVTELNEPLSNEDRNLLSVAYKNVVGARRSSWRVISSIEQKTMADGNEKKLEKVKAYREKIEKELETVCNDVLALLDKFLIKNCNDFQYESKVFYLKMKGDYYRYLAEVASGEKKNSVVEASEAAYKEAFEISKEHMQPTHPIRLGLALNFSVFYYEIQNAPEQACLLAKQAFDDAIAELDTLNEDSYKDSTLIMQLLRDNLTLWTSDQQDEEAGEGN

SEQ ID NO: 14252 - protein, 248 aa, Mus musculus
MERASLIQKAKLAEQAERYEDMAAFMKSAVEKGEELSCEERNLLSVAYKNVVGGQRAAWRVLSSIEQKSNEEGSEEKGPEVKEYREKVETELRGVCDTVLGLLDSHLIKGAGDAESRVFYLKMKGDYYRYLAEVATGDDKKRIIDSARSAYQEAMDISKKEMPPTNPIRLGLALNFSVFHYEIANSPEEAISLAKTTFDEAMADLHTLSEDSYKDSTLIMQLLRDNLTLWTADSAGEEGGEAPDDPHI

SEQ ID NO: 14253 - protein, 248 aa, Mus musculus
MERASLIQKAKLAEQAERYEDMAAFMKSAVEKGEELSCEERNLLSVAYKNVVVGQRAAWRVLSSIEQKSNEEGSEEKGPEVKEYREKVETELRGVCDTVLGLLDSHLIKGAGDAESRVFYLKMKGDYYRYLAEVATGDDKKRIIDSARSAYQEAMDISKKEMPPTNPIRPGLALNFSVFHYEIANSPEEAISLAKTTFDEAMADLHTLSEDSYKDSTLIMQLLRDNLTLWTADSAGEEGGDWPEEPQS

SEQ ID NO: 14254 - protein, 224 aa, Mus musculus
MATCMKAVTEQGAELSNEERNLLSVAYKNVVGGHRSAWRVISSIEQKTDTSDKKLQLIKDYREKVESELRSICTTVLELLDKYLIANATNPESKVFYLKMKGDYFRHLAEVACGDDRKQTIENSQGAYQEAFDISKKEMQPTHPICLGLALNFSVFYYEILNNPELACTLAKTAFDEAIAEIDTLNKDSYKDSTLIMQLLRDNLTLWTSDSAGEECAAAEGAEN

SEQ ID NO: 14255 - protein, 176 aa, Mus musculus
MGMRRSWRKLKPTGRRLKIEKELETVCNDVLALLDKFLIKNCNDFQYESKVFYLKMKGDYYRYLAEVASGEKKNSVVEASEAAYKEAFEISKEHMQPTHPIRLGLALNFSVFYYETQNAPEQACLLAKQAFDDAIAELDTLNEDSYKDSTLIMQLLRDNLTLWTSDQQDEEAGEGN

SEQ ID NO: 14256 - protein, 216 aa, Mus musculus
MFVNECSVARERLAMNYFTMQNVVEGRRSAWMVISSIEKKTDTSNKKLQLTKDCQEKVELELRSICITVLELLGKYLIANAINPESKVFYLKMNGDYFQDLAEVACGDDGKQMIENSQRAYQEAFDISKKEMQPTHPIRLGLALNLPVFYSVILNNPELAYTLAKTAFDEAITELGTLNKDSYKDSTLIMQLLRDNLTLWTSDSAEECDAAEGAEN

SEQ ID NO: 14257 - protein, 142 aa, Mus musculus
MVLELLDKYLIANATNPESKVFYLNMKGDYFRYLAEVACGDDRKQTIENSQGAYQEAFDISKKEMQPTHLIRLGLALNFSVFYYEILNNPELACTLAKTAFDEAITELDTLNEDSYKDSTLIMQLLRDNLTLWTSDSAGRRM

SEQ ID NO: 14258 - protein, 118 aa, Mus musculus
MKGDYYRYLAEVATGDDKKRIIDSARSAYQEAMDISKKEMPPTNPIRLGLALNFSVFHYEIANSPEEAISLAKTTFDEAMADLHTLSEDSYKDSTLIMQLLRDNLTLWTADSAGEEGW

SEQ ID NO: 14259 - protein, 139 aa, Mus musculus
MKAVTDQGAELSNEERNLLSVAYKNVVGGRRSAWSVISSIEQKTDTSDKKLQLIKDHREKSKVFYLKMKGDYFWYLAEVAYGNDRKQTIENSQGAYQEAFDISKKEMQPTHPIRLGLALNFSVFYYESLNNSELALHTG

SEQ ID NO: 14260 - protein, 117 aa, Mus musculus
MDKNELVQKAKLAEQAERYDDMAACMKSVTEQGAELSNEERNLLSVAYKNVVGARRSSWRVVSSIEQKTEGAEKKQQMAREYREKIETELRDICNDVLAFKDMLYSAQDQAPSVEAL

SEQ ID NO: 14261 - protein, 181 aa, Mus musculus
MAAFMKSAVEKGEELSCEERNLLSVAYKNVYGRPESGLEGPVQHRAEEQRGGVRREGPRGAGDAESRIFYLKMKGDYYRYLAEVATGDEKKSIIDSARPPSTFDEAVADLHTLSEDSYKDSTLIMQFLRDNLTLWTADSAGEEGGGAPELKQPKPPGSALPSSPQSAERTKTEWNSALPKP

SEQ ID NO: 14262 - protein, 212 aa, Mus musculus
MATNMKAMTEQGTELSKELHNLLSVAYKNVDGKTDTSDKKLQLIKDYWEKVESELRSICTMGLELLDKYLIASATNPENKVFYLKIKGDYFQYLAEVACGDDQKETIKNSQGAYQKAFDISKKEMQPSHPIHLVKTGSNEAERREKFPKANSAPLLIVSDMLHSIWLSQVLAGLIVPDGRRQLTTQRSAWFRMSDDDDDDQGGLQMGMDEGT

SEQ ID NO: 14263 - protein, 113 aa, Mus musculus
MRRTPDPARRSPSLAMEKTELIQKAKLAEQAERYDDMATCMKAVTEQGAELSNEERNLLSVAYKNVVGGRRSAWRVISSIEQKTDTSDKKLQLIKDYREKVESELRSICTTVL

SEQ ID NO: 14264 - protein, 97 aa, Mus musculus
MVLELLDKYVIAKATNSKSKVFYLKMKGDYFWYLAEVAYGNDRKQTIENSQGAYQEAFDISKKEMQPTHPIRLGLALNFSVFYYESLNNSELALHTG

SEQ ID NO: 14265 - protein, 188 aa, Mus musculus
MEKTGLIQKAKLAQSYKDTATCMKAMMEQGMEELSNKECSLLLVTYKNMVGEPQVLWRVIWSIEQKTDTSNKKLQLIKDYQEKVELELSSISIMVLELLVKYLIANATNPESEVFYLKMKGDYFRYLAEVIELNNKMAFDETIAELDILNKDSCKDRTIIMQLLRDSLPLWTSDSAGEERDAAQGAEN

SEQ ID NO: 14266 - protein, 273 aa, Mus musculus
MAFDEAIAELDTLNEDSYKDSTLIMQLLRDNLTLWTSDSVGEECDAAEGGYSLQALFIHSAPFTTHKDHGFLYCNGHVEAYSYGQAVSTIKTVLEMPRECPAKPPEVEKDSSGLCLEQYENMRYSVLQVTSVAVESIQYPESWFPMRNSTLVTEAQSTFESGTLETRSICSLRGEYRKDVHGRSKEGKELEDMATKGFRALVMSHKGHLRNDIFRLHKLSAQVNELLCPRVPRGSWSIPASGSSCENVPHDGDIITADYEHLKDQGPAQTLPV

SEQ ID NO: 14267 - protein, 245 aa, Rattus norvegicus
MDKNELVQKAKLAEQAERYDDMAACMKSVTEQGAELSNEERNLLSVAYKNVVGARRSSWRVVSSIEQKTEGAEKKQQMAREYREKIEMELRDICNDVLSLLEKFLIPNASQPESKVFYLKMKGDYYRYLAEVAAGDDKKGIVDQSQQAYQEAFEISKKEMQPTHPIRLGLALNFSVFYYEILNSPEKACSLAKTAFDEAIAELDTLSEESYKDSTLIMQLLRDNLTLWTSDTQGDEAEAGEGGEN

SEQ ID NO: 14268 - protein, 246 aa, Rattus norvegicus
MTMDKSELVQKAKLAEQAERYDDMAAAMKAVTEQGHELSNEERNLLSVAYKNVVGARRSSWRVISSIEQKTERNEKKQQMGKEYREKIEAELQDICSDVLELLDKYLILNATHAESKVFYLKMKGDYFRYLSEVASGDNKQTTVSNSQQAYQEAFEISKKEMQPTHPIRLGLALNFSVFYYEILNSPEKACSLAKTAFDEAIAELDTLNEESYKDSTLIMQLLRDNLTLWTSENQGDEGDAGEGEN

SEQ ID NO: 14269 - protein, 246 aa, Rattus norvegicus
MTMDKSELVQKAKLAEQAERYDDMAAAMKAVTEQGHELSNEERNLLSVAYKNVVGARRSSWRVISSIEQKTERNEKKQQMGKEYREKIEAELQDICSDVLELLDKYLILNATHAESKVFYLKMKGDYFRYLSEVASGDNKQTTVSNSQQAYQEAFEISKKEMQPTEPIRLGLALNFSVFYYEILNSPEKACSLAKTAFDEAIAELDTLNEESYKDSTLIMQLLRDNLTLWTSENQGDEGDAGEGEN

SEQ ID NO: 14270 - protein, 247 aa, Rattus norvegicus
MVDREQLVQKARLAEQAERYDDMAAAMKNVTELNEPLSNEERNLLSVAYKNVVGARRSSWRVISSIEQKTSADGNEKKIEMVRAYREKIEKELEAVCQDVLSLLDNYLIKNCSETQYESKVFYLKMKGDYYRYLAEVATGEKRATVVESSEKAYSEAHEISKEHMQPTHPIRLGLALNYSVFYYEIQNAPEQACHLAKTAFDDAIAELDTLNEDSYKDSTLIMQLLRDNLTLWTSDQQDDDGGEGNN

SEQ ID NO: 14271 - protein, 469 aa, Rattus norvegicus
MINGQMVKLKYCFTCKMFRPPRTSHCSVCDNCVERFDHHCPWVGNCVGRRNYRFFYAFILSLSFLTAFIFACVVTHLTLRPTVLELVICFFSIWSILGLSGFHTYLVASNLTTNEDIKGSWSSKRGGEASVNPYSHKSIITNCCAVLCGPLPPSPFTFKVEPERVWREEEEAGPRPAQATPNPAQGHTTPAKRPAQSKGAAESSIGLKAASSSACLSILGVMERASLIQKAKLAEQAERYEDMAAFMKSAVEKGEELSCEERNLLSVAYKNVVGGQRAAWRVLSSIEQKSNEEGSEEKGPEVKEYREKVETELRGVCDTVLGLLDSHLIKGAGEAESRVFYLKMKGDYYRYLAEVATGDDKKRIIDSARSAYQEAMDISKKEMPPTNPIRLGLALNFSVFHYEIANSPEEAISLAKTTFDEAMADLHTLSEDSYKDSTLIMQLLRDNLTLWTADNAGEEGGEAPEEPQS

SEQ ID NO: 14272 - protein, 248 aa, Rattus norvegicus
MERASLIQKAKLAEQAERYEDMAAFMKSAVEKGEELSFEERNLLSVAYKNVVGGQRSAWRVLSSIEQKINEEGSEEKGPEVKEYREKVETELRGVCDTVLGLLDSHLIKGAGEAESRVFYLKMKGDYYRYLAEVATGDDKKRIIDSARSAYQEAMDISKKEMPPTNPIRLGLALNFSVFHYEIANRPEEAISLAKTTFDEAMADLHTLSEDSYKDSTLIMQLLRDNLTLWTAENAGEEGGEAPEEPQS

SEQ ID NO: 14273 - protein, 188 aa, Rattus norvegicus
SWRVVSSIEQKTEGAEKKQQMAREYREKIETELRDICNDVLSLLEKFLIPNRSQPESKVFYLKMKGDYYRYLAEVAAGDDKKGIVDQSQQAYQEAFEISKKEMQPTHPIRLGLALNFSVFYYEILNSPEKACSLAKTAFDEAIAELDTLSEESYKDSTLIMQLLRDNLTLWTSDTQGDEAEAGEGGEN

SEQ ID NO: 14274 - protein, 683 aa, Rattus norvegicus
MERASLIQKAKLAEQAERYEDMAAFMKSAVEKGEELSCEERNLLSVAYKNVKSNEEGSEGKGPEVKEYREKVETELRGVCDTVLGLLDSHLIKGAGEAESRVFYLKMKGDYYRYLAEVATGDDKKRIIDSARLPGGHGHQQEGDAAHQPHTPGPGLNFSVFHYQIANSPEEAISLAKTTFDEAMADLHTLSEDSYKDSTLIMQLLRDTLTLWTADNAGEEGHRPQGVCSHQRQQAEKDSSTLSPPMARVVLFVSGAVSPVQTLFLLQCGLCIFSADTVSSSVQTLFLLQCRHCCFSSADTVSSVQTLYLHCRCCISSADTVSSSVQTLFLLQCRHCSFFNVDSVSPVQTLFLLQCRHCIFSADTVSSLQVLYLQCRHCFLFSADTVSSPVQTLLLLQCRHCISSADTVSSLQVLYLQCRHCFLFSADTVSSPVQTLFLLQCGLCIFSADTVSSPVQTLLLLQCRHCISSADTVSSSVQTLFLLQCRHCSFFNVDSVSSVQTLFLLQCRHCIFSADTVSSLQVLYLQCRHCFFFSADTVSSSMWTLYLQCRHCFFFSADTVSSPVQTLFLLQCGLCIFSADTVSSPVQTLYLQCRHCIFTAVQTLFPLQCRHCFFSSADTVSSSVQTLFPLQCRHCFLFSADTVSSVQTLYLQCRHCIFTAVQTLFLLQCRHCSFFNVDSVSSV

SEQ ID NO: 14275 - protein, 138 aa, Rattus norvegicus
MQLSPESKVFYLKMKGDYFRCLAEVACGDDRKQTIGNPQGAYQEAFDISKKEMQLTRPIRLGLALHSPVFYYESLNNPEPAYTLAKMAFDEAIAELETLNEDSYKDSALVTQLLRDNLTLWTSDSAGEECDAADGAEN

SEQ ID NO: 14276 - protein, 204 aa, Rattus norvegicus
MSGVSSSDGVVIQEPQQCWHSVRIPTALRGLNRALSHPGHTSGLLWSLTAGTRGPDPADSDFSVASQTLGRDPMGRCVTTFADCLQIAEVATGDDKKRIIDSARSAYQEAMDISKKEMLPTNPIRLGLALNFSVFHYEIANSPEEAISLAKTTFDEAVADLHTLSEDSYKDSALIMQLLRDNLTLWTADNAGEEGGEAPEEPQS

SEQ ID NO: 14277 - protein, 106 aa, Rattus norvegicus
MKGDYVRYLAEIACGDDQKQTIENSQGAYQEAFDISKKEMQLTHLIRLGLALHSSVFYYEILNNPELACTLAKTAFDEAIAELGALNEDSYNDSILIMQLLRDNLT

SEQ ID NO: 14278 - protein, 248 aa, Anopheles gambiae str. PEST
MSTVDKEELVQKAKLAEQSERYDDMAQAMKSVTETGVELSNEERNLLSVAYKNVVGARRSSWRVISSIEQKTESSARKQQLAREYRERVEKELREICYEVLGLLDKFLIPKASNPESKVFYLKMKGDYYRYLAEVATGETRHTVVDDSQAAYQDAFEISKGKMQPTHPIRLGLALNFSVFYYEILNSPDKACQLAKQAFDDAIAELDTLNEDSYKDSTLIMQLLRDNLTLWTSDTQGDGDEPQEGGDN

SEQ ID NO: 14279 - protein, 723 aa, synthetic construct
MVSKGEELFTGVVPILVELDGDVNGHRFSVSGEGEGDATYGKLTLKFICTTGKLPVPWPTLVTTLTWGVQCFSRYPDHMKQHDFFKSAMPEGYVQERTIFFKDDGNYKTRAEVKFEGDTLVNRIELKGIDFKEDGNILGHKLEYNYISHNVYITADKQKNGIKAHFKIRHNIEDGSVQLADHYQQNTPIGDGPVLLPDNHYLSTQSALSKDPNEKRDHMVLLEFVTAARMHMEKTELIQKAKLAEQAERYDDMATCMKAVTEQGAELSNEERNLLSVAYKNVVGGRRSAWRVISSIEQKTDTSDKKLQLIKDYREKVESELRSICTTVLELLDKYLIANATNPESKVFYLKMKGDYFRYLAEVACGDDRKQTIDNSQGAYQEAFDISKKEMQPTHPIRLGLALNFSVFYYEILNNPELACTLAKTAFDEAIAELDTLNEDSYKDSTLIMQLLRDNLTLWTSDSAGGTGGSLRRASLPGTGGSELMVSKGEELFTGVVPILVELDGDVNGHKFSVSGEGEGDATYGKLTLKFICTTGKLPVPWPTLVTTFGYGLMCFARYPDHMKQHDFFKSAMPEGYVQERTIFFKDDGNYKTRAEVKFEGDTLVNRIELKGIDFKEDGNILGHKLEYNYNSHNVYIMADKQKNGIKVNFKIRHNIEDGSVQLADHYQQNTPIGDGPVLLPDNHYLSYQSALSKDPNEKRDHMVLLEFVTAAGITLGMDELYK

SEQ ID NO: 14280 - protein, 265 aa, Arabidopsis thaliana
MSSSREENVYLAKLAEQAERYEEMVEFMEKVAKTVDTDELTVEERNLLSVAYKNVIGARRASWRIISSIEQKEESRGNDDHVSIIKDYRGKIETELSKICDGILNLLDSHLVPTASLAESKVFYLKMKGDYHRYLAEFKTGAERKEAAESTLVAYKSAQDIALADLAPTHPIRLGLALNFSVFYYEILNSPDRACSLAKQAFDEAISELDTLGEESYKDSTLIMQLLRDNLTLWNSDINDEAGGDEIKEASKHEPEEGKPAETGQ

SEQ ID NO: 14281 - protein, 255 aa, Arabidopsis thaliana
MSTREENVYMAKLAEQAERYEEMVEFMEKVAKTVDVEELSVEERNLLSVAYKNVIGARRASWRIISSIEQKEESKGNEDHVAIIKDYRGKIESELSKICDGILNVLEAHLIPSASPAESKVFYLKMKGDYHRYLAEFKAGAERKEAAESTLVAYKSASDIATAELAPTHPIRLGLALNFSVFYYEILNSPDRACSLAKQAFDDAIAELDTLGEESYKDSTLIMQLLRDNLTLWTSDMTDEAGDEIKEASKPDGAE

SEQ ID NO: 14282 - protein, 255 aa, Arabidopsis thaliana
MSTREENVYMAKLAEQAERYEEMVEFMEKVAKTVDVEELSVEERNLLSVAYKNVIGARRASWRIISSIEQKEESKGNEDHVAIIKDYRGEIESELSKICDGILNVLEAHLIPSASPAESKVFYLKMKGDYHRYLAEFKAGAERKEAAESTLVAYKSASDIATAELAPTHPIRLGLALNFSVFYYEILNSPDRACSLAKQAFDDAIAELDTLGEESYKDSTLIMQLLRDNLTLWTSDMTDEAGDEIKEASKPDGAE

SEQ ID NO: 14283 - protein, 268 aa, Arabidopsis thaliana
MSSDSSREENVYLAKLAEQAERYEEMVEFMEKVAKTVETEELTVEERNLLSVAYKNVIGARRASWRIISSIEQKEDSRGNSDHVSIIKDYRGKIETELSKICDGILNLLEAHLIPAASLAESKVFYLKMKGDYHRYLAEFKTGAERKEAAESTLVAYKSAQDIALADLAPTHPIRLGLALNFSVFYYEILNSSDRACSLAKQAFDEAISELDTLGEESYKDSTLIMQLLRDNLTLWTSDLNDEAGDDIKEAPKEVQKVDEQAQPPPSQ

SEQ ID NO: 14284 - protein, 268 aa, Arabidopsis thaliana
MSSDSSREENVYLAKLAEQAERYEEMVEFMEKVAKTVETEELTVEERNLLSVAYKNVIGARRASWRIISSIELKEDSRGNSDHVSIIKDYRGKIETELSKICDGILNLLEAHLIPAASLAESKVFYLKMKGDYHRYLAEFKTGAERKEAAESTLVAYKSAQDIALADLAPTHPIRLGLALNSSVFYYEILNSSDRACSLAKQAFDEAISELDTLGEESYKDSTLIMQLLRDNLTLWTSDLNDEAGDDIKEAPKEVQKVDEQAQPPPSQ

SEQ ID NO: 14285 - protein, 241 aa, Arabidopsis thaliana
MENERAKQVYLAKLNEQAERYDEMVEAMKKVAALDVELTIEERNLLSVGYKNVIGARRASWRILSSIEQKEESKGNEQNAKRIKDYRTKVEEELSKICYDILAVIDKHLVPFATSGESTVFYYKMKGDYFRYLAEFKSGADREEAADLSLKAYEAATSSASTELSTTHPIRLGLALNFSVFYYEILNSPERACHLAKRAFDEAIAELDSLNEDSYKDSTLIMQLLRDNLTLWTSDLEEGGK

SEQ ID NO: 14286 - protein, 254 aa, Arabidopsis thaliana
MENEREKQVYLAKLSEQTERYDEMVEAMKKVAQLDVELTVEERNLVSVGYKNVIGARRASWRILSSIEQKEESKGNDENVKRLKNYRKRVEDELAKVCNDILSVIDKHLIPSSNAVESTVFFYKMKGDYYRYLAEFSSGAERKEAADQSLEAYKAAVAAAENGLAPTHPVRLGLALNFSVFYYEILNSPESACQLAKQAFDDAIAELDSLNEESYKDSTLIMQLLRDNLTLWTSDLNEEGDERTKGADEPQDEV

SEQ ID NO: 14287 - protein, 254 aa, Arabidopsis thaliana
MENEREKQVYLAKLSEQTERYDEMVEAMKKVAQLDVELTVEERNLVSVGYKNVIGARRASWRILSSIEQKEESKGNDENVKRLKNYRKRVEDELAKVCNDILSVIDKHLIPSSNAVESTVFFYKMKGDYYRYLAEFSSGAERKEAADQSLEAYKAAVAAAENGLAPTHPVRLGLALNFSVFYYEILNSPESACQLAKQAFDDAIAELDSLNEESYKDSTLIMQLLRDNLTLWTSDLNEEGDERTKGADEPQDEN

SEQ ID NO: 14288 - protein, 248 aa, Arabidopsis thaliana
MATTLSRDQYVYMAKLAEQAERYEEMVQFMEQLVSGATPAGELTVEERNLLSVAYKNVIGSLRAAWRIVSSIEQKEESRKNEEHVSLVKDYRSKVETELSSICSGILRLLDSHLIPSATASESKVFYLKMKGDYHRYLAEFKSGDERKTAAEDTMIAYKAAQDVAVADLAPTHPIRLGLALNFSVFYYEILNSSEKACSMAKQAFEEAIAELDTLGEESYKDSTLIMQLLRDNLTLWTSDMQEQMDEA

SEQ ID NO: 14289 - protein, 246 aa, Arabidopsis thaliana
MATTLSRDQYVYMAKLAEQAERYEEMVQFMEQLVSGATPAGELTVEERNLLSVAYKNVIGSLRAAWRIVSSIEQKEESRKNEEHVSLVKDYRSKVETELSSICSGILRLLDSHLIPSATASESKVFYLKMKGDYHRYLAEFKSGDERKTAAEDTMIAYKAAQDVAVADLAPTHPIRLGLALNFSVFYYEILNSSEKACSMAKQAFEEAIAELDTLGEESYKDSTLIMQLLRDNLTLWTSDMQMDEA

SEQ ID NO: 14290 - protein, 248 aa, Arabidopsis thaliana
MAATLGRDQYVYMAKLAEQAERYEEMVQFMEQLVTGATPAEELTVEERNLLSVAYKNVIGSLRAAWRIVSSIEQKEESRKNDEHVSLVKDYRSKVESELSSVCSGILKLLDSHLIPSAGASESKVFYLKMKGDYHRYMAEFKSGDERKTAAEDTMLAYKAAQDIAAADMAPTHPIRLGLALNFSVFYYEILNSSDKACNMAKQAFEEAIAELDTLGEESYKDSTLIMQLLRDNLTLWTSDMQEQMDEA

SEQ ID NO: 14291 - protein, 248 aa, Arabidopsis thaliana
MATTLSRDQYVYMAKLAEQAERYEEMVQFMEQLVSGATPAGELTVEERNLLSGAYKNVIGSLRAAWRIVSSLEQKEESRKNEEHVSLVKDYRSKVETELSSICSGILRLLDSHLIPSATARESKVFYLKMKGDYHRYLAEFKSGDERKTAAEDAMIAYKAAQDVAVADLAPTHPIRLGLALNFSVFYYEILNSSEKACSMAKQAFEEAIAELDTLGEESYKDSTLIMQLLRDNLTLWTSDMQEQMDEA

SEQ ID NO: 14292 - protein, 273 aa, Arabidopsis thaliana
MAATLGRDQYVYMAKLAEQAERYEEMVQFMEQLVTGATPAEELTVEERNLLSVAYKNVIGSLRAAWRIVSSIEQKEESRKNDEHVSLVKDYRSKVESELSSVCSGILKLLDSHLIPSAGASESKVFYLKMKGDYHRYMAEFKSGDERKTAAEDTMLAYKAAQDIAAADMAPTHPIRLGLALNFSVFYYEILNSSDKACNMAKQAFEEAIAELDTLGEESYKDSTLIMQLLRDNLTLWTSDMQTNQMHHIRDIKEHVKTEITAKPCVLSYYYSM

SEQ ID NO: 14293 - protein, 251 aa, Arabidopsis thaliana
MAATLGRDQYVYMAKLAEQAERYEEMVQFMEQLVTGATPAEELTVEERNLLSVAYKNVIGSLRAAWRIVSSIEQKEESRKNDEHVSLVKDYRSKVESELSSVCSGILKLLDSHLIPSAGASESKVFYLKMKGDYHRYMAEFKSGDERKTAAEDTMLAYKAAQDIAAADMAPTHPIRLGLALNFSVFYYEILNSSDKACNMAKQAFEEAIAELDTLGEESYKDSTLIMQLLRDNLTLWTSDYAGADGRGLRI

SEQ ID NO: 14294 - protein, 245 aa, Arabidopsis thaliana
MENEREKLIYLAKLGCQAGRYDDVMKSMRKVCELDIELSEEERDLLTTGYKNVMEAKRVSLRVISSIEKMEDSKGNDQNVKLIKGQQEMVKYEFFNVCNDILSLIDSHLIPSTTTNVESIVLFNRVKGDYFRYMAEFGSDAERKENADNSLDAYKVAMEMAENSLAPTNMVRLGLALNFSIFNYEIHKSIESACKLVKKAYDEAITELDGLDKNICEESMYIIEMLKYNLSTWTSGDGNGNKTDG

SEQ ID NO: 14295 - protein, 245 aa, Arabidopsis thaliana
MENEREKLIYLAKLGCQAGRYDDVMKSMRKVCELDIELSEEERDLLTTGYKNVMEAKRVSLRVISSIEKMEDSKGNDQNVKLIKGQQEMVKYEFFNVCNDILSLIDSHLIPSTTTNVESIVLFNRVKGDYFRYMAEFGSDAERKENADNSLDAYKVAMEMAENSLVPTNMVRLGLALNFSIFNYEIHKSIESACKLVKKAYDEAITELDGLDKNICEESMYIIEMLKFNLSTWTSGDGNGNKTDG

SEQ ID NO: 14296 - protein, 218 aa, Arabidopsis thaliana
MRKVCELDIELSEEERDLLTTGYKNVMEAKRVSLRVISSIEKMEDSKGNDQNVKLIKGQQEMVKYEFFNVCNDILSLIDSHLIPSTTTNVESIVLFNRVKGDYFRYMAEFGSDAERKENADNSLDAYKVAMEMAENSLAPTNMVRLGLALNFSIFNYEIHKSIESACKLVKKAYDEAITELDGLDKNICEESMYIIEMLKYNLSTWTSGDGNGNKTDG

SEQ ID NO: 14297 - protein, 159 aa, Arabidopsis thaliana
MGSGKERDTFVYLAKLSEQAERYEEMVESMKSVAKLNVDLTVEERNLLSVGYKNVIGSRRASWRIFSSIEQKEAVKGNDVNVKRIKEYMEKVELELSNICIDIMSVLDEHLIPSASEGESTVFFNKMKGDYYRYLAEFKSGNERKEAADQSLKAYEVFL

SEQ ID NO: 14298 - protein, 241 aa, Arabidopsis thaliana
MENEQSTHVHFASLSSSSERYNETFEEIKKAMKKSVQLKAELSAKERNLVSVGYKNVISARRASLEILSSIVQKEESKGNEENVKKLKNYRNKVEDELAKICNDILSVINKQLIPSSTTVDSSVLFYNMLADFSSNAESKEATDQSLDAYKRLVWYQQFQLYMTLNWTSVFLNSPESAYQLAKQAFDDAINEFDISDESNKDMTLIIQLLRDNLNMWTLDLTEREEVIFLFPYLPPLMIDR

SEQ ID NO: 14299 - protein, 196 aa, Arabidopsis thaliana
MENEQSTHVHFASLSSSSERYNETFEEIKKAMKKSVQLKAELSAKERNLVSVGYKNVISARRASLEILSSIVQKEESKGNEENVKKLKNYRNKVEDELAKICNDILSVINKQLIPSSTTVDSSVLFYNMLADFSSNAESKEATDQSLDAYKRLVWYQQFQLYMTLNWTSVFLNSPESAYQLAKQAFDDAINEFDSK

SEQ ID NO: 14300 - protein, 90 aa, Arabidopsis thaliana
MAATLGRDQYVYMAKLAEQAERYEEMVQFMEQLVTGATPAEELTVEERNLLSVAYKNVIGSLRAAWRIVSSIEQKEESRKNDEHVSLVKD

SEQ ID NO: 14301 - protein, 225 aa, Brassica napus
RYEEMVNFMEKLVTGATPSSELTVEERNLLSVAYKNVIGSLRAAWRIVSSIEQKEESRKNEEHVALVKDYRSKVETELSSVCEGILKLLEENLIPSAAASESKVFYLKMKGDYHRYMAEFKAGEERKAAAEDTMVAYKAAQDIAAADMAPTHPIRLGLALNFSVFYYEILNSSDKACDMAKQAFEEAIAELDTLGEESYKDSTLIMQLLRDNLTLWTSDMQEQMD

SEQ ID NO: 14302 - protein, 179 aa, Brassica napus
MAAATMSRDQYVYMAKLAEQAERYEEMVQFMEQLVTSATPAGELTVEERNLLSVAYKNVIGSLRAAWRIVSSIEQKEESRKNEEHVSLVKDYRSKVETELSTICSGILKLLDTHLIPSASASECRVFYLKMKGDYHRYMAEYKSGDERKTAAEDTMVAYKAAQDVAVADLAPTHPIRLG

SEQ ID NO: 14303 - protein, 163 aa, Brassica napus
AEQAERYEEMVEFMEKVAKSVDVEELSVEERNLLSVAYKNVIGARRASWRIISSIEQKEESKGNEDHVAIIKDYRGKIEAELSKICDGILNVLEAHLIPSASPAEFKVFLLKMKGDYHRYLAEFKAGAERKDAAESTLVAYKSAQDIATAELAPTHPIRLGLA

SEQ ID NO: 14304 - protein, 147 aa, Brassica napus
SWRIISSIEQKEESRGNEDHVAIIKDYRGKIETELSKICDGILNLLDSPLVPAASLAESKVFYLKMKGDYHRYLAEFKTGAERKDAAESTLVAHKSAQDIALADLAPTHPIRLGLANFSVFYYEILNSPDRACSLAKQAFDEAISEL

SEQ ID NO: 14305 - protein, 259 aa, Glycine max
MAAAPSPREENVYMAKLAEQAERYEEMVEFMEKVSAAADNEELTVEERNLLSVAYKNVIGARRASWRIISSIEQKEESRGNEDHVSVIRDYRSKIESELSNICDGILKLLDSRLIPSASSGDSKVFYLKMKGDYHRYLAEFKTGAERKEAAESTLSAYKAAQDIANAELPPTHPIRLGLALNFSVFYYEILNSPDRACNLAKQAFDEAIAELDTLGEESYKDSTLIMQLLRDNLTLWTSDMQDDGADEIKEAAPKQDDQ

SEQ ID NO: 14306 - protein, 261 aa, Glycine max
MASAPTPREEFVYMAKLAEQAERYEEMVEFMEKVSASAESEELTVEERNLLSVAYKNVIGARRASWRIISSIEQKEESRGNEDHVAVIRDYRSKIEAELSNICDGILKLLDTRLVPSAASGDSKVFYLKMKGDYHRYLAEFKTGADRKEAAESTLSAYKAAQDIANTELPPTHPIRLGLALNFSVFYYEILNSPDRACSLAKQAFDEAIAELDTLGEESYKDSTLIMQLLRDNLTLWTSDMQDDGADEIKEAAPKGDGEQN

SEQ ID NO: 14307 - protein, 274 aa, Glycine max
  unsure (1)..(274): unsure at all Xaa locations
LVHEGTMSAEKERETQVYLAKLAEQAERYEEMVECMKKVAKLDLDLTVEERNLLSVGYKNVIGARRASWRIMSSIEQKEESKGNEHNVKLIKSYCQKVEEELSKICGDILTIIDQHLIPSSASAEASVFYYKMKGDYFRYLAEFKTDQERKEAAEQSLKGYEAASATANTDLPSTHPIRLGLALNFSVFYYEIMNSPERACHLAKQAFDEAIAELDTLSEESYKDSTLIMQLLRDNLTLWTSDLPEDGGEDSIKAEETKPSEPEXIDVIQXSEI

SEQ ID NO: 14308 - protein, 299 aa, Glycine max
SLSATMSVEKERETQVYLAKLAEQAERYEEMVECMKKVAKLDLDLTVEERNLLSVGYKNVIGARRASWRIMSSIEQKEESKGNEHNVKLIKSYCQKVEEELSKICGDILTIIDQHLIPSSGSAEASVFYYKMKGDYFRYLAEFKTDQERKEAAEQSLKGYEAASATANTDLPSTHPIRLGLALNFSVFYYEIMNSPERACHLAKQAFDEAIAELDTLSEESYKDSTLIMQLLRDNLTLWTSDLPEDGGEDNIKAEEAKPSEPEQCDSVVRNLRYSPRGHFSAFLAMDLDRTIGTVVAIS

SEQ ID NO: 14309 - protein, 305 aa, Glycine max
SLSATMSVEKERETQVYLAKLAEQAERYEEMVECMKKVAKLDLDLTVEERNLLSVGYKNVIGARRASWRIMSSIEQKEESKGNEHNVKLIKSYCQKVEEELSKICGDILTIIDQHLIPSSGSAEASVFYYKMKGDYFRYLAEFKTDQERKEAAEQSLKGYEAASATANTDLPSTHPIRLGLALNFSVFYYEIMNSPERACHLAKQAFDEAIAELDTLSEESYKDSTLIMQLLRDNLTLWTSDLPEDGGEDNIKAEEAKPSEPEQCDSVVRNLRYSPRGHFSAFLAMDLDPDNRDCGGHFIILVLS

SEQ ID NO: 14310 - protein, 259 aa, Glycine max
MASTKERENFVYTAKLAEQAERYEEMVEAMKNVAKLNVELTVEERNLLSVGYKNVVGARRASWRILSSIEQKEEAKGNDVSVKRIKEYRQKVESELSNICSDIMTVIDEHLIPSSSAGEPSVFFYKMKGDYYRYLAEFKSGDERKEAADHSMKAYQSASTTAEAELPPTHPIRLGLALNFSVFYYEILNSPERACHLAKQAFDEAISELDTLSEESYKDSTLIMQLLRDNLTLWTSDIPEEGAEEQKVDSARAAGGDNA

SEQ ID NO: 14311 - protein, 261 aa, Glycine max; identical to SEQ ID NO: 455

SEQ ID NO: 14312 - protein, 261 aa, Glycine max; identical to SEQ ID NO: 455

SEQ ID NO: 14313 - protein, 318 aa, Glycine max
  unsure (1)..(318): unsure at all Xaa locations
QKQKHSTTNQSQPFGSPTNKIVTTTHLLLAASESLSLFLFLSHPDLAKKKKTQWAASAPTPREEFVYMAKLAEQAERYEEMVEFMXEKVSASAESEELTVEERNLLSVAYKNVIGARRASWRIISSIEQKEESRGNEDHVAVIRDYRSKIEAELSNICDGILKLLDTRLVPSAASGXDSKVFYLKMKGDYHRYLAEFKTGXADRKEAAESTLSAYKAAQDIANTELPPTHPIRLGLALNFSVFYYEILNSPDRACSLAKQAFDEAIAELDTLGEESYKDSTLIMQLLRDNLTLWTSDMQDDGADEIKEAAPKGDGEQN

SEQ ID NO: 14314 - protein, 257 aa, Glycine max
MADSSREENVYMAKLAEQAERYEEMVEFMEKVAKTVEVEELTVEERNLLSVAYKNVIGARRASWRIISSIEQKEESRGNEDHVAIIKEYRGKIEAELSKICDGILNLLESNLIPSAASPESKVFYLKMKGDYHRYLAEFKTGAERKEAAESTLLAYKSAQDIALADLAPTHPIRLGLALNFSVFYYEILNSPDRACNLAKQAFDEAISELDTLGEESYKDSTLIMQLLRDNLTLWTSDITDDAGDEIKETSKQQPGE

SEQ ID NO: 14315 - protein, 259 aa, Glycine max
MASTKERENFVYTAKLAEQAERYEEMVEAMKNVAKLNVELTVEERNLLSVGYKNVVGARRASWRILSSIEQKEEAKGNDVSVKRIKEYRQKVESELSNICSDIMTVIDEHLIPSSSAGEPSVFFYKMKGDYYRYLAEFKSGDERKEAADHSMKAYQLASTTAEAELAPTHPIRLGLALNFSVFYYEILNSPERACHLAKQAFDEAISELDTLSEESYKDSTLIMQLLRDNLTLWTSDIPEDGAEEQKVDSARAAGGDDA

SEQ ID NO: 14316 - protein, 261 aa, Glycine max
MTASKDRENFVYIAKLAEQAERYEEMVESMKNVANLDVELTVEERNLLSVGYKNVIGARRASWRILSSIEQKEETKGNELNAKRIKEYRQKVELELSNICNDVMRVIDEHLIPSAAAGESTVFYYKMKRDYYRYLAEFKSGNEKKEAADQSMKAYESATAAAEADLPPTHPIRLGLALNFSVFYYEILNSPERACHLAKQAFDEAISELDTLNEESYKDSTLIMQLLRDNLTLWTSDIPEDGEDAQKVNGTAKLGGGEDAE

SEQ ID NO: 14317 - protein, 261 aa, Glycine max
  unsure (1)..(261): unsure at all Xaa locations
MTASKDRENFVYIAKLAEQAERYEEMVESMKNVANLDVELTVEERNLLSVGYKNVIGARRASWRILSSIEQKEETKGNELNAKRIKEYRQKVELELSNICNDVMRVIDEHLIPSAAAGESTVFYYKMKGDYYRYLXEFKXGNEKKEAXDXSMKAYESATTAAEADLPPTHPIRLGLALNFSVFYYEILNSPEXACHLAKQAFDEAISELDTLNEESYKDSTLIMQLLRDNLTLWTSDIPEDGEDAQKVNGTAKLGGGEEAE

SEQ ID NO: 14318 - protein, 268 aa, Glycine max
  unsure (1)..(268): unsure at all Xaa locations
FRKDRRWPASKDRENFVYIAKLAEQAERYEEMVESMKNVANLDVELTVEERNLLSVGYXKNVIGARRASWRILSSIEQKEETKGNELNAKRIKEYRQKVELELSNICNDVMTVIDEHLIPSAAAGESTVFYYKMKGDYYRYLAEFKAGNEKKEAADQSMKAYESATTAAEADLPPTHPIRLGLALNFSVFYYEILNSPERACHLAKQAFDEAISELDTLNEESYKDSTLIMQLLRDNLTLWTSDIPEDGEDAQKVNGTAKLGGGEEAE

SEQ ID NO: 14319 - protein, 257 aa, Glycine max
MSDSSREENVYMAKLADEAERYEEMVEFMEKVAKTVEVEELTVEERNLLSVAYKNVIGARRASWRIISSIEQKEESRGNEDHVAIIKEYRGKIEAELSKICDGILNLLESNLIPSAASPESKVFYLKMKGDYHRYLAEFKTGAERKEAAESTLLAYKSAQDIALADLAPTHPIRLGLALNFSVFYYEILNSPDRACNLAKQAFDEAISELDTLGEESYKDSTLIMQLLRDNLTLWTSDITDIAGDEIKETSKQQPGE

SEQ ID NO: 14320 - protein, 257 aa, Glycine max; identical to SEQ ID NO: 14319

SEQ ID NO: 14321 - protein, 259 aa, Glycine max
MASTKERENFVYTAKLAEQAERYEEMVEAMKNVAKLNVELTVEERNLLSVGYKNVVGARRASWRILSSIEQKEEAKGNDVSVKRIKEYRQKVESELSNICSDIMTVIDEHLIPSSSAGEPSVFFYKMKGDYYRYLAEFKSGDERKEAADHSMKAYQLASTTAEAELASTHPIRLGLALNFSVFYYEILNSPERACHLAKQAFDEAISELDTLSEESYKDSTLIMQLLRDNLTLWTSDIPEEGAEEQKVDSARAAGGDDA

SEQ ID NO: 14322 - protein, 258 aa, Glycine max
MASTKERENFVYVAKLAEQAERYEEMVEAMKNVANLNVELTVEERNLLSVGYKNVVGARRASWRILSSIEQKEEAKGNDVSVKRIKEYRLKVESELSNICSDIMTVIDEYLIPSSSSGEPSVFFYKMKGDYYRYLAEFKSGDERKEAADHSMKAYQLASTTAEAELASTHPIRLGLALNFSVFYYEILNSPERACHLAKQAFDEAISELDTLSEESYKDSTLIMQLLRDNLTLWTSDIPEDGEEQKVDSARADGGDDA

SEQ ID NO: 14323 - protein, 258 aa, Glycine max; identical to SEQ ID NO: 14322

SEQ ID NO: 14324 - protein, 263 aa, Glycine max
MATFSKERENFVYVAKLAEQAERYDEMVEAMKKVAKLDVELSVEERNLFSVGYKNVVGSRRASWRILSSIEQKEDSKGNELHVKHIRDYRNKVELELSNICSDIMIILDEHLIPSTNIAESTVFYYKMKGDYYRYLAEFKAGNEKKEVADQSLKAYQTASTTAESELQPTHPIRLGLALNFSVFYYEILNSPERACHLAKQAFDDAVSELDTLNEDSYKDSTLIMQLLRDNLTLWTSDIPEEGEDLKMESAARVDQGEDELGR

SEQ ID NO: 14325 - protein, 263 aa, Glycine max
MATFSKERENFVYVAKLAEQAERYDEMVDAMKKVAKLDVELSVEERNLFSVGYKNVVGSRRASWRILSSIEQKEDSKGNELHVKHIRDYRNKVELELSNICSDIMIILDEHLIPSTNIAESTVFYYKMKGDYYRYLAEFKAGNEKKEVADQSLKAYQTASTTAESELQPTHPIRLGLALNFSVFYYEILNSPERACHLAKQAFDDAVSELDTLNEDSYKDSTLIMQLLRDNLTLWTSDIPEEGEDLKMESAARVDQGEDELGR

SEQ ID NO: 14326 - protein, 263 aa, Glycine max; identical to SEQ ID NO: 14325

SEQ ID NO: 14327 - protein, 256 aa, Glycine max
MAAAEGLNREQYVYLAKLSEQAERYEEMVEFMQKVVVGSTPASELTVEERNLLSVAYKNVIGSLRAAWRIVSSIEQKEEGRKNDDHVSLVKHYRSKVENELTQVCASILSLLDSNLVPSASASESKVFYLKMKGDYHRYLAEFKVGDERKTATEDTMLSYKAAQDIASADLPPTHPIRLGLALNFSVFYYEILNQSDKACAMAKQAFEEAIAELDTLGEESYKDSTLIMQLLRDNLTLWTSDVQDQLDEPVNVTME

SEQ ID NO: 14328 - protein, 273 aa, Glycine max
  unsure (1)..(273): unsure at all Xaa locations
MAAAPSPREENVYMAKLAEQAERYEEMVEFMEKVSAAADNEELTVEERNLLSVAYKNVIGARRASWRIISSIEQKXEESRGNEDHVSVIRDYRSKIESELSNICDGILKLLDSRLIPSASSGDSKVFYLKMKGDYXHRYLAEFKTGRRXRKEAXAESTLSAYKAAQDIANXAELPPTHXPIRXLGLALNFSVFYYEILNSPDRACNLAKQAFDEAIAELDTLGEESYKDSTLIMQLLRDNLTLWTSDMQDDGADEIKEAAPKPDDQXKYFTAN

SEQ ID NO: 14329 - protein, 264 aa, Glycine max
  unsure (1)..(264): unsure at all Xaa locations
MAAAPSPREENVYMAKLAEQAERYEEMVEFMEKVSAAADNEELTVEERNLLSVAYKNVIGARPRPRGRIISSIEQKEESRGNEDHVSVIRDYRSKIESELSNICDGILKLLDSRLIPSASSGDSKVFYLKMKGDYHRYLAEFKTGAXERKEAXAESTLSAYKAAQDIANAELPXPTHPIRXLGLALNFSVFYYEILNSPDRACNLAKQAFDEAIAELDTLGEESYKDSTLIMQLLRDNLTLWTSDMQDDGADEIKEAAPKQDDQ

SEQ ID NO: 14330 - protein, 247 aa, Glycine max
AEGLNREQYVYLANVSEQAERYEEMVEFMQKVVVGSTPASELTVEERNLLSVAYKNVIGSLRAAWRIVSSIEQKEEGRKNDDHVSLVKHYRSKVENELTQVCATILSLLDSNLVPSASASESKVFYLKMKGDYHRYLAEFKVGDERKTATEDTMLSYKAAQDIASADLPPTHPIRLGLALNFSVFYYEILNQSDKACAMAKQAFEEAIAELDTLGEESYKDSTLIMQLLRDNLTLWTSDVQDQLDEP

SEQ ID NO: 14331 - protein, 331 aa, Glycine max
  unsure (1)..(331): unsure at all Xaa locations
LIFFXVLFSXFCLIFDLVRQSLFYAQNLHXMVECMKKVAKLDLDLTVEERNLLSVGYKNVIGARRASWRIMSSIEQKEESKGNEHNVKLIKSYCQKVEEELSKICGDILTIIDQHLIPSSASAEASVFYYKMKGDYFRYLAEFKTDQERKEAAEQSLKGYEAASATANTDLPSTHPIRLGLALNFSVFYYEIMNSPERACHLAKQAFDEAIAELDTLSEESYKDSTLIMQLLRDNLTLWTSDLPEDGGEDSIKAEETKPSEPEQCDSIVRNLRYSQRGHFLAMDLDPDNRDCGWWPFHNSYALLISLPKLEDLHPFFFLQTFFLLPSLCFK

SEQ ID NO: 14332 - protein, 269 aa, Glycine max
  unsure (1)..(269): unsure at all Xaa locations
MTASKDRENFVYIAKLAEQAERYEEMVESMKNVANLDVELTVEERNLLSVGYKNVIWSRRAAWRILSFXIEQKEETKGNXELNAKRXLKEYRQKVELELSNICNDVMXRVIDEHLIPSAAAGESTVFYYKMKGDYYRYLAEFKSGNEKKEAADQSMKAYESATAAAEXADLPPTHPXIRLGLALNFSVFYYEILNSPERACHLAKQAFDEAISELDTLNEESYKDSTLXIMQLLXRDNLTLWTSDIPEDGEDAQKVNGTAKLGGGEDAE

SEQ ID NO: 14333 - protein, 333 aa, Glycine max
  unsure (1)..(333): unsure at all Xaa locations
MLPSMDNTCPCMSDITQIIRKALIPCYCLYFPCIFCVSPNERATLHTNTDLVAMASAPTPREEFVYMAKLXAEQAERYEEMVEFMEKVSASAESEELTVEERNLLXSVAYKNVIGARRASWRIISSIEQKEESRGXNEDHVAVIRDYRSKIEAELSNICDGILKLLDTRLVPSAASGXDSKVFYLKMKGDYPRYLAEFKTGAXDRKEAXAESTLSPYKAAQDIANTEFAXPTSPLSGLGLALNFSXVFYYEILNSPXDRGCSLAKQAFDEAIAELDTLGEESYKDSTLIMQLLRDNLTLWTSDMQDDGADEIKEAAPKGCTGNKIKHTILSAY

SEQ ID NO: 14334 - protein, 219 aa, Glycine max
  unsure (1)..(219): unsure at all Xaa locations
MDKNELVQKAKLAEQAERYDDMAACMKSVTEQGAELSNEERNLLSVAYKNVVGARRSSWRVVSSIEQKTEGAEKKQQMAREYREKIETELRDICNDVLSLLEKFLIPNASQPESKVFYLKMKGDYYRYLAEVAAGDDKKGIVDQSQQAYQEAFEISKKEMQPTHPIRLGLALNFSVFYYEILNSPEKACSLXKTAFDEAIAELDTLSEESYKDSTLIMX

SEQ ID NO: 14335 - protein, 222 aa, Glycine max
  unsure (1)..(222): unsure at all Xaa locations
XSTHASGEKTTEGKNVIGARRASWRILSSIEQKEETKGNELNAKRIKEYRQKVELELSNICNDVMRVIDEHLIPSAAAGESTVFYYKMKGDYYRYLAEFKSGNEKKEAADQSMKAYESATAAAEADLPPTHPIRLGLALNFSVFYYEILNSPERACHLAKQAFDEAISELDTLNEESYKDSTLIMQLLRDNLTLWTSDIPEDGEDAQKVNGTAKLGGGEDAE

SEQ ID NO: 14336 - protein, 258 aa, Glycine max
  unsure (1)..(258): unsure at all Xaa locations
MASTKERENFVYTAKLAEQAERYEEMVEAMKNVAKLNVELTVEERNLLSVGYKNVVGARRASWRILSSIEQKEEAKGNDVSVKRIKEYRQKVESELSNICSDIMTVIDEHLIPSSSAGEPSVFFYKMKGDYYRYLAEFKSGDERKEAADHSMKAYQSASTTAEAELPPTHPIRLGXALNFSXFYYEILNSXERACHLAKXAFXDEAISEXLDTLNQGVYXXPXIIASFLXGQIFTPCGNFXEHFPWKKKGSLXGEPKK

SEQ ID NO: 14337 - protein, 226 aa, Glycine max
  unsure (1)..(226): unsure at all Xaa locations
MGDREQLLQRARLAEQAERYDDMASAMKAVTELNEPLSNEDRNLLSVAYKNVVGARRSSWRVISSIEQKTMADGNEKKLEKVKAYREKIEKELETVCNDVLALLDKFLIKNCNDFQYESKVFYLKMKGDYYRYLAEVASGEKKNSVVEASEAAYKEAFEISKEHMQPTHPIRLGLALNFSVFYYEIQNAPEQACLLAKQAFDDAIAELDTLNEDSYKDXTLIMQLX

SEQ ID NO: 14338 - protein, 222 aa, Glycine max
MEAIHLKSSKFAAMMLAGAPPHLDSMSPENEKEEESRRREKRGNEDHVAIIKEYRGKIEAELSKICDGILNLLESNLIPSAASPESKVLYLKMKGDYHRYLAEFKTGAERKEAAESTLLAYKSAQDIALADLAPTHPIRLGLALNFSVFYYEILNSPDRACNLAKQAFDEAISELDTLGEESYKDSTLIMQLLRDNLTLWTSDITDDAGDEIKETFKQQPGE

SEQ ID NO: 14339 - protein, 259 aa, Glycine max
  unsure (1)..(259): unsure at all Xaa locations
MAGASLEDNGGITKSAEQAXRYXEMVEFMDKVAKTVDVDEFTVEERNLLSVAYKNVIGARRAIGRIIFYIEHNEESRGNEDHVRIIKEYGGKIEAELSKISHGILNLLXSNLMRSSGCGGGEXFYLKMXGDYHRDLAEFKTGAEGKEAAESTLLAYKSAQEIALADLAPTPPXIRLGLALNFSVVCYEILSSPDRAWNLAKXQAFDGAISELHTLGEESYKDRAWIGQLLRGNLTLWASDMRVWVGKECVYCSXPSPGL

SEQ ID NO: 14340 - protein, 165 aa, Glycine max
  unsure (1)..(165): unsure at all Xaa locations
XEMVDAMKKVAKLDVELSVEERNLFSVGYKNVVGSRRASWRILSSIEQKEDSKGNELHVKHIRDYRNKXKGDYYRYLAEFKAGNEKKEVADQSLKAYQTASTTAESELQPTHPIRLGLALNFSVFYYEILNSPERACHLAKQAFDDAVSELDTLNEDSYKDSTLX

SEQ ID NO: 14341 - protein, 179 aa, Glycine max
  unsure (1)..(179): unsure at all Xaa locations
MAASKDRENFVYIAKLAEQAERYEEMVESMKNVTNLDVELTVEERNLLSVGYKNVIGARRASWRILSSIEQKEETKGNELNAKRIKEYRQKVELELSNICNDVMTVIDEHLIPSAAAGESNWVYYKMKGDYYRYLAEXKAGNEKKXAADQAMKAYXKSATTAAKADLPPTIPSEWGLAF

SEQ ID NO: 14342 - protein, 148 aa, Glycine max
  unsure (1)..(148): unsure at all Xaa locations
DLNRFLKMVSAREEFVYMAKLAEQAERYEEMVEFMEKVSASVDGDELTVEERNLLSVAYKNVIGARRASWRIISSIEQKEESRGNDDHVAAIRDYRGKIETELTGICEGILKLLDSRLVPAAASGDSKVXYLKMKGDYHRYLAEFKTG

SEQ ID NO: 14343 - protein, 157 aa, Glycine max
  unsure (1)..(157): unsure at all Xaa locations
DELNAKRIKEYRQKVELELSNICNDVMTVIDEHLIPSAAAGESTVFYYKMKGDYYRYLAEFKAGNEKKEAADQSMKAYESATTAAEADLPPTHPIRLGLALNFSVFYYEILNSPERACHLAKQAFDEAISEQDSMHAFGNETSLLIRVLARDRVPLX

SEQ ID NO: 14344 - protein, 132 aa, Glycine max
  unsure (1)..(132): unsure at all Xaa locations
MSSPREENVYLAKLAEQAERYEEMVEFMEKVAKTVDSEELTVEERNLLSVAYKNVIGARRASWRIISSIEQKEESRGNEDHVAIIKDYRGKIETELSKICDGILNLLDSHLVPAASLAESKVFYLKMKGDYX

SEQ ID NO: 14345 - protein, 147 aa, Glycine max
  unsure (1)..(147): unsure at all Xaa locations
MAVSSREDYVYMAKLSEQAERYEEMVEFMEKLSAAADGTELTVEERNLLSVAYKNVIGARRASWRIISSIEQKEESRGNEDRVKTIRDYKAKIESELAGICDGILKLLESALVPSAASEDSKVFYLKMKGDYYRYLAEFKIGXERDD

SEQ ID NO: 14346 - protein, 140 aa, Glycine max
  unsure (1)..(140): unsure at all Xaa locations
XLDSRLIPCFFSGDSEVFYLMRKGDDLRYLAXFKTGAQRLEGAESTVFAYKAAQDIGNAELPPTGPIMLGLALSFSVFYYEILNSPDRACNLAKQACDEAIAELDTLGEESYRDSTVIMQLLRDNLTLWTSDMADDGADE

SEQ ID NO: 14347 - protein, 134 aa, Glycine max
  unsure (1)..(134): unsure at all Xaa locations
XFXMYVFYRYLAEFKSGTERKDAAENTMVAYKAAQEIALKELPPTHPIRLGLALNFSVFYYEILNSPDRACDLAKQAFDEAISELDSLSEESYKDSTLIMQLLRDNLTLWTSDISEDAAEEMKDAPKGESGDGQ

SEQ ID NO: 14348 - protein, 141 aa, Glycine max
  unsure (1)..(141): unsure at all Xaa locations
XEFGTRESRGNEDHVSVIRDYRSKIESELSNICDGILKLLDSRLIPSASSGDSKVFYLKEKGDYHRYLAEFKTGAERKEAAESTLSAYKAAQDIANAELAPXHPIRLGLXLNFSXFYYEILNSPDRACNLAKQALDEAIAX

SEQ ID NO: 14349 - protein, 133 aa, Glycine max
  unsure (1)..(133): unsure at all Xaa locations
XERYLAEFKTGAERKEAAESTLSAYKAAQAIANAELPPTHPIRLGLALNFSVFYYEILNSPDRACTLAKQAFDEAIAELDPLGEESSKDSTLIMQLLRDTLTLWTSDMQDDGADEIKEAAPKPDDXXKYFTVN

SEQ ID NO: 14350 - protein, 157 aa, Glycine max
  unsure (1)..(157): unsure at all Xaa locations
XRGDPASVVLLRLPSFADFLSLTRSRTRALTLXDSIEQKEESRGNEDHVSVIRDYRAKIECELSNICDGVLKLLDSRLIPSASSGDSKVFYLKMKGDYHRYLAEFKTGAERKEAAESTLSAYKGAQDIANAELAPTHPIRLGLALNFSVFYYEILNX

SEQ ID NO: 14351 - protein, 135 aa, Glycine max
  unsure (1)..(135): unsure at all Xaa locations
MSPAEPTRDESVYMAKLAEQAERYEEMVEFMERVAKATGGAGPGEELSVEERNLLSVAYKNVIGARRASWRIISSIEQKEEGRGNDAHAATIRSYRSKIEAELAKICDGILALLDSHLVPSAGAAESKVFYXQDX

SEQ ID NO: 14352 - protein, 182 aa, Glycine max
  unsure (1)..(182): unsure at all Xaa locations
MASAPTPHKEIMYMAKLAEQAKRYKDMAEFMETVSSSVESXELNVEERTLLSVPYNNEIIARQSSWRIMCLIEQMEESRXTNDHXSVIRDXPSKIEAKLXNICDGMLKLLNTRLVRCDDCGDYKDFYLMMKADYHMHLAEFKTGSNPREADQSTLSCYTASHDIAHTELPTTDPMRLRLALN

SEQ ID NO: 14353 - protein, 123 aa, Glycine max
  unsure (1)..(123): unsure at all Xaa locations
METEREKQVYSAKLSEQTERYDEMVEAMKKVAQMDVELTVEERNLVSVGYKNVIGARRASWRILSSIEQKEESKGNEENVKRIQNYRKRVEEELAKVCNDILSVIDKHLIPSSTAVESTVFFX

SEQ ID NO: 14354 - protein, 162 aa, Glycine max
  unsure (1)..(162): unsure at all Xaa locations
XAAAPSPNEENVYMAKLAEQAERYEEMVEVIENDSAAADNEELTVYERNLLSVTYKNVIGARRTSWRIISSIDHKEESHSNDDHVYVIRDYRSKIYSNLSNICDSILKLLNCLLIPFASSYEFKVFYLDIKADYPQYLIKFKTSTXANEADDNTLFTYKPVH

SEQ ID NO: 14355 - protein, 109 aa, Glycine max
  unsure (1)..(109): unsure at all Xaa locations
XCMPAEAELPPTHPIRLGLALNFSVFYYEILNSPERACHLAKQAFDEAISELDTLSEESYKDSTLIMQLLRDNLTLWTSDIPEEGAEEQKVDSARAAGGDNAXVGYVPI

SEQ ID NO: 14356 - protein, 195 aa, Glycine max
  unsure (1)..(195): unsure at all Xaa locations
XAVVPSSSEXNVYMANVAEQAERYLXMVEFMEKVSAAADNXELTVEDRNLLSVDYYNVDRRRRALCRIISSIDQKEESRGNNDHVYVILDYRSKIESXELSNMCNGILRLVDSHMMLSAFCGDSKVCYLKMKEDDHRYLAEFMSGAKRREASDSTLSACRVAQHDANARSDATASDKRGHALDYMYETXDVLILX

SEQ ID NO: 14357 - protein, 118 aa, Glycine max
  unsure (1)..(118): unsure at all Xaa locations
MAVSAREEFVYMAKLAEQAERYEEMVEFMEKVSAAVDGDELTVEERNLLSVAYKNVIGARRASWRIISSIEQKEESRGNDDHVTAIRDYRSKIETELSGICDGILKLLDSRLVPAAAX

SEQ ID NO: 14358 - protein, 120 aa, Glycine max
  unsure (1)..(120): unsure at all Xaa locations
XTVIDEHLIPSSSAGEPSVFFYKMKGDYYRYLAEFKSGDERKEAADHSMKAYQXACHLAKQAFDEAISELDTLSEESYKDSTLIMQLLRDNLTLWTSDIPEEGAEEQKVDSARAAGGDNA

SEQ ID NO: 14359 - protein, 125 aa, Glycine max
  unsure (1)..(125): unsure at all Xaa locations
MATFFKERENFVYVAKLAEQAERYDEMVDAMKKVAKLDVELSVEERNLFSVGYKNVVGSRRASWRILSSIEQKEDSKGNELHVKHIRDYRNKVELELSNICSDIMIILDEHLIPSTNIAESTVFX

SEQ ID NO: 14360 - protein, 110 aa, Glycine max
  unsure (1)..(110): unsure at all Xaa locations
MSSSSREENVYMAKLAEQAERYEEMVEFMEKVAKSVDNEELTVEERNLLSVAYKNVIGARRASWRIISSIEQKEESKGNEDHVAIIKDYRGXIEAELSXICDGILNVLEX

SEQ ID NO: 14361 - protein, 112 aa, Glycine max
MAQPAELSREENVYMAKLAEQAERYEEMVEFMEKVAKTVDSEELTVEERDLLSVAYKNVIGARRASWRIISSIEQKEESRGNEDRVTLIKDYRGKIEVELTKICDGILKLLD

SEQ ID NO: 14362 - protein, 100 aa, Glycine max
  unsure (1)..(100): unsure at all Xaa locations
SAQDIALADLAXTHPIRLGLALNFSVFYYEIPNSSDRACNLAKQAFDEAISELDTLGEESYKDSTLIMQLLRDNLTLWTSDITDDAGDEIKETSKQQPGE

SEQ ID NO: 14363 - protein, 133 aa, Glycine max
  unsure (1)..(133): unsure at all Xaa locations
MADSSREENVYMAKLAEQAERYEEMVEFMEKVAKTVEVEELTVEERNLLSVAYKNVIGARRASWRIISYIEHKEESRGNEDHVAIIKEYKGKIEFKTGADRKEVXKSTLLAYKSAQDIATADLXPTHPIRLGX

SEQ ID NO: 14364 - protein, 89 aa, Glycine max
  unsure (1)..(89): unsure at all Xaa locations
XDIALADLAPTHPIRLGLALNFSVFYYEILNSTDRACNLAKQAFDEAISELDSLGEESYKDSTLIMQLLRDNLTLWTSDTNEDRGDEIX

SEQ ID NO: 14365 - protein, 108 aa, Glycine max
  unsure (1)..(108): unsure at all Xaa locations
MTAPAELSREENVYMAKLAEQAERYEEMVEFMEKVAKTVDSEELTVEERNLLSVAYKNVIGARRASWRIISSIEQKEESRGXEDRVTLIKEYRGXIETELSKICDGIL

SEQ ID NO: 14366 - protein, 130 aa, Glycine max
MTVSKDRENFVYMVKLVEQAVRLEEMEVSQKNVANLDVELTVEERNLLSDGYKNVIGARRACWRILPFIEQKEETKGNELNAKRIKEYRLNGELELSNICDDDMRVTDEHLIPSAAGGESTEDYYTMNGD

SEQ ID NO: 14367 - protein, 135 aa, Glycine max
  unsure (1)..(135): unsure at all Xaa locations
XLEDDDRYLAEFKACNDTNEAADHSIRAYESAALAVHADTPPTHPMRLGVAGNNSERYYEILNSPRRACHLAKQAFHESISELDTLHEESCXDCTLSMHLLRDNLTVWTSGIPEDGEDAPKVNGTGKLGRGEDAP

SEQ ID NO: 14368 - protein, 115 aa, Glycine max
  unsure (1)..(115): unsure at all Xaa locations
MATAAATREEMVYLAKLAEQAERYEEMVEFMEKVVAAAGTGELTVEERNLLSVAYKNVIGARRASWRIVSSIEQKEEGRGAAGHAAAARGYRALVEAELSNICAGILRLLDERLX

SEQ ID NO: 14369 - protein, 139 aa, Glycine max
  unsure (1)..(139): unsure at all Xaa locations
XASATTPREEFVYMANLAEQAERYDEMVEFMEKVSGNAENXELTVEEHNQLCVTYKNRIRTSRACWRIISXIEQNEESQGNEDHGPVIRSYRSQIKAELXHIVDGILXLIERTXITTSATGHXRVIYXFMKGHYYRSLS

SEQ ID NO: 14370 - protein, 182 aa, Glycine max
  unsure (1)..(182): unsure at all Xaa locations
MDDSSGEENIDTAKLAAQAARYEEMVVFMAKXXNTVVAEVLTKEERNLLCVSYTNGIDTMXRALWMIMSSIVLQDESIGNVDHVVIIKEDRCVNEGELIMNCDGILNLLESNLIPFIAFPDSKIHFLEMKGDSEETLAQFKTGAETKDADESTFIADRXSHDIAFVDLAPTHPIRLGPALTX

SEQ ID NO: 14371 - protein, 105 aa, Glycine max
  unsure (1)..(105): unsure at all Xaa locations
XAXKTAQDIWNAELPPXTHPNRVGPAFNFFGFYYEILNFPDWACNLAKQGFDEAIAELDTLGEESFKDSPLVMQLLCDNLPLWAFAMQGDGADXIKKAAPKPDGQ

SEQ ID NO: 14372 - protein, 114 aa, Glycine max
  unsure (1)..(114): unsure at all Xaa locations
XAASKDRENCSCIAKLAEHAERYEEMVESLKNEANLDVELTEEERNLLSVGYKNVIGARRASWKILSSIRQLEXTKGNEXNAKRIKDNTHXVKLELTNICNDEMTVIDEHLMAS

SEQ ID NO: 14373 - protein, 88 aa, Glycine max
  unsure (1)..(88): unsure at all Xaa locations
XDIAHADLAPTHPIKLSPALNISVLYYEILSTPDRACNIANQASDEAIAALDIPXEEYHKDSTPIMQLLRDNITXWSADTNEDGSDDX

SEQ ID NO: 14374 - protein, 87 aa, Glycine max
  unsure (1)..(87): unsure at all Xaa locations
XSTXKERETHVCVAKLSEQAXRYEEMVECMKTIAKLDLELTVEERNLLSVGYKNVIGARRASWRIMSSIEQKEESXGNESTAXLLKN

SEQ ID NO: 14375 - protein, 93 aa, Glycine max
  unsure (1)..(93): unsure at all Xaa locations
XSAPTTREDYEYMAKLADQSTRYEEMEEFMNKVYLSAXSYELTVEERNLLSVAYKNMIGARRASXRIISSIEQKEESRSNXDHCPVIHDYRSR

SEQ ID NO: 14376 - protein, 88 aa, Glycine max
  unsure (1)..(88): unsure at all Xaa locations
XAAAPSPREENEYMAKLADQAARYEEMVETMENVSAAVDNQELTVKERNLLSPAYKNVIGARRASRRIISSIEQKDESHTNQDHESVI

SEQ ID NO: 14377 - protein, 118 aa, Glycine max
  unsure (1)..(118): unsure at all Xaa locations
XPDLAKKKKTQVASDALPPPQRKSSVYTVRILAGARXRAATREIASLEQKERGRGNXEDHVSRLRDYRSRSRAELSNICDGMLKLLDTRLVPSAASGDSKVFYLKMKGDYHRYLAEFX

SEQ ID NO: 14378 - protein, 74 aa, Glycine max
  unsure (1)..(74): unsure at all Xaa locations
XREENVYMAKLAEHAERYEEMVEFMENVSAAADNEELTVEEMNLLSCAYKNVIXARRASWLIISSIXQIEESRA

SEQ ID NO: 14379 - protein, 68 aa, Glycine max
NSSDRACNLAKQAFDEAISELDTLGEESYKDSTLIMQLLRDNLTLWTSDITDDAGDEIKETSKQQPGE

SEQ ID NO: 14380 - protein, 126 aa, Glycine max
  unsure (1)..(126): unsure at all Xaa locations
NTKESXNGVTITSVAXQAPRYEKMVEALNNEAKLNVXLTVEERNLLSVGYKNLVGAPWASWRILSSIEQKEKSKGNEDSVNRIXKARMLNAESRVSNMCNACTTVMDEHLMAYSSSDEPTVDFYKX

SEQ ID NO: 14381 - protein, 132 aa, Glycine max
  unsure (1)..(132): unsure at all Xaa locations
XADSSREENVFMAKLAEHADRYEEMVEFMEKVAKTVEVEELTVEDRNLLYAAYKNAIAARRALPTTTSSIDRKEETPCAEDHLAMVEEPSGTLAAYIPAICRVRXXLRSYSLIPSASSAPSSTFXVKIDGDY

SEQ ID NO: 14382 - protein, 72 aa, Glycine max
  unsure (1)..(72): unsure at all Xaa locations
MAASAPTPREDFVXMANLAEXAERYEEMVEFMEKVSASAESEELTVEERNLLSVAYKNVIGARRASWRIISX

SEQ ID NO: 14383 - protein, 71 aa, Glycine max
  unsure (1)..(71): unsure at all Xaa locations
MSTAEATREENVYMAKLAEQAERYEEMVEFMEKVAKTADVGELTVEERNLLSVAYKNVIGARRAXXRIISS

SEQ ID NO: 14384 - protein, 79 aa, Glycine max
  unsure (1)..(79): unsure at all Xaa locations
XNDEELTVEERNLLSVAYKNVIGARRASWRIISSIEQKEESRGGXDHVFVIRDYRSKIEYELFYLCYGVLKLLGTGVIA

SEQ ID NO: 14385 - protein, 102 aa, Glycine max
  unsure (1)..(102): unsure at all Xaa locations
XASAPSPREENVCMAKLAVLGERYEEMEASMEKVYADVDNQERTAEEMNHLCVAYKNEIGARRASWRIISSIEQNEESRGIDDHMYVNRCYLFKIQSELSSI

SEQ ID NO: 14386 - protein, 123 aa, Glycine max
  unsure (1)..(123): unsure at all Xaa locations
XWPRKKNMILSKLPWLSGPYEQMVXLMRIVYPXDHDXELTIEERILLSVPYNNVIRARRASWRIIFSIXHKEESRGHXDHLFLILYYRFKIYSYLCNICHRMLKLLHCFLIPSTSSGYFKVLY

SEQ ID NO: 14387 - protein, 104 aa, Glycine max
  unsure (1)..(104): unsure at all Xaa locations
IRLELTHTLCIYLYQPDLVATASAPTPREELVCMAKLAEQAKRYKETVEFMENVCSSAESEELTVEERNLLSVDYKNVNGARRAYRRIISLIEQKEESRGIXDX

SEQ ID NO: 14388 - protein, 77 aa, Glycine max
  unsure (1)..(77): unsure at all Xaa locations
ESTLISERSRCCLKGRESFVYIAXLAEQAARYDEMVESMKNVANLDVELTVEERTLLSVGYKHVIGARRASWRILSX

SEQ ID NO: 14389 - protein, 137 aa, Glycine max
  unsure (1)..(137): unsure at all Xaa locations
RSRITGLTHASGENTTARKSVLGAPRSSWRILSSIQHHAYTNGNYLSANQHIEYIRTVELDLAIICCDVMIVIDEHLMPSAATGESTVFYYHIIRHYYRYLAKFQSSPDTNEAADQSTIASESATAAXSQADLPPTX

SEQ ID NO: 14390 - protein, 75 aa, Glycine max
  unsure (1)..(75): unsure at all Xaa locations
MADSSREEIVYMAPTXGEXVRYEDIVEFLEKVAKIAEVDELTVEERNLLSVAFKNVIGASRASWRIISSIEQKEE

SEQ ID NO: 14391 - protein, 70 aa, Glycine max
  unsure (1)..(70): unsure at all Xaa locations
MAASAPTPREDFVYMAXLAEKAERYEEMVDFMEKVSASAESEELTVEERNLLSVAXKNVMGARRASWRIX

SEQ ID NO: 14392 - protein, 108 aa, Glycine max
  unsure (1)..(108): unsure at all Xaa locations
XHLPHEENVYIDKLAVQAECYEXMVEXLERVSFGADNNELTXEEMNLFLPACWNVIRARRAWWLIISSIEQKEESLSHHDHVSGMLHYRVMIVSELCNICDVVLKLLD

SEQ ID NO: 14393 - protein, 125 aa, Glycine max
  unsure (1)..(125): unsure at all Xaa locations
XGNFSRILEKFKVGNEKKKGANQPLKAYETLSPPVERELHPTLPIRWGRVQNSPGFNKKIMNPPERAGLLAKQAFNNVASNLNPLKEDPSKARPLIMQLLRNTLPXXTSDIPKKVEAQKLETPPR

SEQ ID NO: 14394 - protein, 119 aa, Glycine max
VKHIFGREGNGRENVRPVSGEQEVHKGPSVREPAHQERPAEKERKTQGYLAKLAEQAERYEEMVECRKKAGTLVPDLTAEDRNLLSTGYKNVTGAPRASWSMTPSIEHTDESKGNERTV

SEQ ID NO: 14395 - protein, 81 aa, Glycine max
  unsure (1)..(81): unsure at all Xaa locations
XYFVFQDIANAELPPTHPIRLGLALNFSVFYYEILNSPDRACNLAKQAFXVRFRYSEYLGLCFALFIFVLQHFEQCFGCFP

SEQ ID NO: 14396 - protein, 94 aa, Glycine max
  unsure (1)..(94): unsure at all Xaa locations
MEDAPSPREKNVYMANIAQQAERYEKKVELMKKVSSXSFNTHHPTGEERNRLSVAYKNEMEERRASGEIFSSIXQKEESHAKXDHDAVIREYRX

SEQ ID NO: 14397 - protein, 86 aa, Glycine max
  unsure (1)..(86): unsure at all Xaa locations
SRAXFGSRAFDEAIATLDTLDEESYKDSTLIMQLLRDNLTLWTSDMQDDGADEIKEAAPKPDDSKNILLLIRIELLLKIFLKGEVF

SEQ ID NO: 14398 - protein, 50 aa, Glycine max
  unsure (1)..(50): unsure at all Xaa locations
LQSTHTIGIGHALNFSVIYYEIXNSPERACHLAKQAFDEAIAELNTLSEX

SEQ ID NO: 14399 - protein, 109 aa, Glycine max
  unsure (1)..(109): unsure at all Xaa locations
LELRCSIHLRWFCRTTRKGYLHYRAVTPREEIMYMAKLVVPAQRYEEMVGYKEKDSALNXSEELTVEERNLLFVXLRNVIWARRAFWRIITSTVQKGESRGDEEPLLQL

SEQ ID NO: 14400 - protein, 88 aa, Glycine max
  unsure (1)..(88): unsure at all Xaa locations
XFSXVFYNEIFNSPDGACTLAKQAFDEAIAELDPLGEDSSKDSPLFMQFFCDTLPLWPFYMQDDGPNXIKKPPPKGAGDQNLPPHPFN

SEQ ID NO: 14401 - protein, 150 aa, Glycine max
  unsure (1)..(150): unsure at all Xaa locations
MTTLKDRENFVYIAILVYLAVRFXEMAESMRSAANIPIXELTXAEERNLLSVEHKTATSARTETXRILTCIEQKGETKGNXLYATWTKDSRQEGESKLSNIXXGRMRASDEHFITAGVRGESTALNYXTTGEYDWDRAECKSSKEKKEAX

SEQ ID NO: 14402 - protein, 50 aa, Glycine max
  unsure (1)..(50): unsure at all Xaa locations
LLPAXLLYRLPPTHPIRLGLALNFSVFYYEILNSPDRACSLAKQMFEVSV

SEQ ID NO: 14403 - protein, 67 aa, Glycine max
AFEEAIAELDTLGEESYKDSTLIMQLLRDNLTLWTSDVQVNVTMEYGSHLFTEYFFLLPLITNQNLS

SEQ ID NO: 14404 - protein, 68 aa, Glycine max
  unsure (1)..(68): unsure at all Xaa locations
XKSEAVLSYVCDGILKLLDTRLVPSAASGDSKVFYLKMKGDYHRYLAELKTGADRKEGVVITLSDLQS

SEQ ID NO: 14405 - protein, 61 aa, Glycine max
  unsure (1)..(61): unsure at all Xaa locations
MAASAPTPREDSVYMANLADQAERYEDMVDFMEKVSASAESEELTVEERNLLSVAXKKVIG

SEQ ID NO: 14406 - protein, 110 aa, Glycine max
  unsure (1)..(110): unsure at all Xaa locations
SLIHRSSHASALSLTHTISLSFSHPDLVTRAMSTTPREKVTYMAKHTDHANRYXEMMKLMEKVSAYNDSHELTTEEHNLLSVNYKNVISARHAYXRIISIIEHKEDKRVN

SEQ ID NO: 14407 - protein, 69 aa, Glycine max
MSDSSREENVYMAKLSEQAERYEDMVEFMEKVAKTVEVEEMTVDDKSDFSVFSETVIRARRPFWLILSS

SEQ ID NO: 14408 - protein, 74 aa, Glycine max
  unsure (1)..(74): unsure at all Xaa locations
LTHTFSLSLSHPDRVAIASAPTPRAAFVYMAKLAEQAARYEEMVDFMEKVTASAERDELTVEERNLLSVAYKNX

SEQ ID NO: 14409 - protein, 63 aa, Glycine max
  unsure (1)..(63): unsure at all Xaa locations
MAARAPIPREEFVYMANCPEQAERYEEMVEFMEKVSASAESEELPVEERNFFSVAKKNVLGAX

SEQ ID NO: 14410 - protein, 65 aa, Glycine max
  unsure (1)..(65): unsure at all Xaa locations
DRENFAYICKLSEXCPAFQEMVESMKNAXANLCIVLSGEERNLLSVGLTNMIGARRARWRILSSX

SEQ ID NO: 14411 - protein, 70 aa, Glycine max
  unsure (1)..(70): unsure at all Xaa locations
MAASAHTPSKEFVYMAILADHAHRYXEMVEFMRKVSASADNHELSVEERNLLSVGEHNFIXACRSTWRIX

SEQ ID NO: 14412 - protein, 261 aa, Pisum sativum
MATAPTPREEFVYMAKLAEQAERYEEMVEFMEKVTAAVESEELTVEERNLLSVAYKNVIGARRASWRIISSIEQKEESRGNDEHVTVIRDYRSKIETELSNICNGILKLLDSRLIPSAALGDSKVFYLKMKGDYHRYLAEFKSGAERKDAAESTLTAYKSAQDIANTELPPTHPIRLGLALNFSVFYYEILNSPDRACGLAKQAFDEAIAELDTLGEESYKDSTLIMQLLRDNLTLWTSDMQDDGADEIKEAAPKGNDEPQ

SEQ ID NO: 14413 - protein, 263 aa, Vicia faba
MGITVPENLTKLGVAVPENLNREQYVYLAKLAEQAERYEEMVSFMQKLVLVSTPSSELSVEERNLISVAYKNVIGSLRAAWRIVSSIEQKEEGRKNDDHVVLVKDYRSKVEAELSNVCASILELLDKNLIPSGSSSESKVFYYKMKGDYHRYLAEFKIGEERKSAAEDTMLSYKAAQDIAAADLPSTHPIRLGLALNFSVFYYEILNQSDKACAMAKQAFEEAIAELDTLGEESYKDSTLIMQLLRDNLTLWTSDVQDQLDEP

SEQ ID NO: 14414 - protein, 181 aa, Vicia faba
VAYKNVIGSLRAAWRIVSSIEQKEEGRKNDDHVVLVKDYRSKVEAELSNVCASILELLDKNLIPSGSSSESKVFYYKMKGDYHRYLAEFKIGEERKSAAEDTMLSYKAAQDIAAADLPSTHPIRLGLALNFSVFYYEILNQSDKACAMAKQAFEEAIAELDTLGEESYKDSTLIMQLFRDN

SEQ ID NO: 14415 - protein, 248 aa, Vigna angularis
MAEGLNREQYVYLAKLSEQADGYEEMVEFMQKVVVGWTPATELSVEERNLLSVAYKNVIGSLRAAWRIVSSIEQKEEGRKNEEHVALVKQYRSKVETELSNVCASILNLLDSNLVASASNTESKVFYLKMKGDYHRYLAEFKVGDERKAAAEDTMLSYKAAQDVAYADLPPTHPIRLGLALNFSVFYYEILNQSDKACGMAKQAFEEAIAELDTLGEESYKDSTLIMQLLRDNLTLWTSDVQDQLDEP

SEQ ID NO: 14416 - protein, 242 aa, Oryza sativa (japonica cultivar-group)
MVEAMNSVAKLDEGLTKEERNLLSVGYKNLIGAKRAAMRIIGSIELKEETKGKESHVRQTAEYRRKVEAEMDKICCDVINIIDKYLIPHSSGAESSVFYYKMKGDYYRYLAEFKTGTEKIEVSELSLNAYETASKTAQTDLTPTDPIRLGLALNISVFYCEIMNSPDKACQLAKNAFDEAVAELPSLSEENYKDSTLIMQLLRDNLALWNSDMADDADDIRERTDTTGAKGDPAADGGANSW

SEQ ID NO: 14417 - protein, 260 aa, Lycopersicon esculentum
MADSSREENVYLAKLAEQAERYEEMIEFMEKVAKTADVEELTVEERNLLSVAYKNVIGARRASWRIISSIEQKEESRGNEDHVNTIKEYRSKIEAELSKICDGILSLLESNLIPSASTAESKVFYLKMKGDYHRYLAEFKTGTERKEAAENTLLAYKSAQDIALAELAPTHPIRLGLALNFSVFYYEILNSPDRACNLAKQAFDEAISELDTLGEESYKDSTLIMQLLRDNLTLWTSDNADDVGDDIKEASKPESGEGQQ

SEQ ID NO: 14418 - protein, 260 aa, Lycopersicon esculentum
MADSSREENVYLAKLAEQAERYEEMIEFMEKVAKTADVEELTVEERNLLSVAYKNVIGARRASWRIISSIEQKEESRGNEDHVNTIKEYRSKIEADLSKICDGILSLLESNLIPSASTAESKVFHLKMKGDYHRYLAEFKTGTERKEAAENTLLAYKSAQDIALAELAPTHPIRLGLALNFSVFYYEILNSPDRACNLAKQAFDEAISELDTLGEESYKDSTLIMQLLRDNLTLWTSDNADDVGDDIKEASKPESGEGQQ

SEQ ID NO: 14419 - protein, 230 aa, Lycopersicon esculentum
ENVYMAKLADRAESDEEMVEFMEKVSNSLGSEELTVEERNLLSVAYKNVIGARRASWRIISSIEQKEESRGNEEHVNSIREYRSKIENELSKICDGILKLLDSKLIPSATSGDSKVFYLKMKGDYHRYLAEFKTGAERKEAAESTLTAYKAAQDIASAELAPTHPIRLGLALNFSVFYYEILNSPDRACNLAKQAFDEAIAELDTLGEESYKDSTLIMQLLRDNLTLWTS

SEQ ID NO: 14420 - protein, 256 aa, Lycopersicon esculentum
MASPREENVYMAKFAEQAERSYEEMVEFMEKVVFSLNGEELTVEERNLLSVPYGGLIGARRASWRIISSIEQKEESRGNEDHVASIKKYRSQIENELTSICNGILKLLDSKLIGSAATGDSKVFYLKMKGDYYRYLAEFKTGTERKEAAENTLSAYKSAQDIANGELAPTHPIRLGLALNFSVFYYEILNSPDRACNLAKQAFDEAIAELDTLGEESYKDSTLIMQLLRDNLTLWTSDMQDDGTDEIKEPSKADNE

SEQ ID NO: 14421 - protein, 252 aa, Lycopersicon esculentum
MAALIPENLSREQCLYLAKLAEQAERYEEMVQFMDKLVLNSTPAGELTVEERNLLSVAYKNVIGSLRAAWRIVSSIEQKEESRKNEEHVHLVKEYRGKVENELSQVCAGILKLLESNLVPSATTSESKVFYLKMKGDYYRYLAEFKIGDERKQAAEDTMNSYKAAQEIALTDLPPTHPIRLGLALNFSVFYFEILNSSDKACSMAKQAFEEAIAELDTLGEESYKDSTLIMQLLRDNLTLWTSDAQDQLDES

SEQ ID NO: 14422 - protein, 249 aa, Lycopersicon esculentum
MALPENLTREQCLYLAKLAEQAERYEEMVKFMDKLVIGSGSSELTVEERNLLSVAYKNVIGSLRAAWRIVSSIEQKEEGRKNDEHVVLVKDYRSKVESELSDVCAGILKILDQYLIPSASAGESKVFYLKMKGDYYRYLAEFKVGNERKEAAEDTMLAYKAAQDIAVAELAPTHPIRLGLALNFSVFYYEILNASEKACSMAKQAFEEAIAELDTMGEESYKDSTLIMQLLRDNLTLWTSDMQEQMDEA

SEQ ID NO: 14423 - protein, 249 aa, Lycopersicon esculentum
MALPENLTREQCLYLANVAEQAERYEEMVKFMDKLVIGSGSSELTVEERNLLSVAYKNVIGSLRAAWRIVSSIEQKEEGRKNDEHVVLVKDYRSKVESELSDVCAGILKILDQYLIPSASAGESKVFYLKMKGDYYRYLAEFKVGNERKEAAEDTMLAYKAAQDIAVADVAPTHPIRLGLALNFSVFYYEILNASEKACSMAKQAFEEAIAELDTMGEESYKDSTLIMQLLRDNLTLWTSDMQEQMDEA

SEQ ID NO: 14424 - protein, 231 aa, Lycopersicon esculentum
EFMEKVSNSLGSEELTVEERNLLSVAYKNVIGARRASWRIISSVEQKEESRGNEEHVNSIREYRSKIENELSKICDGILKLLDSKLIPSATSGDSKVFYLKMKGDYHRYLAEFKTGAERKEAAESTLTGYKAAQDIASAELAPTHPIRLGLALNFSVFYYEILNSPDRACNLAKQAFDEAIAELDTLGEESYKDSTLIMQLLRDNLTLWTSDMQDDGADEIKEDPKPEEKN

SEQ ID NO: 14425 - protein, 229 aa, Lycopersicon esculentum
MEKVSNSLGSEELTVEERNLLSVAYKNVIGARRASWRIISSVEQKEESRGNEEHVNSIREYRSKIENELSKICDGILKLLDSKLIPSATSGDSKVFYLKMKGDYHRYLAEFKTGAERKEAAESTLTGYKAAQDIASAELAPTHPIRLGLALNFSVFYYEILNSPDRACNLAKQAFDEAIAELDTLGEESYKDSTLIMQLLRDNLTLWTSDMQDDGADEIKEDPKPEEKN

SEQ ID NO: 14426 - protein, 131 aa, Lycopersicon esculentum
MASSKERENFVYVAKLAEQAERYDEMVEAMKNVANMDVELTVEERNLLSVGYKNVVGSRRASWRILSSIEQKEESRGNEQNVKRIKEYLQKVESELTNICNDIMVVIDQHLIPSCSAGESTVFYHKMKGDY

SEQ ID NO: 14427 - protein, 131 aa, Lycopersicon esculentum
MASSKERESLVYIARLAEQRERYDEMVDAMKNVANLDVELTVEERNLLSVGYKNVVGSRRASWRILSSIEQKEDASGNEQNVKRIQGYRQKVESELTDICNNIMTVIDEHLIPSCTAGESTVFYYKMKGDY

SEQ ID NO: 14428 - protein, 138 aa, Lycopersicon esculentum
MAALIPENLSREQCLYLAKLAEQAERYEEMVQFMDKLVLNSTPADDLTVEERNLLSVAYKNVIGSLRAAWRIVSSIEQKEESRKNEEHVHLVKEYRGKVENELSQVCAGILKLLESNLVPSATTSESKVFHLKMKGDY

SEQ ID NO: 14429 - protein, 272 aa, Nicotiana tabacum
MAESTREENVYMAKLAEQAERYEEMVEFMEKVAKTVDVEELTVEERNLLSVAYKNVIGARRASWRIISSIEQKEESRGNEDHVSSIKEYRGKIEAELSKICDGILNLLESHLIPVASTAESKVFYLKMKGDYHRYLAEFKTGAERKEAAENTLLAYKSAQDIALAELAPTHPIRLGLALNFSVFYYEILNSSDRACNLAKQAFDDAIAELDTLGEESYKDSTLIMQLLRDNLTLWTSDTTVSLSLSQKYTPTNADAPTNNTVHTSKSFLGSA

SEQ ID NO: 14430 - protein, 252 aa, Nicotiana tabacum
MAALLTDNLSREQYLYLAKLAEQAERYEEMVQYMDKLVLSSTPAAELTVEERNLLSVAYKNVIGSLRAAWRIVSSIEQKEESRKNEEHVSLVKEYRGKVENELTEVCAGILKLLESNLVPSASTGESRVFYLKMKGDYYRYLAEFKVGDERKQAAEDTMNSYKAAQEIALADLPPTHPIRLGLALNFSVFYFEILNSSDKACSMAKQAFEEAIAELDTLGEESYKDSTLIMQLLRDNLTLWTSDAQDQLDES

SEQ ID NO: 14431 - protein, 249 aa, Nicotiana tabacum
MAVPENLTREQCLYLAKLAEQAERYEEMVKFMDRLVAVSASSELTVEERNLLSVAYKNVIGSLRAAWRIVSSIEQKEEGRKNEEHVVLVKDYRSKVESELSDVCAGILKILDQYLIPSAAAGESKVFYLKMKGDYYRYLAEFKVGNERKEAAEDTMLAYKAAQDIALAELAPTHPIRLGLALNYSVFYYEILNASEKACSMAKQAFEEAIAELDTLGEESYKDSTLIMQLLRDNLTLWTSDMQEQMDEA

SEQ ID NO: 14432 - protein, 204 aa, Nicotiana tabacum
MAVAPTAREENVYMAKLAEPAEMYQEMVEFMEKVSNSLGSEELTVEERNLLSVAYKNVIGARRASWRIISSIEQKEESRGNEEHVNSIREYRSKIENELSKICDGILKLLDAKLIPSAASGDSKVFYLKMKGDYHRYLAEFKTGAERKEAAESTLTAYKAAQDIATTELAQTHPIRLGLALNFSVFYYEILNSPDRACNLAKQA

SEQ ID NO: 14433 - protein, 259 aa, Solanum tuberosum
MADSREENVYMAKLAEQAERYEEMVEFMEKVAKVDVEELTVEERNLLSVAYKNVIGARRASWRIISSIEQKEESRGNEDHVSSIKEYRVKIEAELSKICDGILSLLESHLVPSASTAESKVFYLKMKGDYHRYLAEFKTGARERKEAAENTLLAYKSAQDIALAELTPTHPIRLGLALNFSVFYYEILNSPDRACNLAKQAFDDAIAELDTLGEESYKDSTLIMQLLRDNLTLWTSDTTDDAEDEIREGSKQESGDGQQ

SEQ ID NO: 14434 - protein, 249 aa, Solanum tuberosum
MALPENLTREQCLYLAKLAEQAERYEEMVKFMDKLVIGSGSSELTVEERNLLSVAYKNVIGSLRAAWRIVSSIEQKEEGRKNDEHVVLVKDYRSKVESELSDVCAGILKILDQYLIPSASAGESKVFYLKMKGDYYRYLAEFKVGNERKEAAEDTMLAYKAAQDIAVAELAPTHPIRLGLALNFSVFYYEILNASEKACSMAKQAFEEAIAELDTLGEESYKDSTLIMQLLRDNLTLWTSDMQEQMDEA

SEQ ID NO: 14435 - protein, 296 aa, Oryza sativa
PRIPRLPPPHSSPPVPGAASKTPTPKSQPRSARSLSRLAMAPSDDLVYMAKLAEQAERYDEMVEAMNSVAKLDEGLTKEERNLLSVGYKNLIGAKRAAMRIIGSIELKEETKGKESHVRQTAEYRRKVEAEMDKICCDVINIIDKYLIPHSSGAESSVFYYKMKGDYYRYLAEFKTGTEKIEVSELSLNAYETASKTAQTDLTPTDPIRLGLALNISVFYCEIMNSPDKACQLAKNAFDEAVAELPSLSEENYKDSTLIMQLLRDNLALWNSDMADDADDIRERTDTTGAKGDPAA

SEQ ID NO: 14436 - protein, 207 aa, Oryza sativa
  unsure (1)..(207): unsure at all Xaa locations
XDFERRPGRYMAKLAEQAERYEEMVEFMEKVAKTTDVGELTVEERNLLSVAYKNVIGARRASWRIISSIEQKEESRGNEAYVASIKEFKSGAEGKEAAENTLVAYKSAQDIALADLPTTHPIRLGLALNFSVFYYEILNSPDRACNLAKQAFDDAIAELDTLGEESYKDSTLIMQLLRDNLTLWTSDNAEDGGDEIKEAAKPEGEGH

SEQ ID NO: 14437 - protein, 224 aa, Oryza sativa
  unsure (1)..(224): unsure at all Xaa locations
CWEVKKMKEREKVVRLAKLAEQAERYDDMVEFMKTLARMDVDMSAEERLLFSVGFKKTIGARRASWRILESLEQKVTAGDQPGVTINGYKKKVEDELRAVCNEVLSIIAIHCLPLANSGENVVFFYKMKGDYYRYLAEFSTGTEKKAATDQSLMAYQHAMVGACSELSPAHQLRLGLALNFGDFXEIMNSAERASQVAKQALDEATAEINSAGVVGYKGSVLMM

SEQ ID NO: 14438 - protein, 151 aa, Oryza sativa
RSHPPPQAGAAESKVFYLKMKGDYHIYLAEFKSGDERKQAAESTMNAYKAAQDIALADLAPTHPIRLGLALNFSVFYYEILNSPDRACNLAKQAFDEAISELDSLGEESYKDSTLIMQLLRDNLTLWTSDANDDGGDEIKEAAAPKEPGDQ

SEQ ID NO: 14439 - protein, 142 aa, Oryza sativa
  unsure (1)..(142): unsure at all Xaa locations
XPKTPGLTFYLKMKGDYHRYLAEFKTGAERKDAADATLAAYQAAQDIAMKELSPTHPIRLGLALNFSVFYYEILNSPDRACTLAKQAFDEAISELDTLGEESYKDSTLIMQLLRDNLTLWTSDMQDDGGDEMRDATKPEDEH

SEQ ID NO: 14440 - protein, 149 aa, Oryza sativa
  unsure (1)..(149): unsure at all Xaa locations
XPSSTAARXSKVFYXLKMKXDYHRYLRIXXDGAERKEAAESTMVAYKAAQDIALADLAPTHPIRLGLALNFSVFYYEILNSPDKACNLAKQAXDEAISELDTLGEESYKDSTLIMQLLRDNLTLWTSDLTEDGGDEVKEASKGDACEGQ

SEQ ID NO: 14441 - protein, 175 aa, Oryza sativa
  unsure (1)..(175): unsure at all Xaa locations
SLNCAKCPPEENVYMVKLADQAERYVDMGEYMGKVAKTAYVEEVTVEECNLLSVAXKSEIGDLRASCRNGSSIEHKEEARGNDEHGTLFMDXRDQIEYELSKICDGVLKLLVSLLVPSSTAAQYTVLYLMMKVDYHRYLAXFKTGAERHGAVEITMRAYKDAQDIALXSDLXSHP

SEQ ID NO: 14442 - protein, 151 aa, Oryza sativa
  unsure (1)..(151): unsure at all Xaa locations
XACSHDTHVYIFFLXSALYITLKKMKGDYYRYLAEFSTGTEKKAATDQSLMAYQHAMVVASSELSPAHQFRLGLALNFSVFXEIMNSPERASQVAKQALDEATAEINSAGVEGYKDSMLMMQLLKENLALWTSELXXGGETSKDDDVVMEG

SEQ ID NO: 14443 - protein, 87 aa, Oryza sativa
IKEYRGKIEAELSKICDGILKLLDSHLVPSSTAAESKVFYLKMKGDYHRYLAEFKTGAERKEAAESTMVAYKAAQDIALADLAPTHP

SEQ ID NO: 14444 - protein, 100 aa, Oryza sativa
  unsure (1)..(100): unsure at all Xaa locations
XVMLLDLHLVPSSTAAESTVSYLKMKGDYHRYLVVFKTGAVRKVAAVSTLVVYMAAQDFGLACLATTHPIRIGLSLNYSGFYYXIINSSDKACYLAMQAF

SEQ ID NO: 14445 - protein, 132 aa, Oryza sativa
  unsure (1)..(132): unsure at all Xaa locations
PWLLRLQCRGGLAPLFCPLFSGFAFSAVHVFLCYLAEQAERYQEMVXFMENVANTTDVGELTAEERNPLSVAYKNVIGARRAFLRNIPFIEHNEESRGNEAYVASTXESPSRIETELNKICDGIPKPLXSHL

SEQ ID NO: 14446 - protein, 140 aa, Oryza sativa
  unsure (1)..(140): unsure at all Xaa locations
XFYLKENDVFHRGIDVAKMGLELKDLVDITVETYNSADAFGLTNLTATYMLRHVLTLYYSVYDYDMLNSPDLDCILEQQASDYCIGVLDTVQNMAYLDSSSNIQAMSIKLSLWTARISEDVRVKTRXXQRPHSEMINSLD

SEQ ID NO: 14447 - protein, 96 aa, Oryza sativa
  unsure (1)..(96): unsure at all Xaa locations
PTYVSGKASPANASCEENAYMAXLAYPAERYKEMRQFMDMAANTTDVLELTVQERNLLSRAYKNMTCARMALWRIISSIEQKEDSPRHAASVASIX

SEQ ID NO: 14448 - protein, 274 aa, Triticum aestivum
  unsure (1)..(274): unsure at all Xaa locations
MATERESKTFLARLCEQAERYDEMVTYMKEVAKLGGELTVDERNLLSVAYKNVVGTRRASWRIISSIEQKEESKGSDKHVSTIKDYRNKIETELEKVCQDVLDVLDDFLIPNAATGESKVFYHKMKGDYHRYLAEFASGEKRKGAATAAHDAYKSATDVAQTELTPTHPIRLGLALNFSVFYYEILNSPDRACHLAKQAFDDAIDELDSLSEESYRDSTLIMQLLRDNLTLWTSSDSAEGEAAGAADAPKKEEGEAAKPAEEXXAEEPAPAPAS

SEQ ID NO: 14449 - protein, 232 aa, Triticum aestivum
  unsure (1)..(232): unsure at all Xaa locations
MGHEDAVYLAKLAEQAERYEEMVENMKIVAGEDRDLTVEERNLLSVAYKNVIGARRASWRIVTSIEQKEESKGNSSQVTLIKEYRQKIEAELAKICEDILEVLDQHLIPSAKSGESKVFYHKMKGDYHRYLAEFAIGDRRKDSADKSLEAYKAATEVAXRPELPPTHPIXRLGLALNFSVFYYEILNAPDQACHLAKQAFDDAIAELDTLSEESYRDSTLIMQLLRDTLTLW

SEQ ID NO: 14450 - protein, 260 aa, Triticum aestivum
  unsure (1)..(260): unsure at all Xaa locations
PRVRYXTRNNVYMAKLAEQAERYDEMVQFTKEVAKMGAELSVEERNLLSVAYKNVIGSRRASWRIVSSIEQKEESKGNSAQVEKIRTYRQKIETELQEVCKDILSVLSEDLIPVAEGGESKVFYYKMKGDYHRYLAEFLTGEARKESATEAHEAYKSATDVAQTELAPTHPIRLGLALNFSVFYYEILNSPDRACHLAKQAGDDAIAELDTLSEESYKDSTLIMQLLRDNLTLWTSDLQDESDKPEPKAEEAEESKXRGS

SEQ ID NO: 14451 - protein, 286 aa, Triticum aestivum
  unsure (1)..(286): unsure at all Xaa locations
EEEEEEMEERGKVVCMAKLAEQAGRYDDMVDFMKKLARMDVDMSVEERHLFSVGFKNTIGARRASWRILSSLEQKVAAGEQAGRMISVYRTKVEDELRMVCNEILSIIAIHCLPLANAGENVVFFHKMKGDYYRYLAEFSTGVEKKSAADQSLMAYQHAMVVAXTELSPAHPIRLGLALNFSVFFYDIMNCHQRACQVAKQAFDEATTEINSAGMDGNNDSTLMMQLLNDNLALWKSELTEGETSKDSDIDMEEGXLECAEGSPACMCAKXPEHNGTKPAGHCWFL

SEQ ID NO: 14452 - protein, 261 aa, Triticum aestivum
  unsure (1)..(261): unsure at all Xaa locations
MSTAEATREENVYMAKLAEQAERYEEMVEFMEKVAKTADVGELTVEERNLLSVAYKNVIGARRASWRIISSIEQKEESRGNEAYVASIKEYRTRIETELSKICDGILKLLDSHLVPSATAAESKVFYLEMKGDYHRYLQQFKAVTERYXSVXSFLXITSNNPCXLCQPVETTHAIESIVXNHYLTLRKKGLSLHLSIMFTCWXAFDEAIAELDSLGEESYKDSTLIMQLLRDNLTLWTSDNAEEGGDEIKEAASKPEGEGH

SEQ ID NO: 14453 - protein, 169 aa, Triticum aestivum
  unsure (1)..(169): unsure at all Xaa locations
XRRIQNVIGARRASWRIVSSIEQKEESRKNQEHVNLIKEYRGKIEAELSNICDGILKLLDSHLVPSSTAAESKVFYLKMKGDYHRYLAEFKTGAERKESAESTMVAYKAAQDIALAELAPTHPIRLGLALNFSVFYYEILNSPDKACNLAKQAFDEAISELDTLGEESX

SEQ ID NO: 14454 - protein, 155 aa, Triticum aestivum
  unsure (1)..(155): unsure at all Xaa locations
XGIRHEGYLAEFASGDKRKTAATAAHEAYKSATDVAQTELTPTHPIRLGLALNFSVFYYEILNSPDRACHLAKQAFDDAIAELDSLSEESYRDSTLIMQLLRDNLTLWTSSDGNEPEPAAASDAPKAEESKTAESVEEPKAEASXRDRSSITKST

SEQ ID NO: 14455 - protein, 192 aa, Triticum aestivum
  unsure (1)..(192): unsure at all Xaa locations
MSTAEATLEENANMANLLNQAKRYEEMCEMMEKAVKTANVVELTADERILLSVAYKNAIGAPRASCTIISSIEQNEETRANEVYVASIKEYRTTIETELSMICDGILNLMDSHLALSDTATESMVFYLKTNGDYHRYLAEFMAGAKRKETLXNTPVAYKTSHYDALVDLTTTHSIRLGLALNFSVIYYEILN

SEQ ID NO: 14456 - protein, 216 aa, Triticum aestivum
  unsure (1)..(216): unsure at all Xaa locations
MAQPAKLSREENVYMAKLAEQAERYEEMVEFMEKVAKTGDSEELTVEERNLLSVAYKNVIGARRASWRIISSIEQKEESRGNEDRVTLIKDYRGKIEVELTKDLXXILXLLDXHLXPSSTXPXSKVXXLXXKGEYYXYLAELXXGTERRXSXETPWAIQTXQKCLXXXIPPLNYRVGGDSTXXVXYXNXIXXPXXNFQXXFXRXXELAFXXGXXXX

SEQ ID NO: 14457 - protein, 122 aa, Triticum aestivum
  unsure (1)..(122): unsure at all Xaa locations
XTLIKDYRGKIETELTKICDGILKLLESHLVPSSTAPESKVFYLKMKGDYYRYLAEFKTGAERKDAAENTMVAYKAAQDIALAELAPTHPIRLGLALNFSVFYYEILNSPDRACSLAKQAFX

SEQ ID NO: 14458 - protein, 115 aa, Triticum aestivum
  unsure (1)..(115): unsure at all Xaa locations
MSSPREENVYLAKLAEQAERYEEMVEFMEKVAKTVDSEELTVEERNLLSVAYKNVIGARRASWRIISSIEQKEESRXNEDHVAIIKDYRGKIETELSKICDGILNLLDSHLVPAX

SEQ ID NO: 14459 - protein, 108 aa, Triticum aestivum
  unsure (1)..(108): unsure at all Xaa locations
MAQPAELSREENVYMAKLAEQAERYEEMVEFMEKVAKTIDSEELTVEERNLLSVAYKNVIGARRASWRIISSIEQKEESRGNEDRVTLIKDYRGKIEVELTKICDGIX

SEQ ID NO: 14460 - protein, 147 aa, Triticum aestivum
  unsure (1)..(147): unsure at all Xaa locations
XVRTADVXELTVDERNLLSVAYENVIGARRASLTIILCIELNEESRWIXAYVASIKEFRPRIETELIMICDGILKLLXDSHLDPSATATESKASYLEMKGDYHRYLAGVKSGAERKEAAVNTLXVAYKSAHDIXASLDLPTTHPIRV

SEQ ID NO: 14461 - protein, 206 aa, Triticum aestivum
  unsure (1)..(206): unsure at all Xaa locations
XPEKELSVXEERNLLSVAYKXNGMRARRAYLRIIFSMEQKXEGGGTDAHADTMRYYRRSTRPDYATICSGILALXVDSHLGPSDGAAGFKVLYXLKMKGDYHRVXLAELKIREERKEAGLSTMNAXKLARISDLGDLVTTXHRIRLGLARQLLLCYYSSSNSNVRACNLAKQASADAIIXSMNSLIARESYIDSTVIMQVLRDNMX

SEQ ID NO: 14462 - protein, 153 aa, Triticum aestivum
  unsure (1)..(153): unsure at all Xaa locations
ERKEPPQSPMNAYKTAQDFPLVDLAPTPPLRVGLALNFFVFYYEILNSPARACTLAKQAFFGVLSKLASLGGESSKARPFFMRLLGANLPFWPSPPHEDAVFXIKEAPAPKKFGAGQWGELKYPFVPCWGQWKSVLVLGLKLLSPPPLFYYAL

SEQ ID NO: 14463 - protein, 104 aa, Triticum aestivum
  unsure (1)..(104): unsure at all Xaa locations
SEELTVGERSLISGGYKNVNGDSRASRRIMSSIEETEERPGIHDRVRLIKEEHRKIXTELNRICDSIINLLETHLIPSSTAPESTVPYRSMGDDYYSYRAQFMX

SEQ ID NO: 14464 - protein, 111 aa, Triticum aestivum
  unsure (1)..(111): unsure at all Xaa locations
MAHEDADYPAKLAEPAARNDQMAENMNIATAEDRDLTGXERNTLSGGNKNAIGASRASCFTVPPTHQNEASKANSTPVTLIKEHRPRIEAELAKICEEILEALDPHPIPSX

SEQ ID NO: 14465 - protein, 67 aa, Triticum aestivum
  unsure (1)..(67): unsure at all Xaa locations
XACNLAKQAFDEAISELDSLGEESYKDSSLIMQLLRGNLTLWTSGTNXDAVNXIKEAPGPKESGKGQ

SEQ ID NO: 14466 - protein, 62 aa, Triticum aestivum
  unsure (1)..(62): unsure at all Xaa locations
XKAAQXIAXVXLAPTHPIRLGLELNFSVFYYEILNSPDRACNLAKQAVVXCFSFLLHLFQXS

SEQ ID NO: 14467 - protein, 81 aa, Triticum aestivum
  unsure (1)..(81): unsure at all Xaa locations
MSTAVQTLYXSVYMAKLAEQAXRYEEMVEFMERVANATVGARPGXELXLQERIRLFLADKNFIRARGSSWKIIFSILHMVX

SEQ ID NO: 14468 - protein, 233 aa, Zea mays
  unsure (1)..(233): unsure at all Xaa locations
MGYEDSVYLAKLAEQAERYEEMVENMKAVASADQELSVEERNLLSVAYKNVIGARRASWRIVTSIEQKEESKGNEAQVGLIKEYRQKIEAELAKICEDILECLDGHLIPSAESGESKVFYHKMKGDYHRYLAEFAVGDKRKTSADKSLEAYKAATEVAASSLAPTHPIRLGLALNFSVFYYEILNSPDQACQXGQQAFDDAIAELDTLSEESYKDSTLIMQLLRDNLTLWTSX

SEQ ID NO: 14469 - protein, 256 aa, Zea mays
MSREENVYMAKLAEQAERYEEMVEYMEKVAKTVDVEELTVEERNLLSVAYKNVIGARRASWRIVSSIEQKEESRKNEEHVNLIKEYRGKIEAELSNICDGILKLLDSHLVPSSTAAESKVFYLKMKGDYHRYLAEFKTGAERKESAESTMVAYKAAQDIALAELAPTHPIRLGLALNFSVFYYEILNSPDKACNLAKQAFDEAISELDSLGEESYKDSTLIMQLLRDNLTLWTSDLTEDGADEGKDAQKGDAGEGQ

SEQ ID NO: 14470 - protein, 256 aa, Zea mays
MSREENVYMAKLAEQAERYEEMVEYMEKVAKTVDVEELTVEERNLLSVAYKNVIGARRASWRIVSSIEQKEESRKNEEHVNLIKEYRGKIEAELSNICDGILKLLDSHLVPSSTAAESKVFYLKMKGDYHRYLAEFKTGPERKESAESTMMAYKAAQDIALAELAPTHPIRLGLALNFSVFYYEILNSPDKACNLAKQAFDEAISQLDTLGEESYKDSTLIMQLLRDNLTLWTSDLTEDGADEGKEAPKGEAGDGQ

SEQ ID NO: 14471 - protein, 256 aa, Zea mays
MAREENVYMAKLAEQAERYEEMVEYMEKVAKTVDVEELTVEERNLLSVAYKNVIGARRASWRIVSSIEQKEESRKNEEHVNLIKEYRAKIEAELSNICDGILKLLDSHLVPSSTAAESKVFYLKMKGDYHRYLAEFKTGPERKESAESTMMAYKAAQDIALAELAPTHPIRLGLALNFSVFYYEILNSPDKACNLAKQAFDEAISQLDTLGEESYKDSTLIMQLLRDNLTLWTSDLTEDGADEGKEAPKGEAGDGQ

SEQ ID NO: 14472 - protein, 256 aa, Zea mays; identical to SEQ ID NO: 14471

SEQ ID NO: 14473 - protein, 256 aa, Zea mays; identical to SEQ ID NO: 14471

SEQ ID NO: 14474 - protein, 232 aa, Zea mays
  unsure (1)..(232): unsure at all Xaa locations
MGHEDAVYLAKLAEQAERYEEMVENMKIVAGEDRDLTVEERNLLSVAYKNVIGARRASWRIVTSIEQKEESKGNSSQVTLIKEYRQKIEAELAKICEDILEVLDQHLIPSAKSGESKVFYHKMKGDYHRYLAEFAIGDRRKDSADKSLEAYKAATEVPXTKLPPTHPXIRLGLALNFSVFYYEILDAPXPACHLAKQAFDDAIAELDTLSEESYKDSTLIMQLLRDHLTLWX

SEQ ID NO: 14475 - protein, 256 aa, Zea mays
MSREENVYMAKLAEQAERYEEMVEYMEKVAKTVDVEELTVEERNLLSVAYKNVIGARRASWRIVSSIEQKEESRKNEEHVNLIKEYRGKIEAELSNICDGILKLLDSHLVPSSTAAESKVFYLKMKGDYHRYLAEFKTGAERKESAESTMVAYKAAQDIALAELAPTHPIRLGLALNFSVFYYEILNSPDKACNLAKQAFDEAISELDSLGEESYKDSTLIMQLLRDNLTLWTSDLTEDGADEGKDAPKGDAGEGQ

SEQ ID NO: 14476 - protein, 256 aa, Zea mays
MSREENVYMAKLAEQAERYEEMVEYMEKVAKTVDVEELTVEERNLLSVAYKNVIGARRASWRIVSSIEQKEESRKNEEHVNLIKEYRGKIEAELSNICDGILKLLDSHLVPSSTAAELKVFYLKMKGDYHRYLAEFKTGAERKESAESTMVAYKAAQDIALAELAPTHPIRLGLALNFSVFYYEILNSPDKACNLAKQAFDEAISELDSLGEESYKDSTLIMQLLRDNLTLWTSDLTEDGADEGKDAPKGDAGEGQ

SEQ ID NO: 14477 - protein, 261 aa, Zea mays
MASAELSREENVYMAKLAEQAERYEEMVEFMEKVAKTVDSEELTVEERNLLSVAYKNVIGARRASWRIISSIEQKEEGRGNEDRVTLIKDYRGKIETELTKICDGILKLLESHLVPSSTAPESKVFYLKMKGDYYRYLAEFKTGAERKDAAENTMVAYKAAQDIALAELAPTHPIRLGLALNFSVFYYEILNSPDRACSLAKQAFDEAISELDTLSEESYKDSTLIMQLLRDNLTLWTSDISEDPAEEIREAPKHDSSEGQ

SEQ ID NO: 14478 - protein, 261 aa, Zea mays; identical to SEQ ID NO: 14477

SEQ ID NO: 14479 - protein, 266 aa, Zea mays
MSPSEPTREESVYMAKLAEQAERYEEMVEFMERVARSAGGAGGGEELSVEERNLLSVAYKNVIGARRASWRIISSIEQKEEGRGNEAHAASIRAYRSKIETELARICDGILALLDSHLVPSAGGAESKVFYLKMKGDYHRYLAEFKSGAERKDAAESTMNAYKAAQDIALADLAPTHPIRLGLALNFSVFYYEILNSPDRACNLAKQAFDEAISELDSLGEESYKDSTLIMQLLRDNLTLWTSDTNEDGGDEIKDAAAPKESAEGQ

SEQ ID NO: 14480 - protein, 236 aa, Zea mays
  unsure (1)..(236): unsure at all Xaa locations
MATERESKTFLARLCEQAERYDEMVTYMKEVAKIGGELTVDERNLLSVAYKNVVGTRRASWRIISSIEQKEEAKGTDKHVGIIREYRQKIELELEKVCEDVLSVLDESLIPKAETGESKVFYHKMKGDYHRYLAEFASGDKRKSAATAAHDAYKNATDVAQTELTPTHPIRLGLALNFSVFYYEILNSPDRACHLAKQAFDDAIAELDSLSEESYRDSTLIMQLLRDXLTLWTSSD

SEQ ID NO: 14481 - protein, 266 aa, Zea mays; identical to SEQ ID NO: 14479

SEQ ID NO: 14482 - protein, 266 aa, Zea mays; identical to SEQ ID NO: 14479

SEQ ID NO: 14483 - protein, 266 aa, Zea mays
MSPSEPTREESVYMAKLAEQAERYEEMVEFMERVARSAGGAGGGEELSVEERNLLSVAYKNVIGARRASWRIISSIEQKEEGRGNEAHAASIRTYRSKIETELARICDGILALLDSHLVPSAGGAESKVFYLKMKGDYHRYLAEFKSGAERKDAAESTMNAYKAAQDIALADLAPTHPIRLGLALNFSVFYYEILNSPDRACNLAKQAFDEAISELDSLGEESYKDSTLIMQLLRDNLTLWTSDTNEDGGDEIKDAAAPKESAEGQ

SEQ ID NO: 14484 - protein, 322 aa, Zea mays
  unsure (1)..(322): unsure at all Xaa locations
LEAGRDHSIRSSPTTPFLRGPSPGAAPRQEEVCSFNNMSREENVYMAKLAEQAERYEEMVEYMEKVAKTVDVEELTVEERNLLSVAYKNVIGARRASWRIVSSIEQKEESRKNEEHVNLIKEYRGKIEAELSNICDGILKLLDSHLVPSSTAAESKVFYLKMKGDYHRYLAEFKTGAERKESAESTMVAYKAAQDIALAELAPTHPIRLGLALNFSVFYYEILNSPDKACNXLAKQAFDEAISELDSLGEESYKDSTLIMQLLRDNLTLWTSDLTEDGADEGKDAPKGVQARDSNLRRGVQSCSSPNVLDALCCRSCAVLLL

SEQ ID NO: 14485 - protein, 268 aa, Zea mays
MSPSEPTREESVYMAKLAEQAERYEEMVEFMERVARSPGGAGGGEELSVEERNLLSVAYKNVIGARRASWRIISSIEQKEEGRGNEAHAASIRAYRSKIEAELARICDGILALLDSHLVPSAGGAESKVFYLKMKGDYHRYLAEFKSGAERKDAAESTMNAYKAAQDIALADLAPTHPIRLGLALNFSVFYYEILNSPDRACNLAKQAFDEAISELDSLGEESYKDSTLIMQLLRDNLTLWTSDTNEDGGDEIKEAAAAPKESAPEGQ

SEQ ID NO: 14486 - protein, 273 aa, Zea mays
  unsure (1)..(273): unsure at all Xaa locations
MTETREINVFMAKLAEQAERYDEMVEAMKNVADLGQELTVEERNLLSVAYKNVIGARRASWRIITSIEQKEESKGNTAHVERIKEYRKKVENEVSKICADVLGTLDNKLIPNAQTTESKVFYYKMKGDYHRYLAEFATSEARKEAADNSLAAYKSATDIANSELAPTHPIRLGLALNASVFYYEIMGSPKQACELARKAFDDAIAELDQLNEESYKDSTLIMQLLRDNLTLWTSDLEXXDKADAEPEAANXESSFPHTTLCINTSIFIYKKKK

SEQ ID NO: 14487 - protein, 268 aa, Zea mays
MSPSEPTREESVYMAKLAEQAERYEEMVEFMERVARYAGGAGGGEELSVEERNLLSVAYKNVIGARRASWRIISSIEQKEEGRGNEAHAASIRAYRSKIEAELARICDGILALLDSHLVPSAGGAESKVFYLKMKGDYHRYLAEFKSGAERKDAAESTMNAYKAAQDIALADLAPTHPIRLGLALNFSVFYYEILNSPDRACNLAKQAFDEAISELDSLGEESYKDSTLIMQLLRDNLTLWTSDTNEDGGDEIKEAAAAPKESAPEGQ

SEQ ID NO: 14488 - protein, 261 aa, Zea mays
MASAELSREENVYMAKLAEQAERYEEMVEFMEKVAKTVDSEELTVEERNLLSVAYKNVIGARRASWRIISSIEQKEEGRGNEDRVTLIKDYRGKIETELTKICDGILKLLESHLVPSSTAPESKVFYLKMKGDYYRYLAEFKTGAERKDAAENTMVAYKAAQDIALAELAPTHPIRLGLALNFSVFYYEILNSPDRACSLAKQAFDEAISELDTLSEESYKDSTLIMQLLHDNLTLWTSDISEDPAEEIREAPKHDLSEGQ

SEQ ID NO: 14489 - protein, 267 aa, Zea mays
  unsure (1)..(267): unsure at all Xaa locations
MSPSEPTREESVYMAKLAEQAERYEEMVEFMERVARSAGGAGGGXEELSVEERNLLSVAYKNVIGARRASWRIISSIEQKEEGRGNEAHAASIRAYRSKIETELARICDGILALLDSHLVPSAGGAESKVFYLKMKGDYHRYLAEFKSGAERKDAAESTMNAYKAAQDIALADLAPTHPIRLGLALNFSVFYYEILNSPDRACNLAKQAFDEAISELDSLGEESYKDSTLIMQLLRDNLTLWTSDTNEDGGDEIKDAAAPKESAEGQ

SEQ ID NO: 14490 - protein, 263 aa, Zea mays
MSREENVYMAKLAEQAERYEEMVEYMEKVAKTVDVEELTVEERNLLSVAYKNVIGARRASWRIVSSIEQKEESRKNEEHVNLIKEYRGKIEAELSNSGSRENTICDGILKLLDSHLVPSSTAAESKVFYLKMKGDYHRYLAEFKTGAERKESAESTMVAYKAAQDIALAELAPTHPIRLGLALNFSVFYYEILNSPDKACNLAKQAFDEAISELDSLGEESYKDSTLIMQLLRDNLTLWTSDLTEDGADEGKDAPKGDAGEGQ

SEQ ID NO: 14491 - protein, 261 aa, Zea mays
MASAELSREENVYMAKLAEQAERYEEMVEFMEKVAKTVDSEELTVEERNLLSVAYKNVIGARRASWRIISSIEQKEEGRGNEDRVTLIKDYCGKIETELTKICDGILKLLESHLVPSSTAPESKVFYLKMKGDYYRYLAEFKTGAERKDAAENTMVAYKAAQDIALAELAPTHPIRLGLALNFSVFYYEILNSPDRACSLAKQAFDEAISELDTLSEESYKDSTLIMQLLRDNLTLWTSDISEDPAEEIREAPKHDSSEGQ

SEQ ID NO: 14492 - protein, 261 aa, Zea mays
MASAELSREENVYMAKLAEQAERYEEMVEFMEKVAKTVDSEELTVEERNLLSVAYKNVIGARRASWRIISSIEQKEEGRGNEDRVTLIKDYRGKIETELTKICDGILKLLETHLVPSSTAPESKVFYLKMKGDYYRYLAEFKTGAERKDAAENTMVAYKAAQDIALAELAPTHPIRLGLALNFSVFYYEILNSPDRACSLAKQAFDEAISELDTLSEESYKDSTLIMQLLRDNLTLWTSDISEDPAEEIREAPKRDSSEGQ

SEQ ID NO: 14493 - protein, 261 aa, Zea mays; identical to SEQ ID NO: 14492

SEQ ID NO: 14494 - protein, 261 aa, Zea mays; identical to SEQ ID NO: 14492

SEQ ID NO: 14495 - protein, 261 aa, Zea mays; identical to SEQ ID NO: 14492

SEQ ID NO: 14496 - protein, 261 aa, Zea mays; identical to SEQ ID NO: 14492

SEQ ID NO: 14497 - protein, 316 aa, Zea mays
MIMMPSETRRFRSTGSSAPPTTVRPSVLPATPIRRPVPSHHTLPPLAAMSPSEPTREESVYMAKLAEQAERYEEMVEFMERVARSAGGAGGGDELSVEERNLLSVAYKNVIGARRASWRIISSIEQKEEGRGNEAHAASIRAYRSKIEAELARICDGILALLDSHLVPSAGGAESKVFYLKMKGDYHRYLAEFKSGAERKDAAESTMNAYKAAQDIAVADLAPTHPIRLGLALNFSVFYYEILNSPDRACNLAKQAFDEAISELDSLGEESYKDSTLIMQLLRDNLTLWTSDTNEDAGDEIKEAAAAPKESAPEGQ

SEQ ID NO: 14498 - protein, 268 aa, Zea mays
MSPSEPTREESVYMAKLAEQAERYEEMVEFMERVARYAGGAGGGDELSVEERNLLSVAYKNVIGARRASWRIISSIEQKEEGRGNEAHAASIRAYRSKIEAELARICDGILALLDSHLVPSAGGAESKVFYLKMKGDYHRYLAEFKSGAERKDAAESTMNAYKAAQDIALADLAPTHPIRLGLALNFSVFYYEILNSPDRACNLAKQAFDEAISELDSLGEESYKDSTLIMQLLRDNLTLWTSDTNEDAGDEIKEAAAAPKESAPEGQ

SEQ ID NO: 14499 - protein, 262 aa, Zea mays
  unsure (1)..(262): unsure at all Xaa locations
MASAELSREENVYMAKLAEQAERYEEMVEFMEKVAKTVDSEELTVEERNLLSVAYKNVIGARRASWRIISSIEQKEEGRGNEDRVTLIKDYRGKIETELTKICDGILKLLETHLVPSSTAPESKVFYLKMKGDYYRYLAEFKTGAERKDAAENTMVAYKAAQDIALAELAPTHPIRLGLALNFSVFYYEILNSPDRACSLAKQAFXDEAISELDTLSEESYKDSTLIMQLLRDNLTLWTSDISEDPAEEIREAPKRDSSEGQ

SEQ ID NO: 14500 - protein, 264 aa, Zea mays
  unsure (1)..(264): unsure at all Xaa locations
MASAELSREENVYMAKLAEQAERYEEMVEFMEKVAKTVDSEELTVEERNLLSVAYKNVIGARRASWRIISSIEQKEEGRGNEDRVTLIKDYRGKIETELTKICDGILKLLESHLVPSSTAPESKVFYLKMKGDYYRYLAEFKTGAERKDAAENTMVAYKAAQDIALAELAPTHPIRLGLALNFSVFYYEILNSPDRAGSLAKQXAFDEAISELDTLSEESYKDSTLIMQLLRDNLTLWXTSDISEDPXAEEIREAPKHDSSEGQ

SEQ ID NO: 14501 - protein, 240 aa, Zea mays
MSTAEATREENVYMAKLAEQAERYEEMVEFMEKVAKTADVGELTVEERNLLSVAYKNVIGARRASWRIISSIEQKEESRGNEAYVASIKEYRTRIETELSKICDGILKLLDSHLVPSATAAESKVFYLKMKGDYHRYLAEFKAGAERKEAAENTLVAYKSAQDIALADLPTTHPIRLGLALNFSVFYYEILNSPDRACNLAKQAFDEAIAELDSLGEESYKDSTLIMQLLRDNLTLWTLI

SEQ ID NO: 14502 - protein, 248 aa, Zea mays
MAKLAEQAERYEEMVEFMEKVAKTVDSEELTVEERNLLSVAYKNVIGARRASWRIISSIEQKEEGRGNEDRVTLIKDYRGKIETELTKICDGILKLLESHLVPSSTAPESKVFYLKMKGDYYRYLAEFKTGAERKDAAENTMVAYKAAQDIALAELAPTHPIRLGLALNFSVFYYEILNSPDRACSLAKQAFDEAISELDTLSEESYKDSTLIMQLLHDNLTLWTSDISEDPAEEIREAPKHDLSEGQ

SEQ ID NO: 14503 - protein, 278 aa, Zea mays
MYICRSGVLQILKLNCKMASAELSREENVYMAKLAEQAERYEEMVEFMEKVAKTVDSEELTVEERNLLSVAYKNVIGARRASWRIISSIEQKEEGRGNEDRVTLIKDYRGKIETELTKICDGILQLLETLLVPSSTGPELKVFYLEMNGDYYRYLAEFKTGAERKDAAENTMVAYKAAQDIALAELAPTHPIRLGLALNFSVFYYEILNSPDRACSLAKQAFDEAISELDTLSEESYKDSTLIMQLLRDNLTLWTSDISEDPAEEIREAPKRDSSEGQ

SEQ ID NO: 14504 - protein, 274 aa, Zea mays
  unsure (1)..(274): unsure at all Xaa locations
MSPSEPTREESVYMAKLAEQAERYEEMVEFMERVARYRRGAPXGGEELSVEERNLLSVAYKNVIGARRASWRIISSIEQKEEGRGNEAHAASIRAXYRSKIEAELARICDGILALLDSHLVPSAXAGAESKVFYLKMKGDYHRYLAEFKSGAERKDAXAESTMNAYKAAQDIALADLAPTHPIRLGXLALNFSVFYYEILNSPDRACNLAKQAFDEAISELDSLGEESXYKDSTLIMQLLRDNLTLWTSDTNEDGGDEIKEAAAAPKESAPEGQ

SEQ ID NO: 14505 - protein, 324 aa, Zea mays
  unsure (1)..(324): unsure at all Xaa locations
YRHPAPRWPRPGTPRPRAHHPRLRARARARATHIVIETTRVLRGPRPCTISPRIPESVFFLLLQYLYSLINMSREENVYMAKLAEQAERYEEMVEYMEKVAKTTDVQELTVEERNLLSVAFKNVIAAPRASWRIISSIEQKEESRKNEEHVAQIKEYRGKIEAELSNICDGILKLLDTHLVPSSTATESKVFYLKMKGDYHRYLAEFKTGAERKESAESTMVAYKAAQDIALAELPPIHPIRLGLALNFSVFYYEIQNSPDKACNLAKEXAFDEAISQLDMLGEDSYKDSNLIMQLLRDNLTLWTEDGIEEGLESSKGDAGEGQ

SEQ ID NO: 14506 - protein, 246 aa, Zea mays
  unsure (1)..(246): unsure at all Xaa locations
MASAELSREENVYMAKLAEQAERYEEMVEFMEKVAKTVDSEELTVEERNLLSVAYKNVIGARRASWRIISSIEQKEEGRGNEDRVTLIKDYRGKIETELTKICDGILKLLETHLVPSSTAPESKVFYLKMKGDYYRYLAEFKTGAERKDAAENTMVGYKAAQDIALGELAPTHPIRLGLGLNFSVCYYEILNSPDRACGLAKQAFDEAISELGTLSEECYKDSTLIMRLLRDNLTLWASDICEDPX

SEQ ID NO: 14507 - protein, 259 aa, Zea mays
  unsure (1)..(259): unsure at all Xaa locations
MSREDNVYMAKLAEQAERYEEMVEYMEKVAKTVDVEELTVEERNLLSVAYKNVIGAXRRASWRIISSIEHKEESRKNEEHVIQIKEYRGKIEAELSNICDGILKLIDSHLVPSSTAAESKVFYLKMKGDYHRYLAEFKTGAERKEAAESTMIAYKAAQDIGVAELASTHPIRLGLALNFSVFYYEILNSPDKACNLARAAFDEAISQLDTLGEDSYKDSTLIMQLXLRDNLTLWTADSTTEDGIEEGNEASKGDAGEGQ

SEQ ID NO: 14508 - protein, 259 aa, Zea mays
MAAAAAAAGTREEMVYMAKLAEQAERYEEMVEFMEKVAAAAELTVEERNLLSVAYKNVIGARRASWRIVSSIEHKEETRGAAGHAAAARGYRARVEAELSGICAGILRLLDERLVPAAAAVDARVFYLKMKGDYHRYLAEFKTGAERKDAADSTLAAYQAAQDIAVKELPPTHPIRLGLALNFSVFYYEILSSPDRACSLAKQAFDEAISELDSLGEESYKDSTLIMQLLRDNLTLWTSDMQEDGGDEMRDANKPDEEQ

SEQ ID NO: 14509 - protein, 264 aa, Zea mays
  unsure (1)..(264): unsure at all Xaa locations
TVDGSAELSREENVYMAKLPEHAERYXEMVDFMETVAKTDDSEELTVHERNLLSAAYRNVIGARRALWRMIYSIEQNEDGRGSEDRVTLIQXDYRGKIETELTMICDGILKLLETHLVPSSTAPESKVFYLKMKGDYYRYLAEFKTGAERKDAAENTMVAYKAAQDIALAELAPTHPIRLGLALNFSVFYYEILNSPDRACSLAKQAFDEAISELDTLSEESYKDSTLIMQLLRDNLTLWTSDISEDPAEEIREAPKRDSSEGQ

SEQ ID NO: 14510 - protein, 232 aa, Zea mays
  unsure (1)..(232): unsure at all Xaa locations
MAQPAELSREENVYMAKLAEQAERYEEMVEFMEKVAKTVDSEELTVEERNLLSVAYKNVIGARRASWRIISSIEQKEESRGNEDRVTLIKDYRGKIEVELTKICDGILKLLDSHLVPSSTAPESKVFYLKMKGDYYRYLAEFKSGTERKDAAENTMVAYKAAQEIALKELPPTHPIRLXLALNFSVFYYEILNSPDRACDLAKQAFDEPISELDSLSEESYQDSTLIXQLLX

SEQ ID NO: 14511 - protein, 237 aa, Zea mays
  unsure (1)..(237): unsure at all Xaa locations
XMVEYMEKVAKTVDVEELTVEERNLLSVAYKNVIGARRASWRIVSSIEQKEESRKNEEHVNLIKEYRGKIEAELSNICDGILKLLDSHLVPSSTAAESKVFYLKMKGDYHRYLAEFKTGAERKESAESTMVAYKXAAQDIALAELAPTHPIRLGLALNFSVFYYEILNSPDKACNLAKQAFDEAISELDSLGEESYKDSTLIMQLLRDNLTLWTSDLTEDGADEGKDAPKGDAGEGQ

SEQ ID NO: 14512 - protein, 328 aa, Zea mays
  unsure (1)..(328): unsure at all Xaa locations
MGDLLGSPRVAFHHSIRTFPDHTVPPRSEPRSSPAPGGKFVLFNNMSRXEENVYMAKLAEQAERYEEMVSIMEKVAKTVDVEELTVEERNLLSVAYKNVIGARRASWRIVSSIEQKEESRKNEEHVNLIKEYRGKIEAELSNSGSRENNICDGILKLLDSHLVPSSTAAESKVFYLKMKGDYHRYLAEFKTGAERKESAESTMVAYKAAQDIALAELAPSHPDRLGLAPNFSVFYYEILNSPDKACNPGKXRAFDEAISELDTLVRESYKDSTLIMQLXLRDNLTLWDTTLTEXDGADEXAKMPPKGDAGRGTVIFGGGCKVVRAPMF

SEQ ID NO: 14513 - protein, 275 aa, Zea mays
  unsure (1)..(275): unsure at all Xaa locations
MSPSEPTREESVYMAKLAEQAERYEEMVEFMERVARSAGGAGGGEELSVEERNLLSXVAYKNVIGARRASXWRIISSIEQKEEGXRGNEAHAASIRAYRSKIETELAXRICDGILALLDSHLVPSAGXGAESKVFYLKMKGDXYHRYLAEFKSGAERKDAAESTMNAYKAAQDIXALADLAPTHPIRXLGLALNFSVFYYEILNSPDRACNLAKQAFDEAISELDSPGERAYRDSTLIMQLXLRDNLTLWTSDTNEDGGDEIKDAAAPKESAEGQ

SEQ ID NO: 14514 - protein, 234 aa, Zea mays
  unsure (1)..(234): unsure at all Xaa locations
MTAPAELSREENVYMAKLAEQAERYEEMVEFMEKVAKTVDSEELTVEERNLLSVAYKNVIGARRAPWRIISSIEQKEESRGNEDRVTLIKEYRGKIETELSKICDGILKLLETHLVPSSTAPESKVFYLKMKGDYYRYLAEFKSGPERKDAAENTMVAYKAAQDIALAELAPTHPIRLGLAXNFSVFYYEILNSPDRACNLAKQAFDEXIXSELDTLSEKIYQDSTLIMQLLHD

SEQ ID NO: 14515 - protein, 264 aa, Zea mays
  unsure (1)..(264): unsure at all Xaa locations
SLNICARDENVYMDKVAEQAEQDEEMAEYMPEXAAKTAHVQHLTXAQDRNLLSXAAYKNVTAARRASWRIASXSIEPQEEPRTNEEHVNLIKEYRGKIEAELSNICDGILKLLDSHLVPSSTAAESKVFYLKMKGDYHRYLAEFKTGAERKESAESTMVAYKAAQDIALAELAPTHPIRLGLALNFSVFYYEILNSPDKACNLAKQAFDEAISELDSLGEESYKDSTLIMQLLRDNLTLWTSDLTEDGADEGKDAPKGDAGEGQ

SEQ ID NO: 14516 - protein, 248 aa, Zea mays
  unsure (1)..(248): unsure at all Xaa locations
DAWATTPFLRAQEQPRARRKFVLLTNVEGGECLHGQVGXAGXKNVIGARRASWRIVSSIEQKEESRKNEEHVNLIKEYRGKIEAELSNICDGILKLLDSHLVPSSTAAESKVFYLKMKGDYHRYLAEFKTGAERKESAESTMVAYKAAQDIALAELAPTHPIRLGLALNFSVFYYEILNSPDKACNLAKQAFDEAISELDSLGEESYKDSTLIMQLLRDNLTLWTSDLTEDGADEGKDAQKGDAGEGQ

SEQ ID NO: 14517 - protein, 254 aa, Zea mays
  unsure (1)..(254): unsure at all Xaa locations
GRDSIRSSPTTPFLRAQEQPRARRKFVLLTNVEGGECLHGQVGXAGXKNVIGARRASWRIVSSIEQKEESRKNEEHVNLIKEYRGKIEAELSNICDGILKLLDSHLVPSSTAAESKVFYLKMKGDYHRYLAEFKTGXAERKESAESPMVAYKAAQDIALAELAPTHPIRLGLALNFSVFYYEILNSPDKACNLAKQAFDEAISELDSLGEESYKDSTLIMQLLRDNLTLWTSDLTEDGADEGKDAPKGDAGEGQ

SEQ ID NO: 14518 - protein, 220 aa, Zea mays
MAAAAAGTREEMVYMAKLAEQAERYEEMVEFMEKVAAAAELTVEERNLLSVAYKNVIGARRASWRIVSSIEHKEETRGAAAVDARVFYLKMKGDYHRYLAEFKTGAERKDAADSTLAAYQAAQDIAVKELPPTHPIRLGLALNFSVFYYEILSSPDRACSLAKQAFDEAISELDSLGEESYKDSTLIMQLLRDNLTLWTSDMQEDGGDEMRDANKPDEEQ

SEQ ID NO: 14519 - protein, 215 aa, Zea mays
  unsure (1)..(215): unsure at all Xaa locations
MSREDNVYMAKLAEQAERYEEMVEYMEKVAKTVDVEELTVEERNLLSVAYKNVIGARRASWRIISSIEHKEESQSKVFYLKMKGDYHRYLAEFKTGAERKEAAESTMIAYKAAQDIALAELASTHPIRLGLALNFSVFYYEILNSPDKACNLAKQAFDEAISELDTLGEESYKDSTLIMQLLRDNLTLWTSDITEEGIEEGKEASKGDAEXPGKP

SEQ ID NO: 14520 - protein, 365 aa, Zea mays
  unsure (1)..(365): unsure at all Xaa locations
EAGRGHRPYPQLPRARDQPRARSNLALLSICSTDENVYMAQLSDQAERYEEMIQYLHNQPETXCVKDLHVLQQNLIPMAHTTIAGVARCSHRQHXVIFXLEQQQESRTNQQHVHLITEYPAQIEAELRNICAGILKLLDSHLEPSSTAAESXLFYLKMKGDYHRYLAEFKTGPERKESADSTMMAYNAAQDIALAELAPTHPIRLGLALNFSVFYYEILNSPDKACNLAKQAFDEAISQLDTLGEESYKDSTLIMQLLRDNLTLWTSDLTEDGADEGKEAPKGEGCDGQXGDSNLGRAHIVRAHCFRCSMLSKAELCRAIIVADFLFPHFFFYISRLVVFELVPHCFVLPLVGIKSVWTGIIHWI

SEQ ID NO: 14521 - protein, 215 aa, Zea mays
  unsure (1)..(215): unsure at all Xaa locations
MSREDNVYMAKLAEQAERYEEMVEYMEKVAKTVDVEELTVEERNLLSVAYKNVIGARRASWRIISSIEHKEESQSKVFYLKMKGDYHRYLAEFKTGAERKEAAESTMIAYKAAQDIALAELASTHPIRLGLALNFSVFYYEILNSPDKACNLARQAFDEAISQLDTLGEDSYKDSTLIMQLLRDNLTLWTADSTTEDGIEEGNEASKGXDAGEGQ

SEQ ID NO: 14522 - protein, 222 aa, Zea mays
  unsure (1)..(222): unsure at all Xaa locations
MSPAEPTRDESVYMAKLAEQAERYEEMVEFMERVAKATGXXQKEEGRGNDAHAATIRSYRSKIEAELAKICDGILALLDSHLVPSAGAAESKVFYLKMKGDYHRYLAEFKSGGERKEAAESTMNAYKAAQDIALADLAPTHPIRLGLALNFSVFYYEILNSPDRACNLAKQAFDEAISELDSLGEESYKDSTLIMQLLRDNLTLWTSDTNEDDVDEIKEAPX

SEQ ID NO: 14523 - protein, 206 aa, Zea mays
  unsure (1)..(206): unsure at all Xaa locations
MSPAEPTRDESVYMAKLAEQAERYEEMVEFMERVAKATGGAGPGEELSVEERNLLSVAYKNVIGARRASWRIISSIEQKEEGRGNDAHAATIRSYRSKIEAELAKICDGILALLDSHLVPSAGAAESKVFYLKMKGDYHRYLAEFKSGGXERKEAAESTMNAYKAAQDIALADLAPTHPIRLGLAFNFSVFYYEILNSPDRACNLX

SEQ ID NO: 14524 - protein, 303 aa, Zea mays
  unsure (1)..(303): unsure at all Xaa locations
SGPKSRKGGAKSRKGQATSTAQHSTSTPSVLGRRGEGNPGPGRVVGRGSAAEEMEEREKLVCLAKLAEQAERYDDMVEFMKNLARMDVDMSAEERHLFSVGFKNTIGAKRASWRIICSHEQKVAAXXRQTGVMIDAYKKKVEEELRKVCNEVLSVIAIHCLPLASTGENIVFFYKMKGDYYRYLAEFSTGTEKKAASDQSLMAYQHAMVVASSELSPAHQIRLGLALNLSVFFYEIMNSHERACQVAKQAFDEALTEINSGEGVYKDSTLMMQLLKDNLALWTSELXXGGEASKGNGDVDMEG

SEQ ID NO: 14525 - protein, 290 aa, Zea mays
  unsure (1)..(290): unsure at all Xaa locations
ARVLPSTAQHSTSTPSVLGRRGEGNPGPGRVVGRGSAAEEMEEREKLVCLAKLAEQAERYDDMVEFMKNLARMDVDMSAEERHLFSVGFKNTIGAKRASWRIICSHEQKVAAXXRQTGVMIDAYKKKVEEELRKVCNEVLSVIAIHCLPLASTGENIVFFYKMKGDYYRYLAEFSTGTEKKAASDQSLMAYQHAMVVASSELSPAHQIRLGLALNLSVFFYEIMNSHERACQVAKQAFDEALTEINSGEGVYKDSTLMMQLLKDNLALWTSELXXGGEASKGNDDVDMEG

SEQ ID NO: 14526 - protein, 389 aa, Zea mays
  unsure (1)..(389): unsure at all Xaa locations
NSARGETEPSGPKSRKGQATSTAQHSTSTPSVLGRRGEGNPGPGRVVGRGSAAEEMEEREKLVCLAKLAEQAERYDDMVEFMKNLARMDVDMSAEERHLFSVGFKNTIGAKRASWRIICSHEQKVAAXXRQTGVMIDAYKKKVEEELRKVCNEVLSVIAIHCLPLASTGENIVFFYKMKGDYYRYLAEFSTGTEKKAASDQSLMAYQHAMVVASSELSPAHQIRLGLALNLSVFFYEIMNSHERACQVAKQAFDEALTEINSGEGVYKDSTIMMQLLKDNLALWTSELXXGGEASKGSXRCGHGGLIHSPCFKETQKARKNIQAVMLANLGPQVFSASELRGALCIFLKFLSVSGFFFEVCLFLSFGHRLVLESVTHYQVFQRSELVSI

SEQ ID NO: 14527 - protein, 222 aa, Zea mays
TFSPRARSKFVLLSILSIWRGRRMSTWPSWLSSRKKEESRKNEEHVNLIKEYRAKIEAELSNICDGILKLLDSHLVPSSTAAESKVFYLKMKGDYHRYLAEFKTGPERKESAESTMMAYKAAQDIALAELAPTHPIRLGLALNFSVFYYEILNSPDKACNLAKQAFDEAISQLDTLGEESYKDSTLIMQLLRDNLTLWTSDLTEDGADEGKEAPKGEAGDGQ

SEQ ID NO: 14528 - protein, 231 aa, Zea mays
TRPRSSPAPETQPRARSKFVLLSILSIWRGRRMSTWPSWLSSRKKEESRKNEEHVNLIKEYRAKIEAELSNICDGILKLLDSHLVPSSTAAESKVFYLKMKGDYHRYLAEFKTGPERKESAESTMMAYKAAQDIALAELAPTHPIRLGLALNFSVFYYEILNSPDKACNLAKQAFDEAISQLDTLGEESYKDSTLIMQLLRDNLTLWTSDLTEDGADEGKEAPKGEAGDGQ

SEQ ID NO: 14529 - protein, 239 aa, Zea mays
  unsure (1)..(239): unsure at all Xaa locations
KKKKKKKRPTASIRSSPAPETQPRARSKFVLLSIWRGRRMSTWPSWLSSRKKEESRKNEEHVNLIKEYRAKIEAELSNICDGILKLLDSHLVPSSTAAESKVFYLKMKGDYHRYLAEFKTGPERKESAESTMMAYKAAQDIALAELAPTHPIRLGLALNFSVFYYEILNSPDKACNLAKQAFDEAISQLDTLGEESYKDSTLIMQLLRDNLTLWTSDLTEXDGADEGKEAPKGEAGDGQ

SEQ ID NO: 14530 - protein, 187 aa, Zea mays
MATERESKTFLARLCEQAERYDEMVTYMKEVAKVAGELTGDERNLLSVAYKNVVGTRRASWRIISSIEQKEESKGTEKHVGTIRDYRQKIETELEQVCQDVLNVLDDSLIPKAESGESKVFYHKMKGDYHRYLAEFASGEKRKVAATAAHEAYKTATDVAQTELTPTHPIRLGLALNFLVFYYEILN

SEQ ID NO: 14531 - protein, 224 aa, Zea mays
  unsure (1)..(224): unsure at all Xaa locations
TFSSLAISIISIKEQTYSWRGGRMSTWPSWLSSRKKEESRKNEEHVNLIKEYRAKIEAELSNICDGILKLLDSHLVPSFTAAESKVFYLKMKGDYHRYLAEFKTGPERKESAESTMMAYKAAQDIALAELAPTHPIRLGLALNFSVFYYEILNSPXDKACTLAKQAFDEAISQLDTXLGEESYKDSTLIMQLLRDNLTLWTSDLTEDGADEGKEAPKGEAGDGQ

SEQ ID NO: 14532 - protein, 187 aa, Zea mays
  unsure (1)..(187): unsure at all Xaa locations
XEESRKTKSXVNLIKEYRGKIEAELSNICDGILKLLDSHLVPSSTAAESKVFYLKMKGDYHRYLAEFKTGAERKESAESTMVAYKAAQDIALAELAPTHPIRLGLALNFSVFYYEILNSPDKACNLAKQAFDEAISELDTLGEESYKDSTLIMQLLRDNLTLWTSDLTEDGADECKEASKGDAGEGQ

SEQ ID NO: 14533 - protein, 191 aa, Zea mays
MASAELSREENVYMAKLAEQAERYEEMVEFMEKVAKTVDSEELTVEERNLLSVAYKNVIGARRASWRIISSIEQNEEGRGNEDRVTLIKDYPGKIETELTKICDGILKLLETHLVPSSTAPESKVFYLKMKGDYYRYLAEFKTGAERKDAAENTMVAYKAAQDLALAELAPTHPIRLGLALNFSVFYYENL

SEQ ID NO: 14534 - protein, 257 aa, Zea mays
  unsure (1)..(257): unsure at all Xaa locations
MSREENXYMAKLAEXAERYXEMVEYXEKVAXTVXVEXLTVEERNPXSXAYKNXXWARRASXRIVSSIEQXEEXRKNEEHVNLIKEYRGKIXAXXSXXCXGILKXPXSHXVPXSXXAESKXFYLKXKGDYHRXLAEFKTCXERKESXXXXTXVAXXAAQDXSLAEPAXTHXIRLGLAXNFSXFYYENXNXPDKACNLAKQXFXEXISXLDSLCEEXXKDSTXIMXLXRDNLTLWTTDLTEDGAEEGKNAXKXEAGEGQ

SEQ ID NO: 14535 - protein, 210 aa, Zea mays
  unsure (1)..(210): unsure at all Xaa locations
SRPAGTASFENXNCKMASAELSREENVYMAKLAEQAERYEEMVEFMEKVAKTVDSEKLLESHLVPSSTAPESKVFYLKMKGDYYRYLAEFKTGAERKDAAENTMVAYKAAQDIALAELAPTHPIRLGLALNFSVFYYEILNSPDRACSLAKQAFDEAISELDTLSEESYKDSTLIMQLLRDNLTLWTSDISEDPAEEIREAPKHDSSEGQ

SEQ ID NO: 14536 - protein, 218 aa, Zea mays
MEEREKLVCLAKLAEQAERYDDMVEFMKNLARMDVDMSAEERHLFSVGFKNTIGAKRASWRIICSHEQKVAADRQTGVMIDAYKKKVEEERRKGDYYRYLAEFSTGTEKKAASDQSLMAYQHAMVVASSELSPAHQIRLGLALNLSVFFYEIMNSHERACQVAKQAFDEALTEINSGEGGYKDSTLMMQLLKDNLALWTSELTGGEASKGNDDVDMEG

SEQ ID NO: 14537 - protein, 219 aa, Zea mays
  unsure (1)..(219): unsure at all Xaa locations
LEAGRAPTSAQLVASAPQDPLRHPQPCDRPCCRRPRSADPSRPTTPYRRSQLLAEQAERYEEMVEFMXXRVARSAGGAESKVFYLKMKGDYHRYLAEFKSGAERKDAAESTMNAYKAAQDIALADLAPTHPIRLGLALNFSVFYYEILNSPDRACNLAKQAFDEAISELDSLGEESYKDSTLIMQLLRDNLTLWTSDTNEDGGDEIKDAAAPKESAEGQ

SEQ ID NO: 14538 - protein, 222 aa, Zea mays
  unsure (1)..(222): unsure at all Xaa locations
IGYLEAGRAPTSAQLVASAPQDPLRHPQPCDRPCCRRPRSADPSRPTTPYRRSQLLAEQAERYEEMVEFMXXRVARSAGGAESKVFYLKMKGDYHRYLAEFKSGAERKDAAESTMNAYKAAQDIALADLAPTHPIRLGLALNFSVFYYEILNSPDRACNLAKQAFDEAISELDSLGEESYKDSTLIMQLLRDNLTLWTSDTNEDGGDEIKDAAAPKESAEGQ

SEQ ID NO: 14539 - protein, 165 aa, Zea mays
IRLELPAVSISIQFSAPTHLPQPTAAVDARVFYLKMKGDYHRYLAEFKTGAERKDAADSTLAAYQAAQDIAVKELPPTHPIRLGLALNFSVFYYEILSSPDRACSLAKQAFDEAISELDSLGEESYKDSTLIMQLLRDNLTLWTSDMQEDGGDEMRDANKPDEEQ

SEQ ID NO: 14540 - protein, 218 aa, Zea mays
  unsure (1)..(218): unsure at all Xaa locations
PRVRRSTGSSAPPQPCDRPCRRRSRSADPSQPRSQPCRRRSRRGRRAXYMAKLAEQAERYEEMVXXFMERVARYAESKVFYLKMKGDYHRYLAEFKSGAERKDAAESTMNAYKAAQDIALADLAPTHPIRLGLALNFSVFYYEILNSPDRACNLAKQAFDEAISELDSLGEESYKDSTLIMQLLRDNLTLWTSDTNEDGGDEIKEAAAAPKESAPEGQ

SEQ ID NO: 14541 - protein, 168 aa, Zea mays
  unsure (1)..(168): unsure at all Xaa locations
KXNKKQNRSSSSTGTLPLWPLPCLPPMAAVDARVFYLKMKGDYHRYLAEFKTGAERKDAADSTLAAYQAAQDIAVKELPPTHPIRLGLALNFSVFYYEILSSPDRACSLAKQAFDEAISELDSLGEESYKDSTLIMQLLRDNLTLWTSDMQEDGGDEMRDANKPDEEQ

SEQ ID NO: 14542 - protein, 140 aa, Zea mays
  unsure (1)..(140): unsure at all Xaa locations
XFYLKMKGDYHRYLAEFKSGAERKDAAESTMNAYKAAQDIALADLAPTHPIRLGLALNFSVFYYEILNSPDRACNLAKQAFDEAISELDSLGEESYKDSTLIMQLLRDNLTLWTSDTNEDGGDEIKEAAAAPKESAPEGQ

SEQ ID NO: 14543 - protein, 140 aa, Zea mays; identical to SEQ ID NO: 14542
  unsure (1)..(140): unsure at all Xaa locations

SEQ ID NO: 14544 - protein, 224 aa, Zea mays
  unsure (1)..(224): unsure at all Xaa locations
MPELVEDDRRRTQQIAEHCKFCPLNCPMAAPEFSRXEDNVTWQKLAQKADRYHEMSESHEKVPRTADSKELTGEERNLLSGAYKNAIGARRASWRIISSIQQKEEGRRYDDRPTLLXDYRAKTETEPXPICDGILKLLDTHLVPSSTAPETTVFYLWMTGDYYTYLAEFTTGGERSDSAENTMMRYPVAHDIALGELAPTHPIRIGLRLNFSMCYYETLNVPDX

SEQ ID NO: 14545 - protein, 129 aa, Zea mays
  unsure (1)..(129): unsure at all Xaa locations
XLDSHLVPSSTAAESKVFYLRIKGAYHGFLAELKTGPERKDSVESTIMAYKVVQDIALADLAPTHPIRLGLALNFSVFYYEILNSPDKACNLAKQAFDEAISQLDTLGEESYKDSTLIMQLLXDNLTLX

SEQ ID NO: 14546 - protein, 130 aa, Zea mays
  unsure (1)..(130): unsure at all Xaa locations
MSSPREENVYLAKLAEQAERYEEMVEFMEKVAKTVDSEELTVEERNLLSVAYKNVIGARRASWRIISSIEQKEESRGNEDHVAIIKDYRGKIETELSKICDGILNLLDSHLVPAASLAESKVFYLKMKGX

SEQ ID NO: 14547 - protein, 135 aa, Zea mays
  unsure (1)..(135): unsure at all Xaa locations
MAVSAREEFVYMAKLAEQAERYEEMVEFMEKVSAAVDGDELTVEERNLLSVAYKNVIGARRASWRIISSIEQKEESRGNDDHVTAIRDYRSKIETELSGICDGILKLLDSRLVPAAASGDSKVFYLKMKGDYXRX

SEQ ID NO: 14548 - protein, 159 aa, Zea mays
  unsure (1)..(159): unsure at all Xaa locations
MAQLAEHAXRCEEMGEYMEKVANTVYGEELTVEERNLLWAAYKNVIGARRASWSIASSIEQKEESRLNEXHVNLIKEYRANIVAELINICDGILMLGDSHLLPSSTAGESNVFYLKMKGDYHRYLAEFKTGPDRNECAGSTMMDYMAAPDIALAELAPX

SEQ ID NO: 14549 - protein, 131 aa, Zea mays
PRVRRYLAEFKSGAERKDAAESTMNAYKAAQDIALADLAPTHPIRLGLALNFSVFYYEILNSPDRACNLAKQAFDEAISELDSLGEESYKDSTLIMQLLRDNLTLWTSDTNEDGGDEIKDAAAPKESAEGQ

SEQ ID NO: 14550 - protein, 196 aa, Zea mays
  unsure (1)..(196): unsure at all Xaa locations
SVAYRLSSARTAAASHLIAALLPRHSEKYEELIEFMEKVAKTVDSEEHYVLSIAYKIVXGTQCASWCIISSIEXGEEGRVNVDCVTLIEDYHNKIEVELSKICDGILKLLDSHRFPSLTAAESKVFYLKMKGDYYGYLAEFETGSRRKDAAXNTMVAHKPAQDIALEELAPTHPIRLWLVLNFSTLWYCVLKKKKK

SEQ ID NO: 14551 - protein, 167 aa, Zea mays
  unsure (1)..(167): unsure at all Xaa locations
GTRXLQVPAHAYPVRATLFLSQXPTEAAAYITVLYLKMKGDYHRYLAENKTGAERKDVEDSTLAANHSAHDIVVKELPPTHPIRLALALNFCEFYYEILSPRVRGRVGAKQAFDEAISELDTLGEESYKDSTLIMQLLRDNLTLWTSDMQEDGSDEMRDASKPDDEX

SEQ ID NO: 14552 - protein, 123 aa, Zea mays
  unsure (1)..(123): unsure at all Xaa locations
XPRVRGRVGSAESTMVAYKAAQDIALAELAPTHPIRLGLALNFSVFYYEILNSPDKACNLAKQAFDEAISELDTLGEESYKDSTLIMQLLRDNLTLWTSDITEEGIEEGKEASKGDAEXPGKP

SEQ ID NO: 14553 - protein, 155 aa, Zea mays
MEKTELIQKAKLAEQAERYDDMATCMKAVTEQGAELSNEERNLLSVAYKNVVGGRRSAWRVISSIEQKTDTSDKKLQLIKDYREKVESELRSICTTVLELVDKCLIANATNPESKVFYLKMKGDYLRYLAEGACGDDRKRTMENWRGAYQEAFGV

SEQ ID NO: 14554 - protein, 152 aa, Zea mays
  unsure (1)..(152): unsure at all Xaa locations
RVGGSAAEEMEEREKLVCLAKLAEQAXXYDDMVEFMKNLARMDVDMSAEERHLFSVGFKNTIGAKRASWRIICSHEQKVAAXXRQTGVMIDAYKKKVEEELRKVCNEVLSVIAIHCLPLASTGENIVFFYKMKGDYYRYLAEFSTGTEKKAX

SEQ ID NO: 14555 - protein, 92 aa, Zea mays
  unsure (1)..(92): unsure at all Xaa locations
XRNLLSVAYKNVIGARXASWRIVTSIEQKEESKGNESQVTLIKEYRQKIETELAKICEDILEVLDKHLIPSAQTGESKVFYHKMKGDYHRYX

SEQ ID NO: 14556 - protein, 186 aa, Zea mays
  unsure (1)..(186): unsure at all Xaa locations
MAREENVYMAKLADSVERYXEEMVDHMHNVPNTVDVEQLTVEERDLWSGAYNXNVIGGRRASWTHCAXLLSETELTESAXRTTEHRXEPLSTEYRAQIEAELINIRDGLLXNVLDSLLVASSTGAVPKVFYLKMNVDYHRDLAESTTVPDRKESADITMMVYYAAHDIASTEMRPTHPISLAIAPN

SEQ ID NO: 14557 - protein, 192 aa, Zea mays
  unsure (1)..(192): unsure at all Xaa locations
SFGTCVPCAKTRARHAEQAXYRNGPYFMENETKTVDSDELTAXERNLLXSAAYNNILAARLAXWRMHAAYMRXQHSMTVLGNEDTVTLINDYRGKTDTELTKICHGMLKLVESHLCAXSSTAPESTVLYLKMKGDYYRYLAEFKTGSDRKDADDNTMVXAYTAAHDIALAELAPTHPIRLALALNFXTFYYE

SEQ ID NO: 14558 - protein, 116 aa, Zea mays
  unsure (1)..(116): unsure at all Xaa locations
XNAFVLDSHLVPSDDTGVSKVXYLKMKGDYHRYLAGFKTGADRKEAADNSLLAYKSAQDIAMADLAPTHTIWLXLALNFFVFYYKILNSPDRACNLIKQAFDEAIFNLFSXLCEEX

SEQ ID NO: 14559 - protein, 163 aa, Zea mays
  unsure (1)..(163): unsure at all Xaa locations
MSTXQPTREDSGNMGKLANQARALSRWIEFMXERVARSAMGNGRGEELSXEERNLLTISYNNVIRGRLASWRILSSIXQKDEGRGNEAHAASIRTYRSEIKIEVDHICDGILGLLDSHVIASDDADKTKVFYLKMKGDYRRYLGEIKSGEEMKDAAXSTMNGY

SEQ ID NO: 14560 - protein, 130 aa, Zea mays
  unsure (1)..(130): unsure at all Xaa locations
MSWEDNAYLHKLDAQVERHEEMVDHMENVAKTVYVEELTVDEHNLLSVDYHNVIGDRRASWSIISSIXHKEDSRNNEEPVIQIKEYRGKIGAEMSNICDGILKVIDSHLVTSSTGAEAKVVYLLMKGDYX

SEQ ID NO: 14561 - protein, 213 aa, Zea mays
  unsure (1)..(213): unsure at all Xaa locations
TTREKTEHTEEESDHERDVYNNVYENVIAAWRTVCCIEYYVEHRENYQHNKHNVNFIKEYGAKMNAKLNNIWDRIDNQLESHLTASYTDAESQVMNVNINGDYDKYNTESKTDAYRKNTVESSMAAYNVAQDIVVPNHATTHAIRLKLALNYXEIYNETDNSPHKANHLSNEAIYESNCHLDSLCEDVYMDMPLLMHLLTDNYXTLLTYDLTX

SEQ ID NO: 14562 - protein, 136 aa, Zea mays
  unsure (1)..(136): unsure at all Xaa locations
XRIICCIEQNEEGRGNDDRVTLIKDYRGEIETELTTICDGILKLLESHLEADFTAPESNVYYLKMNGDYYRYYDEFKTEAERKDATENTMVAYMAAHDIAQDDLAATHAITLGLTLNLSVIYYEILNXTDRSCNLX

SEQ ID NO: 14563 - protein, 108 aa, Zea mays
  unsure (1)..(108): unsure at all Xaa locations
TKTVYEEELTVEERNLLSGAYKNVIGARRASWRIGNSIEQKEESLKNHYPVDLIKEYSGXIEAXLSNICDELLKLLDSHLEPYCNAAESNVFYLKMKGDYHTSLTEFX

SEQ ID NO: 14564 - protein, 212 aa, Zea mays
  unsure (1)..(212): unsure at all Xaa locations
RGXKRQSRAQHITPGVGGGRGKRTPGGGGGSAAEEMEDREKLVCLAKLAEQAERYYYMVEFIXNLGIVRGXXIXXXRHXFSXXFKNTIXXXXASXXIISSHXPKVXXXXXTGVMIDAYKKKVEEELRKVCIEVLSVIAIHCLPLASTGENIVFFYKMKGDYYRYLADFRSGTENEAARSSHLXAYQHAMVVNSSELXPAHRRQQTXHADRLE

SEQ ID NO: 14565 - protein, 236 aa, Zea mays
  unsure (1)..(236): unsure at all Xaa locations
APLSTTSCSKIARSQYVHMIDPAWKTAHLLPTPXVLRQIAMTMTSXLLNVEDTYVLSAAYRNVLECERAACRMISSMEQTKLDAGNERXTTLIRDYRGEIXIRLTLICHGVLQLLRPSSSPASTRPRSQGPLSPTEGDYYTYLAXEVKSGPDTQDAADNKCGYSCQLARXLSTPLLVGLHXXFQVYYNSXLTDXACSLAKQAXFDEAISELDTXLSEESYKDSTLIMQLLRDNCTY

SEQ ID NO: 14566 - protein, 100 aa, Zea mays
  unsure (1)..(100): unsure at all Xaa locations
XENPGSVPTRADCXMRELAPTHPIRLGLASNFSVCYYXILNSPDRACSLAKQAFADAIAQLDTVGGEPYKDRTVIMQLVRDSLTLWTSDMPVCSLSILIX

SEQ ID NO: 14567 - protein, 87 aa, Zea mays
  unsure (1)..(87): unsure at all Xaa locations
XPTRXVNFSVFYYEILNSPDRACNLAKQAFDEAIAELDTLGEESYKDSTLIMQLLRDNLTLWTSDMQDDAADEIKEAAAPKPTEEQQ

SEQ ID NO: 14568 - protein, 101 aa, Zea mays
  unsure (1)..(101): unsure at all Xaa locations
MSREENVYMAKLAXQAERYEEMVEYMEKVAKTVDVEELTVEERNLLSVAYKNVIXARRASWRIVSSIEQRXXNFXREHVNLIKEYRGKIXAELSNICDGIX

SEQ ID NO: 14569 - protein, 122 aa, Zea mays
  unsure (1)..(122): unsure at all Xaa locations
PSSAHTRRIRSQDPLRHRNRVTARAAGDPDPPTPDAGERNLLSVAYKNVIGARRASWRIISSIEQKEEGRGNEAHAASIRAYRSKIEAELARICDGILALLDSHLVPSAXGAEXKXFYLTMK

SEQ ID NO: 14570 - protein, 142 aa, Zea mays
  unsure (1)..(142): unsure at all Xaa locations
XYMAISIISIKEXNLILAPGENVXKWANWVNKAXRKENPVRNKNNLNLTRENVPKFKAKLSNICNGILKLLDSHLVPSFTAAESKVFYLKMKGDYHRYLAEFKTGPERKESAESTMMAYKGAQXEIARVNLEPTHPIRLGLX

SEQ ID NO: 14571 - protein, 82 aa, Zea mays
PRVRSVFYYEILNSPDRACSLAKQAFDEAISELDTLSEESYKDSTLIMQLLRDNLTLWTSDISEDPAEEIREAPKRDSSEGQ

SEQ ID NO: 14572 - protein, 140 aa, Zea mays
  unsure (1)..(140): unsure at all Xaa locations
CSFIRCAAPGSIARCXDLHGRAGGRSTTREENVYMAKLVDQAERDDEMDEYMEKAPKTVDAQQLTVEDXNLLSAAYHNAIAARRASWRIASYIEQKDESRKNEEHGNLINEYPGKIDAELSNICHGILNLLESHLMHCST

SEQ ID NO: 14573 - protein, 103 aa, Zea mays
  unsure (1)..(103): unsure at all Xaa locations
XLSVHERNLSFVAYNNVIGTRRASWRIGSSIEQKEESRKNEEHVNLIKEYRAKIEALLCYILYVILNLLYSHLVPSSTAAESMVFYLMTMVYYQRYLAEFKTX

SEQ ID NO: 14574 - protein, 123 aa, Zea mays
  unsure (1)..(123): unsure at all Xaa locations
MNSTISSYRSACSASLAMYTLSSRVGSDGDMAASGAGTAHASADAWADAWLGLALKFAVFDXEILNSPDRACNLAKQAFDEAISELDSLGEESYKDSTLIMQLLRDNLTLWTSDTNEDAGDEX

SEQ ID NO: 14575 - protein, 86 aa, Zea mays
  unsure (1)..(86): unsure at all Xaa locations
KGDYFRYXLAELKTGPERKESVESTMMAYKAAQDIALTELAPTHPIRLGLALNLSVYYYEILNSPDKACNLAKHAFDETVYEVNTX

SEQ ID NO: 14576 - protein, 123 aa, Zea mays
  unsure (1)..(123): unsure at all Xaa locations
MASGELPRXEEYVYMDNLGEQAERHEEMVLLMDKVATTVDSEELTEEERNLLSGAYRNVIGASRASWPIISFIEQKEEGRCNEDRVTLFEDVRGKIESXLTQICDGILKLLETHLEPSSTAPX

SEQ ID NO: 14577 - protein, 109 aa, Zea mays
  unsure (1)..(109): unsure at all Xaa locations
XLTKICDGILKLLETHLGPTSTDDQFNVFYVKMKGDCYRFLDVFKTGAVRQDAVLNTIVAYIAAHDIALAELATTHPIGLGLALNFSVFYYEILNAPDPXTCMSSKACX

SEQ ID NO: 14578 - protein, 95 aa, Zea mays
  unsure (1)..(95): unsure at all Xaa locations
XDFYRYLAENKTGAERKEAXAENTMEAYKAGQDIALAELAPTHPIRLGLALNFSGGYYESPNSPDRACRLGKQAFDEAISELDTPSEXEADKDRX

SEQ ID NO: 14579 - protein, 159 aa, Zea mays
  unsure (1)..(159): unsure at all Xaa locations
DKVCEGLHFFFLXLEFNSKVFXLEIQVDFEKYEGMIKVMEKVXNTVNSMELXXEEHYLLPVACKNVIGIRCASWRIVSSIEYREXGCVNMDRATLIEGYHNKIEVELNKICVGILKLFASHLPPSLIVPKSKVFYLKMKGDYYRILLSYFTSKKKKKKX

SEQ ID NO: 14580 - protein, 111 aa, Zea mays
  unsure (1)..(111): unsure at all Xaa locations
XKIYAYLSIFSRGILKLLEGGLMASSTATKSDAFYLMMKGDYHRXWLMHLILAADRKESAESTVVAYTAAHDIALSDPSPTHPIRLGLALNFSVFYYEIMYSPDKACNLAK

SEQ ID NO: 14581 - protein, 105 aa, Zea mays
  unsure (1)..(105): unsure at all Xaa locations
KLNCKTASTELYREENVYMAXKLAEQAKRYEEMDEFMXKVTNTVYWXELTVEERNLLYXAYKNVIGARRASWRIIYSIEQKEEGRSNEDRVTLIKDYRGKTETEX

SEQ ID NO: 14582 - protein, 86 aa, Zea mays
  unsure (1)..(86): unsure at all Xaa locations
MSPSEPTREESVYMAKLAEQAERYEEMVEFMERVARSVGGAGGGEELSVEERKLVFVAYKNVMGARKGLWRIISCIEQKEEGRGNX

SEQ ID NO: 14583 - protein, 76 aa, Zea mays
  unsure (1)..(76): unsure at all Xaa locations
MASAKRSREENVYMAKLAQQAERYKEMVEFMDKVAKTVDSDELTVEERSLLSVTYKNVIGARRASWRIISSIEQKX

SEQ ID NO: 14584 - protein, 132 aa, Zea mays
  unsure (1)..(132): unsure at all Xaa locations
XHSLNVYMAKLPERAYRHEEMVYFMENVTKTDDSHELTVEEHYLLSAAYKNVIAVRSALXHMISFIEQHDQGQGAEDTRHTLKGQSGSTETELTKICDGEMKLVXCELVPSYIVPEIKALYLKMKGDYYRYT

SEQ ID NO: 14585 - protein, 61 aa, Zea mays
  unsure (1)..(61): unsure at all Xaa locations
ILNSPDRACNLAKQAFDEAISELDSLGEESYKDSTLIMQLLXDNLTLWTSDTNEDGGDEIK

SEQ ID NO: 14586 - protein, 160 aa, Zea mays
  unsure (1)..(160): unsure at all Xaa locations
LSRNPSLLVLCITDRLPCTSAAPASIVHWPLISSIHPNEEGRGHEERVILVXRDYRSISETDLTKICDCILKLLKCHSLSSTTSTSAKTXFYLKMTGDYYTYFADLRLHLIRKTLISNLWLIYNAAQELLXSELCSTHPITLSLTLYFCLIYYEILNSRX

SEQ ID NO: 14587 - protein, 150 aa, Zea mays
  unsure (1)..(150): unsure at all Xaa locations
XXNCPWSXLAETAGRXRVLVEFMEIVPRXVDSEELMXESEPLSVAYKNVIGALRASWRIICYIVHIEEGRGNVDPLTLIKDYRGRIETELTKICDGILMLFETTLEPVLYGCKRXAFYIRMEGDGYIYLDEFKTGAERKDAVENTMVKFX

SEQ ID NO: 14588 - protein, 91 aa, Zea mays
  unsure (1)..(91): unsure at all Xaa locations
FNLINEYHAKGESELSNISDGILNLLDSHLVPSSTAAXSKVFYLKINGDYHRYLAEFNTVPEIKESSYNSIIYYFASHDITLTYLLPTHPX

SEQ ID NO: 14589 - protein, 93 aa, Zea mays
  unsure (1)..(93): unsure at all Xaa locations
XGKIDAELSNICXDGILXSCIDSHXVPXXRTAAXESKVFYLKMKGDYHRYXLAEFKTGAERKESAESTMVAYTAAQDIALAELAPTHPIRLGX

SEQ ID NO: 14590 - protein, 96 aa, Zea mays
  unsure (1)..(96): unsure at all Xaa locations
REXNVYYAXLAEQAERVEEMVEFMEKVFKTVDLEELTVEERNLLVVAYNNFIGARRSLWRIIFFIEHKEDGQGLDVLVSLIKDYFGKIDTELIKIX

SEQ ID NO: 14591 - protein, 191 aa, Zea mays
  unsure (1)..(191): unsure at all Xaa locations
THAISTTLYRVLNVSLLDLAEQVLSDQKMVDVLCKVICIADSLDLTEMEHLLLLGAYMNAIAARRAFRFLVSSIILRDDIRGIVPRKTLIKDYPLEIVTALNDISAAILKMLEMHLAAAPTALKLQAVYLYRLLDYFSYLAECNSGDAIKDLAENTMEKYKAAHDIALXCSLLSTHPIKIALELNFSVLYX

SEQ ID NO: 14592 - protein, 143 aa, Zea mays
  unsure (1)..(143): unsure at all Xaa locations
YAGGRSLTSTSRILLDRGRSRLVSFCRHAFWYEEMVECMEKVSMTVDSEELTVEEGSLLFVAYKNVIGARRDLLGIIYFSELEEVGLGNEDLVILIKDYRGXIETELTQDCDGILKLVETYIVSVFTFXEFKXFYVKMKGDYY

SEQ ID NO: 14593 - protein, 111 aa, Zea mays
  unsure (1)..(111): unsure at all Xaa locations
AFKAVPQRSDPLSMTVNGIQRAXNITSGXDLSPTHPIKLVLALNFSVFYYQILNFRDLSCNPAKQVFDXAISXLHSLXXEFYKDMTLIMQFLHDNSTLLTSYTYYDGCNXI

SEQ ID NO: 14594 - protein, 91 aa, Zea mays
VFYLKMKGDYHRYLAEFTSGAERTDAVEITMDAYKAAQDIALVDLAVRHPIRVVVALRFSVLYDVILDLPDIVFMLAIQVFYDAIPVVGSL

SEQ ID NO: 14595 - protein, 72 aa, Zea mays
  unsure (1)..(72): unsure at all Xaa locations
XLKMKGDYYRYLSSCKTGAERKDAAENTMVRYKAAQDINLAELAPTHPIRLGLALTFSVFYYEILNSPDRAX

SEQ ID NO: 14596 - protein, 88 aa, Zea mays
REVRYCCRKGDYYRYLAEFSTGTEKKAASDQSLMAYQHAMVVASSELSPAHQIRLGLALNLSVFFYEIMNSHERICSLIFNALFLPFY

SEQ ID NO: 14597 - protein, 119 aa, Zea mays
  unsure (1)..(119): unsure at all Xaa locations
REVRYCCRKGDYYRYLAEFSTGTEKKAASDQSLMAYQHAMVVASSELSPAHQIRLGLALNLSVFFYEIMNSHERSCXSTHLQCLVSPFLLMFQIHRYSYTIIFHFLKRGLSCQVVTIFK

SEQ ID NO: 14598 - protein, 82 aa, Zea mays
  unsure (1)..(82): unsure at all Xaa locations
MASAXLSREENVHMAKLAEYAQRYQEMLEVMEKGPKTVDSEELTVEERNLLSVAYKNAIGARRASCRIISSVHNKEERPRTX

SEQ ID NO: 14599 - protein, 76 aa, Zea mays
  unsure (1)..(76): unsure at all Xaa locations
KLNGERALAELSREENVYMAKLAXQAERYEEMAEFMEKVAKTVDSEELTVEERNLLSAAYKNVIGARRALWRIIFX

SEQ ID NO: 14600 - protein, 83 aa, Zea mays
  unsure (1)..(83): unsure at all Xaa locations
XPRVRKESAESTMVAYKAAQDIALAELPPIHPIRLGLALNFSVFYYEIQNSPDKACNLAKEVGVHLSFYCCTGFLSYNYLRCC

SEQ ID NO: 14601 - protein, 83 aa, Zea mays
  unsure (1)..(83): unsure at all Xaa locations
MSREENVYMAKWAAQAERYEVMAEYMEKVATTVDVVELTVEERNLMYVAYKNVIGARRASWSTVPCMEQIEEFRRIEKHVHLX

SEQ ID NO: 14602 - protein, 111 aa, Zea mays
  unsure (1)..(111): unsure at all Xaa locations
XLLETHLVXXSSLPPIQVFYXKMKGDYXYRYLAEFKTGAERGGAAENTMVAYKAAQDIALAELAPTHPIXLXLGLDKAXFYYXTLNSPNRGGSLXXXXWGPAPPRPAPPPP

SEQ ID NO: 14603 - protein, 98 aa, Zea mays
  unsure (1)..(98): unsure at all Xaa locations
XLPPTEAVVYXSLNLSRLLAYMFYYILNIDKLQPNDYKQAFDEAISELDSLGEESYKDSTLIMQLLRDNLTLWTSDTNEDGGDEIKDAAAPKESAEGQ

SEQ ID NO: 14604 - protein, 116 aa, Zea mays
  unsure (1)..(116): unsure at all Xaa locations
IASPFLSAKFNSKISLEIRVDSEKYEELIEFMEKVAKTVDSEEHYVLSIAYKIVXGTQCASWCIISSIEXGEEGRVNVDCVSLIEDYHNKIEVELIKICDGILKLLDSHRFPSLTX

SEQ ID NO: 14605 - protein, 87 aa, Zea mays
  unsure (1)..(87): unsure at all Xaa locations
RVGLAFNFSXVFYYEILNSPXQSFNLAKQGFYETISQLNPLGEGSYKKSPLIMQLLRGNLTLWTFSPPEDGVYXGKKTPKSXAGYGQ

SEQ ID NO: 14606 - protein, 72 aa, Zea mays
  unsure (1)..(72): unsure at all Xaa locations
XFESARICDGILALVDSHLVPSAGGAESKVFYLKMKGDYHRFLAEFKSGAERKDAVDSSMNVFKADQVIVLX

SEQ ID NO: 14607 - protein, 68 aa, Zea mays
  unsure (1)..(68): unsure at all Xaa locations
MSPSEPTREESVYMAKLAEXAERYEEMVEFMERVARYAGAAGGGDQLSVEERNLLSGPYKNVIGARRA

SEQ ID NO: 14608 - protein, 60 aa, Zea mays
  unsure (1)..(60): unsure at all Xaa locations
MAREENVYMAKLAEQAERYEEMVEYMEKVAKTVHVEQLXVEERNLLSVAYHNVTGARRAX

SEQ ID NO: 14609 - protein, 183 aa, Zea mays
  unsure (1)..(183): unsure at all Xaa locations
RRSAATPIVAAPYLSHDLKEDTYFTNIGEESEHSTTRAIMDQSILPVLVVHGTMLASRNLWGEAYPTVIETHRAMPHAGISVAQMDVCCTNISYVNLIKEDGRSIGAELTNTCEGILNLLVSHLKPSSTAAESQGFYRKNTGDYHRNLAEFNTAADRKESAENTLADYTAAQDIALAELAPXP

SEQ ID NO: 14610 - protein, 180 aa, Zea mays
  unsure (1)..(180): unsure at all Xaa locations
XMYSTLFVWIPISXPRAAHGHCXLGSISNDQEDTMFYXLQMKGDYYXYLSLYKTGTXQRKDAANYTISTXKDTNYINYCDLHATYCIRLQLKLYLPQVYYEKHSXLDYAWSFKQHALYYCMWVLHTLAEECYMDTTLMMNILIHHWMLWTIDISEAPAEDIRWAPNHHCCEGKEDLSYMP

SEQ ID NO: 14611 - protein, 72 aa, Zea mays
  unsure (1)..(72): unsure at all Xaa locations
KLNCEMASPELSREENVSMAKLAEQAERYEEMVEFMEKVPKXTVDSEELTVVERTLLSVAYKIVLGARRASW

SEQ ID NO: 14612 - protein, 90 aa, Zea mays
  unsure (1)..(90): unsure at all Xaa locations
HGELAAGPEDEERXRVMEKVAKTGDSDELTGEERNLLTVVFKNXIGARHASWRIIYSIEHKEEGRGNDDRDTLIKDYRGKIETEHTKDCX

SEQ ID NO: 14613 - protein, 60 aa, Zea mays
  unsure (1)..(60): unsure at all Xaa locations
XHRYLAEFKSGAXRKDASGRTLNAYKAASIALADLASTHPIRLGLALNCSIFYYXILNFP

SEQ ID NO: 14614 - protein, 69 aa, Zea mays
TTRPKTEHLVELTDEERNVLAVAYKNVIAARRASWRIEPSIEQKEDSHKNNKHVNLIKEYRAKIEALLN

SEQ ID NO: 14615 - protein, 83 aa, Zea mays
  unsure (1)..(83): unsure at all Xaa locations
XDKACNLAKQGFDEAIFELDTLGGGSSKDSPLFMQLLRDNLPLWTSALPEDGAYEGKNAPKGDAGEGQYIFGGGCKVVRAPMF

SEQ ID NO: 14616 - protein, 69 aa, Zea mays
  unsure (1)..(69): unsure at all Xaa locations
STSTCGGEDNVYMAKLAEQAERYEEMVEYMEKVAKTVDVEELTVEERNLLYVVYKNVMGGAXCPIRFFX

SEQ ID NO: 14617 - protein, 106 aa, Zea mays
  unsure (1)..(106): unsure at all Xaa locations
MAREENVYMAKLAEQAERYEEMVEYIENVAKTVYVEELTCEERNXLLSGAYKYFIGASFVLCCIVISIXTNEDSLXRTNSLLTLSRDTRPNIQAXLSLFCNGISLX

SEQ ID NO: 14618 - protein, 59 aa, Zea mays
  unsure (1)..(59): unsure at all Xaa locations
MAREENVYMAKLAERAERYDEMVEYTEKVAKTVDVEELTVEEPNLLSVAYNNVIAARRX

SEQ ID NO: 14619 - protein, 72 aa, Zea mays
  unsure (1)..(72): unsure at all Xaa locations
XAXPVLSLEENVYLAKLAAQAKRFEEKLEFMVNATKPVDSKDLTVQERNLLYDAYTNVIGARPAXWRIISSX

SEQ ID NO: 14620 - protein, 98 aa, Zea mays
  unsure (1)..(98): unsure at all Xaa locations
GGGFXSXIPGGAPXVRDIVEYIQNVAITEXIQNGTGVEPNVVGVAYRNVIGARRASWRIGSSIEQKGEARKNEXDGNLIKGYRAEIEAXLSNICDGIX

SEQ ID NO: 14621 - protein, 101 aa, Zea mays
  unsure (1)..(101): unsure at all Xaa locations
KVKTRKGNSRNSSCVKPQESEDLPYSSHAAPIPLNSARGAFDEAISQLDTLGEDSYKDSTLIMQLLRDNLTLWSADSTTLTNRSTXTSSHVCNIHTSKTLM

SEQ ID NO: 14622 - protein, 178 aa, Zea mays
  unsure (1)..(178): unsure at all Xaa locations
YPXRXRPGTHATIVRDERTLTADYRLHQCGDYDTRAPTCTLDCRREXGAVSGPERGGMAKVGHLAAKSQDNVPDXYLRAATCCVSPPELAAHERVXXVVGYRTRAGTTCASWCIILLLPXQRADSRGTDDRPTFIKDYRGKIETELTKICDGILXLLETXHLVPSSTATDXRAFYLKX

SEQ ID NO: 14623 - protein, 100 aa, Zea mays
  unsure (1)..(100): unsure at all Xaa locations
TLTLFQSQRYEEMVDFMDIVAGAVDSEELTVKDRILLYDAYKNVIVTIRASXRIISFIDHMEEDHANVDHVTLINNYLPTIESDLNNIYYNILNLYXIIS

SEQ ID NO: 14624 - protein, 73 aa, Zea mays
  unsure (1)..(73): unsure at all Xaa locations
XSLNSPDKACNVAEQAFDXALSELVSSGEESSKDSPMFMQLLKNNMWLGSRDRSENGAEEGKHAPKGDAGEVX

SEQ ID NO: 14625 - protein, 85 aa, Zea mays
  unsure (1)..(85): unsure at all Xaa locations
XLLSRVREKVAKTVYVEERTXVVERNLLSVAYKNVIGARRASWRIISSIVQKEVSCXNVEHVYLIKEYLGMIXSLYLSIYDIGNX

SEQ ID NO: 14626 - protein, 111 aa, Zea mays
  unsure (1)..(111): unsure at all Xaa locations
XDAYGSQDMXNKTVIPAYXCKKNTEIPRCXNGVIDVLEYHLVQCTARGKYQVLYLKMNDDYHMDLAEFKTSAKRKDTFYSTMNAYTNGHDIGLGKMGVTXHPIKLGLGFNL

SEQ ID NO: 14627 - protein, 182 aa, Zea mays
  unsure (1)..(182): unsure at all Xaa locations
PTVTTPTTPPRRAAAQLPLPSRSASYPFESAPSRPSPVRQVPRVRRRHRIXENLSTTLHAPHLTDVQRNHLPDAYKNANWVHRDAWAIASSVALXEETLFNEKHGILITEYXHGKIHAEHTKSCDVIVDLTDSHLVTTATAAESNAIXLIINADYRRDLAHKHTRAXMTHESAESTMVGXYK

SEQ ID NO: 14628 - protein, 119 aa, Zea mays
  unsure (1)..(119): unsure at all Xaa locations
XXSVTYVTMMCDVVVKLRDTHLVPGFTAGVSNVMYLKTNGNYSRYRDECKTGPGIKVLDDNMLVAYNDSNDIVLAKLGXTLIYYRMNAHLSVXVTYYEILMXADRTXSREKDCWDDASX

SEQ ID NO: 14629 - protein, 248 aa, Geodia cydonium
MSEAPEPSPLTTKARIAEQAERYEDMAKFMKEVTEKATEELSPDDRNLLSVAYKNVVGTRRSSWRVISSIEQKSSDENKKEMAKAYREKIEKELDEICNEVLTLLDDHLLKKATSDESKVFYQKMKGDYYRYLAEVTPSGDKREDVVVKAKDSYNKALEVATEKMPPTHPIRLGLALNFSVFHYEIQNAPEKACEMAKKAFDEAIAELDNLKEDSYKDSTLIMQLLRDNLTLWTSEGQTEEQEDGGDN

SEQ ID NO: 14630 - protein, 214 aa, Schistosoma mansoni
SNNELTNEERNLLSVAYKNVVGARRSSWRVISSIEQKTEGSERKQQMAKDYREKIEKELKDICHEVLTLLDKFLIPKATTAESKVFYLKMKGDYYRYLAEVATGDERQKVIEESQRAYNDAFDIAKNQMQPTHPIRLGLALNFSVFYYEILNAPDRACHLAKQAFDDAIAELDTLNEDSYKDSTLIMQLLRDNLTLWTSDTGGDDDANAPDEHQ

SEQ ID NO: 14631 - protein, 252 aa, Schistosoma mansoni
MTTSWVLQSKDLSNTDLVHIAKLAEQAERYDDMAAAMKRYTEASGNLGNEERNLLSVAYKNVVGARRSAWRVIHGSEMKAVNDRTKKQIAEEYRIKMEKELNTICNQVLALLEDYLLPNASPDDSKVFFLKMQGDYYRYLAEVATDDARTEVVQKSLDAYTKATTAAENLPTTHPIRLGLALNFSVFFYEIQNDAAKACELAKSAFDSAIAELDQLQDDSYKDSTLIMQLLRDNLTLWASDQTAEGDVENDS

SEQ ID NO: 14632 - protein, 248 aa, Caenorhabditis elegans
MSDGKEELVNRAKLAEQAERYDDMAASMKKVTELGAELSNEERNLLSVAYKNVVGARRSSWRVISSIEQKTEGSEKKQQMAKEYREKVEKELRDICQDVLNLLDKFLIPKAGAAESKVFYLKMKGDYYRYLAEVASGDDRNSVVEKSQQSYQEAFDIAKDKMQPTHPIRLGLALNFSVFFYEILNAPDKACQLAKQAFDDAIAELDTLNEDSYKDSTLIMQLLRDNLTLWTSDAATDDTDANETEGGN

SEQ ID NO: 14633 - protein, 248 aa, Caenorhabditis elegans
MSDTVEELVQRAKLAEQAERYDDMAAAMKKVTEQGQELSNEERNLLSVAYKNVVGARRSSWRVISSIEQKTEGSEKKQQLAKEYRVKVEQELNDICQDVLKLLDEFLIVKAGAAESKVFYLKMKGDYYRYLAEVASEDRAAVVEKSQKAYQEALDIAKDKMQPTHPIRLGLALNFSVFYYEILNTPEHACQLAKQAFDDAIAELDTLNEDSYKDSTLIMQLLRDNLTLWTSDVGAEDQEQEGNQEAGN

SEQ ID NO: 14634 - protein, 248 aa, Caenorhabditis elegans
MSDTVEELVQRAKLAEQAERYDDMAAAMKKVTEQGQELSNEERNLLSVAYKNVVGARRSSWRVISSIEQKTEGSEKKQQLAKEYRVKVEQELNDICQDVLKLLDEFLIVKAGAAESKAFYLKMKGDYYRYLAEVASEDRAAVVEKSQKAYQEALDIAKDKMQPTHPIRLGLALNFSVFYYEILNTPEHACQLAKQAFDDAIAELDTLNEDSYKDSTLIMQLLRDNLTLWTSDVGAEDQEQEGNQEAGN

SEQ ID NO: 14635 - protein, 304 aa, Caenorhabditis elegans
MSDGKEELVNRAKLAEQAERYDDMAASMKKVTELGAELSNEERNLLSVAYKNVVGARRSSWRVISSIEQKTEGSEKKQQMAKEYREKVEKELRDICQDVLNLLDKFLIPKAGAAESKVFYLKMKGDYYRYLAEVASGDDRNSVVEKSQQSYQEAFDIAKDKMQPTHPIRLGLALNFSVFFYEILNAPDKACQLAKQVSVANIGQTAYAEALEIANKDLSPTNCVRLGLALNYSVFFYEVAASPDRACQLSKQAFDDAIAELDTLNEDSYKDSTLIMQLLRDNLTLWTSDAATDDTDANETEGGN

SEQ ID NO: 14636 - protein, 125 aa, Caenorhabditis elegans
MVADHFRYLVQYDDINREEHAHKSRIAYQEALGIAKDKMQPTHPIRLGLALNASALNFDVLNLPKEANEIAQSALDSAHRELEKMKSSLDSYDISNLKRARTLYDLLKSTHEQRVDGKEGEEADN

SEQ ID NO: 14637 - protein, 261 aa, Meloidogyne incognita
MTETMLDCSDKVTESKEELVQLAKLAEQAERYDDMAESMKKVTEFGDELSNEERNLLSVAYKNVVGARRSSWRVLSSIEQKTEGGKKTMTKEYREKIECELRDIRKGVMNLLDKFLIPKAGTPDSKVFYLKMKGDYYRYLAEVSSGDELTDVIDKSQQSYQEAFDIAKDKMPPTHPIRLGLALNFSVFYFEILDNKSKACQLAKQSFDEAVAELDTLDENLYKDSTLIMQLLRDNLTLWTSDGGVEEPETAPIVADAEGTN

SEQ ID NO: 14638 - protein, 259 aa, Fritillaria agrestis
MSPAEPSREENVYMAKLAEQAERYEEMVEFMEKVARTVDTEELTVEERNLLSVAYKNVIGARRASWRIISSIEQKEESRGNEDHVALIKDYRGKIEAELSKICDGILKLLDSHLVPSSTAAESKVFYLKMKGDYHRYLAEFKSGAERKEAAESTLLAYKSAQDIALAELAPTHPIRLGLALNFSVFYYEILNSPDRACNLAKQAFDEAISELDTLGEESYKDSTLIMQLLRDNLTLWTSDINEEAGDEIKEASKAGEGQ

SEQ ID NO: 14639 - protein, 248 aa, Drosophila melanogaster
MSTVDKEELVQKAKLAEQSERYDDMAQAMKSVTETGVELSNEERNLLSVAYKNVVGARRSSWRVISSIEQKTEASARKQQLAREYRERVEKELREICYEVLGLLDKYLIPKASNPESKVFYLKMKGDYYRYLAEVATGDARNTVVDDSKNAYQEAFDIAKTKMQPTHPIRLGLALNFSVFYYEILNSPDKACQLAKQAFDDAIAELDTLNEDSYKDSTLIMQLLRDNLTLWTSDTQGDEAEPQEGGDN

SEQ ID NO: 14640 - protein, 248 aa, Drosophila melanogaster
MSTVDKEELVQKAKLAEQSERYDDMAQAMKSVTETGVELSNEERNLLSVAYKNVVGARRSSWRVISSIEQKTEASARKQQLAREYRERVEKELREICYEVLGLLDKYLIPKASNPESKVFYLKMKGDYYRYLAEVATGDARNTVVEDSEKAYQEAFDIAKTKMQPTHPIRLGLALNFSVFYYEIINSPARACHLAKQAFDDAIAELDTLNEDSYKDSTLIMQLLRDNLTLWTSDTQGDEAEPQEGGDN

SEQ ID NO: 14641 - protein, 248 aa, Drosophila melanogaster
MSTVDKEELVQKAKLAEQSERYDDMAQAMKSVTETGVELSNEERNLLSVAYKNVVGARRSSWRVISSIEQKTEASARKQQLAREYRERVEKELREICYEVLGLLDKYLIPKASNPESKVFYLKMKGDYYRYLAEVATGDARNTVVDDSQTAYQDAFDISKGKMQPTHPIRLGLALNFSVFYYEILNSPDKACQLAKQAFDDAIAELDTLNEDSYKDSTLIMQLLRDNLTLWTSDTQGDEAEPQEGGDN

SEQ ID NO: 14642 - protein, 191 aa, Drosophila melanogaster
RKAMKSVTETGVELSNEERNLLSVAYKNVVGARRSSWRVISSIEQKTEASARKQQIAREYRERVEKELREICYEVLGLLDKYLIPKASNPESKVFYLKMKGDYYRYLAGYVDNGNMKVCIGTKSRLSVPSNKEHHYRNLRDRYTNCTYVDGNLKLTWLPNENLDLSFLDNIREVTGYILISHVDVKKVVFP

SEQ ID NO: 14643 - protein, 133 aa, Drosophila melanogaster
MSTVDKEELVQKAKLAEQSERYDDMAQAMKSVTETGVELSNEERNLLSVAYKNVVGARRSSWRVISSIEQKTEASARKQQLAREYRERVEKELREICYEVLGLLDKYLIPKASKLFRLLLRNYQFTSEGLSLS

SEQ ID NO: 14644 - protein, 157 aa, Drosophila melanogaster
MHATVSILSSTPTKTPYPRIVRPNCTIIKSLQTKLQILLQNTAVVDDSQTAYQDAFDISKGKMQPTHPIRLGLALNFSVFYYEILNSPDKACQLAKQVNNTLRLGSINRNVWQASKKGTQNPNPSILKNFFVYSQMVFLTFGFYFLLFYITKSCVNR

SEQ ID NO: 14645 - protein, 199 aa, Plasmodium yoelii yoelii
MKSINDNDIIISNKDEFIYYLKILNQIGFYDVAISGTSFKNALNVKRKEKTTLENVIKNEESSEEEKKCAELLKLKINKDIRTIERDAYFIIKAKCIPKTVDEKILMFYWHLLGDIMRYCTDTFRIEDKKRIQERSLQAYSYSLKYANKMNLPPSNPRLLELLVSLTVLHKDMDTQTNDPIEMAAQAFRDAIQNMHLLE

SEQ ID NO: 14646 - protein, 245 aa, Danio rerio
MDRTELIQKAKLAEQAERYDDMASCMKSVTEAGSELSNEERNLLSVAYKNVVGARRSAWRVISSIEQKTEGNDKKLQMVKEYREKVESELRDICNDVLELLNKYLIENSSNPESKVFYLKMKGDYYRYLAEVAAGDDKKATIENSQDAYQKAFDISKTEMQPTHPIRLGLALNFSVFFYEILNSPEKACSLAKQAFDEAIAELDTLNEESYKDSTLIMQLLRDNLTLWTSDNAPDEGEGGEGGEN

SEQ ID NO: 14647 - protein, 245 aa, Danio rerio
MDKLELIQKAKLAEQAERYDDMAACMKQVTEQGEELSNEERNLLSVAYKNVVGARRSAWRVISSIEQKTEGNDKKLQMVKEYREKVEGELRDICNEVLTLLGKYLIKNSTNSESKVFYLKMKGDYYRYLAEVAAADDKMDTITNSQGAYQDAFEISKKDMQPTHPIRLGLALNFSVFYYEILNSPEQACSLAKQAFDEAIAELDTLNEDSYKDSTLIMQLLRDNLTLWTSDNAADEGEGGDGGEN

SEQ ID NO: 14648 - protein, 229 aa, Danio rerio
MDKSQHVQRAKLAEQAERYDDMADSMKKVTELGEELSDEERNLLSVAYKNVVGARRSAWRVVSSIEQKTEGTDKKQMAQEYREKIEAELKAICNDVLHLLDKFLIRSTSPAESQVFYLKMKGDYYRYLAEVATGDEKTNIIQKSQEGYQAAFDISKDNMQPTHPIRLGLALNFSVFYYEILNSPEQACDLAKKAFDDAISELDQLTEDSYKDSTLIMQLLRDNSDTVDL

SEQ ID NO: 14649 - protein, 247 aa, Fundulus heteroclitus
MSESSQKELVQKAKLAEQAERYDDMAAAMKSVTEEGEELTNEERNLLSVAYKNVVGARRSSWRVVSSIEQKAEGVEGRQAKVKEYREKIEKELKDICNDVLVLLDKFLIPKAEAAESKVFYLKMKGDYYRYLAEVAVGDEKTGIIGDSQEAYKQAFEISKAEMQPTHPIRLGLALNFSVFYYEILNSPEQACKLAKQAFDDAIAELDTLSEESYKDSTLIMQLLRDNLTLWTSDNAVEGEEPEEPKE

SEQ ID NO: 14650 - protein, 262 aa, Populus x canescens
MSPTESSREENVYMAKLAEQAERYEEMVEFMEKVAKTVDNEELTMEERNLLSVAYKNVIGARRASWRIISSIEQKEESRGNEDHVTIIKEYRGKIEAELCKICDGILSLLETHLVPSASAAESKVFYLKMKGDYHRYLAEFKTGAERKEAAESTLLSYKSAQDIALSELAPTHPIRLGLALNFSVFYYEILNSPDRACSLAKQAFDEAISELDTLGEESYKDSTLIMQLLRDNLTLWTSDITDDAGDEIKEASKRESGDGPQ

SEQ ID NO: 14651 - protein, 125 aa, Populus x canescens
AEQAERYEEMVQFMQKLVIGNTPGGELNVEERNLLSVAYKNVIGSLRAAWRIVSSIEQKEEGRKNEDHVVLVKEYRSKVESELSDICASILRLLDSNLIPSATASESKVFYLKMKGDYRTSPPVP

SEQ ID NO: 14652 - protein, 105 aa, Populus x canescens
AEQAERYEEMVLFMQKLVLGNTPGGELNVEERNLLSVAYKNVIGSLRAAWRIVSSIEQKEEGRKNEDHVVLVKEYRSKVESELSDVCASILRLLDSNLVPLCLFR

SEQ ID NO: 14653 - protein, 245 aa, Xenopus laevis
MDKNELVQKAKLAEQAERYDDMAACMKRVTEEGGELSNEERNLLSVAYKNVVGARRSSWRVVSSIEQKTEGAEKKQEMSREYREKIEAELREICNDVLNLLDKFLIANATQPESKVFYLKMKGDYYRYLAEVAAGDAKSDIVGQSQKAYQDAFDISKTEMQPTHPIRLGLALNFSVFYYEILNCPDKACSLAKTAFDEAIAELDTLSEESYKDSTLIMQLLRDNLTLWTSDTHGDEAEQGEGGEN

SEQ ID NO: 14654 - protein, 244 aa, Xenopus laevis
MDKSELVQKAKLSEQAERYDDMAASMKAVTELGAELSNEERNLLSVAYKNVVGARRSSWRVISSIEQKTEGNDKRQQMAREYREKVETELQDICKDVLDLLDRFLVPNATPPESKVFYLKMKGDYYRYLSEVASGDSKQETVANSQQAYQEAFEISKSEMQPTHPIRLGLALNFSVFYYEILNSPDKACSLAKSAFDEAIAELDTLNEESYKDSTLIMQLLRDNLTLWTSETQGEEADNVEGDN

SEQ ID NO: 14655 - protein, 245 aa, Xenopus laevis
MDKNELVQKAKLAEQAERYDDMAACMKRVTEEGGELSNEERNLLSVAYKNVVGARRSSWRVVSSIEQKTEGAEKKQEMSREYREKIEAELREICNDVLNLLDKFLIANATQPESKVFYLKMKGDYYRYLAEVAAGNAKTEIVGQSQKAYQDAFDISKTEMQPTHPIRLGLALNFSVFYYEILNCPDKACALAKAAFDEAIAELDTLSEESYKDSTLIMQLLRDNLTLWTSDTQGDEAEQGEGGEN

SEQ ID NO: 14656 - protein, 235 aa, Xenopus laevis
AKLSEQAERYDDMAASMKAVTELGAELSNEERNLLSVAYKNVVGARRSSWRVISSIEQKTEGNDKRQQMAREYREKVETELQDICKDVLDLLDRFLVPNATPPESKVFYLKMKGDYYRYLSEVASGDSKQETVASSQQAYQEAFEISKSEMQPTHPIRLGLALNFSVFYYEILNSPEKACSLAKSAFDEAIRELDTLNEESYKDSTLIMQLLRDNLTLWTSENQGEEADNVEGDN

SEQ ID NO: 14657 - protein, 246 aa, Xenopus laevis
MDRTAQIQKAKLAEQAERYDDMAASMKDVTECGGELSSEERNLLSVAYKNVVGARRSAWRVISSIEQKSDSEETKLKIAKEYKEKVESELQSICETVLNLLDKHLISASTATESQVFYLKMKGDYYRYLAEVATGENRTKTIADSQAAYQQAFDISKKDMQPTHPIRLGLALNFSVFYYEILNSPEKACALAKTAFDEAIAELDTLNEESYKDSTLIMQLLRDNLTLWTSDTACDDNDAVEPGENN

SEQ ID NO: 14658 - protein, 247 aa, Xenopus laevis
MDKNELVQKAKLAEQAERYDDMAACMKRVTEEGGELSNEERNLLSVAYKNVVGARRSSWRVVSSIEQKTEGAEKKQEMSREYREKIEAELREICNDVLNLLDKFLIANATQPESKVFYLKMKGDYYRYLAEVAAGNAKTEIVGQSQKAYQDAFDISKTEMQPTHPIRLGLALKLLCVLTNEESSTVQDKACALAKAAFDEAIAELDTLSEESYKDSTLIMQLLRDNLTLWTSDTQGDEAEQGEGGEN

SEQ ID NO: 14659 - protein, 255 aa, Homo sapiens
MDDREDLVYQAKLAEQAERYDEMVESMKKVAGMDVELTDEERNLLSVAYENVIGARRTSWRIISSIEQKEENKGGENKLEMIREYQQMVETELKLICCDILDVLDKHLIAAANTGESKVFYYKTKWYYHRYLAEFATGNDRKEAAKNSIVAYKAASDIAMTELPPAHPIRLGLALNFSIFYYEILNSPDRACRLAKAAFNDAVVELDTLSEESYKDCKLIMQLLRDNLTLWTSDMQGDGEEQNKEVLQDVEDKNQ

SEQ ID NO: 14660 - protein, 245 aa, Homo sapiens
MDKNELVQKAKLAEQAERYDDMAACMKSVTEQGAELSNEERNLLSVAYKNVVGARRSSWRVVSSIEQKTEGAEKKQQMAREYREKIETELRDICNDVLSLLEKFLIPNASQAESKVFYLKMKGDYYRYLAEVAAGDDKKGIVDQSQQAYQEAFEISKKEMQPTHPIRLGLALNFSVFYYEILNSPEKACSLAKTAFDEAIAELDTLSEESYKDSTLIMQLLRDNLTLWTSDTQGDEAEAGEGGEN

SEQ ID NO: 14661 - protein, 246 aa, Homo sapiens
MTMDKSELVQKAKLAEQAERYDDMAAAMKAVTEQGHELSNEERNLLSVAYKNVVGARRSSWRVISSIEQKTERNEKKQQMGKEYREKIEAELQDICNDVLELLDKYLIPNATQPESKVFYLKMKGDYFRYLSEVASGDNKQTTVSNSQQAYQEAFEISKKEMQPTHPIRLGLALNFSVFYYEILNSPEKACSLAKTAFDEAIAELDTLNEESYKDSTLIMQLLRDNLTLWTSENQGDEGDAGEGEN

SEQ ID NO: 14662 - protein, 246 aa, Homo sapiens
MGDREQLLQRARLAEQAERYDDMASAMKAVTELNEPLSNEDRNLLSVAYKNVVGARRSSWRVISSIEQKTMADGNEKKLEKVKAYREKIEKELETVCNDVLSLLDKFLIKNCNDFQYESKVFYLKMKGDYYRYLAEVASGEKKNSVVEASEAAYKEAFEISKEQMQPTHPIRLGLALNFSVFYYEIQNAPEQACLLAKQAFDDAIAELDTLNEDSYKDSTLIMQLLRDNLTLWTSDQQDEEAGEGN

SEQ ID NO: 14663 - protein, 246 aa, Homo sapiens [sequence omitted]

SEQ ID NO: 14664 - protein, 245 aa, Homo sapiens
MEKTELIQKAKLAEQAERYDDMATCMKAVTEQGAELSNEERNLLSVAYKNVVGGRRSAWRVISSIEQKTDTSDKKLQLIKDYREKVESELRSICTTVLELLDKYLIANATNPESKVFYLKMKGDYFRYLAEVACGDDRKQTIDNSQGAYQEAFDISKKEMQPTHPIRLGLALNFSVFYYEILNNPELACTLAKTAFDEAIAELDTLNEDSYKDSTLIMQLLRDNLTLWTSDSAGEECDAAEGAEN

SEQ ID NO: 14665 - protein, 246 aa, Homo sapiens
MGDREQLLQRARLAEQAERYDDMASAMKAVTELNEPLSNEDRNLLSVAYKNVVGARRSSWRVISSIEQKTMADGNEKKLEKVKAYREKIEKELETVCNDVLSLLDKFLIKNCNDFQYESKFVYLKMKGDYYRYLAEVASGEKKNSVVEASEAAYKEGFEISKEQMQPTHPIRLGLALNFSVFYYEIQNAPEQACLLAKQAFDDAIAELDTLNEDSYKDSTLIMQLLRDNLTLWTSDLQDEEAGEGN

SEQ ID NO: 14666 - protein, 248 aa, Homo sapiens [sequence omitted]

SEQ ID NO: 14667 - protein, 248 aa, Homo sapiens [sequence omitted]

SEQ ID NO: 14668 - protein, 218 aa, Homo sapiens
VTELNEPLSNEERNLLSVAYKNVVGARRSSWRVISSIEQKTSADGNEKKIEMVRAYREKIEKELEAVCQDVLSLLDNYLIKNCSETQYESKVFYLKMKGDYYRYLAEVATGEKRATVVESSEKAYSEAHEISKEHMQPTHPIRLGLALNYSVFYYEIQNAPEQACHLAKTAFDDAIAELDTLNEDSYKDSTLIMQLLRDNLTLWTSDQQDDDGGEGNN

SEQ ID NO: 14669 - protein, 247 aa, Homo sapiens
MVDPEQLVQKARLAEQAEGYDDMAAAMKNVTELNEPLSNEERNLLSVAYKNVVGARRSSWRVISSIEQKTSADGNEKIEMVRAYREKVEKELEAVCQDVLSLVDNYLYKNCSETQYERKDLYLKMKGDYYRYLAEVATGEKRGDVVESSEKAYSEREISKEHMQPTHPIRLGLALNYSVFYYEIQNAPEQACHLAKTEFEDAIAELDTLNEESYKDSTLIMQLLRDNLTLWTSDQQDDHDGGEGNNN

SEQ ID NO: 14670 - protein, 200 aa, Homo sapiens
MKAVTELNEPLSNEDRNLLSVAYKNVVGARRSSWRVISSIEQKTMADGNEKKLEKVKAYREKIEKELETVCNDVLSLLDKFLIKNCNDFQYESKVFYLKMKGDYYRYLAEVASGEKKTSVVEASEAAYKEAFEISKEQMQPTHPIRLGLALNFSVFYYEIQNAPEQACLLAKQAFDDAIAELDTLNEDSYKDSTLIMQLL

SEQ ID NO: 14671 - protein, 199 aa, Homo sapiens
MKAVTELNEPLSNEDRNLLSVAYKNVVGARRSSWRVISSIEQKTMADGNEKKLEKVKAYREKIEKELETVCNDVLSLLDKFLIKNCNDFQYESKVFYLKMKGDYYRYLAEVASGEKKTSVVEASEAAYKEAFEISKEQMQPTHPIRLGLALNFSVFYYEIQNAPEQACLLAKQAFDDAIAELDTLNEDSYKDSTLIMQL

SEQ ID NO: 14672 - protein, 216 aa, Homo sapiens
MERASLIQKAKLAEQAERYEDMAAFMKGAVEKGEELSCEERNLLSVAYKNVVGGQRAAWRVLSSIEQKSNEEGSEEKGPEVREYRVFYLKMKGDYYRYLAEVATGDDKKRIIDSARSAYQEAMDISKKEMPPTNPIRLGLALNFSVFHYEIANSPEEAISLAKTTFDEAMADLHTLSEDSYKDSTLIMQLLRDNLTLWTADNAGEEGGEAPQEPQS

SEQ ID NO: 14673 - protein, 176 aa, Homo sapiens
MADGNEKKLEKVKAYREKIEKELETVCNDVLSLLDKFLIKNCNDFQYESKVFYLKMKGDYYRYLAEVASGEKKNSVVEASEAAYKEAFEISKEQMQPTHPIRLGLALNFSVFYYEIQNAPEQACLLAKQAFDDAIAELDTLNEDSYKDSTLIMQLLRDNLTLWTSDQQDEEAGEGN

SEQ ID NO: 14674 - protein, 173 aa, Homo sapiens
DKKLQLIKDYREKVESELRSICTTVLELLDKYLIANATNPESKVFYLKMKGDYFRYLAEVACGDDRKQTIDNSQGAYQEAFDISKKEMQPTHPIRLGLALNFSVFYYEILNNPELACTLAKTAFDEAIAELDTLNEDSYKDSTLIMQLLRDNLTLWTSDSAGEECDAAEGAEN

SEQ ID NO: 14675 - protein, 159 aa, Homo sapiens [sequence omitted]

SEQ ID NO: 14676 - protein, 181 aa, Homo sapiens [sequence omitted]

SEQ ID NO: 14677 - protein, 249 aa, Homo sapiens [sequence omitted]

SEQ ID NO: 14678 - protein, 133 aa, Homo sapiens
MKSLTEKEGELSNEERNRLSVPYKNVVGVWILDQSQQAYQEACEITKKEMQPTDPIRLGMALNFSVFYYELLNSPEKSHSLVKAAFDEALAELDTLSEESYKDRLLMQLLRDNLTLWTLDTQGDETEARGRKS

SEQ ID NO: 14679 - protein, 99 aa, Homo sapiens [sequence omitted]

SEQ ID NO: 14680 - protein, 95 aa, Homo sapiens [sequence omitted]

SEQ ID NO: 14681 - protein, 118 aa, Homo sapiens
MPVTRPLQKLVLLQTQEKLEELMQFLIPSASQAESKVFYLKMKGDYYGYLSEVAAGDHKKGIVDQSQQAYQEAFGISKKEMQRAHPIRLGLALNYSVFYYEILNSPRESLLSCKDSCQ

SEQ ID NO: 14682 - protein, 179 aa, Homo sapiens
MLKTLPHSCVERTFLFFSPAPQRWELCPHKDGALKRTDNGGWAHEVCALYIPEVQFANDSTMEPIVLQSVPHDHCNKVETELKLICGDVLDALDKHLIPAATTGKSKVFYYEMKGVYHRYLAEFATGNDRKEVAENSLVAYKAASDIATGFSMLARLGSNSWFQVNLPTWLPKVLRLQA

SEQ ID NO: 14683 - protein, 69 aa, Homo sapiens
ERYDDMAACMKSVTEQGAELSNEERNLLSVAYKNVVGARRSSWRVVSSIEQKTEGAEKKQQMAREYREK

SEQ ID NO: 14684 - protein, 220 aa, Homo sapiens
MALSGVRSDTSSAAYKVQPQTCHPTIRHFQNTVYNEPEPSDQTGTREKSTSVSSPQRDRRRRRAGRGQGRRRGAAESPQRQGLRPELLALQPPRPEGPGRAERSRPEPRRTRDAELPAPPTSLSLVWAAQLGGSRPPAPPQHPRGLCGLSLLSSGLGPVVDGAEMVESVKKLAGMDVELTAEERNLLSVTYKNVIGARRASWRIISSLEQKEGTREEKTS

SEQ ID NO: 14685 - protein, 98 aa, Homo sapiens
MDVELTVEERNLLSVSYNNVIEARRAFWRIISIEQKEENKGEDKLKMIWEYQQMVETELNLICCHFLLAKAAFDDAIAELDTLSEGSYNDTMDFRHAG

SEQ ID NO: 14686 - protein, 114 aa, Homo sapiens
MPGSSNFDSLTKAKLAELARWYDYITTWVKAVTEQGTKLFNEELNLLSVAYTYMRVTLSIEQKTVTSDKKLQLIKGYQEKVESELRSICTTVLELLDEYLIADATNPEIASGDD

SEQ ID NO: 14687 - protein, 245 aa, Bos taurus
MDKNELVQKAKLAEQAERYDDMAAAMKSVTEQGAELSNEERNLLSVAYKNVVGARRSSWRVVSSIEQKTEGAEKKQQMAREYREKIETELRDICNDVLSLLEKFLIPNASQAESKVFYLKMKGDYYRYLAEVAAGDDKKGIVDQSQQAYQEAFEISKKEMQPTHPIRLGLALNFSVFYYEILNSPEKACSLAKTAFDEAIAELDTLSEESYKDSTLIMQLLRDNLTLWTSDTQGDEAEAGEGGEN

SEQ ID NO: 14688 - protein, 245 aa, Bos taurus
  unsure (1)..(245): unsure at all Xaa locations
XMDKSELVQKAKLAEQAERYDDMAAAMKAVTEQGHELSNEERNLLSVAYKNVVGARRSSWRVISSIEQKTERNEKKQQMGKEYREKIEAELQDICNDVLQLLDKYLIPNATQPESKVFYLKMKGDYFRYLSEVASGDNKQTTVSNSQQAYQEAFEISKKEMQPTHPIRLGLALNFSVFYYEILNSPEKACSLAKTAFDEAIAELDTLNEESYKDSTLIMQLLRDNLTLWTSENQGDEGDAGEGEN

SEQ ID NO: 14689 - protein, 244 aa, Bos taurus
MDKSELVQKAKLAEQAERYDDMAAAMKAVTEQGHELSNEERNLLSVAYKNVVGARRSSWRVISSIEQKTERNEKKQQMGKEYREKIEAELQDICNDVLQLLDKYLIPNATQPESKVFYLKMKGDYFRYLSEVASGDNKQTTVSNSQQAYQEAFEISKKEMQPTHPIRLGLALNFSVFYYEILNSPEKACSLAKTAFDEAIAELDTLNEESYKDSTLIMQLLRDNLTLWTSENQGDEGDAGEGEN

SEQ ID NO: 14690 - protein, 246 aa, Bos taurus
  unsure (1)..(246): unsure at all Xaa locations
XVDREQLVQKARLAEQAERYDDMAAAMKNVTELNEPLSNEERNLLSVAYKNVVGARRSSWRVISSIEQKTSADGNEKKIEMVRAYREKIEKELEAVCQDVLSLLDNYLIKNCSETQIESKVFYLKMKGDYYRYLAEVATGEKRATVVESSEKAYSEAHEISKEHMQPTHPIRLGLALNYSVFYYEIQNAPEQACHLAKTAFDDAIAELDTLNEDSYKDSTLIMQLLRDNLTLWTSDQQDDDGGEGN

SEQ ID NO: 14691 - protein, 247 aa, Bos taurus
MVDREQLVQKARLAEQAERYDDMAAAMKNVTELNEPLSNEERNLLSVAYKNVVGARRSSWRVISSIEQKTSADGNEKKIEMVRAYREKIEKELEAVCQDVLSLLDNYLIKNCSETQIESKVFYLKMKGDYYRYLAEVATGEKRATVVESSEKAYSEAHEISKEHMQPTHPIRLGLALNYSVFYYEIQNAPEQACHLAKTAFDDAIAELDTLNEDSYKDSTLIMQLLRDNLTLWTSDQQDDDGGEGNN

SEQ ID NO: 14692 - protein, 246 aa, Ovis aries
MTMDKSELVQKAKLAEQAERYDDMAAAMKAVTEQGHELSNEERNLLSVAYKNVVGARRSSWRVISSIEQKTERNEKKQQMGKEYREKIEAELQDICNDVLQLLDKYLIPNATQPESKVFYLKMKGDYFRYLSEVASGDNKQTTVSNSQQAYQEAFEISKKEMQPTHPIRLGLALNFSVFYYEILNSPEKACSLAKTAFDEAIAELDTLNEESYKDSTLIMQLLRDNLTLWTSENQGDEGDAGEGEN

SEQ ID NO: 14693 - protein, 245 aa, Ovis aries
MDKNELVQKAKLAEQAERYDDMAACMKSVTEQGAELSNEERNLLSVAYKNVVGARRSSWRVVSSIEQKTEGAEKKQQMAREYREKIETELRDICNDVLSLLEKFLIPNRSQPESKVFYLKMKGDYYRYLAEVAAGDDKKGIVDQSQQAYQEAFEISKKEMQPTHPIRLGLALNFSVFYYEILNSPEKACSLAKTAFDEAIAELDTLSEESYKDSTLIMQLLRDNLTLWTSDTQGDEAEAGEGGEN

SEQ ID NO: 14694 - protein, 248 aa, Ovis aries
MERASLIQKAKLAEQAERYEDMAAFMKSAVEKGEELSCEERNLLSVAYKNVVGGQRAAWRVLSSIEQKSNEESSEEKGPEVQEYREKVETELRGVCDTVLGLLDTHLIKEAGDAESRVFYLKMKGDYYRYLAEVATGDDKKRIIDSARSAYQEAMDISKKEMPPTNPIRLGLALNFSVFHYEIANSPEEAISLAKTTFDEAMADLHTLSEDSYKDSTLIMQLLRDNLTLWTADNAGEEGGEAPEEPQS

SEQ ID NO: 14695 - protein, 212 aa, Ovis aries
MDDREDLVYQAKLAEQAERYDEMVESMKKVAGMDVELTVEERNLLSVAYKNVIGARRASWRIISSIEQKEENKGGEDKLKMIREYRQMVETELKLICCDILDVLDKHLIPAANTGESKVFYYKMKGDYHRYLAEFATGNDRKEAAENSLVAYPTHPIRLGLALNFSVFYYEIDSTLIMQLLRDNLTLWTSDMQGDGEEQNKEALQDVEDENQ

SEQ ID NO: 14696 - protein, 152 aa, Ovis aries
MDDREDLVYQAKLAEQAERYDEMVESMKKVAGMDVELTVEERNLLSVAYKNVIGARRASWRIISSIEQKEENKGGEDKLKMIREYRQMVETELKLICCDILDVLDKHLIPAANTGESKVFYYKMKGDYHRYLAEFATGNDRKEAAENSLVAY

SEQ ID NO: 14697 - protein, 162 aa, Ovis aries
MDKNELVQKAKLAEQAERYDDMAACMKSVTEQGAELSNEERNLLSVAYKNVVGARRSSWRVVSSIEQKTEGAEKMKGDYYRYLAEVAAGDDKKGIVDQSQQAYQEAFEISKKEMQPTHPIRLGLALNFSVFYYEILNSPEKAMQLLRDNLTLWTSDTQGDEA

SEQ ID NO: 14698 - protein, 138 aa, Ovis aries
MDKSELVQKAKLAEQAERYDDMAAAMKAVTEQGHELSNEEWRVISSIEQKTERNEKKQMGKEYREKIEAELQDIMKGDYFRYLSEVASGDNKQTTVSNSQQAYQEAFEISMQPTHPIRLGLALNFSWTSENQGDEGDA

SEQ ID NO: 14699 - protein, 45 aa, Ovis aries
DDAIAELDTLNEDSYKDSTLIMQLLRDNLTLWTSDQQDEEAGEGN

SEQ ID NO: 14700 - protein, 217 aa, Mus musculus
MATVEPETTPTTNPPPAEEEKTESNQEVANPEHYIKHPLQNRWALWFFKNDKSKTWQANLRLISKFDTVEDFWALYNHIQLSSNLMPGCDYSLFKDGIEPMWEDEKNKRGGRWLITLNKQQRRSDLDRFWLETLLCLIGESFDDYSDDVCGAVVNVRAKGDKIAIWTTESENRDAVTHIGRVYKERLGLPPKIVIGYQSHADTATKSGSTTKNRFVV

SEQ ID NO: 14701 - protein, 217 aa, Mus musculus
MATVEPETTPTTNPPPAEEEKTESNQEVANPEHYIKHPLQNRWALWFFKNDKSKTWQANLRLISKFDTVEDFWALYNHIQLSSNLMPGCDYSLFKDGIEPMWEDEKNKRGGRWLITLNKQQRRSDLDRFWLETLLCLIGESFDDYSDDVCGAVVNVRAKGDKIAIWTTECENRDAVTHIGRVYKERLGLPPKIVIGYQSHADTATKSGSTTKNRFVV

SEQ ID NO: 14702 - protein, 190 aa, Mus musculus
VANPEHYIKHPLQNRWALWFFKNDKSKTWQANLRLISKFDTVEDFWALYNHIQLSSNLMPGCDYSLFKDGIEPMWEDEKNKRGGRWLITLNKQQRRSDLDRFWLETLLCLIGESFDDYSDDVCGAVVNVRAKGDKIAIWTTECENRDAVTHIGRVYKERLGLPPKIVIGYQSHADTATKSGSTTKNRFVV

SEQ ID NO: 14703 - protein, 217 aa, Mus musculus
MATVEPETTPTTNPPPAEEEKTESNQEVANPEHYIKHPLQNRWALWFFKNDKSKTWQANLRLISKFDTVLDFWALYNHIQLSSNLMPGCDYSLFKDGIEPMWEDEKNKRGGRWLITLNKQQRRSDLDRFWLETLLCLIGESFDDYSDDVCGAVVNVRAKGDKIAIWTTECENRDAVTHIGRVYKERLGLPPKIVIGYQSHADTATKSGSTTKNRFVV

SEQ ID NO: 14704 - protein, 254 aa, Rattus norvegicus
MNVSYRLPYHIAHNPAYSSSLTINEARDSPYNEKPSEATAEGLQGEARDLPGSLKTVKQKAQREHPTKLPRELHPLQFRWVLWFFKNDRSRAWQDNLQLVTKFDTVEDFWATYRHVKLASKLSCGCDYALFKEGIQPMWEDSRNKRGGRWLLSLAKQQRHMELDRLWLETLLCLLGESFEEYSGEVCGAVVNIRTKGDKIALWTSEAENKAGVMHIGHIYKERLGLSTKTIIGYQAHADTAAKSNSLAKNKFVV

SEQ ID NO: 14705 - protein, 132 aa, Rattus norvegicus
MPGCDYSLFKDGIEPMWEDEKNKRGGRWLITLNKQQRRSDLDRFWLETLLCLIGESFDDYSDDVCGAVVNVRAKGDKIAIWMTECENRDAVTHIGRVYKERLGLPPKTVIGYQSHADTATKSGSTTKNRFVV

SEQ ID NO: 14706 - protein, 225 aa, Anopheles gambiae str. PEST
LKCPIMAGKTNEETEQQQQQQNENETTEQSQELAEQSNAPESIDPECLIKHPLQHTWTLWYLEVDRTKKWTDSMNEVTSFSTVEDFWSLFNHIRGPSEIKVGGDYMLFKSHIRPMWEDDANKHGGRWTISMNKRLSDKCWLDTVLCLIGETFEHSDQICGATVNVRQKIDKISIWTADYDNRAAVLDIGRTYKERLGLRENIYYQMHKDTMVKLSSSGTKSTYTV

SEQ ID NO: 14707 - protein, 184 aa, Marsupenaeus japonicus
MSTAVNKYDVLKSNDDSGEEDSGSRDMKDKPLPQVEVKPGEHPLQYTYSLWFSRRAPGKQATTQNYDQNLQLLARFASVEQFWGYYSRCLRPVDLPSHSDIHIFKDGIKPMWEDSANKNGGKWIVRLRKGLASRCWENMILAMLGEQFMVGDEICGAVISVRFQEDIISVWNRTAPDSITTGKI

SEQ ID NO: 14708 - protein, 198 aa, Arabidopsis thaliana
MATDDVNEPLPAAAELPATEAEKQPHKLERKWSFWFDNQSKKGAAWGASLRKAYTFDTVEDFWGLHETIFQTSKLTANAEIHLFKAGVEPKWEDPECANGGKWTWVVTANRKEALDKGWLETLMALIGEQFDEADEICGVVASVRPQSKQDKLSLWTRTKSNEAVLMGIGKKWKEILDVTDKITFNNHDDSRRSRFTV

SEQ ID NO: 14709 - protein, 216 aa, Arabidopsis thaliana
EFGTRPKAVSEENTTAKNMATDDVNEPLPAAAELPATEAEKQPHKLERKWSFWFDNQSKKGAAWGASLRKAYTFDTVEDFWGLHETIFQTSKLTANAEIHLFKAGVEPKWEDPECANGGKWTWVVTANRKEALDKGWLETLMALIGEQFDEADEICGVVASVRPQSKQDKLSLWTRTKSNEAVLMGIGKKWKEILDVTDKITFNNHDDSRRSRFTV

SEQ ID NO: 14710 - protein, 206 aa, Oryza sativa (japonica cultivar-group); identical to SEQ ID NO: 574

SEQ ID NO: 14711 - protein, 228 aa, Capsicum annuum
MATAEMEKTTTFDEAEKVKLNANEADDEVEEGEIVEETDDTTSYLSKEIATKHPLEHSWTFWFDNPVAKSKQAAWGSSLRNVYTFSTVEDFWGAYNNIHHPSKLVVGADLHCFKHKIEPKWEDPVCANGGTWKMSFSKGKSDTSWLYTLLAMIGHQFDHEDEICGAVVSVRGKGEKISLWTKNAANETAQVSIGKQWKQFLDYSDSVGFIFHDDAKRLDRNAKNRYTV

SEQ ID NO: 14712 - protein, 228 aa, Capsicum annuum
MATAEMEKTTTFDEAEKVKLNANEADDEVEEGEIVEETDDTTSYLSKEIATKHPLEHSWTFWFDNPEAKSKQAAWGSSLRNVYTFSTVEDFWGAYNNIHHPSKLVVGANLHCFKHKIEPKWEDPVCANGGTWKMSFSKGKSDTSWLYTLLAMIGHQFDHEDEICGAVVSVRGKGEKISLWTKNAANETAQVSIGKQWKQFLDYSDSVGFIFHDDAKRLDRNAKNRYTV

SEQ ID NO: 14713 - protein, 228 aa, Capsicum annuum
MATAEMEKTTTFDEAEKVKLNANEADDEVEEGEIVEETDDTTSYLSKEIATKHPLEHSWTFWFDNPEAKSKQAAWGSSRRNVYTFSTVEDFWGAYNNIHHPSKLVVGADLHCFKHKIEPKWEDPVCANGGTWKMSFSKGKSDTSWLYTLLAMIGHQFDHEDEICGAVVSVRGKGEKISLWTKNAANETAQVSIGKQWKQFLDYSDSVGFIFHDDAKRLDRNAKNRYTV

SEQ ID NO: 14714 - protein, 231 aa, Lycopersicon esculentum
MAAAEMERTMSFDAAEKLKAADGGGGEVDDELEEGEIVEESNDTASYLGKEITVKHPLEHSWTFWFDNPTTKSRQTAWGSSLRNVYTFSTVENFWGAYNNIHHPSKLIMGADFHCFKHKIEPKWEDPVCANGGTWKMSFSKGKSDTSWLYTLLAMIGHQFDHGDEICGAVVSVRAKGEKIALWTKNAANETAQVSIGKQWKQFLDYSDSVGFIFHDDAKRLDRNAKNRYTV

SEQ ID NO: 14715 - protein, 209 aa, Triticum aestivum
MAEVEAALPVAATETPEVAAEGDAGAAEAKGPHKLQRQWTFWYDIQTKPKPGAAWGTSLKKGYTFDTVEEFWCLYDQIFRPSKLVGSADFHLFKAGVEPKWEDPECANGGKWTVISSRKTNLDTMWLETCMALIGEQFDESQEICGVVASVRQRQDKLSLWTKTASNEAVQVDIGKKWKEVIDYNDKMVYSFHDDSRSQKPSRGGRYTV

SEQ ID NO: 14716 - protein, 209 aa, Triticum aestivum; identical to SEQ ID NO: 14715

SEQ ID NO: 14717 - protein, 209 aa, Triticum aestivum
MAEVEAALPVAATETPEVAAESDAGAAEAKGPHKLQRQWTFWYDIQTKPKPGAAWGTSLKKGYTFDTVEEFWCLYDQIFRPSKLVGSADFHLFKAGVEPKWEDPECANGGKWTVISSRKANLDTMWLETCMALIGEQFDESQEICGVVASVRQRQDKLSLWTKTASNEAVQVDIGKKWKEVIDYNDKMVYSFHDDSRSQKPSRGGRYTV

SEQ ID NO: 14718 - protein, 209 aa, Triticum aestivum; identical to SEQ ID NO: 14717

SEQ ID NO: 14719 - protein, 270 aa, Zea mays
VKLPTPIFISSSSSERPKPSPFLLDASLPQPQPLSLVWYRLSHTPLPQPRKTLEKRRRRDMAEVEAPAAAVAAATPEVATVTEGGAATEAKGPHKLHRQWTFWYDIQSKPKPGAAWGTSLKKAYTFDTVEEFWGLYDHVFRPSKLPGTADFHLFKAGVEPKWEDPECANGGKWTVPCNRKPTFETMWLETLMALVGEQFDETDDICGIVASVRPRGDKLALWTRTASNEAVQVNIGKKWKDVIDYNDKIIYTFHDDSRRDKPSRGGRYTV

SEQ ID NO: 14720 - protein, 255 aa, Zea mays
KGRSRLRSSSTRLFHSRNLYPSSGIVSHTPLPQLRKTLEKRRRRDIAEVEAPAAAVAAATPEVATVTEGGAATEAKGPHKLHRQWTFWYDIQSKPKPGAAWGTSLKKAYTFDTVEEFWGLYDHVFRPSKLPGTADFHLFKAGVEPKWEDPECANGGKWTVPCNRKPTFETMWLETLMALVGEQFDETDDICGIVASVRPRGDKLALWTRTASNEAVQVNIGKKWKDVIDYNDKIIYTFHDDSRRDKPSRGGRYTV

SEQ ID NO: 14721 - protein, 216 aa, Zea mays
MAEVEAPATAVEAPAAAVATTTPEVAAPEAGAATEAKGPHKLHRQWTFWYDIQTKTKSGAAWGTSLKKAYTFDTVEEFWSMYDQIFRPSKLSGNADFHLFKAGVEPKWEDPECANGGKWTVPCNRKATFETMWLETLMALIGEQFDETEDICGIVASVRARGDKLALWTRTASNEAVQVNIGKKWKDVIDYNDKITYTFHDDSKRDKPSRGGRYTV

SEQ ID NO: 14722 - protein, 216 aa, Zea mays; identical to SEQ ID NO: 14721

SEQ ID NO: 14723 - protein, 264 aa, Zea mays
  unsure (1)..(264): unsure at all Xaa locations
ISISSSSLERPKPSPFLLDASLPQPQPLSLVWYRLSHTPLPQPRKTLEKRRRRDMAEVEAPAAAVAAATPEVATVTEGGAATEAKGPHKLHRQWTFWYDIQSKPKPGAAWGTSLXXAYTFDTVEEFWGLYDHVFRPSKLPGTADFHLFKAGVEPKWEDPECANGGKWTVPCNRKPTFETMWLETLMALVGEQFDETDDICGIVASVRPRGDKLALWTRTASNEAVQVNIGKKWKDVIDYNDKITYTFHDDSRRDKPSRGGRYTV

SEQ ID NO: 14724 - protein, 216 aa, Zea mays
MAEVEAPAAAVEAPAAAVAPTTPEVAAPEAGAATEAKGPHKLHRQWTFWYDIQTKTKSGAAWGTSLKKAYTFDTVEEFWSMYDQIFRPSKLSGSADFHLFKAGVEPKWEDPECANGGKWTVPCNRKATFETMWLETLMALIGEQFDETEDICGIVASVRARGDKLALWTRTASNEAVQVNIGKKWKDVIDYNDKITYTFHDDSKRDKPSRGGRYTV

SEQ ID NO: 14725 - protein, 266 aa, Zea mays
  unsure (1)..(266): unsure at all Xaa locations
VASLPQPLPLSLVCDRLSHTPLPQLSLTSKSMAERDMAQDKAPAAARATFTPDEATEXPRSKTTTDANATNNLHRQRTFWYHIYTKPNPDAAWRTSLKTXAYTFDTAXEELCGLYDLAVRPIKHTVTADLLLFDAEPKPECEDPEVANGSXQWTVTCNRNPCCETMWLETLMALVGEQFDETDDICGIVASVRPRGDKLALWTRTASNEAVQVHIGKKWKDVIDYNDKIIYTFHVVSRRDXPSTGGRFPRVSCRRRWSLLFGLDRG

SEQ ID NO: 14726 - protein, 243 aa, Schizosaccharomyces pombe
MADAEDSRHSKNEGFPNTSLITEKLDLLDLFGSPKVKTEREGRPARLLEGLSAVNAETAFVKTHPLQHEWTLWFLKPPTQGLEWSDLLKEIISFKTVEEFWGIFKTISKASMLPAKSDYSYFLKGIRPEWEDPQNMNGGKWAYQSKHKGSNLDELWLYMVLAAIGETLDPTGKEVTGVVCNMRKGFYRIAVWTRNCNDKDVLEKIGLRFKEVLGISDKETIEYSAHEDSSKAGSMRAKTRMSL

SEQ ID NO: 14727 - protein, 218 aa, Schizosaccharomyces pombe
MQTEQPPKESQTENTVSEPQEKALRTVFDDKINFNLKHPLARPWTLWFLMPPTPGLEWNELQKNIITFNSVEEFWGIHNNINPASSLPIKSDYSFFREGVRPEWEDVHNKTGGKWAFQNKGRGGNALDEMWLTTVLAAIGETLDPTGQEVMGVVINMRKGFYRLAVWTKSCNNREVLMEIGTRFKQVLNLPRSETIEFSAHEDSSKSGSTRAKTRMSV

SEQ ID NO: 14728 - protein, 112 aa, Schizosaccharomyces pombe
DPQNMNGGKWAYQSKHKGSNLDELWLYMVLAAIGETLDPTGKEVTGVVCNMRKGFYRIAVWTRNCNDKDVLEKIGLRFKEVLGISDKETIEYSAHEDSSKAGSMRAKTRMSL

SEQ ID NO: 14729 - protein, 213 aa, Saccharomyces cerevisiae
MSVEEVSKKFEENVSVDDTTATPKTVLSDSAHFDVKHPLNTKWTLWYTKPAVDKSESWSDLLRPVTSFQTVEEFWAIIQNIPEPHELPLKSDYHVFRNDVRPEWEDEANAKGGKWSFQLRGKGADIDELWLRTLLAVIGETIDEDDSQINGVVLSIRKGGNKFALWTKSEDKEPLLRIGGKFKQVLKLTDDGHLEFFPHSSANGRHPQPSITL

SEQ ID NO: 14730 - protein, 248 aa, Neurospora crassa
MSEQVDLTTIPISPEGGNTNGDAAAAKDDKTVTVFHDKEHFNVKHPLSNRWTLWFTKPSSGKGDNWNDLLKEVITFETVEEFWGVYNNIAPVSELALKSDYHLFKEGVRPEWEDPQNKHGGKWSYQFKEKRNVNIDEIWLHTMLAAIGETLEDEEDGEVMGVVVNVRKAFFRVGVWTRTIGKHIPGRGDGDISGGKGRSPEKGKEILMAIGRRFKEVLQLPPNEALEFSGHTESAHSGSSRARAKMTV

SEQ ID NO: 14731 - protein, 173 aa, Agaricus bisporus
TVEEFWGLYNNIVPPSQLPQKANYYLFKEGIIPAWEDEANKYGGKWSIQLPKDKNRANVDKMWLYTMLAAIGEMFDPTPDNAEGPLSQSLITGVIVSIRPQFYRISIWTRLAPAPTEEDRLRERIETVGRYFKMNVLGYAEGARLAGPLATEVEFLSHKDSEKKGKSAKKIVV

SEQ ID NO: 14732 - protein, 209 aa, Candida albicans
MSEELAQKTEELSLDSKTVFDSKEEFNAKHPLNSRWTLWYTKPQTNKSENWHDLLKPVITFSSVEEFWGIYNSIPPANQLPLKSDYHLFKEGIRPEWEDEANSKGGKWQFSFNKKSEVNPIINDLWLRGLLAVIGETIEDEENEVNGIVLNIRKQAYRVGIWTKDCDESKLKTVGERLKKVLQLNDEQKVEFMSHDASNTRGAEPQIVL

SEQ ID NO: 14733 - protein, 209 aa, Candida glabrata
MSVDEVTKKFEETVSVDGPKTVLSDAKDFEVKHPLNTKWTLWYTKPAVDKSESWSDLLRPVTSFQSVEEFWAIVQNIPEPHELPLKSDYHVFRNDIRPEWEDEANAKGGKWSFQVRGRGAEIDELWLRTLLAVIGETIDEEDSQINGVVLNVRKGGNRFALWTKSCDKEPLSNIGARFKQVLKLADEDTLEFFPHSTANDRHSQPTITL

SEQ ID NO: 14734 - protein, 175 aa, Guillardia theta
MSSHKYHYQNPWTLWYDSSSNNVISYEWNQLLIRISTFDNLEDFLFLLTNIAYLTDLPLGSSYHVFKNNIEPSWEDESNKNGGKWILLLPKNSCCNINKIWEKSLSFTVFYENCNLINGIVGSVKKNHLRISIWTSKSEAKNDQINLGKNWYFFLKNYFDDFHFKIEYSPHKSFN

SEQ ID NO: 14735 - protein, 281 aa, Leishmania major
MDPNTCAPASAVTDEQPLTLLWGTWEMWCDMPQRQQGQSTENTNWLEQVKSIGLFDSAEGFWGIFNCTILPSQLPPNGSYYLFRKHIAPMWEHEANRRGGKWVIPFTGKASRSEGDLQPVDEAWQTLCLSAIGELFPGDEEEICGVTVSRGRQRTLPSGHATSALSEWKLCLWTRSADNRGSQIRIAEYIRKQLHLQPPSKEASRDGKSGEQDTLMEMPRSPDRSPVAKMREASGIPSAMTYVAHRDLMEAKQEFVKGGSSVAQAFRPKYTLAIDVRNEGV

SEQ ID NO: 14736 - protein, 214 aa, Leishmania major
MSAPSSVPPHKMANLHKLQRAWTLWYDSPSTYNTENWEMSLVPIMTVHSVEEFFVMLRYMKPLHALRTSSQYHFFQEGVKPMWEDPANKKGGKLWVNLDITSANGRSSNNNTSGTSAADGSAAEAKTDLDKAWENVLMATVGEYLDCVDKKDTPTEPFVTGIVMSKRKYHNRLAVWVSDASATDKIEALKKALTKEASLAPIASMVFTKHGEAS

SEQ ID NO: 14737 - protein, 173 aa, Encephalitozoon cuniculi
MELASQWVFWQNSNDESNAKSWGDDLVAVGEVSTVPEFLYLCDEISNAGIGRLCTMNLFRKGIKPMWEDEANIDGGRIIMDVPVSGKDNVGELWKRTMAFCVSNTVDNICGCVFNEKQSFYKIAIWFGKDYNQDVIKDMWQEALGPGRLSIYSFLHKKSLDSSKGKKKWGGRR

SEQ ID NO: 14738 - protein, 183 aa, Hydra vulgaris
  unsure (1)..(183): unsure at all Xaa locations
MVETKLDMDDLNNEQELDNNQDVQLSKEIYSKHPLQNTWALWFYKNEKSKSWEANXRVVTTFXTVEDFWAIYNHIQLASKLTLGCDYALFKEGIKPMWEDARNRMGGRWLVSLNRNQRTTDLDRLWLETLLCLIGQAFGDDSDQVCGAVVNIRIKGDKLAMWTSLAENVDSVLKIGRCYKERL

SEQ ID NO: 14739 - protein, 248 aa, Caenorhabditis elegans
MSTSVAENKALSASGDVNASDASVPPELLTRHPLQNRWALWYLKADRNKEWEDCLKMVSLFDTVEDFWSLYNHIQSAGGLNWGSDYYLFKEGIKPMWEDVNNVQGGRWLVVVDKQRRTQLLDHYWLELLMAIVGEQFDEYGDYICGAVVNVRQKGDKVSLWTRDATRDDVNLRIGQVLKQKLSIPDTEILRYEVHKDSSARTSSTVKPRICLPAKDPAPVKEKGPAATTSPSNPGTEATGTSPATPTP

SEQ ID NO: 14740 - protein, 250 aa, Caenorhabditis elegans
MSTSVAENKALSASGDVNASDASVPPELLTRHPLQNRWALWYLKADRNKEWEDCLKMVSLFDTVEDFWSLYNHIQSAGGLNWGSDYYLFKEGIKPMWEDVNNVQGGRWLVVVDKQLQRRTQLLDHYWLELLMAIVGEQFDEYGDYICGAVVNVRQKGDKVSLWTRDATRDDVNLRIGQVLKQKLSIPDTEILRYEVHKDSSARTSSTVKPRICLPAKDPAPVKEKGPAATTSPSNPGTEATGTSPATPTP

SEQ ID NO: 14741 - protein, 251 aa, Caenorhabditis elegans
MSTSVAENKALSASGDVNASDASVPPELLTRHPLQNRWALWYLKADRNKEWEDCLKMVSLFDTVEDFWSLYNHIQSAGGLNWGSDYYLFKEGIKPMWEDVNNVQGGRWLVVVDKQKLQRRTQLLDHYWLELLMAIVGEQFDEYGDYICGAVVNVRQKGDKVSLWTRDATRDDVNLRIGQVLKQKLSIPDTEILRYEVHKDSSARTSSTVKPRICLPAKDPAPVKEKGPAATTSPSNPGTEATGTSPATPTP

SEQ ID NO: 14742 - protein, 212 aa, Caenorhabditis elegans
MTETEQTTAPIYPLKRNWTWWYLNDERNKSWEDRLKKVYTFNTVSEFWALYDAIRPPSGLNALCDYNVFRDDIQPMWEVPENSNGGRWLIVIDKGKTPEMVDAIWLEILMALVGEQFGKDMESICGLVCNVRGKGSKISVWTKDCNDDETNMRIGVVLKEKLMAASKDHSKPLFDVIRYEDHESCQKKTSSVVKAKLSLHSSDAPVAEKSAV

SEQ ID NO: 14743 - protein, 231 aa, Caenorhabditis elegans
MSDSEIAFEKLKISGEKEGMTETEQTTAPIYPLKRNWTWWYLNDERNKSWEDRLKKVYTFNTVSEFWALYDAIRPPSGLNALCDYNVFRDDIQPMWEVPENSNGGRWLIVIDKGKTPEMVDAIWLEILMALVGEQFGKDMESICGLVCNVRGKGSKISVWTKDCNDDETNMRIGVVLKEKLMAASKDHSKPLFDVIRYEDHESCQKKTSSVVKAKLSLHSSDAPVAEKSAV

SEQ ID NO: 14744 - protein, 228 aa, Caenorhabditis elegans [sequence omitted]

SEQ ID NO: 14745 - protein, 201 aa, Caenorhabditis elegans
MTELTTPIYPLQRNWSWWFLNDDRNASWQDRLKKVYTFNTVPEFWAFYEAILPPSGLNDLCDYNVFRDDIQPKWEAPENWDGGRWLIIINKGKTPEVLDAVWLEILLALIGEQFGKDMESICGLVCNVRGQGSKISVWTKNCNDDDTNMRIGVVLKEKLMAAASKAHSKPLFDVIHYQTHRNCVKKTTSALKYKFSLKSIV

SEQ ID NO: 14746 - protein, 240 aa, Caenorhabditis elegans
MKQKIVYCGTFRDVNLHRLSLQVETKRSKTQPLATVPADMTELTTPIYPLQRNWSWWFLNDDRNASWQDRLKKVYTFNTVPEFWAFYEAILPPSGLNDLCDYNVFRDDIQPKWEAPENWDGGRWLIIINKGKTPEVLDAVWLEILLALIGEQFGKDMESICGLVCNVRGQGSKISVWTKNCNDDDTNMRIGVVLKEKLMAAASKAHSKPLFDVIHYQTHRNCVKKTTSALKYKFSLKSIV

SEQ ID NO: 14747 - protein, 215 aa, Aplysia californica
MAERDSEPRVNIIRPDDEPEVEEERVPDPDMVIKHPLQNSWAMWFFKNDKSRDWKDNLRVITTFDTVEDFWGLYNHTLPASKLQSGCDYSVFKAGIQPMWEDAQNKKGGRWLINLNKTQRQTHLDDFWLETLLCLIGEGFDEHSEEICGATVNIRNKGDKLGLWTRDAQKTEATKKIGIKLKESLSVPPKIVIGFQAHSDTAGKAGSTVKNRFTV

SEQ ID NO: 14748 - protein, 210 aa, Spodoptera frugiperda
MAGNNTEEVEGSATTETKGTTNAEVPPEFLIKHPLQNTWSLWFYDNDRNKTWEENLIELTTFDTVEDFWRLYHHIKLPSELRQGHDYAVFKQGIRPMWEDDANKMGGRWLISLEKKQRNSDLDRFWLDVVLLLIGENFDHSDEICGAVVNVRAKLDKIGVWTADTSKQHANIEIGRKIKEQLGIHGKIGFQVHRDTMVKHSSATKNLYTV

SEQ ID NO: 14749 - protein, 248 aa, Drosophila melanogaster
MVVLETEKTSAPSTEQGRPEPPTSAAAPAEAKDVKPKEDPQETGEPAGNTATTTAPAGDDAVRTEHLYKHPLMNVWTLWYLENDRSKSWEDMQNEITSFDTVEDFWSLYNHIKPPSEIKLGSDYSLFKKNIRPMWEDAANKQGGRWVITLNKSSKTDLDNLWLDVLLCLIGEAFDHSDQICGAVINIRGKSNKISIWTADGNNEEAALEIGHKLRDALRLGRNNSLQYQLHKDTMVKQGSNVKSIYTL

SEQ ID NO: 14750 - protein, 259 aa, Drosophila melanogaster
MQSDFHRMKNFANPKSMFKTSAPSTEQGRPEPPTSAAAPAEAKDVKPKEDPQETGEPAGNTATTTAPAGDDAVRTEHLYKHPLMNVWTLWYLENDRSKSWEDMQNEITSFDTVEDFWSLYNHIKPPSEIKLGSDYSLFKKNIRPMWEDAANKQGGRWVITLNKSSKTDLDNLWLDVLLCLIGEAFDHSDQICGAVINIRGKSNKISIWTADGNNEEAALEIGHKLRDALRLGRNNSLQYQLHKDTMVKQGSNVKSIYTL

SEQ ID NO: 14751 - protein, 229 aa, Drosophila melanogaster
MLTTQQTEFKMMDNGTETLADSPSSSSEDLKTLSDMDIRKPVTEIVDLRLKHPLENTWTLWYLENDRSKNWEDMQNEITSFDMVEDFWSLYNHIKQPSEIRVGSDYSLFKKGIQPMWEDDANKFGGRWVINMGRGSKAELDKLWLDVLLILIGEAFENTEEVCGAVINLRGKSNKISIWTANGHNELAVMEIGLKLRDLLVLPPHQLQYQLHKDTMCKQGSVIKAVYCV

SEQ ID NO: 14752 - protein, 232 aa, Drosophila melanogaster
MASAQVQSFDIMKQQDQQHQLNSIHKHHHHHEGVPLESNSPEPIDEEIYQVEYKHPLEHVWTLWYLENDRTKHWKDMLNEITEIDSVETFWSLYHTIKTPAELKIGCDYSVFKKGIKPMWEDEANIKGGRWLVTVSKSAKAELDQIWLDILLLMVGQNFEYSDEICGAVINIRNKSNKISVWTANGSNEMAILEIGQKLKILLHLQSHSLQYQLHSDAMSKFNSGVKSVYTL

SEQ ID NO: 14753 - protein, 232 aa, Drosophila melanogaster
MASAQVQSFDIMKQQDQQHQLNIIHKHHHHHEGVPLESNSPEPIDEEIYQVEYKHPLEHVWTLWYLENDRTKHWRDMLNEITEIDSVETFWSLYHTIKTPAELKIGCDYSVFKKGIKPMWEDEANIKGGRWLVTVSKSAKAELDQIWLDILLLMVGQNFEYSDEICGAVINIRNKSNKISVWTANGSNEMAILEIGQKLKILLHLQSHSLQYQLHSDAMSKFNSGVKSVYTL

SEQ ID NO: 14754 - protein, 429 aa, Drosophila melanogaster
MLPNSFYRMRDFANPRTMFKSCANNNEYPTQGPQKVESPTDVTQPAAAPQSTEDTQPEKTQEPMNDPNKTSPSEPQKRGKGNRKGKKNQKNAPRTPSQTSKSSRSNNPGKDGKSTGNDDNEKGKGQGKQMVQQKENSPEQEQSTSAQYRKNVLDKDLQDKKLIEKNMQGKIITQENLLGQKVLMRLSEQKLLSLRLEPRIKQNTCPPAKKEDAVVAFDNSLEFLSLNNKCDDDLTIAAENAELLEVEDPQHPLNNCWTLWYLENDRNKSWEEMLHKVTSFDTVEKFWSLITHIKPPSELMLGSDYSLFKKGIRPMWEDEANVNGGRWVINLTKSAKMALDSFWMDAMLCLIGEACKHSDDLCGVVVNIRGKSNKISIWNADGGNQTTVLEIGRILRKVLRMDNIYVLEYQLHKDSKDKLGSTVKRIYTV

SEQ ID NO: 14755 - protein, 244 aa, Drosophila melanogaster
MVYTGYVSNGLQNAEETAWVPYGDPNDWSHGLAVYDGLELMSGNEEELQPSLNRVMKNIDYDLAMKHPLEHTWTLWHLENDRTKRWAEMLVDVTSFNTVEDFFSVYYFVKPPSDLKIFNDYMVFKKNIRPMWEDDTNKNGGRWILLLDKASRTYIDKMWHDLLLCMIGECFQHSDEICGVVINVRNKANKLSLWTKDSRNVEAILSIGRQIKELLHLGIMEIQYQVHKDAMVNHGPNVNAIYTL

SEQ ID NO: 14756 - protein, 173 aa, Drosophila melanogaster
MENLRQTKESSEFKMGTSLDNNKLASLGATNKHRLQNTWTLWGVKYDPEISWEDMLKEIDSFNTVEDFWNLYFRIDTPSKLNRGCDYMLFKKGIRPMWEDPPNKGGGRWTYKVDKRSTAELDKTWLDVLLCMIGEACDHCDQICGAFVRIRKNINKISVWTKADAGDECNEQC

SEQ ID NO: 14757 - protein, 197 aa, Pisaster ochraceus
ENESSSPALLQPEQEIKHPLQNKWALWFFKNDKAKSWADNLRVITAFDTVEDFWALFNHIQSASKLQSGCDYSLFKEGIKPMWEDDKNRKGGRWLLNLGRVKAQDVDRYWLESLLFLIGESCDDEGELVNGGVINVRSKGNKISVWTGNHKQEDGIMKIGKGFKATLNLPAKTLISYEAHADTMSKTGSMAKSRFVV

SEQ ID NO: 14758 - protein, 214 aa, Danio rerio
MASCAVQLIDKVPKKKVEKKKFEPNILKEPCMKHPLQNRWGLWFYKNDKSKMWQDNLRLITKFDTVEDFWGLYNNIQLPSKLSSGCDYSMFKDGIEPMWEDRSNKCGGRWLITLAKQHRHTELDHFWLETLLCLIGEGFSSFSRDICGSVINIRAKGDKIALWTSNAENCETVTYIGRKYKESLGLPQKLVIGYQAHADTATKSNSITKNKFVV

SEQ ID NO: 14759 - protein, 183 aa, Danio rerio
MKHPLQNRWGLWFYKNDKSKMWQDNLRLITKFDTVEDFWGLYNNIQLPSKLSSGCDYSMFKDGIEPMWEDRSNKCGGRWLITLAKQHRHTELDHFWLETLLCLIGEGFSSFSRDICGSVINIRAKGDKIALWTSNAENCETVTYIGRKYKESLGLPQKLVIGYQAHADTATKSNSITKNKFVV

SEQ ID NO: 14760 - protein, 215 aa, Danio rerio
MATAEPETSTNPSNSEEKNEENEQQIVSLEDYIKHPLQNRWALWFFKNDKSKTWQANLRLISKFDTVEDFWALYNHIQLSSNLMSGCDYSLFKDGIEPMWEDERNKRGGRWLITLSKQQRRADLDRFWLETLLCLVGEAFDDHSDDVCGAVVNIRTKGDKIAIWTTDYENKDAIVHIGRVYKERLGVPPKVIIGYQSHADTATKSGSTTKNKFVV

SEQ ID NO: 14761 - protein, 213 aa, Oryzias latipes
TAVVVSTSIPGNLEEKSEISNGKIGNPEACIKHPLQNRWTLWFFKNDKSKTWQANLRLISTFDTVEDFWALYNHIQLSSNLMSGCDYSLFKDGIEPMWEDERNRRGGRWLITLSKHQRKMDLDRFWLETLLCLVGEAFDDHSDDVCGAVINIRAKGDKIAIWTTNCENKEAITQIGRVYKERLGVPPKVIIGYQSHADTATKSSSTTKNKFVA

SEQ ID NO: 14762 - protein, 213 aa, Xenopus laevis
MAAVEPENTNPQSTEEEKETGQEIVSPDQYIKHPLQNRWALWFFKNDKSKTWQANLRLISKFDTVEDFWALYNHIQLSSNLMSGCDYSLFKDGIEPMWEDEKNKRGGRWLITLNKQQRRNDLDRFWLETLMCLIGESFDEHSDDVCGAVVNVRAKGDKIAIWTTEFENKDAVTHIGRVYKERLGLPAKVVIGYQSHADTATKSGSTTKNRFVV

SEQ ID NO: 14763 - protein, 231 aa, Xenopus laevis
MAAVEPENTNPQSTEEEKETGQEIENTNPQSTEEEKETGQEIVSPDQYIKHPLQNRWALWFFKNDKSKTWQANLRLISKFDTVEDFWALYNHIQLSSNLMSGCDYSLFKDGIEPMWEDEKNKRGGRWLITLNKQQRRNDLDRFWLETLMCLIGESFDEHSDDVCGAVVNVRAKGDKIAIWTTEFENKDAVTHIGRVYKERLGLPAKVVIGYQSHADTATKSGSTTKNRFVV

SEQ ID NO: 14764 - protein, 171 aa, Verticillium fungicola
TVEEFWGVYNNVANVSDLAVKSDYHLFKAGVRPEWEDPQNKHGGKWSYQYKDKRNVDVNRLWLQVVMAAIGETLEEEDDGEVMGVVVNVRKAFYRIGVWTRTIGKSIPGRGDGDVAGGKGRSNEKGKDILLSIGRRFKEILELPNSEQVEFSGHTDSAHAGSTRAKAKHVV

SEQ ID NO: 14765 - protein, 217 aa, Homo sapiens [sequence omitted]

SEQ ID NO: 14766 - protein, 217 aa, Homo sapiens
MATVEPETTPTPNPPTTEEEKTESNQEVANPEHYIKHPLQNRWALWFFKNDKSKTWQANLRLISKFDTVEDFWALYNHIQLSSNLMPGCDYSLFKDGIEPMWEDEKNKRGGRWLITLNKQQRRSDLNRFWLETLLCLIGESFDDYSDDVCGAVVNVRAKGDKIAIWTTECENREAVTHIGRVYKERLGLPPKIVIGYQSHADTATKSGSTTKNRFVV

SEQ ID NO: 14767 - protein, 217 aa, Homo sapiens
MATVEPETTPTPNPPTTEKEKTESNQEVANPEHYIKHPLQNRWALWFFKNDKSKTWQANLWLISKFDTVEDFWALYNHIQLSSNLMPGCDYSLFKDGIEPMWEDEKNKRGGRWLITLNKQQRRSDLDRFWLETLLCLIGESFDDYSDDVCGAVVNVRAKGDKIAIWTTECENREAVTHIGRVYKERLGLPPKIVIGYQSHADTATKSGSTTKNRFVV

SEQ ID NO: 14768 - protein, 217 aa, Bos taurus
MATVEPETTPTPNPPPTEEEKTESNQEVANPEHYIKHPLQNRWALWFFKNDKSKTWQANLRLISKFDTVEDFWALYNHIQLSSNLMPGCDYSLFKDGIEPMWEDEKNKRGGRWLITLNKQQRRGDLDRFWLETLLCLIGESFDDYSDDVCGAVVNVRAKGDKIAIWTTECENREAVTHIGRVYKERLGLPPKIVIGYQSHADTATKSGSTTKNRFVV

SEQ ID NO: 14769 - protein, 217 aa, Oryctolagus cuniculus
MATVEPETTPTPNPPPAEEEKTESNQEVANPEHYIKHPLQNRWALWFFKNDKSKTWQANLRLISKFDTVEDFWALYNHIQLSSNLMPGCDYSLFKDGIEPMWEDEKNKRGGRWLITLNKQQRRSDLDRFWLETLLCLIGESFDDYSDDVCGAVVNVRAKGDKIAIWTTECENRDAVTHIGRVYKERLGLPPKIVIGYQSHADTATKSGSTTKNRFVV

SEQ ID NO: 14770 - protein, 235 aa, Arabidopsis thaliana
MAVEDTPKSVVTEEAKPNSIENPIDRYHEEGDDAEEGEIAGGEGDGNVDESSKSGVPESHPLEHSWTFWFDNPAVKSKQTSWGSSLRPVFTFSTVEEFWSLYNNMKHPSKLAHGADFYCFKHIIEPKWEDPICANGGKWTMTFPKEKSDKSWLYTLLALIGEQFDHGDEICGAVVNIRGKQERISIWTKNASNEAAQVSIGKQWKEFLDYNNSIGFIIHEDAKKLDRNAKNAYTA

SEQ ID NO: 14771 - protein, 285 aa, Arabidopsis thaliana
MEQYWALYKELTLSHLRLLYWERTRRSIVNGKITVKRAREKEKSEMVVMDSPVSGRMADQNIDPNTTTSPSPIEKHVSAIKAISGDEKAPSKEKKNYASKKSTTVIQKSHCFQNSWTFWFDNPSSKSNQVIWGSSLRSLYTFATIEEFWSLYNNIHPPTKWVSGSDLYCFKDKIEPKWEDPICANGGKWTMFFPRATLESNWLNTLLALVGEQFDQGDEICGAVLNFRTRGDRISLWTKKAANEEAQLSIGKQWKELLGYNDTIGFIVHEDAKTLDRDAKRRYTV

SEQ ID NO: 14772 - protein, 240 aa, Arabidopsis thaliana
MVVMDSPVSGRMADQNIDPNTTTSPSPIEKHVSAIKAISGDEKAPSKEKKNYASKKSTTVIQKSHCFQNSWTFWFDNPSSKSNQVIWGSSLRSLYTFATIEEFWSLYNNIHPPTKWVSGSDLYCFKDKIEPKWEDPICANGGKWTMFFPRATLESNWLNTLLALVGEQFDQGDEICGAVLNFRTRGDRISLWTKKAANEEAQLSIGKQWKELLGYNDTIGFIVHEDAKTLDRDAKRRYTV

SEQ ID NO: 14773 - protein, 240 aa, Arabidopsis thaliana
MVVTDSPVSGIMADQNIDPNTTTSPSPKEKHVSAIKAISGDEKAPSKEKKNYASKKSTTVIQKSHCFQNSWTFWFDNPSSKSNQVIWGSSLRSLYTFGTIEEFWSLYNNIHPPTKWVSGADLYCFKDKIEPKWEDPICANGGKWSMMFPKATLECNWLNTLLALVGEQFDQGDEICGAVLNFRARGDRISLWTKNAANEEAQLSIGKQWKELLGYNETIGFIVHEDAKTLDRDAKRRYTV

SEQ ID NO: 14774 - protein, 238 aa, Glycine max
  unsure (1)..(238): unsure at all Xaa locations
MVVEDTQKSVITEDQYPSRVVSDNNNDDDDDDLEEGEIPVDGEDSGATATTKXSGRPRPKPXHPLENSWTFWFDNPSSKSKQAAWGSSIRPIYTFATVEEFWSIYNNIHHPSKLGLGADFHCFKHKIEPKWEDPICANGGKWTMTFPRGKSDTSWLYTLLAMIGEQFDHGDEICGAVVNVRSRQDKIAIWTKNASNEAAQVSIGKQWKEFLDYNDTIGFIFHEDAKKLDRGAKNKYVV

SEQ ID NO: 14775 - protein, 234 aa, Glycine max
  unsure (1)..(234): unsure at all Xaa locations
MPKNQPSRRTKTLAGSPTTTTTTKISKRGRXPDDGDDGASATCKASVRPTSATXHPLENSWTFWFDXPFRXSPNXAAWGSSIRPIYTFATRQEXLGAYNPFTTPSXVGVWXGADFHXCFKHRLSPKWEDPICANGGKWTMTFHRRKCDTTCIYTLLAMIGEQFDHRHEICGAVVNAISRHEKTAIWTKNALNESAQVSIGKQCKEXLDHNDTIAXIFHEDAKKLDRGAKNKYVV

SEQ ID NO: 14776 - protein, 215 aa, Triticum aestivum
MAEDTETRPASAGAEEREEGEIADDGDGSSAAAAGRITAHPLENAWTFWFDNPQGKSRQVAWGSTIHPIHTFSTVEDFWGLYNNIHNPSKLNVGADFHCFKNKIEPKWEDPICANGGKWTISCGRGKSDTFWLHTLLAMIGEQFDFGDEICGAVVSVRQKQERVAIWTKNAANEAAQISIGKQWKEFLDYKDSIGFIVHEDAKRSDKGPKNRYTV

SEQ ID NO: 14777 - protein, 215 aa, Triticum aestivum; identical to SEQ ID NO: 14776

SEQ ID NO: 14778 - protein, 215 aa, Triticum aestivum
MTEDTEMRPASAGAEEREEGEIADDGDGSSAAAAGRITAHPLENAWTFWFDNPQGKSRQVAWGSTIHPIHTFSTVEDFWGLYNNIHNPSKLNVGADFHCFKNKIEPKWEDPICANGGKWTISCGRGKSDTFWLHTLLAMIGEQFDFGDEICGAVVSVRQKQERVAIWTKNAANEAAQISIGKQWKEFLDYKDSIGFIVHEDAKRSDKGPKNRYTV

SEQ ID NO: 14779 - protein, 215 aa, Triticum aestivum; identical to SEQ ID NO: 14778

SEQ ID NO: 14780 - protein, 197 aa, Triticum aestivum
EGEIADDGDGSSAAAAGRITAHPLENAWTFWFDNPQGKSRQVAWGSTIHPIHTFSTVEDFWGLYNNIHNPSKLNVGADFHCFKNKIEPKWEDPICANGGKWTISCGRGKSDTFWLHTLLAMIGEQFDFGDEICGAVVSVRQKQERVAIWTKNAANEAAQISIGKQWKEFLDYKDSIGFIVHEDAKRSDKGPKNRYTV

SEQ ID NO: 14781 - protein, 218 aa, Zea mays
MAEETDTRPASAGSRGRPAPEDDDREEGEITDLACAPSPPATHPLEHSWTFWFDNPQSKSKQAAWGSSIRPIHTFSTVEEFWGLYNNINHPSKLIVGADFHCFKNKIEPKWEDPICANGGKWTISCGRGKSDTFWLHTLLAMIGEQFDYGDEICGAVVSVRGKQERIAIWTKNAANEAAQVSIGKQWKELLDYKDSIGFIVHDDAKKMDKGLKNRYTV

SEQ ID NO: 14782 - protein, 218 aa, Zea mays
MAEETDTRPASAGSRGRPAPEDDDREEGEITDLACAPSPPATHPLEHSWTFWFDNPQSKSKQAAWGSSIRPIHTFSTVEEFWGLYNNINHPSKLIVGADFHCFKNKIEPKWEDPICANGGKWTISCGRGKSDTFWLHTLLAMIGEQFDYGDEICGAVVSVRGKQERIAIWTKNAANEAAQVSIGKQWKELLDYKDSIGFIVHDDAKKMDKGLKERYTV

SEQ ID NO: 14783 - protein, 230 aa, Zea mays
  unsure (1)..(230): unsure at all Xaa locations
RKASLTTAATPWAEETDTRPASAGSRGRPAPEDDDREEGEITDLACAPSPPATHPLEHSWTFWFDNPQSKSKQAAWGSSIRPIHTFSTVEEFWGLYNNINHPSKLIVGADFHCFKNKIEPKWEDPICANGGKWTISCGRGKSDTFWLHTLLAMIGEQFDYGDEICGAVVSVRGKQERIAIWTKNAANEAAQVSIGKQWKELLDYKDSIGFIVHDDAKKMDKGLKNXRYTV

SEQ ID NO: 14784 - protein, 220 aa, Zea mays
  unsure (1)..(220): unsure at all Xaa locations
MADEIDTRPAPAGSRGRPAPEDDDREEGEIATDAPSPALPAAHPLEHSWTFWFDNPHGKNKMAAWGSSIRPIHTFSTVEDFWGLYNNIHHPSKLIGGADFHCFKNKIEPKWEDPICANGGKWTISCGRGKSDTLWLHTLLAMIGEQFDYGDEICGAVVSVRSKQERIAIWTKNAANEAAQISIGKQWKXEFLDYKDSIGXFIVHDDAKKMDKGLKNRYTV

SEQ ID NO: 14785 - protein, 221 aa, Zea mays
  unsure (1)..(221): unsure at all Xaa locations
MADEIDTRPASAGSRGRPSAXATEDDDREEGEIAADAPSPALPAAHPLEHSWTFWFDNPHGKNKMAAWGSSIRPIHTFSTAEDFWGLYNNIHHPSKLIGGADFHCFKNKIEPKWEDPICANGGKWTISCGRGKSDTLWLHTLLAMIGEQFDYGDEICGAVVSVRSKQERIAIWTKNAGNEAGQISIGKQWKEFLDYKDSIGFIVHDDAXKMDKGLKKPYTV

SEQ ID NO: 14786 - protein, 219 aa, Zea mays
  unsure (1)..(219): unsure at all Xaa locations
MADEIDTRPASAGSRGRPAPEDDDREEGEIAADAPSPALPAAHPLEHSWTFWFDNPHGKNKMAAWGSSIRPIHTFSTVEDFWGLYNNIHHPSKLIGGADFHCFKNKIEPKWEDPICADGGKWTISCGRGKSDTLWLHTLLAMIGEQFDYGDEICGAVVSVRSKQERIAIWTKNAANEAAQISIGKQWKFLDYNSIGFTXHDDAKLWXRVDKGLKNRYTV

SEQ ID NO: 14787 - protein, 137 aa, Zea mays
  unsure (1)..(137): unsure at all Xaa locations
XGLYNNINHPSKLIVGADFHCFKNKIEPRWEDPICANGGKWTISCGRGKSDTFWLHTLLAMIGEQFDYGDEICGAVVSVRGKQERIAIWTKNAANEAAQVSIGKQWKELLDYKDSIGFIVHDDAKKMDKGLKNRYTV

SEQ ID NO: 14788 - protein, 233 aa, Aspergillus fumigatus
MSAPKLHFNNDQSPIKDESSPTQKAMECPSSSTRKSLHQNILGKLRPLPLQYHWTVWYDRYSESTDYDNRLYVLHEDVADIATFYRVYNNYPWDKIRLRDSVHIFRKGVRPVWEDPENLRGGCWKFRVPKSKAQEFFHEIAILCMANEFQAALEKEHDHVLGVSTSVRFNSHMISVWNKMGTNERSIKILEQTIIDRLSPELRPTSSGSHSYFYKRHDENDGYQEAVAASSSH

SEQ ID NO: 14789 - protein, 245 aa, Mus musculus
MNNKFDALKDDDSGDHDQNEENSTQKDGEKEKTDRDKSQSSGKRKAVVPGPAEHPLQYNYTFWYSRRTPGRPTSSQSYEQNIKQIGTFASVEQFWKFYSHMVRPGDLTGHSDFHLFKEGIKPMWEDDANKNGGKWIIRLRKGLASRCWENLILAMLGEQFMVGEEICGAVVSVRFQEDIISIWNKTASDQATTARIRDTFRRVLNLPPNTIMEYKTHTDSIKMPGRLGPQRLLFQNLWKPRLNVP

SEQ ID NO: 14790 - protein, 234 aa, Mus musculus
MNNKFDALKDDDSGDHDQNEENSTQKDGEKEKTDRDKSQSSGKRKAVVPGPAEHPLQYNYTFWYSRRTPGRPTSSQSYEQNIRQIGTFASVEQFWKFYSHMVRPGDLTGHSDFHLFKEGIKPMWEDDANKNGGKWIIRLRKGLASRCWENLILAMLGEQFMVGEEICGAVVSVRFQEDIISIWNKTASDQATTARIRDTLRRVLNLPPNTIMEYKTHTDSIKDNSSFRNTKITL

SEQ ID NO: 14791 - protein, 245 aa, Mus musculus
MNNKFDALKDDDSGDHDQNEENSTQKDGEKEKTDRDKSQSSGKRKAVVPGPAEHPLQYNYTFWYSRRTPGRPTSSQSYEQNIKQIGTFASVEQFWKFYSHMVRPGDLTGHSDFHLFKEGIKPMWEDDANKNGGKWIIRLRKGLASRCWENLILAMLGEQFMVGEEICGAVVSVRFQEDIISIWNKTASDQATTARIRDTLRRVLNLPPNTIMEYKTHTDSIKMPGRLGPQRLLFQNLWKPRLNVP

SEQ ID NO: 14792 - protein, 257 aa, Mus musculus
MNNKFDALKDDDSGDHDQNEENSTQKDGEKEKTDRDKSQSSGKRKAVVPGPAEHPLQYNYTFWYSRRTPGRPTSSQSYEQNIKQIGTFASVEQFWKFYSHMVRPGDLTGHSDFHLFKEGIKPMWEDDANKNGGKWIIRLRKGLASRCWENLILAMLGEQFMVGEEICGAVVSVRFQEDIISIWNKTASDQATTARIRDTLRRVLNLPPNTIMEYKTHTDSIAPQGTMSSKLCLMVNPLKVTRPHASTFPLGSVHQQI

SEQ ID NO: 14793 - protein, 244 aa, Mus musculus
MNKVEGGGHKEEVVVKEKEVVKEKPSEATAEGVQAGEAKDLPGSLKTQRRKAHREHPPEVLSKLHPLQYRWVLWFFKNDRSRAWQDNLQLVTKFNTVEDFWAVYSHIKLASKLSSGCDYALFKEGILPMWEDNRNKQGGRWLLSIDKQLRHFELDRLWLETLLCLVGNCFEEYSREVCGAVVNIRTKRDKIALWTSEAEDKAGVMQIGQIYKERLGISTKTIIGYQAHADTAAKSNNLANKFVV

SEQ ID NO: 14794 - protein, 303 aa, Mus musculus
MGVSLVIVYASSVTLALYSQLPPPYNDRAPDAREETGRALQGELLLQTHMLPALLHEGADGDLPQKPVEGGGHKEEVVKEKEVVKEKPSEATAEGVQAGEARDLPGSLKTQRRKAHKEHPSEVLSKLHPLQYRWVLWFFKNDRSRAWQDNLQLVSKFNTVEDFWVMYSHIKLASKLSSCCDYALFKEGILPMWEDNRNKWGSRWLLSIDKQLRHFELDRLWLETLVCLVGNCFEEYSGAVVNICTKRDKIALWTNEAEDKAGVMQIGQIYKERLGIPTKTILGYQAHADTAAKSNNLANKFVV

SEQ ID NO: 14795 - protein, 207 aa, Mus musculus
MALPPAAAPPGANEPLDKALSALPPEPGGVPLHSPWTFWLDRSLPGATAAECASNLKKIYTVQTVQIFWSVYNNIPPVTSLPLRCSYHLMRGERRPLWEEESNAKGGVWKMKVPKDSTSTVWKELLLATIGEQFTDCAAADDEIIGVSVSVRDREDVVQVWNVNASLVGEATVLEKIHQLLPHIAFKAVFYKPHEEHHAFEGGRGKH

SEQ ID NO: 14796 - protein, 207 aa, Mus musculus
MALPPAAAPPGANEPLDKALSALPPEPGGVPLHSPWTFWLDRSLPGATAAECASNLKKIYTVQTVQIFWSVYNNIPPVTSLPLRCSYHLMRGERRPLWEEESNAKGGVWKMKVPKDSTSTVGKELLLATIGEQFTDCAAADDEIIGVSVSVRDREDVVQVWNVNASLVGEATVLEKIHQLLPHIAFKAVFYKPHEEHHAFEGGRGKH

SEQ ID NO: 14797 - protein, 162 aa, Mus musculus
MATVEPETTPTTNPPPAEEEKTESNQEVANPEHYIKHPLQNRWALWFFKNDKSKTRQANLRLISKFDTVEDFWALYNHIQLSSNLMPGCDYSLLKDGIEPMWEDEKNKRGGRWLITLNKQQRRSDLDRFLARHCCALLENLSMTTVMMCVELLLMLELKVMR

SEQ ID NO: 14798 - protein, 145 aa, Rattus norvegicus
MVRPGDLTGHSDFHLFKEGIKPMWEDDANKNGGKWIIRLRKGLASRCWENLILAMLGEQFMVGEEICGAVVSVRFQEDIISIWNKTASDQATTARIRDTLRRVLNLPPNTIMEYKTHTDSIKMPGRLGPQRLLFQNLWKPRLNVP

SEQ ID NO: 14799 - protein, 208 aa, Anopheles gambiae str. PEST
KAKASKAKAQSETLQQTFCDNVNNYTKTSCTTLLHTPASLNMSNKYEIKPYASDSDDSGDEDADIDVDKLEPLEAGPGEHKLQYTYCLWFGKKGSHRAASGIKPMWEDPSNSKGGKWVIRLKKSKIDRAWENVCMAMLGEQFLVGSEICGVVLCTQYPEDVLSVWNRTATDTVSTNRIRDTLRRILNLPQSQHIEYKPHGDSLKFVPA

SEQ ID NO: 14800 - protein, 217 aa, Glycine max
PKPSKHNLTRISVAERERQMATSEEVVAAAPEAAALEAGLKHKLERKWTFWCDNQSKPKQGAAWGTSLRKVYTFDTVEEFWCLYDQVFKPSKLQINADFHLFKTGIEPKWEDPECANGGKWSVTSSRKANLDNMWLETMMALIGEQFEDAEDICGVVASVRQWQDKLSLWTKTAANEAAQMSIGRKWKEIIDVNDKITYNFHDDSRTKGASKGRYTV

SEQ ID NO: 14801 - protein, 218 aa, Glycine max
MATSEEVVAAAPEAAGREREMATSEEVVAAAPEAAAPEAGLKHKLERKWTFWCDNQSKPKQGAAWGTSLRKVYTFDTVEEFWCLYDQVFKPSKLQINADFHLFKTGIDPKWEDPECANGGKWSITSSRKANLDNMWLETMMALIGEQFEDAEDICGVVASVRQWQDKLSLWTKTAANEAAQMSIGRKWKEIIDVNDKITYNFHDDSRSKGATKGRYTV

SEQ ID NO: 14802 - protein, 200 aa, Glycine max
  unsure (1)..(200): unsure at all Xaa locations
RVREEHTNTSHHRVHVGAASIQHFLLSTLVGGLSGDITLKARSKHKLDRKWTFWCDNQSKPYLGAAWGASLSKVYTFDTVKXFWWWYDQVFKPRKLQINGDFHLFKTGIDPKWEDPXCANGGKWSITSSRKANLDNMWLETMMALIGEQFEDAEDICGVVASVRQWQDKLSLWTKTVANESGQVVXLSCKXYYAVEMYAM

SEQ ID NO: 14803 - protein, 206 aa, Oryza sativa; identical to SEQ ID NO: 574

SEQ ID NO: 14804 - protein, 206 aa, Oryza sativa
MAEVEAAPIAAAETPEVAAAEGAAAAKAPHKLHRQWAFWYDIQSKPKPGAAWGTSLRKAYTFDTVEEFWGLYDQIFRPSKVTVNADFHLFKVGVEPKWEDPECANGGKWTVPCSRKTTLENMWLETLMALIGEQFDESEEICGVVASVRQRGDKLALWTRTASNEAVQVNIGKKWKEIVDYNDKMVYSFHDDAKREKPSRGGRYNV

SEQ ID NO: 14805 - protein, 1478 aa, Oryza sativa
  unsure (1)..(1478): unsure at all Xaa locations
MATLTCGSHADSAATSDKTEVKTTEGPKTNGFWHRGVVAQVKTQHISLANAAISRSRNLLPLLLLFPLGGGGGFSLLFSLSHRLLVRFPSRRSRGGGGGGGADMAEVEAAPIAAAETPEVAAAEGAAAAKAPHKLHRQWAFWYDIQSKPKPGAAWGTSLRKAYTFDTVEEFWGLYDQIFRPSKVTVNADFHLFKAGVEPKWEDPECANGGKWTVPCSRKTTLENMWLETLMALIGEQFDESEEICGVVASVRQRGDKLALWTRTASNEAVQVNIGKKWKEIVDYNDKMVYSFHIKYVHSSFYLDGASTSMQDDAKREKPSRGGRYNVKTVRRHRNPPTKHIHVPSPLAFDFASAALRPLQHISLASRCDLTLRRSRSSSSSIGSGGLLPKRAMHGARGRPPPPPRPPTSLPRHLTMDTASVTGGEHKGKEKTCRVCGEEVAAREDGKPFVACAECGFPVCKPCYEYERSEGTQCCPQCNTRYKRHKGCPRVEGDEDDGGDMDDFEEEFQIKSPTKQKPPHEPVNFDVYSENGEQPAQKWRPGGPALSSFTGSVAGKDLEQEREMEGGMEWKDRIDKWKTKQEKRGKLNRDDSDDDDDKNDDEYMLLAEARQPLWRKVPIPSSKINPYRIVIVLRLVVLCFFLKFRITTPAMDAVPLWLASVICELWFALSWILDQLPKWSPVTRETYLDRLALRYERDGEPCRLAPIDFFVSTVDPLKEPPIITANTVLSILAVDYPVDRVSCYVSDDGASMLLFDTLSETAEFARRWVPFCKKFTIEPRAPEFYFSQKIDYLKDKVQPTFVKERRAMKREYEEFKVRINALVAKAQKKPEEGWVMQDGTPWPGNNTRDHPGMIQVYLGSQGALDVEGSELPRLVYVSREKRPGYNHHKKAGAMNSLVRVSAVLTNAPFILNLDCDHYVNNSKAVREAMCFLMDKQLGKKLCYVQFPQRFDGIDRHDRYANRNTVFFDINMKGLDGIQGPVYVGTGTVFNRQALYGYDPPRPEKRPKMTCDCWPSWCCCCCCFGGGKRGKSHKNKKGGGGGEGGGLDEPRRGLLGFYKKRSKKDKLGGGAASLAGGKKGYRKHQRGFELEEIEEGLEGYDELERSSLMSQKSFEKRFGQSPVFIASTLVEDGGLPQGAAADPAALIKEAIHVISCGYEEKTEWGKEIGWIYGSVTEDILTGFKMHCRGWKSVYCTPARAAFKGSAPINLSDRLHQVLRWALGSVEIFMSRHCPLWYAYGGRLKWLERFAYTNTIVYPFTSIPLLAYCTIPAVCLLTGKFIIPTLNNLASIWFIALFLSIIATGVLELRWSGVSIEDWWRNEQFWVIGGVSAHLFAVFQGLLKVLXGVDTTFTVTSKAAADETDAFGELYLFKWTTLLVPPTTLIIINMVGIVAGVSDAVNNGYGSWGPLFGKLFFSFWVILHLYPFLKGLMGRQNRTPTIVVLWSILLASIFSLVWVRIDPFIPKPKGPVLKPCGVSC

SEQ ID NO: 14806 - protein, 211 aa, Oryza sativa
  unsure (1)..(211): unsure at all Xaa locations
PLSYFRCCVREREMATSEEVVAAAPEAAAPEAGLKHKLERKWTFWCDNQSKPKQGAAWGTSLRKVYTFDTVEEFWCLYDQVFKPSKLQINADFHLFKTGIDPKWEDPECANGGKWSITSSRKANLDNMWLETMMALIGEQFEDAEDICGVVASVRQWQDKLSLWTKTAANEAAQMSIGRKWKEIIDVNDKITYNFHDDSRSXGSTKGRYTV

SEQ ID NO: 14807 - protein, 599 aa, Neurospora crassa
MNAHWAAENERHTGTYNFRARQNIVVMKGYGMSGSCFRSSSHHGRRANGALVMMVLNKGNLEEFFLTFTIRIVGCAEAIRCSPTVFYGNVVVVVKKKKKKKRKGERNLSRHFELKSCLFHGRVCTYCHFSPPITLLLPCSVHLCQKVTSHVPWNPDSIWQGGAFRASIQRPCSRGTGRQAGQGERPVTVDGGPATARAISPSVAATGHFFGKQSSRRSQAAGAHCSPRGHCGPYLLPFLVSDFSMDTNLWSRRTNSSKLSLTTPGSGGQVDNSSSRTFSKRFGGDSSSHGKTNPFNSITTPGGLVSPTAGASSAFGLGSGAFASFGSAKTPKTTGNPFETTLIGHSAKTPSAEKSSKEGGLGGKTVGKTASNASLADANKRAQGAVSNSPSSGLNHQLRNSWVFWYRPPISKANGFIEYEKTLHPIATCETAEQFFAVYQHLKRPSGLPLVSDYHLFKKGIRPIWEDEENKNGGKWIVRLRKGVADRYWEDILLALIGDQFGDASDDVCGIVLSVRNGEDILSIWARANGQRVLKIRETMRRTLSFPSETKVEWKSHDSSIQQRTAIEESRREKANNRDHSQGDKRTTNRQQQQTDSRP

SEQ ID NO: 14808 - protein, 282 aa, Neurospora crassa
MSSRPGLFTRGLSGLSQSNDASVSSPAAERDDAKRNFLKTMRPLPTQHYWNIWFDRPDKDQQGKSADGSYHSNLEKLGSTIESVQDFWRYNNNMPIENIKMRESIYLFKAGFKPVWEDRRNILGGSWTFRVPKANGADFWTRVQLLAIGEELQDVLEEGDQICGVGLSVRFNAHLISIWHRDASKQKSVDAILQLVLTKAIPDDFPPLKPDNYFYKKHSDHAGFNPSPEMQAVLDSQKAREQHAAAVAKAQAQAAQQTTAQEGGQSQPEPPQIVEVPPSGEA

SEQ ID NO: 14809 - protein, 304 aa, Neurospora crassa
MSSRPGLFTRGLSGLSQSNDASVSSPAAERDDAKRNFLKTMRPLPTQHYWNIWFDRHVLKVCMHMQCAVASNTLHLYRPDKDQQGKSADGSYHSNLEKLGSTIESVQDFWRYNNNMPIENIKMRESIYLFKAGFKPVWEDRRNILGGSWTFRVPKANGADFWTRVQLLAIGEELQDVLEEGDQICGVGLSVRFNAHLISIWHRDASKQKSVDAILQLVLTKAIPDDFPPLKPDNYFYKKHSDHAGFNPSPEMQAVLDSQKAREQHAAAVAKAQAQAAQQTTAQEGGQSQPEPPQIVEVPPSGEA

SEQ ID NO: 14810 - protein, 190 aa, Hydra vulgaris
MATNKFEALAREDSNDSSSKSDEEVENGEVPADESASKEDSKEETNKYVFPDEPVIENGEHRLQDCYCLWFSRKSHGKQPVTQKYEDSIKLIGAFASVEQFWAYYLHMVRPGELTGHSDIHLFKYGIRPMWEDKANKNGGKWIVRLKKGLASRCWETLILAMLGEQFMVGQEICGAVVSIRYQEDIISIW

SEQ ID NO: 14811 - protein, 212 aa, Caenorhabditis elegans
MEAETSTQEVVKQVKNLPILMEDAPVGSDDHQLQYSYTFSYFMRPTGKFDPEDYASYVQPVGIMKSVEQFWSIMVHFKRPTEMCDKADIHFFKTGVKPVWEDPANCKGGKWIIRLKKGLSTRIWENLLMAIIGEQFLVGDELCGAVCSIRNQEDIISLWNRNADDTPVTNRIRETLRSVLQLPQNTVLEYKRHDDCLRDQSSYRHTTKNICK

SEQ ID NO: 14812 - protein, 223 aa, Drosophila melanogaster
MSMEKVANKQYETKNWPDIVDSDDSDVDNQIDVDNLPPLEVGPGENRLQHTYCLWFSRKETQRAAADYSKSLHMVGRCASVQQWWSLYSHLIRPTALKPYRELLLFKQGIIPMWEDPANSKGGQWLIRLRKNKVDRAWENVCMAMLGEQFLVGDEICGVVLQTKYPEDSLSVWHRTATDMTSTTRIRDTLRRILNIPLTTALEYKIHCDSLKYVSINKGPLKS

SEQ ID NO: 14813 - protein, 236 aa, Homo sapiens [sequence omitted]

SEQ ID NO: 14814 - protein, 245 aa, Homo sapiens
MNNKFDALKDDDSGDHDQNEENSTQKDGEKEKTERDKNQSSSKRKAVVPGPAEHPLQYNYTFWYSRRTPGRPTSSQSYEQNIKQIGTFASVEQFWRFYSHMVRPGDLTGHSDFHLFKEGIKPMWEDDANKNGGKWIIRLRKGLASRCWENLILAMLGEQFMVGEEICGAVVSVRFQEDIISIWNKTASDQATTARIRDTLRRVLNLPPNTIMEYKTHTDSIKMPGRLGPQRLLFQNLWKPRLNVP

SEQ ID NO: 14815 - protein, 117 aa, Homo sapiens
MWEDSRNKRGGRWLVSLAKQQRHIELDRLWLETLLCLIGESFEEHSREVCGAVVNIRTKGDKIAVWTREAENQAGVLHVGRVYKERLGLSPKTIIGYQAHADTATKSNSLAKNKFVV

SEQ ID NO: 14816 - protein, 227 aa, Oryza sativa; identical to SEQ ID NO: 575

SEQ ID NO: 14817 - protein, 227 aa, Oryza sativa; identical to SEQ ID NO: 575

SEQ ID NO: 14818 - protein, 396 aa, Mus musculus
MTNEEPLPKKVRLSETDFKVMARDELILRWKQYEAYVQALEGKYTDLNSNDVTGLRESEEKLKQQQQESARRENILVMRLATKEQEMQECTTQIQYLKQVQQPSVAQLRSTMVDPAINLFFLKMKGELEQTKDKLEQAQNELSAWKFTPDSQTGKKLMAKCRMLIQENQELGRQLSQGRIAQLEAELALQKKYSEELKSSQDELNDFIIQLDEEVEGMQSTILVLQQQLKETRQQLAQYQQQQSQASAPSTSRTTSSEPVDQAEVTSKDCSRLANGPSNGSSSRQRTSGSGFHREGSTPEDDFPSSSGNGNKASNSSEERTGRGGSSYINPLSAGYESVDSPTGSENSLTHHSNDTDSSHDPQEEKAVSGKGNRTVGSRHVQNGLDSNVNVQGAVL

SEQ ID NO: 14819 - protein, 379 aa, Mus musculus
  unsure (1)..(379): unsure at all Xaa locations
FKVMARDELILRWKQYEAYVQALEGKYTDLNSNDVTGLRESEEKLKQQQQESARRENILVMRLATKEQEMQECTTQIQYLKQVQQPSVAQLRSTMVDPAINLFFLKMKGELEQTKDKLEQAQNELSAWKFTPDSQTGKKLMAKCRMLIQENQELGRQLSQGRIAQLEAELALQKKYSEELKSSQDELNDFIIQLDEEVEGMQSTILVLQQQLKETRQQLAQYQQQQSQASAPSTSRTTSSEPVDQAEVTSKDCSRLANGPSNGSSSRQRTSGSGFHREGSTPEDDFPSSSGNGNKXSNSSEERTGRGGSSYINPLSAGYESVDSPTGSENSLTHHSNDTDSSHDPQEEKAVSGKGNRTVGSRHVQNGLDSSVNVQGAVL

SEQ ID NO: 14820 - protein, 272 aa, Anopheles gambiae str. PEST
EELQAVKESEAKIKQQYSESQRRERILARRVAVQEQEMRDFSKQIAELKSAQAPGPAALRSALLDPAVNILFQKLKAELQATKAKLEETQNELSAWKFTPDSNTGKRLMAKCRLLYQENEELGKMTSNGRLAKLESELALQKSYNEEVKKSQLELDDFLQELDEDVEGMQGTIVFLQQELKQTKDARNEIEKEVIQLRAYIAANLGPFSGSGNNPTSGSTPTDERSSSMMMMMDVQDSNSNSNSHGHDAYHHPDGGGPDSIGGRGVRLGELG

SEQ ID NO: 14821 - protein, 330 aa, Arabidopsis thaliana
MEFSSQDDDFGGDDSAANATRASGNRRSFGDLEDDEDDIFGSTTVAPGVRTGMILSLRGSLKNCKDDLASCQNELESAKTEIQKWKSAFQNESFVPAGKSPEPRFLIDYIQNLKSSEKSLKEQLEIAKRKEASCIVQYAKREQEMAELKSAVRDLKSQLKPASMQARRLLLDPAIHEEFSRLKNLVEEKDKKIKELQDNIAAVTFTPQSKNGKMLMAKCRTLQEENEEIGHQAAEGKIHELAIKLAMQKSQNAELRSQFEGLYKHMEELTNDVERSNETVIILQEKLEEKEKEIERVKKGLEIVSELVGDKKDEVDEIDEDAKEEIAGGE

SEQ ID NO: 14822 - protein, 346 aa, Glycine max
MASPTHFDDDFDFGGGFGGRHSGNKRSSPDYDDDDNDPFAPTEEASGVTTGMILSLRESLQNCKDTLATCQNELEAAKSEIQSWHSTLKNQPSILAGITPEPKMLINYLQALKSSEESLREQLEKAKKKEAAFIVTFAKREQEIAELKSAVRDLKVQLKPPSMQARRLLLDPAVHEEFTRLKNLVEEKDKKVKELQDNIAAVSFTPQSKMGKMLMAKCRTLQEENEEIGNQASEGKMHELGMKLALQKSQNSQLRNQFEGLQKHMEGLTNDVERSNEMVLMLQEKLEEKDRQIQRLKHEIKQKNLEDQRLKHELQQKNLEDQRLKHELQQKNLEDGNDNNAGEAAN

SEQ ID NO: 14823 - protein, 335 aa, Glycine max
MASPTHFDDDFDFGDGFGGRHSGNKRSSPDYDDDDNDPFAPTTLREDDRRGMILSLRESLQNCKETLATYQNELEAAKSEIQSWHSTLKNEPSKSAGITPEPKMLINYLQTLKFSEESLREQLEKAKKKEAAFIVTFAKREQEIAELKSAVRDLKVQLKPPSMQSRRLLLDPAVHEEFTRLKNLVEEKDKKVKELQDNIAAVSFTPQSKMGKMLMAKCRTLQEENEEIGNQASEGKMHELGMKLALQKSQNSQLRSQFEGLQKHMEGLTNDVERSNEMVLMLQEKLEDRDREIQRLKHELQQKNLEDQRLKHKLQQKNLEDGNDNNETIAGEAAN

SEQ ID NO: 14824 - protein, 299 aa, Glycine max
  unsure (1)..(299): unsure at all Xaa locations
MASPTHFDDDFDFGDGFGGRHSGNKRAYPDYDDDDNDPFAPTKVASDETTGMILSLRESLQNCKETLATYQNELEAAKSEIQSWHSTLKNEPSKSAGITPEPKMLINYLQTLKFSEESLREQLEKAKKKEAAFIVTFAKREQEIAELKSAVRDLKVQLKPPSMQSRRLLLDPAVHEEFTRLKNLVEEKDKKVKELQDNIAAVSFTPQSKMGKMLMAKCRTLQEENEEIGNQASEGKMHELGMKLALQKSQNSQLRSQFEGLQKHMEGLTNDVERSNEMVLIYREKGXLKKKTADMPFNG

SEQ ID NO: 14825 - protein, 193 aa, Glycine max
  unsure (1)..(193): unsure at all Xaa locations
MASPPHFDDDFDFGGGFSGTQSGNKRPSPDYDEDEYENDPSEEAASGVTTGMILSLRESLQNCKDMLATCQNELEAAKSEIQKWHSSFQNEPFISAGTTPAPKSVINYLQALKSSEESLREQLEKAKKKEAAFIVTFAKREQEIAELKSAVRDLKSQFNPASMQAKRLLLDPAVHEEFTRLKNLVERKDKKXX

SEQ ID NO: 14826 - protein, 153 aa, Glycine max
KRVKNLVEEKDKKVKELQDNIAAVNFTPQSKMGKMLMAKCRTLQEENEEIGNQASEGKMHELAMKLSVQKYQNAELRSQFEGLQKHMDGLTNDVDRSNEMVLMLQDKLEEKDQEIQRLKDELQPKSLVVEDGKTDPASNRNDDDETIPTEAAN

SEQ ID NO: 14827 - protein, 106 aa, Glycine max
  unsure (1)..(106): unsure at all Xaa locations
MASPTHFDDDFDFGGGFGGRHSVGSLGNKRSSPDYDDDDNDPFAPTEEASGVTTGMILSLRESLQNCKDTLATCQNELEAAKSEIQSWAXSTLKNSHPYLAGIPPX

SEQ ID NO: 14828 - protein, 124 aa, Glycine max
LFREHLQLRFLHSSSLGFLKLTMASPPHFDEDFDFGGGFSGTHSGNKRSSPDYDEDEYENDPFGHKKAKSKAEEAASGVTTGMILSLRESLQNCKDMLVTCQVCFSPLTTEVVCFCLKILNYCY

SEQ ID NO: 14829 - protein, 352 aa, Triticum aestivum
MADPPSPRLDEDDTFGRDFNASPSRNAAPARSGEKRQFGDLDDDEDDVFASKKGKTKVEESAPGAATGMILSLRESLQTCKENLESNQVELEAAKSEIQKWHSAFQNIPAVPAGTNPEPVSVVTYLNNLKSSEESLKEQLEKAKKREAAFIVTFAKREQEIAELKSAVRDLKTQLRPPSMQTRRLLLDPAIHEEFTRLKNLAEEKEKKIKELQENVAAVNFTPSSKHGKMLMAKCRTLQEENEEIGAMASEGKIHELGMKIAVLKTQNNELRNQFDGLYKHMDGLTNDVERSNEMVSILQEELEAKDVELARLKEMLCQKEATEDDTVVEEREEAANDMNASSDPQPIKVES

SEQ ID NO: 14830 - protein, 97 aa, Triticum aestivum
  unsure (1)..(97): unsure at all Xaa locations
XDHPEIATSLESAFTVTFAKRXEQDIAELKSAIKELDSQLMPPSVQTRLLSLVPTIHXEFTRLNTLAEEIYRRDSQLHENVAAVNSTPSSIHRKMLX

SEQ ID NO: 14831 - protein, 361 aa, Zea mays
MLNATSRFLSGGGGVPPGRMQGFVYRPVNFHEETVKKRARSVSNSSTNPSNSRKSEAKIKVEESAPGAATGVILSLRESLQDCKQSLASCQVELEAAKSEIEKWHSAFQSIPAVPSGTSPDPGFMVSYLSNLKSSEESLKEQLEKAKKREAAFIVTFAKREQEIAELKSAVRDLKTQLRPPSMQTRRLLLDPAIHEEFTRLKNLVEEKEKKIKELQDNVAAVNFTPSSKLGKMLMAKCRTLQEENEEIGAMASEGKIHELGMKIAVLKSQNNELRNQFDVLYKHMDGVTNDVERSNELVAILQEELEAKELEVTRLKEETLSQKEGTPDAPAPAPAPVEEGDGAGNDLKPASDPLQVKLES

SEQ ID NO: 14832 - protein, 230 aa, Zea mays
  unsure (1)..(230): unsure at all Xaa locations
MSSPWSPMSLEEEEEIQELDAEEQQDGEQPQQGDGLQQGSTAEARAQQTGNARSVANSSTKSEAKIKVEESAPGAATGVILSLRESLQDCKQSLASCQVELEAAKSEIEKWHSAFQSIPAVPSGTSPDPVSVVSYLSNLKSSEESLKEQLEKAKKREAAFIVTFAKREQEIAELKSAVRDLKTQLRPPSMQTRRLLLDPAIHEEFTRLKNLVEEKEKKNKXELQDNVAAX

SEQ ID NO: 14833 - protein, 170 aa, Zea mays
  unsure (1)..(170): unsure at all Xaa locations
XTRPEEFTRLKNLVEEKEKKIKELQDNVAAVNFTPSSKLGKMLMAKCRTLQEENEEIGAMASEGKIHELGMKIAVLKSQNNELRNQFDVLYKHMDGVTNDVERSNELVAILQEELEAKELEVTRLKEETLSQKEGTPDAPAPAPAPVEEGDGAGNDLKPASDPLQVKLES

SEQ ID NO: 14834 - protein, 185 aa, Zea mays
  unsure (1)..(185): unsure at all Xaa locations
MSSPWSPLSIEEDEEIQELGADEQQVGEQLRQGDGQQQELTAEARAQETVKKRARSASSSTNPSNSRKSEGKIKVEESAPGAATGVILSLRESLQDCKQSLASCQVELEAAKSEIEKWHSAFQSIPAVPSGTIPNPVSVVSYLSTLKSSEGSLKEQLEKAKXREAAFIVTFXKREQEIAELKSAX

SEQ ID NO: 14835 - protein, 134 aa, Zea mays
  unsure (1)..(134): unsure at all Xaa locations
XISSIQKLXXXLMAKCRTLQEENEEIGAMASEGXIHELGMKIAVLKSQNNELRNQFDVLYKHMDGVTNDVERSNELVAILQEELEAKELEVTRLKEETLSQKEGTQDAPAPAPAPVEEADGAGTSDPLQVKMES

SEQ ID NO: 14836 - protein, 116 aa, Zea mays
  unsure (1)..(116): unsure at all Xaa locations
MEFSLQDDDFGGDFSASNATRAASGSKRSFGDLEDDEDDIFGSKKVRTKAEEAAPGVATGMILSLRESLQNCKDDLASSQNELESAKAEILKWKSAFQNESFIPAGKSPXPXFLIX

SEQ ID NO: 14837 - protein, 91 aa, Zea mays
  unsure (1)..(91): unsure at all Xaa locations
XSASIGRPPPPPPGLRWARRRRQAPTRKRKKIKELQDNVVAVNFTPSNKLGKMLMAKCRTLQEENEDIGVMASKGKACHLWIRLPLEKSKP

SEQ ID NO: 14838 - protein, 229 aa, Zea mays
  unsure (1)..(229): unsure at all Xaa locations
XEFPGRPTRPVAARPEIKVLASAAAXEERGGAGGGAASACVTGGAPASGWEGCKMTNEEPLPKKVRLSETDFKVMARDELILRWKQYEAYVQALEGKYTDLNSNDVTGLRESEEKLKQQQQESARRENILVMRLATKEQEMQECTTQIQYLKQVQQPSVAQLRSTMVDPAINLFFLKMKGELEQTKDXLEQAQNELSAWKFTPDRYILPSQDFPDSPTSRKLWWDSQVL

SEQ ID NO: 14839 - protein, 536 aa, Drosophila melanogaster
MSVAAMTMDDQRPCMNSYDKMPPTKYEQNLNILNSSQNSGATGGPASPTPSGLEDHHHHHHPHPHHHHHQEQQQQQQQQQHLQQQQQQQQQQHAAAVAEAVAAAEQRQRLLEDEIENLKLEQVRMAQQCADAQRREKILMRRLANKEQEFQDYVSQIAEYKAQQAPTALALRTALLDPAVNLLFERLKKELKATKAKLEETQNELSAWKFTPDSNTGKRLMAKCRLLYQENEELGKMTSNGRLAKLETELAMQKSFSEEVKKSQSELDDFLQELDEDVEGMQSTILFLQQELKTTRDRIQTLEKENAQLKQAIKDEVVAPAAATNGGTNTTINKLETIHEDACMANNPTNPDCYNGNTNNEQIAAVPQIPLSDDGSNMNGNAARLARKRNYQEEEALPTVVVVPTPTPVGNNVQEAPPIREVTAPRTLPPKKSKLRGITTRRNSQLEEDHQPVTTPVAVPMIVDNAVAGMASEEAAAAAAAVNNSNTGIIPETGVQVGVPVEGGDPGAPAAPGRILTRRRSVRMQQNGSGAVDYST

SEQ ID NO: 14840 - protein, 539 aa, Drosophila melanogaster
MSVAAMTMDDQRPCMNSYDKMPPTKYEQNLNILNSSQNSGATGGPASPTPSGLEDHHHHHHPHPHHHHHQEQQQQQQQQQQHLQQQQQQQQQQQQHAAAVAEAVAAAEQRQRLLEDEIENLKLEQVRMAQQCADAQRREKILMRRLANKEQEFQDYVSQIAEYKAQQAPTALALRTALLDPAVNLLFERLKKELKATKAKLEETQNELSAWKFTPDSNTGKRLMAKCRLLYQENEELGKMTSNGRLAKLETELAMQKSFSEEVKKSQSELDDFLQELDEDVEGMQSTILFLQQELKTTRDRIQTLEKENAQLKQAIKDEVVAPAAATNGGTNTTINKLETIHEDACMANNPTNPDCYNGNTNNEQIAAAPQIPPSDDGSNMNGNAARLARKRNYQEEEALPTVVVVPTPTPVGNNVQEAPPIREVTAPRTLPPKKSKLRGITTRRNSQLEEDHQPVTTPVAVPMIVDNAVAGMASEEAAAAAAAVNNSNTGIIPETGVQVGVPVEGGDPGAPAAPGRILTRRRSVRMQQNGSGAVDYST

SEQ ID NO: 14841 - protein, 412 aa, Drosophila melanogaster
MAQQCADAQRREKILMRRLANKEQEFQDYVSQIAEYKAQQAPTALALRTALLDPAVNLLFERLKKELKATKAKLEETQNELSAWKFTPDSNTGKRLMAKCRLLYQENEELGKMTSNGRLAKLETELAMQKSFSEEVKKSQSELDDFLQELDEDVEGMQSTILFLQQELKTTRDRIQTLEKENAQLKQAIKDEVVAPAAATNGGTNTTINKLETIHEDACMANNPTNPDCYNGNTNNEQIAAAPQIPPSDDGSNMNGNAARLARKRNYQEEEALPTVVVVPTPTPVGNNVQEAPPIREVTAPRTLPPKKSKLRGITTRRNSQLEEDHQPVTTPVAVPMIVDNAVAGMASEEAAAAAAAVNNSNTGIIPETGVQVGVPVEGGDPGAPAAPGRILTRRRSVRMQQNGSGAVDYST

SEQ ID NO: 14842 - protein, 412 aa, Drosophila melanogaster
MAQQCADAQRREKILMRRLANKEQEFQDYVSQIAEYKAQQAPTALALRTALLDPAVNLLFERLKKELKATKAKLEETQNELSAWKFTPDSNTGKRLMAKCRLLYQENEELGKMTSNGRLAKLETELAMQKSFSEEVKKSQSELDDFLQELDEDVEGMQSTILFLQQELKTTRDRIQTLEKENAQLKQAIKDEVVAPAAATNGGTNTTINKLETIHEDACMANNPTNPDCYNGNTNNEQIAAVPQIPLSDDGSNMNGNAARLARKRNYQEEEALPTVVVVPTPTPVGNNVQEAPPIREVTAPRTLPPKKSKLRGITTRRNSQLEEDHQPVTTPVAVPMIVDNAVAGMASEEAAAAAAAVNNSNTGIIPETGVQVGVPVEGGDPGAPAAPGRILTRRRSVRMQQNGSGAVDYST

SEQ ID NO: 14843 - protein, 396 aa, Homo sapiens
MTNEEPLPKKVRLSETDFKVMARDELILRWKQYEAYVQALEGKYTDLNSNDVTGLRESEEKLKQQQQESARRENILVMRLATKEQEMQECTTQIQYLKQVQQPSVAQLRSTMVDPAINLFFLKMKGELEQTKDKLEQAQNELSAWKFTPDSQTGKKLMAKCRMLIQENQELGRQLSQGRIAQLEAELALQKKYSEELKSSQDELNDFIIQLDEEVEGMQSTILVLQQQLKETRQQLAQYQQQQSQASAPSTSRTTASEPVEQSEATSKDCSRLTNGPSNGSSSRQRTSGSGFHREGNTTEDDFPSSPGNGNKSSNSSEERTGRGGSGYVNQLSAGYESVDSPTGSENSLTHQSNDTDSSHDPQEEKAVSGKGNRTVGSRHVQNGLDSSVNVQGSVL

SEQ ID NO: 14844 - protein, 388 aa, Homo sapiens
EEPLPKKVRLSETDFKVMARDELILRWKQYEAYVQALEGKYTDLNSNDVTGLRESEEKLKQQQQESARRENILVMRLATKEQEMQECTTQIQYLKQVQQPSVAQLRSTMVDPAINLFFLKMKGELEQTKDKLEQAQNELSAWKFTPDSQTGKKLMAKCRMLIQENQELGRQLSQGRIAQLEAELALQKKYSEELKSSQDELNDFIIQLDEEVEGMQSTILVLQQQLKETRQQLAQYQQQQSQASAPSTSRTTASEPVEQSEATSKDCSRLTNGPSNGSSSRQRTSGSGFHREGNTTEDDFPSSPGNGNKSSNSSEERTGRGGSGYVNQLSAGYESVDSPTGSENSLTHQSNDTDSSHDPQEEKAVSGKGNRTVGSRHVQNGLDSSVNV

SEQ ID NO: 14845 - protein, 285 aa, Homo sapiens
MVDPAINLFFLKMKGELEQTKDKLEQAQNELSAWKFTPDSQTGKKLMAKCRMLIQENQELGRQLSQGRIAQLEAELALQKKYSEELKSSQDELNDFIIQLDEEVEGMQSTILVLQQQLKETRQQLAQYQQQQSQASAPSTSRTTASEPVEQSEATSKDCSRLTNGPSNGSSSRQRTSGSGFHREGNTTEDDFPSSPGNGNKSSNSSEERTGRGGSGYVNQLSAGYESVDSPTGSENSLTHQSNDTDSSHDPQEEKAVSGKGNRTVGSRHVQNGLDSSVNVQGSVL

SEQ ID NO: 14846 - protein, 190 aa, Mus musculus
MEKVPGDMEIERRERSEELSEAERKAVQATWARLYANCEDVGVAILVRLFVNFPSAKQYFSQFRHMEDPLEMERSPQLRKHACRVMGALNTVVENLHDPDKVSSVLALVGKAHALKHKVEPMYFKILSGVILEVIAEEFANDFPVETQKAWAKLRGLIYSHVTAAYKEVGWVQQVPNTTTPPATLPSSGP

SEQ ID NO: 14847 - protein, 165 aa, Cichorium intybus x Cichorium endivia
MSFSEEQEALVKEAWEIMKEDIPALSLYFFTQVLEIAPAAKGLFSFLKDAEEIPQDNPKLKSHAVKVFKMTCEAIQLREKGEVVVSGSTLKYLGSVHLQKGVIDAHFAVVKEGVLRTVEKGVGEKWSEEMKGAWSEAYDQLAAAIITEMKKEATEMDEEAEETQT

SEQ ID NO: 14848 - protein, 161 aa, Cichorium intybus x Cichorium endivia
MGFSEKQEALVKESWEVMKQDIPALSLYLYAMILEIAPEARGLFSFLKDTNVIPQNNPKLKSHAVKVFKMVCESAIQLREKGEVVVSGSTLKYLGSVHLEKGIVDPQFEVVKEALIRTVAKAMGEKCSEEMKSAWSEAYDELADAIKTEMKKEAAETQTHI

SEQ ID NO: 14849 - protein, 149 aa, Canavalia lineata
MGAFSEKQESLVKSSWEAFKQNVPHHSAVFYTLILEKAPAAQNMFSFLSNGVDPNNPKLKAHAEKVFKMTVDSAVQLRAKGEVVLADPTLGSVHVQKGVLDPHFLVVKEALLKTFKEAVGDKWNDELGNAWEVAYDELAAAIKKAMGSA

SEQ ID NO: 14850 - protein, 161 aa, Marchantia polymorpha
DSATHSVTFFAKIFEIAPGAKALFSFLKDSDIPFDKNPKLKAHALTVFRLTGDSACMLGEKGAIDALHPKLKELGKKHVGYGVIAAHFDVVKAALLSTIESLLPEDWPAEKKVATCGAWSQAYDELAGVMINEMQAIRDAEKAPAAEEAPEAPAAESKALP

SEQ ID NO: 14851 - protein, 180 aa, Physcomitrella patens
MASAVVNQSEAAAVRAPSKPVKTYSKENEQLVKQSWEILKKDAQRNGINFFRKVFEIAPGAKAMYSFLRDSTIPFEENPKVKNHARYVFMMTGDAAVQLGEKGAYQVLESKLQKLAATHVNAGVTDDQFEIVKEAILYAIEMGVPDLWSPELKSAWGDAYDMLAEQVKAEMHAQRSAATS

SEQ ID NO: 14852 - protein, 177 aa, Ceratodon purpureus
MAPPTVGTQAQAAPAMVPARVYSKDDEVLVKKSWDILKKDAQRNGINFFRKVFEIAPGAKSMYSFLRDSTIPFEENPKVKNHARYVFMMTGDAAVQLGEKGAYQVLDSKLQKLAATHINAGVTDDQFEIVKEAILYAIEMGVPELWSPELKSAWGDAYDMLAAAVKAEMHAQRAAAQ

SEQ ID NO: 14853 - protein, 147 aa, Lotus japonicus
MGFTAQQEALVGSSYETFKKNLPTNSVLFYTVILEIAPTAKDMFSFLKESGPKHSPQLQAHAEKVFALTRDAATQLVAKGEVTLADASLGAVHVQKAVTDPHFVVVKEALLQTVKEAVGADEWSDDLSTAWEGAYDGLATAIKKAMG

SEQ ID NO: 14854 - protein, 137 aa, Lotus japonicus
AGGAYETFKKNLPTNSVLFYTVILEIAPTAKDMFSFLKESGPKHSPQLQAHAEKVFALTRDAATQLVAKGEVTLADASLGAVHVQKAVTDPHFVVVKEALLQTVKEAVGADEWSDDLSTAWEGAYDGLATAIKKAMG

SEQ ID NO: 14855 - protein, 123 aa, Lotus japonicus
GNSVLFYTLILEKAPAAKDMFSFLKASGPTHSPQLQAHAEKVFGLTRDAAAQLLAKGEVTLADASLGAVHVQKAVADPHFAVVKEALLKTVQAAVGDKWSEELSTAWGVAYDGLAAAIKKAMS

SEQ ID NO: 14856 - protein, 123 aa, Lotus japonicus
GNSVLFYTLILEKAPAAKDMFSFLKASGPTHSPQLQAHAEKVFGLTRDAAAQLLAKGEVTLADAGLGAVHVQKAVADPHFAVVKEALLKTVQAAVGDKWSEDLSTAWGVAYDGLAAAIKKAMS

SEQ ID NO: 14857 - protein, 162 aa, Parasponia andersonii
MSSSEVNKVFTEEQEALVVKAWAVMKKNSAELGLQFFLKIFEIAPSAKNLFSYLKDSPVPLEQNPKLKPHATTVFVMTCESAVQLRKAGKVTVKESDLKRIGAIHFKTGVVNEHFEVTRFALLETIKEAVPEMWSPEMKNAWGVAYDQLVAAIKFEMKPSST

SEQ ID NO: 14858 - protein, 155 aa, Parasponia andersonii
VNKVFTEEQEALVVKAWAVMKKNSAELGLQFLKIFEIAPSAKNLFSYLKDSPVPLEQNPKLKPHATTFVMTTESAVQLRKAGKVTVKESDLKRIGAIHFKTGVVNEHFEVTRFALLETIKEAVPEMWSPEMKNAWGVAYDQLVAAIKFEMKPSST

SEQ ID NO: 14859 - protein, 161 aa, Parasponia rigida
SSSEVNKVFTEEQEALVVKAWAVMKKNSAELGLQFFLKIFEIAPSAKNLFSYLKDSPVPLEQNPKLKPHATTVFVMTCESAVQLRKAGKVTVKESDLKRIGAIHFKTGVVNEHFEVTRFALLETIKEAVPEMWSPEMKNAWGVAYDQLVAAIKFEMKPSST

SEQ ID NO: 14860 - protein, 162 aa, Parasponia rigida
MSSSEVNKVFTEEQEALVVKAWAVMKKNSAELGLQFFLKIFEIAPSAKNLFSYLKDSPVPLEQNPKLKPHATTVFVMTCESAVQLRKAGKATVKESDLKRIGAIHFKTGVVNEHFEVTRFALLETIKEAVPEMWSPEMKNAWGVAYDQLVAAIKFEMKPSST

SEQ ID NO: 14861 - protein, 161 aa, Parasponia rigida
SSSEVNKVFTEEQEALVVKAWAVMKKNSADLGLQFFLKIFEIAPSAKNLFSYLKDSPVPLEQNPKLKPHATTVFVMTCESAVQLQKAGKVTVKESDLKRIGAIHFKTGVVNEHFEVTRFALLETIKEAVPEMWSPEMKNAWGVAYDQLVVAIKFEMKPSST

SEQ ID NO: 14862 - protein, 162 aa, Trema tomentosa
MSSSEVDKVFTEEQEALVVKSWAVMKKNSAELGLKFFLKIFEIAPSAKNLFSYLKDSPIPLEQNPKLKPHAMTVFVMTCESAVQLRKAGKVTVRESNLKRLGAIHFKNGVVNEHFEVTRFALLETIKEAVPEMWSPEMKNAWGEAYDQLVAAIKSEMKPSST

SEQ ID NO: 14863 - protein, 161 aa, Trema tomentosa
MSSSEVDKVFTEEQEALVVKSWAVMKKNSAELGLKFFLKIFEIAPSAKNLFSYLKDSPIPLEQNPKLKPHAMTVFVMTCESAVQLRKAGKVTVRESNLKRLGAIHFKNGVVNEHFETRFALLETIKEAVPEMWSPEMKNAWGEAYDQLVAAIKSEMKPSST

SEQ ID NO: 14864 - protein, 160 aa, Casuarina glauca
MSTLEGRGFTEEQEALVVKSWSAMKPNAGELGLKFFLKIFEIAPSAQKLFSFLKDSNVPLERNPKLKSHAMSVFLMTCESAVQLRKAGKVTVRESSLKKLGASHFKHGVADEHFEVTKFALLETIKEAVPETWSPEMKNAWGEAYDKLVAAIKLEMKPSS

SEQ ID NO: 14865 - protein, 163 aa, Gossypium hirsutum
MATYEGKVFTEEQEALVVKSWTVMKKKTAELGLKFFLKIFEIAPSAKKLFSFLRDSNVPLEQNTKLKPHAMSVFVMTCESAVQLRKAGKVTVRESNLKKLGATHFKYGVVDEHFEVTKFALLETIKEAVPDMWSDEMKNAWGEAYDRLVAAIKIEMKACSQAA

SEQ ID NO: 14866 - protein, 159 aa, Gossypium hirsutum
MGFTEKQEGLVKESWEVLKQDIPHSSLRFFSLILEIAPGAKNMFSFLRESEEIPQNNPKLKAHAVKVFKMTCESAIQLREKGEVVVADTTLKYLGTVHVKSGVKDPHFEVVKEALLRTIEEAIGEEKWNEEMKNAWGEAYDQLAEAIKAEMKNHHDETA

SEQ ID NO: 14867 - protein, 160 aa, Arabidopsis thaliana
MESEGKIVFTEEQEALVVKSWSVMKKNSAELGLKLFIKIFEIAPTTKKMFSFLRDSPIPAEQNPKLKPHAMSVFVMCCESAVQLRKTGKVTVRETTLKRLGASHSKYGVVDEHFEVAKYALLETIKEAVPEMWSPEMKVAWGQAYDHLVAAIKAEMNLSN

SEQ ID NO: 14868 - protein, 158 aa, Arabidopsis thaliana
MGEIGFTEKQEALVKESWEILKQDIPKYSLHFFSQILEIAPAAKGLFSFLRDSDEVPHNNPKLKAHAVKVFKMTCETAIQLREEGKVVVADTTLQYLGSIHLKSGVIDPHFEVVKEALLRTLKEGLGEKYNEEVEGAWSQAYDHLALAIKTEMKQEES

SEQ ID NO: 14869 - protein, 161 aa, Brassica napus
MGEIVFTEKQEALVKESWEILKQDIPKYSLHFFSQILEIAPAAKDMFSFLRDTDEVPHNNPKLKAHAVKVFKMTCETAIQLREKGKVVVADTTLQYLGSVHFKSGVLDPHFEVVKEALVRTLKEGLGEKYNEEVEGAWSKAYDHLALAIKAEMKQEDSQKP

SEQ ID NO: 14870 - protein, 162 aa, Glycine max
  unsure (1)..(162): unsure at all Xaa locations
MSAAEGAVVFSEEKEALVLKSWAIMKKDSANLGLRFFLKIFEIAPSARQMFPFLRDSDVPLETNPKLKTHAVSVFVMTCEAAAQLRKAGKITVRETTLKRLGGTHLKYGVADGHFEVTRFALLETIKEXLPADMWGPXXRNXWGEAYDQLXAAIKQXMKPFE

SEQ ID NO: 14871 - protein, 161 aa, Glycine max
MTTTLERGFSEEQEALVVKSWNVMKKNSGELGLKFFLKIFEIAPSAQKLFSFLRDSTVPLEQNPKLKPHAVSVFVMTCDSAVQLRKAGKVTVRESNLKKLGATHFRTGVANEHFEVTKFALLETIKEAVPEMWSPAMKNAWGEAYDQLVDAIKSEMKPPSS

SEQ ID NO: 14872 - protein, 161 aa, Glycine max; identical to SEQ ID NO: 14871

SEQ ID NO: 14873 - protein, 161 aa, Glycine max; identical to SEQ ID NO: 14871

SEQ ID NO: 14874 - protein, 172 aa, Glycine max
  unsure (1)..(172): unsure at all Xaa locations
RVENMEGKGFTEEQEALVVKSWNEMKKNSQELGLKFFKKILEIAPAAQQLFSFLKDSTVPLEENPKLKPHAMAVFVMTCESAVQLRKAGKVTVRESNLKRLGATHFKAGVAAEHFEVTKLALLETIKEAVPEMWSPAMKNAWEEAHDQLAEAIKSEMKPSDXTLVVAFSQIE

SEQ ID NO: 14875 - protein, 133 aa, Glycine max
  unsure (1)..(133): unsure at all Xaa locations
RVENMEGKGFTEEQEALVVKSWNEMKKNSQELGLKFFKKILEIAPAAQQLFSFLKDSTVPLEENPKLKPHAMAVFVMVTKLALLETIKEAVPEMWSPAMKNAWEEAHDQLAEAIKSEMKPSDXTLVVAFSQIE

SEQ ID NO: 14876 - protein, 151 aa, Lupinus luteus
LTESQAALVKSSWEEFNANIPKHTHRFFILVLEIAPAAKDLFSFLKGTSEVPQNNPELQAHAGKVFKLVYEAAIQLQVTGVVVTDATLKNLGSVHVSKGVADAHFPVVKEAILKTIKEVVGAKWSEELNSAWTIAYDELAIVIKKEMNDAA

SEQ ID NO: 14877 - protein, 153 aa, Lupinus luteus
GALTESQAALVKSSWEEFNANIPKHTHRFFILVLEIAPAAKDLFSFLKGTSEVPQNNPELQAHAGKVFKLVYEAAIQLQVTGVVVTDATLKNLGSVHVSKGVADAHFPVVKEAILKTIKEVVGAKWSEELNSAWTIAYDELAIVIKKEMNDAA

SEQ ID NO: 14878 - protein, 153 aa, Lupinus luteus
GALTESQAALVKSSWEEFNANIPKHTHRFFILVLEIAPAAKDLFSFLKGTSEVPQNNPELQAHAGKVFKLVYEAAIQLEVTGVVVTDATLKNLGSVHVSKGVADAHFPVVKEAILKTIKEVVGAKWSEELNSAWTIAYDELAIVIKKEMDDAA

SEQ ID NO: 14879 - protein, 153 aa, Lupinus luteus
GALTESQAALVKSSWEEFNANIPKHTHRFFILVLEIAPAAKDLFSFLKGTSEVPQNNPELQAHAGKVFKLVYEAAIQLEVTGVVVSDATLKNLGSVHVSKGVADAHFPVVKEAILKTIKEVVGAKWSEELNSAWTIAYDELAIVIKKEMDDAA

SEQ ID NO: 14880 - protein, 154 aa, Lupinus luteus
MGVLTDVQVALVKSSFEEFNANIPKNTHRFFTLVLEIAPGAKDLFSFLKGSSEVPQNNPDLQAHAGKVFKLTYEAAIQLQVNGAVASDATLKSLGSVHVSKGVVDAHFPVVKEAILKTIKEVVGDKWSEELNTAWTIAYDELAIIIKKEMKDAA

SEQ ID NO: 14881 - protein, 153 aa, Lupinus luteus
GVLTDVQVALVKSSFEEFNANIPKNTHRFFTLVLEIAPGAKDLFSFLKGSSEVPQNNPDLQAHAGKVFKLTYEAAIQLEVNGAVASDATLKSLGSVHVSKGVVDAHFPVVKEAILKTIKEVVGDKWSEELNTAWTIAYDELAIIIKKEMKDAA

SEQ ID NO: 14882 - protein, 154 aa, Lupinus luteus
MGVLTDVQVALVKSSFEEFNANIPKNTHRFFTLVLEIAPGAKDLFSFLKGSSEVPQNNPDLQAHAGKVFKLTYEAAIQLQVNGAVASDATLKSLGSVHVSKGVVDAHFPVVKEAILKTIKGVVGDKWSEELNTAWTIAYDELAIIIKKEMKDAA

SEQ ID NO: 14883 - protein, 94 aa, Lupinus luteus
ASAHAGKVFKLVYEAAIQLQVTGVVVTDATLKNLGSVHVSKGVADAHFPVVKEAILKTIKEVVGAKWSEELNSAWTIAYDELAIVIKKEMNDAA

SEQ ID NO: 14884 - protein, 160 aa, Medicago sativa
MGTLDTKGFTEEQEALVVKSWNAMKKNSAELGLKLFLKIFEIAPSAQKLFSFLKDSKVPLEQNTKLKPHAMSVFLMTCESAVQLRKSGKVTVRESSLKKLGANHFKYGVVDEHFEVTKFALLETIKEAVPEMWSPAMKNAWGEAYDQLVNAIKSEMKPSS

SEQ ID NO: 14885 - protein, 146 aa, Medicago truncatula
MGFTEKQEALVNSSWELFKQNPGNSVLFYTIILEKAPAAKGMFSFLKDTAGVQDSPKLQSHAEKVFGMVRDSAVQLRATGGVVLGDATLGAIHIQKGVVDPHFVVVKEALLKTIKEVSGDKWSEELSTAWEVAYDALAAAIKKAMG

SEQ ID NO: 14886 - protein, 147 aa, Medicago truncatula
MSFTDKQEALVNSSYEAFKQNLSGYSVFFYTVILEKAPAAKGLFSFLKDSAGVQDSPQLQAHAEKVFGLVRDSASQLRATGGVVLGDAALGAIHIQKGVVDPHFVVVKEALLKTIKEAAGDKWSEELSTAWEVAYDALATEIKKAMS

SEQ ID NO: 14887 - protein, 146 aa, Phaseolus vulgaris
MGAFTEKQEALVNSSWEAFKGNIPQYSVVFYTSILEKAPAAKNLFSFLANGVDPTNPKLTAHAESLFGLVRDSAAQLRANGAVVADAALGSIHSQKGVNDSQFLVVKEALLKTLKEAVGDKWTDELSTALELAYDELAAAIKKAYA

SEQ ID NO: 14888 - protein, 145 aa, Phaseolus vulgaris
GAFTEKQEALVNSSWEAFKGNIPQYSVVFYTSILEKAPAAKNLFSFLANGVDPTNPKLTAHAESLFGLVRDSAAQLRANGAVVADAALGSIHSQKGVSNDQFLVVKEALLKTLKQAVGDKWTDQLSTALELAYDELAAAIKKAYA

SEQ ID NO: 14889 - protein, 146 aa, Phaseolus vulgaris
MGAFTEKQEALVNSSWEAFKGNIPQYSVVFYTSILEKAPAAKNLFSFLANGVDPTNPKLTAHAESLFGLVRDSAAQLRANGAVVADAALGSIHSQKALNDSQFLVVKEALLKTLKEAVGDKWTDELSTALELAYDEFAAGIKKAYA

SEQ ID NO: 14890 - protein, 146 aa, Pisum sativum
MGFTEKQEALVNSSWELFKQNPSYSVLFYTIILKKAPAAKGMFSFLKDSAEVVDSPKLQAHAEKVFGMVHDSAIQLRASGEVVVGDATLGAIHIQKGVVDPHFVVVKEALLETIKEASGEKWSEELSTAWEVAYEGLASAIKKAMN

SEQ ID NO: 14891 - protein, 146 aa, Pisum sativum
MGFTEKQEALVNSSWELFKQNPSYSVLFYTIILKKAPAAKGMFSFLKDSAEVVDSPKLQAHAEKVFGMVHDSAIQLRASGEVVLGDATLGAIHIQKGVVDPHFVVVKEALLETIKEASGEKWSEELSTAWEVAYEGLASAIKKAMN

SEQ ID NO: 14892 - protein, 147 aa, Pisum sativum
MGFTDKQEALVNSSWESFKQNLSGNSILFYTIILEKAPAAKGLFSFLKDTAGVEDSPKLQAHAEQVFGLVRDSAAQLRTKGEVVLGNATLGAIHVQRGVTDPHFVVVKEALLQTIKKASGNNWSEELNTAWEVAYDGLATAIKKAMT

SEQ ID NO: 14893 - protein, 146 aa, Pisum sativum
MGFTEKQEALVNSSWELFKQNPSYSVLFYTIILKKAPAAKGMFSFLKDSAEVVDSPKLQAHAEKVFGMVHDSAIQLRASGEVVLGDVTLGAIHIQKGVIDPHFVVVKEALLDTIKEASGEKWSEELSTAWEIAYEGLASAIKKAMN

SEQ ID NO: 14894 - protein, 146 aa, Pisum sativum
MGFTDKQEALVNSSWELFKQNPGYSVLFYNIILKKAPATKGMFSFLKDSAGVVDSPKLQAHAEKVFGMVHDSAVQLRVSGEVVLGDATLGAIHIQKGVVDSHFVVVKEALLETIKEASGEKWSEELSTAWEVAYEGLASAIKKAMS

SEQ ID NO: 14895 - protein, 147 aa, Pisum sativum
GFTDKQEALVNSSSEFKQNLPGYSILFYTIVLEKAPAAKGLFSFLKDTAGVEDSPKLQAHAEQVFGLVRDSAAQLRTKGEVVLGNATLGAIHVQKGVTNPHFVVVKEALLQTIKKASGNNWSEELNTAWEVAYDGLATAIKKAMKTA

SEQ ID NO: 14896 - protein, 145 aa, Psophocarpus tetragonolobus
MGGFTEKQEALVNSSYEAFKANVPQYSVVFYTSILEKAPAAKDLFPFLANGVDPTNPKLIGHAEKLFGLVHDSAAQLRAKGAVVADAALGSLHAQKGVTDPQFVVVKEALLKTVKEAVGDKWSDELSNAWEVAYNELAAALKKAF

SEQ ID NO: 14897 - protein, 148 aa, Sesbania rostrata
GAFTESQEALVTSSYETFKQNASDLSVLFYTFILEKAPGAKNLFSFLKDSDGVPKDNPNLKAHAAKVFELVVDSAVQLRTKGAVVIADANLGPVHVQKGVTDAHFVVVKEALLKTVKEATGAKWSDELSNAWEVAYDELAAAIKKAMG

SEQ ID NO: 14898 - protein, 148 aa, Sesbania rostrata
MGFTEKQEALVNASYEAFKQNLPGNSVLFYSFILEKAPAAKGMFSFLKDSDGVPQNNPSLQAHAEKVFGLVRDSAAQLRATGVVVLADASLGSVHVQKGVLDPHFVVVKEALLKTLKEAAGATWSDEVSNAWEVAYDGLSAAIKKAMS

SEQ ID NO: 14899 - protein, 147 aa, Sesbania rostrata
GFTDKQEALVNASYEAFKKNLPGHSVLFYSFILEKEPAAKGLFSFLKDSDGVPQNNPSLQAHAEKVFGLVHDAAAQLRATGVVVLADASLGSVHVQKGVTDPHFVVVKEALLKTLKEAAGATWSDEVSIAWEVAYDGLAAAIKKAMS

SEQ ID NO: 14900 - protein, 148 aa, Sesbania rostrata
MGFTEKQEALVNASYEAFKQNLPGNSVLFYSFILEKAPAAKGMFSFLKDFDEVPQNNPSLQAHAEKVFGLVRDSAAQLRATGVVVLADASLGSVHVQKGVLDPHFVVVKEALLKTLKEAGGATWSDEVSNAWEVAYDELSAAIKKAMS

SEQ ID NO: 14901 - protein, 154 aa, Sesbania rostrata
QKKTKNMGFTDKQEALVNTSYEAFKKNLPGHSVLFYSFILEKEPAAKGLFSFLKDSDGVPQNNPSLQAHAEKVFGLVHDAAAQLRATGVVVLADASLGSVHVQKGVTDPHFVVVKEALLKTLKEAAGATWSDEVSIAWEVAYDGLAAAIKKAMS

SEQ ID NO: 14902 - protein, 146 aa, Vicia faba
MGFTEKQEALVNSSWELFKQNPGNSVLFYTIILKKAPTAKGMFSFLKDSAGVVDSPKLQAHAEKVFGMVRDSAVQLRASGEIVLGDATLGAIHIQKGVLDPHFVVVKEALLETIKEISGDKWSEELSAAWEVAYEGLAVAIKKAMS

SEQ ID NO: 14903 - protein, 147 aa, Vicia faba
MGFTDKQEALVNSSWESFKQNLSGNSIFFYTIILEKAPAAKGLFSFLKDTAGVEDSPKLQAHAEQVFGLVRDSAAQLRAKGEVVLGNATLGAIHVQKGVTDPHFVVVKEALLQTIKKASGSNWSVELSTAWEVAYDGLASAIKKAMN

SEQ ID NO: 14904 - protein, 146 aa, Vicia faba
MGFTQQQEALVNSSWESFKQNPSYSVLFYTIILEKAPAAKGMFSFLKDSAGVVDSPKLQAHAEQVFGMVRDSAIQLQATGEVVLKNGSLGAIHIQKGVVDPHFVVVKEALLKTIKEASGDKWSEELSIAWEVAYDGLATAIKKAMS

SEQ ID NO: 14905 - protein, 143 aa, Vicia faba
GFTEKQEALVNSSSQLFKQNPSNYSVLFYTIILQKAPTAKAMFSFLKDSAGVVDSPKLGAHAEKVFGMVRDSAVQLRATGEVVLDGKDGSIHIQKGVLDPHFVVVKEALLKTIKEASGDKWSEELSAAWEVAYDGLATAIKAA

SEQ ID NO: 14906 - protein, 148 aa, Vicia faba
MEFTLRQEALVNSSWEAFNQNLPLFSVLFYTFILEKAPIAKNMFSVLKDANEIPLANPSINAHTEMVFEMVRDAAAQLQTTGQVVLGDTTLGVVHTQKRVDGLHFMVVKEALLKTIKEAVGDKWSEELSNAWEIAYDGLAVAIMKEMS

SEQ ID NO: 14907 - protein, 107 aa, Vicia faba
KGMFSFLKDSAGVVDSPKLQAHAEQVFGMVRDSAIQIRQTGDVFLKDGSLGAIHIQKGVVDPHFVVVKEALLKTIKEASGDKWSEELSIAWEVAYDGLATAIKKAMS

SEQ ID NO: 14908 - protein, 83 aa, Vicia faba
QVFGMVRDSAIQLRTTGDIVLKDGTLGAIHIQKGVVDPHFVVVKEALLKTIKEASGDKWSEELSIAWEVAYDGLATAIKKAMS

SEQ ID NO: 14909 - protein, 145 aa, Vigna unguiculata
MVAFSDKQEGLVNGAYEAFKADIPKYSVVFYTTILEKAPAAKNLFSFLANGVDATNPKLTGHAEKLFGLVRDSAAQLRASGGVVADAALGAVHSQKAVNDAQFVVVKEALVKTLKEAVGDKWSDELGTAVELAYDELAAAIKKAY

SEQ ID NO: 14910 - protein, 145 aa, Vigna unguiculata
MVAFSDKQEALVNGAYEAFKANIPKYSVVFYTTILEKAPAAKNLFSFLANGVDATNPKLTGHAEKLFGLVRDSAAQLRASGGVVADAALGAVHSQKAVNDAQFVVVKEALVKTLKEAVGDKWSDELGTAVELAYDELAAAIKKAY

SEQ ID NO: 14911 - protein, 152 aa, Lycopersicon esculentum
MSSFSEEQEALVVKSWGSMKKDAGEWGLKFFLKIFEIAPSAKKMFSFLKDSNVPLDQNPKLKIHAKSVLVMTCEAAVQLRKAGKVVVRDSTLKKIGATHFKYGVVDEHFEVTKYALLETIKEASQEMWSVEMKNAWGEAYDQLVSAIKTEMK

SEQ ID NO: 14912 - protein, 152 aa, Solanum tuberosum
MSSFSEEQEALVVKSWGSMKKDAGEWGLKFFLKIFEIAPSAKKMFSFLKDSNVPLDQNPKLKVHAKSILVMTCEAAVQLRKAGKVVVRDSTLKKIGATHFKYGVADEHFEVTKYALLETIKEASPEMWSVEMKNAWGEAYDQLVSAIKTEMK

SEQ ID NO: 14913 - protein, 162 aa, Hordeum vulgare
MSAAEGAVVFSEEKEALVLKSWAIMKKDSANLGLRFFLKIFEIAPSARQMFPFLRDSDVPLETNPKLKTHAVSVFVMTCEAAAQLRKAGKITVRETTLKRLGGTHLKYGVADGHFEVTRFALLETIKEALPADMWGPEMRNAWGEAYDQLVAAIKQEMKPAE

SEQ ID NO: 14914 - protein, 290 aa, Oryza sativa
MGSRLVRKQTARPPLVAVVPHPPRRPSSAIRIGGSETINETYLHESTLKPPLVFARPAAHVIEARRERTLQKHAACLPCAGTATRSRSCIRHTDFRLEWISAVVSKSICCSFPPRNQIEAAMALVEGNNGVSGGAVSFSEEQEALVLKSWAIMKKDSANIGLRFFLKIFEVAPSASQMFSFLRNSDVPLEKNPKLKTHAMSVFVMTCEAAAQLRKAGKVTVRDTTLKRLGATHFKYGVGDAHFEVTRFALLETIKEAVPVDMWSPAMKSAWSEAYNQLVAAIKQEMKPAE

SEQ ID NO: 14915 - protein, 169 aa, Oryza sativa
MALVEGNNGVSGGAVSFSEEQEALVLKSWAIMKKDSANIGLRFFLKIFEVAPSASQMFSFLRNSDVPLEKNPKLKTHAMSVFVMTCEAAAQLRKAGKVTVRDTTLKRLGATHFKYGVGDAHFEVTRFALLETIKEAVPVDMWSPAMKSAWSEAYNQLVAAIKQEMKPAE

SEQ ID NO: 14916 - protein, 169 aa, Oryza sativa; identical to SEQ ID NO: 14915

SEQ ID NO: 14917 - protein, 166 aa, Oryza sativa
MALVEDNNAVAVSFSEEQEALVLKSWAILKKDSANIALRFFLKIFEVAPSASQMFSFLRNSDVPLEKNPKLKTHAMSVFVMTCEAAAQLRKAGKVTVRDTTLKRLGATHLKYGVGDAHFEVVKFALLDTIKEEVPADMWSPAMKSAWSEAYDHLVAAIKQEMKPAE

SEQ ID NO: 14918 - protein, 166 aa, Oryza sativa; identical to SEQ ID NO: 14917

SEQ ID NO: 14919 - protein, 167 aa, Oryza sativa
MAFASASNGAVRFTEEQEALVLKSWAIMKDDSANIGHRFFLKIFEVAPSARHLFSFLRNSDVPLEKNPNLKKHAMAVFVMTCEAAAQLRKTGRVTVRDTTIKRLGSTHFKNGVSDTHFEVARFALLETIKDGIPASMWSPEMKNAWGEAYEHLVAAIKEGMKPVALL

SEQ ID NO: 14920 - protein, 167 aa, Oryza sativa; identical to SEQ ID NO: 14919

SEQ ID NO: 14921 - protein, 169 aa, Oryza sativa
MAANGSNVVSRGAVRFTEEQEALVLKSWAIMKNDSAHIGHRFFLKIFEVAPSARQLFSFLRNSDVPLEKNPKLKIHAMAVFVMTCEAAAQLRKTGRVTVRDTTIKRLGSTHFKNGVSDAHFEVAKFALLETIKEAVPASMWSPAMKGAWGEAYDHLVAAIKQGMKPAAA

SEQ ID NO: 14922 - protein, 169 aa, Oryza sativa; identical to SEQ ID NO: 14921

SEQ ID NO: 14923 - protein, 278 aa, Oryza sativa
MLPSCSFPLSQLHSGTQFSRLAWTDIRHIQVVFLLPSVQLEWTWSATTMRLARRHDRQPMAAPIPGPIDQYKSASHCCSLYSDSIASIQQLSCTELDRVDLAAIESITCEIKAGTCASNGAVRFTEEQEALVLKSWAIMKDDSANIGHRFFLKIFEVAPSARHLFSFLRNSDVPLEKNPNLKKHAMAVFVMTCEAAAQLRKTGRVTVRDTTIKRLGSTHFKNGVSDTHFEVARFALLETIKDGIPASMWSPEMKNAWGEAYEHLVAAIKEGMKPVALL

SEQ ID NO: 14924 - protein, 169 aa, Oryza sativa
  unsure (1)..(169): unsure at all Xaa locations
MALVEGNNGVSGGAVXSAXEQEALVLKSWAIMKKDSANIGLRFFLKIFEVAPSEARMFSFLRNSDVPLEKNPKLKTDPGRAILQTCEAAAQXRKAGKVTVRDTTLKRLGATHLKYGVGDAHFEVVKFALLDTIKEEVPADMWSPAMKSAWSEAYDHLVAAIKQEMKPAE

SEQ ID NO: 14925 - protein, 79 aa, Oryza sativa
  unsure (1)..(79): unsure at all Xaa locations
MALVEDNNAVAVSFSEEQEALVLKSWAILKKDSANIALRFFLKIFEVAPSGXAQIFSXFLXNPTVPFEKXPKVXKTHGX

SEQ ID NO: 14926 - protein, 183 aa, Citrus unshiu
MRDGSLKGLFCTAPKSIRSVRRNSGSFNVTAFTEEQEALVVKSWNAMKKNSGELALKFFLRIFEIAPSAKKLFTFLKDSDIPVEQNPKLKPHATTVFVMTCESAVQLRKAGKVTVRESNLKDLGATHFKYGVADEHFEVTKYALLEPIKEPVPEMWSPELKNAWAEAYDQLAAAIKIEMKPPS

SEQ ID NO: 14927 - protein, 162 aa, Trema orientalis
MSSSEVDKVFTEEQEALVVKSWAVMKKNSAELGLKFFLKIFEIAPSANNLFSYLKDSPIPLEQNPKLKPHAMTVFVMTCESAVQFRKAGKVTVRESNLKRIGAIHFKNGVVHEHFEVTRFALLETIKEAVPEMWSPEMKNAWGEAYDQLVAAIKFEVKPSST

SEQ ID NO: 14928 - protein, 161 aa, Trema orientalis
MSSSEVDKVFTEEQEALVVKSWAVMKKNSAELGLKFFLKIFEIAPSANNLFSYLKDSPIPLEQNPKLKPHAMTVFVMTCESAVQFRKAGKVTVRESNLKRIGAIHFKNGVVHEHFETRFALLETIKEAVPEMWSPEMKNAWGEAYDQLVAAIKFEVKPSST

SEQ ID NO: 14929 - protein, 165 aa, Zea mays subsp. parviglumis; identical to SEQ ID NO: 373

SEQ ID NO: 14930 - protein, 161 aa, Trema virgata
MSSSEVDKVFTEEQEALVVKSWAVMKKNSAELGLKFFLKIFEIAPSAKNLFSYLKDSPIPLEQNPKLKPHAMTVFVMTCESAVQLRKAGKVTVRESNLKRLGAIHFKNGVVNEHFETRFALLETIKEAVPEMWSAEMKNAWGEAYDQLVAAIKFEVKPSST

SEQ ID NO: 14931 - protein, 161 aa, Trema virgata
MSSSEVDKVFTEELEALVVKSWAVMKKNSAELGLKFFLKIFEIAPSAKNLFSYLKDSPIPLEQNPKLKPHAMTVFVMTCESAVQLRKAGKVTVRESNLKRLGAIHFKNGVVNEHFETRFALLETIKEAVPEMWSAEMKNAWGEAYDQLVAAIKFEVKPSST

SEQ ID NO: 14932 - protein, 161 aa, Trema virgata
MSSSEVDKVFTEEQEALVVKSWAVMKKNSAELGLKFFLKIFEIAPSAKNLFSYLKDSPIPLEQNPKLKPHAMTVFVMTCESAVQLRKAGKVTVRESNLKRLGAIHFKNGVVNEHFETRFALLETIKEAVPEMWSAEMKNAWGEAYDLLVAAIKFEVKPSST

SEQ ID NO: 14933 - protein, 423 aa, Arabidopsis thaliana
MDKEKSPAPPPSGGLPPPSGRYSAFSPNGSSFAMKAESSFPPLTPSGSNSSDANRFSHDISRMPDNPPKNLGHRRAHSEILTLPDDLSFDSDLGVVGAADGPSFSDDTDEDLLYMYLDMEKFNSSATSTSQMGEPSEPTWRNELASTSNLQSTPGSSSERPRIRHQHSQSMDGSTTIKPEMLMSGNEDVSGVDSKKAISAAKLSELALIDPKRAKRIWANRQSAARSKERKMRYIAELERKVQTLQTEATSLSAQLTLLQRDTNGLGVENNELKLRVQTMEQQVHLQDALNDALKEEVQHLKVLTGQGPSNGTSMNYGSFGSNQQFYPNNQSMHTILAAQQLQQLQIQSQKQQQQQQQHQQQQQQQQQQFHFQQQQLYQLQQQQRLQQQEQQSGASELRRPMPSPGQKESVTSPDRETPLTKD

SEQ ID NO: 14934 - protein, 423 aa, Arabidopsis thaliana
MDKEKSPAPPPSGGLPPPSGRYSAFSPNGSSFAMKAESSFPPLTPSGSNSSDANRFSHDISRMPDNPPKNLGHRRAHSEILTLPDDLSFDSDLGVVGAADGPSFSDDTDEDLLYMYLDMEKFNSSATSTSQMGEPSEPTWRNELASTSNLQSTPGSSSERPRIRHQHSQSMDGSTTIKPEMLMSGNEDVSGVDSKKAISAAKLSELALIDPKRAKRIWANSQSAARSKERKMRYIAELERKVQTLQTEATSLSAQLTLLQRDTNGLGVENNELKLRVQTMEQQVHLQDALNDALKEEVQHLKVLTGQGPSNGTSMNYGSFGSNQQFYPNNQSMHTILAAQQLQQLQIQSQKQQQQQQQHQQQQQQQQQQFHFQQQQLYQLQQQQRLQQQEQQSGASELRRPMPSPGQKESVTSPDRETPLTKD

SEQ ID NO: 14935 - protein, 398 aa, Arabidopsis thaliana
MDKEKSPAPPCGGLPPPSPSGRCSAFSEAGPIGHGSDANRMSHDISRMLDNPPKKIGHRRAHSEILTLPDDLSFDSDLGVVGNAADGASFSDETEEDLLSMYLDMDKFNSSATSSAQVGEPSGTAWKNETMMQTGTGSTSNPQNTVNSLGERPRIRHQHSQSMDGSMNINEMLMSGNEDDSAIDAKKSMSATKLAELALIDPKRAKRIWANRQSAARSKERKTRYIFELERKVQTLQTEATTLSAQLTLLQRDTNGLTVENNELKLRLQTMEQQVHLQDELNEALKEEIQHLKVLTGQVAPSALNYGSFGSNQQQFYSNNQSMQTILAAKQFQQLQIHSQKQQQQQQQQQQQHQQQQQQQQQYQFQQQQMQQLMQQRLQQQEQQNGVRLKPSQAQKEN

SEQ ID NO: 14936 - protein, 154 aa, Cicer arietinum
IAPTTRHYRSVSMDSFIGKLNFNDESSKLPPSPGLMSPGNSVDGNSAAAFSLEFGNGEFSGPELKKIMANEKLAEIAMADPKRAKRILANRQSAARSKERKMRYISELEHKVQTLQTEATTLSAQLTLLQRDSVGLTNQNSELKFRLQSMEQQA

SEQ ID NO: 14937 - protein, 469 aa, Oryza sativa (japonica cultivar-group)
MAESRIFGGLKPTKSRLLGPTIRGPPPNGAATHAPRRILFSFSPESQWLGQSSTRACLPPLRSPCLPAPSAASPAYPRLASSAASASAPARLRSRITLPGGRSPVPPMDPAASAAESSSLSSRDVAAMPDSPPRRAARHRRAQSEILLGAALPDDIAFDADLGVVGEVGGGGGDDYEEEEEDDEEEEMEGAGGSRMFEMFLEAGGKLETPEPAAPLPPPPARPRHQHSMSMDGSTSLASSAAGVAGRMGADAKKAISDAKLAELALVDPKRAKRILANRQSAARSKERKMRYIAELERKVQTLQTEATTLSAQLSMLQRDTTGLTSENSDLKIRVQTMEQQVRLQDALNDRLRDEIQQLKVATGQVNANCGKVGNFGLSSFGGANPQGYQRSHIQSLLAAQQLQQLQIHSQHQQQQMHLQQHHHLSTVQQQLLQEGLPLPGDLKMKGIVAASHAQNAGASESHALRSEP

SEQ ID NO: 14938 - protein, 200 aa, Oryza sativa (japonica cultivar-group)
MDGESSLFEGESAPPDYAKKAMPADRLAELALLDPKRAKRILANRQSAARSKERKIKYTGELERKVQTLQTEATTLSTQLTLLQRDTSGLTAENRELKLRLQSMEEQAKLRDALNDALREEVQRLKIAAGQVPNMNGNSFNGGLQQQQQQQMPTYFSQQQQMHYLSGHQGRHHHPNNPHNSLNGGQSMSGQTLNDSMDFM

SEQ ID NO: 14939 - protein, 444 aa, Lycopersicon esculentum
MAQSNSKPPMSSQNFGVGAVSHVRSLSQSSIFSNSCLPPLSPFPPSEPGMVSGHSSLKDISMEEADVNSQGVGVVSSFTRDGLPPRKGHRRSNSDVPLGFSAMIQSSPQLMPISGQKVLGRAVSLGDSNGKIDERKPKGEVTDELLFSYMNLENIETLNGSGTKDRDKDSIVSGTKVTGSESSNNEAESVMKGNNVSIQPTNLREGTKRSADANIAPAARHFRSLSMDSAIGNFHYGDESPNLPTSLMMRSGQLSPSNSGNESSSKHNLDFGNSEFSEAEMKKIMADERLAEIAVLDPKRAKRILANRLSAARSKERKTRYISELEHKVQKLQTETTTLSTQVTILQKNFVEISSLNSELKFRIQAMEQQAQLRDALHEALTAEVQRLKLAAGEHREEGRLPNNMTQQTPVKHNIFQMQRQQPSQMQQLSVGKASAASATPASA

SEQ ID NO: 14940 - protein, 444 aa, Lycopersicon esculentum
MAQSNSKPPMSSQNFGVGAVSHVRSLSQSSIFSNSCLPPLSPFPPSEPGMVSGRSSLKDISMEEADVNSQGVGVVSSFTRDGLPPRKGHRRSNSDVPLGFSAMIQSSPQLMPISGQKVLGRAVSLGDSNGKIDERKPKGEVTDELLFSYMNLENIETLNGSGTKDRDKDSIVSGTKVTGSESSNNEAESVMKGNNVSIQPTNLREGTKRSADANIAPAARHFRSLSMDSAIGNFHYGDESPNLPTSLMMRSGQLSPSNSGNESSSKHNLDFGNSEFSEAEMKKIMADERLAEIAVLDPKRAKRILANRLSAARSKERKTRYISELEHKVQKLQTETTTLSTQVTILQKNFVEISSLNSELKFRIQAMEQQAQLRDALHEALTAEVQRLKLAAGEHREEGRLPNNMTQQTPVKHNIFQMQRQQPSQMQQLSVGKASAASATPASA

SEQ ID NO: 14941 - protein, 435 aa, Lycopersicon esculentum
MSSQNFGVGAVSHVRSLSQSSIFSNSCLPPLSPFPPSEPGMVSGRSSLKDISMEEADVNSQGVGVVSSFTRDGLPPRKGHRRSNSDVPLGFSAMIQSSPQLMPISGQKVLGRAVSLGDSNGKIDERKPKGEVTDELLFSYMNLENIETLNGSGTKDRDKDSIVSGTKVTGSESSNNEAESVMKGNNVSIQPTNLREGTKRSADANIAPAARHFRSLSMDSAIGNFHYGDESPNLPTSLMMRSGQLSPSNSGNESSSKHNLDFGNSEFSEAEMKKIMADERLAEIAVLDPKRAKRILANRLSAARSKERKTRYISELEHKVQKLQTETTTLSTQVTILQKNFVEISSLNSELKFRIQAMEQQAQLRDALHEALTAEVQRLKLAAGEHREEGRLPNNMTQQTPVKHNIFQMQRQQPSQMQQLSVGKASAASATPASA

SEQ ID NO: 14942 - protein, 368 aa, Oryza sativa
MNREKSPIPGDGGDGLPPQATRRAGPPAAAAAAEYDISRMPDFPTRNPGHRRAHSEILSLPEDLDLCAAGGGDGPSLSDENDEELFSMFLDVEKLNSTCGASSEAEAESSSAAAHGARPKHQHSLSMDESMSIKAEELVGASPGTEGMSSAEAKKAVSAVKLAELALVDPKRAKRIWANRQSAARSKERKMRYIAELERKVQTLQTEATTLSAQLALLQRDTSGLTTENSELKLRLQTMEQQVHLQDALNDTLKSEVQRLKVATGQMANGGGMMMNFGGMPHQFGGNQQMFQNNQAMQSMLAAHQLQQLQLHPQAQQQQVLHPQHQQQQPLHPLQAQQLQQAARDLKMKSPMGGQSQWGDGKSGSSGN

SEQ ID NO: 14943 - protein, 368 aa, Oryza sativa; identical to SEQ ID NO: 14942

SEQ ID NO: 14944 - protein, 460 aa, Oryza sativa
  unsure (1)..(460): unsure at all Xaa locations
MAESRIFGGLKPTKSRLLGPTIRGPPPNGAATHAPRRILFSFSPESQWLGQSSTRACLPPLRSPCLPAPSAASPAYPRLASSAASASAPARLRSRITLPGGRSPVPPMDPAASAAESSSLSSRDVAAMPDSPPRRAGHRRAQSEILLGAALPDDIAFVGGGGGDDYEEEEEDDEEEEMEGAGGSXDVRDVPRGRGQARDPGARGAAAAAAXARPRHQHSMSMDGSTSLASSAAGVAGRMGADAKKAISDAKLAELALVDPKRAKRILANRQSAARSKERKMRYIAELERKVQTLQTEATTLSAQLSMLQRDTTGLTSENSDLKIRVQTMEQQVRLQDALNDRLRDEIQQLKVATGQVNANCGKVGNFGLSSFGGANPQGYQRSHIQSLLAAQQLQQLQIHSQHQQQQMHLQQHHHLSTVQQQLLQEGLPLPGDLKMKGIVAASHAQNAGASESHALRSEP

SEQ ID NO: 14945 - protein, 368 aa, Oryza sativa
  unsure (1)..(368): unsure at all Xaa locations
PARLRSRITLPGGRSPVPPMDPAASAAESSSLSSRDVAAMPDSPPRRAGHRRAQSEILLGAALPDDIAFVGGGGGDDYEEEEEDDEEEEMEGAGGSXDVRDVPRGRGQARDPGARGAAAAAAXARPRHQHSMSMDGSTSLASSAAGVAGRMGADAKKAISDAKLAELALVDPKRAKRILANRQSAARSKERKMRYIAELERKVQTLQTEATTLSAQLSMLQRDTTGLTSENSDLKIRVQTMEQQVRLQDALNDRLRDEIQQLKVATGQVNANCGKVGNFGLSSFGGANPQGYQRSHIQSLLAAQQLQQLQIHSQHQQQQMHLQQHHHLSTVQQQLLQEGLPLPGDLKMKGIVAASHAQNAGASESHAL

SEQ ID NO: 14946 - protein, 362 aa, Zea mays
MNKDKAPMPGDGGPSDGLPPQSTRRVGAPPSSSTPPLECDISRMPDFPTRSTGHRRAHSEILGLPDDLDLSAPGGGEGPSLSDENDEELFSMFLDVDKLNSSCGASSEAEAESSSAAGGGARPRHQHSQSMDGSMSIKAEQLVGAPGMEGMSSAEAKKAVSAAKLAELALVDPKRAKRIWANRQSAARSKERKMQYIGELELKVQTLQTEATTLSAQLALLQRDTTGLTTENSELKIRLQTMEQQVHLQDALNDTLKTEVQRLKVATGQVGNGGGGMMLNFGAMPRLVGGNQQMFHSSQAMQSVLATHQLQQLQLHSQPQQQQLHSLQLQQVARDLKMKGHLGGQGQWGDGKSGSGSRSSGS

SEQ ID NO: 14947 - protein, 321 aa, Zea mays
  unsure (1)..(321): unsure at all Xaa locations
XWVPRGRPGSGKRYSPSLFNPLXHFLSLLLSCNPARRSYSXDENDEELFSMFLDVDKLNSSCGASSEAEAESSSAAGGGARPRHQHSQSMDGSMSIKAEQLVGAPGMEGMSSAEAKKAVSAAKLAELALVDPKRAKRIWANRQSAARSKERKMQYIGELELKVQTLQTEATTLSAQLALLQRDTTGLTTENSELKIRLQTMEQQVHLQDALNDTLKTEVQRLKVATGQVGNGGGGMMLNFGAMPRLVGGNQQMFHSSQAMQSVLATHQLQQLQLHSQPQQQQLHSLQLQQVARDLKMKGHLGGQGQWGDGKSGSGSRSSGS

SEQ ID NO: 14948 - protein, 286 aa, Zea mays
  unsure (1)..(286): unsure at all Xaa locations
XWVPRGRPGSGKRYSPSLFNPLXHFLSLLLSCNPARRSYSXDENDEELFSMFLDVDKLNSSCGASSEAEAESSSAAGGGARPRHQHSQSMDGSMSIKAEQLVGAPGMEGMSSAEAKKAVSAAKLAELALVDPKRAKRIWANRQSAARSKERKMRYIGELELKVQTLQTEATTLSAQLALLQRDTTGLTTENSELKIRLQTMEQQVHLQDALNDTLKTEVQRLKVATGQVGNGWXXGMMLNFXAMPRLVGGNQQMFHSSQAMQSLLAAHQLQQLQLHSQXQQQQLHX

SEQ ID NO: 14949 - protein, 350 aa, Zea mays
  unsure (1)..(350): unsure at all Xaa locations
MNMDKTPIAGDGGDGPEMQSSLDAVAPSPTPHTELDISSMPDTPLRKPGHRRALSEIIGLPDDLDLGGPGAGDAPALSDENEEELFSMFLDVDKLNSRCGASDPGEATETSAAASGAAQGQMHHHNRHSMDASSSIDAEHLFGTTVTEGVSPAEAKKAMSAANLAELALIDPKKAKRIINNRQSAARSKERKMRYIAELERKVQFMQREATALNXQLALLQRDTAGLTVENGDLKIRLESTEQQIHLQDXXLKMATGQAGNQMMNFAEPPHTFGGANQQVFHHPGQAVPPFLVAMQQQQQLLLPXXMNQPLHPLQSQQLHQAATLSIDMEGPPPGQWQWGGDTWSESSSS

SEQ ID NO: 14950 - protein, 303 aa, Zea mays
  unsure (1)..(303): unsure at all Xaa locations
SKLKPSNSSPCSSNFPPGFCPFIELSGGSRMFEMFLENGGKLPAPEPSAHPHSTPPRPRHHHSMSMDGSTSLFGSGLAGMPGRSGTDAKKAMGDAKLAELALVDPKRAKRILANRQSAARSKERKMRYIAELERKVQTLQLEATTLSAQLAMLQRDTTGMTSENSDLKIRVQTMEQQVQLQDALNDRLRDEIQQLKVATGQVNASIGKTGNSGMSSFGGNPQSYQRSHIQSLLAAQHLQRLRIHSQHQQQQTHFQQQQXXPQPQLLLQEAHPFPVDLKMRGFSLSSHAQNAGASDSHAAKSEP

SEQ ID NO: 14951 - protein, 362 aa, Mus musculus
MESKTTYLEDLPPLPEYELSPSKLGDEVDDVYLIRAQGLPWSCTVEDVLNFFSDCRIRNSENGIHFLLNRDGKRRGDALIEMESEQDVQKALEKHRMYMGQRYVEVYEINNEDVDALMKSLQVKPSPVLSDGVVRLRGLPYSCNEKDIVDFFAGLNIVDITFVMDYRGRRKTGEAYVQFEEPEMANQALLKHREEIGNRYIEIFPSRRNEVRTHVGSHKGKKMTSSPPTKYITEPEVVFEEHEVNEDIRPMTAFESDKEIELPKEMSEKLPEAVDFGTLPSLHFVHMRGLPFQANAQDIINFFAPLKPVRITMEYSSSGKATGEADVHFDTHEDAVAAMLKDRSHVQHRYIELFLNSCPKGK

SEQ ID NO: 14952 - protein, 479 aa, Mus musculus
MAGTRWVLGALLRGCGCNCSSCRRTGAACLPFYSAAGTFPSGVSGRRRLLLLLGAAAAAASQTRGLQLGPAAAGRLAGPIPARPSAAAAAAACYSALRAPLFPRSLAAAAGPARGYSQESKTTYLEDLPPLPEYELSPSKLGDEVDDVYLIRAQGLPWSCTVEDVLNFFSDCRIRNSENGIHFLLNRDGKRRGDALIEMESEQDVQKALEKHRMYMGQRYVEVYEINNEDVDALMKSLQVKPSPVLSDGVVRLRGLPYSCNEKDIVDFFAGLNIVDITFVMDYRGRRKTGEAYVQFEEPEMANQALLKHREEIGNRYIEIFPSRRNEVRTHVGSHKGKKMTSSPPTKYITEPEVVFEEHEVNEDIRPMTAFESDKEIELPKEMSEKLPEAVDFGTLPSLHFVHMRGLPFQANAQDIINFFAPLKPVRITMEYSSSGKATGEADVHFDTHEDAVAAMLKDRSHVQHRYIELFLNSCPKGK

SEQ ID NO: 14953 - protein, 344 aa, Mus musculus
LSPSKLGDEVDDVYLIRAQGLPWSCTVEDVLNFFSDCRIRNSENGIHFLLNRDGKRRGDALIEMESEQDVQKALEKHRMYMGQRYVEVYEINNEDVDALMKSLQVKPSPVLSDGVVRLRGLPYSCNEKDIVDFFAGLNIVDITFVMDYRGRRKTGEAYVQFEEPEMANQALLKHREEIGNRYIEIFPSRRNEVRTHVGSHKGKKMTSSPPTKYITEPEVVFEEHEVNEDIRPMTAFESDKEIELPKEMSEKLPEAVDFGTLPSLHFVHMRGLPFQANAQDIINFFAPLKPVRITMEYSSSGKATGEADVHFDTHEDAVAAMLKDRSHVQHRYIELFLNSCPKGK

SEQ ID NO: 14954 - protein, 479 aa, Mus musculus
MAGTRWVLGALLRGCGCNCSSCRRTGAACLPFYSAAGTFPSGVSGRRRLLLLLGAAAAAASQTRGLQLGPAAAGRLAGPIPARPSAAAAAAASYSALRAPLFPRSLAAAAGPARGYSQESKTTYLEDLPPLPEYELSPSKLGDEVDDVYLIRAQGLPWSCTVEDVLNFFSDCRIRNSENGIHFLLNRDGKRRGDALIEMESEQDVQKALEKHRMYMGQRYVEVYEINNEDVDALMKSLQVKPSPVLSDGVVRLRGLPYSCNEKDIVDFFAGLNIVDITFVMDYRGRRKTGEAYVQFEEPEMANQALLKHREEIGNRYIEIFPSRRNEVRTHVGSHKGKKMTSSPPTKYITEPEVVFEEHEVNEDIRPMTAFESDKEIELPKEMSEKLPEAVDFGTLPSLHFVHMRGLPFQANAQDIINFFAPLKPVRITMEYSSSGKATGEADVHFDTHEDAVAAMLKDRSHVQHRYIELFLNSCPKGK

SEQ ID NO: 14955 - protein, 444 aa, Mus musculus
MTESLNFEKSDSVSRYGASQVEDMGNIILAMISEPYNHRFSDPERLNYKFESGTCSKMELIDDSTVVRARGLPWQSSDQDIARFFKGLNIAKGGAALCLNAQGRRNGEALVRFVSEEHRDLALQRHKHHMGTRYIEVYKATGEDFLKIAGGTSNEVAQFLSKENQVIVRMRGLPFTATAEEVVAFFGQHCPITGGKEGILFVTYPDGRPTGDAFVLFACEEYAQNALRKHKELLGKRYIELFRSTAAEVQQVLNRFSSAPLIPLPTPPIIPVLPQQFVPPTNVRDCIRLRGLPYAATIEDILDFLGEFSTDIRTHGVHMVLNHQGRPSGDAFIQMKSTDRAFMAAQKYHKKTMKDRYVEVFQCSAEEMNFVLMGGTLNRNGLSPPPCLSPPSYTFPAPTAVIPTEAAIYQPSLLLNPRALQPSTAYYPAGTQLFMNYTAYYPSV

SEQ ID NO: 14956 - protein, 500 aa, Mus musculus
TAGATGAKLGSDEKELILLLWKVVDLANKKVGQLHEVLVRPDQLELTEDCKEETKIDAENLSSAPQLDQALRQFNQSVSNELNIGVGTSFCLCTDGQLHIRQILHPKASKKNVLLPECFYSFFDLRKEFKKCCPGSPDIDKLDVAAMTESLNFEKSDSVSRYGASQVEDMGNIILAMISEPYNHRFSDPERVNYKFESGTCSKMELIDDSTVVRARGLPWQSSDQDIARFFKGLNIAKGGAALCLNAQGRRNGEALVRFVSEEHRDLALQRHKHHMGTRYIEVYKATGEDFLKIAGGTSNEVAQFLSKENQVIVRMRGLPFTATAEEVVAFFGQHCPITGGKEGILFVTYPDGRPTGDAFVLFACEEYAQNALRKHKELLGKRYIELFRSTAAEVQQVLNRFSSAPLIPLPTPPIIPVLPQQFVPPTNVRDCIRLRGLPYAATIEDILDFLGEFSTDIRTHGVHMVLNHQVRGVIGKCVCSFLRPSAPSSITAQRFTLPL

SEQ ID NO: 14957 - protein, 681 aa, Mus musculus
MTASPDYLVVLFGITAGATGAKLGSDEKELILLLWKVVDLANKKVGQLHEVLVRPDQLELTEDCKEETKIDAENLSSAPQLDQALRQFNQSVSNELNIGVGTSFCLCTDGQLHIRQILHPEASKKNVLLPECFYSFFDLRKEFKKCCPGSPDIDKLDVAAMTESLNFEKSDSVSRYGASQVEDMGNIILAMISEPYNHRFSDPERVNYKFESGTCSKMELIDDSTVVRARGLPWQSSDQDIARFFKGLNIAKGGAALCLNAQGRRNGEALVRFVSEEHRDLALQRHKHHMGTRYIEVYKATGEDFLKIAGGTSNEVAQFLSKENQVIVRMRGLPFTATAEEVVAFFGQHCPITGGKEGILFVTYPDGRPTGDAFVLFACEEYAQNALRKHKELLGKRYIELFRSTAAEVQQVLNRFSSAPLIPLPTPPIIPVLPQQFVPPTNVRDCIRLRGLPYAATIEDILDFLGEFSTDIRTHGVHMVLNHQGRPSGDAFIQMKSTDRAFMAAQKYHKKTMKDRYVEVFQCSAEEMNFVLMGGTLNRNGLSPPPCKLPCLSPPSYTFPAPTAVIPTEAAIYQPSLLLNPRALQPSTAYYPAGTQLFMNYTAYYPSPPGSPNSLGYFPTAANLSSVPPQPGTVVRMQGLAYNTGVKEILNFFQGYQYATEDGLVHTNDQARTLPKEWVCI

SEQ ID NO: 14958 - protein, 479 aa, Mus musculus
MAGTRWVLGALLRGYGCNCSSCRRTGAACLPFYSAAGTFPSGVSGRRRLLLLLGAAAAAASQTRGLQLGPAAAGRLAGPIPARPSAAAAAATSYSALRAPLFPRSLAAAAGPARGYSQESKTTYLEDLPPLPEYELSPSKLGDEVDDVYLIRAQGLPWSCTVEDVLNFFSDCRIRNSENGIHFLLNRDGKRRGDALIEMESEQDVQKALEKHRMYMGQRYVEVYEINNEDVDALMKSLQVKPSPVLSDGVVRLTGLPYSCNEKDIVDFFAGLNIVDITFVMDYRGRRKTGEAYVQFEEPEMANQALLKHREEIGNRYIEIFPSRRNEVRTHVGSHKGKKMTSSPPTKYITEPEVVFEEHEVNEDIRPMTAFESDKEIELPKEMSEKLPEAVDFGTLPSLHFVHMRGLPFQANAQDIINFFAPLKPVRITMEYSSSGKATGEADVHFDTHEDAVAAMLKDRSHVQHRYIELFLNSCPKGK

SEQ ID NO: 14959 - protein, 798 aa, Anopheles gambiae str. PEST
QFDEYTKSLNLDPHCASFRLVTDGQLPLRQCLHPEASAKVIDLPQYYWRFCDLRKEFVRFQAGDLSRALVPVAEAQKLQSMPSLPPTPASVAEIIKDLDLPACQDNNEFYVKEARDMVTIVKHLISLGHKFEANEIINLNLEPGICSIDDEIDGTCIVRARGLPWQSSDQDIAKFFRGLNVAKGGVALCLSPQGRRNGEALVRFVSQEHRDMALKRHKHHIGNRYIEVYRANGEDFLAVAGGASNEAQAFLSKGAQVIIRMRGLPYDCTAKQVLDFFANGENSCNVLDGADGILFVKKPDGRATGDAFVLFEQDSDASKALSKHRESIGQRYIELFRSTTAEVQQVLNRSMDPKTYEPPQPPLIAQLPQMQLLPQHVITSGVEKNCIRLRGLPYEAKVEHILHFLDDFANHIIYQGVHLVYNAQGQFNGEAFIQMDSETAAYQSAQQKHHKNMMFGKKQRYIEVFQCSGEDMNMVLNGGFQQPGSLSKPSLLSPGMLPTAATQPPTQSPQTLSLSQLSLPIPPPLALSLMLQNLGMYMGGPATSVATSLSVSHGAGGAMAATPTYVTAGGGGGAAATAALSSSVTGAASAGGLAAFGHSPATAAGLAAAGLGATSAASGAAAAAGGLPPHLAAAHPGAQYAPLYFMHRHAAMLGSNGGGIPMSLMAPSHAAAAAAAQHAAAYSQLHHFGAGGQVGAGSGASSSLAHHGSAALMHHPSQHHAMQAMAAAAASQSAAAAAGMLPSKRSYDSAFRGDQSALGSGAGSKRPFHGTPAQGTAAAAAAAAAAAALYAPYYHPHI

SEQ ID NO: 14960 - protein, 289 aa, Arabidopsis thaliana
MASFELWADIFGPDVYFPGNKNRRGRKRRPWRQVMYGSRGAMFGSGGYEVGSKRQRMMQSNPYLAVGTGPTSFPPFGYAGGFPVVRLRGLPFNCADIDIFEFFAGLNIVDVLLVSKNGKFSGEAFVVFAGPMQVEIALQRDRHNMGRRYVEVFRCSKQDYYNAVAAEEGAYEYEVRASPPPTGPSRAKRFSEKEKLEYTEVLKMRGLPYSVNKPQIIEFFSGYKVIQGRVQVVCRPDGKATGEAFVEFETGEEARRAMAKDKMSIGSRYVELFPTTREEARRAEARSRQ

SEQ ID NO: 14961 - protein, 248 aa, Arabidopsis thaliana
MFGSGGYEVGSKRQRMMQSNPYLAVGTGPTSFPPFGYAGGFPVVRLRGLPFNCADIDIFEFFAGLNIVDVLLVSKNGKFSGEAFVVFAGPMQVEIALQRDRHNMGRRYVEVFRCSKQDYYNAVAAEEGAYEYEVRASPPPTGPSRAKRFSEKEKLEYTEVLKMRGLPYSVNKPQIIEFFSGYKVIQGRVQVVCRPDGKATGEAFVEFETGEEARRAMAKDKMSIGSRYVELFPTTREEARRAEARSRQ

SEQ ID NO: 14962 - protein, 278 aa, Arabidopsis thaliana
MGPKRQRMIDQGPPGPFYGPHPSSGFMYNPYGFVAPPPPPPFPAVRLRGLPFDCAELDVVEFFHGLDVVDVLFVHRNNKVTGEAFCVLGYPLQVDFALQKNRQNMGRRYVEVFRSTKQEYYKAIANEVAESRVHGMASGGGGGLGGGNGSGGGGGGGGGGGRISGGSSPRRHVQRARSSDDGKEDIEHTGILRLRGLPFSAGKEDILDFFKDFELSEDFVHVTVNGEGRPTGEAFVEFRNAEDSRAAMVKDRKTLGSRYIELFPSSVEELEEALSRGR

SEQ ID NO: 14963 - protein, 350 aa, Arabidopsis thaliana
MYLAGTRLNHSAKATVLIRLREEEEAPSKVPIDLIIQIRRHSNLLRVIDNVLQRLRYVCGECRYGDGPDGREMGPKRQRMIDQGPPGPFYGPHPSSGFMYNPYGFVAPPPPPPFPAVRLRGLPFDCAELDVVEFFHGLDVVDVLFVHRNNKVTGEAFCVLGYPLQVDFALQKNRQNMGRRYVEVFRSTKQEYYKAIANEVAESRVHGMASGGGGGLGGGNGSGGGGGGGGGGGRISGGSSPRRHVQRARSSDDGKEDIEHTGILRLRGLPFSAGKEDILDFFKDFELSEDFVHVTVNGEGRPTGEAFVEFRNAEDSRAAMVKDRKTLGSRYIELFPSSVEELEEALSRGR

SEQ ID NO: 14964 - protein, 274 aa, Glycine max
  unsure (1)..(274): unsure at all Xaa locations
PTRPPTRPVMYGPRGAMLGSGGVSDGYEVGSKRQRMMESNPYFAVSSGTGNXXPYGYAGGFQPPPFPVVRLRGLPFNCTDIDILKFFAGLTIVDVLLVNKSGRFSGEAFVVFAGAMQVEFALQRDRQNMGRRYVEVFRCKKQDYYNAVAAEIKYEGIYDNDYQGSSPPPSRLKRFNDKDQMECTEILKMRGLPFQVTKSQIVEFFKDFKLIEDRVHIACRPDGKSTGEAYVEFVSAEEAKRAMSKDKMTIGSRYVELFPSTPDEARRAESRSRQ

SEQ ID NO: 14965 - protein, 287 aa, Glycine max
  unsure (1)..(287): unsure at all Xaa locations
RIYIHTEREAAKPRQEWHPCCSLQIQCSXRGKFADGGDGREMAAKRQRTVDPGSSFYGASTGSNFMYNPSPYGYVSQPPPPPPFPVVRLRGLPFDCTETDVAEFFHGLDIVDVLFVHKGGKFTGECFCVLGYPLQVDFALQRNRQNMGRRYVEVFRSKRQEYYKAIANEVSDARGGSPRRSASRAKSYDEGKESAEHTGVLRLRGLPFSASKDDIMEFFKDFGLPEDSIHIIMNSEGRPSGEAYAEFESAEDSKAAMVKDRMTLGSRYIELFPSSPGEMEEAISRGR

SEQ ID NO: 14966 - protein, 150 aa, Glycine max
PHLPLLSRLGFPPPPRRPSPPPASSPPHLPREAPAAAAAAAMYGHRGAMMGSGGVSDGYEGSKRPRMMESNPYFAVNAGSPLDVSKRARMMEPGPPYFAGMGSSAGGSGSGFYPTYGGNMAGAAGVNSCIQNFPAVRLRGLPFDCEDVDI

SEQ ID NO: 14967 - protein, 170 aa, Glycine max
  unsure (1)..(170): unsure at all Xaa locations
XHYEGIYDNDYHGSSPPPSRLKRFNDKDQMEYTEILKMRGLPFQVTKSQIVEFFKDFKLIEDRVHIACRPDGKATGEAYVEFVSAEEAKRAMSKDKMTIGSRYVELFPSTPDEARRAESRSRQESEVFYLVLGRLPWSFWGYYNVLNFRLCTLFLLVRLAVIFACLNWMH

SEQ ID NO: 14968 - protein, 158 aa, Glycine max
  unsure (1)..(158): unsure at all Xaa locations
XFFLFIKIVLKQLXXITGKSKRGLNFHKREMAAKRQRTVDPGSSFYGASTGSNFMYNPSPYGYVSQPPPPPFPVVRLRGLPFDCTETDVAEFFHGLDIVDVLFVHKGGKFTGEGFCVLGYPLQVDFALQRNRQNMGRRYVEVFRSKRQEYYKAIANEX

SEQ ID NO: 14969 - protein, 200 aa, Glycine max
  unsure (1)..(200): unsure at all Xaa locations
IYIHTEREAAKPRQEWHPCCSLQIQCSXRGKFADGGDGREMAAKRQRTVDPGSSFYGASTGSNFMGNPSPYGYVSQPPPPPPFPVVRLRGLPFDCTETDVGEFFHGLDIVDVLFVHKGGKFTGECFCGLGDAVEGDFALGRNRRNMGGRYVGVLRSGRRGCYEAIADEGXDARVGGRAGGAGGVRGGGDGVGAPGGGSWG

SEQ ID NO: 14970 - protein, 148 aa, Glycine max
  unsure (1)..(148): unsure at all Xaa locations
LGFASRFGIRLSRDRSAGSVPCSSVYGSAFCSILRRSRKPTRPYMYGPRGAMLGSGGVSDGYEVGSKRQRMMESNPYFAVSSGTGNXXPYGYAGGFPAPSLSXVVRLRGLPFNCTDIDILKFFAGLTMGEVXVVNKSGRFLGEAFXFL

SEQ ID NO: 14971 - protein, 250 aa, Oryza sativa
  unsure (1)..(250): unsure at all Xaa locations
MMGGGGVSDGYEGSKRPRMIESNPYFAXXPQAVPWMSQRGNFPGVRLRGLPFDCDDLDICKFFVGLDIVDCLLVHKNGRFTGEAFVVFPSPMQAEFALHRNRQNMGRRYVEVFRCKKQEYYSAIAAEVNQGGFFDSEYRHSPPPPRPKKPAEDKSSMEYTEVLKLRGLPYSATTEDIIKFFVEYELTDENVHIVYRPDGKATGEAYVEFPTAEVVKTAMCKDKMTIGTRYVELFPSTPEEASRAKSRVRQ

SEQ ID NO: 14972 - protein, 239 aa, Oryza sativa
  unsure (1)..(239): unsure at all Xaa locations
MYGHRGAMMGGGGVSDGYEGSKRPRMIESNPYFAXXPQAVPWMSQRGNFPGVRLRVLPFDCDDLDIFKFFVGLDIVDCLLVHKNGRFTGEAFVVFPSPMQAEFALHRNRQNMGRRYVEVFRCKKQEYYSAIAAEVNQGGFFDSEYRHSPPPPRPKKPAEDKSSMEYTEVLKLRGLPYSATTEDIIKFFVEYELTDENVHIVYRPDGKATGEAYVEFPTAEVVKTAMCKDKMTIGTRMGX

SEQ ID NO: 14973 - protein, 194 aa, Oryza sativa
  unsure (1)..(194): unsure at all Xaa locations
XPRVRPRVRLDIVDCLLVHKNGRFTGEAFVVFPSAMQAEFALHRNRQNMGRRYVEVFRCKKQEYYSAIAAEVNQGGFFDSEYRHSPPPPRPKKPAEDKSSMEYTEVLKLRGLPYSATTEDIIKFFVEYELTDENVHIVYRPDGKATGEAYVEFPTAEVAKTAMCKDKMTIGTRYVELFPSTPEEASRAKSRARQ

SEQ ID NO: 14974 - protein, 263 aa, Oryza sativa
  unsure (1)..(263): unsure at all Xaa locations
GRGGGGFEEGSKRLRMMESNPYFAVTAGPTYLVPNSAIQNFSGVRLLGLPFDCGDLDICKFFVGLDIVDCLLVHKNGCFTDEAFVVFPSAMQGEFALHRNRXNMGRRYVEVFRCKKQEYYSSIAAEVNQDGFFDSKYRHSPPPPRPKKPAEDEQHEKRTPPDVLKLRGLPYFTTAEDIIKFFVEYELTEENVHTAYRLDGKXXSMEFSTTGVAKTAICKDKMTIGTRYMELFPSTPEEASRTKSRFTSQAMNYLIQASTLPWP

SEQ ID NO: 14975 - protein, 108 aa, Oryza sativa
  unsure (1)..(108): unsure at all Xaa locations
VDHASAHASGHAYXLNIFYCLWAHKNGRCTGEAFGGSPSAMQAEPALHRSRANTGRTYVDVCRCERQEYYRATAAEEGGFFDSTCQDSPPDARSKKPAEDTSIMDYTX

SEQ ID NO: 14976 - protein, 184 aa, Triticum aestivum
  unsure (1)..(184): unsure at all Xaa locations
XAAASTVHKNGRFSGEAFVVFPSSMQAEFALHRNRQNMGRRYVEVFRCKKQDYYSAIAAEXEPGRSSAXAGAPAPSPPLRSRRLSEDKSSMEYTEGPTPRGPPRPATIEDIIKFFVEYELSEENVHIAYRGDGKATGEAFVEFPTAEVAKTAMCKDKMTIGTRYVELFPSTPEEASRAKPRGRQ

SEQ ID NO: 14977 - protein, 131 aa, Triticum aestivum
  unsure (1)..(131): unsure at all Xaa locations
SRPXSTVHKNGRFSGEAFVVFPSSADAEAAXEDKSSMEYTEVLKLRGLPHSATIEDIIKFFCGXYELTEENVHIAYRGDGRATGEAFVEFPTAEVAKTAMCKDKMTIGTRYVELFPSTPEEASRAKPRGRQ

SEQ ID NO: 14978 - protein, 67 aa, Triticum aestivum
  unsure (1)..(67): unsure at all Xaa locations
RPLAIRVSAAAAPPVSPAGHFPAVRLRGLPFDCEDVDISKFFAGLDIVDCLLVHKNGRFSGEAFVVX

SEQ ID NO: 14979 - protein, 610 aa, Caenorhabditis elegans
MSEQTTQPTTEDQQSAEIAVKEEEIAVKTQSAPADAPDIHQSTIKEADESMPTKISSGEPPRSQYIRLRGLPFNATEKDIHEFFAGLTIERVKFVCTTGRPNGEAYVEFKNTEEAGKAMENDRKEISNRYIEVFTVEADEAEFEFRPDPDSNGEVNHVIRLRGVPWSCKEDDVRKFFEGLEPPPAEIVIGGTGGPRSRPSGEAFVRFTTQDAAEKAMDYNNRHMGSRYVEVFMSSMVEFNRAKGGGSGEYSASYERTGIRPLMSVDSGYDHGRRGGGGRYGDSSYDRGYDDYNRGSYGGRRDYGYNGGHDQGGRSDYGRGGDDPLRVYMRGLPYDADDHAIAAFFSPLRCHSVKIGINETGRPSGDAIAEFDNYNDLQVALSRNNQRMGRRYVELFDNRGAPGPMRRLLWKETSGTNASAAPAPDPILNGGRRGGGPPQRDSGYRAGPQAMPPSYRESRDPYGPREPRGYDIEPKYEPRGIPPRSAPIRAPPAAHGRAPDTWGSYGAASTGPSYDQSSAAGGYAASWDAYYASQAQSAYSAEPASTYPTAAHSAYGSGESYSYGASAGGAYDRQREPRDSQPTWAQQQQPSHHSAYGGWGAGAGDHRSGY

SEQ ID NO: 14980 - protein, 618 aa, Caenorhabditis elegans
MNRQTSHPEQRLLLIRVSDGNYDENTKLVVTSFYPRRQEDANNNSTSPSSASSSGSEISTRLVNITPEDVVKFFDEHPTSSYIFTKGPEPIRHVLIPLFARNELCVPHPLHHYYDIKHLYYGNQEEDGMEQEEIEDDVAIARAILDMDDELLEKTHQFVNIEYQPAPILEDQEVGADGDNVVCRARGLPWQASDHHVAQFFAGLDIVPGGIALCLSSEGRRNGEVLVQFSSQESRDLALKRHRNFLLSRYIEVYKAGLDEFMHVATGSSTEAMEFVSANAIIVRMRGLPYDCTDAQIRTFFEPLKLTDKILFITRTDGRPTGDAFVQFETEEDAQQGLLKHRQVIGQRYIELFKSTAAEVQQVVKRCNLINSSPAVANAVEAPEEKKKDCVRLRGLPYEATVQHIVTFLGDFATMVKFQGVHMVYNNQGHPSGEAFIQMINEQAASACAAGVHNNFMSVGKKKRYIEVFQASAEELNLHHLVGQQHQVPPPAPLGFMGQLPPQAPQPQQFWSSYPSPPISPIVPGQVTQLIIYGIHMSIGVPELVANFTTPEHTVDNVLFTRWPTHLCPGEAILTLRNRGAPPPQTSPLSQISQLSAPNFAAYSHHPQNFPLQPILME

SEQ ID NO: 14981 - protein, 614 aa, Caenorhabditis elegans
MITSEQRLLLIRVSDGNYDENTKLVVTSFYPRRQEDANNNSTSPSSASSSGSEISTRLVNITPEDVVKFFDEHPTSSYIFTKGPEPIRHVLIPLFARNELCVPHPLHHYYDIKHLYYGNQEEDGMEQEEIEDDVAIARAILDMDDELLEKTHQFVNIEYQPAPILEDQEVGADGDNVVCRARGLPWQASDHHVAQFFAGLDIVPGGIALCLSSEGRRNGEVLVQFSSQESRDLALKRHRNFLLSRYIEVYKAGLDEFMHVATGSSTEAMEFVSANAIIVRMRGLPYDCTDAQIRTFFEPLKLTDKILFITRTDGRPTGDAFVQFETEEDAQQGLLKHRQVIGQRYIELFKSTAAEVQQVVKRCNLINSSPAVANAVEAPEEKKKDCVRLRGLPYEATVQHIVTFLGDFATMVKFQGVHMVYNNQGHPSGEAFIQMINEQAASACAAGVHNNFMSVGKKKRYIEVFQASAEELNLHHLVGQQHQVPPPAPLGFMGQLPPQAPQPQQFWSSYPSPPISPIVPGQVTQLIIYGIHMSIGVPELVANFTTPEHTVDNVLFTRWPTHLCPGEAILTLRNRGAPPPQTSPLSQISQLSAPNFAAYSHHPQNFPLQPILME

SEQ ID NO: 14982 - protein, 549 aa, Caenorhabditis elegans
MSTAYEVQCRGLPWEATEQELRDFFGNNGIESLEIPRRNGRTSGDAKVVFTNEEDYNNALKKDREHLGSRYIEVFPAGGAPTRRGDRGERGDRGDRDHYRSRGAPPRDRYSDRGGPRSSGPDSIVRLRGLPFSVTSRDISDFLAPLPIVRDGILLPDQQRARPGGEAYVCFETMESVQIAKQRHMKNIGHRYIEVFEATHRDLSRFAEENDLRVPRFGPPPFASAPQTAPRGAYDPYSQPTDPYRNATDYRRAAEPEDPYARSRAPSVQDYGVRASYDPYTQPAAPVSSYPSQQQPSAGYYDNYAPKTAYESYGRERGPDPRDVRDPRDSRMPDPRDSRALSDPYAAESRYSEYGYESREPYWRGGSGGPPSIGGGVGGGGAPLAPTGRDPYSVGESWANGAGGPGGPPPVSSDRDRYGSGGYASEPYAQREAGGAMRRSEYGRPDDRYSKPEPYGYSRDRDYGAPQNQHFVLRMRGVPFRASEADVYDFFHPIRPNQVELLRDHQFQRPSGDARVIFYNRKDYDDALMKDKQYMGERYIEMIPDNGRY

SEQ ID NO: 14983 - protein, 362 aa, Caenorhabditis elegans
MSTAYEVQCRGLPWEATEQELRDFFGNNGIESLEIPRRNGRTSGDAKVVFTNEEDYNNALKKDREHLGSRYIEVFPAGGAPTRRGDRGERGDRGDRDHYRSRGAPPRDRYSDRGGPRSSGPDSIVRLRGLPFSVTSRDISDFLAPLPIVRDGILLPDQQRARPGGEAYVCFETMESVQIAKQRHMKNIGHRYIEVFEATHRDLSRFAEENDLRVPRFGPPPFASAPQTAPRGAYDPYSQPTDPYRNATDYRRAAEPEDPYARSRAPSVQDYGVRASYDPYTQPAAPVSSYPSQQQPSAGYYDNYAPKTAYESYGRERGPDPRDVRDPRDSRMPDPRDSRALSDPYAAESSWRSYAPIRIRSS

SEQ ID NO: 14984 - protein, 967 aa, Drosophila melanogaster
MQVPEHVVSLYIATCGQNGSGLGSDEKEIILLVFVLLEVSTGQIVGTKQILVRPDGYFIKDRTISSSSDNSSVTNNTASSPPLAIGDANNGSGSTSGNGNSLENGSELILPIAEAQAAGKPLSEAIEEFDAYLRSLSLHDTEIKLVTDGQLPLRQCLHREASAKDVELPAYYNRFSDLRKEFLRYKSGDLARALVPVKDVKKMLQAPTLPMPQSIAEMLGELNISSVEDNDFYIRESRDMVTVIQTLLQAGHKFAANELVNLVLEPGICSIDDEVDGNCIVRARGLPWQSSDQDIAKFFRGLNVAKGGVALCLSPLGRRNGEALIRFVCQEHRDMALKRHKHHIGTRYIEVYRASGEDFLAIAGGASNEAQAFLSKGAQVIIRMRGLPYDATAKQVLDFFTTGDTPPCHVLDGNEGVLFVKKPDGRATGDAFVLFANETDAPKALGRHRESIGQRYIELFRSTTAEVQQVLNRSMDPKNYESGGGHSQPPLIAQLPTMQLPLLPQVGAHSLSHSLGASPANLCPPVPPPALPLPTQHLITSGTTKNCIRLRGLPYEAMVEHILHFLDDFAKHIIYQGVHMVINAQGQPSGEAFIQMDLEESARLCAQRRHNHYMMFGKKYRYIEVFQCSGDDMNMVLNGGLASPVAQPPPPHLGHAHKQQSLLAATTGMFSSAGQSPTTVAAGTAQSPLGGTHTHTHPHSHAHAHATGHAHAAAAAAHHGLSASSAMLPGLSAAASASGLASFMSAGQQSAAAAAHSAASLQNAAVALAPQGYALNPFSLPPPGSAAAAAASTPALLAQQQAQFIAQQSLLVRQQAAAAALAAEQQQQQQQQQQLYASAMLQQHPLYLQQQQQQQQLYASAMLQQGQPQFVLMQRPSAAYLPPFPLSYMSAAGAASGVGVAPGAAVAGAAAAASPSASNSSLSQSMKRSYENAFQQEAAGAAAAASAAKRALTRQPSSVYSYYNSGI

SEQ ID NO: 14985 - protein, 891 aa, Drosophila melanogaster
MQVPEHVVSLYIATCGQNGSGLGSDEKEIILLVFVLLEVSTGQIVGTKQILVRPDGYFIKDRTISSSSDNSSVTNNTASSPPLAIGDANNGSGSTSGNGNSLENGSELILPIAEAQAAGKPLSEAIEEFDAYLRSLSLHDTEIKLVTDGQLPLRQCLHREASAKDVELPAYYNRFSDLRKEFLRYKSGDLARALVPVKDVKKMLQAPTLPMPQSIAEMLGELNISSVEDNDFYIRESRDMVTVIQTLLQAGHKFAANELVNLVLEPGICSIDDEVDGNCIVRARGLPWQSSDQDIAKFFRGLNVAKGGVALCLSPLGRRNGEALIRFVCQEHRDMALKRHKHHIGTRYIEVYRASGEDFLAIAGGASNEAQAFLSKGAQVIIRMRGLPYDATAKQVLDFFTTGDTPPCHVLDGNEGVLFVKKPDGRATGDAFVLFANETDAPKALGRHRESIGQRYIELFRSTTAEVQQVLNRSMDPKNYESGGGHSQPPLIAQLPTMQLPLLPQVGAHSLSHSLGASPANLCPPVPPPALPLPTQHLITSGTTKNCIRLRGLPYEAMVEHILHFLDDFAKHIIYQGVHMVINAQGQPSGEAFIQMDLEESARLCAQRRHNHYMMFGKKYRYIEVFQCSGDDMNMVLNGGLASPVAQPPPPHLGHAHKQQSLLAATTGATVLGAHYGGPFPAYGAAPPPPPPHTPLLATPRSHHHPHHHPASAFYPAPLVYWPYPSPPVSPTTYYSQPGAHSPSQAMYPLDFFPPSPLSPPNVSIPNTSTGLILTPTKAAVSFVPPKQFSPSSTGSGSPSSSSVKLAGQAGPAHMPSIAVNGKTEGVTSTGAKDTSTPQETSASQTLLSIDTNHATPTTAAAPPLKTGSQGSAGAAATPLVTNSCVELYIS

SEQ ID NO: 14986 - protein, 736 aa, Danio rerio
MASHSDTLVVFFGATAGANGGKLGSDERELILLVWQIVDLHENKVGKLHRTLVQPDSVDLSEQCKEETGLTAEELCKAEPLESVLQQFHQSVSAELKSLGRSSYTLCVDGPLLIRQVLHPEASKKNLVLPECFYTFVDLKKEFHKCCPNAGPVKDLTLLSMLDYVCIQATVEREAGLREVKDMVLLILHVLADPYNHKFSAFETVNYKFESGACSKTEAVDSETVIRARGLPWQSSDQDIARFFKGLNIAKGGVALCLNAQGRRNGEALVRFINSEHRDMALDRHKHHMGSRYIEVYKATGEEFLKIAGGTSNEVAQFLSKENQMIIRMRGLPFTATPQDVLGFLGPECPVTDGTEGLLFVKYPDGRPTGDAFVLFACEEYAQNALKKHKQILGKRYIELFRSTAAEVQQVLNRYMSTPLISTLPPPPPPMVSVPVLATPPLITTGNTRDCIRLRGLPYTAAIEDILEFMGEHTIDIKPHGVHMVLNQQGRPSGDAFIQMKSADRAFMVAQKCHKKMMKDRYVEVFQCSTEEMSFVLMGGTLNRSGLSPPPCKLPCLSPPTYAAFPAAPAMLPTEAGLYQPPLLATPRTPQAPTHSPAPAFAYYSPQLYMNMNMSYTTYYPSPPVSPSTVSYFAAPPGSVAAAVAAQPTPAILPPQPGALVRMQGLPYNAGVKDILSFFQGYQLQADSVLVLYNWSGQRSGEALVTFPSEKAARRAVAECSNIPLSGHPIHLACCE

SEQ ID NO: 14987 - protein, 688 aa, Xenopus laevis
MTAVSPDYLVVLFTTTAGANGSKLGSDEKEVIQLLWKVINLANKKVGELHEVTVRPDHLELTEECKEITQIETDDLYVAPQLEQALQQFNQSVGNELNIGVGTSFCICTDGQLHVRQVLHPEASKKNILLPECFYSFFDLRKEFMKCCPGSSDINELDVHAMASFLGFEKKNTHYRYGASEVDDMGDIIVTLISEPYNYKFSDPERVNYKFESGTCSKLEMIDDNTIIRARGLPWQSSDQDIARFFKGLNIAKGGAALCLNAQGRRNGEALVRFVSEEHRDLALQRHKHHMGNRYIEVYKATGEDFLKIAGGTSNEVAQFLSKENQVIVRMRGLPFTATAEEVLAFFGQQCPVTGGKEGILFVTYPDNRPTGDAFVLFACEEYAQNALKKHKELLGKRYIELFRSTAAEVQQVLNRYSSAPLIPLPTPPIIPVLPQPFIPPVNVRDCIRLRGLPYAATIEDILEFLGEFSADIRTHGVHMVLNHQGRPSGDSFIQMKSADRAYLAAQKCHKKTMKDRYVEVFQCSAEEMNFVLMGGTLNRNGLSPPPCKLPCLSPPSYTFPAQAAVIPTEAAALYQPSLLLNPRSLQPSAAAYYPAGAQLFMNYTAYYPSPPGSPSSLGFFPASAGVSTMPPHNTGAMVRMQGLAYNSGVKDILNFFQGYQYSPEDGLLPVNDQARALLTHPKEWVCI

SEQ ID NO: 14988 - protein, 658 aa, Xenopus laevis
MAVVIRLQGLPLVAGSTDIRHFFSGLHIPEGGVHITGGKHGEAFIIFPTDEDARRAMSCSGGFIKKSQIDLFLSSKAEMQHTLEMNRKGNKDLGATPDISKLLNVMKKGIYQKNMVHKSNAEAGFDGKEENVPRPKYQGNEGTMPLKENGYGYVFLNGLPYTADEHDVKEFFHGFDVEDINFCVRQNGDKDGKAYVKFATFQDAKASLSRHKEYIGHRYIFLKLSNEHAWIEAVSKTNRREESVHNNREWSPRFSSKNHSRSPGHGSRSPKMHRTRSRSPHNQQFHLHLLNMPYSVDKKDIKLYFGDPDIPDSQVKFLLDRKGVRTREGFVSVKNEKFYQKCLGLHKGLLNGREVWVYPIAGKDMSELIESTERPQLERNTSEDSSPKRKSRDRSNLKRCMYLRNFPFNVGKSEVQKFFAGFPVDERDIFLLYDSRGVGLGEALVIFPSEHHAILAEGLNQQTFLGTEVLLRRISEEQMKELAAFPEDQNERQSKQSTTYRDEYPEIAEQSFVDSDACGSYDQPQPYRADDFGHVSGSGRRSTERLRSPYNMNQNEQYERFHMGNQNVTDYESGPVNRPSLGGASIRLENVPYTATIEEILDFFHGYNVVPDSVKMDYNSKGTAIVHMENYYEAAAAINELNERPIGPRKVHMSLIRS

SEQ ID NO: 14989 - protein, 932 aa, Macaca mulatta
MAVVIRLQGLPIVAGTMDIRHFFSGLTIPDGGVHIVGGELGEAFIVFATDEDARLGMMRTGGTIKGSKVTLLLSSKTEMQNMIELSRRRFETANLDIPPANASRSGPPPSSGMSGRVNLPTTVSNFNNPSPSVVTATTSVHESNKNIQTFSTASIGTAPPNMGASFGSPTFSSTVPSTASPMNTVPPPPIPPIPAMPSLPPMPSIPPIPVPPPVPTLPPVPPVPPIPPVPSVPPMTPLPPMSGMPPLNPPPVAPLPAGMNGSGAPMNLNNNLNPMFLGPLNPVNPIQMNSQSSVKPLPINPDDLYVSVHGMPFSAMENDVRDFFHGLRVDAVHLLKDHVGRNNGNGLVKFLSPQDTFEALKRNRMLMIQRYVEVSPATERQWVAAGGHITFKQNMGPSGQSHPPPQTLPRSKSPSGQKRSRSRSPHEAGFCVYLKGLPFEAENKHVIDFFKKLDIVEDSIYIAYGPNGKATGEGFVEFRNEADYKAALCRHKQYMGNRFIQVHPITKKGMLEKIDMIRKRLQNFSYDQREMMLNPEGDVNSAKVCAHITNIPFSITKMDVLQFLEGIPVDENAVHVLVDNNGQGLGQALVQFKNEDDARKSERLHRKKLNGREAFVHVVTLEDMREIEKNPPAQGKKGLKMPVPGNPAVPGMPNAGLPGVGLPSAGLPGAGLPSTGLPGSAITSAGLPGAGMPSAGIPSAGGEEHAFLTVGSKEANNGPPFNFPGNFGGSNAFGPPIPPPGLGGGAFGDARPGMPSVGNSGLPGLGLDVPGFGGGPNNLSGPSGFGGGPQNFGNGPGSLGGPPGFGSGPPGLGSAPGHLGGPPAFGPGPGPGPGPGPIHIGGPPGFASSSGKPGPTVIKVQNMPFTVSIDEILDFFYGYQVIPGSVCLKYNEKGMPTGEAMVAFESRDEATAAVIDLNDRPIGSRKVKLVLG

SEQ ID NO: 14990 - protein, 415 aa, Homo sapiens
MAGTRWVLGALLRGCGCNCSSCRRTGAAYPALRASLLPQSLAAAAAVPTRSYSQESKTTYLEDLPPPPEYELAPSKLEEEVDDVFLIRAQGLPWSCTMEDVLNFFSDCRIRNGENGIHFLLNRDGKRRGDALIEMESEQDVQKALEKHRMYMGQRYVEVYEINNEDVDALMKSLQVKSSPVVNDGVVRLRGLPYSCNEKDIVDFFAGLNIVDITFVMDYRGRRKTGEAYVQFEEPEMANQALLKHREEIGNRYIEIFPSRRNEVRTHVGSYKGKKIASFPTAKYITEPEMVFEEHEVNEDIQPMTAFESEKEIELPKEVPEKLPEAADFGTTSSLHFVHMRGLPFQANAQDIINFFAPLKPVRITMEYSSSGKATGEADVHFETHEDAVAAMLKDRSHVHHRYIELFLNSCPKGK

SEQ ID NO: 14991 - protein, 424 aa, Homo sapiens
MAGTRWVLGALLRGCGCNCSSCRRTGAACLPFYSAASYPALRASLLPQSLAAAAAVPTRSYSQESKTTYLEDLPPPPEYELAPSKLEEEVDDVFLIRAQGLPWSCTMEDVLNFFSDCRIRNGENGIHFLLNRDGKRRGDALIEMESEQDVQKALEKHRMYMGQRYVEVYEINNEDVDALMKSLQVKSSPVVNDGVVRLRGLPYSCNEKDIVDFFAGLNIVDITFVMDYRGRRKTGEAYVQFEEPEMANQALLKHREEIGNRYIEIFPSRRNEVRTHVGSYKGKKIASFPTAKYITEPEMVFEEHEVNEVFQPMTAFESEKEIELPKEVPEKLPEAADFGTTSSLHFVHMRGLPFQANAQDIINFFAPLKPVRITMEYSSSGKATGEADVHFETHEDAVAAMLKDRSHVHHRYIELFLNSCPKGK

SEQ ID NO: 14992 - protein, 331 aa, Homo sapiens
FLIRAQGLPWSCTMEDVLNFFSDCRIRNGENGIHFLLNRDGKRRGDALIEMESEQDVQKALEKHRMYMGQRYVEVYEINNEDVDALMKSLQVKSSPVVNDGVVRLRGLPYSCNEKDIVDFFAGLNIVDITFVMDYRGRRKTGEAYVQFEEPEMANQALLKHREEIGNRYIEIFPSRRNEVRTHVGSYKGKKIASFPTAKYITEPEMVFEEHEVNEVFQPMTAFESEKEIELPKEVPEKLPEAADFGTTSSLHFVHMRGLPFQANAQDIINFFAPLKPVRITMEYSSSGKATGEADVHFETHEDAVAAMLKDRSHVHHRYIELFLNSCPKGK

SEQ ID NO: 14993 - protein, 358 aa, Homo sapiens
MTEYLNFEKSSSVSRYGASQVEDMGNIILAMISEPYNHRFSDPERVNYKFESGTCSKMELIDDNTVVRARGLPWQSSDQDIARFFKGLNIAKGGAALCLNAQGRRNGEALVRFVSEEHRDLALQRHKHHMGTRYIEVYKATGEDFLKIAGGTSNEVAQFLSKENQVIVRMRGLPFTATAEEVVAFFGQHCPITGGKEGILFVTYPDGRPTGDAFVLFACEEYAQNALRKHKDLLGKRYIELFRSTAAEVQQVLNRFSSAPLIPLPTPPIIPVLPQQFVPPTNVRDCIRLRGLPYAATIEDILDFLGEFATDIRTHGVHMVLNHQGRPSGDAFIQMKSADRAFMAAQKCHKKKHEGQIC

SEQ ID NO: 14994 - protein, 193 aa, Ralstonia metallidurans
MGSTGIIRFAPDWAGRHRHGNQHMSDKGTDTKDKEKKAGKKKTASDRIEVRQSGVHGKGVYAIGQIAEGERVIEYKGEHISWKEALKRHPHDPNDPNHTFYFSLDDGDVIDAKFGGNRARWINHACDPNCEAREKKGRVFIHALRDIEPGEELFYDYGLVIDARYTKKLKQEYECRCGSPKCRGTMLAPKDKK

SEQ ID NO: 14995 - protein, 569 aa, Clytus arietis
MASSEGSGVTTGQPNLHKQDLSKLDVNKLTALSPEVISRQATINIGTIGHVAHGKSTVVKAISGVQTVRFKNELERNITIKLEKLQFDENGTITWPNVLRGRKVDLNQALRDSEEFETERRGVKRKLEKLRRVKPNKDKETYSKEFVVEKILAQEFNQATRQLMFLVKWKGYAVQQSTWEPLEHLTHCTQLLTQFLAETLGTQVFDKLCDKLNISTTLSDQDLLDMLKIYDLSVLPDKLTLQEKLLRLIATPPRDRHIHKLEEGKRAILLYQLVLRREAQLKKLREFEDMINENAKDEAAITVENNADLECLPESFVCINDYLATDGIVIPNEPTKGCDCKECGPKLKSCCGRQPYNGFTYNVRPRVNVNPGAPIYECNKLCKCGPDCRNRVVQKGRKVPLCIFRTSNGCGWGVKAMRKIHSAEFVCEYLAEVITHEEAEIRGRAYDQEGRTYLFDLDYNSRDNPYTVDAAKYGNVSHFINHSCDPNLGVYAVWINCSDPNLPKLALFALREIERDEEVTFDYMMNIDPVVPTTPEKSRFLHTPDKNQVIQNGRNICKCEADSCRRYLF

SEQ ID NO: 14996 - protein, 647 aa, Scoliopteryx libatrix
MASSEGRSASSNLHQQDLTKLDVTKLSALSPEVISRQATINIGTIGHVAHGKSTVVKAISGVQTVRFKNELERNITIKLERVSESVIKMYRERANERHENIFFEKLRRSKKRKLSIESEDDIVMPASKKQKKRKKSQEFIIEKILDFKFQEGKEYFHIKWKGWPDSENTWEPIENLDNCPEVLTEFLVNQELRYCDKIEKLKAEISFGDLLSEDNLLKRLEEVEESDITKLKETLILKMISMISLSECNEEYATELVEDTRDTLQLYCLIRKRCQQLIKLQNWEDHINQVDKSKKLSVENNVDLAGPPVNFTYINLCIPGTGVTIPDEPPIGCECIACNCRSKSCCGMQAGLFAYTAKKRLRVAPGTPIYECNKACKCSSDCCNKVVQTGRNIRLTIFRTSNGCGWGVRTEQKIYQGQFICQYVGEVITFEEAEKRGREYDANGLTYLFDLDFNSVENPYVVDAAHLGNVSHFINHSCDPNLGVWAAWADCLDPNLPMLALFATRDTEIGEEICFDYLQKSSDNDDVDTNSSTVSKEGSVDDIPTGSSCDDIPSGSEATAAIAPVSPVKSRFEIQQQNRAMLRNLTECKCGALKCRYANAKIYKCDNPKCARPTSFISGGSSKDDNFPCLRPACNGRFQLVRHVSFV

SEQ ID NO: 14997 - protein, 567 aa, Scoliopteryx libatrix
MASSEGRSASSNLHQQDLTKLDVTKLSALSPEVISRQATINIGTIGHVAHGKSTVVKAISGVQTVRFKNELERNITIKLERVSESVIKMYRERANERHENIFFEKLRRSKKRKLSIESEDDIVMPASKKQKKRKKSQEFIIEKILDFKFQEGKEYFHIKWKGWPDSENTWEPIENLDNCPEVLTEFLVNQELRYCDKIEKLKAEISFGDLLSEDNLLKRLEEVEESDITKLKETLILKMISMISLSECNEEYATELVEDTRDTLQLYCLIRKRCQQLIKLQNWEDHINQVDKSKKLSVENNVDLAGPPVNFTYINLCIPGTGVTIPDEPPIGCECIACNCRSKSCCGMQAGLFAYTAKKRLRVAPGTPIYECNKACKCSSDCCNKVVQTGRNIRLTIFRTSNGCGWGVRTEQKIYQGQFICQYVGEVITFEEAEKRGREYDANGLTYLFDLDFNSVENPYVVDAAHLGNVSHFINHSCDPNLGVWAAWADCLDPNLPMLALFATRDTEIGEEICFDYLQKSSDNDDVDTNSSTVTPMRKSTNVTTQNVRGPQASYRVDHRRMTISRA

SEQ ID NO: 14998 - protein, 219 aa, Burkholderia fungorum
MSVAGRRGARKAPRLLCASEKAARQTRAFATAADLHPKFFTRIHSMSSRRIAVRRSGVHGKGVFAVEPIAAGERLIEYKGERISWKEALRRHPHNPAEPNHTFYFALDSGKVIDGKVNGNSARWINHSCAPNCEAEEIDGHVYVHALRDIAEGEEVFYDYGLVIDARQTNKLKKEYECRCGARKCRGTMLAPPEKEKGAGKSGKSAKKAGTTVKKAKKK

SEQ ID NO: 14999 - protein, 155 aa, Xylella fastidiosa Dixon
MSRRIVARKSRIHGNGVFAVVSIHQGERIIEYKGRIRTHAAVDANSHGHIESGHTFLFTLNDDYVIDANDAGNIARWINHSCSPNCEAVVEEDTGGNRRKDKIFIQAIRDIASGEELTYNYGIVLAERHTARLKKIWACLCGSDHCTHTMLQPKR

SEQ ID NO: 15000 - protein, 602 aa, Anopheles gambiae str. PEST
TKPHSSDELRTGSNDISLSLTVVPLPLIDGSIMKRPEEKQLLSMEEIKIVGMEEPYYTDKGSDNNCFMNNLLERKTSSDADSGKGSSVDLAIIYRAGNLYWAAQTRKSIHWPCIVHVDPETDQITRLYGDKFLEVHVSYFGDRGRRAWIKEHSILPFEGVDEYCTNAKNMEYGKLLKSALKSERWKNACSIAERYMTLALSERIASFDHEVKLELARHKVMRHRMAIEGRIKNGASQKMPALLPSDNSEVLEHWNKRDRSSSPESPEYELLPGVFPTKNNPIKKIKFSPSMQNCILNDNRSPLDRPLHSMDSEENPPGSATKANGPKAKTLGVSDLENLNSTEYDDILTFIRYYMFDGHTSYEVEKGLQLYIPPLKPPSVNRQLDGVEDSVCRCQPSDDDPCGPTSACLNRAIMMECSSKTCPAKESCSNQRFTKRIYPALEVRFFSDKGFGLVALEDLKSGQFVIEYVGEVINSEEFDRRVMMMQAAKETNYYFLTVEPDLTIDAGPKGNVSRFINHSCEPNCETQKWTIGETRVIGLFAIKDINAGEELTFNYNLESLGNNKRVCLCGAGKCSGFIGEKYRPPNKKDIVISMKSERSLKN

SEQ ID NO: 15001 - protein, 1969 aa, Anopheles gambiae str. PEST
TAEGGSCSSDNELPALVSAAIRRVESGSDAESIRGLSAPTQQYTSSLLRDFVVKTQMLGTVGGGGAGAMPAGVSGSAANSAAPAPKRRGRPPKSSLQAAPAPPPAARPTGSSRSVTIPTVSESPDSGILSTHSSTGSPKTDKTSGSRTSGAAASSYALTSCLDRNTYATERVLYPPRGPKKRGVGRPPKKDTTAHQQPAGAGRGGSANDPAARSQQQAEDRLDPHWQKIDISKKFHEPRLSGYKSDGGHSTICCSKRLASQSGYISDYGGVGASSGRSRLSGYKSDFSSRSRRSCSRAGGYRSDYGRAKSCGYRSDCSTRHRKQVRRKRRKKIGSHQQSQQQHHNQHDQQHHNNNLSDRKNYNASSDGGGGGGSTKSASVGELEIIRRFQKSTSSFALGGIAGSVDLLARIADGTIPKASPTKSVCSKRSRRKSCASDRLEVMSVKSYGVIGSCGKIRQRRLSTMSRSSGLDLKLNVEIDRLSESFSGMCRIVGGTVNNEAGQASSGAGRSVSPPEETTATNAPAAATPTSGKGHQTKRSVKKRKASEHVTDSPSTAGGANAPGGGGGGAAALGNGGGAGGGGGTGKRRNKKTVPTQSPDDHKLPLKKRHYLLTPGEKGNNTNSSFTGSHTVLNPCAFASGARSSANSAAAGSSISGAATKAVTPKKRHLLKSPEPGPVPTDTELQLQINRERQATGASGQPGTTSDNSAGPQHRSTPPARPSVIQSSGSVHPAASSGAYSASSAGPPPGVFEPTVDLELVIPPPSSIPSLIAKVEMLDSPRLAGSALLATISTASASSEKVLEKLLTKTGAHHLLMKKKRKKPNRTGFPTVKKKKKKLPENDPLDDGLSVLDLKPEVGPDLFDSSNLTRHVPSEAEKTRMKERQQQHHPTTGKHAACDRVPKEGEPTDCFIERHTGVGRPRLSVVSLEKLQGKLPLPGGGSRDVATTPPATGGRGHGRKSVPPGLAEPIESARLATRVTASKSVTPTPPVGTVIPTRLKRGKSDETLRAQQLEKPTKKPRKELPGSAEPSPETAAHLSKRSAIVSPIVEPVDPEETAHVLQPASSTEELEHDPLPPDEGPSDFLRLTDTPSPTSSGEARELAMGGAAAAGGRGAGTSKKLPRKKYITAGLFSDCYKDDGTTGGEGRSGPKTPPETLLPPPAYCERFLRRTVRDFQLPYDLWWLQENGKLPGRNSVPSWNYRKIRTNVYYDVKANPSTDNNTQCNCKPDSGCQDDCLNRMVYTECVPEQCPCGDRCRNTCIQRHEYAPGLERFMTEEKGWGIRSRERISKGTFIMEYLGEVVTEREFKERMRTMYLNDTHHYCLNLDGGLVIDGHRMGSDCRFVNHSCAPNCEMQKWSVNGLFRMALFAMRDIPPNEELCYDYNFSLFNPSEGQPCRCGSEQCRGVIGGKSQRIKPIPLDASKAAGADGTAGGNGASGALVVELSPRSAARSRKRQAKKNQPIVHLNGTPLPTFHPPSVKERALIAEHHCFLLRNLNKIRRQKERAATLASAGGGGNGGAGAAATESGGQGAAAGSDQTAGGSGKPSLASQISALRCPRNIRTRGLAFVEDDPELEKTARIAVALKDICTEIATLKGVPFISKLQLPSKKKTPLYYERIPKPIDLAQIETNIEQGVYRMPKVFEEDLLIMLSNAIKYYGINSPEGIASEALKSHYYTCKQQQVPKLQAYIGEENELLRGFVPKKEPAEDAVPPKPKRGRRQEQPEDIIRCICGLFKDEGLMIQCSKCLVWQHIECTKADPAVENYLCEKCDPREVNYEIPLNEFTEEGYQYYVSLMRGKLQIRQTDTVYVLRDIPMSPDPKNPNAPVRKHTYETIGKIEYSECDIFRVESLWKDKEGRRFVYGHHYLRPHETYHEPTRRFYPNEVMRVPLYEVIPIELVVDRCWVLDPITFCKGRPVDSSEPHVYICELRVDKSARLFSKISRHSHPVCMKSYAFHKFEQKLKIAKTFA

SEQ ID NO: 15002 - protein, 1370 aa, Anopheles gambiae str. PEST
RKAAGLGAGSALLATISTASASSEKVLEKLLTKTGAHHLLMKKKRKKPNRTGFPTVKKKKKKLPENDPLDDGLSVLDLKPEVGPDLFDSSNLTRHVPSEAEKTRMKERQQQHHPTTGKHAACDRVPKEGEPTDCFIERHTGVGRPRLSVVSLEKLQGKLPLPGGGSRDVATTPPATGGRGQHESAGKGASQSSTPVRPHSGGIAALHNEDSTSLDSMPLLKRLHSRSISRMQSVITPTVVIEPIATSPKTPGRPRGRPRTTSPITATETPNSPTATTGPGRGRPRTALALTGNPSAASMQRTPASPLSSPSPTVAAAERTAGRKKQRLDGRKSVPPGLAEPIESARLATRVTASKSVTPTPPVGTVIPTRLKRGKSDETLRAQQLEKPTKKPRKELPGSAEPSPETAAHLSKRSAIVSPIVEPVDPEETAHVLQPASSTEELEHDPLPPDEGPSDFLRLTDTPSPTSSGEARELAMGGAAAAGGRGAGTSKKLPRKKYITAGLFSDCYKDDGTTGGEGRSGPKTPPETLLPPPAYCERFLRRTVRDFQLPYDLWWLQENGKLPGRNSVPSWNYRKIRTNVYYDVKANPSTDNNTQCNCKPDSGCQDDCLNRMVYTECVPEQCPCGDRCRNTCIQRHEYAPGLERFMTEEKGWGIRSRERISKGTFIMEYLGEVVTEREFKERMRTMYLNDTHHYCLNLDGGLVIDGHRMGSDCRFVNHSCAPNCEMQKWSVNGLFRMALFAMRDIPPNEELCYDYNFSLFNPSEGQPCRCGSEQCRGVIGGKSQRIKPIPLGSSGGGASGPGGTGGQRNASEAGADTDASKAAGADGTAGGNGASGALVVELSPRSAARSRKRQAKKNQPIVHLNGTPLPTFHPPSVKERALIAEHHCFLLRNLNKIRRQKERAATLASAGGGGNGGAGAAATESGGQGAAAGSDQTAGGSGKPSLASQISALRCPRNIRTRGLAFVEDDPELEKTARIAVALKDICTEIATLKDDKGVPFISKLQLPSKKKTPLYYERIPKPIDLAQIETNIEQGVYRMPKVFEEDLLIMLSNAIKYYGINSPEGIASEALKSHYYTCKQQQVPKLQAYIGEENELLRGFVPKKEPAEDAVPPKPKRGRRQEQPEDIIRCICGLFKDEGLMIQCSKCLVWQHIECTKADPAVENYLCEKCDPREVNYEIPLNEFTEEGYQYYVSLMRGKLQIRQTDTVYVLRDIPMSPDPKNPNAPVRKHTYETIGKIEYSECDIFRVESLWKDKEGRRFVYGHHYLRPHETYHEPTRRFYPNEVMRVPLYEVIPIELVVDRCWVLDPITFCKGRPVDSSEPHVYICELRVDKSARLFSKISRHSHPVCMKSYAFHKFEQKLKIAKTFA

SEQ ID NO: 15003 - protein, 1351 aa, Anopheles gambiae str. PEST
MKALELQPISRTKPPHDDSRRRAETKDRDDSSSSSSSHRTKEHSRHSSSSGSSKHKSSKSSSSHEGATARRLDTSGHRSSRPKEKEEEKQQRDRGEGGEKERTGRKSVSAGGSFLQEETNRDRSIVKKSSKTKDSKRDSSKAKSGVEAVEEKPAEKPLVTESPQKKIEEQPVETRNVPECPPVEQEPAEPFKASPEAPRIVTKASLKMYKMEDSQKQRTSGHGLVRDRDKLMKKSSGAVGDAYGTAEALAGGYSASEMAMQSGGHLQGAAGVSGPAWPVIANEGDSANVELSEEYLRDMEEKLSRFETIRENIYHSDRIVSREAKKMTCDCFLTHEEIERGEHGCGEDCLNRLLMIECGSRCTVGDRCTNRRFQRQEYAHCQVFRTEKKGFGIQASSAIAPGEFIMEYVGEVLNSAQFDERAEAYSREKNKHYYFMALRSDGIIDATTKGNISRFINHSCDPNAETQKWTQSAQLDVGKAVKGAALVAAATAAGVGDRPEGGKSDAAPVAPTKVKKTRKKRTTGRKQRRLEIHEDPDLDEEINNLLKTGLKNQAHTLKLSRLMVRAKDIKSRSRLLTLLQSGELPCRRLFLDYHGLRLLYGWICESTESIEDLKFRIQILDTLDRLPISNKTMLKDSKILHTVEKWARVEKGKQQKEVVPGPTAVPKEEPQPQLPPPAPAAVGEKAEKEVSSRTSSPSDSNGAGSDSSSQPATERQQQQAAAKKDLLGLGSMEVLKNMPALLKLADLGKLKEIISTCDNIQIPEPEDENAPEEQRLGTQIRILSCKLLISWMNLKEVFRIPKKERIEQMKEHEREADMRYQAIGLENDDEKEEKQQHHRHRDGRGWGDSRGFVRGSGEPKRRRSLDDRDAPYGGGLGGKLKRPPPGGLTGVGGYAPLKQDNLSKQQRRHLFEMKVAHEEAERRKKEMWLMHENACLRFGLNPHLTAPMDIPVRMNPATGEYFSEDDRLLPTPPSHAYFKIQPPPMSTNPDDYELPAMKLPPYWRFAIDERGRLYYYHVKERIPQWEPPRKPGASRAAVVADDEDISLSSDSSTTDTCDTSEEELAAQFEQLLKKKRKQQSSFNLDDVLAKPDDMNDDMSKAPVKRESGESGSPQMLTLEEIFGESANASTAAVDEATLQQLLPRRKRKHSLKLVQARIISPRTEEDKQYGQMEMKRYKETKEKLRKRKEEAKRLRARSMFSKTLADNPFGAAPAQQSAADGGGSSAMATAKLAKRKKSSKGDLNSEEAKKIKEKFRVDIAGVIVQHLSSYRKDSCPLGRITNTDDFKHLARKLTHFVMLKELKHCDNTVHELEVTDSVKTKAREFIKKYMAKHGPVYVRGENEPDYSNVAL

SEQ ID NO: 15004 - protein, 298 aa, Giardia lamblia ATCC 50803
MGKVMAMKQGDKLPTAREPLRVFPYVYKRDELAKMRRVFASAIHITEMDAVSLHYTHVKRNIYVGCKRPSAARKTFCTCTCKEGTGCGTSCELRKVHLECYKECCAGSPCSKQFIVRPLFGNSIDLPKDATTLHKDNSRLADCGNQRLQRMQYARTAVYPAGRKGYGLFALTSIQRGALVTEYIGEVITREECMRRKKSAKGHLYFLALDRELYIDAAHKGNESRFINHSCDPNCEVQLWYVGEEPRAAIVALRSIAPHEELSFDYKFDFYPGVKPKYPCFCGSLYCRGYIDAPKLRT

SEQ ID NO: 15005 - protein, 139 aa, Xanthomonas axonopodis pv. citri str. 306
MFALAPLRKGERIIQYKGRLRTHAEVDADDTGDVESGHTFLFTLSDDYVLDANYEGNVARWINHSCDPNCEAVIEEAEGDDRRKDKIFIEAKRDIKPGEELTYNYGITLAERHTPRLKKIWECRCGSKNCTGTMLQPKR

SEQ ID NO: 15006 - protein, 186 aa, Bradyrhizobium japonicum USDA 110
MPAISSNKPYRVGRSKTGLGLFATKPIKKGTRIIRYFGPILDSRIPAHDEIENKYLFELNGRWTIDGSVRKNLARYINHSCRPNAESDVRPRERKVFIRAIKNIEPGDEINYDYGTDYFKAYLKPIGCKCASCETKRKKLRAEERAERAKVKARTEAKAKKAGAKAVKKKKLNGHAVGKANGSARA

SEQ ID NO: 15007 - protein, 179 aa, Ralstonia solanacearum
MPRSSAAAKDSDAHQPTPPEAAGLRRRDRIAVRESGVHGRGVYAVAAIAKGKKIIEYKGEHISWKEALRRHPHDPDDPNHTFYFSLEDGSVIDAKYGGNRARWINHACKPNCEAREKDGRVFIHALRDIDAGEELFYDYGLVIEGRQTKALKAQFACHCGAKKCRGTMLAPPEKKEKKQ

SEQ ID NO: 15008 - protein, 4498 aa, Takifugu rubripes
MAHSCRWRFPARPGGSSNSGTGRRAGRIRVTASLRSVPGAHPNAAGLGPGFDAALQVSSVIESNLQKFRDVLGESSDSSSAEEEAFGGFRTVAEQKRIQSPSTTCSETPSPQEKKPRGRPPRVLTAHKSAPSLPSHTSLPSSTQSKPEGPERPAEKIKRLPGRPPGTGEKRRGRPPSSSSKKSWSTTVADDSRQDGSEDGVDTDEDRKSAKRAPFGPSQPNDNEAQLPKGGRGDAKVSNLKRLRATKLSPLKSRLKTLPGVPRRRRGRPPSAERLKAEAAAAAGAAHLSAAIESGEGKHKAFKARMGEQLSMPRSVDDIEDQDSCNSAASPASSKPGRTMGLRKSPRHRKPVRIVPSSKRTDATIAKQLLQRAKKGAQKRLEKEAVASGSRGTGAIEAGIRKTQLKNIRQFIMPVVSTVSLRIIKTPKRFIEDEGSFGTPTPHLKMARLETATSAVSASSQPTASSSPAPAQVSSALNVTAGNSGAPTDNLPPPPPPAPSPSVQSTTPSLLNTNANNATNGRFSSSAASCGSSAVSQHSSQLSSAESSRSSSPSLDDSSCDSQASEATQALSETEDHSPSLQGERKGNLLHSAKLPSPPSEPEPEHVLQERNRRGRRGQGVSRESPNQRPRETLAPVAKKPIISPPTGVLMSSTFVNSQQASSTASSSSSPPPPPLLTPPQLPQSASSSTAAIAEHHPQSTWMSHPVPPFMPGSSVLSGLSDKRNRSILRQPTFRWTSLSHPEHQYFSSAKYAKEGLIRKPIFDNFRPPPLTAEDVGLSRQGVSGAGGTPTVPFPAPSSAAGTGNRLFAPLHSHTHHQHPSSSRFDAPVQKRSPLLRPPRFTPSEAHSRIFESVTLHSSSGSSPGSLSPHQTSPNSNRISRRRRQLGSGTPRGHLRSPSHSMTRRSSQIGGQLSVGKGSSDTSVLTGSVSTSNPSSLQGVSSIPLATSALNPAPFSTFSNVSLSLASQGTTDSRRGTAGNPPPSSNTSSSSSPLFQNFPPSAQDTVRGAGKGAKDKSVSISQEPSPKEKERDSEKNREKEKENKREGRKDSEKKSKIPSPDGSPTAPSSLFTVDGRDTEDPILTLASKKAPGRKKSISVDLVSDTAPSEVRGLHSIGPLSIAKGCLFKKGRPSDKGAEIEDGEKEKEKQSAANQQTASLPGQPGRQQLPVSSLGSVLAQAEKQPVSNKRVVGLLKKANAQLCEINKSKLKPTDQTKVQGQESDSSETSVRGPRIKHVCRRAAVALGRNRAVFPDDMPTLSALPWEEREKILSSMGNDDKSSVAGSEEAEPQSPPIKPRETRQKAIQEAPPKKGRRSRRCGQCSGCQVPEDCGVCTNCLDKPKFGGRNIKKQCCKMRKCQNLQWMPSKIFQKQEKGKKDKKKKLSEKKEGLNPVKIPASDSGQKSSPPLQKEDPHRKKSESPPLKSAEDKLKLQSASKQPSPGLDSSPAPDEPSQAPSAVTAQSPSPPLTADKKGHKPQQSAPTSSSSSSSSSSSSSSSSSSSSSSSSSSSSPSSSAQNSPSQATQSHAPSQQQQRPVNSQASSKKDASPKIPLSETKRKPQQHSAQQQSSSALSDTTDLKQLKKTHSCSVPPSPKQRPKDKPLMAKPSGSSTLNWVNTPSTGSQGRSRAPFDGVHRIRVDFKRDHDVEKVWEAGGLGLLTSVPVTPRVLCFLCASSGNVEFVFCQVCCEPFHLFCLGESERPLQEQFENWCCRRCRFCQACGRQHQKTKQQLLECDKCRNSYHPECLGPNHPTRPTKKKRVWVCNKCVRCKCCGATKPGKSWDAQWSHDFSMCHDCAKLFAKRNICVLCNKCYEDDEADGKMVECGRCHHRVHAKCEKLTDDMYELLSKLPESVAYTCTKCTERHPAEWRTALERQLQGCVHHVLTALLNSRTSSHLLRYKQMVKPPELNPETEESLPSCQQLEGPDPPVLTEVSTTPPSEFPPDLESVKKKTDQGRYSSLEFSDDIVRIIQTAMNGDGGHPESRKANSMVKAFFIRQMERIFPWFKVKESRFWEKQNVSANGLLPNAVLPPSLDHNYAQWQERQELSRAEHSHLMKKIIPAPQPKTPWEPDSPASPPPLPPPPLLPPPPLIPDQEDGPDFPPPPGITDNRQCLLCQKYGDENTNEGGRLLYIGQNEWTHINCALWSSEVFEDDEGSLKNVHTAVLRGKQLHCQKCQLPGATVSCCLTSCTSNYHFMCARHCHCVFLEDKKVYCPKHRDLIKGEVVSEFEVTRRVLVDLEGISLRRKWLSGLEPENVHMMIGSMTIDCLGILTELSDCKRKLFPIGYQCSRVYWSTLDARKRCVYTCRILVCHPTLLESDLKNVMSPEENRTIAHSPPPMTDFPDPFESPRRSDSLSPNNTPKLRVYTRNRHPSYPPCHHSLGPSPIPSLGGNTQPQSQENVTPGEFPANPSIQNINARRNSSAPLSPPLHQLNRQRGVTSLPQILSRPLTSPPPLIPSPARDPEKSKHLSKEVAKSQTLRDDERGRPFSTDRNRQKSSRDQEFRDVDKGQVSSQDQAIKDSEKNPSSRELQKESDKCEVSGREPEKRTSLGKDLDHKESERGKLVSRDQVRDSEKRRQMIRGSDKGRHGSRDPIHRESNKSKSFSREPSNKDMEKSRSLSKEAGLKESDKHKQYSKETGKDSGQGKDRLSSRDTDKGRPSSRDFSQRSTERNKDSGSGKDRNTGTQFKQAGDEAKNPGLVPASSGQYSPPVGTAALTGQQRVGGTKQTDKQGKHGGKDQDDSMSPTSMPRHRLNSYSSQSTGNVMQASFHKDSVIGKTGSLSSIQKSSARKSNDYLPGPVTAAAMKPLWPSWTPAEEDVVKQGSMHLASPAASLAKEKQPKVKTAGSREVSKDHEREKTLQNNSKIPLLNNNTKATGSFTTNATNTSSNNGSNSRVAVLGNSIEAHGNAQGEKLENQGGDRSSSKNRENYHSSERKNSSGADNMHQSSSAPEKEVKTDSESHHKATTNQLPLSSRDKRKFVSFPSVTTLKAEMKLDPNGTGTVGGISSSSNVTPTSTISPASQGTCRSALATLYSPSVSSSDSSESDTQPPIDEDVHTKHLHIKHRDHHSLLSHAAEDEGDGPEDDNDRAMDGKHHEDDSDGSGSAKRRYPRRSARARSNMFFGLTPFYGVRSYGEEDLPFYGSGDGAGAIVKRRTGIRKKSAEGQVDGADDISSTSSSGDSGEDEDDEMKQSGKDPFYYSFTRTIINPGDGLPSIEGIDQCVGRGSQLQRFLKDEAQQQQRAQGKTEEDLLNALTLGKPQIGQLDGVDDGSESDASTSTTTTTTTSSSTPNKSTPKRRGRDRHVEKPDPHDLSKDADNSGGAVSSNTREGRKNQKENCLPLGGAVKSQSQGQDPLETQLSLSSDLLKSDSDNNNSDDCGNILPSDIMEFVLNTPSMSMQALSQQSEPSSSELLLDEGYVDVNRRKNMLFDDFSQPLSNAESGSVVESNVNSSMSVEEPYLPLELPSDLSVLTTRSPTVSTSQNHTAGSLIPDSSDRNMLALTPNSEVISGDKSGDKKRAAVLQSENQHDASTLGNKNTQVTEGHMTPEHFIPSSAIGQVVEPSGNQDVNRSSGTPGLPSSPSLPQKYLQTSTVAAGSPSPVSGPSQTQVTSPAVIKPGPDKLILVNQQFQPLYVLQTVPNGVTQKLSATGVMDNSSQAVLSSMTLATGLNTGLSTAQPIFPAGGKVLGTMAHPSQIHTFTGTTQTGFQTGIPSTTSGLLIGLPHDQSQILVSEAGRPQDLRPSVAIVSSSPSLTSSPAALASAHGKKRPISRLQPRKTKKLARTRSQPALAPSEVNPPNMTLINLSSPQITASIPGQPGGLVELSTISTSQRKVPNIIKRPKSGVMYLDPTTLIQQRIPGPAQSGVLGHDSSSHAHLLPCTVSGLNPSQSVVNVVSVPPNGAAGLLAPGSVSLSTPVLGSTEITGSISNLLFKASPHGLGLSDQPMVLQSAGGAPLMSQLTSSVQTSLSSSICVLPSQQTISMTVNQQAEIEGNNLHLQHQSQPLNRAQTLDSGPNSAVTLAPSSATPLSPTKGCVVGVFTQTSALSQSNRTAPISRSSDPRPAKTNTTVTVLGAEKGKQKTKRSRQSANFTSGKKLKVSQEEEHHSHHAGRAQSNSSSKDLSSLEPMDTGKPAEKTTNKGVLGKKKTSEGHVLPANILGNEKGCVAEGAGSLPVASPPDQENSSDLDLDSKPKKGIIFEICSEDGFHIRCESIEEAWRSLTDKVQEARSNARLKELSFEGVNGLRMLGIVHEAVVFLLEQLYGSRHCHNYRFRFHKPDEPDEPPINPHGSARAEINHRRCVFDIFSFLASKHRQPPEYRPHEDDGDEGQLKTARRISMELPLAVRFKQLKVTSKESVGVYRSPIHGRGLFCKKTIEAGEMVIEYSGNVIRSVLTDKREKYYDGKGIGCYMFRIDDYEVVDATVHGNAARFINHSCEPNCYSRVITVDGKKHIVIFASRRIYRGEELTYDYKFPIEDASSKLPCNCNSKKCRKFLN

SEQ ID NO: 15009 - protein, 2548 aa, Plasmodium falciparum 3D7
MEYKLFKNKKILNEKVNELTKKNRQRNTLDHINCIEIDDDDDDDNDNNEEPKEMNINKTNNNNNDILMKSCNDIRRNTTFYRHNVINEEQKNFEYLLSRKKKNVDSIDNVNFYDFMKNDFFNIFNNNIISEHKKTNQIVNQINNNVDTSKNVVYNINYDEHKGEVVNLSFDKKGKETYPQVDIELYNKKMNPRYQNINEQNTCQTSDDNTTYRNVYSDNCALNSSYTNFLRNKSLKYKKCYKQNRQDESTGAEFDYNLDESVYYDDCNNKLYKRSFLKNNKNIIEKGREEHKQDIYNNISDICKSYIKNFDYLNKRIFHNKSKIWKLSNKKVTIHGDPKKRIERNKQEIEDHRREQDGENDQEEDNYDDYDDEDDDDDNCHIYDNYDDYLENDDYDNHNYFYHKNHDVNKIRKIQNKNCSTDFINYTSINNRNMECPNKNADNLKNMDSFLLYMKERKIKKKKNINDHMENQLSDTLNNSNNYNKDVYDSYYDDMNFCYDKDYNMILKKGVNSNRTKSLDRYPNNISHNYVNNISSEIIKYCKDNNITLKSDIKNIINHFNKKYANSSLTNSKISMYENGYPQRSVDRIYDSSTNDPKSDMNGSNNNNSSSNNNNNITHITNDCDNTQTNKNKHYVNSIVNSIVNIFQKRKNVNEKKENINEQNCISFNTNLRNNKLNNNDDLCSNSYVNNINRNKQITNNENKKDNMLMLKGTYHGDSLNESINIEHNLKNNNSMSDVNFVLNNNDNDKKQNSYDISEVSINCYYDDVIKCYMDYTMHGMEDETNFYLCEFCEQNIFDMNNMIKKDKAKECMYRCNISCGRTFHKACVCYIKNNDNYICFFCLYDINFCTLCKEVLTNDSLLPCYYPLCSVSMHTKCVEKLLLFNSHCLKQYESIILPRDINIEQQKNTQKSASDGIIEQPLNIKKKIKRRHIYRKRRRRGPRKSQITTSNKKINKSELAGGSIINGVDMEQENDQGGNNNNNDDNNDDNNDNNDDNNDNNDDNNDNNDNNDDNNNDNNNNNNNDNNDNNNNNNNNNNNNDNDNNNNNNCDENFKNHLLKKDLLRDEPHHNNYDKILECNTEIKMENNVNMSEEPIYNKLFNGKEETLNNENDEKIIVLKKFICPLHICYVCKEFDINNTESSKKELKNNLFRCIKCYKSVHRKCMNQLKNNDNNDNDNNNNNINIYIISHKHRIICCANHMDDYKKEHMEYLKYIKEVKDICKLDEPIHNNNNNNNILSEKGFYGDENNLSISKFHNNSSYEPIKNKETCIKGKDSNYLSHDNKGITDMNNTNKMNVLNLKSCMVNDMNTSERKKKKSCESRGSNITNKKVVFDLTDELNEKEKSPPLDNVQNKIIYGDNEIEKNVNICQKEDGGLNLGSMNILSIGKNHMRTNNNNNNDSSCSSNNNIISVENEYILKNKNLNKSNNSLLDHNNKIKKNSTLNIKECTDSCINVDEFINKNQNEKDISLENIDALCIKRKRNVSHPYNDTLDDTNILKDISNNKSYYVNISKKKRNVSFNYKEEFMKGDEQFLLKGNNLESNEKNTKNKLCNNDNNNNNNNKGKNTKYNTLDRKNNKNKQINDTINKEPENINHNMQNQQLTDNFVEDNMKYKQEIYHIKLSHILSIEKGLLSLQEINIDQMNDECKKHISILCTFRQDFINYVIFLFSKRLHKENQIEPVNGVDHKKEGNIYHAERKQEKINHNAKHNEQGSINNAKHNEQGSINNAKHNEQDSINNAKQNEQDSINNAKHNEQDSINNAKHNEQDSINNAKHNEDDSLNNAKHNEDDSLNNAKQNEEDSLNNAKQNEEDILNNDDHRNQEELHERWKENMVYNFLANYDKKEKKYISKKEEDAIIKILSNDIVGIMKKELKISLYDFIMLKKKTISTNENHKDNDESVVYVEDGKHHCNDINKMKDNVNNDIIPNIKYNNNNYDDVINTKEKESIPDASYMKVTRNQSIMNNDIYNNNIQIIEKERIMNNNKKNYYDEEKKREEYNGLFSKGKKKSFKNNKMDLKTFFSLTNNGYKVDISILKKYSSFLKFEYISKNIYLNDKNKNLLACKSDDYKCLCQGECNLYTCYNSLSNIQCSKSRCNLPEKIQDRKCFNRPFRKSFVKDLEIKKTEKTGYGVFCKRDIKNGELICEYVGEVLGKREFEKRLEVYQEESKKTDMYNWYIIQINKDVYIDSGKKGSISRFINHSCSPNSVSQKWIVRGFYRIGIFALRDIPSGEEITYNYSYNFLFNNFECLCKSPNCMNYHLLKKGESSGASNIIKETELLNNTIFNPVENFHNLHGKMQDWNIFIEEAHTRLLYEYNKMNAFNLRLMECYSTWIFYDMNFQKNQFFSLKSKPYNVSAEFWKVLVSAFSDGEKNIINTFNLFLPSLIKIGQLRRIQQYSYILHNIIGLEHDMWNLIDKGFADDEVCRKCKSCGNLTMCDKCFQSYHQLCGNMHSKMYKNNELVLCRFCQKYDYKIQWIKENHGSKMKTCIEIRSKAFYKLNRDIMTLLEESVKYTQNQSLDSIHAHNTKAFKSKKLKLRKFQYKYVKI

SEQ ID NO: 15010 - protein, 363 aa, Arabidopsis thaliana
MPASKKISDRNHLGQVFDKLLNQIGESEEFELPEWLNKGKPTPYIFIRRNIYLTKKVKRRVEDDGIFCSCSSSSPGSSSTVCGSNCHCGMLFSSCSSSCKCGSECNNKPFQQRHVKKMKLIQTEKCGSGIVAEEEIEAGEFIIEYVGEVIDDKTCEERLWKMKHRGETNFYLCEITRDMVIDATHKGNKSRYINHSCNPNTQMQKWIIDGETRIGIFATRGIKKGEHLTYDYQFVQFGADQDCHCGAVGCRRKLGVKPSKPKIASDEAFNLVAHELAQTLPKVHQNGLVNRHIDAGKSWNNLSQRDTCSRNCIGVVIRLSRPTSDRCFGLVRHFDEYSRKHSVMFEDGVTEFVDMSREDWEIV

SEQ ID NO: 15011 - protein, 344 aa, Arabidopsis thaliana
MPASKKISDRNHLGQVFDKLLNQIGESEEFELPEWLNKGKPTPYIFIRRNIYLTKKVKRRVEDDGIFCSCSSSSPGSSSTVCGSNCHCGMLFSSCSSSCKCGSECNNKPFQQRHVKKMKLIQTEKCGSGIVAEEEIEAGEFIIEYVGEVIDDKTCEERLWKMKHRGETNFYLCEITRDMVIDATHKGNKSRYINHSCNPNTQMQKWIIDGETRIGIFATRGIKKGEHLTYDYQFVQFGADQDCHCGAVGCRRKLGVKPSKPKIASDEAFNLVAHELAQTLPKVHQNGLVNRHIDAGKSWNNLSQRDTCSRDVRGWCYRVCRHVERRLGDCLILFSDCFEVEKPK

SEQ ID NO: 15012 - protein, 352 aa, Arabidopsis thaliana
MSSSKKGSDRNQIRKSLRKLKKQIGELEKLESPDRLNNVKPIFIKRNIYLKKKLKKKVKDHGIFCSCSLDPGSSTLCGSDCNCGILLSSCSSSCKCSSECTNKPFQQRHIKKMKLVQTEKCGYGIVADEDINSGEFIIEYVGEVIDDKICEERLWKLNHKVETNFYLCQINWNMVIDATHKGNKSRYINHSCSPNTEMQKWIIDGETRIGIFATRFINKGEQLTYDYQFVQFGADQDCYCGAVCCRKKLGAKPCKTKNTTLEEAVKPVACKVTWKTPKLLNSEVRETNLDASGQAWNNHSQRKICCRDCIGAYYTAQMKVLTLVVDIFQVMYEDGVTEIIDMCREVWKVVTA

SEQ ID NO: 15013 - protein, 352 aa, Glycine max
  unsure (1)..(352): unsure at all Xaa locations
MPAMKKNPELTCIGSVFNMLGKELGEPVDFELPDSFNKSKPMQYTYIKRNIYLTKKVKRSRFDDDGIFCSCTXXSPGSTSVCGRDCHCGMLLSSCSSGCKCGSSCLNKPFQNRPVKKMKLVKTEKCGSGIVADEDIKLGEFVIEYVGEVIDDKTCEERLWNMKHSGETNFYLCEINRDMVIDATYKGNKSRYINHSCCPNTEMQKWIIDGETRIGIFATRDIQKGEHLTYDYQFVQFGADQDCHCGAAECRRKLGVRPTKSKLSSDAALKLVAYQVYQNGXXLQIGSSRVVDQPKCLHNCIGEVIRIKHLENERFGIIKRFDKYSRKHSIMFEDGCVEIYDMSXREDFELVR

SEQ ID NO: 15014 - protein, 260 aa, Glycine max
  unsure (1)..(260): unsure at all Xaa locations
KASTEIPPTNGTRRFFRVGYINTFTPSRPFRFPISHSLLQSHFRQNLPLKESKSXANFIGSVFNMLGKELGEPVDFELPDSFNKSKPMQYTYIKRNIYLTKKVKRSRFDDDGIFCSCTXXSPGSTSVCGRDCHCGMLLSSCSSGCKCGSSCLNKPFQNRPVKKMKLVKTEKCGSGIVADEDIKLGEFVIEYVGEVIDDQTCXGRLWNMKHRGETNFILLLMRTFLLVCIVKLENEGSKIASTCVVQVQLYLWKIEWFCCV

SEQ ID NO: 15015 - protein, 895 aa, Oryza sativa (indica cultivar-group)
MASSSSKASDSSSQRPKRPDQGPSGKDAAGLVVLHGKLAQLKRQVQSTRLAAIKERVEANRKALQVHTCALFDVAAAAEVASRGAEGGNALSRGAAEGHCRLVGWDSASGPGERELVHVQEENLVAGTLVLSSSGGSGASHRTVVQLAKLPVVDKIPPYTTWIFLDKNQRMADDQLVCRRRIYYDPIVNEALICSESDDDVPEPEEEKHVFTEGEDQLIWKATQDHGLSREVLNVLCQFVDATPSEIEERSEVLFEKYEKQSQSSYETDFQLFLGKTMDVALDSFDNLFCRRCLVFDCRLHGCSQNLVFPSEKQPYGHGLDENKRPCGDQRYLRRREVYQDTCNDDRNACTTYNTDSRSSSLKVSATILSESEDSNRDEDNIKSTSIVETSRSKITNSEYADKSVTPPPGDASETENVSPDMPLRTLGRRKISKHASKSNDHSPDKRQKIYSSPFPFAMSVLNKQSVPEIGETCPDSIESAVDQLPSLDDPNKKISTKDMCAGSTTNTTENTLRDNNNNLFISNKEHSISHWSALERDLYLKGIEIFGKNSCLIARNLLSGLKTCMEVASYMYNNGAAMAKRPLSGKSILGDFAEAEQGYMEQDLVARTRICRRKGRARKLKYTWKSAGHPTVRKRIGDGKQWYTQYNPCGCQQMCGKDCACVENGTCCEKYCGCSKSCKNRFRGCHCAKSQCRSRQCPCFAASRECDPDVCRNCWVSCGDGSLGEPLARGDGYQCGNMKLLLKQQQRILLGKSDVAGWGAFIKNPVNRNDYLGEYTGELISHREADKRGKIYDRANSSFLFDLNEQYVLDAYRKGDKLKFANHSSNPNCYAKVMLVAGDHRVGIYAKDRIEASEELFYDYRYGPDQAPAWARRPEGSKKDEASVSHHRAHKVAR

SEQ ID NO: 15016 - protein, 1153 aa, Oryza sativa (japonica cultivar-group)
MLRSHSKARALPLDGTVEHLGCGQGVVIGAARQGEDQVGFLQELRSMPTTESMTVRTVRRKLRSAMAWGISEKASGLRSLSWTGWLRSPTTASSSACRPRREDVLVHEIAGELRRLGDHAPHLLHVVVVAGPPPAHHHARDDVAGDTHQRGVDVDVLGVGGTPAERADEARHLLAADMAEPEEERMEPPPPPPYIHIETNDFLHRRHKRQKEEDIAVCECQYNLLDPDSACGDRCLNVLTSTECTPGYCLCGVYCKNQRFQKSQYAATRLVKTEGRGWGLLADENIMVTEFTLILWSANVVKYIQAGQFVMEYCGEVISWKEAKRRSQAYENQGLTDAYIIYLNADESIDATKKGSLARFINHSCQPNCETRKWNVLGEVRVGIFAKQDIPIGTELSYDYNFEWFGGAMVRCLCGAGSCSGFLGAKSRGFQEATYLWEDDDDRFSVENVPLYDSADDEPTSIPKDILIKDEPNTQDGNNNTIQNTGIPIIASSSEFTPMNVEPSIASSNEFTPMNVEPLNVSSNELTPMTIEPLNAIPMGVDFTQNGSIEYGAQCAEDALQNSTRGVANLQNQSAPRDNNHTELVAVKRRPTLRGGKAKRGMRKQLNVVGICDRLASEVAREEILYCEEMKNEAAAEIDSLYDEIRPAIEEHERDSQDSVATSLAEKWIEASCCKYKADFDLFPLFRISRVMGKSEHGNLLVSLSDGLPHYSLAAAVGLAIGVAGLCKALHSSLVIPPVSQKKLLSNSDRLYYTGGLKNLGNNCFLNVILQALASCDGFVSSLDNLLGSEDVLPEEKSEKMPLIFALSSLIKVENKVLVPVTLVVSGITEQWWSGGIVTYCNTVNTLSLDFENFYCLPLSPVATINGDIINGCSLVDCLEHFTALEHLDNYRCDHCWHNVAAKYLSLKSEVDEEKINKLHTCVDYGTCSCRHIFTPEEMTCSISSQATKQLAITHFPKILCIHLLRASVGLDGEFVKRGGHISFPLLLDLSPFAGGALIPGQGPKPSAMNKQRHGQQTLHLWRQLNAEMPVNMFPAATDGDSSSHHCGDESINTLGRSFYVGNRDADSRFLSSSSLTDKLYGLSSVVEHYGVCGGGHYAAYRRVTPNSDSNEPVQSLASFRKEWLYVSDDHVSHVSECEVLAAEATLLFYERL

SEQ ID NO: 15017 - protein, 249 aa, Oryza sativa
  unsure (1)..(249): unsure at all Xaa locations
VHPPKALLLLRPHLASFLRRLPPLRHCSLAYGLELVADPRHRRDLCLPPMPRPAKIRKKHENVFDQLIKAIKAPVDFDLPPVLKEWKSNYYVPIKRNAYITRKRVEDDGIFCSCTPSGSSATCDKDCQCGMLFSCCSSTCKCENKCANKPFQHRTLRKTKLIKTEKCGNGVVAEEDIKKGEFVIEXXXGEVIDDRTCEQRLWKMKRQGDTNFYLCEVSKNMVIDATNKXNMSRFINHSCEPNTEMQKWX

SEQ ID NO: 15018 - protein, 798 aa, Schizosaccharomyces pombe
MQTASSLSVLTPLNEENVDRKSSWSKDTIAVQAVGSSPSSSSSHDFESKEDAEGMNKDESAPSPSTSSPSSASSRSQSKYVRKEALPPQLFHHLDSAKDKALTTFEEIQECQYASANIGKPPENEAMICDCRPHWVDGVNVACGHGSNCINRMTSIECTDEDNVCGPSCQNQRFQRHEFAKVDVFLTEKKGFGLRADANLPKDTFVYEYIGEVIPEQKFRKRMRQYDSEGIKHFYFMMLQKGEYIDATKRGSLARFCNHSCRPNCYVDKWMVGDKLRMGIFCKRDIIRGEELTFDYNVDRYGAQAQPCYCGEPCCVGYIGGKTQTEAQSKLPENVREALGIEDEEDSWENITARRQRRKKGIDETSKIIEEVQPTPLTSESATKVIGVLLQTKDDLLTRKLMERIFLTSDPSVCRSIIALRGYNIFGLMLKKFSIDIEFILRSIKTMLSWPRLTRNKIQDSNIEPVVQEFCDHENEEVKDHAKTLLKEWESLEIAYRIPRRKPGQVAPQSTNAEPSNNQSNPPLRDQEPQRGDKGDIKSAINNSTEDLSKKHPALHSSRPSDSRSRSKFGNDYQSHSKHNLFRKNSFPKRRRLSNSDTPSETTTPNNEQEQVSNQANKVDLNKIISAAMESVNQKNVLKAQKEEEERIAQQKREEKRRLAYEESLKRHAKKLHEKKTKSSQDATIDHHLTSHSPESIAFKAVLAKFFANKTARYQEKLGKAEFKLRVKKMTEIILKKHIQLVLSKKEKALPDELSDSQQRKLRVWAFRYLDTVVSRSGTATTTPTDSPSIGESPKKAA

SEQ ID NO: 15019 - protein, 733 aa, Saccharomyces cerevisiae
MSKNQSVSASEDEKEILNNNAEGHKPQRLFDQEPDLTEEALTKFENLDDCIYANKRIGTFKNNDFMECDCYEEFSDGVNHACDEDSDCINRLTLIECVNDLCSSCGNDCQNQRFQKKQYAPIAIFKTKHKGYGVRAEQDIEANQFIYEYKGEVIEEMEFRDRLIDYDQRHFKHFYFMMLQNGEFIDATIKGSLARFCNHSCSPNAYVNKWVVKDKLRMGIFAQRKILKGEEITFDYNVDRYGAQAQKCYCEEPNCIGFLGGKTQTDAASLLPQNIADALGVTVSMEKKWLKLKKLSGEPIIKNENENINIEFLQSLEVQPIDSPVDVTKIMSVLLQQDNKIIASKLLKRLFTIDDDSLRHQAIKLHGYTCFSKMLKLFITEQPQVDGKGNETEEDDIKFIKGILDFLLELPKTTRNGIESSQIDNVVKTLPAKFPFLKPNCDELLEKWSKFETYKRITKKDINVAASKMIDLRRVRLPPGWEIIHENGRPLYYNAEQKTKLHYPPSGSSKVFSSRSNTQVNSPSSSGIPKTPGALDSKKHKLSDEEYERKKQKRLEYERIALERAKQEELESLKQKLKLENERKSVLEDIIAEFNKQKELQKEESKKLVEAKEAKRLKRKTVSQSQRLEHNWNKFFASFVPNLIKKNPQSKQFDHENIKQCAKDIVKILTTKELKKDSSRAPPDDLTKGKRHKVKEFINSYMDKIILKKKQKKALGLSSASTRMSSPPPSTSS

SEQ ID NO: 15020 - protein, 954 aa, Neurospora crassa
MEDGHHSPDSTKESKSEEHSKMNGSKLKRDGASNAGNAATPNGSQTGISRPPSMSPDEHKAASESTATPSENVPTQKPSRKASQKNMKREPVLFNHLPDVREEACTHFQVIHDCLYGSKNMGASEHDALDCDCAEEWRGDMNHACGEDSDCINRATKMECVDGDCNCGSGCQNQRFQRKQYADVSVIKTEKKGFGLRANTDLQVNDFIFEYIGEVINEPTFRSRMVKYDKEGIKHFYFMSLTKSEFVDATKKGNLGRFCNHSCDPNCYVDKWVVGDKLRMGIFAGRAIKAGEELVFNYNVDRYGADPQPCYCGEPNCTGFIGGKTQTERATKLPPATIEALGIEDGDSWDTAVAATVKKPRKKKATEDDEEYINRFEPRGLDEEGVTKVMATLMQCKEKWIAVKLLGRLQNADDDHVRNRVVKMHGYQILKTTLNTFKEDTNVVLQILDILYQLPRITKNKITDSNIEAAVEPLTHSDHEDVASQSKRLLQEWSKLETAYRIPRKKLDPSAPVTTNSFEDDRRNVNHEEHPSRPVNPFENMVVPTGPRSNIPQRNMNYFNNQRPRKLPTNLPAGWFVTTDSTGKYYFYDKSGHTQWQRPTTPAVDVPKPSAKVEQNQKALQDIIDSLTKEPTPRHSANQTPKSNTPVPDNGKKEKWRSLPVEKQMKIYENTLFPHVKYVMDKFHRRLPKEDLKRFGREINKKLVASDYKNHRVDDPTTISSNQARKIKKFVKDFFDRAVVKHRENEQRAAQKAGPSSSGAPSPTNGGSAKSPLGRNGASNATVKTQQPDADGDIVLTDVEDEGENTPATSSSDRKRKRAEEQEVPAPASEAIPSPKRAKEDSTTEDSIPSPPPPPPPPTDTPLTEEERSMREQEEALMRENEEAQRLEDEEAERRVSVTVQGAAVATSKVNGVNGTKAHHTSEASPAVSDENGMDAGRDEKSHEQMAQQEPVSR

SEQ ID NO: 15021 - protein, 1183 aa, Neurospora crassa
MSQISDADVSGKPDIVSVPSLESAIPLLENEQQNQARQQLQQEQQGAGQGITEPQPDAIVVVPQPPADPSLPAQEPVPDTTGRFPRRARGNNAPVYNLARLTGTYVHGKRASKGDIVLQKKRKPKGRKLQALLAQQALEAEQAAQLAAQGGTPANPAADVPSIQPATQETDKPDSNAPADTLTIPPVHAPAAPEPTFPESAASPDKNGAAEAADAPAEENRVDHESLDASVHEAPLELSTNTAELSSTTKADTAQDINLDPCGALIPALPVDVPDHIPAIAPSATRKPDTRGAKATEKDVVKRPVGRPKKHTVTNIGKAARTALVETAEPATAEKVGTNTIGEAVTSSPKEAVPNVEKEAERGIEKEAEPSGTEDIQTGAWEDVPAETTGDVHTSTASQVKAVKAKGTKTTRGKATKAETIKASAVVPATRRATRHSGVPVEDPILPLITPASGKKAKTAEPALSRVPRELKRLRDTNEFVGIDTRPIRYSVWSNGKYVNVTEEKEPTAPAKKKAKVDSSTATVREDRKDKTVEPEAPTNTDSSRPAVKQKRVKKWLNKGLYAGQQAPEDVTKSLTTQERKRLLNIPELAKSGPPNKVLPLPIFNGLRLLIAGRDFKLPFDVCHPLPPGQPKPAAYRTMTKNRFIGQAAAIWKKTPHFEDFASKCVCTPEDGCAQDCQNRVMLYECDDTNCNVGKEFCQNRAFQMLTERTKKGGRYRIGVEVFKTEDRGYGVRSNRCFEPHQIIMEYTGEIITDEECERRMNEEYKNNECYYLMSFDQNMIIDATTGSIARFVNHSCSPNCRMIKWIVSGQPRMALFAGDRPIQTGEELTYDYNFDPFSAKNVQKCLCGAPNCRGVLGPKPKEVKPPKPPKAEVKGKKKVGKRKLQELLANGIENVVEGEGRSPKKLKVGNAQAGKATEDTAKGAPTFVSRKVSKVSVSAKSKVASAKTTKTFTRKVSIATTRVVKSYSKKGAAAKSKTITLKAPSKGSSLTIVAADAAGSITAAETAGAEEEAGNKASKTARVTPKNTPRAKKMADAVQNTPTIAEGDDGSIFDVPSSSSARKRAPSWKVRDSGVKNVSSLFRKARKSPVKIKDTADPAAKSTAATTKIVKPRKAFTKGKVTRPGKAMPKLTVAKKTGKSVAKPAISKSGKGSVSTKGATKIRLVNKAADGQDENAAPELVV

SEQ ID NO: 15022 - protein, 1604 aa, Caenorhabditis elegans
MFQRKVVLPKKRTEMVQTRRKTAAAVQDGGAVKENKAKPPAPQTPTKRAKRGRPPKIKTDANTLNTPSTSSNLVDDKLLIESESQDSILTNEADSFLEKEVEEIEDSSDILPDKINSPEKPSVLVKRRSSTRLKVKTDEDEKDVPVNIEVAVLEEKSIQIEPTSPAHPEDPQPSTSSLPLVEPIEDIVEPNEPTSSADPPVSNIKDEDIKEEEPLIKKPASDESESMDIANSESGNDSDSSEADPRTIPSFSIPLPDTPPPNFAKRGEIHVDVDQKNSKQSGESQSPWERAREKSASNPLSSPTMSRPRIHFLHPAYQSFTNDSVSPLPPPPPEPAPAREKVENGGPTTFKMTFKKAANIPILKTSAFEQPSSPPPSSSVSSSISLSEVNSSTSIASESSPAKRSSNFDLTASNELPPPQMVELPKLSFFNMPPAVRSAEDDSAMTSEEPILLLRSPNSATPDDDALFLTTPPPPKMTESEIQALKVATEKVNQVIARREDSEKDVRHREDRDDYDRRRDDRDRRSRKTDSERNDQRGRQREDDERRAREREREVTKRHDREREEMRLQKQKDEERRKKDEEERIQKENDEKKQKEDEAKMEEEKKKIKEEEMKIPEFELISESKYLTRNANKKKTESLTCECHRTGGNCSDNTCVNRAMLTECPSSCQVKCKNQRFAKKKYAAVEAFHTGTAKGCGLRAVKDIKKGRFIIEYIGEVVERDDYEKRKTKYAADKKHKHHYLCDTGVYTIDATVYGNPSRFVNHSCDPNAICEKWSVPRTPGDVNRVGFFSKRFIKAGEEITFDYQFVNYGRDAQQCFCGSASCSGWIGQKPEEFSSDEDDDIVTTRHINMDEEEEEKLEGLDHLGNHERNEVIKDMLDDLVIRNKKHARKVITIASAMTDYSQRVDVIQEIFSSDTSVTVQKFYAKEGMATLMAEWLSEDDYSLDNLKLVQAILKALHTELFDSCAKNDRLLRDSTSRWVNAKMDEYVDIQVIADSLIACVEDPVQEYKDVCKVIEKGLVENFTRAKEMAYRLNQYWFNRSVSFKIPKKIRDPVPKDVPVRQEDATTSSQSHDNSSRTVSPNHRHHSSSYSNSCYQEREPSHIRFFNNGNDVHQYRFGGYHGNNYNDNYFSRRPNKDSYRDRRRFNGRRSRSRSRSVSPQNYKRRKLDEHDNNHRQRSPIRDRHTSPGGEKTPSSNNSGERNYKRLDIRGARIKTIKEDLEAAAAAAAAAAVPSEVQAYPHEHTAVHQSVYQMPGYESYGVYDPVNGVYMYPHPGAGYYPPAYPQQPIMLTMDTLPPNDRLGELYEKASIEQLAQRDAIVRQELELIRIQIERKTAQKEAIKAACRRANEEEAKRQEALAKTKYVWAIAKSEAGETYYYNKITKETQWTAPTPVQGLLEPACGASPDTTVVIADEITEEEQQAEVLEKPRVVKEEVIEPGSQSETQKESPEKVRVVVPKVEVERSPSPKSSRDREKDREKSREKDRERDRDRREGSKHRDSYHGHRNGSSSVSERRMREFKHELERSTRSAVRSRLQHQRDASSDKTTWLIKLIYREIFKRESAQSGFDYRFSENTDKKVKNYVKSYIDRKLESNDLWKEYSRP

SEQ ID NO: 15023 - protein, 629 aa, Caenorhabditis elegans
MDIANSESGNDSDSSEADPRTIPSFSIPLPDTPPPNFAKRGEIHVDVDQKNSKQSGESQSPWERAREKSASNPLSSPTMSRPRIHFLHPAYQSFTNDSVSPLPPPPPEPAPAREKVENGGPTTFKMTFKKAANIPILKTSAFEQPSSPPPSSSVSSSISLSEVNSSTSIASESSPAKRSSNFDLTASNELPPPQMVELPKLSFFNMPPAVRSAEKVATEKVNQVIARREDSEKDVRHREDRDDYDRRRDDRDRRSRKTDSERNDQRGRQREDDERRAREREREVTKRHDREREEMRLQKQKDEERRKKDEEERIQKENDEKKQKEDEAKMEEEKKKIKEEEMKIPEFELISESKYLTRNANKKKTESLTCECHRTGGNCSDNTCVNRAMLTECPSSCQVKCKNQRFAKKKYAAVEAFHTGTAKGCGLRAVKDIKKGRFIIEYIGEVVERDDYEKRKTKYAADKKHKHHYLCDTGVYTIDATVYGNPSRFVNHSCDPNAICEKWSVPRTPGDVNRVGFFSKRFIKAGEEITFDYQFVNYGRDAQQCFCGSASCSGWIGQKPEEFSSDEDDDIVTTRHINMDEEEEEKLEGLDHLGNHERNEVIKDMLDDLVIRNKKHARKVITIAVSIYL

SEQ ID NO: 15024 - protein, 1590 aa, Caenorhabditis elegans
MVQTRRKTAAAVQDGGAVKENKAKPPAPQTPTKRAKRGRPPKIKTDANTLNTPSTSSNLVDDKLLIESESQDSILTNEADSFLEKEVEEIEDSSDILPDKINSPEKPSVLVKRRSSTRLKVKTDEDEKDVPVNIEVAVLEEKSIQIEPTSPAHPEDPQPSTSSLPLVEPIEDIVEPNEPTSSADPPVSNIKDEDIKEEEPLIKKPASDESESMDIANSESGNDSDSSEADPRTIPSFSIPLPDTPPPNFAKRGEIHVDVDQKNSKQSGESQSPWERAREKSASNPLSSPTMSRPRIHFLHPAYQSFTNDSVSPLPPPPPEPAPAREKVENGGPTTFKMTFKKAANIPILKTSAFEQPSSPPPSSSVSSSISLSEVNSSTSIASESSPAKRSSNFDLTASNELPPPQMVELPKLSFFNMPPAVRSAEDDSAMTSEEPILLLRSPNSATPDDDALFLTTPPPPKMTESEIQALKVATEKVNQVIARREDSEKDVRHREDRDDYDRRRDDRDRRSRKTDSERNDQRGRQREDDERRAREREREVTKRHDREREEMRLQKQKDEERRKKDEEERIQKENDEKKQKEDEAKMEEEKKKIKEEEMKIPEFELISESKYLTRNANKKKTESLTCECHRTGGNCSDNTCVNRAMLTECPSSCQVKCKNQRFAKKKYAAVEAFHTGTAKGCGLRAVKDIKKGRFIIEYIGEVVERDDYEKRKTKYAADKKHKHHYLCDTGVYTIDATVYGNPSRFVNHSCDPNAICEKWSVPRTPGDVNRVGFFSKRFIKAGEEITFDYQFVNYGRDAQQCFCGSASCSGWIGQKPEEFSSDEDDDIVTTRHINMDEEEEEKLEGLDHLGNHERNEVIKDMLDDLVIRNKKHARKVITIASAMTDYSQRVDVIQEIFSSDTSVTVQKFYAKEGMATLMAEWLSEDDYSLDNLKLVQAILKALHTELFDSCAKNDRLLRDSTSRWVNAKMDEYVDIQVIADSLIACVEDPVQEYKDVCKVIEKGLVENFTRAKEMAYRLNQYWFNRSVSFKIPKKIRDPVPKDVPVRQEDATTSSQSHDNSSRTVSPNHRHHSSSYSNSCYQEREPSHIRFFNNGNDVHQYRFGGYHGNNYNDNYFSRRPNKDSYRDRRRFNGRRSRSRSRSVSPQNYKRRKLDEHDNNHRQRSPIRDRHTSPGGEKTPSSNNSGERNYKRLDIRGARIKTIKEDLEAAAAAAAAAAVPSEVQAYPHEHTAVHQSVYQMPGYESYGVYDPVNGVYMYPHPGAGYYPPAYPQQPIMLTMDTLPPNDRLGELYEKASIEQLAQRDAIVRQELELIRIQIERKTAQKEAIKAACRRANEEEAKRQEALAKTKYVWAIAKSEAGETYYYNKITKETQWTAPTPVQGLLEPACGASPDTTVVIADEITEEEQQAEVLEKPRVVKEEVIEPGSQSETQKESPEKVRVVVPKVEVERSPSPKSSRDREKDREKSREKDRERDRDRREGSKHRDSYHGHRNGSSSVSERRMREFKHELERSTRSAVRSRLQHQRDASSDKTTWLIKLIYREIFKRESAQSGFDYRFSENTDKKVKNYVKSYIDRKLESNDLWKEYSRP

SEQ ID NO: 15025 - protein, 408 aa, Caenorhabditis elegans
MPGTRASTNKKTQLTKKNNSVFVYNTDPKFFPNTRRMDYSFICSPKRKTGLLTVTSCKCGTDCTTEECSNFANHRECPRGCSNCENQRFRKRQFCGVETFLTDNGIGHGLRATEEIATGKLILEYRGEAITKAEHNKRVKRYKKDGIKHSYSFEVGRNYYVDPTRKGNSARFINHSCNPNALVKVWTVPDRPMKSLGIFASKVIKPGEEITFDYGTSFRNDQPCQCGEAACRGWIGKPSTSEVPKDVSKELKKRGRKPKMDPTAPISTTSTGGGDKGKLSGTIPVPKSRRGRKRKTDVTAPVPLATKTKRHSPPAENESEDKENVKPPSEEDITNAMNNLLNKTYDNQNGSKLETVATRGLSNGLHASLQNCQTCLHNPHLCHFIFSMISMISCFNFIFIIIKTSEKK

SEQ ID NO: 15026 - protein, 898 aa, Caenorhabditis elegans
MHRIPGDSSKENCAPQDGIVEKEGPNKPFKKKNVKQRNATPQGAGSETSSNAEDKQEEAPILTNAPKDIISMQIQETKAFLSEYEEFVDTDYPKTTFTHVPRKFLSVSPFTPIEADAEGEFLPDADSKCVICHEEKDKTGKSDLITCHGYINGEMDDGKRLLGNIPMFPCRSKFHASCMINYNSGGFHFQYAARLECQARLLCPLHCCNSCNLDHHKQSAYVGDIAECALCLRAFHLTSCYPSGGRDLNVSITIGGKVEKFEMIICPAHYLPGADVQFYNKHKKRKNAVTVVPKADVTMKSHIKACCVIGCEKSSNSKTIMCKTCCRSFHSGCREVETLNGKPIPDDQCESCVCGDPIPQNTLILAKWTDNSFWLALTLDWYKYPTGNRGNINFERLGYTVVQWLIPQENDKEKQPLMSIVPVSDIARLTKNYFSLAKNSTLRNLWEEKYEEQADTALKRCPYVCKTVFGRLRTSVYYKCEPKLEEYHNNEVCNCEGADRCTKLSCQYLADDYECPPSCSKKGVCHNRQVSMGIVSEKIKLAATLCKGYGVFAKGQIEKDEYICEYVGEIIDKAEKKRRLDSVSISRDFQANHYMMELHKGLTVDAARYGNISRYINHSCDPNAASFVTKVFVKKTKEGSLYDTRSYIRAIRTIDDGDEITFSYNMNNEENLPDCECGAENCMGTMGKAKREKPEVADSSEKAAKKNKSSKKKSVKNQNRKSQEAGKNGTASKKSEISPSKPSTSSASSTSFVQQASWPISQNKKNLKKNSNQPVADTGSTLSTSTELNFHEKPQELLSPVSSRSRAASSSTPRAQKSKSRRDDVESEAPPVKRATPSLQTIQETGKAIEFPATKSAITKARALSTQSVPSPHTVEVKVRAISTRGRVQKETKRFEPI

SEQ ID NO: 15027 - protein, 898 aa, Caenorhabditis elegans
MLPSSGDSSKENCAPQDGIVEKEGPNKPFKKKNVKQRNATPQGAGSETSSNAEDKQEEAPILTNAPKDIISMQIQETKAFLSEYEEFVDTDYPKTTFTHVPRKFLSVSPFTPIEADAEGEFLPDADSKCVICHEEKDKTGKSDLITCHGYINGEMDDGKRLLGNIPMFPCRSKFHASCMINYNSGGFHFQYAARLECQARLLCPLHCCNSCNLDHHKQSAYVGDIAECALCLRAFHLTSCYPSGGRDLNVSITIGGKVEKFEMIICPAHYLPGADVQFYNKHKKRKNAVTVVPKADVTMKSHIKACCVIGCEKSSNSKTIMCKTCCRSFHSGCREVETLNGKPIPDDQCESCVCGDPIPQNTLILAKWTDNSFWLALTLDWYKYPTGNRGNINFERLGYTVVQWLIPQENDKEKQPLMSIVPVSDIARLTKNYFSLAKNSTLRNLWEEKYEEQADTALKRCPYVCKTVFGRLRTSVYYKCEPKLEEYHNNEVCNCEGADRCTKLSCQYLADDYECPPSCSKKGVCHNRQVSMGIVSEKIKLAATLCKGYGVFAKGQIEKDEYICEYVGEIIDKAEKKRRLDSVSISRDFQANHYMMELHKGLTVDAARYGNISRYINHSCDPNAASFVTKVFVKKTKEGSLYDTRSYIRAIRTIDDGDEITFSYNMNNEENLPDCECGAENCMGTMGKAKREKPEVADSSEKAAKKNKSSKKKSVKNQNRKSQEAGKNGTASKKSEISPSKPSTSSASSTSFVQQASWPISQNKKNLKKNSNQPVADTGSTLSTSTELNFHEKPQELLSPVSSRSRAASSSTPRAQKSKSRRDDVESEAPPVKRATPSLQTIQETGKAIEFPATKSAITKARALSTQSVPSPHTVEVKVRAISTRGRVQKETKRFEPI

SEQ ID NO: 15028 - protein, 637 aa, Drosophila erecta
  unsure (1)..(637): unsure at all Xaa locations
MATAEAQIGVNRNLQKQDLSNLDVSKLTPLSPEVISRQATINIGTIGHVAHGKSTVVKAISGVQTVRFKNELERNITIKLERLSEKXLKKLLSSKQQRQQYEIKQRSLLRHLAEMRRHSRFRHLCTMQASFSMPASASSVDRRTTRRSTSQTSLSPSNSSGYGSVFGCEEPDVDKLHSVKGFANLKRRRSSIVGTPTPFSKRSKNNEGLIVKKPPKGEYVVERIECVEVDQYQPVFFVKWLGYKDSANTWESLANVADCAQMEEFVERHQQLYEAYIAKITTELEEQLEALPLMENITVAEVDAFDPLNLQLDLILLAQYRAASSRSQREPQKIGERALKRMQLKRAQFSRRKQLDDLASFEKCMNRVEKPSPPIRVENNVDLDTIDSSFKYIHENIIGKGVPKPEAGLLGCKCIEENGVEECTASTKCCARMAGELFAYDRSTRRLRLRPGGAIFECNSRCSCDSNCSNRLVQHGRQVPLVLFKTSNGSGWGVRASTALRKGQFVCEYIGEIITSDEANERGKAYDDKGRTYLFDLDYNTAQDREYTIDAANYGNISHFINHSCDPNLAVFPCWIEHLNVALPHLVFFTLRPIKAGEELSFDYIRADNEDLPYENLSTAVRVECRCGADNCRKVLF

SEQ ID NO: 15029 - protein, 1137 aa, Plasmodium yoelii yoelii
  unsure (1)..(1137): unsure at all Xaa locations
MKDKNNSKNLTSNKKTKKKSTSNYVDNCKNDAENSNVNKNNKNTNVLVNNENPSFIKNEKLSHDTRFNLMNCGDTNSTIETNNASQREQNAEENLETNIKKRIKNIKLMERLEYIENKHSFNNYQNIIEVDEDDIKEIIYDSVNSTCFLCGYKNASIYCSNENCSVKFHLNCAFYSTIIKNCNDNIFFNYKKLFNLIKFNNDTIFCNLNNLPHKKEEENYIFENNYNDIFPIHIIFKTKKIWCNHXWNDKSVYESFYLKKENVSYCTPSNCVNDQMTYEQNQIIADNTPSKHVEINNLNHIPNLENTLGKKEMLQENSITCVKSENDMENKKLISYTNDKRATSTKFLEMLKQYFNSFLEFYFENGSYYVMDTILHNINESIKIRYKSKPLTVLQEILNKKSKIEKKMKELENVINKYVNKKNDEKYIDDKYNLIIQENTKNISNNNNDIPNERHETKITKKIKRNEEPINNTIVDIQKIIDNKNVSNILKSYFILKNFFYIGNFTTLKNENYFFSKKNENSFVKYLVENEQTLNICLSDVLTTNQIKMSSFACKKKWNENDMANSSTNEYNKMNEMNSPQNYCIKYVEYDNESDDNTSDTNINCSSETEESSQYINDIDNNIEENMKYKKKSINIYFKNLTDMKEKKKVNITKLQQVSSNFIRNRENVHINKIVEEIDEGKNKNLVGKEKLNIFKKRGKPQEYINDRKWSNTSSNASIANMMLKKECFLNLVTNNNDIYIKQINDKYFLNYKYNTATNNNNNLPFNHSKCNVIKIGCHNILNIGEVVKYEGEEMIYPCGFLNMRIFFNLPSSVLFHIYKNANINNLCLKNNVLEKICLQLRATYIFSITLKNNNIFFSIILFPLININYFSEADAQKFVLAESHNINELYKQFLSYFNYQNEIYITEQYKKFTKKYSKLYEYMAKFFFKSAEHNKSLDAHSFFGLTLPCVIYHIKYKLFKFIWANLSSKINTHAKRECERDEIKKKIKNCKREVKYNDNILCKYSNLETSIFKDSEKEMPVIEYIGEYIRNIISDKREKYYEKIESSCYMFRLNENIIIDATKWGNVSRFINHSCEPNCFCKIVSCDQNLKHIVIFAKKDILPHEEITYDYQFGVESEGEKLICLCGSSTCLGRMN

SEQ ID NO: 15030 - protein, 2133 aa, Plasmodium yoelii yoelii
  unsure (1)..(2133): unsure at all Xaa locations
MKEQVIRTVDEDGEADQPLSILSSNTINDDVNNNISNRECIQKGDDDNNNNEIVSRNKNNTNLISIVNCQKEYNTSLITENGEKNGEKYETKHEMACNNNEQECMIIDTDDEIKNSGFICPQENKINDLPSTIMLEGNLEIETSLQQNTQNDLITDTIRNENKTSLIENYQNRENCYISLCSNTVEKSGEKNGEKGGEKNDEKDGEKNDEKDGEDDNENVNIKEKKKMGLKIMKKNFQSNNNDENKKEENSIHTNNNNSNNNSNNNSNNSNNGNVKVARKRGRREKNCLRNENGFLRIYDNNSSVIYSNNYIPSNPTDSNIVKDNTNIKNDNIIDAHGLKNNTPITINDSNSINHSNQLSILNEKEKETHKDCDNNNNNVGEIKEYSPIKFENDNKQPGRRRRRKRKLKKGNANENKKGIRRKRSQSVLANNGNIKYRIGKRNMPIIYEKNXNNDNNNXNNNGNNNGNKNNNSIYYYGYEDEYNTLDNMINKMSNIKISKHFFLKMDDDNTSESSTLSNSIKNENLKKIIIIFDQKYNMGFICNAAKRYLTIEEEGGLLNLVKKINGERFNFKNIISSKDSSIEQFMLYNLFSYDITTLKSSLKLIYTFCLFKNLRLYFQMQNKNICIEGNGMSSWRIKDNLLDTHSIILSMFNNYYRNMNKDKLTAIDFINSYYFNIHNIKFAKKNVQPNKTYDNIIEMDQNNGIDEDNNNNSNRNRREGKIKGRGRRKTKEIVIKKEKGKRRGRKSLKNKSYLYGNYKYENNELNDIDSKKIIKRRRGKWGYKLIAKENENKIIKEEKSTDEIIKDKQDNFIEKKKKKNLNKKENELDEENISYQENINNLDNKLSKNNIDQINDENNDIENNVNMIDVKINRTRNSNNKYNFKNIIKRENSNYYDITSMKNNENEQIDVSKTGENNDDFDVAIPKNEDKNGDKNGDKNGDKKDGERDDERDGERDGERDGENNFDCDTKKRRVVICSDKGSNHSDKENNPEIIDDYNKLNIDSTDADKEMVQAGNGQASNGQDKNEEINLLFVKNKLNYNDVINIGSSNETCLEADNNNNTNNEPSLSYYTTDNKVKCKIEEPNGIENASNNECENDVNIKDSEKCDEENNGIIKDDNVIGVEKNGIKNEGNMEYKKKIILRRRSTKEEKENNYINEMNLTKTGCSINNGNNNGSLIKDEGVFCNPMALIKRRRRRRRISKKTKIQKSIEKGNEKIGRKRRRRRRKNINPDESCTEDVIKLENVSIMLLERIKNNYKMLIENNELNKKKQEMKQYNNNVNTKPYNYIGNHNGSGYLNDKSREIDASNVEGSHQFNANTNCLQPGSVSNNNNNNNNNNNNNNCNATGIIDADNSVRTQNNENMVASNANEGIQYSNNNSRILQDNTSNNFEGTLNNNANVNNLIQNNETNVNTVIYENDNNNNIMENKGNYNNSITNVNKINKINHTNFQNNIIKTELSEKEKKYMLTIDSIYNSNFNILDIKVNTHFSHNYHIALFFLCKYTSYNLFLHPINKNEHIVSSIILNSKNDILTDNGNCFVLKYLLSFLSNKISSLRKCYANALYNSYLLQMPIRIFRHNNLKTKYGPNYGIRYDGIYKIANAFTVNDYSTSEYKRDILYVFKRLYMDKCFIPSNCRFYNNIYERKKNLDEKNSVSINVFFKNEIIMTLRVPYIKNYKSTAFTNFNHIYKFIRKKCITENIATEWLNSDVRIYDECMKEYKQMKVKNSELDSKINENVLDNNIKENETNNDPIKIYQPNEEENKRRQNANKNDLKGKYPFWCLGKYLPMVLMLETLCFEKEINENKMIRTKNLKNLNISIKKCEISINCELAKRPAHLFIPIKSKEAISAYIELKKPFDDDWNPYEDLSAGKEKFKIPVENDVDNDLPPMNFTYVNKTIFFSRLPPYNLLPLCSGCTPQNYNKKDFDEIYINGYCKALKHKRTNEIYCDGNKNYDINDFNVLAACSGNCLCDPLKCINKFPEGLHYPVKVVKTVDVGWDIVSCSHIKANSLIMHYVGEITTRKEMISREHEYDKKGYFNYFIETAEVDETYADDWKIPCIDALFISNVARFLNHSCEPNVNVITIWRGDSYPSVGVFSSRDISPNEPLKYHYGINYKNIKCMCRSKKCKGYIG

SEQ ID NO: 15031 - protein, 203 aa, Arabidopsis thaliana
MRCRFPYDGKQRIILEEGYPVYECNKFCGCSRTCQNRVLQNGIRAKLEVFRTESKGWGLRACEHILRGTFVCEYIGEVLDQQEANKRRNQYGNGDCSYILDIDANINDIGRLMEEELDYAIDATTHGNISRFINHSCSPNLVNHQVIVESMESPLAHIGLYASMDIAAGEEITRDYGRRPVPSEQENEHPCHCKATNCRGLLS

SEQ ID NO: 15032 - protein, 185 aa, Glycine max
  unsure (1)..(185): unsure at all Xaa locations
XRVSYVGPPPPDDISFGKESVPVICVVDQELTHSLHMNGCNGQNISSSMPWETITYVTKPMLDQSLIDSESLQLGCACSYTSCCPETCDHVYLFGNDYDDAKDIFGKPMRGRFPYDENGRIILEEGYLVYECNHMCRCNKSCPNRVLQNGVRVKLEVFXTEKKGWAVRAGEAILHGANLCGYIAE

SEQ ID NO: 15033 - protein, 761 aa, Oryza sativa (japonica cultivar-group)
MPQILAEVSKNPDVGEFLLKLISSEREKLSHVWGFGTDSSNQMHSENQDGSVMVLREDGTHPSPGLKCKICSQEFSDDQGLGLHWTEVHKKEVRWLFRGYSCAVCMDSFTNRRVLERHVQEKHGAQYLQYSTLLRCISCNSNFLNTDLLWQHIVSDHSRDFSLLDHVPRRPRGQSIKRTERASDELLYDNHNLGKDDGLQKFTCRLCGMMFDLLPDLGHHHQVAHTNSGTVSDIPSGREKYQFNRGRHYYSAFKKSLRPSGSLKKRTSSGVEKHFKAQSLDLSMDTSHIVESETTTLGRLLDFQCSDVALTLFSKIQKTRPHPSNLDILSIARSVCCKTSLRAALKAKYGILPDNIFVKAAKLCSDVGIQIDWHQEEFFCPKGCKSRSSSNSLLPLQPTQVDFVMSPPIGDEIWGMDEYHYVLDSEHFGWNLKNEMVIVCEDVSFGREKVPVVCAIDVDAKEFPYMKPGEILQSENSLPWQGFHYVTKRLMDSSLVDSENTMVGCACSHAHCSPEECDHVSLFDSIYENLVDLHGVPMRGRFAYDENSKVILQEGYPIYECNSSCTCDASCQNKVLQRGLLVKLEVFRTENKGWAVRAAEPIPQGTFVCEYIGEVLKMKDDGAIRHVERLEIYWNFSGAFHKLIRKLLDLREAKSGSSYLFEITSQIDRERVQTTGTTAYVIDATRYGNVSRFINHSCSPNLSTRLVSVESKDCQLAHIGLFANQDILMGEELAYDYGQKLLPGDGCPCHCGAKNCRGRVY

SEQ ID NO: 15034 - protein, 72 aa, Triticum aestivum
VSRFINHSCSPNLSARLVLVESKDCQLAHVGLFASQDIAVGEELSFDYRRKLQSGDGCPCHCGAQNCRGRVY

SEQ ID NO: 15035 - protein, 6761 aa, Plasmodium falciparum
MSENSDEGKMQKGKGNEMNEDKIICKKEESNSSSYKFISFIKTIEDVKEKWKSSNLSRMDVLKLKNDDINNDDNMNNMDNMNNMNNMNNINNMNNMNNINNMNNMNNINNMNNMNNMNNMDNMNNNEKHPCSNNNYSFNNYIKESINYNTCTGYDKNNIMLNFLDKHKKSIFLKSRNNVNTFQSDINSSKTSSFFSCMSLKNMNYHNDINKYSNYRMMKNINGLHKLMILKNKNKDKKLFTNTSDKKNYYCLNNGDHIINEKDSFSDTYISYGCRKRRWKKKKKNIYNMLFYDESINDYPYKNLEKTTFSNSSKIYELFFNKYKKKKILNIECSGNKYKGLLRTNHFPPYANFNFTIRRKLQTSNVLGHFMISKCNFNRTICYRKYIKCVNKYKNNKRNRVINMYVKKENVDSIKGTFGNMNNGVHHNNSRRRLNNTSKNNISNNNNNMLKKKKGKKNYKGSFDQMIQEDTTLDQAKKESIKTVSKNERKNNMNKHSHDNKVSKLNKRMSNKRRNNKNCNPSNDMCNEDDVIEKICTTEEVNDDEKKKKLSRHKKFVCERKKGVILQNNNKCKKKNDDNIINNNNDDVNNCGDNINDHHDNRKDYDTTEDQNKCPKILSINFIKCDEKLFEKIYNDMFLRIGKIVTNKRKKYFLIYKIVKDSFFRILILNTEKLEKNILQVMAVQDVILCDKNVKIYSDPIYIRNNNKLYAIKFLKIFSLKYMKKVKNMSEVNFSDDDECKKENKDNISESSKRSNNIGEKKMLHVEKSEEHDDMTSDSNKEDTKIEEGRKKSNEVNIDVDDGEEEENVNNNDNNNDNNNDNDNSSDNNNNDDGSNDTESCSKINKSKYKGKEKKDVKENTDDKNLSDSNSNNSKKKFKVLNKAIKKDNDKKKKYEKKNIEGNSNNNMILVRSNSSSTSTSNSSSKSKSSNCRNKKNNQISICSKMDEKNSEQKKKNIKKKNKTCNEGKSKKDSTKLNCVKKVKNKSTDKKNGKSKINIKNEKKKKINNSKINKGRKGINKKDKGKGDDNNYVCLIYDDEKKFYFNFKKFKDIINVIKGSDESTRFYVDTNNNNHNNNMKKKMKLFKKVEKSLYLENLDIDTDEILFRRPKFFNCIIEESFENYDINYEGEDGNFYVFKNKLNKIRKKVTIKNETDSSDMYIELKDEEKGFKYIGYRVSFELKKDNKKKAQVKVGIIKYYSPKYKQFFIHHLENYKLYQTSDLSKGNNNNNNNNMKENGFVKCGRNSYSRACSKSLNSSIYINKYKNVELNEKITNIIDDDNNNNINSSCIYKNNLSNENNLCADKVLCDGNYNMLENDVDEMNNVDQNQKKRNDLVFSDVKGWYSPYFYNIKILNNYKEFERFDILEKCDKKKEMTDHVNNTLNKNEICSICSKRILFMKGHDHYSCSLSSAIYDMCSEAEKKEIDENNCIDIYWGIKCFTCEKKYHANCLEDDVLITKWFDKNILMKEYKKFIYKNSLKKEKRYFNNNGKNKRTKNGKKKKNTIHKLEDKNNSHVVSTASNSHSIEVSSSESAKKGNEKNTATCKKRKTSCSALYKKVKKGKNKNGENKNGENKNGDIKNDDIKNDDIKNDDIRNDDDKNDENEENTKECKNESNNIDNNNSSNDSLSDVDNNKDNGKSKNKKYRRCINYIPSVEHSDITYKKFICKDCYRCIYCCESIYDYKQTPNVANYVICKNCNMVAHGSCCFPNVPDIYLFNWKCDDCLKCNKCNYSNLCYINYNEWELHLDCCINCYKEYEKKNFCIMCNEKYDEDDSKKWVQCDVCKFWIHLSCDKNESRNIETLSNKNIDYKCPTCSIGTFHDKIERILYLLFLLDKYKNFTFHVPINYSIYWRIVKIPMNLYIMKKKIWEKKYDTILDFLYDFMLIIHNAKMVHMPNTPIYKNACIFEKKGRVIIKNMFNMTNEYLNKCIEDCVENYKNEINNLDSFQIGHDNNNNNDNNINNNNKMEGVNNESVIFMNDGCNNKLYNKEGTNMTCVNMDSINKNLNDMNNNNNNNNKMEVFCGQNNIKLNEYYINKEGYNIISNDNNMNYDNYNNVQNIGMKKMYTNINDYNSSNVPNESVYNKENFINNSSIYNINENNTYDLNCDKKLIFDNKYNLSAYQNEGDIMNYNGMYQKNINISNPPYNNNNNNNNNMVKEGEKYILNNDDMNNISISKDNDINNNCNNIANIYRKRKLEQYKKDITQYELYELFDFKNDSFFINRNKEMFSCSSNDHNLIDYNILYVKLNGKIYFNTFYDKHDEFDVCKILKVHFLKNNRRGGGNHIMCPKIRNNQNLKEDVTQCDEEKIEQNNDNGCDDEYDNNNNNNNNIGSSSISSINKIHMNDTYNNSINDNSLRHNNNCSVFINSNIFMIDVLNEKVKINNIVKETKRIISPINNVLKFLKCIQIVFFYDNNTNECTEKEKNVISSNLCNNNFEKYVNINSIDHNNMSGEKKRKSVEEIMSVVDNKSYYGFNKCSEYILYSSNEYDRAKKKENKRIKLLKNDILKECCYICGSIEYKNNFIYCCICGISVHYSCANIVHPFLFNLNDYKDHKKEINNILNIITRNFKCDNCIKCDNCLLHFDSSLKHNLYFKLKNLNVSCNNNRMERRTYNYLYDVKIKVFTTNKEGTKQTGKCVMKTKENDIIKLDEDNKQKDELNEANKECFYKQDDVHVEKNCDELLYKNSFNSEECNKNEKKKNDNNVDENDDNVDKNDDNNNNNNNGDDNNNIDNTLVDGDMNKLENDLNNSNDFSINEEKKNNKDTKKYMISSKEEINKEIENVSNQMDNKNNDVDKKKNISNEEIILDNTKNSCHDNDSNVLYNESVKKSFNACKIEKKEGIEKDDNLGHVNKLRNKRLIKILSIREEGNKLVKCFCCGKPSHDECFYIIDNNTYKNKICTLKKTVKNYVRKKNVENKCNTKVEMNSDVILLDDNIKDHCSVNKTGDEHMNNNEFIDISKDKISEHNILDESFNSGVVCSDKNRKDQVVFIDGDVKNNDISIIEENVTYYTSKEVNNNSVLKNERDVESTSELYIGGDKHVYNKLETDNAEMESNNNNNNNNNNSDCNNNVSTLSTAAVNTINRSHMSPQKNDNDMNKINQDDIIHTKMNDKKNVKDDNGNMTNLNNNIDKNDRNLDTILKEHSVIMQKLDELKENRNKEHDGEFYNNLILNNQFLIHSFKVEEGVEINKDSIIINKKMFNKYILNKIYELLDNKKRVRIKDLFNLFNLDEFRCSFILYEVLNALNTYLNEKLKEYNLTKIRNGTYKKYENEIRNENFCLFNKYLIVNNRDKINITKVVLKIQSLITEILSDAMNGNIVDEKDKSKKKESISSDFNVVNNVKEYNIQNGCINIDINNYFKGEYINFKPILCSSQFNLDTNAQIFLQNKANLSMFQKSASYNNNFENNLENNFVNNKMNNMNNMKNNMNNMNNIMNNIMNNNMNNIMNNIMNNNMNNIINNNNIFNNDVSNNVDMQHKSDQICIFNSNNIHSVPIFNNKPYMDNNFNNMVLVNKSNDINGDDILCNMKNLYNKSVCNKQEKNGYSVVHKNICDVNFPYNDTKIWNGDITNKSKTYTYTNINNNGSVIDYRKWSSVNRSVSMNNMNCIRSNTNPRILSGTDHILKNNHMNKRNNVNNTYGVNNVNNVNNVNNTNNVSCFMMRRKIRSNSLHDMNDKMNKMNDNINININNLNIINNNINICNMNYPIDRVDSMNNTFNRNNIIISQNTKENTNILNFNGNDFCNNNNNNNNIINKENNFGTSNFNSPFHVGNLAKSYSYNNTMSEKNMNEVICPNVRNNMSNMNNMNNMNNMNNMNNMNNMNNMNNMDSINNVISYSCTNPNMKDINFNSMRRSSSTPKKSTGLLKNYFNIDIDQYNKTNSHIMNYNVSINNDMNNVYINNNNNHNNNNNNSCNNFINNDVINMNNVGTFYNFNQNAESYNNISNNIKCSNINNIIINNNMNVNNLNYFCNNKEVGFKENDLNINQKVHTINKDPYEMNHSKMYVTFPYCNTKDNNSNKSSLKSNVLRLDKIRNRNIKKPLLYNRSSSMHSSDNLIYNVHNNNRNSPAEFTSDIIINKERNMENNYNTSINYVNNNITNNIIVANNNCYHTANNFIQINYSPSSSNIVNINKDSYKYDISLENCIDLGSTNTCMYNLNNIHNKDINNMPLEDCFSHIGSCPNEQNEHEDEINEDNKKDVTKQQKKRKLNSVSKKDMLIKKEMNADDNINCKENTLQNESPKKDDELRENDLKTTTENIKSNEVEDKEFVDKKKKRKLSVKVKVNVNVKVELQDTENDENKEKGIKKEKNDEEKKNDAEKKKKENKKGREKSVKVRKTKNQTQVERENEKENLMENVTNDKTSDIINNKTSDIINNKTSDIINNKTSDIINNKTSDIINNKTSDIINNKTSDIINDKTNDIINNKTSDCLSLVQNNKPVIHIDCNTSLDITDGYNNLISCEGRKKGKYNIEENNINDDNMFQYSDAFDSEGSIKYKEEYDKIYIPNNKNKINNINNFLIKNNLLLKSKFMRITPNTYLCRNCVLLYQNDFSYNTYEEEINKMERSILNEYEKGVIKKNEYVHDAIQNDKVVNTDENIMTNVLADKVDDMKIVEKLNCPLNVEEKGIEENILYVKREGDELINYGKHNDQMKEEEESEVVLGDVDFLKNEKKDNLILPYDEKYTGVNNNNSSIIMSLKKCDKNITKKKGKDKNFNNIKYFKIDNNKSLWYENYMYWMNKISLYNNLFFTNMYYKENVIKCIDMNNLFLNKMNIYKCSICCMLYHCSNMDRNNFFIKNEDKMRKKTKKNDCLKLLYICNLCTIKYDYVLKIITYKENNKCWNEFYTDNYYKNNFYELVYFIIKIIYKNIYINNFFNIFCSIMDNIFKEHKTLNMKLLSLFLFSNKYFKYEEFYHFFNNKMKKDDRVFKKTFHMKNVCFMPRYSKKSIMYYIFSLFCNKIYNINKKKKCIHNKRSYIHNKQSYIHNKRTDVMYDNNVYFHLYELARKKLYDYSEKSQKPFDEIINMCLYLLYLYYLCNVLYKCVRINNVLKGDKDKGDILCDNKKMKYYKKRKNIKLFLNIINSNEYINVNKIFHGKCIYELPFYVNKERIKKKRNSVREFINNNDNNQENNADKKKDHHIYNQNYNHNSYLCDIGKVDESLHSKEDNKKDVIITNNASIDSTSPSINMNKSVVSSIYSYNSNKEKKKNMRKCIKGLHHTIKNKLNLYVKLMLDKYIQESSNYIKNENKDIKKTIESKNKDDKICLLCNFSNYIYKGRLIPFYDIYIHSECLKWSLNCTQCCYEENKNKTIVNNDNGTKVDVNLDNADDIINNNNMNMLDNNMNGPIKNNEENNNNNDNNNNNNNNNNNNNNNNNNNNNNNNNNNNNNNNNNNNNNNNNNNNNNKSKKNTQKKKDHVNDVKINQNNSNNKNNKKKKTSKDNEELKSDNTKNNKTKDSDGNNNDKTKLEKINLIHNKQSNEISCKIDNNNIINDISTNNPYMKEKKCKNKEKNRGSKNNNIKNIKLIDMCEWKEDRNFYNIYENMIEVDEDNVKEIIFDSIKSTCFLCGYNNASVYCSNEDCNVKFHLNCAFYSTVIKDPSNNPFFRYLKCFNLVEFNKDTIFYKNMYHDPNVNNSVSSHVCTDNRYYKEMIEKNYVDIFPVHIIYKIKKIWCNKCWNKKKIYNLFYIQKCFMSPYYYDNIKTEESVPNKITPMKKDKSDITNEVKEEKDDDILYDSKVHKEYFTLRNILMDDNLLNNIIRNKKSCSMEIQENNDKMKGDNNIDNEDVRNVLCDGEERVSYNRNKLNDILLKMDMKDILKYFIDFYFENGSYYILDNILYSVNHCVKIKYKKKSLYNIQDVLNKETKIGTMMRELEGLISKYVNRSNDNNYMDRKYDMLLLKNIKSDINNDNNNDINNNDNNNNENNNENINDNNNNNNNNNNNNNNNNSNNNNNNNYYYYHNNEGKYNEQGSYQHIDIQNIINDKSVENLIKGYFILKNFLHIGNNNITLQNEDLLILKKSENSFVHNLYDNDKVYNVHVPYVYTKKMNTSYMNKKENDKKYNKSVNKNSCKSKNSILDNINFDKNKNKITKKYTAFIIDNNEYTTDCSNEENNTSDDEENENRKNENDDDNIPEHIKMNNIMNSQQKKENDFKNINLYFQLTNVIKKVSINKLEGNFFNYEEKGNLLGSNVSKIKMNELLECNVGEENFCDDDQKFSDNKNYASDDEEKKKKKRKNQTRFYNYPKRISTTNNNKNVNVLVNSLNNNLINKKEYFLNIIMNENNDLYMKKINEKYFPNYHPKKRKKKKLDNTSYINHNYNYNYPYNYNLLSNNSKSRILKVGCHNILNIGDILKYDGDKIIYPCGYLNMRIFYNLPSYYLFQIYKNANIDDINRKTKLLEKIFLQLRATYIFSITLREQNFFFSILLFPLINIDYFSESDATNFILAEGYNINEVYMKFLSLFNSQNYICDDMNNDYSHYNAKYGNIYKCLETYILKSVEHNKFIDSHTFFGLTLPCVVYQIKYKLFKYMYKHLSEKIKTYIKKSKDSVMKKRIKGCTREVVYNDNVLCKYSNLDTTIFKENEKENVRMDLNIFEKNIRKTVKYKYNINSAMSYRYLMNISSNLRLYVKKSSIHGYGLYTCEFINEGEPVFEYIGEYIRNIISDKRKKYYDKIESSCYMFRLNENIIIDATKWGNVSRFINHSCEPNCFCKIVSCDQNLKHIVIFAKRDIAAHEEITYDYQFGVESEGKKLICLCGSSTCLGRMN

SEQ ID NO: 15036 - protein, 2399 aa, Plasmodium falciparum
MLNDMNDKKDSIRNRNYKKNKKDEERNIRKYSNDNINVVNNMKDIYNNNNNNINKSVIDCGNNLKRIEGKKVFERNKFGQFIKKSNSPSLKDTNIKSNNNKNMKNTNHNNEENNNNNNTNNTLSNKEKIKVLIDKMKKIQNKKEVNKTLDKPMYIRNFQDEKKVSTHNNAYKLKRNGDPRNYGDIKNGDNIKNGDNNKNGDNIKNGDNIKNGDNIKNGDNIKNGDNIKNGDNIKNGDNIKNGDDQIIGCLKNNREPRSNVENETNEMSNSYGKFTKNRDLKNSDKIKMNDEYRRNNDANISDYNKKNNNNNVNKSNNVVRSSDESLSSDTINKSDCKNKVEENSSRNADESHKKEDGDLINKDKDEKEGENLSVPKESNETYYRISRRERCRNLKKEDNLKIINDEDNSVSHFIKEGRKRSVRERSNLRNYNYINVNNNIKDDDFVDEPNNGSSIIKMNERKKTILRRGARHRRRNPRKRGRRCSSLRNNRNTINSVTKSNYDMSDGDNYEKGRKFLYDNSSNYNELDPLNSKFSNIKISKNFFLKMNDDEDEEDEDGVGDDDKTSKNSSYSFGFNERNIEKKIIILEQKDGIYEINENYLKYDNMKDMEDRKNMEDMKNMEDRKNMEDMKNMEYMKNMEYMKNMEYMKNMEDMKNMEDMKNMEDMKNMEDMKNMEDMKNMEDDNKKDYMNDNLKDDIVIKDNIVIKDDIVMKDNIVMKDNINDSVKDNINEELENNETSCKSSKLNDVTHNNNNICDDNNIVSHSNGEMKEVNIMYPINNEINIKKKRILNNDEILILLNLLRDININRFNIKHVMTSKDCMYEKFMLYNLFSYNITCLKSSLKMMYAYCLFKNLKLFYQIQYKNMNMTEKSIPNYKIKNNLLDTHCIILSMFENYYENVSKQKMPIADFINSFYLNIHNINIGKKKVQPNKNYENIVLPEKDNRKITSMYTNKSLLYSNYMNKDINMENKAYKLNDINMENYRSDHKNNTFIDNDCNNNHKYNNICKNELNSCISNISNDPNNNKNVHTMNKDLYGNIYTEQNAYHVHNYKDMRNEHENNNNIKKKDNIENSIYYDNKMYLGANEKTPCLKDIHMNKNYEQTYDNYDGTNGYNNNNKKKNDNKKNDNNNNDNNNNDNNNNDNQDDNHHDNNKEEYNNQNHLFLNNESRKRKFFTNILPYKNKKKKLPYTINLNNDNKTYHHESINNENHMPLWDYKELENIKNMINDEKDEEDCTPLAHSIKITKNYDNINMDECNVRNENQEYKDNVTNYKVCQDGNFECYDVNESVLVRDIHMEKNNNVEKNNNDEKKNNDEKKNNDEKKNNDEKKNNDEKKNNDEKKNNDEKNNDDNNNIIEKAKENIESIPYDKNCSQDNIQYNMAYKDTSLLLCEQRDMDKGNKKEDDTIKMEDIHFSADMECSPMLKYRKRNYDNKNDDDYVKNDDDYVKDDDGCVKNDDGCIKNDDGYIKNDDGYIKNDDGYIKNDDDYNNNGEYLHGSDNNLSAHKYNSVCRRRRRVDRNKESNEKEKRVYRNDIMELENVDVMLLERIKKNYKMLIRNDNENKKKKKKNNGTVTILEDVDNVYDDNNNNNNDNNIDNNNNNNNNNNNNNNNNNVESHNNNNNERGSTKIEKCRKNKITFFNKYSKLLNNDNVDKKKSKYMLTTESLYNNNFNILDIKVNTHFAHNYHISLFFFCKYTSYNLYLHPLNKNEHIVSYVILNSKNEVLTDNGNSFVLRYLLSFLTNKISSLRKCYANALYNSYLLQIPIRIFRHHNLENKYSPQYGIRYDGIYKIINAFTINDYSTPEYKRDILYVFKRLYVDKCFIPNMNPKILDKQDKAERKKNFIEKNSVSINVMMNKEIIMTLRIPYLKNYKSTTFTNFNHIYKFIKKKCIQKKKAMPWIQSEVSIYEACMQHIKKTEEKKKEHFLNSQKMNNIKTKVNNTNDIYNNENLNSGDDAFKDCIQAINVDKSVQQINDVRFDMNDGNYKMGDIKKECSNVYENMFPAKNNNKIDINKININSNHFSNSSNNNNCDNYKRLGEPNFPYWCLGKYLPFVLVLETLNFEKEIDIYKGIRTKNLKNLKISIIKTEIPINCEMAKRPAHLFIPIKSKEAISAYIELKKPYDNHWNPYEDLSGGKEIFKIPVENVVDESLPPMNFTYVNKTIFFSRLPPYNLLPLCSGCAPHNYNKKEYVDLYINGYCKGIRHKKTNRIYCDGNKNYDINDFNVLAACSGNCLCDPLKCTNKFPEGLHYPIKVVKTKDIGWDIVSCSFIKANSLIMHYVGEITTRKEMISREHEYDKKGYFNYFIETAEVDETYPDDWKIPCIDALFISNVARFLNHSCEPNVNVITIWRGDNYPSVGIFASRDIQPNEPLKYHYGINYKNIKCMCASKKCKGYIG

SEQ ID NO: 15037 - protein, 410 aa, Caenorhabditis elegans
MFKISNPNLFCLPYFPHIFLSAETFFSRFLLRVTYQLLRPSQISFLFFFSIFYVFKMYVQNVKDHITFAVFFWKFFFILAFIFRTGNFDFCKIFSDFKFSKKQAFLAGNSIFLVLVGNSNFKFFLEKEVVGNMPIIGKEWFTDVAKQQPMVLYEDISQGCERFVVPVYSNPRFFMDSSLFENFKYTSRIIDVAGQLACRSASPTFMCQCAGQCSTNCECSSGVFGEGGTVENMELLMWDTVRECNEYCNCALWCGNRVAQKGAMYPVEIFARDPWCGWGVRASVDIAFGTFIGEYAGELIDDEEAMDRHDSTFLFETKVGSETLTIDAKYSGNYTRFINHSCAPNVKVANISWDYDKIQLIHMCFFTDKAIRKGEELTIDYGEAWWANKKFPCLCKSSECRYQFGNDQRT

SEQ ID NO: 15038 - protein, 244 aa, Caenorhabditis elegans
MNYEKIDSTIPGPGISETDWNDVFEGCNCEAECSSAAGCSCLINKIDNYTVDGKINKSSELLIECSDQCACILLPTSCRNRVVQCGPQKKLEIFSTCEMAKGFGVRAGEQIAAGEFVCEYAGECIGEQEVERRCREFRGDDNYTLTLKEFFGGKPVKTFVDPRLRGNIGRFLNHSCEPNCEIILARLGRMIPAAGIFAKRDIVRGEELCYDYGHSAIEGENRKLCLCKSEKCRKYLPMSATPIE

SEQ ID NO: 15039 - protein, 401 aa, Caenorhabditis elegans
MFKISNPNLFCLPYFPHIFLSAETFFSRFLLRVTYQLLRPSQISFLFFFSIFYVFKMYVQNVKDHITFAVFFWKFFFILAFIFRTGNFDFCKIFSDFKFSKKQAFLAGNSIFLVLVGNSNFKFFLEKEVVGNMPIIGKEWFTDVAKQQPMVLYEDISQGCERFVVPVYSNPRFFMDSSLFENFKYTSRIIDVAGQLACRSASPTFMCQCAGQCSTNCECSSGVFGEGGTVENMELLMWDTVRECNEYCNCALWCGNRVAQKGAMYPVEIFARDPWCGWGVRASVDIAFGTFIGEYAGELIDDEEAMDRHDSTFLFETKVGSETLTIDAKYSGNYTRFINHSCAPNVKVANISWDYDKIQLIHMCFFTDKAIRKGEELTIDYGEAWWANKAEIPVPLQVVGM

SEQ ID NO: 15040 - protein, 3828 aa, Drosophila virilis
MGRSKFPGNPSKSINRKRISVLQLEDEAASAAAAAAAATAATTEQHQQSEQSAGSSASREKGNNCDNDDDDNAPSGAATSGNRGASSGASDAAPEGGNSYGNGSSTGSKTTNGGNVNGGSHHKSATAPAELKECKNQGNQIEPNNCIAAEPDGTEDTNNDDDDDSSNDKKPTAAAAAAAAAAFVPGPSALQRARKGGNKKFKNLNLARPEVMLPSTSKLKQQQQQQLQLNCPSASASSLSSSAAAAAAAAAPTTTTTTASASATLTATATSTSTSSLPGTPLSVIAGGGGGAAAAALLLANPFASVETKVVEVNAAATAAATAAATAAAGAGEDVGMLKASIEMANEAGLEAPAVAVKSSGSSPNPNHNPNAVAGSTSAAAPGAPTATKQKKTVTFKNILETSDDKSVVKRFYNPDNRVPLVSIMKKDSLNRPLNYCRGSEFIVRPSILSKILNKNSNIDKLNSLKFRSVHASSNSIQESSSSTTNLFGSGLSRAFGAPIDDEDAVSGGVTFRKQEPQHKTPEDNDDDGSASSDAIEDDEDIDDDDAEENEEAASEKSAETTASVDEKEADDRQLVMDKHFVLPKRSTRSSRIIKPNKRLLEVGGICSKRSPSDANGKPKPKNYFGLATLPAKCTPRRRRSAATALSQKLGKETFASFATAKVNSSFVLRQPRLQFQTDKSRSFVSAKPTLPTTTVLPASSSAITSANVLSFGALNNANSAVAAASTCAVCSAPVNNKDAPLARKYGVIACEVCRKFNSRMTKISKLSTPMHSNPSTSTAQSGQQLKCTDGGNCSILSLKSQLKNFKKLYKERCKACWLKKCLATLQLPAGHRSRLSAILPASMREEVAPKDDKCPELLSPTASLRFTAPTSSASSGTTIKWKSSAETAVNSIKSNPLAENNVTFGGTPLLRPAILEKPLFLKIGSDNKKAKESKEALGLSPVPSTSEAAVAPGKTTRKAKQDKEKARELEAEKPLSPNAKKTTEANTPETQKDEQPASTTTTVSAASSSTSHTSSAATNSSQLETTEAANASAVPDNLKRQRIDLKGPRVKHVCRSASIVLGQPLATFGDEEEELAAAEAGPAPTTTTTTTSPEVIIKKPKSPQPMQMIIDENDNCASCILTPTEATAEAQPAVKSVLESRSSKSNTQTEAKKTPATSGSSKGKVTTRNATATVTSVASSLVATKKQRNIEVSSSISSSQAAATQSRRALAKEVNRLKALISIDFWENYDPAEVCQTGFGLIVTETVAQRALCFLCGSTGLDPLIFCACCCEPYHQYCVLDEYNLKHSSFEDTLMTSLLETSNNACAISAATNTALNQLTQRLNWLCPRCTVCYTCNMSSGSKVKCQKCQKNYHSTCLGTSKRLLGADRPLICVNCLKCKSCATTKVSKFVGNLPMCTACFKLRKKGNFCPICQKCYDDNDFDLKMMECGDCNQWVHSKCEGLSDEQYNLLSTLPESIEFICKKCARRCDVSRNKADEWRQAVMEEFKSSLYSVLKLLSKSRQACALLKLSPRKNWRCCSAGAQPAKAHSQGKLQPKALQFTYNGLGSDGESQNSDDIYEFKEQHSTNRKPSTPVPCSCLQPLSQSPSFSLVDIKQKIASNAYVSLAEFNYDMSQVIQQSNCDELDIAYKELLSEQFPWFQNETKACTDALEEDMFESCGYEELKESPTTYAEHHTASQAPRTGLLDIPLDDVDDLGGCAVKTRLDTRVCLFCRKSGEGLSGEEARLLYCGHDCWVHINCAMWSAEVFEEIDGSLQNVHSAVARGRMIKCTVCGNRGATVGCNVKSCGEHYHYPCARTIDCAFLTDKSMYCPAHARNALKANGSPSVTYESNFEVSRPVYVELERKRKKLIVPAKVQFHIGSVAVRQLGSIVPRFSDSFEAIVPINFLCSRLYWSSKEPWKIVEYTVRTTIQNSYSSTLTLDAGRNFTVDHTNPNCSLVQLGLAQIARWHSSLARSDLLDTDWAEFPNSYVPADENTEEEPQQNADLLPPEIKDAIFEDLPHELLDGISMLDIFMYEDLGDKTELFAMSEQSKDGTTATSQAGGASVIICDEDTRNSNSLNKHLVLSNCCTASNPVDDAMLCAARSSSQEKECGDVLKKTDTAPTRSWPKLDGGSVAAFKRRKLSKNIAEGVLLSLNQRSKKEMATVAGITRRQSVCGSSELPAEGSATMRTKSFTWSAAKCLFEKNESREEPAKLTIMQMDGVDDSITEYRIIGSDGNLSTAQFTGQVKCERCQCTYRNYDSFQRHLGSCEPMSTSESESETATGTAQLSAESLNELQKQALAAATLSNTGGLNYLQTSFPQVQNLATLGQFGVQGLQGLQTLQLQPQSLGNGFFLSQPNAAQATSNGNDVLQLYANSLQNLAANLGGGFTLTQPTMSTQAQPQLIALSTNPDGTQQFIQLPQSNGATTQLLQTAAPLRCNATYQTLQATNSDKKIVLLFLEAGDPLQEVVTQAAQQATAAAHQKQLKSGHGVKPIQAKLQGQQQQQRHQQHQQHQQHQQQQQQQQQQQQQQQTPITVAQHGGTTQLLGQNLLQPQLLFQSNAQPQTQQLLLPQTQAQNIISFVTGDGSQNQPLQYISIPTTNDFKPQQTTSTPTFLTAPGGGATFLQTDASGNLMLTTAPANSGLQMLTGQLQTQPQVIGTLIQPQTLQLTTGADGTQTATAQQPLILGGATGGGTTGLEFATAPQVILATQPMYYGLETIVQNTVMSSQQFVSTAMPGVLSQNSSFSATTTQVFQASKIEPIVDLPAGYVVLNNAVDASGNTSWLQQSQTQATDDATAQLLQNAGFQFQTTPTTSTQQTMSTDYAPPLVVTAKVPPVAQMKRNTNANKSPISVLSKVQPQPQQSQVVNKVLPTNVIQQQQQQQQQQQQQQQQMQPKQQLAGNANLKLTSQFQRQQQANELKNKQAAGQQTGSTCGAPPSIASKPLQKKTNLIRPIHKVEVKPKIMKQAPKLATSAASMQHHQQQQSPAAINQVAKVALLQQRLAPAPQPQQQEPQEEQQHLHQQQQQQQQQQQHMQQHQQQQQQLSMPQLLRAQQPIISIVNTAEPQAATQFVIRPALQAQAQPIQLQEQQSQQQQQQPAEQLINGKAARLQRYASNSLPTNVVNPLQQQRCASANNSSNSNVTQQNSTITINSRPTNRVLPMQQRQEPTPLSNDVVVQSPTPPKPIEEPVPAGASTQKPIVKCYAQLEQKSPGYETELKTNITLDNLEQTNSITTMQLQQPQQGPIYGEQIFEKQSEAQVQLEKPKHNDLMLLEATSCQQQQQQQQHMEMVVDNGFQLTSNESCLLEKHGFNVEAVPMDTEDHYASMKNGSGGGAAEGIGQVDDAEEDEDDDDDFSLKMATSACNDHEMSDSEEPAVKEKISKILDNLTNDDCSDSIATATTVEASAGYQQMVEDVLATTAAGSVSTDDETFTATAEAVEAAASYINEMAEAHELQLKQLQAGVELDLKKPKLDVPQQQPDTVPPNVVPTAAAPQQPPPMRDPKKISGPHLLYEIQSEDGFTYKSSSIAEIWEKVFEAVQVARRAHGLTPLPEGPLADMSGVQMIGLKTNALKYLIEQLPGVEKCVKYTPKYHKRNGNVSTAAGGGHARTAGSNPAALAAGAESLIDYGSDQEELQENAYECARCEPYVSRSEYDMFSWLASRHRKQPIQVFVQPSDNELVPRRGTGSNLPMAMKYRTLKETYKDYVGVFRSHIHGRGLYCTKDIEAGEMVIEYAGELIRSTLTDKRERYYDSRGIGCYMFKIDDNLVVDATMRGNAARFINHSCEPNCYSKVVDILGHKHIIIFALRRIVQGEELTYDYKFPFEDEKIPCSCGSKRCRKYLN

SEQ ID NO: 15041 - protein, 917 aa, Mus musculus
MSETDRAAKMDGDSEEEQESPDTGEDEDGGDESDLSSESSIKKKFLKRRGKTDSPWIKPARKRRRRSRKKPSSMLGSEACKSSPGSMEQAALGDSAGYMEVSLDSLDLRVRGILSSQTENEGLASGPDVLGTDGLQEVPLCSCRMETPKSREISTLANNQCMATESVDHELGRCTNSVVKYELMRPSNKAPLLVLCEDHRGRMVKHQCCPGCGYFCTAGNFMECQPESSISHRFHKDCASRVNNASYCPHCGEEASKAKEVTIAKADTTSTVTLAPGQEKSLAAEGRADTTTGSIAGAPEDERSQSTAPQAPECFDPAGPAGLVRPTSGLSQGPGKETLESALIALDSEKPKKLRFHPKQLYFSARQGELQKVLLMLVDGIDPNFKMEHQSKRSPLHAAAEAGHVDICHMLVQAGANIDTCSEDQRTPLMEAAENNHLDAVKYLIKAGAQVDPKDAEGSTCLHLAAKKGHYDVVQYLLSNGQMDVNCQDDGGWTPMIWATEYKHVELVKLLLSKGSDINIRDNEENICLHWAAFSGCVDIAEILLAAKCDLHAVNIHGDSPLHIAARENRYDCVVLFLSRDSDVTLKNKEGETPLQCASLSSQVWSALQMSKALRDSAPDKPVAVEKTVSRDIARGYERIPIPCVNAVDSELCPTNYKYVSQNCVTSPMNIDRNITHLQYCVCVDDCSSSTCMCGQLSMRCWYDKDGRLLPEFNMAEPPLIFECNHACSCWRNCRNRVVQNGLRARLQLYRTQDMGWGVRSLQDIPLGTFVCEYVGELISDSEADVREEDSYLFDLDNKDGEVYCIDARFYGNVSRFINHHCEPNLVPVRVFMSHQDLRFPRIAFFSTRLIQAGEQLGFDYGERFWDVKGKLFSCRCGSSKCRHSSAALAQRQASAAQEPQENGLPDTSSAAAADPL

SEQ ID NO: 15042 - protein, 308 aa, Mus musculus
PRVRLRLGVGNRAVRTEKIICRDVARGYENVPIPCVNGVDGEPCPEDYKYISENCETSTMNIDRNITHLQHCTCVDDCSSSNCLCGQLSIRCWYDKDGRLLQEFNKIEPPLIFECNQACSCWRSCKNRVVQSGIKVRLQLYRTAKMGWGVRALQTIPQGTFICEYVGELISDAEADVREDDSYLFDLDNKDGEVYCIDARYYGNISRFINHLCDPNIIPVRVFMLHQDLRFPRIAFFSSRDIRTGEELGFDYGDRFWDIKSKYFTCQCGSEKCKHSAEAIALEQSRLARLDPHPELLPDLSSLPPINT

SEQ ID NO: 15043 - protein, 1263 aa, Mus musculus
MRGLPRGRGLMRARGRGRAAPTGGRGRGRGGAHRGRGRPRSLLSLPRAQASWAPQLPAGLTGPPVPCLPSQGEAPAEMGALLLEKEPRGAAERVHSSLGDTPQSEETLPKANPDSLEPAGPSSPASVTVTVGDEGADTPVGAASLIGDEPESLEGDGGRIVLGHATKSFPSSPSKGGACPSRAKMSMTGAGKSPPSVQSLAMRLLSMPGAQGAATAGPEPSPATTAAQEGQPKVHRARKTMSKPSNGQPPIPEKRPPEVQHFRMSDDMHLGKVTSDVAKRRKLNSGSLSEDLGSAGGSGDIILEKGEPRPLEEWETVVGDDFSLYYDAYSVDERVDSDSKSEVEALAEQLSEEEEEEEEEEEEEEEEEEEEEEEEEDEESGNQSDRSGSSGRRKAKKKWRKDSPWVKPSRKRRKREPPRAKEPRGVNGVGSSGPSEYMEVPLGSLELPSEGTLSPNHAGVSNDTSSLETERGFEELPLCSCRMEAPKIDRISERAGHKCMATESVDGELLGCNAAILKRETMRPSSRVALMVLCEAHRARMVKHHCCPGCGYFCTAGTFLECHPDFRVAHRFHKACVSQLNGMVFCPHCGEDASEAQEVTIPRGDGGTPPIGTAAPALPPLAHDAPGRADTSQPSARMRGHGEPRRPPCDPLADTIDSSGPSLTLPNGGCLSAVGLPPGPGREALEKALVIQESERRKKLRFHPRQLYLSVKQGELQKVILMLLDNLDPNFQSDQQSKRTPLHAAAQKGSVEICHVLLQAGANINAVDKQQRTPLMEAVVNNHLEVARYMVQLGGCVYSKEEDGSTCLHHAAKIGNLEMVSLLLSTGQVDVNAQDSGGWTPIIWAAEHKHIDVIRMLLTRGADVTLTDNEENICLHWASFTGSAAIAEVLLNAQCDLHAVNYHGDTPLHIAARESYHDCVLLFLSRGANPELRNKEGDTAWDLTPERSDVWFALQLNRKLRLGVGNRAVRTEKIICRDVARGYENVPIPCVNGVDGEPCPEDYKYISENCETSTMNIDRNITHLQHCTCVDDCSSSNCLCGQLSIRCWYDKDGRLLQEFNKIEPPLIFECNQACSCWRSCKNRVVQSGIKVRLQLYRTAKMGWGVRALQTIPQGTFICEYVGELISDAEADVREDDSYLFDLDNKDGEVYCIDARYYGNISRFINHLCDPNIIPVRVFMLHQDLRFPRIAFFSSRDIRTGEELGFDYGDRFWDIKSKYFTCQCGSEKCKHSAEAIALEQSRLARLDPHPELLPDLSSLPPINT

SEQ ID NO: 15044 - protein, 615 aa, Mus musculus
CDPLADTIDSSGPSLTLPNGGCLSAVGLPTGPGREALEKALVIQESERRKKLRFHPRQLYLSVKQGELQKVILMLLDNLDPNFQSDQQSKRTPLHAAAQKGSVEICHVLLQAGANINAVDKQQRTPLMEAVVNNHLEVARYMVQLGGCVYSKEEDGSTCLHHAAKIGNLEMVSLLLSTGQVDVNAQDSGGWTPIIWAAEHKHIDVIRMLLTRGADVTLTDNEENICLHWASFTGSAAIAEVLLNAQCDLHAVNYHGDTPLHIAARESYHDCVLLFLSRGANPELRNKEGDTAWDLTPERSDVWFALQLNRKLRLGVGNRAVRTEKIICRDVARGYENVPIPCVNGVDGEPCPEDYKYISENCETSTMNIDRNITHLQHCTCVDDCSSSNCLCGQLSIRCWYDKDGRLLQEFNKIEPPLIFECNQACSCWRSCKNRVVQSGIKVRLQLYRTAKMGWGVRALQTIPQGTFICEYVGELISDAEADVREDDSYLFDLDNKDGEVYCIDARYYGNISRFINHLCDPNIIPVRVFMLHQDLRFPRIAFFSSRDIRTGEELGFDYGDRFWDIKSKYFTCQCGSEKCKHSAEAIALEQSRLARLDPHPELLPDLSSLPPINT

SEQ ID NO: 15045 - protein, 1000 aa, Mus musculus
MSDDMHLGKVTSDVAKRRKLNSGSLSEDLGSAGGSGDIILEKGEPRPLEEWETVVGDDFSLYYDAYSVDERVDSDSKSEVEALAEQLSEEEEEEEEEEEEEEEEEEEEEEEEEDEESGNQSDRSGSSGRRKAKKKWRKDSPWVKPSRKRRKREPPRAKEPRGVNGVGSSGPSEYMEVPLGSLELPSEGTLSPNHAGVSNDTSSLETERGFEELPLCSCRMEAPKIDRISERAGHKCMATESVDGELLGCNAAILKRETMRPSSRVALMVLCEAHRARMVKHHCCPGCGYFCTAGTFLECHPDFRVAHRFHKACVSQLNGMVFCPHCGEDASEAQEVTIPRGDGGTPPIGTAAPALPPLAHDAPGRADTSQPSARMRGHGEPRRPPCDPLADTIDSSGPSLTLPNGGCLSAVGLPPGPGREALEKALVIQESERRKKLRFHPRQLYLSVKQGELQKVILMLLDNLDPNFQSDQQSKRTPLHAAAQKGSVEICHVLLQAGANINAVDKQQRTPLMEAVVNNHLEVARYMVQLGGCVYSKEEDGSTCLHHAAKIGNLEMVSLLLSTGQVDVNAQDSGGWTPIIWAAEHKHIDVIRMLLTRGADVTLTDNEENICLHWASFTGSAAIAEVLLNAQCDLHAVNYHGDTPLHIAARESYHDCVLLFLSRGANPELRNKEGDTAWDLTPERSDVWFALQLNRKLRLGVGNRAVRTEKIICRDVARGYENVPIPCVNGVDGEPCPEDYKYISENCETSTMNIDRNITHLQHCTCVDDCSSSNCLCGQLSIRCWYDKDGRLLQEFNKIEPPLIFECNQACSCWRSCKNRVVQSGIKVRLQLYRTAKMGWGVRALQTIPQGTFICEYVGELISDAEADVREDDSYLFDLDNKDGEVYCIDARYYGNISRFINHLCDPNIIPVRVFMLHQDLRFPRIAFFSSRDIRTGEELGFDYGDRFWDIKSKYFTCQCGSEKCKHSAEAIALEQSRLARLDPHPELLPDLSSLPPINT

SEQ ID NO: 15046 - protein, 1172 aa, Mus musculus
MAAAAGAAAAAAAEGEAPAEMGALLLEKEPRGAAERVHSSLGDTPQSEETLPKANPDSLEPAGPSSPASVTVTVGDEGADTPVGAASLIGDEPESLEGDGGRIVLGHATKSFPSSPSKGGACPSRAKMSMTGAGKSPPSVQSLAMRLLSMPGAQGAATAGPEPSPATTAAQEGQPKVHRARKTMSKPSNGQPPIPEKRPPEVQHFRMSDDMHLGKVTSDVAKRRKLNSGSLSEDLGSAGGSGDIILEKGEPRPLEEWETVVGDDFSLYYDAYSVDERVDSDSKSEVEALAEQLSEEEEEEEEEEEEEEEEEEEEEEEEEDEESGNQSDRSGSSGRRKAKKKWRKDSPWVKPSRKRRKREPPRAKEPRGVSNDTSSLETERGFEELPLCSCRMEAPKIDRISERAGHKCMATESVDGELLGCNAAILKRETMRPSSRVALMVLCEAHRARMVKHHCCPGCGYFCTAGTFLECHPDFRVAHRFHKACVSQLNGMVFCPHCGEDASEAQEVTIPRGDGGTPPIGTAAPALPPLAHDAPGRADTSQPSARMRGHGEPRRPPCDPLADTIDSSGPSLTLPNGGCLSAVGLPPGPGREALEKALVIQESERRKKLRFHPRQLYLSVKQGELQKVILMLLDNLDPNFQSDQQSKRTPLHAAAQKGSVEICHVLLQAGANINAVDKQQRTPLMEAVVNNHLEVARYMVQLGGCVYSKEEDGSTCLHHAAKIGNLEMVSLLLSTGQVDVNAQDSGGWTPIIWAAEHKHIDVIRMLLTRGADVTLTDNEENICLHWASFTGSAAIAEVLLNAQCDLHAVNYHGDTPLHIAARESYHDCVLLFLSRGANPELRNKEGDTAWDLTPERSDVWFALQLNRKLRLGVGNRAVRTEKIICRDVARGYENVPIPCVNGVDGEPCPEDYKYISENCETSTMNIDRNITHLQHCTCVDDCSSSNCLCGQLSIRCWYDKDGRLLQEFNKIEPPLIFECNQACSCWRSCKNRVVQSGIKVRLQLYRTAKMGWGVRALQTIPQGTFICEYVGELISDAEADVREDDSYLFDLDNKDGEVYCIDARYYGNISRFINHLCDPNIIPVRVFMLHQDLRFPRIAFFSSRDIRTGEELGFDYGDRFWDIKSKYFTCQCGSEKCKHSAEAIALEQSRLARLDPHPELLPDLSSLPPINT

SEQ ID NO: 15047 - protein, 309 aa, Mus musculus
MSAEGVEKLSLEIAASEEESVAPTEQQDVACGLENLPVSLWPLGAEPRPKPFQYTPDHVAGPGADIDPTQITFPGCACIETPCVPGTCSCLRHENNYDDNLCFRDVGSEGKYAKPVFECNVLCQCGMRCRNRVVQNGLHFLLQVFQTEKKGWGLRTLEFIPKGRFVCEYAGEVLGFSEVQRRIHLQTSHDSNYIIAVREHIYSGQIMETFVDPTYIGNIGRFLNHSCEPNLLMIPVRIDSMVPKLALFAAKDILPGEELSYDYSGRFLNQVSRKDKEKIDCSPPRKPCYCGAQSCTTFLPYDSSLYMAP

SEQ ID NO: 15048 - protein, 309 aa, Mus musculus
MSAEGVEKLSLEIAASEEESVAPTEQQDVACGLENLPVSLWPLGAEPRPKPFQYTPDHVAGPGADIDPTQITFPGCACIETPCVPGTCSCLRHENNYDDNLCLRDVGSEGKYAKPVFECNVLCQCGMRCRNRVVQNGLHFLLQVFQTEKKGWGLRTLEFIPKGRFVCEYAGEVLGFSEVQRRIHLQTSHDSNYIIAVREHIYSGQIMETFVDPTYIGNIGRFLNHSCEPNLLMIPVRIDSMVPKLALFAAKDILPGEELSYDYSGRFLNQVSSKDKEKIDCSPPRKPCYCGAQSCTTFLPYDSSLYMAP

SEQ ID NO: 15049 - protein, 453 aa, Mus musculus
PEGEGCGHAREKAALSDRYPFGFHGRRRKGRKKWNDPLLKMGEPATLGCSVCCKSSWNQLQDLCRLAKLSCPALGVSKKNLYDFEVEYLCDYKKIREQEYYLVKWRGYPDSENTWEPRQNLKCIRVLKQFHKDLERELVRRHRRSKPPRHLDPNLANYLVQKAKQRRALQRWEQELNAKRSHLGRITVENEVDLDGPPRSFVYINEYRVGEGITLNQVAVGCECQDCLLAPTGGCCPGASLHKFAYNDQGQVRLKAGQPIYECNSRCCCGYDCPNRVVQKGIRYDLCIFRTNDGRGWGVRTLEKIRKNSFVMEYVGEIITSEEAERRGQIYDRQGATYLFDLDYVEDVYTVDAAYYGNISHFVNHSCDPNLQVYNVFIDNLDERLPRIAFFATRTIWAGEELTFDYNMQVDPVDMESTRMDSNFGLAGLPGSPKKRVRIECKCGTTACRKYLF

SEQ ID NO: 15050 - protein, 412 aa, Mus musculus
MAENLKGCSVCCKSSWNQLQDLCRLAKLSCPALGVSKKNLYDFEVEYLCDYKKIREQEYYLVKWRGYPDSENTWEPRQNLKCIRVLKQFHKDLERELVRRHRRSKPPRHLDPNLANYLVQKAKQRRALQRWEQELNAKRSHLGRITVENEVDLDGPPRSFVYINEYRVGEGITLNQVAVGCECQDCLLAPTGGCCPGASLHKFAYNDQGQVRLKAGQPIYECNSRCCCGYDCPNRVVQKGIRYDLCIFRTNDGRGWGVRTLEKIRKNSFVMEYVGEIITSEEAERRGQIYDRQGATYLFDLDYVEDVYTVDAAYYGNISHFVNHSCDPNLQVYNVFIDNLDERLPRIAFFATRTIWAGEELTFDYNMQVDPVDMESTRMDSNFGLAGLPGSPKKRVRIECKCGTTACRKYLF

SEQ ID NO: 15051 - protein, 412 aa, Mus musculus
MAENLKGCSVCCKSSWNQLQDLCRLAKLSCPALGVSKKNLYDFEVEYLCDYKKIREQEYYLVKWRGYPDSENTWEPRQNLKCIRVLKQFHKDLERELVRRHRRSKPPRHLDPNLANYLVQKAKQRRALQRWEQELNAKRSHLGRITVENEVDLDGPPRSFVYINEYRVGEGITLNQVAVGCECQDCLLAPTGGCCPGASLHKFAYNDQGQVRLKAGQPIYECNSRCCCGYDCPNRVVQKGIRYDLCIFRTNDGRGWGVRTLEKIRKNSFVMEYVGEIITSEEAERRGQIYDRQGATYLFDLDYVEDVYTVDAAYYGNISHFVNHSCDPNLQVYNVFIDNLDERLPRIAFFATRTIWAGEELTFGYNMQVDPVDMESTRMDSNFGLAGLPGSPKKRVRIECKCGTTACRKYLF

SEQ ID NO: 15052 - protein, 477 aa, Mus musculus
MATARAKARGSEAGARCHRAPGPPPRPKARRTARRRRAETLTARRSRPSAGERRAGSQRAWSGAPRAAVFGDECARGALFKAWCVPCLVSLDTLQELCRKEKLTCKSIGITKRNLNNYEVEYLCDYKVAKGVEYYLVKWKGWPDSTNTWEPLRNLRCPQLLRQFSDDKKTYLAQERKCKAVNSKSLQPAIAEYIVQKAKQRIALQRWQDYLNRRKNHKGMIFVENTVDLEGPPLDFYYINEYRPAPGISINSEATFGCSCTDCFFDKCCPAEAGVVLAYNKKQQIKIQPGTPIYECNSRCRCGPECPNRIVQKGTQYSLCIFKTSNGCGWGVKTLVKIKRMSFVMEYVGEVITSEEAERRGQFYDNKGITYLFDLDYESDEFTVDAARYGNVSHFVNHSCDPNLQVFSVFIDNLDTRLPRIALFSTRTINAGEELTFDYQMKGSGEASSDSIDHSPAKKRVRTQCKCGAETCRGYLN

SEQ ID NO: 15053 - protein, 477 aa, Mus musculus
MAAARAKARGSEAGARCHRAPGPPPRPKARRTARRRRAETLTARRSRPSAGERRAGSQRAWSGAPRAAVFGDECARGALFKAWCVPCLVSLDTLQELCRKEKLTCKSIGITKRNLNNYEVEYLCDYKVAKGVEYYLVKWKGWPDSTNTWEPLRNLRCPQLLRQFSDDKKTYLAQERKCKAVNSKSLQPAIAEYIVQKAKQRIALQRWQDYLNRRKNHKGMIFVENTVDLEGPPLDFYYINEYRPAPGISINSEATFGCSCTDCFFDKCCPAEAGVVLAYNKKQQIKIQPGTPIYECNSRCRCGPECPNRIVQKGTQYSLCIFRTSNGCGWGVKTLVKIKRMSFVMEYVGEVITSEEAERRGQFYDNKGITYLFDLDYESDEFTVDAARYGNVSHFVNHSCDPNLQVFSVFIDNLDTRLPRIALFSTRTINAGEELTFDYQMKGSGEASSDSIDHSPAKKRVRTQCKCGAETCRGYLN

SEQ ID NO: 15054 - protein, 337 aa, Rattus norvegicus
MGNSNIPQDPVKSLPPNEKPSSWCLAELLLSSSVDTLAGHFTRDQNKNSPHELSLTKEWFGRTLVKFLSCICTRNVSVASDAGPGADMDPTQITFPGCACIKTPCVPGTCSCLRHESNYNDNLCLRDVGSEAKYAKPVFECNVLCQCGEHCRNRVVQSGLQFLLQVFQTEKKGWGLRTLEYIPKGRFVCEYAGEVLGFSEVQRRIHLQTAHDPNYIIALREHTYNGQVMETFVDPTYIGNIGRFLNHSCEPNLLMIPVRIDSMVPKLALFAAKDILPGEELSYDYSGRFLNQISSKDKERIDCGQPRKPCYCGAQSCATFLPYDSSLYGPLENPGTS

SEQ ID NO: 15055 - protein, 1027 aa, Rattus norvegicus
MELQDDGKVDFMFEKAQDVLHSLKQKIKDGSATNGDHTPVTQNEQKNKSNVFPSTSCENPSPEDCIILSTGRKGFLPVNNKTEGSGEKEPPLHASFHHHVCSSACLREAPLSLKGENPLQLPLRCHFQRRHAKTNSPSAALHVNYRTPCGRSLRNMEEVFHYLLETECNFLFTDNFSFNTYVQLTRNHPKQNEVVSDVDISNGVESVSISFCNEVDNSKLPQFKYRTTVWPRAYHLNVSSMFSDSCDCSEGCIDIKKCACLQLTAKNAKACPLSPDGECTGYKYKRLQRLIPSGIYECNLFCKCNRQMCQNRVIQHGPRVRLQVFKSEKKGWGVRCLDDIDKGTFVCIYSGRLLSRATPEKTNIGESESEQQHTVKNSFSKKRKIEVVCSDRQTHCESPKTEGCPPKFSSDLEEPVVEMNNRNISRTQRHSVIRRPKSKTDVFHYNEKNMGFVCSYSAAPEEKNGFKPAQEHLDSKARRAHEDLSSSQVGYSEDKQLTESDVIDTTTSREDTSPAYGCKHAAILNSKNTKKVLEVPVKTSQEEEPAASQSQQVSCGEELASERTKIPSASLVQLSKESLFLLDASKEGNVGRFLNHSCYPNLWVQNVFVETHDRNFPLAAFFTNSQVERSEETRGDEQVPTQGTHLGQLGAMSFRPTMIFTYAMFTVEFMEGRYVKARTELTWDYGYEAGTMPEKEILCQCCYLPSPPRFRETKLETPQLHLEECRYPAMAQETSLTPDPVLTGFCQVTEKMEKRTCVLCPEGHDWSVIYFSPSANIAAHENCLLYSSGLVECEAHDPFNIAKNFDVSSVLEKIWNGSTSKCSFCNNEGAIMGCDETSCAKNYHLLCAKEDRAILQVGVKRTYNQWPKHQEEERKEETTFIGPSRTDAAVKAPFLKKCLEAGLLTELFEQIQQKMISIHGRFMDETASESDYEGIETLVFGCGLFKDTLIKLEEAIKSKTCEYEERLNQMKQKLEALAHLQQNLHSFQECGDLDPSGSTSGSLLPPEDHQCRCQESPEVQAGSGDSL

SEQ ID NO: 15056 - protein, 938 aa, Anopheles gambiae str. PEST
ARQAAKANAPPCPDVDTFLQGVRAMRLGTANRSRTDDNRKLNRRQQKRADKMKLKFMAGLGLQRPSAQQPRNGTDGDDFDVQMSVGESDSSGSEADFVPPQKIGTVGRPNVTLRLRKPETLLENPPRKASLASAAGPANRVPLVTAPSGPVGMPKSSAVNANRQAANAHARQVGKQSNGGRTPLAPANGAGKSRSSASPAQNVATPPILPGTTSPSLQIMLGGGPGSGQPVRTTSGLVASSTRTAVPENESCASDSLVCHCRQKSDIFVAKTVGNGYCTAVDDIDGQQIGCCNELSNDLLNMLRPSARGNFAMCKNAHLFHPKCADKYTLNTPYNPARPGDHAAPTLVLKCPHCNQECPNGEIEVNIQLTSPPVLLPSRKSMVKPAKMTVSKTGSGGSSSTNGISGPSNGKDSFRTTVKSLVPSSVKNMLATDHSSKNGSGVSASTSASSSASRTSSAKDAGSTAGASSTGTKLRHTAKDFTNAVCTKKDDALVSEIITSGFDIETRFREYHHGTCLHVVCSYGTPAMAYLIMCRARSVDYLNIFDRELHTAVMRAVVGSKSDIVKLLLDSGADATLKGPYGMTVLHLAAKQGQHDTVRTILECARQRLTARALMAFVNAVDNGRWTALAWAAENRHKQTVEQLISIGADVNVCDRLNNTSLHWASLSGCSDTLYRLMTKDCNPNLQNSNGETPLHIACRQGHAEICVVLLAMGASLNVRNTSNQLPQDIILDPNSECGNIIAANVKMRNLSNNLKETHIICSDISNGRERHPIQVVYYTRGANERQLTVPKLKYIQSNVQIDYRVTIDTDARNMHVCSCVDSTCTSMDSECLCSERTWYTNDGRLVNDFNYLDPPIITECGDLCDCNLRSCRNRVVQHGLDVPLQLCYIPGKGWGVRTMVPIPKGTFLVEYVGEILPDEAANHRLDDSYLFDLGNGL

SEQ ID NO: 15057 - protein, 669 aa, Arabidopsis thaliana
MQGVPGFNTVPNPNHYDKSIVLDIKPLRSLKPVFPNGNQGPPFVGCPPFGPSSSEYSSFFPFGAQQPTHDTPDLNQTQNTPIPSFVPPLRSYRTPTKTNGPSSSSGTKRGVGRPKGTTSVKKKEKKTVANEPNLDVQVVKKFSSDFDSGISAAEREDGNAYLVSSVLMRFDAVRRRLSQVEFTKSATSKAAGTLMSNGVRTNMKKRVGTVPGIEVGDIFFSRIEMCLVGLHMQTMAGIDYIISKAGSDEESLATSIVSSGRYEGEAQDPESLIYSGQGGNADKNRQASDQKLERGNLALENSLRKGNGVRVVRGEEDAASKTGKIYIYDGLYSISESWVEKGKSGCNTFKYKLVRQPGQPPAFGFWKSVQKWKEGLTTRPGLILPDLTSGAESKPVSLVNDVDEDKGPAYFTYTSSLKYSETFKLTQPVIGCSCSGSCSPGNHNCSCIRKNDGDLPYLNGVILVSRRPVIYECGPTCPCHASCKNRVIQTGLKSRLEVFKTRNRGWGLRSWDSLRAGSFICEYAGEVKDNGNLRGNQEEDAYVFDTSRVFNSFKWNYEPELVDEDPSTEVPEEFNLPSPLLISAKKFGNVARFMNHSCSPNVFWQPVIREGNGESVIHIAFFAMRHIPPMAELTYDYGISPTSEARDESLLHGQRTCLCGSEQCRGSFG

SEQ ID NO: 15058 - protein, 670 aa, Arabidopsis thaliana
MERNGGHYTDKTRVLDIKPLRTLRPVFPSGNQAPPFVCAPPFGPFPPGFSSFYPFSSSQANQHTPDLNQAQYPPQHQQPQNPPPVYQQQPPQHASEPSLVTPLRSFRSPDVSNGNAELEGSTVKRRIPKKRPISRPENMNFESGINVADRENGNRELVLSVLMRFDALRRRFAQLEDAKEAVSGIIKRPDLKSGSTCMGRGVRTNTKKRPGIVPGVEIGDVFFFRFEMCLVGLHSPSMAGIDYLVVKGETEEEPIATSIVSSGYYDNDEGNPDVLIYTGQGGNADKDKQSSDQKLERGNLALEKSLRRDSAVRVIRGLKEASHNAKIYIYDGLYEIKESWVEKGKSGHNTFKYKLVRAPGQPPAFASWTAIQKWKTGVPSRQGLILPDMTSGVESIPVSLVNEVDTDNGPAYFTYSTTVKYSESFKLMQPSFGCDCANLCKPGNLDCHCIRKNGGDFPYTGNGILVSRKPMIYECSPSCPCSTCKNKVTQMGVKVRLEVFKTANRGWGLRSWDAIRAGSFICIYVGEAKDKSKVQQTMANDDYTFDTTNVYNPFKWNYEPGLADEDACEEMSEESEIPLPLIISAKNVGNVARFMNHSCSPNVFWQPVSYENNSQLFVHVAFFAISHIPPMTELTYDYGVSRPSGTQNGNPLYGKRKCFCGSAYCRGSFG

SEQ ID NO: 15059 - protein, 669 aa, Arabidopsis thaliana
MQGVPGFNTVPNPNHYDKSIVLDIKPLRSLKPVFPNGNQGPPFVGCPPFGPSSSEYSSFFPFGAQQPTHDTPDLNQTQNTPIPSFVPPLRSYRTPTKTNGPSSSSGTKRGVGRPKGTTSVKKKEKKTVANEPNLDVQVVKKFSSDFDSGISAAEREDGNAYLVSSVLMRFDAVRRRLSQVEFTKSATSKAAGTLMSNGVRTNMKKRVGTVPGIEVGDIFFSRIEMCLVGLHMQTMAGIDYIISKAGSDEESLATSIVSSGRYEGEAQDPESLIYSGQGGNADKNRQASDQKLERGNLALENSLRKGNGVRVVRGEEDAASKTGKIYIYDGLYSISESWVEKGKSGCNTFKYKLVRQPGQPPAFGFWKSVQKWKEGLTTRPGLILPDLTSGAESKPVSLVNDVDEDKGPAYFTYTSPLKYSETFKLTQPVIGCSCSGSCSPGNHNCSCIRKNDGDLPYLNGVILVSRRPVIYECGPTCPCHASCKNRVIQTGLKSRLEVFKTRNRGWGLRSWDSLRAGSFICEYAGEVKDNGNLRGNQEEDAYVFDTSRVFNSFKWNYEPELVDEDPSTEVPEEFNLPSPLLISAKKFGNVARFMNHSCSPNVFWQPVIREGNGESVIHIAFFAMRHIPPMAELTYDYGISPTSEARDESLLHGQRTCLCGSEQCRGSFG

SEQ ID NO: 15060 - protein, 693 aa, Arabidopsis thaliana
MDKSIPIKAIPVACVRPDLVDDVTKNTSTIPTMVSPVLTNMPSATSPLLMVPPLRTIWPSNKEWYDGDAGPSSTGPIKREASDNTNDTAHNTFAPPPEMVIPLITIRPSDDSSNYSCDAGAGPSTGPVKRGRGRPKGSKNSTPTEPKKPKVYDPNSLKVTSRGNFDSEITEAETETGNQEIVDSVMMRFDAVRRRLCQINHPEDILTTASGNCTKMGVKTNTRRRIGAVPGIHVGDIFYYWGEMCLVGLHKSNYGGIDFFTAAESAVEGHAAMCVVTAGQYDGETEGLDTLIYSGQGGTDVYGNARDQEMKGGNLALEASVSKGNDVRVVRGVIHPHENNQKIYIYDGMYLVSKFWTVTGKSGFKEFRFKLVRKPNQPPAYAIWKTVENLRNHDLIDSRQGFILEDLSFGAELLRVPLVNEVDEDDKTIPEDFDYIPSQCHSGMMTHEFHFDRQSLGCQNCRHQPCMHQNCTCVQRNGDLLPYHNNILVCRKPLIYECGGSCPCPDHCPTRLVQTGLKLHLEVFKTRNCGWGLRSWDPIRAGTFICEFAGLRKTKEEVEEDDDYLFDTSKIYQRFRWNYEPELLLEDSWEQVSEFINLPTQVLISAKEKGNVGRFMNHSCSPNVFWQPIEYENRGDVYLLIGLFAMKHIPPMTELTYDYGVSCVERSEEDEVLLYKGKKTCLCGSVKCRGSFT

SEQ ID NO: 15061 - protein, 755 aa, Arabidopsis thaliana
MVSTPPTLLMLFDDGDAGPSTGLVHREKSDAVNEEAHATSVPPHAPPQTLWLLDNFNIEDSYDRDAGPSTGPVHRERSDAVNEEAHATSIPPHAPPQTLWLLDNFNIEDSYDRDAGPSTSPIDREASHEVNEDAHATSAPPHVMVSPLQNRRPFDQFNNQPYDASAGPSTGPGKRGRGRPKGSKNGSRKPKKPKAYDNNSTDASAGPSSGLGKRRCGRPKGLKNRSRKPKKPKADDPNSKMVISCPDFDSRITEAERESGNQEIVDSILMRFDAVRRRLCQLNYRKDKILTASTNCMNLGVRTNMTRRIGPIPGVQVGDIFYYWCEMCLVGLHRNTAGGIDSLLAKESGVDGPAATSVVTSGKYDNETEDLETLIYSGHGGKPCDQVLQRGNRALEASVRRRNEVRVIRGELYNNEKVYIYDGLYLVSDCWQVTGKSGFKEYRFKLLRKPGQPPGYAIWKLVENLRNHELIDPRQGFILGDLSFGEEGLRVPLVNEVDEEDKTIPDDFDYIRSQCYSGMTNDVNVDSQSLVQSYIHQNCTCILKNCGQLPYHDNILVCRKPLIYECGGSCPTRMVETGLKLHLEVFKTSNCGWGLRSWDPIRAGTFICEFTGVSKTKEEVEEDDDYLFDTSRIYHSFRWNYEPELLCEDACEQVSEDANLPTQVLISAKEKGNVGRFMNHNCWPNVFWQPIEYDDNNGHIYVRIGLFAMKHIPPMTELTYDYGISCVEKTGEDEVIYKGKKICLCGSVKCRGSFG

SEQ ID NO: 15062 - protein, 954 aa, Arabidopsis thaliana
MDKSIPIKAIPVACVRPDLVDDVTKNTSTIPTMVSPVLTNMPSATSPLLMVPPLRTIWPSNKEWYDGDAGPSSTGPIKREASDNTNDTAHNTFAPPPEMVIPLITIRPSDDSSNYSCDAGAGPSTGPVKRGRGRPKGSKNSTPTEPKKPKVYDPNSLKVTSRGNFDSEITEAETETGNQEIVDSVMMRFDAVRRRLCQINHPEDILTTASGNCTKMGVKTNTRRRIGAVPGIHVGDIFYYWGEMCLVGLHKSNYGGIDFFTAAESAVEGHAAMCVVTAGQYDGETEGLDTLIYSGQGGTDVYGNARDQEMKGGNLALEASVSKGNDVRVVRGVIHPHENNQKIYIYDGMYLVSKFWTVTGKSGFKEFRFKLVRKPNQPPAYAIWKTVENLRNHDLIDSRQGFILEDLSFGAELLRVPLVNEVDEDDKTIPEDFDYIPSQCHSGMMTHEFHFDRQSLGCQNCRHQPCMHQNCTCVQRNGDLLPYHNNILVCRKPLIYECGGSCPCPDHCPTRLVQTGLKLHLEVFKTRNCGWGLRSWDPIRAGTFICEFAGLRKTKEEVEEDDDYLFDTSKIYQRFRWNYEPELLLEDSWEQVSEFINLPTQVLISAKEKGNVGRFMNHSCSPNVFWQPIEYENRGDVYLLIGLFAMKHIPPMTELTYDYGVSCVERSEEDEGFLVCPYLSSSLWPSSSEIHFLINSKGRAWYDKIYRKLASQGNVSSGLDSVKDEPEKLREEQMEGDGFKEKLSDSVLIDEKLEEYSDCDRTATTSRSHTDPVSSQSTHQTPESFRTPITCDDDTFVSVSGISRDVSNLIPFATETPASPVQEKMANTRSFSNNSVKGNQDEFFIEDFDVGPMDTIDLYDMTFREDPSDFDDNLLYAMRDRTKQLRSFKRKIMDAIKSKRRREKEYEQLAIWFGDADMGCDLVNDKEQSTTSIDSKSSQTNVPVVSEDSEWEIL

SEQ ID NO: 15063 - protein, 429 aa, Arabidopsis thaliana
MCLVGLHRNTAGGIDSLLAKESGVDGPAATSVVTSGKYDNETEDLETLIYSGHGGKPCDQVLQRGNRALEASVRRRNEVRVIRGELYNNEKVYIYDGLYLVSDCWQVTGKSGFKEYRFKLLRKPGQPPGYAIWKLVENLRNHELIDPRQGFILGDLSFGEEGLRVPLVNEVDEEDKTIPDDFDYIRSQCYSGMTNDVNVDSQSLVQSYIHQNCTCILKNCGQLPYHDNILVCRKPLIYECGGSCPTRMVETGLKLHLEVFKTSNCGWGLRSWDPIRAGTFICEFTGVSKTKEEVEEDDDYLFDTSRIYHSFRWNYEPELLCEDACEQVSEDANLPTQVLISAKEKGNVGRFMNHNCWPNVFWQPIEYDDNNGHIYVRIGLFAMKHIPPMTELTYDYGISCVEKTGEDEVIYKGKKICLCGSVKCRGSFG

SEQ ID NO: 15064 - protein, 708 aa, Glycine max
  unsure (1)..(708): unsure at all Xaa locations
MEHHXXGQGTTPASVDKARVLNVKPLRTLVPVFPSPSNPASSSTPQGGAPFVCVSPSGPFPSGVAPFYPFFISSESQRLSEQNAQTPSGQRVPAAPVSTAVPINSFRTPTGAANGDVGSSRKNARSRGRVTEEDGHSNVEXXEEIDADEGTGTGRSKRKSNKKTKARQSGGSVSGDVDPDAVAADILKSLNALVFDVLKSTXEGSRDSVAYTLMIYEVMRRKLGQIEDSNRAANSGAKRPDLKAGAIMMNKGIRTNSKKRIGVVPGVEIGDIFFFRFELCLVGLHAPSMAGIDYIGKTSQEEEPLAVSIVSSGGYEDNVEDGDVLIYSGQGGVNRDKGASDQKLERGNLALEKSAHRGNEVRVIRGLRDPQHPTGKIYVYDGLYKIQNSWVEKAKSGFNVFKYNLVRLPEQPQAYMIWKSIQQWTEKSASRAGVILPDLTSGAENVPVCLVNDVDNEKGPAYFTYIPTLKNLRPTAPVESSTGCPCVGGCQSKNFNCPCIQKNGGYLPYSSALLLADLKSVIYECGPSCQCPSNCRNRVSQSGLKFRLEVFRTKNKGWGLRSWDSIRAGTFICEYAGEVIDCSRGEELGGVKEYXYIFDSTRIYQQLEVFPGDTDSXRKIPSPLYISAKNEGNVSRFMNHSCSPNVLWRPVIRENKNESDLHIAFYAIRHIPPMMELTYDYGAVLPLKVGQRKKKCLCGSVKCKGYFC

SEQ ID NO: 15065 - protein, 736 aa, Oryza sativa (japonica cultivar-group)
MNRESNFMPTPDQDVLEVKPLRTLAPMFPAPLGIDVLNRLTAPPLVFVAPAGQFPGGFGSLNIPAVRSFAAFGGQDASGGKTAGGGDQDASGGKTAAGGDQDAGRGETAAFGGQETVRGEFVANGTPNVGASATGPIDATPISACKSTQPSVISLDDDDNDDDEPYGGNQTSASGRKIKRPSHLKGYNVSDGLGTDSSNGTKKRPKTSNRKAATDNEISLMPPSSDPREVVEVLLMTFEALRRRHLQLDETQETSKRADLKAGAIMLASNLRANIGKRIGAVPGVEVGDIFYFRMELCIIGLHAPSMGGIDYMNKFGDEDDSVAICIVAAGVYENDDDDTDTLVYSGSGGISRNSEEKQDQKLERGNLALERSLSRKNVIRVVRGYKDPACLTGKVYIYDGLYKIHESWKERTKTGINCFKYKLQREPGQPDAVAIWKMCQRWVENPAARGKVLHPDLSSGAENLPVCLINDVNSEKGPGHFNYITQVKYLKPLRSMKPFQGCRCTSVCLPGDTSCDCAQHNGGDLPYSSSGLLVCRKLMVYECGESCRCSINCRNRVAQKGVRIHLEVFRTTNRGWGLRSWDPIRAGSFICEYVGEVVDDTKVNLDGEDDYLFRTVCPGEKTLKWNYGPELIGEHSINISADTFEPLPIKISAMKMGNVARFMNHSCNPNTFWQPVQFDHGEDGYPHIMFFALKHIPPMTELTYDYGDIGCESRGVGSRAKNCLCGSSNCRGFFS

SEQ ID NO: 15066 - protein, 704 aa, Nicotiana tabacum
MEQGLRSDGNNPPSIDKTRVLDVKPLRCLAPVFPSPNGMSSVSTPQPSPFVCVPPTGPFPPGVAPFYPFVAPNDSGRPGESSQQTPSGVPNQGGPFGFAQPISPVPLNSFRTPTTANGNSGRSRRAVDDDDYSNSQDQNDQFASGFSVHVNNVEDSGTGKKRGRPKKPRRAQQAEGLTPVEVDVEPLLTQLLTSFKLVDLDQVKKADGDKELAGRVLLVFDLFRRRMTQIDESRDGPGSGRRPDLKASNMLMTKGVRTNQTKRIGNAPGIEVGDIFFFRMELCLVGLHAPTMAGIDYMSVKLTMDEEPLAVSIVSSGGYDDDGGDGDVLIYTGQGGVQRKDGQVFDQKLERGNLALEKSVHRANEVRVIRGVKDVAYPTGKIYIYDGLYKIQESWAEKNKVGCNVFKYKLLRVPGQPEAFKVWKSIQQWKDGVASRVGVILPDLTSGAESQPVCLVNDVDDEKGPAYFTYIPSLKYSKPFVMPRPSPSCHCVGGCQPGDSNCACIQSNGGFLPYSSLGVLLSYKTLIHECGSACSCPPNCRNRMSQGGPKARLEVFKTKNRGWGLRSWDPIRGGGFICEYAGEVIDAGNYSDDNYIFDATRIYAPLEAERDYNDESRKVPFPLVISAKNGGNISRFMNHSCSPNVYWQLVVRQSNNEATYHIAFFAIRHIPPMQELTFDYGMDKADHRRKKCLCGSLNCRGYFY

SEQ ID NO: 15067 - protein, 812 aa, Oryza sativa
MAGTRQTTSVPMDNAAVVDAKPLRTLTPMFPAALGLHTFTAKENSSSIVCITPFGPYAGGTEQAMPASIPPMFASPAAPADPNQRQPYAVHLNGAAPANGTANNTGVIPDLQIAVAGTVESAKRKRGRPKRVQDSSVPSAHLVPSAPGGNITAVQTPPSATTDESGKKKRGRPKRVQDVPVLSTPSAPQVDSTVFQTPASAVNESVTRKRGRPRRVQDGADTSAPPIQSKYNEPVLQTPSAVTLPEDGKRKRGRPKRVPDGALIPLSHSGVSIDDDSGEIITGKRGRPRKIDVNLLNLPSLFSDDPRESVDNVLMMFDALRRRLMQLDEVKQGAKQQHNLKAGSIMMSAELRANKNKRIGEVPGVEVGDMFYFRIEMCLVGLNSQSMSGIDYMSAKFGNEEDPVAISIVSAGVYENTEDDPDVLVYTGQGMSGKDDQKLERGNLALERSLHRGNQIRVVRSVRDLTCPTGKIYIYDGLYKIREAWVEKGKTGFNVFKHKLLREPGQPDGIAVWKKTEKWRENPSSRDHVILRDISYGAESKPVCLVNEVDDEKGPSHFNYTTKLNYRNSLSSMRKMQGCNCASVCLPGDNNCSCTHRNAGDLPYSASGILVSRMPMLYECNDSCTCSHNCRNRVVQKGSQIHFEVFKTGDRGWGLRSWDPIRAGTFICEYAGEVIDRNSIIGEDDYIFETPSEQNLRWNYAPELLGEPSLSDSSETPKQLPIIISAKRTGNIARFMNHSCSPNVFWQPVLYDHGDEGYPHIAFFAIKHIPPMTELTYDYGQSQGNVQLGINSGCRKSKNCLCWSRKCRGSFG

SEQ ID NO: 15068 - protein, 812 aa, Oryza sativa; identical to SEQ ID NO: 15067

SEQ ID NO: 15069 - protein, 977 aa, Oryza sativa
  unsure (1)..(977): unsure at all Xaa locations
MAGTRQTTSVPMDNAAVVDAKPLRTLTPMFPAALGLHTFTAKENSSSIVCITPFGPYAGGTEQAMPASIPPMFASPAAPADPNQRQPYAVHLNGAAPANGTANNTGVIPDLQIAVAAHLVPSAPGGNITAVQTPPSATTDESGKKKRGRPKRVQDVXVLSTPSAPQXKRGRPRRVQDGADTSAPPIQSKYNEPVLQTPSAVTLPEDGKRKRGRPKRVPDGALIPLSHSGVSIDDDSGEIITGKRGRPRKIDVNLLNLPSLFSDDPRESVDNVLMMFDALRRRLMQLDEVKQGAKQQHNLKAGSIMMSAELRANKNKRIGEVPGVEVGDMFYFRIEMCLVGLNSQSMSGIDYMSAKFGNEEDPVAISIVSAGVYENTEDDPDVLVYTGQGMSGKDDQKLERGNLALERSLHRGNQIRVVRSVRDLTCPTGKIYIYDGLYKIREAWVEKGKTGFNVFKHKLLREPGQPDGIAVWKKTEKWRENPSSRDHVILRDISYGAESKPVCLVNEVDDEKGPSHFNYTTKLNYRNSLSSMRKMQGCNCASVCLPGDNNCSCTHRNAGDLPYSASGILVSRMPMLYECNDSCTCSHNCRNRVVQKGSQIHFEVFKTGDRGWGLRSWDPIRAGTFICEYAGEVIDRNSIIGEDDYIFETPSSEQNLRWNYAPELLGEPSLSDSSETPKQLPIIISAKRTGNIARFMNHSCSPNVFWQPVLYDHGDEGYPHIAFFAIKHIPPMTELTYDYGQSXGSRRLLXNYEAAGCIQCLCHVIRCPGHGNSSCTEQFAKSDEMIRAIAFRESSGRYDSSEKCMFCRLINNLDNAHEQIDTAIATALSESKPVYISVGCNLAGLSHPTFSREPVPLFISPRLSNKANLEYAVEAAADFLNKAVKPMMVGGPKFRVAKAKKAFAGIAESSGLTVRPPSHLLSDRPCLGQTDPIRLDRPPNLGLRFFDGIVAKRNEEIEPGNPERSFLDGWLGLASTA

SEQ ID NO: 15070 - protein, 657 aa, Oryza sativa
  unsure (1)..(657): unsure at all Xaa locations
TRQTTSVPMDNAAVVDAKPLRTLTPMFPAAXXNSSSIVCITPFGPYAGGTEQAMPASIPPMFASPAAPADPNQRQPYAVHLNGAAPANGTANNTGRGRPKRVPDGALIPLSHSGVSIDDDSGEIITGKRGRPRKIDVNLLNLPSLFSDDPRESVDNVLMMFDALRRRLMQLDEVKQGAKQQHNLKAGSIMMSAELRANKNKRIGEVPGVEVGDMFYFRIEMCLVGLNSQSMSGIDYMSAKFGNEEDPVAISIVSAGVYENTEDDPDVLVYTGQGMSGKDDQKLERGNLALERSLHRGNQIRVVRSVRDLTCPTGKIYIYDGLYKIREAWVEKGKTGFNVFKHKLLREPGQPDGIAVWKKTEKWRENPSSRDHVILRDISYGAESKPVCLVNEVDDEKGPSHFNYTTKLNYRNSLSSMRKMQGCNCASVCLPGDNNCSCTHRNAGDLPYSASGILVSRMPMLYECNDSCTCSHNCRNRVVQKGSQIHFEVFKTGDRGWGLRSWDPIRAGTFICEYAGEVIDRNSIIGEDDYIFETPSSEQNLRWNYAPELLGEPSLSDSSETPKQLPIIISAKRTGNIARFMNHSCSPNVFWQPVLYDHGDEGYPHIAFFAIKHIPPMTELTYDYGQSQGNVQLGINSGCRKSKNCLCWSRKCRGSFG

SEQ ID NO: 15071 - protein, 663 aa, Oryza sativa
  unsure (1)..(663): unsure at all Xaa locations
MAGTRQTTSVPMDNAAVVDAKPLRTLTPMFPAALXXGPYAGGTEQAMPASIPPMFASPAAPADPNQRQPYAVHLNGAAPANGTANNTGVIPDLQIAVAGTVESAKRKRGRPKRVQDSSVPSAHLVPSAPGGNITAVQTPPSATTDESGKKKRSDDPRESVDNVLMMFDALRRRLMQLDEVKQGAKQQHNLKAGSIMMSAELRANKNKRIGEVPGVEVGDMFYFRIEMCLVGLNSQSMSGIDYMSAKFGNEEDPVAISIVSAGVYENTEDDPDVLVYTGQGMSGKDDQKLERGNLALERSLHRGNQIRVVRSVRDLTCPTGKIYIYDGLYKIREAWVEKGKTGFNVFKHKLLREPGQPDGIAVWKKTEKWRENPSSRDHVILRDISYGAESKPVCLVNEVDDEKGPSHFNYTTKLNYRNSLSSMRKMQGCNCASVCLPGDNNCSCTHRNAGDLPYSASGILVSRMPMLYECNDSCTCSHNCRNRVVQKGSQIHFEVFKTGDRGWGLRSWDPIRAGTFICEYAGEVIDRNSIIGEDDYIFETPSSEQNLRWNYAPELLGEPSLSDSSETPKQLPIIISAKRTGNIARFMNHSCSPNVFWQPVLYDHGDEGYPHIAFFAIKHIPPMTELTYDYGQSQGNVQLGINSGCRKSKNCLCWSRKCRGSFG

SEQ ID NO: 15072 - protein, 367 aa, Triticum aestivum
  unsure (1)..(367): unsure at all Xaa locations
XRHEALERSLHRGNPIRVVRTVKDLTCSTGKIYIYDGLYQIREAWVEKGKSGFNMFKHKLLREPGQPDGIAVWKKTEKWRENPSSRDRVILHDISYGVESKPICLVNEVDDEKGPSHFTYTTKLNYMNSPSSMRKMQGCKCTSVCLPGDNNCSCTHRNAGDLPYSASGILVSRMPMLYECNDSCTCLHNCRNRVVQKGIQIHFEVFKTGDRGWGLRSWDPIRAGTFICEYAGVIVDKNALDAEDDYIFETPPSEQNLRWNYAPELLGEPSLSDLNESSKQLPIIISAKHTGNIARFMNHSCSPNVFWQPVLYDHGDEGYPHIAFFAIKHIPPMTELTYDYGQSQGNSGCRRTKSCLCWSRKCRGSFG

SEQ ID NO: 15073 - protein, 490 aa, Schizosaccharomyces pombe
MSPKQEEYEVERIVDEKLDRNGAVKLYRIRWLNYSSRSDTWEPPENLSGCSAVLAEWKRRKRRLKGSNSDSDSPHHASNPHPNSRQKHQHQTSKSVPRSQRFSRELNVKKENKKVFSSQTTKRQSRKQSTALTTNDTSIILDDSLHTNSKKLGKTRNEVKEESQKRELVSNSIKEATSPKTSSILTKPRNPSKLDSYTHLSFYEKRELFRKKLREIEGPEVTLVNEVDDEPCPSLDFQFISQYRLTQGVIPPDPNFQSGCNCSSLGGCDLNNPSRCECLDDLDEPTHFAYDAQGRVRADTGAVIYECNSFCSCSMECPNRVVQRGRTLPLEIFKTKEKGWGVRSLRFAPAGTFITCYLGEVITSAEAAKRDKNYDDDGITYLFDLDMFDDASEYTVDAQNYGDVSRFFNHSCSPNIAIYSAVRNHGFRTIYDLAFFAIKDIQPLEELTFDYAGAKDFSPVQSQKSQQNRISKLRRQCKCGSANCRGWLFG

SEQ ID NO: 15074 - protein, 299 aa, Schizosaccharomyces pombe
SKLDSYTHLSFYEKRELFRKKLREIEGPEVTLVNEVDDEPCPSLDFQFISQYRLTQGVIPPDPNFQSGCNCSSLGGCDLNNPSRCECLDDLDEPTHFAYDAQGRVRADTGAVIYECNSFCSCSMECPNRVVQRGRTLPLEIFKTKEKGWGVRSLRFAPAGTFITCYLGEVITSAEAAKRDKNYDDDGITYLFDLDMFDDASEYTVDAQNYGDVSRFFNHSCSPNIAIYSAVRNHGFRTIYDLAFFAIKDIQPLEELTFDYAGAKDFSPVQSQKSQQNRISKLRRQCKCGSANCRGWLFG

SEQ ID NO: 15075 - protein, 490 aa, Schizosaccharomyces pombe
MSPKQEEYEVERIVDEKLGRNGAVKLYRIRWLNYSSRSDTWEPPENLSGCSAVLAEWKRRKRRLKGSNSDSDSPHHASNPHPNSRQKHQHQTSKSVPRSQRFSRELNVKKENKKVFSSQTTKRQSRKQSTALTTNDTSIILDDSLHTNSKKLGKTRNEVKEESQKRELVSNSIKEATSPKTSSILTKPRNPSKLDSYTHLSFYEKRELFRKKLREIEGPEVTLVNEVDDEPCPSLDFQFISQYRLTQGVIPPDPNFQSGCNCSSLGGCDLNNPSRCECLDDLDEPTHFAYDAQGRVRADTGAVIYECNSFCSCSMECPNRVVQRGRTLPLEIFKTKEKGWGVRSLRFAPAGTFITCYLGEVITSAEAAKRDKNYDDDGITYLFDLDMFDDASEYTVDAQNYGDVSRFFNHSCSPNIAIYSAVRNHGFRTIYDLAFFGIKDIQPLEELTFDYAGAKDFSPVQSQKSQQNRISKLRRQCKCGSANCRGWLFG

SEQ ID NO: 15076 - protein, 302 aa, Neurospora crassa
IRSFATHAQLPISIVNREDDAFLNPNFRFIDHSIIGKNVPVADQSFRVGCSCASDEECMYSTCQCLDEMAPDSDEEADPYTRKKRFAYYSQGAKKGLLRDRVLQSQEPIYECHQGCACSKDCPNRVVERGRTVPLQIFRTKDRGWGVKCPVNIKRGQFVDRYLGEIITSEEADRRRAESTIARRKDVYLFALDKFSDPDSLDPLLAGQPLEVDGEYMSGPTRFINHSCDPNMAIFARVGDHADKHIHDLALFAIKDIPKGTELTFDYVNGLTGLESDAHDPSKISEMTKCLCGTAKCRGYLW

SEQ ID NO: 15077 - protein, 318 aa, Neurospora crassa
MEKAFRPHFFNHGKPDIRSFATHAQLPISIVNREDDAFLNPNFRFIDHSIIGKNVPVADQSFRVGCSCASDEECMYSTCQCLDEMAPDSDEEADPYTRKKRFAYYSQGAKKGLLRDRVLQSQEPIYECHQGCACSKDCPNRVVERGRTVPLQIFRTKDRGWGVKCPVNIKRGQFVDRYLGEIITSEEADRRRAESTIARRKDVYLFALDKFSDPDSLDPLLAGQPLEVDGEYMSGPTRFINHSCDPNMAIFARVGDHADKHIHDLALFAIKDIPKGTELTFDYVNGLTGLESDAHDPSKISEMTKCLCGTAKCRGYLW

SEQ ID NO: 15078 - protein, 747 aa, Caenorhabditis elegans
MGFTFKNTRSNSSQAAGGRSFRKRSVTSLANEQPAKRSKTEGSDSKKLNNQMKRLMAKDPKKLSFNEATLLSELLTTCCTVERKKVIPKRKGGGALRKSPVDFQNDENRNTKPIKSGRKKKDNLLEQASKKDKIAAKYRNEIFAHSIIANLEIKKILTKTSKATEKDLKLFLKAECSVRNAIKSDPELDGFYVRTCGKLINKTVLNTMADMMDNHMATTRLLWNMPRHEFPVDFHEKFVDFALNVSYTPPKKRIFVEKKLFEKSISTFTDIPGETHRTISLGNTFVYKYTERNVVDVEKYPELHALTEEAERPNNVIRCECCSSGSIKKCWNNPDCFCFQMNLKLRKEQDPKNNKLLTDFSTFDPVFIRERNHFFDTIGFACSENCACGGKCTNNITLLPEKNINKFEIYRKNEIMGFAIRTLNSIPAGTPVMEFTGELMDFDILDNIDQDYAFEIVNEAHNLHETLPNFNKRWSENFKSSLKKQLARPWFVNPKRIGNVARICCHSCQPNMAMVRVFQKGFSPAHCKLLLVTLEDIFPGVELTFDYGPGYLNELKGGCLCERIGCPNTESFGILSRATKKEVSKIDFPSSFFLNFPNWLKSKIFSSNNTMPYDIILSTRAEPELTTRFFFKGTFTCQSHRAPFIQDIQAWEEDTFKPNDHIDTWHKFEIVNSTAMTYEMHAEAHGDGLWNNFYEISFSMRHTCFSPIDISRGMKFKQSGLILKPEAFPVIDGNLYHTEDINLERYF

SEQ ID NO: 15079 - protein, 635 aa, Drosophila melanogaster
MATAEAQIGVNRNLQKQDLSNLDVSKLTPLSPEVISRQATINIGTIGHVAHGKSTVVKAISGVQTVRFKNELERNITIKLERLSEKKIKNLLTSKQQRQQYEIKQRSMLRHLAELRRHSRFRRLCTKPASSSMPASTSSVDRRTTRRSTSQTSLSPSNSSGYGSVFGCEEHDVDKIPSLNGFAKLKRRRSSCVGAPTPNSKRSKNNMGVIAKRPPKGEYVVERIECVEMDQYQPVFFVKWLGYHDSENTWESLANVADCAEMEKFVERHQQLYEIYIAKITTELEKQLEALPLMENITVAEVDAYEPLNLQIDLILLAQYRAAGSRSQREPQKIGERALKSMQIKRAQFVRRKQLADLALFEKRMNHVEKPSPPIRVENNIDLDTIDSNFMYIHDNIIGKDVPKPEAGIVGCKCTEDTEECTASTKCCARFAGELFAYERSTRRLRLRPGSAIYECNSRCSCDSSCSNRLVQHGRQVPLVLFKTANGSGWGVRAATALRKGEFVCEYIGEIITSDEANERGKAYDDNGRTYLFDLDYNTAQDSEYTIDAANYGNISHFINHSCDPNLAVFPCWIEHLNVALPHLVFFTLRPIKAGEELSFDYIRADNEDVPYENLSTAVRVECRCGADNCRKVLF

SEQ ID NO: 15080 - protein, 635 aa, Drosophila melanogaster
MATAEAQIGVNRNLQKQDLSNLDVSKLTPLSPEVISRQATINIGTIGHVAHGKSTVVKAISGVQTVRFKNELERNITIKLERLSEKKIKNLLTSKQQRQQYEIKQRSMLRHLAELRRHSRFRRLCTKPASSSMPASTSSVDRRTTRRSTSQTSLSPSNSSGYGSVFGCEEHDVDKIPSLNGFAKLKRRRSSCVGAPTPNSKRSKNNMGVIAKRPPKGEYVVERIECVEMDQYQPVFFVKWLGYHDSENTWESLANVADCAEMEKFVERHQQLYETYIAKITTELEKQLEALPLMENITVAEVDAYEPLNLQIDLILLAQYRAAGSRSQREPQKIGERALKSMQIKRAQFVRRKQLADLALFEKRMNHVEKPSPPIRVENNIDLDTIDSNFMYIHDNIIGKDVPKPEAGIVGCKCTEDTEECTASTKCCARFAGELFAYERSTRRLRLRPGSAIYECNSRCSCDSSCSNRLVQHGRQVPLVLFKTANGSGWGVRAATALRKGEFVCEYIEEIITSDEANERGKAYDDNGRTYLFDLDYNTAQDSEYTIDAANYGNISHFINHSCDPNLAVFPCWIEHLNVALPHLVFFTLRPIKAGEELSFDYIRADNEDVPYENLSTAVRVECRCGRDNCRKVLF

SEQ ID NO: 15081 - protein, 1637 aa, Drosophila melanogaster
MTDFVELMNSMSSTFNSDCATSTAEGGTLLNLNLAEDKTLKWRNLANNQFASKEKKHKDKEEEERKEARNQEEIEDIKALLADVVDAAAVKLEEEEAQNAEKVEPHTKCEIEEEGRKEMEYDQDVAKQDSEMEKKQNGKATSITVKMESNERAEKHATEIATTSTERWENESFKTEQQNKKAAEKEEEPILAATQKLEANAEPLTTTRIEVAVASPLVVSSASVKLAADATNQMRAATSAGAATLADKNVQVSPGGTRRSRRTPRPIDTPTSVTDEHVQVENKKFGKSEQYTDCSSHLERFTLDDNTAIVRLQLKSEPDKPSLTALSPEENSAPAPKRGRGRARKIRPDAEVETSEVILPCEDSLGEKKPGRKRKLPDEPIDQQQLSDLVVVKTEQEELGDAPLGDVKRMRRSVRLGNRLHADGSPWEEVKTEALHPQPSAELSFAEVTSEILPLAVLDEKTPPKKRGRKAKTPCVKLESETSCGLPFANGNKKTNSSGGCELQLPKRSKRRIKPTPKILENDELRCEFETKHIERMTQWESAAAVDGDFETPTTGGNGSNSSTSRQKSDKSDGSNFEGGPGHPAGTSAIKKRLFSKSQRDIENYGAAMLAKSKLPPCPDVEQFLNDIKASRINANRSPEERKLNKKQQRKLAKQKEKHLKHLGLQKNHRDEPSDNDSSNTDNEFFPTTRVQVGKPSVTLRVRNSVTKELPTTATLKSRRNPVVQAAKLTRRIGARAAGEVTEAARASVPISTPDAEQLHSLDTSIQADVTPIRDLDMRPSTSRVSKFICLCQKPSQYYARNAPDSSYCCAIDHIDDQKIGCCNELSSEVHNLLRPSQRVSYMILCDEHKKRLQSHNCCAGCGIFCTQGKFVLCKQQHFFHPDCAQRFILSTSYEKELGDEEDQGVKFSSPVLVLKCPHCGLDTPERTSTVTMKCQSLPVFLRTQKYKIKPARLTTSSHLTQFGTVENANTPGATARNKGGLSTAVTLSAASSPASKTNGAQRGRAGTSNSNSRHALNSINFAQLIPESVMNVVLRGHVVSASGRVTAEFTPRDMYYAVQNDDLERVAEILAADFNVLTPIREYLNGTCLHLVAHSGTLQMAYLLLCKGASSPDFVNIVDYELRTALMCAVMNEKCDMLNLFLQCGADVAIKGPDGKTSLHIAAQLGNLEATQLIVDSYRTSRNITSFLSFIDAQDEGGWTAMVWAAELGHTDIVSFLLNQDADPNICDNDNNTVLHWSTLHNDGLDTITVLLQSGADCNVQNVEGDTPLHIACRHSVTRMCIALIANGADLMIKNKAEQLPFDCIPNEESECGRTVGFNMQMRSFRPLGLRTFVVCADASNGREARPIQVVRNELAMSENEDEADSLMWPDFRYVTQCIIQQNSVQIDRRVSQMRICSCLDSCSSDRCQCNGASSQNWYTAESRLNADFNYEDPAVIFECNDVCGCNQLSCKNRVVQNGTRTPLQIVECEDQAKGWGVRALANVPKGTFVGSYTGEILTAMEADRRTDDSYYFDLDNGHCIDANYYGNVTRFFNHSCEPNVLPVRVFYEHQDYRFPKIAFFSCRDIDAGEEICFDYGEKFWRVEHRSCVGCRCLTTTCKYASQSSSTNASPTNATTAPENETGTLSSTNTEKIGHA

SEQ ID NO: 15082 - protein, 1624 aa, Drosophila melanogaster
MTDFVELMNSMSSTFNSDCATSTAEGGTLLNLNLAEDKTLKWRNLANNQFASKEKKHKDKEEEERKEARNQEEIEDIKALLADVVDAAAVKLEEEEAQNAEKVEPHTKCEIEEEGRKEMEYDQDVAKQDSEMEKKQNGKATSITVKMESNERAEKHATEIATTSTERWENESFKTEQQNKKAAEKEEEPILAATQKLEANAEPLTTTRIEVAVASPLVVSSASVKLAADATNQMRAATSAGAATLADKNVQVSPGGTRRSRRTPRPIDTPTSVTDEHVQVENKKFGKSEQYTDCSSHLERFTLDDNTAIVRLQLKSEPDKPSLTALSPEENSAPAPKRGRGRARKIRPDAEVETSEVILPCEDSLGEKKPGRKRKLPDEPIDQQQLSDLVVVKTEQEELGDAPLGDVKRMRRSVRLGNRLHADGSPWEEVKTEALHPQPSAELSFAEVTSEILPLAVLDEKTPPKKRGRKAKTPCVKLESETSCGLPFANGNKKTNSSGGCELQLPKRSKRRIKPTPKILENDELRCEFETKHIERMTQWESAAAVDGDFETPTTGGNGSNSSTSRQKSDKSDGSNFEGGPGHPAGTSAIKKRLFSKSQRDIENYGAAMLAKSKLPPCPDVEQFLNDIKASRINANRSPEERKLNKKQQRKLAKQKEKHLKHLGLQKNHRDEPSDNDSSNTDNEFFPTTRVQVGKPSVTLRVRNSVTKELPTTATLKSRRNPVVQAAKLTRRIGARAAGEVTEAARASVPISTPDAEQLHSLDTSIQADVTPIRDLDMRPSTSRVSKFICLCQKPSQYYARNAPDSSYCCAIDHIDDQKIGCCNELSSEVHNLLRPSQRVSYMILCDEHKKRLQSHNCCAGCGIFCTQGKFVLCKQQHFFHPDCAQRFILSTSYEKELGDEEDQGVKFSSPVLVLKCPHCGLDTPERTSTVTMKCQSLPVFLRTQKYKIKPARLTTSSHLTQFGTVENANTPGATARNKGGLSTAVTLSAASSPASKTNGAQRGRAGTSNSNSRHALNSINFAQLIPESVMNVVLRGHVVSASGRVTAEFTPRDMYYAVQNDDLERVAEILAADFNVLTPIREYLNGTCLHLVAHSGTLQMAYLLLCKGASSPDFVNIVDYELRTALMCAVMNEKCDMLNLFLQCGADVAIKLGNLEATQLIVDSYRTSRNITSFLSFIDAQDEGGWTAMVWAAELGHTDIVSFLLNQDADPNICDNDNNTVLHWSTLHNDGLDTITVLLQSGADCNVQNVEGDTPLHIACRHSVTRMCIALIANGADLMIKNKAEQLPFDCIPNEESECGRTVGFNMQMRSFRPLGLRTFVVCADASNGREARPIQVVRNELAMSENEDEADSLMWPDFRYVTQCIIQQNSVQIDRRVSQMRICSCLDSCSSDRCQCNGASSQNWYTAESRLNADFNYEDPAVIFECNDVCGCNQLSCKNRVVQNGTRTPLQIVECEDQAKGWGVRALANVPKGTFVGSYTGEILTAMEADRRTDDSYYFDLDNGHCIDANYYGNVTRFFNHSCEPNVLPVRVFYEHQDYRFPKIAFFSCRDIDAGEEICFDYGEKFWRVEHRSCVGCRCLTTTCKYASQSSSTNASPTNATTAPENETGTLSSTNTEKIGHA

SEQ ID NO: 15083 - protein, 917 aa, Homo sapiens
MSEADRAQKMDGESEEEQESVDTGEEEEGGDESDLSSESSIKKKFLKRKGKTDSPWIKPARKRRRRSRKKPSGALGSESYKSSAGSAEQTAPGDSTGYMEVSLDSLDLRVKGILSSQAEGLANGPDVLETDGLQEVPLCSCRMETPKSREITTLANNQCMATESVDHELGRCTNSVVKYELMRPSNKAPLLVLCEDHRGRMVKHQCCPGCGYFCTAGNFMECQPESSISHRFHKDCASRVNNASYCPHCGEESSKAKEVTIAKADTTSTVTPVPGQEKGSALEGRADTTTGSAAGPPLSEDDKLQGAASHVPEGFDPTGPAGLGRPTPGLSQGPGKETLESALIALDSEKPKKLRFHPKQLYFSARQGELQKVLLMLVDGIDPNFKMEHQNKRSPLHAAAEAGHVDICHMLVQAGANIDTCSEDQRTPLMEAAENNHLEAVKYLIKAGALVDPKDAEGSTCLHLAAKKGHYEVVQYLLSNGQMDVNCQDDGGWTPMIWATEYKHVDLVKLLLSKGSDINIRDNEENICLHWAAFSGCVDIAEILLAAKCDLHAVNIHGDSPLHIAARENRYDCVVLFLSRDSDVTLKNKEGETPLQCASLNSQVWSALQMSKALQDSAPDRPSPVERIVSRDIARGYERIPIPCVNAVDSEPCPSNYKYVSQNCVTSPMNIDRNITHLQYCVCIDDCSSSNCMCGQLSMRCWYDKDGRLLPEFNMAEPPLIFECNHACSCWRNCRNRVVQNGLRARLQLYRTRDMGWGVRSLQDIPPGTFVCEYVGELISDSEADVREEDSYLFDLDNKDGEVYCIDARFYGNVSRFINHHCEPNLVPVRVFMAHQDLRFPRIAFFSTRLIEAGEQLGFDYGERFWDIKGKLFSCRCGSPKCRHSSAALAQRQASAAQEAQEDGLPDTSSAAAADPL

SEQ ID NO: 15084 - protein, 719 aa, Homo sapiens
GTRVKHQCCPGCGYFCTAGNFMECQPESSISHRFHKDCASRVNNASYCPHCGEESSKAKEVTIAKADTTSTVTPVPGQEKGSALEGRADTTTGSAAGPPLSEDDKLQGAASHVPEGFDPTGPAGLGRPTPGLSQGPGKETLESALIALDSEKPKKLRFHPKQLYFSARQGELQKVLLMLVDGIDPNFKMEHQNKRSPLHAAAEAGHVDICHMLVQAGANIDTCSEDQRTPLMEAAENNHLEAVKYLIKAGALVDPKDAEGSTCLHLAAKKGHYEVVQYLLSNGQMDVNCQDDGGWTPMIWATEYKHVDLVKLLLSKGSDINIRDNEENICLHWAAFSGCVDIAEILLAAKCDLHAVNIHGDSPLHIAARENRYDCVVLFLSRDSDVTLKNKEGETPLQCASLNSQVWSALQMSKALQDSAPDRPSPVERIVSRDIARGYERIPIPCVNAVDSEPCPSNYKYVSQNCVTSPMNIDRNITHLQYCVCIDDCSSSNCMCGQLSMRCWYDKDGRLLPEFNMAEPPLIFECNHACSCWRNCRNRVVQNGLRARLQLYRTRDMGWGVRSLQDIPPGTFVCEYVGELISDSEADVREEDSYLFDLDNKDGEVYCIDARFYGNVSRFINHHCEPNLVPVRVFMAHQDLRFPRIAFFSTRLIEAGEQLGFDYGERFWDIKGKLFSCRCGSPKCRHSSAALAQRQASAAQEAQEDGLPDTSSAAAADPL

SEQ ID NO: 15085 - protein, 1267 aa, Homo sapiens
MAADEGSAEKQAGEAHMAADGETNGSCENSDASSHANAAKHTQDSARVNPQDGTNTLTRIAENGVSERDSEAAKQNHVTADDFVQTSVIGSNGYILNKPALQAQPLRTTSTLASSLPGHAAKTLPGGAGKGRTPSAFPQTPAAPPATLGEGSADTEDRKLPAPGADVKVHRARKTMPKSVVGLHAASKDPREVREARDHKEPKEEINKNISDFGRQQLLPPFPSLHQSLPQNQCYMATTKSQTACLPFVLAAAVSRKKKRRMGTYSLVPKKKTKVLKQRTVIEMFKSITHSTVGSKGEKDLGASSLHVNGESLEMDSDEDDSEELEEDDGHGAEQAAAFPTEDSRTSKESMSEADRAQKMDGESEEEQESVDTGEEEEGGDESDLSSESSIKKKFLKRKGKTDSPWIKPARKRRRRSRKKPSGALGSESYKSSAGSAEQTAPGDSTGYMEVSLDSLDLRVKGILSSQAEGLANGPDVLETDGLQEVPLCSCRMETPKSREITTLANNQCMATESVDHELGRCTNSVVKYGLMRPSNKAPLLVLCEDHRGRMVKHQCCPGCGYFCTAGNFMECQPESSISHRFHKDCASRVNNASYCPHCGEESSKAKEVTIAKADTTSTVTPVPGQEKGSALEGRADTTTGSAAGPPLSEDDKLQGAASHVPEGFDPTGPAGLGRPTPGLSQGPGKETLESALIALDSEKPKKLRFHPKQLYFSARQGELQKVLLMLVDGIDPNFKMEHQNKRSPLHAAAEAGHVDICHMLVQAGANIDTCSEDQRTPLMEAAENNHLEAVKYLIKAGALVDPKDAEGSTCLHLAAKKGHYEVVQYLLSNGQMDVNCQDDGGWTPMIWATEYKHVDLVKLLLSKGSDINIRDNEENICLHWAAFSGCVDIAEILLAAKCDLHAVNIHGDSPLHIAARENRYDCVVLFLSRDSDVTLKNKEGETPLQCASLNSQVWSALQMSKALQDSAPDRPSPVERIVSRDIARGYERIPIPCVNAVDSEPCPSNYKYVSQNCVTSPMNIDRNITHLQYCVCIDDCSSSNCMCGQLSMRCWYDKDGRLLPEFNMAEPPLIFECNHACSCWRNCRNRVVQNGLRARLQLYRTRDMGWGVRSLQDIPPGTFVCEYVGELISDSEADVREEDSYLFDLDNKDGEVYCIDARFYGNVSRFINHHCEPNLVPVRVFMAHQDLRFPRIAFFSTRLIEAGEQLGFDYGERFWDIKGKLFSCRCGSPKCRHSSAALAQRQASAAQEAQEDGLPDTSSAAAADPL

SEQ ID NO: 15086 - protein, 1176 aa, Homo sapiens
MAAAAGAAAAAAAEGEAPAEMGALLLEKETRGATERVHGSLGDTPRSEETLPKANPDSLEPAGPSSPASVTVTVGDEGADTPVGATPLIGDESENLEGDGDLRGGRILLGHATKSFPSSPSKGGSCPSRAKMSMTGAGKSPPSVQSLAMRLLSMPGAQGAAAAGSEPPPATTSPEGQPKVHRARKTMSKPGNGQPPVPEKRPPEIQHFRMSDDVHSLGKVTSDLAKRRKLNSGGGLSEELGSARRSGEVTLTKGDPGSLEEWETVVGDDFSLYYDSYSVDERVDSDSKSEVEALTEQLSEEEEEEEEEEEEEEEEEEEEEEEEDEESGNQSDRSGSSGRRKAKKKWRKDSPWVKPSRKRRKREPPRAKEPRGVSNDTSSLETERGFEELPLCSCRMEAPKIDRISERAGHKCMATESVDGELSGCNAAILKRETMRPSSRVALMVLCETHRARMVKHHCCPGCGYFCTAGTFLECHPDFRVAHRFHKACVSQLNGMVFCPHCGEDASEAQEVTIPRGDGVTPPAGTAAPAPPPLSQDVPGRADTSQPSARMRGHGEPRRPPCDPLADTIDSSGPSLTLPNGGCLSAVGLPLGPGREALEKALVIQESERRKKLRFHPRQLYLSVKQGELQKVILMLLDNLDPNFQSDQQSKRTPLHAAAQKGSVEICHVLLQAGANINAVDKQQRTPLMEAVVNNHLEVARYMVQRGGCVYSKEEDGSTCLHHAAKIGNLEMVSLLLSTGQVDVNAQDSGGWTPIIWAAEHKHIEVIRMLLTRGADVTLTDNEENICLHWASFTGSAAIAEVLLNARCDLHAVNYHGDTPLHIAARESYHDCVLLFLSRGANPELRNKEGDTAWDLTPERSDVWFALQLNRKLRLGVGNRAIRTEKIICRDVARGYENVPIPCVNGVDGEPCPEDYKYISENCETSTMNIDRNITHLQHCTCVDDCSSSNCLCGQLSIRCWYDKDGRLLQEFNKIEPPLIFECNQACSCWRNCKNRVVQSGIKVRLQLYRTAKMGWGVRALQTIPQGTFICEYVGELISDAEADVREDDSYLFDLDNKDGEVYCIDARYYGNISRFINHLCDPNIIPVRVFMLHQDLRFPRIAFFSSRDIRTGEELGFDYGDRFWDIKSKYFTCQCGSEKCKHSAEAIALEQSRLARLDPHPELLPELGSLPPVNT

SEQ ID NO: 15087 - protein, 1210 aa, Homo sapiens
MAAAAGAAAAAAAEGEAPAEMGALLLEKETRGATERVHGSLGDTPRSEETLPKANPDSLEPAGPSSPASVTVTVGDEGADTPVGATPLIGDESENLEGDGDLRGGRILLGHATKSFPSSPSKGGSCPSRAKMSMTGAGKSPPSVQSLAMRLLSMPGAQGAAAAGSEPPPATTSPEGQPKVHRARKTMSKPGNGQPPVPEKRPPEIQHFRMSDDVHSLGKVTSDLAKRRKLNSGGGLSEELGSARRSGEVTLTKGDPGSLEEWETVVGDDFSLYYDSYSVDERVDSDSKSEVEALTEQLSEEEEEEEEEEEEEEEEEEEEEEEEDEESGNQSDRSGSSGRRKAKKKWRKDSPWVKPSRKRRKREPPRAKEPRGVNGVGSSGPSEYMEVPLGSLELPSEGTLSPNHAGVSNDTSSLETERGFEELPLCSCRMEAPKIDRISERAGHKCMATESVDGELSGCNAAILKRETMRPSSRVALMVLCETHRARMVKHHCCPGCGYFCTAGTFLECHPDFRVAHRFHKACVSQLNGMVFCPHCGEDASEAQEVTIPRGDGVTPPAGTAAPAPPPLSQDVPGRADTSQPSARMRGHGEPRRPPCDPLADTIDSSGPSLTLPNGGCLSAVGLPLGPGREALEKALVIQESERRKKLRFHPRQLYLSVKQGELQKVILMLLDNLDPNFQSDQQSKRTPLHAAAQKGSVEICHVLLQAGANINAVDKQQRTPLMEAVVNNHLEVARYMVQRGGCVYSKEEDGSTCLHHAAKIGNLEMVSLLLSTGQVDVNAQDSGGWTPIIWAAEHKHIEVIRMLLTRGADVTLTDNEENICLHWASFTGSAAIAEVLLNARCDLHAVNYHGDTPLHIAARESYHDCVLLFLSRGANPELRNKEGDTAWDLTPERSDVWFALQLNRKLRLGVGNRAIRTEKIICRDVARGYENVPIPCVNGVDGEPCPEDYKYISENCETSTMNIDRNITHLQHCTCVDDCSSSNCLCGQLSIRCWYDKDGRLLQEFNKIEPPLIFECNQACSCWRNCKNRVVQSGIKVRLQLYRTAKMGWGVRALQTIPQGTFICEYVGELISDAEADVREDDSYLFDLDNKDGEVYCIDARYYGNISRFINHLCDPNIIPVRVFMLHQDLRFPRIAFFSSRDIRTGEELGFDYGDRFWDIKSKYFTCQCGSEKCKHSAEAIALEQSRLARLDPHPELLPELGSLPPVNT

SEQ ID NO: 15088 - protein, 1210 aa, Homo sapiens
MAAAAGAAAAAAAEGEAPAEMGALLLEKETRGATERVHGSLGDTPRSEETLPKANPDSLEPAGPSSPASVTVTVGDEGADTPVGATPLIGDESENLEGDGDLRGGRILLGHATKSFPSSPSKGGSCPSRAKMSMTGAGKSPPSVQSLAMRLLSMPGAQGAAAAGSEPPPATTSPEGQSKVHRARKTMSKPGNGQPPVPEKRPPEIQHFRMSDDVHSLGKVTSDLAKRRKLNSGGGLSEELGSARRSGEVTLTKGDPGSLEEWETVVGDDFSLYYDSYSVDERVDSDSKSEVEALTEQLSEEEEEEEEEEEEEEEEEEEEEEEEDEESGNQSDRSGSSGRRKAKKKWRKDSPWVKPSRKRRKREPPRAKEPRGVNGVGSSGPSEYMEVPLGSLELPSEGTLSPNHAGVSNDTSSLETERGFEELPLCSCRMEAPKIDRISERAGHKCMATESVDGELSGCNAAILKRETMRPSSRVALMVLCETHRARMVKHHCCPGCGYFCTAGTFLECHPDFRVAHRFHKACVSQLNGMVFCPHCGEDASEAQEVTIPRGDGVTPPAGTAAPAPPPLSQDVPGRADTSQPSARMRGHGEPRRPPCDPLADTIDSSGPSLTLPNGGCLSAVGLPLGPGREALEKALVIQESERRKKLRFHPRQLYLSVKQGELQKVILMLLDNLDPNFQSDQQSKRTPLHAAAQKGSVEICHVLLQAGANINAVDKQQRTPLMEAVVNNHLEVARYMVQRGGCVYSKEEDGSTCLHHAAKIGNLEMVSLLLSTGQVDVNAQDSGGWTPIIWAAEHKHIEVIRMLLTRGADVTLTDNEENICLHWASFTGSAAIAEVLLNARCDLHAVNYHGDTPLHIAARESYHDCVLLFLSRGANPELRNKEGDTAWDLTPERSDVWFALQLNRKLRLGVGNRAIRTEKIICRDVARGYENVPIPCVNGVDGEPCPEDYKYISENCETSTMNIDRNITHLQHCTCVDDCSSSNRLCGQLSIRCWYDKDGRLLQEFNKIEPPLIFECNQACSCWRNCKNRVVQSGIKVRLQLYRTAKMGWGVRALQTIPQGTFICEYVGELISDAEADVREDDSYLFDLDNKDGEVYCIDARYYGNISRFINHLCDPNIIPVRVFMLHQDLRFPRIAFFSSRDIRTGEELGFDYGDRFWDIKSKYFTCQCGSEKCKHSAEAIALEQSRLARLDPHPELLPELGSLPPVNT

SEQ ID NO: 15089 - protein, 1001 aa, Homo sapiens
MSDDVHSLGKVTSDLAKRRKLNSGGGLSEELGSARRSGEVTLTKGDPGSLEEWETVVGDDFSLYYDSYSVDERVDSDSKSEVEALTEQLSEEEEEEEEEEEEEEEEEEEEEEEEDEESGNQSDRSGSSGRRKAKKKWRKDSPWVKPSRKRRKREPPRAKEPRGVNGVGSSGPSEYMEVPLGSLELPSEGTLSPNHAGVSNDTSSLETERGFEELPLCSCRMEAPKIDRISERAGHKCMATESVDGELSGCNAAILKRETMRPSSRVALMVLCETHRARMVKHHCCPGCGYFCTAGTFLECHPDFRVAHRFHKACVSQLNGMVFCPHCGEDASEAQEVTIPRGDGVTPPAGTAAPAPPPLSQDVPGRADTSQPSARMRGHGEPRRPPCDPLADTIDSSGPSLTLPNGGCLSAVGLPLGPGREALEKALVIQESERRKKLRFHPRQLYLSVKQGELQKVILMLLDNLDPNFQSDQQSKRTPLHAAAQKGSVEICHVLLQAGANINAVDKQQRTPLMEAVVNNHLEVARYMVQRGGCVYSKEEDGSTCLHHAAKIGNLEMVSLLLSTGQVDVNAQDSGGWTPIIWAAEHKHIEVIRMLLTRGADVTLTDNEENICLHWASFTGSAAIAEVLLNARCDLHAVNYHGDTPLHIAARESYHDCVLLFLSRGANPELRNKEGDTAWDLTPERSDVWFALQLNRKLRLGVGNRAIRTEKIICRDVARGYENVPIPCVNGVDGEPCPEDYKYISENCETSTMNIDRNITHLQHCTCVDDCSSSNCLCGQLSIRCWYDKDGRLLQEFNKIEPPLIFECNQACSCWRNCKNRVVQSGIKVRLQLYRTAKMGWGVRALQTIPQGTFICEYVGELISDAEADVREDDSYLFDLDNKDGEVYCIDARYYGNISRFINHLCDPNIIPVRVFMLHQDLRFPRIAFFSSRDIRTGEELGFDYGDRFWDIKSKYFTCQCGSEKCKHSAEAIALEQSRLARLDPHPELLPELGSLPPVNT

SEQ ID NO: 15090 - protein, 1001 aa, Homo sapiens
MSDDVHSLGKVTSDLAKRRKLNSGGGLSEELGSARRSGEVTLTKGDPGSLEEWETVVGDDFSLYYDSYSVDERVDSDSKSEVEALTEQLSEEEEEEEEEEEEEEEEEEEEEEEEDEESGNQSDRSGSSGRRKAKKKWRKDSPWVKPSRKRRKREPPRAKEPRGVNGVGSSGPSEYMEVPLGSLELPSEGTLSPNHAGVSNDTSSLETERGFEELPLCSCRMEAPKIDRISERAGHKCMATESVDGELSGCNAAILKRETMRPSSRVALMVLCETHRARMVKHHCCPGCGYFCTAGTFLECHPDFRVAHRFHKACVSQLNGMVFCPHCGEDASEAQEVTIPRGDGVTPPAGTAAPAPPPLSQDVPGRADTSQPSARMRGHGEPRRPPCDPLADTIDSSGPSLTLPNGGCLSAVGLPLGPGREALEKALVIQESERRKKLRFHPRQLYLSVKQGELQKVILMLLDNLDPNFQSDQQSKRTPLHAAAQKGSVEICHVLLQAGANINAVDKQQRTPLMEAVVNNHLEVARYMVQRGGCVYSKEEDGSTCLHHAAKIGNLEMVSLLLSTGQVDVNAQDSGGWTPIIWAAEHKHIEVIRMLLTRGADVTLTDNEENICLHWASFTGSAAIAEVLLNARCDLHAVNYHGDTPLHIAARESYHDCVLLFLSRGANPELRNKEGDTAWDLTPERSDVWFALQLNRKLRLGVGNRAIRTEKIICRDVARGYENVPIPCVNGVDGEPCPEDYKYISENCETSTMNIDRNITHLQHCTCVDDCSSSNCLCGQLSIRRWYDKDGRLLQEFNKIEPPLIFECNQACSCWRNCKNRVVQSGIKVRLQLYRTAKMGWGVRALQTIPQGTFICEYVGELISDAEADVREDDSYLFDLDNKDGEVYCIDARYYGNISRFINHLCDPNIIPVRVFMLHQDLRFPRIAFFSSRDIRTGEELGFDYGDRFWDIKSKYFTCQCGSEKCKHSAEAIALEQSRLARLDPHPELLPELGSLPPVNT

SEQ ID NO: 15091 - protein, 671 aa, Homo sapiens
MAEFKEKPEAPTEQLDVACGQENLPVGAWPPGAAPAPFQYTPDHVVGPGADIDPTQITFPGCICVKTPCLPGTCSCLRHGENYDDNSCLRDIGSGGKYAEPVFECNVLCRCSDHCRNRVVQKGLQFHFQVFKTHKKGWGLRTLEFIPKGRFVCEYAGEVLGFSEVQRRIHLQTKSDSNYIIAIREHVYNGQVMETFVDPTYIGNIGRFLNHSCEPNLLMIPVRIDSMVPKLALFAAKDIVPEEELSYDYSGRYLNLTVSASKERLDHGKLRKPCYCGAKSCTAFLPFDSSLYCPVEKSNISCGNEKEPSMCGSAPSVFPSCKRLTLETMKMMLDKKQIRAIFLFEFKMGRKAAETTRNINNAFGPGTANERTVQWWFKKFCKGDESLEDEERSGRPSEVDNDQLRAIIEADPLTTTREVAEELNVNHSTVVRHLKQIEKVKKLDKWVPHELTENQKNRRFEVSSSLILRNHNEPFLDRIVTCDEKWILYDNRRRSAQWLDQEEAPKHFPKPILHPKKVMVTIWWSAAGLIHYSFLNPGETITSEKYAQEIDEMNQKLQRLQLALVNRKGPILLHDNARPHVAQPTLQKLNELGYEVLPHPPYSPDLLPTNYHVFKHLNNFLQGKRFHNQQDAENAFQEFVESQSTDFYATGINQLISRWQKCVDCNGSYFD

SEQ ID NO: 15092 - protein, 352 aa, Homo sapiens
MAEFKEKPEAPTEQLDVACGQENLPVGAWPPGAAPAPFQYTPDHVVGPGADIDPTQITFPGCICVKTPCLPGTCSCLRHGENYDDNSCLRDIGSGGKYAEPVFECNVLCRCSDHCRNRVVQKGLQFHFQVFKTHKKGWGLRTLEFIPKGRFVCEYAGEVLGFSEVQRRIHLQTKSDSNYIIAIREHVYNGQVMETFVDPTYIGNIGRFLNHSCEPNLLMIPVRIDSMVPKLALFAAKDIVPEEELSYDYSGRYLNLTVSEDKERLDHGKLRKPCYCGAKSCTAFLPFDSSLYCPVEKSNISCGNEKEPSMCGSAPSVFPSCKRLTLEVSLFSDKQLAPPYSGRQWLASFTSA

SEQ ID NO: 15093 - protein, 671 aa, Homo sapiens [sequence omitted]

SEQ ID NO: 15094 - protein, 203 aa, Homo sapiens
MAEPPLIFECNHACSCWRNCRNRVVQNGLRARLQLYRTRDMGWGVRSLQDIPPGTFVCEYVGELISDSEADVREEDSYLFDLDNKDGEVYCIDARFYGNVSRFINHHCEPNLVPVRVFMAHQDLRFPRIAFFSTRLIEAGEQLGFDYGERFWDIKGKLFSCRCGSPKCRHSSAALAQRQASAAQEAQEDGLPDTSSAAAADPL

SEQ ID NO: 15095 - protein, 412 aa, Homo sapiens
MAENLKGCSVCCKSSWNQLQDLCRLAKLSCPALGISKRNLYDFEVEYLCDYKKIREQEYYLVKWRGYPDSESTWEPRQNLKCVRILKQFHKDLERELLRRHHRSKTPRHLDPSLANYLVQKAKQRRALRRWEQELNAKRSHLGRITVENEVDLDGPPRAFVYINEYRVGEGITLNQVAVGCECQDCLWAPTGGCCPGASLHKFAYNDQGQVRLRAGLPIYECNSRCRCGYDCPNRVVQKGIRYDLCIFRTDDGRGWGVRTLEKIRKNSFVMEYVGEIITSEEAERRGQIYDRQGATYLFDLDYVEDVYTVDAAYYGNISHFVNHSCDPNLQVYNVFIDNLDERLPRIAFFATRTIRAGEELTFDYNMQVDPVDMESTRMDSNFGLAGLPGSPKKRVRIECKCGTESCRKYLF

SEQ ID NO: 15096 - protein, 803 aa, Homo sapiens
MSEADRAQKMDGESEEEQESVDTGEEEEGGDESDLSSESSIKKKFLKRKGKTDSPWIKPARKRRRRSRKKPSGALGSESYKSSAGSAEQTAPGDSTGYMEVSLDSLDLRVKGILSSQAEGLANGPDVLETDGLQEVPLCSCRMETPKSREITTLANNQCMATESVDHELGRCTNSVVKYELMRPSNKAPLLVLCEDHRGRMVKHQCCPGCGYFCTAGNFMECQPESSISHRFHKDCASRVNNASYCPHCGEESSKAKEVTIAKADTTSTVTPVPGQEKGSALEGRADTTTGSAAGPPLSEDDKLQGAASHVPEGFDPTGPAGLGRPTPGLSQGPGKETLESALIALDSEKPKKLRFHPKQLYFSARQGELQKVLLMLVDGIDPNFKMEHQNKRSPLHAAAEAGHVDICHMLVQAGANIDTCSEDQRTPLMEAAENNHLEAVKYLIKAGALVDPKDAEGSTCLHLAAKKGHYEVVQYLLSNGQMDVNCQDDGGWTPMIWATEYKHVDLVKLLLSKGSDINIRDNEENICLHWAAFSGCVDIAEILLAAKCDLHAVNIHGDSPLHIAARENRYDCVVLFLSRDSDVTLKNKEGETPLQCASLNSQVWSALQMSKALQDSAPDRPSPVERIVSRDIARGYERIPIPCVNAVDSEPCPSNYKYVSQNCVTSPMNIDRNITHLQYCVCIDDCSSSNCMCGQLSMRCWYDKDGRLLPEFNMAEPPLIFECNHACSCWRNCRNRVVQNGLRARLQLYRTRDMGWGVRSLQDIPPGTFVCEYVGELISDSEADVREEDSYLFDLDNKISSA

SEQ ID NO: 15097 - protein, 315 aa, Homo sapiens
DKHNYLSQVKKGKAITPKDNNKTLKPAIAEYIVKKAKQRIALQRWQDELNRRKNHKGMIFVENTVDLEGPPSDFYYINEYKPAPGISLVNEATFGCSCTDCFFQKCCPAEAGVLLAYNKNQQIKIPPGTPIYECNSRCQCGPDCPNRIVQKGTQYSLCIFRTSNGRGWGVKTLVKIKRMSFVMEYVGEVITSEEAERRGQFYDNKGITYLFDLDYESDEFTVDAARYGNVSHFVNHSCDPNLQVFNVFIDNLDTRLPRIALFSTRTINAGEELTFDYQMKGSGDISSDSIDHSPAKKRVRTVCKCGAVTCRGYLN

SEQ ID NO: 15098 - protein, 410 aa, Homo sapiens
MAAVGAEARGAWCVPCLVSLDTLQELCRKEKLTCKSIGITKRNLNNYEVEYLCDYKVVKDMEYYLVKWKGWPDSTNTWEPLQNLKCPLLLQQFSNDKHNYLSQVKKGKAITPKDNNKTLKPAIAEYIVKKAKQRIALQRWQDELNRRKNHKGMIFVENTVDLEGPPSDFYYINEYKPAPGISLVNEATFGCSCTDCFFQKCCPAEAGVLLAYNKNQQIKIPPGTPIYECNSRCQCGPDCPNRIVQKGTQYSLCIFRTSNGRGWGVKTLVKIKRMSFVMEYVGEVITSEEAERRGQFYDNKGITYLFDLDYESDEFTVDAARYGNVSHFVNHSCDPNLQVFNVFIDNLDTRLPRIALFSTRTINAGEELTFDYQMKGSGDISSDSIDHSPAKKRVRTVCKCGAVTCRGYLN

SEQ ID NO: 15099 - protein, 350 aa, Homo sapiens
MEYYLVKWKGWPDSTNTWEPLQNLKCPLLLQQFSNDKHNYLSQVKKGKAITPKDNNKTLKPAIAEYIVKKAKQRIALQRWQDELNRRKNHKGMIFVENTVDLEGPPSDFYYINEYKPAPGISLVNEATFGCSCTDCFFQKCCPAEAGVLLAYNKNQQIKIPPGTPIYECNSRCQCGPDCPNRIVQKGTQYSLCIFRTSNGRGWGVKTLVKIKRMSFVMEYVGEVITSEEAERRGQFYDNKGITYLFDLDYESDEFTVDAARYGNVSHFVNHSCDPNLQVFNVFIDNLDTRLPRIALFSTRTINAGEELTFDYQMKGSGDISSDSIDHSPAKKRVRTVCKCGAVTCRGYLN

SEQ ID NO: 15100 - protein, 707 aa, Homo sapiens [sequence omitted]

SEQ ID NO: 15101 - protein, 719 aa, Homo sapiens
MGEKNGDAKTFWMELEDDGKVDFIFEQVQNVLQSLKQKIKDGSATNKEYIQAMILVNEATIINSSTSIKGASQKEVNAQSSDPMPVTQKEQENKSNAFPSTSCENSFPEDCTFLTTGNKEILSLEDKVVDFREKDSSSNLSYQSHDCSGACLMKMPLNLKGENPLQLPIKCHFQRRHAKTNSHSSALHVSYKTPCGRSLRNVEEVFRYLLETECNFLFTDNFSFNTYVQLARNYPKQKEVVSDVDISNGVESVPISFCNEIDSRKLPQFKYRKTVWPRAYNLTNFSSMFTDSCDCSEGCIDITKCACLQLTARNAKTSPLSSDKITTGYKYKRLQRQIPTGIYECSLLCKCNRQLCQNRVVQHGPQVRLQVFKTEQKGWGVRCLDDIDRGTFVCIYSGRLLSRANTEKSYGIDENGRDENTMKNIFSKKRKLEVACSDCEVEVLPLGLETHPRTAKTEKCPPKFSNNPKELTMETKYDNISRIQYHSVIRDPESKTAIFQHNGKKMEFVSSESVTPEDNDGFKPPREHLNSKTKGAQKDSSSNHVDEFEDNLLIESDVIDITKYREETPPRSRCNQATTLDNQNIKKAIEVQIQKPQEGRSTACQRQQVFCDEELLSETKNTSSDSLTKFNKGNVFLLDATKEGNVGRFLNHSCCPNLLVQNVFVETHNRNFPLVAFFTNRYVKARTELTWDYGYEAGTVPEKEIFCQCGVNKCRKKIL

SEQ ID NO: 15102 - protein, 921 aa, Mus musculus
MPPKAPRRAAAAEPPPPPPPPPREDDPAQDSGPEELPLARLEFEEIEEPEFIALCQKLKVPDHVRERAWLTWEKVSSVDGILEGYIQKKKELWGICIFIAAVDLDEMPFTFTELQKSIETSVYKFFDLLKEIDTSTKVDNAMSRLLKKYNVLCALYSKLERTCELIYLTQPSSALSTEINSMLVLKISWITFLLAKGEVLQMEDDLVISFQLMLCVVDYFIKFSPPALLREPYKTAAIPINGSPRTPRRGQNRSARIAKQLENDTRIIEVLCKEHECNIDEVKNVYFKNFIPFINSLGIVSSNGLPEVESLSKRYEEVYLKNKDLDARLFLDHDKTLQTDPIDSFETERTPRKNNPDEEANVVTPHTPVRTVMNTIQQLMVILNSASDQPSENLISYFNNCTVNPKENILKRVKDVGHIFKEKFANAVGQGCVDIGVQRYKLGVRLYYRVMESMLKSEEERLSIQNFSKLLNDNIFHMSLLACALEVVMATYSRSTLQHLDSGTDLSFPWILNVLNLKAFDFYKVIESFIKVEANLTREMIKHLERCEHRIMESLAWLSDSPLFDLIKQSKDGEGPDNLEPACPLSLPLQGNHTAADMYLSPLRSPKKRTSTTRVNSAANTETQAASAFHTQKPLKSTSLALFYKKVYRLAYLRLNTLCARLLSDHPELEHIIWTLFQHTLQNEYELMRDRHLDQIMMCSMYGICKVKNIDLKFKIIVTAYKDLPHAAQETFKRVLIREEEFDSIIVFYNSVFMQRLKTNILQYASTRPPTLSPIPHIPRSPYKFSSSPLRIPGGNIYISPLKSPYKISEGLPTPTKMTPRSRILVSIGESFGTSEKFQKINQMVCNSDRVLKRSAEGGNPPKPLKNVRFDIEGADEADGSKHLPAESKFQQKLAEMTSTRTRMQKQRMNESKDVSNKEEK

SEQ ID NO: 15103 - protein, 815 aa, Rattus norvegicus
MPFTFTELQKSIETSVYKFFDLLKEIDTSTKVDNAVSRLLKKYNVLCALYSKLERTCGLIYLTQPSSGLSTEINSMLVLKVSWITFLLAKGEVVQMEDDLVISFQLMLCVLDYFIKLSPPALLREPYKTAATPINGSPRTPRRGQNRSARIAKQLESDTRTIEVLCKEHECNVDEVKNVYFKNFIPFISSLGIVSSNGLPELESLSKRYEEVYLKSKDLDARLFLDHDKTLQTDTIDSFETERTPRKSNPDEEANMVTPHTPVRTVMNTIQQLMVILNSASDQPSENLISYFSNCTVNPKENILKRVKDVGHIFKEKFASAVGQGCIDIGAQRYKLGVRLYYRVMESMLKSEEERLSIQNFSKLLNDNIFHMSLLACALEVVMATYSRSMLQNLDSGTDLSFPWILNVLNLKAFDFYKVIESFIKVEANLTREMIKHLERCEHRIMESLAWLSDSPLFDLIKQSKDGEGPDHLESACSLSLPLQSNHTAADMYLSPIRSPKKRTSTTRVNSAANTETQAASAFHTQKPLKSTSLSLFYKKVYRLAYLRLNTLCARLLSDHPELEHIIWTLFQHTLENEYELMKDRHLDQIMMCSMYGICKVKNIDLKFKIIVTAYKDLPHAAQETFKRVLIREEEFDSIIVFYNSVFMQRLKTNILQYASTRPPTLSPIPHIPRSPYKFSSSPLRIPGGNIYISPLKSPYKISEGLPTPTKMTPRSRILVSIGESFGTSEKFQKINQMVCNSDRVLKRSAEGGNPPKPLKKLRFDIEGSDEADGSKHLPAESKFQQKLAEMTSTRTRMQKQKLNDSMEISNKEEK

SEQ ID NO: 15104 - protein, 899 aa, Rattus norvegicus
PEDDPAQDSDPEELPLIRLEFEKIEEPEFIALCQKLKVPDHVRERAWLTWEKVSSVDGILEGYIQKKKELWGICIFIAAVDLDEMPFTFTELQKSIETSVYKFFDLLKEIDTSTKVDNAVSRLLKKYNVLCALYSKLERTCGLIYLTQPSSGLSTEINSMLVLKVSWITFLLAKGEVVQMEDDLVISFQLMLCVLDYFIKLSPPALLREPYKTAATPINGSPRTPRRGQNRSARIAKQLESDTRTIEVLCKEHECNVDEVKNVYFKNFIPFISSLGIVSSNGLPELESLSKRYEEVYLKSKDLDARLFLDHDKTLQTDTIDSFETERTPRKSNPDEEANMVTPHTPVRTVMNTIQQLMVILNSASDQPSENLISYFSNCTVNPKENILKRVKDVGHIFKEKFASAVGQGCIDIGAQRYKLGVRLYYRVMESMLKSEEERLSIQNFSKLLNDNIFHMSLLACALEVVMATYSRSMLQNLDSGTDLSFPWILNVLNLKAFDFYKVIESFIKVEANLTREMIKHLERCEHRIMESLAWLSDSPLFDLIKQSKDGEGPDHLESACSLSLPLQSNHTAADMYLSPIRSPKKRTSTTRVNSAANTETQAASAFHTQKPLKSTSLSLFYKKVYRLAYLRLNTLCARLLSDHPEPEHIIWTLFQHTLENEYELMKDRHLDQIMMCSMYGICKVKNIDLKFKIIVTAYKDLPHAAQETFKRVLIREEEFDSIIVFYNSVFMQRLKTNILQYASTRPPTLSPIPHIPRSPYKFSSSPLRIPGGNIYMSPLKSPYKISEGLPTPTKMTPRSRILVSIGESFGTSEKFQKINQMVCNSDRVLKRSAEGGNPPKPLKKLRFDIEGSDEADGSKHLPAESKFQQKLAEMTSTRTRMQKQKLNDSMEISNKEEK

SEQ ID NO: 15105 - protein, 1209 aa, Chlamydomonas reinhardtii
MSTTHPPERGLVALIKGLTIGNVPALQPDVLELYAELKGAYEAQERAAPREYAGDQDEDVKQACKQASLLFVARVLSAAQKKEKDGSETQPSNLGLSISRIVAVAGINLLDFFREVHVVVSELSAYFESRGSSSKQFSQQALLKENSETVVVMGLLAKKYKDNFNTFLHQLDFYKQVVLRLGWSAFLVLRVKLLSAFPDVVSCVELLPCIFAILASHAPRLPDCLTHITREDRGKFLLKSMADTCKADYGRVQARMPSVEALLTQVFTSAVPEWRTAVAEAKAKALSDASGPAAVGGVDLVASPVLEGLVTDTDRMNRVVAALEREYEQHYSRGATELDEREFLSTDFTKFASPRFSPGHMHSTMAKLRSGSMPLRSGGPLGPGLHTATPAHPGPQQLHLVPLGLHSPLPMMHLNAGPGVPGTPISEAMGASAWLRGVTSNMVAEPSPTLQRFLAALPINSNSSGPTPVQQLMKRVRDLVASVIPDEAAPSLLGPFPLLNTSLGVERRIEATKLYCHSLDTILQNEQRTNGLPAALALLGSAKFQRGLIACCIEVVAACYRMVSCAFPNVLDALRIKAFDMANIIGTFVKSIATLPRELKRHLFLIEEKILECLAWEPGSSLYHLIVNVHTENEAAAAAAAAAMQEAAATAACSAASGDDSQHDGAGSRAGLSSSSGGAGAAAAAEGGAGGGTEQPGASSSHNTEQSGGAPPMETAEGGAPGAATSAPPSTTSAAPAEPAPPAAASPAAPAASHAPPPSPKRSQGVAFSGMMSPAKKARGTDGGAHSTQSYIESLPNAVGFPPAAGAAQGQAGLLFEFLRKVLKLTSFRLALLCENFDFSPLEGPEVNSKVYEAIEHALYKQTHLFYNRHIDQIMLSTLYGYCKVHKLSQVSFREIIAQYRKQPQAQQSIFRSVVIDQVLPTLQIQSRADIIGFYNAVFVPAMRNFLLKSESNGSGASGPGLGGDSKHAAAGNSGNAVGAAAGAAPAQGVGATSAMPPGLPPLPPRASQSPRGPKLPLLGAIAAAPRMLGRSATGNARGGGERELGMPLLHPLLPTGSSTGGGALSPTKGSEGSGHPTPTGPVPVSRSSNGGRGGSGGRGGGRGSAEHKIPEGLAALLQALDSQKAAEENTAEEEEEEEEVDADEEQPQARVTRSGRTARDRSTGRERRGRHTEARDDMDEASMDAEFSQQTVVTGRRQRTPNRRYGAD

SEQ ID NO: 15106 - protein, 597 aa, Physcomitrella patens
MNPDGVTYFEGLMEVEQISSNLVILEEDYDGWYRSRGELDERMFINGEDSLIGAVSSSSTTSVCGVKRKRDAVTSAGQGRAVSSGASPSSPCGSPESSPAVMGGVAGGSTCKPPPTPVSITMTTAKWLRTVIAPLSAEPSPELERYLRVFERNIASEMKVRANVILGGIFEARKWRGAGEAGTSDSMWGDQRRLEALKLYYKVLGAMCTAESHRLRSEHLPFLPNERFHRCMLACSAELVLASHKTVTMTFPAVLEPAGITAFDLSKVIEGFVRHEETLPRELKRHLNSIEERLLESMAWEKGSSMFNCLAIAKANLAPEINRLKLMAEPMPALDTSKAQQRSPVDTADGRIGGSKVDDPAGESKGGAASPPRQGSMTAVKGNAGATGGSAEQGESASFMSPARGPSAFTAFSSPQKSRAMPPLLLAFASPQRPNPQAGGETCAETCINVFFQKVLKLAAVRIRNLCERLQQSQQVVERVNRALHHALNHETGLFFNRHIDQIILCCVYGICKVSKVNVTFRDIIYHYRKQPQCKPYVFRNVLLDGSVVWRSGKAGQETGDIIRFYNEVFVPSTKSFLLQVGSSAGVAVPKQRWCSL

SEQ ID NO: 15107 - protein, 926 aa, Oryza sativa
  unsure (1)..(926): unsure at all Xaa locations
DAEKLCFAFVLYCVSKLKETKAGSSGVRLWEILKGCKLKYDDFFKESQRLASRIDQVLGSRYGSDWEARLEVGSRQANLPTISQYPRFYCKAFNELFLSPSTDQEPGSTTNIPDYIRFGWLLFLILRSKSPELFKDLVSCIHGLVAILAILLIHVPAKFRSFTIEGSSHLIKQTEKGVDLLPSLCHNYHTSEDRLKEMMGKSYKVIEVFFSRKAINASEFKTVNLDKIDTDGLMYFKDLVDDEIFQSNLEKLEKLSSTTGCQGELDLEMFLTSNDYVLNAENSSGSSANFGCSKRVFETLASPTKTIKNMLAAPSSPSSPANGGSIKIVQMTPVTSAMTTAKWLRDVISSLPDKRSSKLEEFLSSCDMDLTSDVVKRVSIILEAIFPTKSXXDRGTSIGLNCANAFDIPWAEARKMEASKLYYRVLEAICRAESQNNNVNHLTPLLSNERFHRCLIACSAELVLATHKTVIMMFPAVLESTGLTAFDLSKIIENFVRHEETLPRELKRHLNSLEEQLLESMSWEKGSSLYNSLVVARPSLSTEINSLGLLAEPMPSLDGIVARQSIHPDGLPPTPSKRRPSAGPDGNCYPQSPKRLCTESRNSLVEHNSQTPPPKQSQTGLSILKAKYHPLQATFASPTVSNPVSGNEKCAVVGVQIFFSKILKLAAIRIRNLCERLRHEELTVSVYNIFKQILDQQTALFFNRHVDQIILCCLYGVAKVSQLSLTFKEIVNNYKREPQCKPEVFRSIFVGSTNRNGGCGSRLVDIIVFYNQVFVPTVKPLLVALMPSSTRPEDKRNTNSQIPGSTKSSPFSNLPDMSPKKVSSSHNVYVSPLRQTKMDALLSPSSRSFYACIGESTQAFQSPSKDLAAINSRLNYPTRRINTRINFDMVSDSVVAGSLGQPNGGSASSDPAAAFSPLSKKSKTDS

SEQ ID NO: 15108 - protein, 473 aa, Oryza sativa
  unsure (1)..(473): unsure at all Xaa locations
MEASKLYYRVLEAICRAESQNNNVNNLTPLLSNERFHRCLIACSAELVLATHKTVIMMFPAVLESTGLTAFDLSKIIENFVRHEETLPRELKRHLNSLEEQLLESMSWEKGSSLYNSLVVARPSLSTEINSLGLLAEPMPSLDGIVARQSIHPDGLPPTPSKRSSAGPDGNCYPQSPKRLCTESRNSLVERNSQTPPPKQSQTGLSILKAKYHPLQATFASPTVSNPVSGNEKCAVVGVQIFFSKILKLAAIRIRNLCERLRHEELTVSVYNIFKQILDQQTALFFNRHVDQIILCCLYGVAKGXXGSRHVDIIVFYNQVFVPTVKPLLVALMPSSTRPEDKRNTNSQIPGSPKSSPFSNLPDMSPKKVSSSHNVYVSPLRQTKMDALLSPSSRSFYACIGESTQAFQSPSKDLAAINSRLNYPTRRINTRINFDMVSDSVVAGSLGQPNGGSASSDPAAAFSPLSKKSKTDS

SEQ ID NO: 15109 - protein, 619 aa, Triticum aestivum
  unsure (1)..(619): unsure at all Xaa locations
FCPKRVFETLASPTKTIKNMLTVPSSPSSPANGGSVKVVHMTPVTSAMTTAKWLREVISLLPEKPSSKLEKFLSSCDTDLTSDVTKRVSIILEAIFPTKPSGHWGGSMGLNCTNAFDIPWAEARKMEASKLYYRVLEAICRAESLNTNVNNLTPLLSNERFHRCLIACSAELVLATHKTVIMMFPAVLESTGLTAFDLSKIIENFVRHEESLPRELKRHLNSLEEQLLESMAWEKGSSLYNSLVVARPSLASEINRLGLLAESMPSLDDIVARQNFHAEDLPATPSKKRAAYSDENGDSRSPKRLCIEPRSTLVDQISQTPPAKQSYXXLKAKWRPLQSTFASPTVSNPVGGNEKCAEVGVHIFFSKILKLAAIRIRNLCERLRHVEQTERVYNIFKQILDQQTTLFFNRHIDQLILCSLYGVAKVSQLTLTFKEIVNNYRREQQCIPEVFRSVFVVNTNHNGGLGSRHVDIIVFYNEVFVPAVKPFLVALIPSGGAHPDNKKNPNSQIPGSPKPPPFSNLPDMSPKKVSSSHNVYISPLRQTKKDALLSPSSRSFYACIGESTHAYQSPSEDLAAINNCLNYTSRRINTRINFDMVSDSVVAGSLGQPNGVPASSDPX

SEQ ID NO: 15110 - protein, 764 aa, Eufolliculina uhligi
PSSPCSSLISEISRNLTLSVEVLSKAQRFLDSAQSSKIPNKVLVRCCLFLAAKLTENPQLSLSELLAGPSPVTFKEFWEGLNEAAKKLLLPTEAQHVVEGFIKAQGVTMALFSKFKKIWDDLFIDGREENTLQVFHFCWLLFAYARKELVDTPSILFDCGNLLTSVLHTVLTRLPSTVRFEQGTALQTILDAMKTTEDKIRPWSTQLDSFLAQLSSNSGFILDDWIGANYEHNSQLLLRLYKEKLGADDPDETTLAERTDQPQTPTKERVYSPLVGRSNIRRETVGRILNWDKLPTDLGISSRLKEFRLPPDSPFIGCSTPMTMVMENHRWLSDIIDDENTSNLYAESLRTLHEADVQTLTAETEQITSRVDTLFKEKSIGGNPAEGAAFILSHFEADDDGGHDDYLHGSSDENYRVAEVKTLLHHTIRVLVDNGSLKQQKPGSSLWRSLYACCIETSLYTHEVTNISLGELLKACDIGMFDFWKTIRVFLTFDARIPMGLKWHLKEVELQIVSCLAWADQTLIQPEIQAKLHSNNERCNHSRFFKRVYSQAACRLSELATSLGLSDALKENSWVVVKYLLTDKLELLVGRHLDQMVICSIYGTCKGRSEVSFTKIVESYKKLFNEDQSIYMQVLIEGSHFDTVIQFYNKVFMPTLKEFLIDMHQGKTITQGLHQQNPLRACAPAVPVQRAIINTMKSPNRSPFMTPRTMKLMASNSPMFPSNRQAPTSLIGSLRFDSAGMTRKIIKPTEPADQPPVIRKCLTF

SEQ ID NO: 15111 - protein, 722 aa, Drosophila melanogaster
MANLPQEFVNEIEDLDRKFSITFMLHKRFRIIMDMIFSCPPNEKKHSKYISLHGNHAHGKCSYIKLDDICWRLFLCAKNQKPSNTVDLVTSYNLMICCIDLIYNNVLAEKRTDLINPKFEGLPSNWTELDFRHNPHCILSNFCDMTEEAKAMKATTFRQIMSSFFQASTIYGNKDTMLGLLANENFERNLKSLNISYEQYVLSVGEFDERILSAYDAGEHTALNDQSLRPPVTPLTRKQDLPAQPAMAGDKFEPVRNATNNVKQLSAFGRITEPTDFVKQAGEEVIAKLLSIIEEIEQKFLAKYPSTEAKSRFQLAKSFFFYLLDQILQAEIRNKPDIDLKRLLVQKVSLVIFNITLMACCVELVLEAYKTELKFPWVLDCFSISAFEFQKIIEIVVRHGSHEGCLNRSLIKHLNSIEETCLERLAWARNSTVWEMIASAQLPLPTWLMVNLDRAAGPLQIFLRKVYLLGWLRIQKLCSELSLCEKTPESIWHIFEHSITHETELMKDRHLDQNIMCAIYIYIRVKRMEDPKFSDIMRAYRNQPQAVNSVYREVFIDINEDGEPKVKDIIHFYNHTYVPLMRQFVIDYLNVTPDVSGRASDLQLSPHPKERAAQPKKVTQSHSLFVSQMSKNEIQQSPNQMVYSFCRSPAKDLQAMNEKVRGGKRMLSFGDEPGLGTMAETKRSKISQVKAVMDDPELQSAEQQTAVTTEGCVGGEGGEHET

SEQ ID NO: 15112 - protein, 845 aa, Drosophila melanogaster
MSEPDPQELGAEVVSGLVATSDDRLEMINAEYTNLCRDLNMDRQTELQGYETYLEVSQRCSMEGTASHWMCCAIYTACRRTSTPTVTGQNAVVKGNCVSLNNLLRCCKMSIYEFKTKIKQWCDMANLPQEFVNEIEDLDRKFSITFMLHKRFRIIMDMIFSCPPNEKKHSKYISLHGNHAHGKCSYIKLDDICWRLFLCAKNQKPSNTVDLVTSYNLMICCIDLIYNNVLAEKRTDLINPKFEGLPSNWTELDFRHNPHCILSNFCDMTEEAKAMKATTFRQIMSSFFQASTIYGNKDTMLGLLANENFERNLKSLNISYEQYVLSVGEFDERILSAYDAGEHTALNDQSLRPPVTPLTRKQDLPAQPAMAGDKFEPVRNATNNVKQLSAFGRITEPTDFVKQAGEEVIAKLLSIIEEIEQKFLAKYPSTEAKSRFQLAKSFFFYLLDQILQAEIRNKPDIDLKRLLVQKVSLVIFNITLMACCVELVLEAYKTELKFPWVLDCFSISAFEFQKIIEIVVRHGSHEGCLNRSLIKHLNSIEETCLERLAWARNSTVWEMIASAQLPLPTWLMVNLDRAAGPLQIFLRKVYLLGWLRIQKLCSELSLCEKTPESIWHIFEHSITHETELMKDRHLDQNIMCAIYIYIRVKRMEDPKFSDIMRAYRNQPQAVNSVYREVFIDINEDGEPKVKDIIHFYNHTYVPLMRQFVIDYLNVTPDVSGRASDLQLSPHPKERAAQPKKVTQSHSLFVSQMSKNEIQQSPNQMVYSFCRSPAKDLQAMNEKVRGGKRMLSFGDEPGLGTMAETKRSKISQVKAVMDDPELQSAEQQTAVTTEGCVGGEGGEHET

SEQ ID NO: 15113 - protein, 797 aa, Drosophila melanogaster
MSEPDPQELGAEVVSGLVATSDDRLEMINAEYTNLCRDLNMDRQTELQGYETYLEVSQRCSMEGTASHWMCCAIYTACRRTSTPTVTGQNAVVKGNCVSLNNLLRCCKMSIYEFKTKIKQWCDMANLPQEFVNEIEDLDRKFSITFMLHKRFRIIMDMIFSCPPNEKKHSKYISLHGNHAHGKCSYIKLDDICWRLFLCAKNQKPSNTVDLVTSYNLMICCIDLIYNNVLAEKRTDLINPKFEGLPSNWTELDFRHNPHCILSNFCDMTEEAKAMKATTFRQIMSSFFQASTIYGNKDTMLGLLANENFERNLKSLNISYEQYVLSVGEFDERILSAYDAGEHTALNDQSLRPPVTPLTRKQDLPAQPAMAGDKFEPVRNATNNVKQLSAFGRITEPTDFVKQAGEEVIAKLLSIIEEIEQKFLAKYPSTEAKSRFQLAKSFFFYLLDQILQAEIRNKPDIDLKRLLVQKVSLVIFNITLMACCVELVLEAYKTELKFPWVLDCFSISAFEFQKIIEIVVRHGSHEGCLNRSLIKHLNSIEETCLERLAWARNSTVWEMIASAQLPLPTWLMVNLDRAAGPLQIFLRKVYLLGWLRIQKLCSELSLCEKTPESIWHIFEHSITHETELMKDRHLDQNIMCAIYIYIRVKRMEDPKFSDIMRAYRNQPQAVNSVYREVFIDINEDGEPKVKDIIHFYNHTYVPLMRQFVIDYLNVTPDVSGRASDLQLSPHPKERAAQPKKVTQSHSLFVSQMSKNEIQQSPNQMVYSFFRSPAKDLQAMNEKVRGGKRMLSFGDEPD

SEQ ID NO: 15114 - protein, 782 aa, Drosophila melanogaster
METCEVEGEAETLVRRFSVSCEQLELEARIQQSALSTYHRLDAVNGLSTSEADAQEWLCCAVYSELQRSKMRDIRESINEANDSVAKNCCWNVSLTRLLRSFKMNVSQFLRRMEHWNWLTQNENTFQLEVEELRCRLGITSTLLRHYKHIFRSLFVHPGKGADPGAANHYQALYEFGWLLFLVIRNELPGFAITNLINGCQVLVCTMDLLFVNALEVPRSVVIRREFSGVPKNWDTEDFNPILLNKYSVLEALGELIPELPAKGVVQMKNAFFHKALIMLYMDHSLVGDDTHMREIIKEGMLDINLENLNRKYTNQVADISEMDERVLLSVQGAIETKGDSPKSPQFAFQTSSSPSHRKLSTHDLPASLPLSIIKAFPKKEDADKIVNYLDQTLEEMNQTFTMAVKDFLDAELSGKRFRQARGLYYKYLQKILGPELVQKPQLKIGQLMKQRKLTAALLACCLELALHVHHKLVEGLRFPFVLHCFSLDAYDFQKILELVVRYDHGFLGRELIKHLDVVEEMCLESLIFRKSSQLWWELNQRLPRYKEVDAETEDKENFSTGSSICLRKFYGLANRRLLLLCKSLCLVDSFPQIWHLAEHSFTLESSRLLRNRHLDQLLLCAIHLHVRLEKLHLTFSMIIQHYRRQPHFRRSAYREVSLGNGQTADIITFYNSVYVQSMGNYGRHLECAQTRKSLEESQSNVGILTETTSNELSMRANISISSPPPPRVCQSGSCSSHPPSSPAASPLSLQSSPNVKRAASSNDLREIKRPNILRRRQLSVI

SEQ ID NO: 15115 - protein, 783 aa, Drosophila melanogaster
METCEVEGEAETLVRRFSVSCEQLELEARIQQSALSTYHRLDAVNGLSTSEADAQEWLCCAVYSELQRSKMRDIRESINEANDSVAKNCCWNVSLTRLLRSFKMNVSQFLRRMEHWNWLTQNENTFQLEVEELRCRLGITSTLLRHYKHIFRSLFVHPGKGADPGAANHYQALYEFGWLLFLVIRNELPGFAITNLINGCQVLVCTMDLLFVNALEVPRSVVIRREFSGVPKNWDTEDFNPILLNKYSVLEALGELIPELPAKGVVQMKNAFFHKALIMLYMDHSLVGDDTHMREIIKEGMLDINLENLNRKYTNQVADISEMDERVLLSVQGAIETKGDSPKSPQLAFQTSSSPSHRKLSTHDLPASLPLSIIKAFPKKEDADKIVNYLDQTLEEMNRTFTMAVKDFLDAELSGKRFRQARGLYYKYLQKILGPELVQKPQLKIGQLMKQRKLTAALLACCLELALHVHHKLVEGLRFPFVLHCFSLDAYDFQKILELVVRYDHGFLGRELIKHLDVVEEMCLDSLIFRKSSQLWWELNQRLPRYKEVDAETEDKENFSTGSSICLRKFYGLANRRLLLLCKSLCLVDSFPQIWHLAEHSFTLESSRLLRNRHLDQLLLCAIHLHVRLEKLHLTFSMIIQHYRRQPHFRRSAYREVSLGNGQTADIITFYNSVYVQSMGNYGRHLECAQTRKSLEESQSNVGILTETTSNELSMRANISISSPPPPRVCQSGSCSSHPPSSPAASPLSLQSSPNVKRAASSNDLMREIKRPNILRRRQLSVI

SEQ ID NO: 15116 - protein, 314 aa, Danio rerio
ESMLKSEEKRLSVQNFSKLLNNAAFHTSLLACALEVVIATYVGSSLKNGGFGRSSGASDSVESNLCFPWILSVFQLPAFDFYKVIESFIKAEPTLKHDMVKHLEQCEHVIMESLAWRADSPLFDLLKQSREEGPGEQAEPPATLNQPLHHNHTAADLYLSPVRPCRQPPVMEAEPPTPGTRAPRSNSLSLFYKKLYRMAYLRLKMLFSNLLTSHPEMEPIIWTLLQHTLQNEYELMRDRHLDQLIMSAMYAICKVKNVDLRFKTIVTAYKELPNTNQETFKRVLIREGQYDSINVFYNLVFMQKLKTNSLQYSS

SEQ ID NO: 15117 - protein, 910 aa, Oncorhynchus mykiss
MPPKKRNSGAAQNKEMKPSIKNASPDKENPDLSIEKHQEKDADFMTLCQSLQVIDAVCDRAWTIWKAVQASVDKVLDTQKKLWAACLFVAVIDLEIASFTFTQILKAVDLNVKQFLGLLKKMDVNLDTISTKVNSAVTRLEKKYDVSRALYQRFEKTCSKIYAEDSEAKGKEILRSCWTMFLLAKGRALQMEDELVISLHLMVCVLEFFIRRCPPSLLQPLYQSVISTAQSPPTRTSRRNQSKAKPRQAPPEVDVQLLETLCKENDCSVEEVKSVYQTSFSAFLDSMSLSGTRDLPQATDLSKQYEELYFKSRDFDSRLFLDNDETLLTPKVEPMPVERTPRKNMPEDVVLIPPQTPVRAAMNSIAQLRVDLITSGDQPSSNLAVYFKNCTVDPTEEVLQRVESLGLLFSQRFGQAVGPRCVGLGKQRFTLGIRLYYRVMESMLKSEEKRLSVQNFSKLLNDSTFHTSLLACALEVAMATYGGSTFKNGGYSNGGVPVETDLCFPWILDVFQLTAFDFYKVIESFIKAEPSLSKDIVKHLERCEHLIMETIAWREDSPLFELLKRTREEGPVEQAEPPATLNQPLQHNHTAADLYLSPVRPSSRTLPAPESTAPPSSQPSAPAPHQTPRHPKSNSLSLFYKKLYRLAYMRLKMLYTQLLTSHPELEPIMWTLFQHTLQNEYELMRDRHLDQLMMSAMYAICKVKNVDLRFKTIVTAYKNMPNTNQETFKHVLIREGQYDSIIVFYNLVFMQKLKTNILQYASPRPPTLSPIPHIPRSPYKFPNSPLRVPGSNNVYISPMKSPTRMSPVMTPRTRILVSIGESFGTSDKFQKINAMVNSSDRSLKRSLDMSSAPKPLKRLRFDVEGQDESDESKPGEESRLIQKLAEIGSTRTRMQEQKMKDDAESEKDKP

SEQ ID NO: 15118 - protein, 910 aa, Oryzias latipes
MPPKKRNSGTAQSKEPKPSSDKSFADKKGSPEFSLNKHTEKDVEFVTLCKSLHATDSVCERAWSLWKTVQDVMEDVDANQKRLWGSCLFVTATDMDATCFTLTEVLKAVNINVKQFVDLVRQLDVNLDTISTKVNSALMRVEKKYDVMLALYQRFEKTCKKIFASTPDKKERATMRTCWTMFLLAKGRALQMEDDLVISFQLLLCTLELFIKRSSPELLLPLYKSVVSKAQSPTRTSRRNQSKAKSRVVESEVNVELLETLCKDNECNAEEVKNVYQTSLSAFLDLMDLPIPDFLGTDVSKQYQEHYLKSGDIDGRLFFDGDETVLAPKVDISQVGRTPKKTSPDDDGPLIPPQTPIRAAMNSIKMLRGDLPSSGDQPSSNLEIYFKNCTVDPTQGIQSLEMLGLFSQKFGEAVGPHCIVYGRERFTLGVRLYYKVMEAMLESKKKRLFVQNFSKLLNDSTFHMSLLACALEVVMVTYEESSFKNRGCSHGEGDQAVRDLCFPWILDVFDLSAFDFYKVIESFIKAEPTLSKDIIKHLETCENLIMEKIAWRTGSPLFELLKREHEAGATEQAEPPASFSLPLQHNHTAVDLYLSPIRPGLRVLPPESPATPSSQASSQPTPQAAGQAPRQPKSNSLSLFYKKLYRLAYTRLKTLCSCLLSNHPDLEHVIWTLFQHTLQYEYDLMRDRHLDQLMMSAMYAICKVKSVDLRFKLIVSAYKNMPNTSQETFKHVLITEGQYDSIIVFYNQVFMQKLKTNILQYASTRPPTLSPIPQIPCSPYKFPNSPLRVPGSNNVYISPLKNSRLSAGMMAPRSRMLVSIGESFGFANRFQKINQMVNSGDRAHKRTLDGGSALKPLKRLRFDVDGQDEADGSKSGGESALIQKLAEMSSTRSRMQEQKMKEDAESRKKT

SEQ ID NO: 15119 - protein, 899 aa, Notophthalmus viridescens
MPPKYPPQVRKGDSSSSAVQSQEEHRQWLDDADFTLLCDSLKVSDAVREGSWKIWQKVSADGCERIIRNEKVLGICIFLAAVELNDLTFTITELLKSTHLNVNMFTGYIKEMDISMDTITTKVNNAVTRLKTKYNTLCTLYQKFQRLFELIFIKEPSNVQISSDISPAALFKILWITFLLVKGSVLQMEDDLVISFQLLLCVFTHYIKILPLPLLREPYKSAISGKSDKAQTRSSRRGRNRNPHLSKQVESDEVFEILCKENGCNMDEVKNINITTFVPFLDSVGISTTNGIPEEPVLSKQYEDLYFNSKDLDARLFLDDDETLQPNMGGCVELEKTPQKNDPEEMNLIPPQTPVRTAMNTIQNLLNSLASASDQPSPTLKAYFNNCTSNPTRAIQERENNLGQIFKQKFAEAVGQACEEIGYQRFKVGVRLAYRVMEAMLKSEEKRLSVQNFSNLLNNSAFHESLLACSIEVVMATYGSISRETDLSFPWILEVFKIEPYDFYKVIESFIKDEPSLTREMIKHLESCEHRIMESLAWRSESPIYELIRQPREREGHVDQPEPTSSLNQPLEHNHTAADLYLSPLRSPRRNVPTSRAIPTLSVPESNNVPAPLPQPTQRSTSLSLFYKKVYRLAYLRMNTLCSKLLPDHPELEHVIWTLFQHTLQNEYELMKDRHLDQIMMCSMYAICKVKAIDLRFKTIVTAYKELPNTNQETFKHVLIRDGQHDSIIVFYNLVFMQKLKTNILQYATLRNPTLSPIPHIPRSPYKISNSPLRLPGGNNIYISPLKSPYKHPEGLLSPTKMTPRSRILVSIGEQFGTAEKFQKINQMLSSSERLRKRAAESSNAPKPLKRLHFDTDGPDETDGSKHLAQKLAEMTSTRSRMQKQKQDEEMDTTLKEEK

SEQ ID NO: 15120 - protein, 899 aa, Xenopus sp.
MPPKSPRKQQIRSQGEPRSPDRPDFQDPDFNFLCENLKISDNVRGKAWNTYEKMFPSGYMMRETAKKKESLGLCLYIASVDCEEMTFTFTELLKILRLSVNRCFRLLREMDINMDVLSNKVDNAISKLKKKYENMCLLFQKFQRTFELIFEEQHNTRAAVDTAPILKGTWITFLLARGKILQMDDELVISSQLLLCVLDYFIKLSPPSILKEPYKSALNGLPVNTPPRSSRRSQNRNTRVSPQSETDSKVLEFLCSQNYCPMDEVRNVYSTSFVDFLASAGISSNEGIPKVESISRQYEELYHKHKDLDARLFLENDETLKVDVQDSLDLERTPRKDESEVFPVPPQTPVRGAMNTVQQLMVTLSSANDKPPDTLDSYFSNCTVNPKTKITDRIEHFGHVFKEKFASSVGQACAEIGYQRYKLGVCLYYRVMEAILKTEEERLSVHNFSKLLNNDIFHICLLACAVEVVVASYARNASQAYCSSGTNLSFPWILRAFEIKAFDFYKVIECFIKAEPSLTSNMIKYLERCEHQIMECLAWQSDSPLFDLIKQTREREGLVDHPELVSNLQQPVQHNHTAADLYLSPSRSSHQHPVTSVPTSSVTNGQVSSSQPVQQKSTSLSLFYKKVYLLAYKRLSSLCSSLLSDHPELEQVIWTLLQHTLQQEYELMRDRHLDQIMMCSMYGICKAKNIDLRFKTIVTAYKGLTNTNQETFKHVLIRDGQHDSIIVFYNLVFMQKLKSHILQYGSARHPTLSPIPHIPRSPYRFGNSPKVPGNIYVSPLKTPYKTADGLLSPSKMTPKTSFLISLGETFRSPDRFQKINQMLNSCERPIKRSADTGTTPKPLKKLRFDSDGQDEADGSKHIQGESKFQQKLAEMTSTRTRMQKQKLEESLESSQQEEK

SEQ ID NO: 15121 - protein, 921 aa, Gallus gallus
MPPKPLRRAGAARSQRTSPEGGAGTASPPGGTRLEVGEAEFVALCDALKAPDSVREKAWMTYQSLAAADGASAYNKKKKETWGVCIFIVAIDLDEMTFTFTELLKSLSISVCTFFQFLKEVDVNMDTVSTKVDSTVSRLKKKYDVLLALYHKFERTCGLIYLEQPSSEISAELSSVLVLKNYWITFLLAKGKVLQMEDDLVISFQLLLCVLDYFIKLSPPAMLKEPYKSAVTALTVNGSTRTPRRGQNRNARASKQIDTDTKVIEILCKEHDCNLDEVKNVYFTSFIPFLNSLGVVASNGLPEVDVLSKQYDELYLKNKDIDARLFLDHDETLQPDVIACSQLERTPRKNNPDEEVNHVLPQTPVRAAMNTIQQLMMILNSATDKPSDTLIAYFNNCTVNPEDSILKRVESLGHIFKKKFAEAVGQGCAEIGSQRYQLGVRLYYRVMESMLKSEEERLSVHNFSKLLNDNIFHTSLLACALEIVMATYGRTASQSDGTSAETDLSFPWILNVFDLKAFDFYKVIESFIKVEPSLTRDMIKHLERCEHRIMESLAWQSDSPLFDLIKQSKEREGQTDQPEPTSTLNLPLQHNHTAADLYLSPVRSPKKKASGHPQSGTSNPDAQPSATSQTQKPQKSTSLSLFYKKVFRLAYLRLHTLFFRLLSEHPDLEPLIWTLFQHTLQNESELMRDRHLDQIMMCSMYGICKVKNVDLRFKTIVSAYKELPNTNQETFKRVLIREEQYDSIIVFYNLVFMQKLKTNILQYASNRPPTLSPIPHIPRSPYQFSNSPRRVPAGNNIYISPLKSPYKFSDGFHSPTKMTPRSRILVSIGETFGTSEKFQKINQMVCNSESHVKRSAEPSDAPKPLKRLRFDIEGQDEADGGKHLPQESKFQQKLAEMTSTRTRMQKQKLNDGNDTSANEEK

SEQ ID NO: 15122 - protein, 919 aa, Gallus gallus
MPPKPLRRAGAAGVSAPAPRRRRHRLTARRTRLEVGEAEFVALCDALKAPDSVREKAWMTYESLAAADGASAYNKKKKETWGVCIFIVAIDLDEMTFTFTELLKSLSISVCTFFQFLKEVDVNMDTVSTKVDSTVSRLKKKYDVLLALYHKFERTCGLIYLSQPSSEISAELSSVLVLKNYWITFLLAKGKVLQMEDDLVISFQLLLCVLDYFIKLSPPAMLKEPYKSAVTALTVNGSTRTPRRGQNRNARASKQIDTDTKVIEILCKEHDCNLDEVKNVYFTSFIPFLNSLGVVASNGLPEVDVLSKQYDELYLKNKDIDARLFLDHDETLQPDVIACSQLERTPRKNNPDEEVNHVLPQTPVRAAMNTIQQLMMILNSATDKPSDTLIAYFNNCTVNPEDSILKRVECLGHIFKKKFAEAVGQGCAEIGSQRYQLGVRLYYRVMESMLKSEEERLSVHNFSKLLNDNIFHTSLLACALEIVMATYGRTASQSDGTSAETDLSFPWILNVFDLKAFDFYKVIESFIKVEPSLTRDMIKHLERCEHRIMESLAWQSDSPLFDLIKQSKEREGQTDQPEPTSTLNLPLQHNHTAADLYLSPVRSPKKKASGHPQSGTSGPDAQPSATSQTQKPQKSTSLSLFYKKVFRLAYLRLHTLFFRLLSEHPDLEPLIWTLFQHTLQNESELMRDRHLDQIMMCSMYGICKVKNVDLRFKTIVSAYKELPNTNQETFKRVLIREEQYDSIIVFYNLVFMQKLKTNILQYASNRPPTLSPIPHIPRSPYQFSNSPRRAAGNNIYISPLKSPYKFSDGFHSPTKMTPRSRILVSIGETFGTSEKFQKINQMVCNSESHVKRSAEPSDAPKPLKRLRFDIEGQDEADGGKHLPQESKFQQKLAEMTSTRTRMQKQKLNDGNDTSANEEK

SEQ ID NO: 15123 - protein, 882 aa, Pan troglodytes
LEFEETEEPDFTALCQKLKIPDHVRERAWLTWEKVSSVDGVLGGYIQKKKELWGICIFIAAVDLDEMSFTFTELQKNIEISVHKFFNLLKEIDTSTKVDNAMSRLLKKYDVLFALFSKLERTCELIYLTQPSSLISTEINSALVLKVSWITFLLAKGEVLQMEDDLVISFQLMLCVLDYFIKLSPPVLLKEPYKTAVIPINGSPRTPRRGQNRSARIAKQLENDTRIIEVLCKEHECNIDEVKNVYFKNFIPFMNSLGLVTSNGLPEVENLSKRYEEIYLKNKDLDARLFLDHDKTLQTDSIDSFETQRTPRKSNLDEEVNVIPPHTPVRTVMNTIQQLMMILNSASDQPSENLISYFNNCTVNPKESILKRVKDIGYIFKEKFAKAVGQGCVEIGSQRYKLGVRLYYRVMESMLKSEEERLSIQNFSKLLNDNIFHMSLLACALEVVMATYSRSTSQNLDSGTDLSFPWILNVLNLKAFDFYKVIESFIKAEGNLTREMIKHLERCEHRIMESLAWLSDSPLFDLIKQSKDREGPTDHLESACPLNLPLQNNHTAADMYLSPVRSPKKKGSTTRVNSTANAETQATSAFQTQKPLKSTSLSLFYKKVYRLAYLRLNTLCERLLSEHPELEHIIWTLFQHTLQNEYELMRDRHLDQIMMCSMYGICKVKNIDLKFKIIVTAYKDLPHAVQETFKRVLIKEEEYDSIIVFYNSVFMQRLKTNILQYASTRPPTLSPIPHIPRSPYKFPSSPLRIPGGNIYISPLKSPYKISEGLPTPTKMTPRSRILVSIGESFGTSEKFQKINQMVCNSDRVLKRSAEGSNPPKPLKKLRFDIEGSDEADGSKHLPGESKFQQKLAEMTSTRTRMQKQKMNDSMDTSNKEEK

SEQ ID NO: 15124 - protein, 928 aa, Homo sapiens [sequence omitted]

SEQ ID NO: 15125 - protein, 928 aa, Homo sapiens
MPPKTPRKTAATAAAAAAEPPAPPPPPPPEEDPEQDSGPEDLPLVRLEFEETEEPDFTALCQKLKIPDHVRERAWLTWEKVSSVDGVLGGYIQKKKELWGICIFIAAVDLDEMSFTFTELQKNIEISVHKFFNLLKEIDTSTKVDNAMSRLLKKYDVLFALFSKLERTCELIYLTQPSSSISTEINSALVLKVSWITFLLAKGEVLQMEDDLVISFQLMLCVLDYFIKLSPPMLLKEPYKTAVIPINGSPRTPRRGQNRSARIAKQLENDTRIIEVLCKEHECNIDEVKNVYFKNFIPFMNSLGLVTSNGLPEVENLSKRYEEIYLKNKDLDARLFLDHDKTLQTDSIDSFETQRTPRKSNLDEEVNVIPPHTPVRTVMNTIQQLMMILNSASDQPSENLISYFNNCTVNPKESILKRVKDIGYIFKEKFAKAVGQGCVEIGSQRYKLGVRLYYRVMESMLKSEEERLSIQNFSKLLNDNIFHMSLLACALEVVMATYSRSTSQNLDSGTDLSFPWILNVLNLKAFDFYKVIESFIKAEGNLTREMIKHLERCEHRIMESLAWLSDSPLFDLIKQSKDREGPTDHLESACPLNLPLQNNHTAADMYLSPVRSPKKKGSTTRVNSTANAETQATSAFQTQKPLKSTSLSLFYKKVYRLAYLRLNTLCERLLSEHPELEHIIWTLFQHTLQNEYELMRDRHLDQIMMCSMYGICKVKNIDLKFKIIVTAYKDLPHAVQETFKRVLIKEEEYDSIIVFYNSVFMQRLKTNILQYASTRPPTLSPIPHIPRSPYKFPSSPLRIPGGNIYISPLKSPYKISEGLPTPTKMTPRSRILVSIGESFGTSEKFQKINQMVCNSDRVLKRSAEGSNPPKPLKKLRFDIEGSDEADGSKHLPGESKFQQKLAEMTSTRTRMQKQKMNDSMDTSNKEEK

SEQ ID NO: 15126 - protein, 928 aa, Homo sapiens
MPPKTPRKTAATAAAAAAEPPAPPPPPPPEEDPEQDSGPEDLPLVRLEFEETEEPDFTALCQKLKIPDHVRERAWLTWEKVSSVDGVLGGYIQKKKELWGICIFIARVDLDEMSFTLLSYRKTYEISVHKFFNLLKEIDTSTKVDNAMSRLLKKYDVLFALFSKLERTCELIYLTQPSSSISTEINSALVLKVSWITFLLAKGEVLQMEDDLVISFQLMLCVLDYFIKLSPPMLLKEPYKTAVIPINGSPRTPRRGQNRSARIAKQLENDTRIIEVLCKEHECNIDEVKNVYFKNFIPFMNSLGLVTSNGLPEVENLSKRYEEIYLKNKDLDRRLFLDHDKTLQTDSIDSFETQRTPRKSNLDEEVNIIPPHTPVRTVMNTIQQLMMILNSASDQPSENLISYFNNCTVNPKESILKRVKDIGYIFKEKFAKAVGQGCVEIGSQRYKLGVRLYYRVMESMLKSEEERLSIQNFSKLLNDNIFHMSLLACALEVVMATYSRSTSQNLDSGTDLSFPWILNVLNLKAFDFYKVIESFIKAEGNLTREMIKHLERCEHRIMESLAWLSDSPLFDLIKQSKDREGPTDHLESACPLNLPLQNNHTAADMYLSPVRSPKKKGSTTRVNSTANAETQATSAFQTQKPLKSTSLSLFYKKVYRLAYLRLNTLCERLLSEHPELEHIIWTLFQHTLQNEYELMRDRHLDQIMMCSMYGICKVKNIDLKFKIIVTAYKDLPHAVQETFKRVLIKEEEYDSIIVFYNSVFMQRLKTNILQYASTRPPTLSPIPHIPRSPYKFPSSPLRIPGGNIYISPLKSPYKISEGLPTPTKMTPRSRILVSIGESFGTSEKFQKINQMVCNSDRVLKRSAEGSNPPKPLKKLRFDIEGSDEADGSKHLPGESKFQQKLAEMTSTRTRMQKQKMNDSMDTSNKEEK

SEQ ID NO: 15127 - protein, 928 aa, Homo sapiens [sequence omitted]

SEQ ID NO: 15128 - protein, 518 aa, Canis familiaris
QLMVILNSASDQPSENLISYFNNCTVNPKESILKRVKDVGYIFKEKFAKAVGQGCMEIGSQRYKLGVRLYYRVMESMLKSEEERLSIQNFSKLLNDDIFHMSLLACALEVVMATYSRSTSQNLDTGTDLSFPWILNVLNLKAFDFYKVIESFIKAEANLTREMIKHLERCEHRIMESLAWLSDSPLFDLIKQAKDREGPADHLESACTLNLPLQSNHTAADMYLSPVRSPKKKGSTIRVNSTVNTEAQATSAFQTQKPLKSTSLSLFYKKEYRLAYLRLNTLCARLLSDHPELEHIIWTLFQHTLQNEYELMRDRHLDQIMMCSMYGICKVKNIDLKFKIIVTAYKDLPHAVQETFKRVLIREEEYDSIIVFYNSVFMQRLKTNILQYASTRPPTLSPIPHIPRSPYKFSSSPLRIPGGNIYISPLKNPYKISEGVPTPTKMTPRSRILVSIGESFGTSEKFQKINQMVCNSDRVLKRSAEGSNPPKPLKKLRFDIEGTDEADGSKHLPGESKFQQKL

SEQ ID NO: 15129 - protein, 364 aa, sweet potato leaf curl virus
MAPPKRFKIQAKNYFITYPRCSLSKEDCLAQLLNIQTPSNKKYIHVARELHEDGEPHLHVLVQFEGKFVCTNSRFFDLVSPNRSNHFHPNIQGAKSSSDVKSYVDKDGDTITWGEFQVDGRSARGGQQTANDAAAEALNAGSKEAALQIIREKLPEKYLFQFHNLVSNLDRIFSPPPSVYSSPFSSSSFNAVPDIISDWAAENVMDSAARPDRPISIVIEGPSRIGKTVWARSLGPHNYLCGHLDLSPKVYSNSAWYNVIDDVNPQYLKHFKEFMGAQKDWQSNCKYGKPVRIKGGIPTIFLCNPGEGSSFKLWLDKPEQGALKNWATANAIFCDVQSPFWVQEEVSHSGATAHRGEEGQEESS

SEQ ID NO: 15130 - protein, 314 aa, sweet potato leaf curl virus
MAPPKRFKIQAKNYFITYPRCSLSKEDCLAQLLNIQTPSNKKYIHVARELHEDGEPHLHVLVQFEGKFVCTNSRFFDLVSPNRSNHFHPNIQGAKSSSDVKSYVDKDGDTITWGEFQVDGRSARGGQQTANDAAAEALNAGSKEAALQIIREKLPEKYLFQFHNLVSNLDRIFSPPPSVYSSPFSSSSFNAVPDIISDWAAENVMDSAARPDRPISIVIEGPSRIGKTVWARSLGPHNYLCGHLDLSPKVYSNSAWYNVIDDVNPQYLKHFKEFMGAQKDWQSNCKYGKPVRIKGAVRPTEGLAIVVMKPCHTA

SEQ ID NO: 15131 - protein, 234 aa, Geminiviridae
MPRKGSFSIKAKNYFLTYPQCSLSKEDALSQIQNLTIPVNKKFIKICRELHENGEPHLHVLIQFEGKFNCTNNRLFDLVSPTRSTHFHPNIQGAKSSSDVKSYVEKDGDTIEWGLFQIDGRSARGGQQTANDAAAEALNSGTKEEAMKIIKEKLPEKFLFQYHNLSSDLDRIFMKAPNPWAPPFPLSSFTNVPHEMQEWSHDYFGRSAAARGETISIIIEGDSRTGKTMWACRC

SEQ ID NO: 15132 - protein, 235 aa, Geminiviridae
MPPPKHFRINAKNYFLTYPKCSIGKEEALSQLQNLTIPVNKKSIKICRELHENGEPHLHVLIQFEGKYNCTNNRQFDLVSPTRSAHFHPNIQGAKSSSDVKSYLDKDGDTLDWGEFQIDGRSARGGQQSANDSYAKALNAGSVQAAMVVLKEEQPKDFVLQNHNIRSNLERIFAKAPERWVPPFPLSSFTNVPDEMQEWADDYFGTPAAARRRDLLVLSLNLTLERGRRCGPADA

SEQ ID NO: 15133 - protein, 355 aa, Abutilon mosaic virus (isolate West India)
MPPPKKFRVQAKNYFLTYPQCSLTKDEALSQLQNLETPVNKKFIKICRELHENGEPHLHVLIQFEGKYQCTNNRFFDLVSPTRSAHFHPNIQGAKSSSDVKSYIDKDGDTAEWGEFQIDGRSARGGQQTANDSYAKALNAGDVQSALNILKEEQPKDYVLQNHNIRSNLERIFAKAPEPWVAGFPSPLSRPFPRRCRSGRMIILGVVPLRPDRPLSLIVEGDSRTGKTMWARALGPHNYLSGHLDFNGRVYSNEVEYNVIDDVAPHYLKLKHWKELLGAQKDWQSNCKLAKPVQIKGGIRAIVLCNPGEGSSYKEYLDKEENRGLRNWTLKNAIFITLTAPLYQGRHTGRPRGGH

SEQ ID NO: 15134 - protein, 358 aa, African cassava mosaic virus
MRTPRFRIQAKNVFLTYPKCSIPKEHLLSFIQTLSLQSNPKFIKICRELHQNGEPHLHALIQFEGKITITNNRLFDCVHPSCSTSFHPNIQGAKSSSDVKSYLDKDGDTVEWGQFQIDGRSARGGQQSANDAYAKALNSGSKSEALNVIRELVPKDFVLQFHNLNSNLDRIFQEPPAPYVSPFPCSSFDQVPVEIEEWVADNVRDSAARPWRPNSIVIEGDSRTGKTIWARSLGPHNYLCGHLDLSPKVFNNAAWYNVIDDVDPHYLKHFKEFMGSQRDWQSNTKYGKPVQIKGGIPTIFLCNPGPTSSYKEFLAEEKQEALKAWALKNAIFITLTEPLYSGSNQSHSQTSQEASHPA

SEQ ID NO: 15135 - protein, 359 aa, African cassava mosaic virus
MPRAGRFQINAKNYFITYPRCSLTKEETLSQLKAFSYPTNIKFIRVCRELHQDGVPHLHVLIQFEGKFQCTNPRFFDLFSPSRSTHFHPNIQGAKSSSDVKAYIEKGGEFLDDGIFQVDARSARGEGQHLAQVYADALNASSKSEALQIIKEKDPKSFFLQFHNISANADRIFQAPPQTYVSPFLSSSFTQVPEEIEVWVSENICSPAARPWRPISIVLEGDSRTGKTLWARSLGPHNYLCGHLDLSPKIYSNDAWYNVIDDVDPHYLKHFKEFMGAQRDWQSNTKYGKPIQIKGGIPTIFLCNPGPTSSYKEFLDEEKNHSLKAWALKNATFITLHEPLFSSSHQSPTPHSEDQGRQT

SEQ ID NO: 15136 - protein, 358 aa, Cassava latent virus (strain Nigerian)
MRTPRFRVQAKNVFLTYPNCSIPKEHLLSFIQTLSLPSNPKFIKICRELHQNGEPHLHALIQFEGKITITNNRLFDCVHPSCSTNFHPNIQGAKSSSDVKSYLDKDGDTVEWGQFQIDGRSARGGQQSANDAYAKALNSGSKSEALNVIRELVPKDFVLQFHNLNSNLDRIFQEPPAPYVSPFPCSSFDQVPDELEEWVADNVRDSAARPWRPNSIVIEGDSRTGKTIWARSLGPHNYLCGHLDLSPKVFNNDAWYNVIDDVDPHYLKHFKEFMGSQRDWQSNTKYGKPVQIKGGIPTIFLCNPGPTSSYKEFLDEEKQEALKAWALKNAIFITLTEPLYSGSNQSQSQTIQEASHPA

SEQ ID NO: 15137 - protein, 295 aa, Chloris striate mosaic virus
MSSLPVSESEGEGSGTSVQVPSRGGQVTPGEKAFSLRTKHVFLTYPRCPISPEEAGQKIADRLKNKKCNYIYISREFHADGEPHLHAFVQLEANFRTTSPKYFDLDEFHPNIQAARQPASTLKYCMKHPESSWEFGKFLKPKVNRSPTQSASRDKTMKQIMANATSRDEYLSMVRKSFPFEWAVRLQQFQYSANALFPDPPQTYSAPYASRDMSDHPVIGEWLQQELYTVSPQALSLHAGISEEQARIDLQWMSDLTRSGALESGDEACTSVGQQELERLLGPEVLELITTGSTQ

SEQ ID NO: 15138 - protein, 170 aa, Chloris striate mosaic virus
MKHPESSWEFGKFLKPKVNRSPTQSASRDKTMKQIMANATSRDEYLSMVRKSFPFEWAVRLQQFQYSANALFPDPPQTYSAPYASRDMSDHPVIGEWLQQELYTVSPQALSLHAGISEEQARIDLQWMSDLTRSGALESGDEACTSVGQQELERLLGPEVLELITTGSTQ

SEQ ID NO: 15139 - protein, 272 aa, Maize streak virus
MASSSSNRQFSHRNANTFLTYPKCPENPEIACQMIWELVVRWIPKYIICAREAHKDGSLHLHALLQTEKPVRISDSRFFDINGFHPNIQSAKSVNRVRDYILKEPLAMFERGTFIPRKSPFLGKSDSEVKEKKPSKDEIMRDIISHSTSKEEYLSMIQKEFPYDWSTKLQYFEYSANKLFPEIQEEFTNPHPPSSPDLLCNESINDWLQPNIFQVSPEAYMLLQPTCYTLEDAISDLQWMDSVSRHQMKDQESRASTSSGQQEQESLLGPEA

SEQ ID NO: 15140 - protein, 272 aa, Maize streak virus
MASSSSNRQFSHRNANTFLTYPKCPENPEIACQMIWELVVRWIPKYILCAREAHKDGSLHLHALLQTEKPVRITDSRFFDINGFHPNIQSAKSVNRVRDYILKEPLAMFERGTFIPRKSPFLGKSDSEVKEKKPSKDEIMRDIISHSTSKEEYLSMIQKEFPYDWSTKLQYFEYSANKLFPEIQEEFTNPHPPSAPDLLCNESINDWLQPNIFQVSPEAYMLLQPTCYTLEDAISDLQWMDSVSSHQMKDQESRASTSSGQQEQESLLGPEA

SEQ ID NO: 15141 - protein, 272 aa, Maize streak virus
MASSSSNRQFSHRNANTFLTYPKCPENPEIACQMIWELVVRWIPKYILCAREAHKDGSLHLHALLQTEKPVRISDSRFFDINGFHPNIQSAKSVNRVRDYILKEPLAMFERGTFIPRKSPFLGKSDSEVKEKKPSKDEIMRDIISHSTSKEEYLSMIQKEFPYDWSTKLQYFEYSANKLFPEIQEEFTNPHPPSSPDLLCNESINDWLQPNIFQVSPEAYMLLQPTCYTLEDAISDLQWMDSVSSHQMKDQESRASTSSGQQEQESLLGPEA

SEQ ID NO: 15142 - protein, 272 aa, Maize streak virus
MASSSSNRQFSHRNANTFLTYPKCPENPEIACQMIWELVVRWIPKYILCAREEHKDGSLHLHALLQTEKPVRISDSRFFDINGFHPNIQSAKSVNRVRDYILKEPLAMFERGTFIPRKSPFLGKSDSEVKEKKPSKDEIMRDIISHSTSKEEYLSMIQKEFPYDWSTKLQYFEYSANKLFPEIQEEFTNPHPPSSPDLLCNESINDWLQPNIFQVSPEAYMLLQPTCYTLEDAISDLQWMDSVSSHQMKDQESRASTSSGQQEQESLLGPEA

SEQ ID NO: 15143 - protein, 272 aa, Maize streak virus
MASSSSNRQFSHRNANTFLTYPKCPENPEIACQMIWELVVRWIPKYILCAREAHKDGSLHLHALLQTEKPVRISDSRFFDINGFHPNIQSAKSVNRVRDYILKEPLAMFERGTFIPRKSPFLGKSDSEVKEKKPSKDEIMRDIISHSTSKEEYLSMIQKELPYDWSTKLQYFEYSANKLFPEIQEQFTNPHPQSSPDLLCNESINDWLQPNIFQVSPEAYMLLQPTCYTLEDAISDLQWMDNVSSHQMKDQESRASTSSAQQEQENLLGPEA

SEQ ID NO: 15144 - protein, 272 aa, Maize streak virus
MASSSSNRQFSHRNANTFLTYPKCPENPEIACQMIWELVVRWIPKYILCAREAHKDGSLHLHALLQTEKPVRISDSRFFDINGFHPNIQSAKSVNRVRDYILKEPLAMFERGTFIPRKSPFLGKSDSEVKEKKPSKDEIMRDIISHSTSKEEYLSMIQKELPYDWSTKLQYFEYSANKLFPEIQEEFTNPHPQSSPDLLCNESINDWLQPNIFQVSPEAYMLLQPTCYTLEDAISDLQWMDNVSSHQMKDQESRASTSSAQQEQENLLGPEA

SEQ ID NO: 15145 - protein, 272 aa, Maize streak virus
MASSSSNRQFSHRNANTFLTYPKCPENPEIACQMIWELVVRWIPKYILCAREAHKDGSLHLHALLQTEKPVRISDSRFFDINGFHPNIQSAKSVNRVRDYILKEPLAVFERGTFIPRKSPFLGKSDSEVKEKKPSKDEIMRDIISHATSKEEYLSMIQKELPFDWSTKLQYFEYSANKLFPEIQEEFTNPHPPSSPDLLCNESINDWLQPNIFQVSPEAYMLLQPTCYTLEDAISDLQWMDSVSSHQMKDQESRASTSSGQQEPENLLGPEA

SEQ ID NO: 15146 - protein, 272 aa, Maize streak virus
MASSSSNRQFSHRNVNTFLTYPKCPENPEIACQMIWELVVRWIPKYIVCAREAHKDGSLHLHALLQTEKPVRISDSRFFDINGFHPNIQSAKSVNRVRDYILKEPLAMFERGTFIPRKSPFLGKSDSEVKEKKPSKDEIMRDIISHSTSKEEYLSMIQKEFPYDWVTKLQYFEYSANKLFPEIQEEFTNPHPQSTPDLLCSESINDWLQPNIFQVSPEAYMLLQPTCYTLEDAISDLQWMDSVSSHQMKDQESRASTSSAQQEQENLLGPEA

SEQ ID NO: 15147 - protein, 272 aa, Maize streak virus
MASSSSNRQFSHRNANTFLTYPKCPENPEIACQMIWELVVRWIPKYILCAREAHKDGSLHLHALLQTEKPVRISDSRFFDINGFHPNIQSAKSVNRVRDYILKEPLAMFERGTFIPRKSPFLGKSDSEVKEKKPSKDEIMRDIISHSTSKEEYLSMIQKELPYDWSTKLQYFEYSANKLFPEIQEEFTNPHPPSSPDLLCNESINDWLQPNIFQVSPEAYMLLQPTCYTLEDAISDLQWMDNVSSHPMKDQESRASTSSAQQEQENLLGPEA

SEQ ID NO: 15148 - protein, 272 aa, Maize streak virus
MASSSSNRQFSHRNANTFLTYPKCPENPEIACQMIWELVVRWIPKYILCAREAHKDGSLHLHALLQTEKPVRISDSRFFDINGFHPNIQSAKSVNRVRDYILKEPLAVFERGTFIPRKSPFLGKSDSEVKEKKPSKDEIMRDIISHCTSKEEYLSMIQKELPFDWSTKLQYFEYSANKLFPEIQEEFTNPHPPSSPDLLCNESINDWLQPNIFQVSAEAYMLLQPTCYTLEDAISDLQWMDSVSSHQMKDQESRASTSSAQQEPENLLGPEA

SEQ ID NO: 15149 - protein, 272 aa, Maize streak virus
MASSSSNRQFSHRNANTFLTYPKCPENPEIACQMIWELVVRWIPKYILCAREAHKDGSLHLHALLQPEKPIRISDSRFFDINGFHPNIQSAKSVNRVRDYILKEPLAVFERGTFIPRKSPFLGKSDSEVKEKKPSKDEIMRDIISHATSKEEYLSMIQKELPFDWSTKLQYFEYSANKLFPEIQEEFTNPHPPSSPDLLCNESINDWLQPNIFQVSPEAYMLLQPTCYTLEDAISDLQWMDSVSSHQMKDQESRASTSSAQQEPENLLGPEA

SEQ ID NO: 15150 - protein, 258 aa, Maize streak virus
MASSSSNRQFSHRNANTFLTYPKCPENPEIACQMIWELVVRWIPKYIICAREAHKDGSWHLHALLQTEKPVRISDSRFFDINGFHPNIQSAKSVNRVRDYILKEPLAMFERGTFIPRKSPFLGKSDSEVKEKKPSKDEIMRDIISHSTSKEEYLSMIQKEFPYDWSTKLQYFEYSANKLFPEIQEEFTNPHPPSSPDLLCNESINDWLQPNIFQVSPEAYMLLQPTCYTLEDAISDLQWMDSVSRHQMKDQESRASTS

SEQ ID NO: 15151 - protein, 272 aa, Maize streak virus
MASSSSNRQFSHRNANTFLTYPKCPENPEIACQMIWELVVRWIPKYILCAREAHKDGSLHLHALLQTEKPVRISDSRFFDINGFHPNIQSAKSVNRVRDYILKEPLAMFERGTFIPRKSPFLGKSDSEVKEKKPSKDEIMRDIISHATSKVEYLSMIQKELPYDWSTKLQYFEYSANKLFPEIQEEFTNPHPQSSPDLLCNESINDWLQPNIFQVSPEAYMLLQPTCYTLEDAISDLQWMDNVSSHQMKDQESRASTSSAQQEQENLLGPEA

SEQ ID NO: 15152 - protein, 272 aa, Maize streak virus
MASSSSNRQFSHRNVNTFLTYPHCPENPEILCQMIWELVGRWTPKYIICAREAHRDGDMHLHALIQTEKPVRITDSRFFDIKGFHPNIQSAKSVNKVRDYILKEPLALFERGTFIPRKSSFLGNPSKGNSEKKPSKDEIMREIISHSTSKLEYLSMVRKEFPYDWATKLQYFEYSANKLFPEIQEEFISPHPPSSPDLLCNESIKDWLQPNIFQVSPESYMLLQPTCYTLEEAISDLEWMDQLSSQQMKEQESRASTSSVQHEQENLLGPEA

SEQ ID NO: 15153 - protein, 272 aa, Maize streak virus
MASSSSNRQFSHRNVNTFLTYPKCPENPEIACQMIWELVVRWIPKYIVCAREAHKDGSLHLHALLQTEKPVRISDSRFFDINGFHPNIQSAKSVNRVRDYILKEPLAVFERGTFIPRKSPFLGKSDSEVKEKKPSKDEIMRDIISHCTSKEEYLSMIQKEFPYDWATKLQYFEYSANKLFPEIQEEFTNPHPPSSPDLLCNETINDWLQPNIFQVSPQAYMLLQPNCYTLEDAISDLQWMDSVSSHQMRDQESRASTSSAQQEPENLLGPEA

SEQ ID NO: 15154 - protein, 272 aa, Maize streak virus
MASSSSNRQFSHRNANTFLTYPKCPENPEIACQMIWELVVRWIPKYILCAREAHKDGSLHLHALLQTEKPVRISDSRFFDINGFHPNIQSAKSVNRVRDYILKEPLAVFERGTFIPRKSPFLGKSDSEVKEKKPSKDEIMRDIISHATSKAEYLSMIQKELPFDWSTKLQYFEYSANKLFPEIQEEFTNPHPPSSPDLLCNESINDWLQPNIFQVSPEAYMLLQPTCYTLEDAISDLQWMDSVSSHQMKDQESRASTSSAQQEPENLLGPEA

SEQ ID NO: 15155 - protein, 272 aa, Maize streak virus
MASSSSNRQFSHRNANTFLTYPKCPENPEIACQMIWELVVRWIPKYILCAREAHKDGSLHLHALLQTEKPVRISDSRFFDINGFHPNIQSAKSVNRVRDYILKEPLAVFERGTFIPRKSPFLGKSDSEVKEKKPSKDEIMRDIISHSTSKEEYLSMIQKELPFDWSTKLQYFEYSANKLFPEIQEEFTNPHPPSQPDLLCNESINDWLQPNIFQVSPEAYMLLQPNCYTLEDAISDLQWMDSVSSHQMKDQESRASTSSAQQEPENLLGPEA

SEQ ID NO: 15156 - protein, 258 aa, Maize streak virus
MASSSSNRQFSHRNANTFLTYPKCPENPEIACQMIWELVVRWIPKYILCAREAHKDGSLHLHALLQTEKPVRISDSRFFDINGFHPNIQSAKSVNRVRDYILKEPLAMFERGTFIPRKSPFLGKSDSEVKEKKPSKDEIMRDIISHSTSKEEYLSMIQKEFPYDWSTKLQYFEYSANKLFPEIQEEFTNPHPPSSPDLLCNESINDWLQPNIFQVSPEAYMLLQPTCYTLEDAISDLQWMDSVSSHQMKDQESRASTS

SEQ ID NO: 15157 - protein, 261 aa, Maize streak virus
MASSSSNRQFSHRNANTFLTYPKCPENPEIACQMIWELVVRWIPKYILCAREAHKDGSLHLHALLQTEKPVRISDSRFFDINGFHPNIQSAKSVNRVRDYILKEPLAVFERGTFIPRKSPFLGKSDSEVKEKKPSKDEIMRDIISHATSKEEYLSMIQKELPFDWSTKLQYFEYSANKLFPEIQEEFTNPHPPSSPDLLCNESINDWLQPNIFQVSPEAYMLLQPTCYTLEDAISDLQWMDSVSSHQMKDQESRASTSSAQ

SEQ ID NO: 15158 - protein, 261 aa, Maize streak virus
MASSSSNRQFSHRNANTFLTYPKCPENPEIACQMIWELVVRWIPKYILCAREAHKDGSLHLHALLQTEKPVRISDSRFFDINGFHPNIQSAKSVNRVRDYILKEPLAVFERGTFIPRKSPFLGKSDSEVKEKKPSKDEIMRDIISHCTSKEEYLSMIQKELPFDWSTKLQYFEYSANKLFPEIQEEFTNPHPPSSPDLLCNESINDWLQPNIFQVSAEAYMLLQPTCYTLEDAISDLQWMDSVSSHQMKDQESRASTSSAQ

SEQ ID NO: 15159 - protein, 272 aa, Maize streak virus
MASSSSNRQFSHRNVNTFLTYPHCPENPEIVCQMIWELVGRWTPKYIICAREAHKDGDMHLHALVQTDKPVRITDSRFFDINGFHPNIQSAKSVNKVRDYILKEPLALFERGTFIPRESSFLGNPSKGNSEKKPSKDEIMREIISHSTSKLEYLSLVRKEFPYDWATKLQYFEYSANKLFPEIQEEFISPHPPSSPDLLCNESIKDWLQPNIYQVSPESYMLLQPTCYTLEDAISDLEWMDKLSSQQMKEQESRASTSSVQQELENLLGPEA

SEQ ID NO: 15160 - protein, 272 aa, Maize streak virus
MTSSSSNRPFSHRSPNTFLTYPQCPEQPEIISQRIWDLCSHWTPLYIICAREAHRDGNQCLHALIQTEKPVRTTDSRFFDIDGFHPNIQSAISPNKVRDYITKEPLALFERGTFIPRKKSFLGNSSKGNSDKKPSKDEIMRDIISHATSKQEYLSMVQKSLPYDWSTKLQYFEYSANKLFPDIQEEFINPHPTSEPDLLCNESIKDWLQPNIYQVSPQAYLLLQPNCYSIDDAISDLEWLDDLTSKQIMEQGSAASTSSVQQGQENLHGPEA

SEQ ID NO: 15161 - protein, 261 aa, Maize streak virus
MASSSSNRQFSHRNANTFLTYPKCPENPEIACQMIWELVVRWIPKYILCAREAHKDGSLHLHALLQTEKPVRISDSRFFDINGFHPNIQSAKSVNRVRDYILKEPLAMFERGTFIPRKSPFLGKSDSEVKEKKPSKDEIMRDIISHATSKEEYLSMIQKELPYDWSTKLQYFEYSANKLFPEIQEEFTNPHPQSSPDLLCNESINDWLQPNIFQVSPEAYMLLQPTCYTLEDAISDLQWMDSVSSHQMKDQESRASTSSAQ

SEQ ID NO: 15162 - protein, 258 aa, Maize streak virus
MASSSSNRQFSHRNANTFLTCPKCPENPEIACQMIWELVVRWIPKYILCAREAHKDGSLHLHALLQTEKPVRISDSRFFDINGFHPNIQSAKSVNRVRDYILKEPLAMFERGTFIPRKSPFLGKSDSEVKEKKPSKDEIMRDIISHSTSKEEYLSMIQKEFPYDWSTKLQYFEYSANKLFPEIQEEFTNPHPPSSPDLLCNESINDWLQPNIFQVSPEAYMLLQPTCYTLEDAISDLQWMDSVSSHQMKDQESRASTS

SEQ ID NO: 15163 - protein, 261 aa, Maize streak virus
MASSSSNRQFSHRNANTFLTYPKCPENPEIACQMIWELVVRWIPKYILCAREAHKDGSLHLHALLQTEKPVRISDSRFFDINGFHPNIQSAKSVNRVRDYILKEPLAVFERGTFIPRKSPFLGKSDSEVKEKKPSKDEIMRDIISHSTSKEEYLSMIQKELPFDWSTKLQYFEYSANKLFPEIQEEFTNPHPPSQPDLLCNESINDWLQPNIFQVSPEAYMLLQPNCYTLEDAISDLQWMDSVSSHQMKDQESRASTSSAQ

SEQ ID NO: 15164 - protein, 261 aa, Maize streak virus
MASSSSNRQFSHRNVNTFLTYPKCPENPEIACQMIWELVVRWIPKYIVCAREAHKDGSLHLHALLQTEKPVRISDSRFFDINGFHPNIQSAKSVNRVRDYILKEPLAVFERGTFIPRKSPFLGKSDSEVKEKKPSKDEIMRDIISHCTSKEEYLSMIQKEFPYDWATKLQYFEYSANKLFPEIQEEFTNPHPPSSPDLLCNETINDWLQPNIFQVSPQAYMLLQPNCYTLEDAISDLQWMDSVSSHQMRDQESRASTSSAQ

SEQ ID NO: 15165 - protein, 261 aa, Maize streak virus
MASSSSNRQFSHRNVNTFLTYPHCPENPEILCQMIWELVGRWTPKYIICAREAHRDGDMHLHALIQTEKPVRITDSRFFDIKGFHPNIQSAKSVNKVRDYILKEPLALFERGTFIPRKSSFLGNPSKGNSEKKPSKDEIMREIISHSTSKLEYLSMVRKEFPYDWATKLQYFEYSANKLFPEIQEEFISPHPPSSPDLLCNESIKDWLQPNIFQVSPESYMLLQPTCYTLEEAISDLEWMDQLSSQQMKEQESRASTSSVQ

SEQ ID NO: 15166 - protein, 271 aa, Maize streak virus
MASSSSNRSFLHRNANTFLTYPHCPENPEIISQKLWDLVARWNPLYIVCAREAHRDGNMHLHALLQTDKPVRTTDARIFDIEGFHPNIQSAKSVNKVRDYILKEPLAVFERGTFIPRKSCFQGNTPPFPKKNPNKDEIMAHIISHATSKQEYLCLVRKEFPYDWATKLQYFEYSANKLFPDIQEEFISPHPPSSPDLLCNESIKDWLQPNIYQVSPEAYMLLQPTCYTVDEAISDLTWMDNLSSQQMKDQESRASTSSVQQGQGNLLGPEV

SEQ ID NO: 15167 - protein, 272 aa, Maize streak virus
MTSSSSNRQFLHRTANTFLTYPQCPEHPEIISQRIWDLVGRWNPLYIICAQEAHEDGNMHLHALIQTDKQVRTTDSRFFDIDGFHPNIQSAMSPNKVRDYILKEPLALFERGTFVPRKKTFLGNSSKGNSEKKPSKDEIMQDIISHATSKPEYLSMVRKSFPYDWATKLQYFEYSANKLFPDIQEEFINPHPTSEPDLLCNESIKDWLQPNIYQVSPQAYMLLQPNCYTVDDAISDLQWLDDLTSKQIMDQESRASTSSVQQGQENLLGPEA

SEQ ID NO: 15168 - protein, 272 aa, Maize streak virus
MASSSSNRQFSHRNVNTFLTYPHCPENPEIVCQMIWELVGRWTPKYIICAQEAHRDGDMHLHALLQTEKPVRITDSRFFDIEGFHPNIQSAKSVNKVRDYILKEPLAVFERGTFIPRKSSFQGNPSKGNSEKKPSKDEIMREIISHSTSKLEYLSMIRKEFPYDWATKLQYFEYSANKLFPEIQEEFISPHPPSSPDLLCNESIKDWLQPNIFQVSPESYMLLQPTCYTLEDAISDLEWMDKLSSQQMKDQESRASTSSVQQELGNLLGPEA

SEQ ID NO: 15169 - protein, 272 aa, Maize streak virus
MASSSSNRQFSHRNVNTFLTYPHCPENPEIVCQMIWELVGRWTPKYIICAQEAHKDGDMHLHALLQTEKPVRITDSRFFDIEGFHPNIQSAKSVNKVRDYILKEPLAVFERGTFIPRKSSFQGNPSKGNSEKKPSKDEIMREIISHSTSKLEYLSMIRKEFPYDWATKLQYFEYSANKLFPEIQEEFISPHPPSSPDLLCNESIKDWLQPNIFQVSPESYMLLQPTCYTLEDAISDLEWMDKLSSQQMKEQESRASTSSVQQELGNLLGPEA

SEQ ID NO: 15170 - protein, 261 aa, Maize streak virus
MASSSSNRQFSHRNVNTFLTYPHCPENPEIVCQMIWELVGRWTPKYIICAQEAHKDGDMHLHALLQTEKPVRITDSRFFDIEGFHPNIQSAKSVNKVRDYILKEPLAVFERGTFIPRKSSFQGNPSKGNSEKKPSKDEIMREIISHSTSKLEYLSMIRKEFPYDWATKLQYFEYSANKLFPEIQEEFISPHPPSSPDLLCNESIKDWLQPNIFQVSPESYMLLQPTCYTLEDAISDLEWMDKLSSQQMKEQESRASTSSVQ

SEQ ID NO: 15171 - protein, 261 aa, Maize streak virus
MASSSSNRQFSHRNVNTFLTYPKCPENPEIACQMIWELVVRWIPKYIVCAREAHKDGSLHLHALLQTEKPVRISDSRFFDINGVHPNIQSAKSVNRVRDYILKEPLAMFERGTFIPRKSPFLGKSDSEVKEKKPSKDEIMRDIISHSTSKEEYLSMIQKEFPYDWVTKLQYFEYSANKPYPEIQEEFTNPHPQSTPDLLCSESINDWLQPNIFQVSPEAYMLLQPTCYTLEDAISDLQWMDSVSSHQMKDQESRASTSSAQ

SEQ ID NO: 15172 - protein, 261 aa, Maize streak virus
MTSSSSNRQFLHRTANTFLTYPQCPEHPEIISQRIWDLVGRWNPLYIICAQEAHEDGNMHLHALIQTDKQVRTTDSRFFDIDGFHPNIQSAMSPNKVRDYILKEPLALFERGTFVPRKKTFLGNSSKGNSEKKPSKDEIMQDIISHATSKPEYLSMVRKSFPYDWATKLQYFEYSANKLFPDIQEEFINPHPTSEPDLLCNESIKDWLQPNIYQVSPQAYMLLQPNCYTVDDAISDLQWLDDLTSKQIMDQESRASTSSVQ

SEQ ID NO: 15173 - protein, 411 aa, Maize streak virus
MASSSSNRGFSHRNANTFLTYPKCPENPEIACQMIWELVVRWIPKYILCAREAHKDGSLHLHALLGTEKPVRISDSRFFDINGFHPNIGSAKSVNRVRDYILKEPLAVFERGTFTIPRKSPFLGKSDSEVKEKKPSKDEIMRDIISHSTSKEEYLSMIQKELPFDWSTKLQYFEYSANKLFPEIQEEFTNPHPPSSPDLLCNESINDWLQPNIFQVSPDLLCNESINDWLQPNIFQVSPEAYMLLQPACYTLDDAISDLQWMDSVSSHQMKDQESRASTSSAQQEQENLGPEAGFIITGKIMLIGLHTTKHAIYNIVDDIPFKFCPCWKQLVGCQRDFIVNPKYGKKKKVQKKSKPTIILANSDEDWMKEMTPGQLEYFQANCIIYIMSPGEKWYSPPELPPTEAVHSDRS

SEQ ID NO: 15174 - protein, 360 aa, Maize streak virus
MASSSSNRQFSHRNVNTFLTYPKCPENPEIACQMIWELVVRWIPKYIVCAREAHKDGSLHLHALLQTEKPVRISDSRFFDINGFHPNIQSAKSVNRVRDYILKEPLAVFERGTFIPRKSPFLGKSDSEVKEKKPSKDEIMRDIISHCTSKEEYLSMIQKEFPYDWATKLQYFEYSANKLFPEIQEEFTNPHPPSSPDLLCNETINDWLQPNIFQSSDERSRKQSLYIVGPTRTGKSTWARGLGVHNYWQNNVDWSSYNEDAIYNIVDDIPFKFCPCWKQLVGCQRDFIVNPKYGKKKKVQKKSKPTIILANSDEDWMKEMTPGQLEYFEANCTIYIMSPGEKWYSPPELPPTEAVHSDRS

SEQ ID NO: 15175 - protein, 360 aa, Maize streak virus
MASSSSNRQFSHRNANTFLTYPKCPENPEIACQMIWELVVRWIPKYILCAREAHKDGSLHLHALLQTEKPVRISDSRFFDINGFHPNIQSAKSVNRVRDYILKEPLAVFERGTFIPRKSPFLGKSDSEVKEKKPSKDEIMRDIISHATSKEEYLSMIQKELPFDWSTKLQYFEYSANKLFPEIQEEFTNPHPPSSPDLLCNESINDWLQPNIFQSSDERSRKQSLYIVGPTRTGKSTWARSLGVHNYWQNNVDWSSYNEDAIYNIVDDIPFKFCPCWKQLVGCQRDFIVNPKYGKKKKVQKKSKPTIILANSDEDWMKEMTPGQLEYFEANCVIYIMSPGEKWYSPPELPPTEAVHSDRS

SEQ ID NO: 15176 - protein, 360 aa, Maize streak virus
MASSSSNRQFSHRNANTFLTYPKCPENPEIACQMIWELVVRWIPKYILCAREAHKDGSLHLHALLQTEKPVRISDSRFFDINGFHPNIQSAKSVNRVRDYILKEPLAVFERGTFIPRKSPFLGKSDSEVKEKKPSKDEIMRDIISHSTSKEEYLSMIQKELPFDWSTKLQYFEYSANKLFPEIQEEFTNPHPPSQPDLLCNESINDWLQPNIFQSSDERSRKQSLYIVGPTRTGKSTWARSLGVHNYWQNNVDWSSYNEDAIYNIVDDIPFKFCPCWKQLVGCQRDFIVNPKYGKKKKVQKKSKPTIILANSDEDWMKEMNPGQLDYFEANCIIYIMSPGEKWYSPPELPPTEAVHSDRS

SEQ ID NO: 15177 - protein, 360 aa, Maize streak virus
MASSSSNRQFSHRNANTFLTYPKCPENPEIACQMIWELVVRWIPKYILCAREAHKDGSLHLHALLQTEKPVRISDSRFFDINGFHPNIQSAKSVNRVRDYILKEPLAMFERGTFIPRKSPFLGKSDSEVKEKKPSKDEIMRDIISHSTSKEEYLSMIQKELPYDWSTKLQYFEYSANKLFPEIQEEFTNPHPPSSPDLLCNESINDWLQPNIFQSSDERSRKQSLYIVGPTRTGKSTWARSLGVHNYWQNNVDWSSYNEDAIYNIVDDIPFKFCPCWKQLVGCQRDFIVNPKYGKKKKVQKKSKPTIILANSDEDWMKEMTPGQLEYFEANCVIYIMSPGEKWYSPPELPPTEAVHSDRS

SEQ ID NO: 15178 - protein, 360 aa, Maize streak virus
MASSSSNRQFSHRNANTFLTYPKCPENPEIACQMIWELVVRWIPKYILCAREAHKDGSLHLHALLQTEKPVRISDSRFFDINGFHPNIQSAKSVNRVRDYILKEPLAMFERGTFIPRKSPFLGKSDSEVKEKKPSKDEIMRDIISHSTSKEEYLSMIQKELPYDWSTKLQYFEYSANKLFPEIQEEFTNPHPQSSPDLLCNESINDWLQPNIFQSSDERSRKQSLYIVGPTRTGKSTWARSLGVHNYWQNNVDWSSYNEDAIYNIVDDIPFKFCPCWKQLVGCQRDFIVNPKYGKKKKVQKKSKPTIILANSDEDWMKEMTPGQLEYFEANCVIYIMSPGEKWYSPPELPPTEAVHSDRS

SEQ ID NO: 15179 - protein, 360 aa, Maize streak virus
MASSSSNRQFSHRNVNTFLTYPKCPENPEIACQMIWELVVRWIPKYIVCAREAHKDGSLHLHALLQTEKPVRISDSRFFDINGFHPNIQSAKSVNRVRDYILKEPLAMFERGTFIPRKSPFLGKSDSEVKEKKPSKDEIMRDIISHSTSKEEYLSMIQKEFPYDWVTKLQYFEYSANKLFPEIQEEFTNPHPQSTPDLLCSESINDWLQPNIFQSSDERSRKQSLYIVGPTRTGKSTWARSLGVHNYWQNNVDWSSYNEDAIYNIVDDIPFKFCPCWKQLVGCQRDFIVNPKYGKKKKVQKKSKPTIILANSDEDWMKEMTPGQLEYFEANCVIWIMSPGEKWYSPPELPPTEAVHSDRS

SEQ ID NO: 15180 - protein, 355 aa, Maize streak virus
MASSSSNRQFSHRNANTFLTYPKCPENPEIACQMIWELVVRWIPKYILCAREAHKDGSLHLHALLQTEKPVRISDSRFFDINGFHPNIQSAKSVNRVRDYILKEPLAVFERGTFIPRKSPFLGKSDSEVKEKKPSKDEIMRDIISHCTSKEEYLSMIQKELPFDWSTKLQYFEYSANKLFPEIQEEFTNPHPPSSPDLLCNESINDWLQPNIFQSSDERSRKQSLYIVGPTRTGKSTWARSLGVHNYWQNNVDWSSYNEDAIYNIVDDIPFKFCPCWKQLVGCQRDFIVNPKYGKKKKVQKKSKPTIILANSDEDWMKEMTPGQLEYFEANCIIYIMSPGEKWYSPPVLPPTEEV

SEQ ID NO: 15181 - protein, 360 aa, Maize streak virus
MASSSSNRQFSHRNANTFLTYPKCPENPEIACQMIWELVVRWIPKYILCAREAHKDGSLHLHALLQTEKPVRISDSRFFDINGFHPNIQSAKSVNRVRDYILKEPLAMFERGTFIPRKSPFLGKSDSEVKEKKPSKDEIMRDIISHATSKVEYLSMIQKELPYDWSTKLQYFEYSANKLFPEIQEEFTNPHPQSSPDLLCNESINDWLQPNIFQSSDERSRKQSLYIVGPTRTGKSTWARSLGVHNYWQNNVDWSSYNEDAIYNIVDDIPFKFCPCWKQLVGCQRDFIVNPKYGKKKKVQKKSKPTIILANSDEDWMKEMTPGQLEYFEANCVIYIMSPGEKWYSPPELPPTEAVHSDRS

SEQ ID NO: 15182 - protein, 355 aa, Maize streak virus
MASSSSNRQFSHRNVNTFLTYPHCPENPEIVCQMIWELVGRWTPKYIICAREAHKDGDMHLHALVQTDKPVRITDSRFFDINGFHPNIQSAKSVNKVRDYILKEPLALFERGTFIPRESSFLGNPSKGNSEKKPSKDEIMREIISHSTSKLEYLSLVRKEFPYDWATKLQYFEYSANKLFPEIQEEFISPHPPSSPDLLCNESIKDWLQPNIYQPTDERTRKQSLYIVGPTRTGKSTWARSLGVHNYWQNNVDWSSYNEDAIYNIVDDIPFKYCPCWKQLVGCQKEFVVNPKYGKKKKVQMKSKPTIILANSDEDWMKEMTPGQLEYFEANCMIYIMSPGEKWYSPPVLPPTEAV

SEQ ID NO: 15183 - protein, 355 aa, Maize streak virus
MASSSSNRQFSHRNVNTFLTYPHCPENPEILCQMIWELVGRWTPKYIICAREAHRDGDMHLHALIQTEKPVRITDSRFFDIKGFHPNIQSAKSVNKVRDYILKEPLALFERGTFIPRKSSFLGNPSKGNSEKKPSKDEIMREIISHSTSKLEYLSMVRKEFPYDWATKLQYFEYSANKLFPEIQEEFISPHPPSSPDLLCNESIKDWLQPNIFQPTDEGTRKQSLYIVGPTRTGKSTWARSLGLHNYWQNNVDWSSYNEDAIYNIVDDIPFKFCPCWKQLVGCQKEFVVNPKYGKKKKVQMKSKPTIILTNWDEDWMKEMTPGQMEYFEANCMIYKMSPGEKWYSPPVLPPTEEV

SEQ ID NO: 15184 - protein, 355 aa, Maize streak virus
MTSSSSNRQFLHRTANTFLTYPQCPEHPEIISQRIWDLVGRWNPLYIICAQEAHEDGNMHLHALIQTDKQVRTTDSRFFDIDGFHPNIQSAMSPNKVRDYILKEPLALFERGTFVPRKKTFLGNSSKGNSEKKPSKDEIMQDIISHATSKPEYLSMVRKSFPYDWATKLQYFEYSANKLFPDIQEEFINPHPTSEPDLLCNESIKDWLQPNIYQQADNGSRKQSLYIVGPTRTGKSTWARSLGRHNYWQNNVDWSSYNEDAIYNIVDDIPFKYCPCWKQLVGCQKEFVVNPKYGKKKKVQMKSKPTIILANSDEDWMKEMTPGQLEYFEANCMIYIMSPGEKWYSPPQLPPTEEV

SEQ ID NO: 15185 - protein, 354 aa, Maize streak virus
MASSSSNRSFLHRNANTFLTYPHCPENPEIISQKLWDLVARWNPLYIVCAREAHRDGNMHLHALLQTDKPVRTTDARIFDIEGFHPNIQSAKSVNKVRDYILKEPLAVFERGTFIPRKSCFQGNTPPFPKKNPNKDEIMAHIISHATSKQEYLCLVRKEFPYDWATKLQYFEYSANKLFPDIQEEFISPHPPSSPDLLCNESIKDWLQPNIYQPADEGSRKQSLYIVGPTRTGKSTWARSLGLHNYWQNNVDWSSYNEDAIYNIVDDIPFKYCPCWKQLVGCQKEFVVNPKYGKKKKVQMKSKPTIILANSDEDWMKEMTPGQLEYFEANCMIYVMSPGEKWYSPPQLPPTEEV

SEQ ID NO: 15186 - protein, 355 aa, Maize streak virus
MASSSSNRQFSHRNVNTFLTYPHCPENPEIVCQMIWELVGRWTPKYIICAQEAHKDGDMHLHALLQTEKPVRITDSRFFDIEGFHPNIQSAKSVNKVRDYILKEPLAVFERGTFIPRKSSFQGNPSKGNSEKKPSKDEIMREIISHSTSKLEYLSMIRKEFPYDWATKLQYFEYSANKLFPEIQEEFISPHPPSSPDLLCNESIKDWLQPNIFQPTDEGTRKQSLYIVGPTRTGKSTWARSLGLHNYWQNNVDWSSYNEDAIYNIVDDIPFKFCPCWKQLVGCQKEFVVNPKYGKKKKVQMKSKPTIILANWDEDWMNEMTPGQLEYFEANCMIYKMSPGEKWYSPPVLPPTEEV

SEQ ID NO: 15187 - protein, 355 aa, Maize streak virus
MASSSSNRQFSHRNVNTFLTYPHCPENPEIVCQMIWELVGRWTPKYIICAQEAHRDGDMHLHALLQTEKPVRITDSRFFDIEGFHPNIQSAKSVNKVRDYILKEPLAVFERGTFIPRKSSFQGNPSKGNSEKKPSKDEIMREIISHSTSKLEYLSMIRKEFPYDWATKLQYFEYSANKLFPEIQEEFISPHPPSSPDLLCNESIKDWLQPNIFQPTDEGSRKQSLYIVGPTRTGKSTWARSLGLHNYWQNNVDWSSYNEDAIYNIVDDIPFKYCPCWKQLVGCQKEFVVNPKYGKKKKVQMKSKPTIILANWDEDWMNEMTPGQLEYFEANCMIYKMSPGEKWYSPPMLPPTEEV

SEQ ID NO: 15188 - protein, 272 aa, Maize streak virus (Kenyan isolate)
MASSSSNRQFSHRNANTFLTYPKCPENPEIACQMIWELVVRWIPKYILCAREAHKDGSLHLHALLQTEKPVRISDSRFFDINGFHPNIQSAKSVNRVRDYILKEPLAVFERGTFIPRKSPFLGKSDSEVKEKKPSKDEIMRDIISHSTSKEEYLSMIQKELPFDWSTKLQYFEYSANKLFPEIQEEFTNPHPPSSPDLLCNESINDWLQPNIFQVSPEAYMLLQPACYTLDDAISDLQWMDSVSSHQMKDQESRASTSSAQQEQENLLGPEA

SEQ ID NO: 15189 - protein, 272 aa, Maize streak virus (Nigerian isolate)
MASSSSNRQFSHRNANTFLTYPKCPENPEIACQMIWELVVRWIPKYILCAREAHKDGSLHLHALLQTEKPVRISDSRFFDINGFHPNIQSAKSVNRVRDYILKEPLAVFERGTFIPRKSPFLGKSDSEVKEKKPSKDEIMRDIISHATSKEEYLSMIQKELPFDWSTKLQYFEYSANKLFPEIQEEFTNPHPPSSPDLLCNESINDWLQPNIFQVSPEAYMLLQPTCYTLEDAISDLQWMDSVSSHQMKDQESRASTSSAQQEPENLLGPEA

SEQ ID NO: 15190 - protein, 217 aa, Miscanthus streak virus
MRAPASSAASNRPGPSNHPTPRWNSKQFFLTYPHCNLTPSELMKELFSRLTEKIPGYIKVSQEFHKDGDPHLHVLIQLNTKLCTRNPKFFDVQGFHPNIQPVRDAEKVFGYISKTNGDSDEMGELQLRIKKPEKPTRDQRMAMIIASSTNRNEYLSMVRKEFPFDWAIRLQQFEYSAAALFTEPPPVYQSPFPNEQIVCPPELVDIIDQEWNQVTTD

SEQ ID NO: 15191 - protein, 217 aa, Miscanthus streak virus
MRAPASSAASNRPGPSNHPTPRWNSKQFFLTYPHCNLTPSELMKELFSRLTEKIPGYIKVSQEFHKDGDPHLHVLIQLNTKLCTRNPKFFDVQGFHPNIQPVRDAEKVFGYISKTNGDSDEMGELQLRNKKPEKPTRDQRMAMIIASSTNRNEYLSMVRKEFPFDWAIRLQQFEYSAAALFTEPPPVYQSPYPNEQIVCPPELVDIIDQEWNQVTTD

SEQ ID NO: 15192 - protein, 324 aa, Panicum streak virus
MSTSLSITSDGRHSVRSFRHRNANTFLTYSKCPLEPEFIGEHLFRLTKDFEPAYILVVRETHQDGTWHCHALLQCIKPVTTRDERYFDIDRYHPNIQSAKSTDKVREYILKDPKDKWEKGTYIPRKKSFVPPGKENSEKKPSKDEVMKEIMTHATSRAEYLSLVQTSLPYDWATKLSYFEYSASRLFPDIAEPYSNPHPATDPDLLCNETLQDWLEPNIYQVSPKAYMLLEPSCLSLEQAKADLEWLSETTRLFQEQESEASTSSAQHGQVKHPGPEASDGTTTGRITSTGLHTMKKLRTMSWTTFPSSSVRAGSSSSAVKKTT

SEQ ID NO: 15193 - protein, 208 aa, potato yellow mosaic virus
MPRKGSFSIKAKNYFLTYPHCSLSKEDALSQIQNLNIPVNKKFIKICRELHENGEPHLHVLIQFEGKFNCTNNRLFDLVSPTWSTHFHPNIQGAKSSSDVKSYVEKDGDTIEWGLFQIDGRSARGGQQTSNDAAAEALNSGAKEEAMKIIKEKLPEKFLFQYHNLSSNLDRIFMKAPKPWAPPFPLSSFTNIPDEMQEWADEYFGRGA

SEQ ID NO: 15194 - protein, 289 aa, potato yellow mosaic virus
MPRKGSFSIKAKNYFLTYPHCSLSKEDALSQIQNLNIPVNKKFIKICRELHENGEPHLHVLIQFEGKFNCTNNRLFDLVSPTWSTHFHPNIQGAKSSSDVKSYVEKDGDTIEWGLFQIDGRSARGGQQTSNDAAAEALNSGTKEEAMKIIKEKLPEKFLFQYHNLSSNLDRIFMKAPKPWAPPFPLSSFTNVPDEMQEWADEYFGRGAAARPDRPISIIIEGDSRTGKTMWARVLGPHNYLSGHLDFNSRVYSNEVEYNVIDDVAPQYLKLKHWEDNVGLQMHREDNVG

SEQ ID NO: 15195 - protein, 361 aa, potato yellow mosaic virus
MPRKGSFSIKAKNYFLTYPQCSISKEEALSQLQNLTIPVNKKFIKICRELHENGEPHLHVLIQFEGKYNCTNNRLFDLVSPTRSTHFHPNIQGAKSSSDVKSYVEKDGDTIEWGLFQIDGRSARGGQQTVNDAAAEALNSGTKEAAMKIIKEKLPEKFLFQYHNLSCNLDRIFMKAPETWAPPFPLSSFTNVPDEMQEWADGYFGKSSAARPERPISIIIEGDSRRGKTMWARVLGPHNYLSGHLDFNPRVYSNEVEYNVIDDVAPQYLKLKHWKELLGAQRDWQSNCKYGKPVQIKGGIPSIVLCNPGEGSSYKAFLDKDENASLKNWTLKNAVFITITAPLYQEGTQASKEEGNQEETH

SEQ ID NO: 15196 - protein, 359 aa, squash leaf curl virus
MAPPKRFRIQAKNYFLTYPKCSLTKEEALSQLQTLETPTSKKFIKICRELHEDGSPHIHVLIQFEGKFVCTNNRFFDLVSPSRSAHFHPNIQGAKSSSDVKSYIDKDGDTLEWGKFQVDGRSARGGQQSANDTAAKALNSGSAEAALAIIREELPKDFIFQYHNIKNNLDRIFAPPVEVYVSPFSISSFDKVPQELVDWVSGNVVCSARPIRPIGIVLEGDSRTGKTAWARSLGTQLLVRPLDLSPKVYSNDAWYNVIDDVDPHYLKHFKEFMGAQRDWQSNTKYGKPVMIKGGIPTIFLCNPGPNSSYKEYLDEDKNAALKQWALKNAIFITLEEPLYSGRERIATAEEEEEHQAQTN

SEQ ID NO: 15197 - protein, 347 aa, squash leaf curl virus
MPRNPNSFRLTARNIFLTYPRCDVPKEEVLEMLLHLSWSVVKPNYVRVAREEHSDGSPHLHCLIQLSGKSNIKDAGFFDLTHPRRSARFHPNIQAAKDTNAVKNYITKEGDYCESGQYKVSGGSKSNKDDVYHNAVNAGSAGEALDIIKAGDPKTFIVNYHNLLANVERLFQKPPEPWVPPFELSSFTSVPEELQDWADDYFNECSAAARPTSIIIEGGSRTGKTMWARSLGPHNYLSGHLDFNSRVFSNDVKYNVIDDVAPHYLKLKHWKELIGAQRDWQSNCKYGKPVQIKGGIPSIVLCNPGEGSSYKDFLDKAENSALREWTEKNAKFIFLEGPLYQSTAQDC

SEQ ID NO: 15198 - protein, 348 aa, squash leaf curl virus
NMPRNPNSFRLTARNIFLTYPRCDVPKEEVLEMLLHLSWSVVKPNYVRVAREEHSDGSPHLHCLIQLSGKSNIKDAGFFDLTHPRRSARFHPNIQAAKDTNAVKNYITKEGDYCESGQYKVSGGSKSNKDDVYHNAVNAGSAGEALDIIKAGDPKTFIVNYHNLLANVERLFQKPPEPWVPPFELSSFTSVPEELQDWADDYFNECSAAARPTSIIIEGGSRTGKTMWARSLGPHNYLSGHLDFNSRVFSNDVKYNVIDDVAPHYLKLKHWKELIGAQRDWQSNCKYGKPVQIKGGIPSIVLCNPGEGSSYKDFLDKAENSALREWTEKNAKFIFLEGPLYQSTAQDC

SEQ ID NO: 15199 - protein, 295 aa, tobacco yellow dwarf virus
MPSAPQKTKSFRLQTKYVFLTYPRCSSSAENLRDFLWDKLSRFAIFFIAIATELHQDGTPHLHCLIQLDKRSNIRDPSFFDLEGNHPNIQPAKNSEQVLEYISKDGNVITKGEFKKHRVSPSKSDERWRTIIQTATSKEEYLDMIKDEFPHEWATKLQWLEYSANKLFPPQPEIYQATFTEEDLQCHEDLQLWRDQHLYHVSVDAYRLVHNVTLVEAHSDLVWMDDISRNLEGLEPGSPPSTSADQVVPERQHGPEASEGTITGMGPSTSLSMMTTRPTTSSTTSPSNSSHSGSN

SEQ ID NO: 15200 - protein, 337 aa, tobacco yellow dwarf virus
MPSAPQKTKSFRLQTKYVFLTYPRCSSSAENLRDFLWDKLSRFAIFFIAIATELHQDGTPHLHCLIQLDKRSNIRDPSFFDLEGNHPNIQPAKNSEQVLEYISKDGNVITKGEFKKHRVSPSKSDERWRTIIQTATSKEEYLDMIKDEFPHEWATKLQWLEYSANKLFPPQPEIYQATFTEEDLQCHEDLQLWRDQHLYHEPRRAGTRIPSLYICGPSRTGKTTWARSLGRHNYWNGTIDFTVYDDHATYNVIDDIPFKFVPLWKQLIGCQSDFTVNPKYGKKKKIKGGVPCIILCNDDEDWLKNMSPAQIEYFEANCITHFMYAAETFFAPESSSH

SEQ ID NO: 15201 - protein, 352 aa, tomato golden mosaic virus
MPSHPKRFQINAKNYFLTYPQCSLSKEESLSQLQALNTPINKKFIKICRELHEDGQPHLHVLIQFEGKYCCQNQRFFDLVSPTRSAHFHPNIQRAKSSSDVKTYIDKDGDTLVWGEFQVDGRSARGGCQTSNDAAAEALNASSKEEALQIIREKIPEKYLFQFHNLNSNLDRIFDKTPEPWLPPFHVSSFTNVPDEMRQWAENYFGKSSAARPERPISIIIEGDSRTGKTMWARSLGPHNYLSGHLDLNSRVYSNKVEYNVIDDVTPQYLKLKHWKELIGAQRDWQTNCKYGKPVQIKGGIPSIVLCNPGEGASYKVFLDKEENTPLKNWTFHNAKFVFLNSPLYQSSTQSS

SEQ ID NO: 15202 - protein, 359 aa, tomato yellow leaf curl virus
MAQPKRFQINAKHYFLTFPKCCLTKEEALEQLLKLQTPTNKKYIKICRELHEDGQPHLHILMQFEGKFNCKNNRFFDLVSPTRSAHFHPNIQGAKSSSDVKSYIDKDGDVLEWGTFQIDGRSARGGQQTANDAYAKAINARSKSEALDVIKQLAPRDYVLHFHNISSNLDKVFQVPPAPYVSPFLSSSFDQVPEELEHWVSENVMDVAARPWRPVSIVIEGDSRTGKTMWARSLGPHNYLCGHLDLSQKVYSNNAWYNVIDDVDPHYLKHFKEFMGAQRDWQSNTKYGKPIQIKGGIPTIFLCNPGPQSSFKEYLDEEKNQALKNWAVKNAIFVTIDQPLFTDTHQNTTPHRQEEAGEE

SEQ ID NO: 15203 - protein, 359 aa, tomato yellow leaf curl virus
MAPPKRFQINCKNYFLTYPKCSLTKEEALSQLKDLETPTNKKYIKVCRELHENGEPHLHVLIQFEGKFKCQNQRFFDLVSPSRAAHFHPNIQGAKSSSDVKSYVDKDGDTVDWGEFQIDGRSARGGQQSANNAYAAALNSGSKSEALRIIKELMPKDYILQFHNLNSNLDRIFQEPPAPYISPLLSSSFNQVPDELEVWVSENVVSSAARPWRPNSIVIEGDSRTGKTMWARSLGPHNYLCGHLDLSPKVYSNDAWYNVIDDVDPHYLKHFKEFMGAQRDWQSNTKYGKPIQIKGGIPTIFLCNPGPTSSYREYLDEEKNISLKNWALKNATFVTLYEPLFACINQGPTQDSQEETNKA

SEQ ID NO: 15204 - protein, 357 aa, tomato yellow leaf curl virus
MPRLFKIYAKNYFLTYPNCSLSKEEALSQLKNLETPTNKKYIKVCRELHENGEPHLHVLIQFEGKYQCKNQRFFDLVSPNRSAHFHPNIQAAKSSTDVKTYVEKDGDFIDFGVFQIDGRSARGGQQSANDAYAEALNSGNKSEALNILKEKAPKDYILQFHNLSSNLDRIFSPPLEVYVSPFLSSSFNQVPDELEEWVAENVVSSAARPWRPNSIVIEGDSRTGKTMWARSLGPHNYLCGHLDLSPKVYSNDAWYNVIDDVDPHYLKHFKEFMGAQRDWQSNTKYGKPIQIKGGIPTIFLCNPGPTSSYREYLDEEKNISLKNWALKNATFVTLYEPLFASINQGPTQDSQEETNKA

SEQ ID NO: 15205 - protein, 242 aa, tomato yellow leaf curl virus
MAPPNKFRINAKNYFLTYPHCSLTKEEALSQIKTLETPVNKLFIRICRELHEDGSPHLHVLIQFEGKFQCKNQRFFDLTSPHRSAHFHPNIQGAKSSTDVKSYMEKDGDVLDHGVFQIDGRSARGGCQSANDAYAEAINSGSKASALNILREKAPKDFVLQFHNLNSNLDRIFTPPIVEYISPFSSSSFDQVPEELDEWAVDNVVSAAARPLRPVSIVIEGDSRTGKTMWARSLGPHEEYVD

SEQ ID NO: 15206 - protein, 357 aa, tomato yellow leaf curl virus
MPRLFKIYAKNYFLTYPNCSLSKEEALSQLKNIETPTNKKYIKVCREFHENGEPHLHVLIQFEGKYQCKNQRFFDLVSPNRSAHFHPNIQAAKSSTDVKTYVEKDGDFIDFGVFQIDGRSARGGQQSANDAYAEALNSGSKSEALNILKEKAPKDYILQFHNLSSNLDRIFSPPLEVYVSPFLSSSFNQVPDELEEWVAENVVSSAARPWRPISIVIEGNSRTGKTMWARSLGPHNYLCGHLDLSPKVYSNDAWYNVIDDVDPHYLKHFKEFMGAQRDWQSNTKYGKPIQIKGGIPTIFLCNPGPTSSYREYLDEEKNISLKNWALKNATFVTLYEPLFASINQGPTQDSQEETNKA

SEQ ID NO: 15207 - protein, 229 aa, tomato yellow leaf curl virus
MPRLFKIYAKNYFLTYPNCSLSKEEALSQLKNIETPTNKKYIKVCREFHENGEPHLHVLIQFEGKYQCKNQRFFDLVSPNRSAHFHPNIQAAKSSTDVKTYVEKDGDFIDFGVFQIDGRSARGGQQSANDAYAEALNSGSKSEALNILKEKAPKDYILQFHNLSSNLDRIFSPPLEVYVSPFLSSSFNQVPDELEEWVAENVVSSAARPWRPISIVIEGDSRTGKTMWA

SEQ ID NO: 15208 - protein, 357 aa, tomato yellow leaf curl virus
MPRLFKIYAKNYFLTYPNCSLSKEEALSQLKKLETPTNKKYIKVCKELHENGEPHLHVLIQFEGKYQCKNQRFFDLVSPNRSAHFHPNIQAAKSSTDVKTYVEKDGNFIDFGVSQIDGRSARGGQQSANDAYAEALNSGSKSEALNILKEKAPKDYILQFHNLSSNLDRIFSPPLEVYVSPFLSSSFNQVPDELEEWVAENVVYSAARPWRPISIVIEGDSRTGKTMWARSLGPHNYLCGHLDLSPKVYSNDAWYNVIDDVDPHYLKHFKEFMGAQRDWQSNTKYGKPIQIKGGIPTIFLCNPGPTSSYREYLDEEKNISLKNWALKNATFVTLYEPLFASINQGPTQDSQEETNKA

SEQ ID NO: 15209 - protein, 349 aa, tomato yellow leaf curl virus
MPSLNKFRINAKNYFLTYPQCSLSKEETLSQLKELQTPTSKKYIKICRELHEDGSPHLHVLIQFEGKFQCKNNRFFDLVSPTRSAHFHPNVQGAKSSSDVKSYLEKDGDTIEWGEFQVDGRSARGGQQSANDAYAKAINCGSKSEALAVLKELAPKDYVLQYHNLNANLDRIFAPIQELFVNPYELSSFNQVPKELASWAEKNVCDAAARPWRPIGMVIEGESRTGKTMWARSLGPHNYLCGHLDLSPKVYSNDAWYNVIDDVDPHYLKHLKEFMGAQRDWQSNTKYGKPIQIKGGIPTIFLCNPGPSSSFKEFLDEPKNEALKNWALKNAEFVTLQQPLYNCTSQSTT

SEQ ID NO: 15210 - protein, 349 aa, tomato yellow leaf curl virus
MPSLNKFRINAKNYFLTYPQCSLSKEETLSQLKELQTPTSKKYIKICRELHEDRSPHLHVLIQFEGKFQCKNNRFFDLVSPTRSAHFHPNVQGAKSSSDVKSYLEKDGDTIEWGEFQIDGRSARGGQQSANDAYAKAINCGSKSEALAVLKELAPKDYVLQYHNLNANLDRIFAPIQELFVNPYELSSFNQVPEELASWAEKNVCDAAARPWRPIGIVIEGESRTGKTMWARSLGPHNYLCGHLDLSPKVYSNDAWYNVIDDVDPHYLKHLKEFMGAQRDWQSNTKYGKPIQIKGGIPTIFLCNPGPSSSFKEFLDEPKNEALKNWALKNAEFVTLQQPLYNCTSQSTT

SEQ ID NO: 15211 - protein, 80 aa, tomato yellow leaf curl virus
MPRLFKIYAKNYFLTYPNCSLSKEEALSQLKNIETPTNKKYIKVCREFHENGEPHLHVLIQFEGKYQCKNQRFFDLVSPN

SEQ ID NO: 15212 - protein, 361 aa, tomato mottle virus
MPPPKKFRVQSKNYFLTYPQCSLSKEEALSQLQNLNTPVNKKFIKICRELHENGEPHLHVLVQFEGKYQCTNNRFFDLVSPTRSAHFHPNIQGAKSSSDVKSYIDKDGDTIEWGDFQIDGRSARGGQQSANDSYAKALNASSVQSALAVLREEQPKDFVLQNHNIRSNLERIFAKAPEPWVPPFQVSSFTNVPDEMQEWADNYFGTGAAARPERPVSIIVEGDSRTGKTMWARALGPHNYLSGHLDFNGRVFSNDVQYNVIDDIAPHYLKLKHWKELLGAQKDWQSNCKYGKPVQIKGGIPAIVLCNPGEGASYKEFLDKAENTGLKNWTVKNAIFITLTAPLYQDSTQASQETGNQKAQG

SEQ ID NO: 15213 - protein, 361 aa, tomato mottle virus
MPPPKKFRVQSKNYFLTYPQCSLSKEEALSQLQNLNTPVNKKFIKICRELHENGEPHLHVLVQFEGKYQCTNNRFFDLVSPTRSAHFHPNIQGAKSSSDVKSYIDKDGDTIEWGDFQIDGRSARGGQQSANDSYAKALNAGSVQSALAVLREEQPKDFVLQNHNIRSNLERIFAKAPEPWVPPFQVSSFTNVPDEMQEWADNYFGTGDAAPPDRPVSIIVEGDSRTGKTMWARALGPHNYLSGHLDFNGRVFSNDVQYNVIDDIAPHYLKLKHWKELLGAQKDWQSNCKYGKPVQIKGGIPAIVLCNPGEGASYKEFLDKAENTGLKNWTIKNAIFITLTAPLYQESTQASQETGNQKAQG

SEQ ID NO: 15214 - protein, 358 aa, tomato mottle virus
PKKFRVQSKNYFLTYPQCSLSKEEALSQLQNLNTPVNKKFIKICRELHENGEPHLHVLVQFEGKYQCTNNRFFDLVSPTRSAHFHPNIQGAKSSSDVKSYIDKDGDTIEWGDFQIDGRSARGGQQSANDSYAKALNAGSVQSALAVLREEQPKDFVLQNHNIRSNLERIFAKAPEPWVPPFQVSSFTNVPDEMQEWADNYFGTGDAAPPDRPVSIIVEGDSRTGKTMWARALGPHNYLSGHLDFNGRVFSNDVQYNVIDDIAPHYLKLKHWKELLGAQKDWQSNCKYGKPVQIKGGIPAIVLCNPGEGASYKEFLDKAENTGLKNWTIKNAIFITLTAPLYQESTQASQETGNQKAQG

SEQ ID NO: 15215 - protein, 314 aa, sugarcane streak virus
MSTVGSTVSSTPSRRFKHRNVNTFLTYSRCPLEPEAVGLHIWSLIAHWTPVYVLSVRETHEDGGYHIHVLAQSAKPVYTTDSGFFDIDGFHPNIQSAKSANKVRAYAMKNPVTYWERGTFIPRKTSFLGDSTEPNSKKQSKDDIVRDIIEHSTNKQEYLSMIQKALPYEWATKLQYFEYSANKLFPDIQEIYTSPFPQSTPALLDPTAINTWLENNLYQVSPSAYMLANPSCLTLEEATSDLIWMHETSRTLIPTGSSACTSSGQQEQASPPGPGAWEDIITGRTTSTGPPTTRTQNTTSSTTYPSSTVHAGSN

SEQ ID NO: 15216 - protein, 266 aa, Digitaria streak virus
MAANRSFRHRNANTFLTYSKCDHSPQLIADHLWDLLKSWNPIYILVASEHHADGSLHSHALVQTEKQVNTTNQRFFDILEFHPNIQSAKSVNKVRTYILKNPVEKFERGTFVPRKSPFLGESSSSEKKHNKDDVMRDIIDHATSKEEYLSMVQKALPYDWATKLSYFEYSADRLFPVEAAPFINPHPPSEPDLLCQETITDWLQNDLFQVSAEAYCLLNPTCYTREEAISDLQWMSDYTRSRMGSENAASTSSVQQELESLLGPEA

SEQ ID NO: 15217 - protein, 361 aa, bean dwarf mosaic virus
MPPPKKFRVQSRNYFLTYPQCSLTKEEALSQIQNLKTPVNKKFIKICRELHEDGEPHLHVLIQFEGKYQCTNNRFFDLVSPTRSAHFHPNIQGAKSSSDVKSYIDKDGDTVEWGVFQIDGRSARGGQQSANDTYAKALNAGSAEQALRIIKEEQPQHFFLQHHNLVANATSIFKKAPEPWVPPFPLSSSTNVPDEMQEWADDYFGRGSAARPERPVSLIVEGDSRTGKTMWARALGPHNYLSGHLDFNSKVFTDEVEYNVIDDVAPHYLKLKHWKELIGAQKNWQSNCKYGKPVQIKGGIPSIVLCNPGEGASYKDFLNKEENTALRNWTLKNAIFITLDSTLYQEGTQASQAAGDQETPH

SEQ ID NO: 15218 - protein, 361 aa, bean golden mosaic virus
MPPPKRFKINAKNYFLTYPQCSITKESAIEQLQNLQTPVNKKYIRICREIHENGEPHLHALIQFEGKFQCTNCRVFDLKHPTTSSVSHANIQSAKSSSDVKSYIEKDGDYIEWGHFQVDGRSARGGQQTANDAASEALNASSKEEAMQIIKEKLPEKFLFQYHNLSSNLDRIFTKAPDPWSPPYHLSSFTNVPREMQEWADDYFGRGAAARPERPISIIIEGDSRTGKTMWARALGTHNYLSGHLDFNSKVFSNHAEYNVIDDIAPHYLKLKHWKELMGAQKDWQSNCKYGKPVQIKGGIPSIVLCNPGEGASYKCFLDKEENAALKNWTIHNAKFIFLNSPLYQSSTQSCEETSNQTTSR

SEQ ID NO: 15219 - protein, 353 aa, bean golden mosaic virus
MPPPQRFRVQSKNYFLTYPRCTIPKEEALSQLQKIHTTTNKKFIKVCEERHDNGEPHLHALIQFEGKFICTNKRLFDLVSTTRSAHFHPNIQGAKSSSDVKEYIDKDGVTIEWGQFQVDGRSARGGQQSANDSYAKALNADSIESALTILKEEQPKDYVLQNHNIRSNLERIFFKVPEPWVPPFPLSSFVNIPVVMQDWVDDYFGRGSAARPERPISIIVEGDSRTGKTMWARALGPHNYLSGHLDFNSLVYSNSVEYNVIDDITPNYLKLKDWKELIGEQKDWQSNCKYGKPVQIKGGIPSIVLCNPGEGSSYKDFLNKEEKPALHNWTIHNAIFVTLTAPLYQSTAQDCQT

SEQ ID NO: 15220 - protein, 162 aa, bean golden mosaic virus
MPPPKRFKVSAKNYFLTYPQCSITKECALEQLQLIETPVNKKYIRICRELHDNGEPHLHALIQFEGKFQCTNCRFFDLKHPLTSSVSHANIQSAKSSSDVKSYIEKDGDYIEWGTFQVDGRSARGGQKTANDAASEALNASSKEEAMQIIKEKLPEKFLFQY

SEQ ID NO: 15221 - protein, 358 aa, Beet curly top virus
MPPTKRFRIQAKNIFLTYPQCSLSKEEALEQIQRIQLSSNKKYIKIARELHEDGQPHLHVLLQLEGKVQITNIRLFDLVSPTRSAHFHPNIQRAKSSSDVKSYVDKDGDTIEWGEFQIDGRSARGGQQTANDSYAKALNATSLDQALQILKEEQPKDYFLQHHNLLNNAQKIFQRPPDPWTPLFPLSSFTNVPEEMQEWADAYFGVDAAARPLRYNSIIVEGDSRTGKTMWARSLGAHNYITGHLDFSPRTYYDEVEYNVIDDVDPTYLKMKHWKHLIGAQKEWQTNLKYGKPRVIKGGIPCIILCNPGPESSYQQFLEKPENEALKSWTLHNSTFCKLQGPLFNNQAAASSQGDSTL

SEQ ID NO: 15222 - protein, 385 aa, Beet curly top virus
  unsure (1)..(385): unsure at all Xaa locations
MKVVLIYIILQYSNRYVNMLSHVIGVXMPPTKRFRIQAKNIFLTYPQCSLSKEEALEQIQRIQLSSNKKYIKIARELHEDGQPHLHVLLQLEGKVQITNIRLFDLVSPTRSAHFHPNIQRAKSSSDVKSYVDKDGDTIEWGEFQIDGRSARGGQQTANDSYAKALNATSLDQALQILKEEQPKDYFLQHHNLLNNAQKIFQRPPDPWTPLFPLSSFTNVPEEMQEWADAYFGVDAAARPLRYNSIIVEGDSRTGKTMWARSLGAHNYITGHLDFSPRTYYDEVEYNVIDDVDPTYLKMKHWKHLIGAQKEWQTNLKYGKPRVIKGGIPCIILCNPGPESSYQQFLEKPENEALKSWTLHNSTFCKLQGPLFNNQAAASSQGDSTL

SEQ ID NO: 15223 - protein, 358 aa, Beet curly top virus
MPPTKRFRIQAKNIFLTYPQCSLSKEEALEQIQGIQLSSNKKYIKIARELHEDGQPHLHVLLQLEGKVQITNIRLFDLVSPTRSAHFHPNIQGAKSSSDVKSYVDKDGDTIEWGEFQIDGRSARGGQQTANDSYAKALNATSLEQALQILKEEQPKDYFLQHHNLLNNAQKIFQRAPDPWTPLFPLSSFTNVPEEMQEWADAYFGVDAAARPLRYNSIIVEGDSRTGKTMWARSLGAHNYITGHLDFSLRTYYDEVEYNVIDDVDPTYLKMKHWKHLIGAQKEWQTNLKYGKPRVIKGGIPCIILCNPGPESSYQQFLEKPENEALKSWTLHNSTFCKLQGPLFNNQAAASSQGDSTL

SEQ ID NO: 15224 - protein, 358 aa, Beet curly top virus
MPRSPSFQIKAKNIFLTYPRCSVIKEDALEILKNIPCPSDKLFIRVSQEKHQDGSLHLHALIQFKGKAQFRNPRHFDITHPSSSSTFHPNFQGAKSASDVKQYIEKDGDYVDWGTFQVDGRSARGGQQTANDAAAEALNAGNAAEALQIIREKLPEKYIFQYHNLKPNLEAIFLPPPDIYQPPFPQSSFTQVPEIVQEWADSYFGVDAAARPFRYNSIIIEGDSRTGKTLWARSLGPHNYISGHLDFSLKTYHDDVLYNVIDDVDPAYLKMKHWKHLIGAQREWQTNLKYGKPRVIKGGIPSIILCNPGDGSSYQDFLDKSENEALKSWTIQNSTFVKLSGPLFDKDTEASSQGQSPL

SEQ ID NO: 15225 - protein, 353 aa, Beet curly top virus
MPFYKKAKNFFLTYPQCSVTKEDALEQLLAINTPSNKKYIRICRELHDNGEPHLHALIQFEGKVQIRNARYFDLQHRSTSKQFHCNIQGAKSSSDVKSYVSKDGDHIDWGEFQVDGRSARGGQQTANDAAAEALNAGNALEALQIIREKLPEKYIFQYHNLKPNLEAIFLPPPDLFQPPFPLSSFTRVPDIIQEWADSYFGLDPAAPFRYNSIIIEGDSRTGKTMWARCLGPHNYITGHLDFSLKTYSDNVLYNVIDDVDPNYLKMKHWKHLIGAQREWQTNLKYGKPRVIKGGIPSIILCNPGEGSSYQDFLNKSENEALRSWTLQNSVFAKLTSPLFDNNQEASSQDQTSL

SEQ ID NO: 15226 - protein, 230 aa, barbados tomato geminivirus
  unsure (1)..(230): unsure at all Xaa locations
MPRTPKSFRLAARNIFLTYPQCDIQKDEALQLLQNLPWSVIKPIYIRVAGEEHSDGFPHLHCLIQLSGXSNIKDVRFFDITHPRRSATFHPNIQAAKDTNAVKNYITKRVIIGESGQYKVPGGTKANKDDVYYNAVNAHGVAEALDIIRAGDPKTFIVSYHNIKANMERLFAKAPEPWTPPFTLSSFTNVPDEMQDWADDYFKQGAAARPERPISIIIEGDSRTRKDNVL

SEQ ID NO: 15227 - protein, 358 aa, Rhynchosia Golden Mosaic Virus
MPQPRRFRINAKNFFLTYPQCSIPKEDALEQLQCLSTPVNKKYIKICRERHEDGQPHLHVLIQFEGKYQCTNNRFFDLVSSTRSAHFHPNIQGAKSSSDVKSYIDKDGDTIEWGDFQIDGRSARGGQQSANDTYAKALNASSAEEALQIIKEEQPQHFFLQYHNLITNATRIFQKQPEPWVPPFNQSSFNNAPALITQWVNQNVCDSAARPLRPISIVIEGPSRTGKTQWARSLGPHNYLCGHLDLKPKIYSNDAWYNVIDDVTPHYLKHFKEFMGAQRDWQSNCKYGKPIQIKGGIPAIFLCNPGPHSSYKEYLSEEKNKGLNDWAQKNAIFVTIEEPFYTTLNQASSQIREETDEA

SEQ ID NO: 15228 - protein, 362 aa, Bhendi yellow vein mosaic virus
MPPRRFVINSKNYFLTYPQCSLNKEEALSQLQNIQTPTNKKYIKICSELHENGEPHLHVLIQFEGKYKCQNQRFFDLVATNRSAHFHPNIQGAKSSSDVKSYIDKDGDTLEWGEFQIDGRSARGGQQSANDAYAAALNTGSKAEALRVLKELAPKDYVLQYHNLNSNLDRIFTPPQEVYVCPFLSSSFDQVPEELEEWASENVMDAAARPQRPLSLVLEGESRTGKTQWARSLGPHNYLCGHLDLSPKVYSNDAWFNIIDDVDPHYLKHFKEFMGAQRDWQSNTKYGKPVQIKGGIPTIFLCNPGPNASYKEFLDEEKNSALKAWALKNAAFVFLTQPLYSGTNQSSTQGSEASAQEETSGP

SEQ ID NO: 15229 - protein, 359 aa, tomato yellow leaf curl Sardinia virus
MPRSGRFSIKAKNYFLTYPKCDLTKENALSQITNLQTPTNKLFIKICRELHENGEPHLHILIQFEGKYNCTNQRFFDLVSPTRSAHFHPNIQGAKSSSDVKSYIDKDGDVLEWGTFQIDGRSARGGQQTANDAYAKAINAGSKSQALDVIKELAPRDYVLHFHNINSNLDKVFQVPPAPYVSPFLSSSFDQVPDELEHWVSENVMDAAARPWRPVSIVIEGDSRTGKTTWARSLGPHNYLCGHLDLSQKVYSNNAWYNVIDDVDPHYLKHFKEFMGAQRDWQSNTKYGKPIQIKGGIPTIFLCNPGPQSSFKEYLDEEKNQALKNWATKNAIFVTIHQPLFADTNQNTTSHRQEEASEA

SEQ ID NO: 15230 - protein, 359 aa, tomato yellow leaf curl Sardinia virus
MAQPKRSQINAKHYFLTFPKCSLSKEEALEQLLQLQTPTNKKYIKICRELHEDGQPHLHMLIQFEGKFNCKNNRFFDLVSPTRSAHFHPNIQGAKSSSDVKSYIDKDGDVLEWGTFQIDGRSARGGQQTANDAYAKAINAGSKSEALDVIKELAPRDYILHFHNINSNLNMVFQVPPAPYVSPFLSSSFDQVPDELEHWVSENVMDAAARPWRPVSIVIEGDSRTGKTMWARSLGPHNYLCGHLDLSQKVYSNNAWYNVIDDVDPHYLKHFKEFMGSQRDWQSNTKYGKPIQIKGGIPTIFLCNPGPQSSFKEYLDEEKNQTLKNWAIKNAIFVTIHQPLFTNTNQDPTPHRQEETSEA

SEQ ID NO: 15231 - protein, 118 aa, tomato yellow leaf curl Sardinia virus
SGRFSIKAKNYFLTYPKCDLTKENALSQITNLQTPTNKLFIKICRELHENGEPHLHILIQFEGKYNCTNQRFFDLVSPTRSAHFHPNIQGAKSSSDVKSYIDKDGDVLEWGTFQIDGR

SEQ ID NO: 15232 - protein, 359 aa, tomato curly stunt virus
MAPPKRFQINSKNYFVTYPKCSLTKEESLSQLLNLETPTNKKYIKICRELHENGEPHLHVLIQFERKFNCKNHRFFDLVSPNRSAHFHPNIQGAKSSSDVKSYIDKDGDTLEWGEFQVDGRSARGGCQNANDACADALNAGSAEAAMAIIREKLPKDFIFQYHNLKTNLDRIFQAPPEPYISPFSSSSFDQVPEELEEWVSENVCGAAARPWRPNSIVIEGDSRSGKTIWARSLGQHNYLCGHLDLSPKVYSNDAWYNVIDDVDPHYLKHWKEFFGAQRDWQSNTKYGKPIQIKGGIPTIFLCNPGPTSSYKEYLDEDKNTSLKAWTIKNAVFITLNQPLYSSPNQGPASNSQEESSQA

SEQ ID NO: 15233 - protein, 352 aa, Tomato rugose mosaic virus
MPSATRRFQIKAKNYFLTYPKCSISKEEALSQLKNLNTPTNKKFIKVCRELHENGEPHLHVLLQFEGNYCCQNQRFFDLVSPTRSTHFHPNIQRAKSSSDVKSYVDKDGDTIEWGEFQIDGRSARGGCQTANDAAAEALNAPSKDIALQIIREKMPEKFLFQFHNLNSNLDRIFARAPEPWAPTFPLSSFTNVPREMQDWADDYFGRGAAARPERPISIIIEGDSRTGKTMWARALGAHNYLSGHLDFNPRVYSNHVEYNVIDDIAPHYLKLKHWKELIGAQRDWQSNCKYGKPVQIKGGIPCIVLCNPGEGASYKCFLDKEENSALSSWTKHNAQFIFLNSPLYQSSTSGC

SEQ ID NO: 15234 - protein, 351 aa, Cucurbit leaf curl virus
MPRNPNSFRISAKNIFLTYPQCDIPKDEAIQMLQHLNWSIVKPTYIRVAREEHSDGFPHLHCLIQLSGKSNIKDARFFDLAHPRRSTSFHPNVQAAKDANAVKNYITKEGDYCESGKYKVSGGTKSSKDDVYHNAINAGSAGEALDIIKAGDPKTFIVNYHNIKANIERLFHQPPETWACPFPLSSFTLVPEELQEWADDYFGRDAAARPMRARSIIIEGDSRTGKTMWSRSLGKHNYLSGHLDFNSRVYSNEAEYNVIDDVAPQYLKLKHWKELIGAQRDWQSNCKYGKPVQIKGGIPSIVLCNPGEGASYKDFLDKEENESLREWTIKNAQFIFLEGPLYQSTAQSSED

SEQ ID NO: 15235 - protein, 351 aa, Tomato severe rugose virus
MPSATKRFQIKAKNYFLTYPKCSLSKEEALSQLKKLNTPTNKKFIKVCRELHENGEPHLHVLLQFEGNYCRQNQRFFDLVSPTRSTHFHPNIQRAKSSSDVKSYVDKDGDTIEWGEFQIDGRSARGGCQTANDAAAEALNAPSKDVALQIIREKLPEKFLFQFHNLNSNLDRIFARAPEPWAPTFPLSSFTNVPREMQDWADDYFGRGAARPERPISIIIEGDSRTGKTMWARAFGAHNYLSGHLDFNPRVYSNHVEYNVIDDIAPHYLKLKHWKELLGAQKDWQSNCKYGKPVQIKGGIPCIELCNPGEGASYKVFPRHKENASLNNWTKHNAKFVFLNTPLYQGTTQSC

SEQ ID NO: 15236 - protein, 351 aa, Sri Lankan cassava mosaic virus
MRNPRFRIQSKNIFLTYPKCSLTKEHLLDFFRSLSLPTNIKFIKICRELHHNGEPHLHALLQFEGKLTITNNRQFDCVHPSSSTSFHPNIQSAKSSSDVKSYIDKDGDTIDWGEFQIDGRSARGGQQTANDAYAAALNTGSKPEALRVIKELAPKDYVLQFHNLNANLDRIFTPPPEVYVSPFSASSFDQVPDELEEWVSENVMGASARPLRPNSIVIEGDSRTGKTMWARSLGPHNYLCGHLDLSPRVYSNDAWYNVIDDVDPHYLKHFKEFMGAQRDWQSNTKYGKPVQIKGGIPTIFLCNPGPNSSYKEFLDEAKNIALKAWALKNATFISLSEPLYSGSNQGPTQSS

SEQ ID NO: 15237 - protein, 320 aa, Soybean yellow mosaic virus
FIRVCRELHEDGQPHLHVLLQFEGKQQTKNQRFFDLHSRCRSAYYHPNIQAAKSCSDVKTYMEKDGDILDHGTFQIDGRSARGGKQSANDAYAEALNSGSKLEALLILKEKAPKDFILQFHNLNCNLSRIFTEPVQAYVSPFTLESFDKVPSYISSWAERNVRDPAARPDRPISIVIEGDSRTGKTMWARAIGPHNYLCGHLDLNDKTYSNEAWYNVIDDVDPHYLKHFKEFMGAQRDWQSNVKYGKPTKIKGGIPTIFLCNPGPKSSYKEYLDEENNAALKQWASKNAEFYTLKEPLFSSVNQGSTQGRQEESNSTISN

SEQ ID NO: 15238 - protein, 359 aa, melon chlorotic leaf curl virus
MPQNPKSFRLSARNIFLTYPKCDVPKDEVLEILQGLSWSVVKPTYIRVAREEHADGFPHLHCLVQLSGKSNIKDAGFFDITHPRRSARFHPNIQAAKDTNAVKNYITKEGDYCEFGQYKVSGGSKSNKDDVYHNAVNAASAGEALDIIKAGDPKTFIVSYHNITANVDRLFHKPPMPWVPPYELSSFTNVPEELKDWADHYFNECSAARPFLIKESNNVCNRPISVIIEGDSRTGKTMWARSLGPHNYLSGHLDFNSRVFSNDVKYNVIDDVAPHYLKLKHWKELIGAQRDWQSNCKYGKPVQIKGGIPSIVLCNPGEGASYKEFLDKAENAALREWTLKNAQFIFLDCPLYQSTTQDR

SEQ ID NO: 15239 - protein, 348 aa, Macroptilium yellow mosaic virus
MPPPKRFRVSARNYFLTYPHCSLSKEEALSQLQNISTPTNKKFIRICEELHEDGQPHLHVLIQFEGKFVCTNNRLFDLVSPSRSAHFHPNVQGAKSSSDVKSYLDKDGVTVEWGEFQVDGRSARGGCQSANDSYAKALNASSVEQALQILKEEQPKDFLLQNHNIRSNLERIFAKAPEPWVPPFHLSSLNNVPAEMQAWVDDYFGRGAAARPERPISIIVEGDSRTGKTMWARSLGPHNYLSGHLDFNSRIYSNEVLYNVIDDISPNYLKLKHWKELIGAQKDWQSNCKYGKPVQIKGGIPSIVLCNPGEGASYKDFLDKEENRALHNWTIHNALFITLTSPLYQSTP

SEQ ID NO: 15240 - protein, 349 aa, Chilli leaf curl virus
MPRAGRFNINAKNYFLTYPNCSLTKEEALSQLQNLETPVNKLFIRVCRELHENGEPHLHVLIQFEGKYQCTNNRFFDLISPTRSANFHPNIQRAKSSSDVKAYVEKDGDFIDFGVFQIDGRSARGGCQSANDAYAEAINSGSKSSALNILREKAPKDYVLQFHNLNANLDRIFTPPLEVYVSPFCSSSFDQVPEELEEWAAENVLGAAARPLRPISIVIEGESRTGKTIWARSLGPHNYLCGHLDLSPKVYSNDAWYNVIDDVDPHYLKHFKEFMGAQRDWQSNTKYGKPVQIKGGIPAIFLCNPGPNSSYKEFLDEEKNSALKNWALKNATFVTLTGPLYSGSNQSTA

SEQ ID NO: 15241 - protein, 232 aa, Tomato chlorotic vein virus
MPLAKRFQIKAKNYFLTYPICSLTKEEALSQILALSTSTNKKYIKVCRELHEDGQPHLHVLLQFEGNFCCQNQRFFDLVSTTRSAHFHPNIQRAKSSSDVKSYVDKDGDTLEWGEFQIDGRSARGGQQTGNDAAAEALNASSKEAAMQIIKEKLPEKFLFQYHNLSSNLDRIFSKAPEPWVPPFPLSSFTHVPDEMQEWTDDYFGRGAAARPERPISIIVEGDSRTGKTMWA

SEQ ID NO: 15242 - protein, 224 aa, Tomato chlorotic mottle virus
MPLPKRFRLNAKNYFLTYPKCSLSKEEALSQLLALTIPVNKLFVRVARELHEDGQPHLHVLIQFEGKYQCTNERLFDLVSPTRSAHFHPNIQAAKSSSDVKAYVEKDGDFVDHGVFQIDGRSARGGQQSANDTYAKVLNAGSVMEALNILKEEQPKDYVLQHHNIRSNLERIFAKAPEPWVPPFPLSSFTNVPVEMQSWADDYFGRDAAARPERPISIIIEGDS

SEQ ID NO: 15243 - protein, 232 aa, Tomato chlorotic mottle virus
MPPPKRFRLSAKNYFLTYPQCSLPKEEALSQLLAIQTPVNKLFLRVARELHEDGQPHLHILIQFEGKFVCTNSRLFDLTSPTRSTHFHPNIQAAKSSSDVKSYVEKDGDFVDHGVFQVDGRSARGGQQSANDTYAKVLNAGSVMEALNILREEQPKDFVLQHHNIRSNLERIFAKAPEPWVPPFPLSSFTNVPVEMQAWADDYFGRHAAARPERPVSIIIEGDSRTGKTMWA

SEQ ID NO: 15244 - protein, 293 aa, Tomato chlorotic mottle virus
MPPPKHFRVNSKNYFLTYPHCSLSKEEALSQLLAIQIPVNKLFIRVARELHEDGQPHLHVLIQFEGKFVCTNNRLFDLVSPTRSAHFHPNIQGAKSSSDVKAYVEKDGDFSDHGVFQIDGRSARGGQQSANDTYAKVLNAGSVMEALNILREEQPKDFVLQHHNIRSNLERIFAKAPEPWVPPFPLSSFTNVPVEMQDWVDDYFGRDAAARPERPISIIIEGDSRSGKTMWARALGSHNYLSGHLDFNSKVYSNDVQYNVIDDVAPHYLKLKHRKDDVGLQMQAEFQHTGGRY

SEQ ID NO: 15245 - protein, 235 aa, Tomato chlorotic mottle virus
MPPPKRFRLSAKNYFLTYPQCSLTKHETLSQLLAIQIPVNKLFIRVARELHEDGQPHLHVLIQFEGKFVCTNNRLFDLVSPTRSAHFHPNIQGAKSSSDVKAYVEKDGDFIDHGVFQIDGRSARGGQQSANDTYAKVLNAGSVMEALNILKEEQPKDYVLQHHNIRSNLERIFAKAPEPWVPPFPLSSFTNVPDEMKAWADDYFGRDAAARPERHISMIMEVIQVRERSMWACRC

SEQ ID NO: 15246 - protein, 351 aa, Tomato chlorotic mottle virus
MPLPRHFRVNSKNYFLTYPHCSLSKEEALSQLLALNTPTNKLFIRVSRELHENGEPHLHVLIQFEGKYNCKNNKFFDLVSPTRSAHFHPNIQGAKSSSDVKSYVEKDGDFVDHGVFQIDGRSARGGQQSANDTYAKVLNAGSVMEALNILREEQPKDFVLQHHNIKSNLERIFVKAPEPWVPPFPLSSFTNVPVEMQDWVNDYFGRDAAARPERPISIIIEGDSRTGKAMWARTLGSHNYLSGHLDFNSKVYSNDVQYNVIDDVAPHYLKLKHWKELIGAQRDWQSNCKYGKPVQIKGGIPCIVLCNPGEGASYKCFLNKQENSALDSWTKHNAQFIFLNSPLYQSSTSGC

SEQ ID NO: 15247 - protein, 234 aa, Tomato chlorotic mottle virus
MPLPRHFRVNSKNYFLTYPHCSLSKEEALSQLLALNTPTNKLFIRVSRELHENGEPHLHVLIQFEGKYNCKNNKFFDLVSPTRSAHFHPNIQGAKSSSDVKSYVEKDGDFVDHGVFQIDGRSARGGQQSANDTYAKVLNAGSVMEALNILREEQPKDFVLQHHNIKSNLERIFVKAPEPWVPPFPLSSFTNVPVEMQDWVNDYFGRDAAARPERPISIIIEGDSRTGKTMWACR

SEQ ID NO: 15248 - protein, 225 aa, Tomato chlorotic mottle virus
MPPAKTFSFKCEELFSHISSVLLTKEEALSQLLAIQTPVNKLFLRVARELHEDGQPHLHILIQFEGKFVCTNSRLFDLTSPTRSTHFHPNIQAAKSSSDVKSYVEKDGDFVDHGVFQVDGRSARGGQQSANDTYAKVLNAGSVMEALNILREEQPKDFVLQHHNIRSNLERIFAKAPEPWVPPFPLSSFTNVPVEMQAWADDYFGRHAAARPERPVSIIIEGDSR

SEQ ID NO: 15249 - protein, 223 aa, Tomato severe mosaic virus
MPLARRFNIQSKKYSPTCLKCSLSKEEALSQLLALNTPTNKLFIRVSRELHEDGQPHLYVLLQFEGKYICKNKRFFDLVCPTRSAHFHPNIQGAKSSSDVKTYVEKDGDFIHHGLFQIDGRSARGGQQSANDAAAEALNAPSKDIALQIIREKMPEKFLFQFHNLNSNLDRIFARAPEPWAPTFPLSSFTNVPREMQDWADDYFGRGAAARPERPISIIIEGD

SEQ ID NO: 15250 - protein, 235 aa, Tomato infectious yellows virus
MPPPKHFRVNSKNYFLTYPHCSLSKEEALSQLLAIQIPVNKLFIRVARELHEDGQPHLHVLIQFEGKFVCTNNRLFDLVSPTRTSSSPIHIQSAKSSSDVKSYIEKDGDYIEWGIFQIDGRSARGGQQTANDAASEALNASSKEEAMQIIKEKLPEKFLFQYHNLSCNLDRIFTKAPDPWSPPFHLSSFTNVPREMQEWADDYFGRGAAARSERPISIIIEGDSRTGKSMWACRC

SEQ ID NO: 15251 - protein, 232 aa, Tomato mottle leaf curl virus
MPLPRRFRIHSKNYFLTYPKCSLTKEEALSQLLGLQTPVNKLFVRVARELHEDGEPHLHVLIQFEGKLQCTNERLFDLISPTRSAHFHPNVQGAKSSSDVKSYVEKDGDFIDHGVFQIDGRSARGGQQSANDTYAKVLNAGSVMEALNILREEQPKDFVLQHHNIRSNLERIFQNAPEPWVPPFPLSSFTEVPEEMQEWADDYFGGDPAARPERPISIIIEGDSRTGKTMWA

SEQ ID NO: 15252 - protein, 233 aa, Tomato mottle leaf curl virus
MPLPRRFRIHSKNYFLTYPKCSLTKEEALSQLLGLQTPVNKLFVRVARELHEDGEPHLHVLIQFEGKLQCTNERLFDLISPTRSAHFHPNVQGAKSSSDVKSYVEKDGDFIDHGVFQIDGRSARGGQQSANDTYAKVLNAGSVMEALNILREEQPKDFVLQHHNIRSNLERIFQKAPEQWVPPFPLSSFTEVPEEMQEWADDYFGGDPAARPERPISIIIEGDSRTGKTMWAC

SEQ ID NO: 15253 - protein, 232 aa, Tomato mottle leaf curl virus
MPLPRRFKIHSKNYFLTYPKCSLPKEEALSQLLGLQTPVNKLFVRVARELHEDGEPHLHVLIQFEGKLQCTNERLFDLVSPTRSAHFHPNVQGAKSSSDVKSYVEKDGDFIDHGVFQIDGRSARGGQQSANDTYAKVLNAGSVMEALNILREEQPKDFVLQHHNIRSNLERIFQKAPEPWVPPFPLSSFTEVPEEMQEWADDYFGRDPAARPERPISIVIEGDSRTGKTMWA

SEQ ID NO: 15254 - protein, 232 aa, Tomato mottle leaf curl virus
MPLPRRFRIHSKNYFLTYSKCSLQKEEALSQLLGLQTPVNKLFVRVARELHEDGEPHLHVLIQFEGKLQCTNERLFDLISPTRSAHFHPNVQGAKSSSDVKSYVEKDGDFIDHGVFQIDGRSARGGQQSANDTYAKVLNAGSVMEALNILREEQPKDFVLQHHNIRSNLERIFQKAPEQWVPPFPLSSFTEVPEEMQEWADDYFGGDPAARPERPISIIIEGDSRTGKTMWA

SEQ ID NO: 15255 - protein, 232 aa, Tomato mottle leaf curl virus
MPLPRRFRIHSKNYFLTYPKCSLPKEEALSQLLGLQTPVNKLFVRVARELHEDGDLHLHVLIQFEGKLQCTNERLFDLVSPTRSAHFHPNVQGAKSSSDVKSYVEKDGDFIDHGIFQIDGRSARGGQQSANDTYAKVLNAGSVMEALNILREEQPKDFVLQHHNIRSNLERIFQTAPEPWVPPFPLSSFTEVPEEMQEWADDYFGRDPAARPERPISIIIEGDSRTGKTMWA

SEQ ID NO: 15256 - protein, 232 aa, Tomato mottle leaf curl virus
MPPPKPFRVNARNYFLTYPQCSLSKEEALSQLLALNTPTNKLFIRVSRELHEDGQPHLHVLIQFEGKYNCKNNRFFDLVSPTRSAHFHPNIQGAKSSSDVKTYVEKDGDFIDHGVFQIDGRSARGGQQSANDTYAKVLNSGSVMEALDILREEQPKDFVLQHHNIRSNLERIFQNAPEPWVPPFPLSSFTEVPEEMQEWANDYFGGDPAARPERPISIIIEGDSRTGKTMWA

SEQ ID NO: 15257 - protein, 232 aa, Tomato mottle leaf curl virus
MPPAKRFQLNGKNYFLTYPRCSLTKEEALSQLQNLETPTNKKFIRVSRELHEDGEPHLHALIQFEGNFRCTNQRFFDLVSPTRSAHFHPNIQKAKSASDVKTYVEKDGDFVDFGVFQIDGRSARGGQQSANDSYAKVLNAGSIHEALNILREEQPKDFVLQHHNIRSNLERIFQNAPEPWAPPFPLSSFTEVPEEMQEWADDYFGGDPAARPERPISIIIEGDSRTGKTMWA

SEQ ID NO: 15258 - protein, 232 aa, Tomato mottle leaf curl virus
MPLPKQFRINAKNYFLTYPKCSLSKEEALSQLLAIQTPTNKLFIRVSRELHEDGEPHLHVLIQFEGKFQCKNNRFFDLVSPTRSTHFHPNIQGAKSSSDVKSYVEKDGDFIDHGVFQIDGRSARGGQQSANDTYAKVLNAGSVMEALNILREEQPKDFVLQQHNIRSNLERIFQKAPEPWVPPFPLSSFTEVPEEMQEWADDYFGRDPAARPERPISIIIEGDSRTGKTMLA

SEQ ID NO: 15259 - protein, 232 aa, Tomato mottle leaf curl virus
MPPAKRFQLNGKNYFLTYPRCSLTKEEPLSQLQNLETPTNKKFIRVSRELHEDGEPHLHALIQFEGNFRCTNQRFFDLVSPTRSAHFHPNIQKAKSASDVKTYVEKDGDFVDFGVFQIDGRSARGGQQSANDSYAKVLNAGSIHEALNILKEEQPKDFVLQHHNIRSNLERIFAKAPEPWVPPFPLSSFTMVPEEMQEWADAYFGTSAAARPVRPISLIIEGDSRTGKTMWA

SEQ ID NO: 15260 - protein, 222 aa, Tomato mottle leaf curl virus
MPLPKKFLINSKNYFITYPHCSLSKEEALSQLLALKTPTNKKFIRFTRELHEDGEPHLHVLIQFEGKYRCTNCRFFDLVSPTRSTHFHPNVQGAKSSSDVKTYMEKDGDFIDHGVFQIDGRSARGGQQSANDTYAKVLNAGSVVEALNILREDQPKDFVLQQHNIRSNLERIFQKAPEPWVPPFPLSSFTEIPEEIQEWADDYFGRDPAARPERPISIIIEG

SEQ ID NO: 15261 - protein, 232 aa, Tomato mottle leaf curl virus
MPLPKQFRINAKNYFLTYPKCSLNKEEALSQLLAIQTPTTKLFIRVSRELHEDGNLHLHVLIQFEGKFQCKNNRFFDLISPTRSAHFHPNIQGAKSSSDVKSYVEKDGDFIDHGVFQIDGRSARGGQQSANDTYAKVLNAGSVMEALNILREEQPKDFVLQQHNIRSNLERIFQRAPEPWVPPFPLSSFTEVPEEMQEWADDYFGRDPAARPERPISIIIEGDSRTGKTMWA

SEQ ID NO: 15262 - protein, 231 aa, Tomato crinkle virus
MPLPKRFRLNAKNYFLTYPKCSLSKEEALSQLLALTIPVNKLFVRVARELHEDGQPHLHVLIQFEGKFQCTNERLFDLTSPTRSAHFHPNIQAAKSSSDVKTYVEKDGDFVDHGVFQIDGRSARGGQQSANDTYAKVLNAGSVMEALNILREEQPKDFVVQHHNIRSNLERIFAKAPEPWVPPFPLSSFTNVPVEMQAWADDYFGRGSAARPERPVSIIIEGDSRTGKTMW

SEQ ID NO: 15263 - protein, 223 aa, Calopogonium golden mosaic virus
MPRNPNSFRLTAKNIFLTYPQCDISKDEALQMLQHLHWSVVKPTYIRVAREEHSDGLPRLHCLVQLSGKSNIKDARFFDLTHPRRSACFHPTIQAAKDANAVKNYITKEGDYCESGQYKVSGSSKANKDDVYHNAVNAGSAGEALDIIKVGDPRTFLVSYHHVKANIERLFHKAPEPWTPPFQLSTFTNVPVEMQRWADDYFGRDAAARPERPISIIIESDSR

SEQ ID NO: 15264 - protein, 361 aa, Tobacco curly shoot virus
MAPPNKFRINAKNYFLTYPHCSLTKEEALSQIKALETPINKLFIRICRELHEDGTPHLHVLIQFEGKFQCKNQRFFDLTSPTRSAHFHPNIQGAKSSTDVKTYMEKDGDVLDHGIFQIDGRSARGGCQSANDAYAEAINSGSKASALNILREKAPKDFVLQFHNLNSNLDRIFTPPIEEYISPFLSSSFDQVPEELDEWAAENVVSAAARPLRPMSIVIEGDSRTGKTMWARSLGPHNYLCGHLDLSPKVYNNDAWYNVIDDVDPHYLKHFKEFMGAQRDWQSNTKYGKPVQIKGGIPTIFLCNPGPNSSYKEFLDEEKNTALKNWALKNAIFVTLESPLYSGSNQSEAQASQEGEQTSSC

SEQ ID NO: 15265 - protein, 363 aa, Honeysuckle yellow vein mosaic virus
MAPPKRFQINSKNYFLTYPHCSLTKEEALSQLKALDTPTNKLFIRICRELHEDGSPHLHVLLQFEGKYRCTNQRFFDLVSPTRSAHFHPNIQGAKSSSDVKAYMEKDGDVVDFGIFQVDGRSARGGCQSANDAYAEAINSGSKSSALSILREKAPKDFVLQFHNLNSNLDRIFAPPLEEFVSPFLSSSFDQVPEQLEEWAAENVRDSAARPWRPMSIVIEGDSRTGKTMWARSLHPRHNYLCGHLDLSPKVYSNEAWYNVIDDVDPHYLKHFKEFMGAQRDWQSNTKYGKPIQIKGGIPTIFLCNPGPTSSYTEYLDEEKNAALKAWAIRNATFITLYSPLYSSTHQGATQIREEESTSQAED

SEQ ID NO: 15266 - protein, 392 aa, Honeysuckle yellow vein mosaic virus
MPCPPEYKLPPNAPPFSRSLKCPPIDQVNMPRAGRFSLKAKNYFLTYPQCSIDKEEALTQLQKLNTPTNIKFIRICRELHQNGSPHLHVLIQFEGKYNCTNQRFFDLVSPSRSAHFHPNIQAAKSSSDVKTYMEKDGDIVDFGVFQVDGRSARGGCQSATDAYAEAINSGSKSSALCILREKAPKDFVLQFHNLNSNLDRIFAPPLEEFVSPFLSSSFDQVPEQLEGWAAENVRDSAARPWRPISIVIEGDSRTGKTMWARSLSPRHNYLCGHLDLSPKVYSNEAWYNVIDDVDPHYLKHFKEFMGAQRDWQSNTKYGKPIQIKGGIPTIFLCNPGPTSSYTEYLDEDKNAALKAWAIKNAAFVTLYGPLYSGTHQGATQIREEESTSPEED

SEQ ID NO: 15267 - protein, 361 aa, Tomato yellow leaf curl China virus
MAPPNKFRINAKNYFLTYPHCSLTKEEALSQIKTLETPVNKLFIRICRELHEDGSPHLHVLIQFEGKFQCKNQRFFDLTSPHRSAHFHPNIQGAKSSTDVKSYMEKDGDVLDHGVFQIDGRSARGGCQSANDAYAEAINSGSKASALNILREKAPKDFVLQFHNLNSNLDRIFTPPIVEYISPFSSSSFDQVPEELDEWAVDNVVSAAARPLRPVSIVIEGDSRTGKTMWARSLGPHNYLCGHLDLSPKVYSNDAWFNVIDDVDPHYLKHFKEFMGAQRDWQSNTKYGKPVQIKGGIPTIFLCNPGPNSSYKEYLEEEKNSALRNWAVKNAIFVSLNGPLYSGSYQGATPNRQEDNQTTTG

SEQ ID NO: 15268 - protein, 362 aa, Eupatorium yellow vein virus
MPTPNRFKINAKNFFLTYPHCSLTKEEALSQIKQLQTPTNKLFIRICRELHEDGSPHLHVLIQFEGKYTCRNQRFFDLVSPNRSAHFHPNIQAAKSSSDVKTYMEKDGDILDSGVFQVDGRSARGGCQNANDAYAEAINSGSKSSALNILREKAPKDYVLQFHNLNSNLDRIFAPPLEVFVCPFSSSSFDQVPEEIEEWAAENVKSSAARPWRPMSIVIEGDSRTGKTMWARSLGPHNYLCGHLDLSPKIYSNGAWYNVVDDVDPHYLKHFKEFMGAQRDWQSNTKYGRPIQIKGGIPTIFLCNPGPTSSYTEFLDEEKNSALKAWAIKNATFVTLYSPLYSGAHQSPAQDSQEEEPSQAED

SEQ ID NO: 15269 - protein, 362 aa, Eupatorium yellow vein virus
MPAPNRFKINAKNYFLTYPHCSLTKGEALSQIKQLQTPISKKFIRICRELHEDGSPHLHILIQFEGKYQCKNQRFFDLVSPSRSAHFHPNIQAAKSSSDVKSYMEKDGDILDFGVFQVDGRSARGGCQSANDAYAEAINSGSKSSALNILREKAPKDFVLQFHNLNSNLDRIFAPPLEVFVCPFSSSSFDQVPEELEEWAAENVKSSARPWRPISIVIEGDSRTGKTMWARSLGPHNYLCGHLDLSPKIYSNDAWYNVVDDVDPHYLKHFKEFMGAQRDWQSNTKYGKPIQIKGGIPTIFLCNPGPTSSYTEFLDEEKNSALKAWAVKNATFVTLYSPLYSGSHQSPAQDSQIEEEEPQEED

SEQ ID NO: 15270 - protein, 361 aa, Ageratum enation virus
MAAPNRLKINAKNYFLTYPKCSLTKEEALSQLLNLQPPTNKKYIKICRELHEDGSPHLHVLIQFEGKYQCKNQRFFDLVSPNRSAHFHPNIQGAKSSTDVKSYIDKDGDTLEWGEFQIDGRSARGGQQTANDAAAEALNAGSKEAAMAIIKEKLPEKFIFQYHNLNSNLDRIFTPPLEVYVSPFLSSSFDQVPEELEEWVSENVMNAAARPLRPQSIVIEGDSRTGKTMWARSLGPHNYLCGHLDLSPKVYSNDAWYNIIDDVDPHYLKHFKEFMGAQRDWQSNTKYGKPVQIKGGIPTIFLCNPGPNSSYKEFLDEEKNNALKNWALKNAIFVTLEGPLYSGSNQSAAQASQEGDEASTC

SEQ ID NO: 15271 - protein, 360 aa, Sida mottle virus
MPSKPRRFRVQAKNIFLTYPQCPLTKEEALSQLQAIQLPSNKKFIKICRELHEDGQPHLHILLQLEGKIQVTNNRLFDLVSPTRSAHFHPNIQELMELRRQVIHLQGREIQWEWGQFQVDGRSSRGGQQTANDAAAEPFNDPDKHTALQIIREKLPEKYLFQFHNLNSNLDRIFLKAPEPWTPPFSLSSFTNVPVEMQEWADDYFGRGSAARPLRPMSLIVEGDSRTGKTMWARSLGPHNYLSGHLDFNSKVYSNEVEYNVIDDVTPQYLKLKHWKGADWCSKRLAVKLLSYGKPVQIKGGIPSIVLCNPGEGVSYKEFLDKEENAGLKSWTLHNAKFIFLDSPLYQTTTQGGEEERNSP

SEQ ID NO: 15272 - protein, 358 aa, Sida yellow mosaic virus
MPSPRAFRINSKNYFLTYPKCSLTKEEALSQLKELNTPTSKKFIRVSRELHEDGSPHLHVLIQFEGKYNCKNNRFFDLVSPSRSTHFHPNIQGAKSSSDVKKYVEKDGDFIDFGVFQIDPRSARGGCQTANDTYAKVLNAQSAEQALQILKEEQPRDYVLHLDKVQTHVQKLFKKAPEPWVPPFPLSSFTNVPDEMQEWADDYFGRGSAARPLRPMSLIVEGDSRTGKDDVGSCISPHNYLSGHLDFNNRVYSNEVDYNVIDDVTPQYLKLKHWKELIGAQKDWQSNCKYGKPVQIKGGIPSIVLCNPGEGVSYKEFLDKEENAGLKSWTLHNAKFIFLDSPLYQTTTQSGEEERNSP

SEQ ID NO: 15273 - protein, 362 aa, Tomato leaf curl Taiwan virus
MHPLNKFRINAKNYFLTYPHCSLTKEEALSQIQALQTPTNKLFIRVCRELHEDGAPHLHILIQFEGKFQCKNNRFFDLTSPTRSAHFHPNIQGAKSSTDVKTYMEKDGDVLDHGIFQVDGRSARGGCQSANDAYAEAINSGSKAEALNILREKAPKDFVLQFHNLNSNLDRIFTPPLEVYISPFNSSSFDQVPVELVEWVAENVRDSAARPWRPMSIVVEGESRTGKTLWARSLGPHNYLCGHLDLSPRVYNNEAWYNVIDDVDPHYLKHFKEFMGAQRDWQSDTKYGKPIQIKGGIPTIFLCNPGPTSSYKEYLDEEKNFALKDWALKNAEFITLTEPLYSRANQGPTQNSEEETNSQAEG

SEQ ID NO: 15274 - protein, 361 aa, Tobacco leaf rugose virus
MPSVKRFKSQPKTNFITYPQCSLPKEEALSQLQNLETPVNKKFIKICRELHENGEPHLHVLIQFEGKYQCKNNRFFDLVSPTRSAHFHPNIQGAKSSSDVKSYIDKDGDTLEWGEFQIDGRSARGGKQSANDSYAKALNADSVQSAMAVLREEQPKDFVLQNHNIRSNLERIFAKAPEQWVPPFQLSSFTNVPEDMQEWADDYFGRGSARPERPLSIIVEGDSRTGKTMWARSLGPHNYLSGHLDFNARVYSNEVDYNVIDDVAPHYLKLKHWKELLGAQKDWQSNCKYGKPVQIKGGIPSIVLCNPGEGASYKDFLDKEENASLRNWTIKNAVFITLTAPLYQEGAQTIQEKEGNQETQD

SEQ ID NO: 15275 - protein, 362 aa, Hollyhock leaf crumple virus
MAPPKRFKINAKNYFLTYPHCSLSLSETLSQLKTLQTPVNKLYIKICRELHENGEPHLHALIQFEGKYQCTNNRFFDLVSPSRSTHFHPNIQGAKSSSDVKSYLEKDGDTLEWGEFQIDARSARGGQQTANDAYAAALNSGSKSEALRVIRELAPKDFVLQFHNLNSNLDRIFQEPPAPYVSPFLSSSFDQVPEELEEWAAENVVEAAARPSRPISIVIEGESRTGKTVWARSLGPHNYLCGHLDLSPKVFSNDAWYNVIDDVDPHYLKHFKEFMGAQKDWQSNTKYGKPVQIKGGIPTIFLCNPGPNSSYKEYLDEDKNAHLKSWALKNATFITLSNQLYSGTNQSQASGGQEESNQETQD

SEQ ID NO: 15276 - protein, 362 aa, Hollyhock leaf crumple virus
MAPPHRFQIYAKNYFLTFPKCSLTKEEALEQIQQISTASNKKYIKICRELHEDGQPHLHVLLQFEGKFKCQNQRLFDLVSPNRSAHFHPNIQGAKSSSDVKSYIDKDGDTLEWGEFQIDGRSARGGQQTANDAYAAALNAGSKAEALRVIRELAPKDFVLQFHNLNSNLERIFQEPPAPYVSPFLSSSFDQVPEELEEWAAENVVEAAARPSRPISIVIEGESRTGKTVWARSLGPHNYLCGHLDLSPKVFSNDAWYNVIDDVDPHYLKHFKEFMGAQKDWQSNTKYGKPVQIKGGIPTIFLCNPGPNSSYKEYLEEDKNAHLKSWALKNATFITLSNPLYSGTNQSPASGGQEESNQETQD

SEQ ID NO: 15277 - protein, 362 aa, Ageratum yellow vein China virus
MPPPTKFRINAKNYFLTYPHCSLTKEEALSQLKALETPTNKLFIRICRELHEDGTPHLHVLIQFEGKFQCKNQRFFDLTSPSRSAHFHPNIQGAKSSTDVKAYMEKDGDVLDHGVFQIDGRSARGGCQTANDAYAEAINSGSKAEALNILKEKAPKDFVLQFHNLNSNLDRIFAPPLEVFVCPFLSSSFDQVPEELEEWVSENVSGAAARPWGPKSIVIEGDSRTGKTMWARSLGPHNYLCGHLDLSPKVYSNDAWYNVIDDVDPHYLKHFKEFMGAQRDWQSNTKYGKPVQIKGGIPTIFLCNPGPTSSYKEYLNEDKNSALKDWALKNAEFITLNSPLYSGTNQSATQNSQEEAYSETES

SEQ ID NO: 15278 - protein, 361 aa, Stachytarpheta leaf curl virus
MPPPRRFKIQAKNYFLTYPQCSLTKEEALSQLQNLETPTNKKYIKICRELHEDGSPHIHVLIQFEGKYVCTNNRFFDLVSPTRSAHFHPNIQGAKSSSDVKSYIDKDGDTLEWGEFQIDGRSARGGQQSANDAYAAALNTGSKSEALNVIKELAPKDYVLQFHNLNANLDRIFAPPLEVFVCPFSSSSFDQVPEELHEWSANNVVNAAARPLRPISIVIEGDSRTGKTMWARSLGPHNYLCGHLDLSPKVYSNDAWYNVIDDVDPHYLKHFKEFMGAQRDWQSNTKYGKPVQIKGGIPTIFLCNPGPNSSYKEFLDEEKNSALKNWAIHNAIFVTIQRPLYSGSNQGATQNSQANNEETTS

SEQ ID NO: 15279 - protein, 211 aa, Stachytarpheta leaf curl virus
MPPPRRFKIQAKNYFLTYPQCSLTKEEALSQLQNLETPTNKKYIKICRELHEDGSPHLHVLIQFEGKYVCTNNRFFDLVPPTRSAHFHPNIQGAKSSSDVKSYIDKNGDTLEWGEFQIDGRSARGGQQSANDAYAAALNTGSKSEALNVIKELAPKDYVLQFHNLNANLDRIFAPPLEVFVCPFSSSSFDQVPEELHEWSANNVVSAVGGI

SEQ ID NO: 15280 - protein, 361 aa, Croton yellow vein mosaic virus
MPRINSFCVNAKNIFLTYPKCPIPKEQMLEILKNISCPSNRLFIRVAQEKHQDGSMHIHALIQFKGKSKFRNPRHFDVTHPNSSTQFHPNFQGAKSSSDVKSYIEKDSDYIDWGEFQIDGRSARGGQQTANDAAAEALNAGSTEAALAIIREKLPKDFIFQYHNLKCNLDRIFTPPMEVYVSPFSSSSFDQVPEELEEWAAENVVSAAARPIRPISIVIEGDSRTGKTMWARSLGPHNYLCGHLDLSPKVYSNDAWYNVIDDVDPHYLKHFKEFMGAQKDWQSNTKYGKPVQIKGGIPTIFLCNPGPDSSYKEFLDEEKNAALKNWALKNATFITLEGPLYSGSNQSAAQDSQEGDQASTS

SEQ ID NO: 15281 - protein, 362 aa, Tomato leaf curl Vietnam virus
MAPPNKFRINAKNYFLTYPHCSLTKEEALSQLKNLETPVNKLFIRICREFHEDGTPHLHVLIQFEGKFQCKNQRFFDLTSPSRSAHFHPNIQAAKSSTDVKAYMDKDGDVLDHGVFQIDGRSARGGCQSANDAYAEAINSGSKASALNILREKAPKDFVLQFHNLNSNLDRIFTPPMEVYVSPFSSSSFDRVPEELEEWAAENVVSSAARPLRPISIVIEGDSRTGKTMWARSLGPHNYLCGHLDLSPKVYSNDAWFNVIDDVDPHYLKHFKEFMGAQRDWQSNTKYGKPVQIKGGIPAIFLCNPGPNSSYKEYLDEEKNTALKSWAIKNAVFVSITEPLYSSTYQSPAQDSEEENNQETED

SEQ ID NO: 15282 - protein, 362 aa, Legume yellow mosaic virus
MPREGRFAINAKNYFLTYPKCPLTKEDALEQLLALSTPVNKKFIRICRELHEDGQPHLHVLLQFEGKQQTKNQGFFDLHSRCRSAYYHPNIQAAKSCSDVKSYMEKDGDILDHGTFQIDGRSARGGKQSANDAYAEALNSGSKLEALLILKEKAPKDFILQFHNLNCNLSRIFTEPVQAYQSPFTLESFNKVPSYISSWAERNVRDPAARPDRPISIVIEGDSRTGKTMWARAIGPHNYLCGHLDLNDKTYSNEAWYNVIDDVDPHYLKHFKEFMGAQRDWQSNVKYGKPTKIKGGIPTIFLCNPGPKSSYKEYLDEENNAALKQWASKNAEFYTLKEPLFSSVNQGSTQGRQEESNSTISN

SEQ ID NO: 15283 - protein, 362 aa, Legume yellow mosaic virus
MPREGRFAINAKNYFLTYPKCPLTKEDALEQLLALSTPVNKKFIRICRELHEDGQPHLHVLLQFEGKQQTKNQRFFDLHSRCRSAYYHPNIQAAKSCSDVKSYMEKDGDILDHGTFQIDGRSARGGKQSANDAYAEALNSGSKLEALLILKEKAPKDFILQFHNLNCNLSRIFTEPVQAYQSPFTLESFNKVPSYISSWAERNVRDPAARPDRPISIVIEGDSRTGKTMWARAIGPHNYLCGHLDLNDKTYSNEAWYNVIDDVDPHYLKHFKEFMGAQRDWQSNVKYGKPTKIKGGIPTIFLCNPGPKSSYKEYLDEENNAALKQWASKNAEFYTLKEPLFSSVNQGSTQGRQEESNSTISN

SEQ ID NO: 15284 - protein, 362 aa, Legume yellow mosaic virus
MPREGRFAINAKNYFLTYPKCPLTKEDALEQLLALSTPVNKKFIRICRELHEDGQPHLHVLLQFEGKQQTKNQRFFDLHSRCRSAYYHPNIQAAKSCSDVKTYMEKDGDILDHGTFQIDGRSARGGKQSANDAYAEALNSGSKLEGLLILKEKAPKDFILQFHNLNCNLSRIFTEPVQAYMSPFTPESFNKVPRYISPWAERNVRDPAARPDRPISIVIEGDSRTGKTMWARAIGPHNYLCGHLDLNGQTYSTEAWYNVIDDVDPHYLKHFKEFMGAQRDWQSNVKYGKPTKIKGGIPTIFLCNPGPKSSYKEYLDEENNAALKQWASKNAEFYTLKEPLFSTVNQGSSQGRQEESNSTISN

SEQ ID NO: 15285 - protein, 362 aa, Legume yellow mosaic virus
MPREGRFAINARNYFLTYPKCPLTKEDALEQLLALSTPVNKKFIRICRELHEDGQPHLHVLLQFEGKHQTRNQRFFDLHSRCRSAYYHPNIQAAKSCSDVKTYMEKDGDVLDHGTFQIDGRSARGGKQSANDACAEALNSGSKLEALIILKEKAPKDFILQFHNLNCNLSRIFTEPVQAYVSPFTLESFNKVPSYISSWAERNVRDPAARPDRPISIVIEGDSRTGKTMWARAIGPHNYLCGHLDLNDKTYSNEAWYNVIDDVDPHYLKHFKEFMGAQRDWQSNVKYGKPTKIKGGIPTIFLCNPGPKSSYKEYLDEENNAALKQWASKNAEFYTLKEPLFSSVNQGSTQGRQEESNSTISN

SEQ ID NO: 15286 - protein, 363 aa, Tobacco leaf curl Yunnan virus
MAPPKRFKIQAKNYFLTYPQCSLTKEEALSQLQALETPTNKKYIKICRELHEDGSPHLHVLIQFEGKYVCTNNRFFDLVSPTRSAHFHPNIQGAKSSSDVKSYIDKDGDTLEWGEFQIDGRSARGGQQTANDAYAQALNSGSKSEALNVIKELAPKDFVLQFHNLNANLDRIFAPPLEVFVSSFFIFIIWIKFPKNLKSGLLDNVRHAAARPWRPISIVIEGESRTGKTMWARSLGPHNYLCGHLDLSPKVYSNDAWYNVIDDVDPHYLKHFKEFMGAQRDWQSNTKYGKPIQIKGGIPTIFLCNPGPTSSYKEFLEEEKNSALKEWALKNAEFITLNSPLYSGTNQSATQNSQEEASSQAES

SEQ ID NO: 15287 - protein, 363 aa, Tobacco leaf curl Yunnan virus
MAPPKRFKIQAKNYFLTYPQCSLNKEEALSQLQALETPTNKKYIKICRELHEDGSPHLHVLIQFEGKYVCTNNRFFDLVSPTRSAHFHPNIQGAKSSSDVKSYIDKDGDTLEWGEFQIDGRSARGGQQTANDAYAQALNSGSKSEALNVIKELAPKDFVLQFHNLNANLDRIFAPPLEVFGSPFLSFIIWIKFPKNLKNGAADNVRHAGARPWRPISIVIEGESRTGKTMWARSLGPHNYLCGHLDLSPKVYSNDAWYNVIDDVDPHYLKHFKEFMGAQRDWQSNTKYGKPIQIKGGIPTIFLCNPGPTSSYKEFLEEEKNSALKEWALKNAEFITLNSPLYSGTNQSATQNSQEEASSQAES

SEQ ID NO: 15288 - protein, 361 aa, Tomato leaf curl Gujarat virus
MAAPNRFKINAKNYFLTYPKCSLTKEEALSQLLNLQTPTFKKFIRICRELHDDGTPHLHVLIQFEGKFQCKNNRFFDLTSPTRSAHFHPNIQGAKSSSDVKSYMEKDGDVIDHGVFQVDGRSARGGCQSANDAYAEAINSGSKAQALNILREKAPKDFVLQFHNLNSNLDRIFTPPMDVYVSPFISSSFDQVPEELEAWAAENVCSPAARPLRPISIVIEGDSRTGKTMWARSLGPHNYLCGHLDLSPKVYSNDAWYNVIDDVDPHYLKHFKEFMGAQRDWQSNTKYGKPVQIKGGIPTTFLCNPGPNSSYKEYLDEEKNSALKNWALKNATFVTLEGPLYSSTNQSTAQASQEGDQTSTS

SEQ ID NO: 15289 - protein, 359 aa, Tomato yellow leaf curl Malaga virus
MAPPKRFQINCKNYFLTYPKCSLTKEEALSQLKNLETPTNKKYIKVCRELHENGEPHLHVLIQFEGKFKCQNQRFFDLVSPSRAAHFHPNIQGAKSSSDVKSYVDKDGDTVDWGEFQIDGRSARGGQQSANDAYAAALNSGSKSEALRIIKELIPKDYILQFHNLNSNLDRIFQEPPAPYISPFLSSSFNQVPDELEVWVSENVVSSAARPWRPNSIVIEGDSRTGKTMWARSLGPHNYLCGHLDLSPKVYSNDAWYNVIDDVDPHYLKHFKEFMGAQRDWQSNTKYGKPIQIKGGIPTIFLCNPGPTSSYREYLDEEKNISLKNWALKNATFVTLYEPLFASINQGPTQDSQEETNKA

SEQ ID NO: 15290 - protein, 353 aa, Bean golden yellow mosaic virus
MPPPQRFRVQSKNYFLTYPRCTIPKEEALSQLQKIHTTTNKKFIKVCEERHDNGEPHLHALIQFEGKFICTNKRLFDLVSTTRSAHFHPNIQGAKSSSDVKEYIDKDGVTIEWGQFQVDGRSARGGQQSANDSYAKALNADSIESALTILKEEQPKDYVLQNHNIRSNLERIFFKVPEPWVPPFPLSSFVNIPVVMQDWVDDYFGRGSAARPERPISIIVEGDSRTGKTMWARALGPHNYLSGHLDFNSRVYSNSVEYNVIDDISPNYLKLKHWKELIGAQKDWQSNCKYGKPVQIKGGIPSIVLCNPGEGSSYKDFLNKEENRALHNWTIHNAIFVTLTAPLYQSTAQDCQT

SEQ ID NO: 15291 - protein, 353 aa, Bean golden yellow mosaic virus
MPPPQRFRVQSKNYFLTYPRCSIPKEEALSQLQKIHTATNKKFIKVCEERHENGEPHLHALIQFEGKFVCTNKRLFDLVSSTRSTHFHPNIQGAKSSSDVKKYIDKDGVTIEWGQFQVDGRSARGGQQSANDSYAKALNADSIESALTILKEEQPKDYVLHNHNIRSNLERIFVKAPEPWVPPFPLSSFINVPVVMQEWVDDYFGRGSAARPERPISIIVEGDSRTGKTMWARALGPHNYLSGHLDFNSRVYSNAVKYNVIDDISPNYLKLKHWKELIGAQKDWQSNCKYGKPVQIKGGIPPIVLCNPGEGSSYKDFLDKEENRALHNWTIHNAIFVTLTAPLYQSTAQDCQT

SEQ ID NO: 15292 - protein, 360 aa, Tomato leaf curl Bangalore virus
MPRPGRFNINAKNYFLTYPKCSLSKERHLSQLQTVKTPTSKLFIRVCRELHVDGEPHLHVLIQFEGKFQCTNNRFFDLVSPTRSTHFHPNIQKAKSSSDVKAYVEKDGDFIDFGVFQIDGRSARGGQQSANDAYAEAINSGSKAAALDILREKAPKDFVLQFHNLNANLDRIFTPSAEVYVSPFLCSSFDTVPEELHHWAAENVVDAAAAIRPISIVIEGDSRTGKTMWARSLGPHNYLCGHLDLSPRVYSNDAWYNVIDDVDPHYLKHFKEFMGAQRDWQSNTKYGKPVQIKGGIPTIFLCNPGPNSSYKEFLDEDKNNALKQWALKNATFITLEGPLYSGSNQSATQPSQEGDQASTS

SEQ ID NO: 15293 - protein, 361 aa, Tomato leaf curl Gujarat virus-[Vadodara]
MAAPNRFKINAKNYFLTYPKCSLTKEEALSQLLNLQTPTSKKFIRICRELHEDGTPHLHVLIQFEGKFQCKNNRFFDLTSPTRSAHFHPNIQGAKSSSDVKSYMEKDGDVVDHGVFQVDGRSARGGCQSANDAYAEAINSGSKAQALNILREKAPKDFVLQFHNLNSNLDRIFTPPMDVYVSPFLSSSFDQVPEELEEWAAENVVSSAARPLRPISIVIEGDSRTGKTMWARSLGPHNYLCGHLDLSPKVYSNYAWYNVIDDVDPHYLKHFKEFMGAQRDWQSNTKYGKPVQIKGGIPTIFLCNPGPNSSYKEYLDEEKNSALKNWALKNATFVTLEGPLYSGTNQSTAQASQEGDQTSTS

SEQ ID NO: 15294 - protein, 361 aa, Tomato leaf curl Gujarat virus-[Kelloo]
MAAPNRFKINAKNYFLTYPKCSLTKEEALSQLLNLQTPTFKKFIRICRELHEDGTPHLHVLIQFEGKFQCKNNRFFDLTSPTRSAHFHPNIQGAKSSSDVKSYMEKDGDVIDHGVFQVDGRSARGGCQSANDAYAEAINSGSKAQALNILREKAPKDFVLQFHNLNSNLDRIFTPPMDVYVSPFLSSSFDQVPEELEEWAAENVCSPAARPLRPISIVIEGDSRTGKTMWARSLGPHNYLCGHLDLSPKVYSNDAWYNVIDDVDPHYLKHFKEFMGAQRDWQSNTKYGKPVQIKGGIPTTFLCNPGPNSSYKEYLDEEKNSALKNWALKNATFVTLEGPLYSGTNQSTAQASQEGNQTSTS

SEQ ID NO: 15295 - protein, 361 aa, Tomato leaf curl Karnataka virus
MAAPNRFKLNAKNYFLTYPKCSLTKEEALSQFLNLQTPTSKKFIRICRELHEDGTPHLHVLIQFEGKFQCKNNRFFDLTSPTRSAHFHPNIQGAKSSSDVKTYMEKDGDILDHGVFQVDGRSARGGCQSANDAYAEAINAGSKIEALNILREKAPKDYVLQFHNLNSNLDRIFTPPMEVYVSPFSSSSFDQVPEELEEWAAENVVNAAARPLRPVSIVIEGDSRTGKTMWARSLGPHNYLCGHLDLSPKVYSNDAWYNVIDDVDPNYLKHFKEFMGAQRDWQSNRKYNKPVQIKGGIPTIFLCNPGPNSSYKEFLDEEKNSKLKNWAIKNATFVTPEGPLYSGTNQSAAQASQEGDQTSTS

SEQ ID NO: 15296 - protein, 361 aa, Tomato leaf curl Bangalore virus-[Ban5]
MPQIKRFQIYAKNYFLTYPKCSISKEEALSQLQNLETPTNKLFIRVSRELHDDGEPHLHVLIQFEGKFKCQNNRFFDLVSPTRSTHFHPNIQGAKSSSDVKAYVEKDGGFIDFGVFQIDGRSARGGQQSANDAYAEAINSGSKAAALNILREKAPKDFVLQFHNLNANLDRIFTPPLEVYISPFSSSSFDTVPEELYQWAADNVVDAAARPIRPISIVIEGDSRTGKTMWARSLGPHNYLCGHLDLSPRVYSNDAWYNVIDDVDPHYLKHFKEFMGAQKDWQSNTKYGKPVQIKGGIPTIFLCNPGPNSSYKEFLDEDKNNALKQWALKNARFITLEEPLYSGSNQSAAQVSQEGDQASTS

SEQ ID NO: 15297 - protein, 361 aa, Tomato leaf curl Bangalore virus-[Kolar]
MPRAGRFNINAKNYFLTYPKCSLSKETHLSQLQNLETPTSKLFIRVCRELPDDGEPHLHVLIQFEGKFQCNNNRFFDLVSPTRSTHFHPNIQGAKSSSDVKAYVEKDGDFIDFGVFQIDGRSARGGQQSANDAYAEAINSGSKAAALNILREKAPKDFVLQFHNLNANLDRIFTPPVEVYISPFSSSSFDTVPEELYQWAAENVVNAAARPIRPISIVIEGDSRTGKTMWARSLGPHNYLCGHLDLSPRVYSNGAWYNVIDDVDPHYLKHFKEFMGAQKDWQSNTKYGKPVQIKGGIPTIFLCNPGPNSSYKEFLEEDKNNALKQWALKNATFITLEGPLYSGSNQSATQPSQEGDQASTS

SEQ ID NO: 15298 - protein, 361 aa, Tomato leaf curl Bangalore virus-[Ban4]
MAAPNRFKINAKNYFLTYPKCSLNKRRALSQLLNLQTPTSKKFIRICGELHEDGTPHLHVLIQFEGKFQCKNNRFFDLTSPTRSAHFHPNIQGAKSASDVKSYMEKDGDVIDHGVFQVDGRSARGGCQSANDAYAEAINSGSKAEALNILKEKAPRDFLLQFHNLNSNLDRYFQEPPAPYVSPFHSSSFDTVPEELYQWAAENVVDAAARPIRPISIVIEGDSRTGKTMWARSLGPHNYLCGHLDLSPRVYSNDAWYNVIDDVDPHYLKHFKEFMGAQRDWQSNTKYGKPVQIKGGIPIIFLCNPGPNSSYKEFLDEDKNNALKQWTLKNARFITLEEPFYSGSNQSATQVSQEGDQASTS

SEQ ID NO: 15299 - protein, 359 aa, Tomato yellow leaf curl virus-[Portugal]
MAPPKRFQINCKNYFLTYPKCSLTKEEALSHLKDLETPTNKKYIKVCRELHENGEPHLHVLIQFEGKFKCQNQRFFDLVSPSRAAHFHPNIQGAKSSSDVKSYVDKDGDTVDWGEFQIDGRSARGGQQSANDAYAAALNSGSKSEALRIIKELIPKDYILQFHNLNSNLDRIFQEPPAPYISPFLSSSFNQVPDELEVWVSENVVSSAARPWRPNSIVIEGDSRTGKTMWARSLGPHNYLCGHLDLSPKVYSNDAWYNVIDDVDPHYLKHFKEFMGAQRDWQSNTKYGKPIQIKGGIPTIFLCNPGPTSSYREYLDEEKNISLKNWALKNATFVTLYEPLFASINQGPTQDSQEETNKA

SEQ ID NO: 15300 - protein, 359 aa, Tomato yellow leaf curl virus-[Aichi]
MAPPKRFQINCKNYFLTYPKCSLTKEEALSQLKDLETPTNKKYIKVCRELHENGEPHLHVLIQFEGKFKCQNQRFFDLVSPSRAAHFHPNIQGAKSSSDVKSYVDKDGDTVDWGEFQIDGRSARGGQQSANDAYAAALNSGSKSEALRIIKELIPKDYILQFHNLNSNLDRIFQEPPAPYISPFLSSSFNQVPDELEVWVSENVVSSAARPWRPNSIVIEGDSRTGKTMWARSLGPHNYLCGHLDLSPKVYSNDAWYNVIDDVDPHYLKHFKEFMGAQRDWQSNTKYGKPIQIKGGIPTIFLCNPGPTSSYREYLDEEKNISLKNWALKNATFVTLYEPLFASINQGPTQDSQEETNKA

SEQ ID NO: 15301 - protein, 357 aa, Tomato yellow leaf curl virus-[Cuba]
MPRLFKIYAKNYFLTYPNCSLSKEEALSQLKNIETPTNKKYIKVCREFHENGEPHLHVLIQFEGKYQCKNQRFFDLVSPNRSAHFHPNIQAAKSSTDVKTYVEKDGDFIDFGVFQIDGRSARGGQQSANDAYAEALNSSSKSEALNILKEKAPKDYILQFHNLSSNLDRIFSPPLEVYVSPFLSSSFNQVPDELEEWVAENVVYSAARPWRPISIVIEGDSRTGKTMWARSLGQHNYLCGHLDLSPKVYSNDAWYNVIDDVDPHYLKHFKEFMGAQRDWQSNTKYGKPIQIKGGIPTIFLCNPGPTSSYREYLDEEKNISLKNWALKNATFVTLYEPLFASINQGPTQDSQEETNKA

SEQ ID NO: 15302 - protein, 357 aa, Tomato yellow leaf curl virus-[Dominican Republic]
MPRLFKIYAKNYFLTYPNCSLSKEEALSQLKNIETPTNKKYIKVCREFHENGEPHLHVLIQFEGKYQCKNQRFFDLVSPNRSAHFHPNIQAAKSSTDVKTYVEKDGDFIDFGVFQIDGRSARGGQQSANDAYAEALNSGSKSEALNILKEKAPKDYILQFHNLSSNLDRIFNPPLEVYVSPFLSSSFNQVPDELEEWVAENVVYSAARPWRPISIVIEGDSRTGKTMWARSLGPHNYLCGHLDLSPKVYSNDAWYNVIDDVDPHYLKHFKEFMGAQMDWQSNTKYGKPIQIKGGIPTIFLCNPGPTSSYREYLDEEKNISLKNWALKNATFVTLYEPLFASINQGPTQDSQEETNKA

SEQ ID NO: 15303 - protein, 359 aa, Tomato yellow leaf curl virus-[Shizuokua]
MAPPKRFQINCKNYFLTYPKCSLTKEEALSQLKNLETPTNKKYIKVCRELHENGEPHLHVLIQFEGKFKCQNQRFFDLVSPSRAAHFHPNIQGAKSSSDVKSYVDKDGNTVDWGEFQIDGRSARGGQQSANDAYAAALNSGSKSEALRIIKELIPKDYILQFHNLNSNLDRIFQEPPAPYISPFLSSSFNQVPDELEVWVSENVVSSAARPWRPNSIVIEGDSRTGKTMWARSLGPHNYLCGHLDLSPKVYSNDAWYNVIDDVDPHYLKHFKEFMGAQRDWQSNTKYGKPIQIKGGIPTIFLCNPGPTSSYREYLDEEKNISLKNWALKNATFVTLYEPLFASINQGPTQDSQEETNKA

SEQ ID NO: 15304 - protein, 359 aa, Tomato yellow leaf curl virus-Iran
MAAPNRFKINAKNYFLTYPKCSLTKEEALSQLLNIQTPTSKKFIRICRELHEDGTPHLHVLIQFEGKFQCKNNRFFDLTSPTRSAHFHPNIQGAKSSSDVKTYMEKDGDILDHGVFQVDGRSARGGCQSANDAYAEAINSGSKAQALNILKEKAPRDFILQFHNLNNNLDRIFQEPPAPYVSPFLSSSFNQVPEELEVWAAENVVSSAARPWRPNSIIIEGDSRTGKTMWARSLGPHNYLCGHLDLSPKVYSNDAWYNVIDDVDPHYLKHFKEFMGAQRDWQSNTKYGKPIQIKGGIPTIFLCNPGPTSSYREYLDEEKNISLKNWALKNATFVTLYKPLFASINQGPTQDSQEETNKA

SEQ ID NO: 15305 - protein, 359 aa, Tomato yellow leaf curl virus-Mild
MAPPKRFQINCKNYFLTYPHCSLTNEEALSQLKNLETPTNKKYIKVCRELHENGEPHLHVLIQFEGKFKCQNQRFFDLVSPGRAAHFHPNIQGAKSSSDVKSYVDKDGDTVDWGEFQIDGRSARGGQQSANDAYAAALNSGSKSEALRIIKELVPKDYILQFHNLNSNLDRIFQEPPAPYISPFLSSSFNQVPDELEVWVSENVMSSAARPWRPNSIIIEGDSRTGKTMWARSLGPHNYLCGHLDLSPKVYSNDAWYNVIDDVDPHYLKHFKEFMGAQRDWQSNTKYGKPIQIKGGIPTIFLCNPGPTSSYREYLDEEKNISLKNWALKNATFVTLYEPLFASINQGPTQDSQEETNKA

SEQ ID NO: 15306 - protein, 362 aa, Bhendi yellow vein mosaic virus-[301]
MPPKRFLINSKNYFLTYPKCSLTKEEALSQIQNLQTPVNKKYIKICREFHEDGEPHLHVLIQFEGKYKCQNQRFFDLVSPTRSAHFHPNIQGAKSSSDVKSYLEKDGDTIDWGGFQIDGRSARGGQQSANDAYAAALNAGSKSEALRVIKELAPKDYVLQFHNLNANLDRIFTPPMEVYVSPFSSSSFDQVPEELEEWAAENVVSAAARPLRPLSLVLEGESRTGKTQWARSLGPHNYLCGHLDLSPKVYSNDAWFNIIDDVDPHYLKHFKEFMGAQRDWQSNTKYGKPVQIKGGIPTIFLCNPGPNASYKEFLDEEKNSALKAWTLKNATFVFLTQPLYSGTNQSSTQGSEESAQEETSGP

SEQ ID NO: 15307 - protein, 361 aa, Tomato yellow leaf curl China virus-[Y64]
MAPPNKFRINAKNYFLTYPHCSLTKEEALSQIQTLETPVNKLFIRICRELHEDGTPHLHVLIQFEGKFQCKNQRFFDLTSPHRSAHFHPNIQGAKSSTDVKSYMEKDGDVLDHGVFQIDGRSARGGCQSANDAYAEAINSGSKASALNILREKAPKDFVLQFHNLNSNLDRIFTPPMEEYISPFSSSSFDQVPEELDEWAVDNVVSAAARPLRPVSIVIEGDSRTGKTMWARSLGPHNYLCGHLDLSPKVYSNDAWFNVIDDVDPHYLKHFKEFMGAQRDWQSNTKYGKPVQIKGGIPTIFLCNPGPNSSYKEYLEEEKNSALRNWAVKNAIFVTLNGPLYSGSYQGATPNRQEDNQTTTS

SEQ ID NO: 15308 - protein, 360 aa, Tomato yellow leaf curl China virus-Tb[Y5]
MAPPNKFRINAKNYFLTYPHCSLTKEEALSQIKALETPVNKLFIRICRELHEDGTPHLHVLIQFEGKFQCKNQRFFDLISPNRSAHFHPNIQGAKSSTDVKTYMEKDGDVLDHGVFQIDGRSARGGCQSANDAYAEAINSGSKASALNILREKAPKDFVLQFHNLNSNLDRIFTPPIENIFLLFLLLLLIKFQKNLMNGAIENVVSACAPLRPVSIVIEGDSRTGKTMWARSLGPHNYLCGHLDLSPKVYNNDAWFNVIDDVDPHYLKHFKEFMGAQRDWQSNTKYGKPVQIKGGIPTIFLCNPGPNSSYKEYLEEEKNSALKKWAVKNAIFVTLQSPLYSGSYQGATPNRQENNQTPES

SEQ ID NO: 15309 - protein, 361 aa, Tomato yellow leaf curl China virus-Tb[Y10]
MPPPNKFRINAKNYFLTYPHCSLTKEEALSQIKALETPITKLFIRICRELHEDGTPHLHILIQFEGKFQCKNQRFFDLISPNRSAHFHPNIQGAKSSTDVKSYMEKDGDVLDHGIFQIDGRSARGGCQSANDAYAEAINSGSKASALNILREKAPKDFVLQFHNLNSNLDRIFTPPIDEYISPFSYSSFDQVPHELDEWAVNNVVSAAARPLRPISIVIEGDSRTGKTMWARSLGQHNYLCGHLDLSPKVYNNNAWYNIIDDVDPHYLKHFKEFMGAQRDWQSNTKYGKPVQIKGGIPTIFLCNPGPNSSYKEYLDEEKNSALKNWAVKNAIFVTLQQPLYSGTYQGETPNRQENNQTTSG

SEQ ID NO: 15310 - protein, 361 aa, Tomato yellow leaf curl China virus-Tb[Y11]
MAPPNKFRINAKNYFLTYPHCSLTKEEALSQIQALEAPINKLFIRICRELHEDGTPHLHVLIQFEGKFQCKNQRFFDLTSPNRSAHFHPNIQGAKSSTDVKSYMEKGGDVLDHGIFQIDGRSARGGCQSANDAYAEAINSGSKASALNILREKAPKDFVLQFHNLNSNLDRIFTPPIEEYISPFSSSSFDQVPEELDEWAVDNIFSAAARPLRPISIVIEGDSRTGKTMWARSLGPHNYLCGHLDLSPKVYNNDAWFNVIDDVDPHYLKHFKEFMGAQRDWQSNTKYGKPVQIKGGIPTIFLCNPGPNSSYKEYLEEEKNSALRNWAIKNAIFVTLKGPLYSGSYQGATPNRQENNQTAEG

SEQ ID NO: 15311 - protein, 360 aa, Tomato yellow leaf curl China virus-Tb[Y8]
MAPPNKFRINAKNYFLTYPHCSLTKEEALSQIQTLETPVNKLFIRICRELHEDGTPHLHVLIQFEGKFQCKNQRFFDLTSPHRSAHFHPNIQGAKSSTDVKSYMEKDGDVLDHGVFQIDGRSARGGCQSANDAYAEAINSGSKASALNILREKAPKDFVLQFHNLNSNLDRIFTPPMENIFLLFLPLLLTKFPKNLMSGAVDNVVSACAPLRPVSIIIEGDSRTGKTMWARSLGPHNYLCGHLDLSPKVYSNDAWFNVIDDVDPHYLKHFKELMGAQRDWQSNTKYGKPVQIKGGIPTIFLCNPGPNSSYKEYLEEEKNSALRNWAVKNAIFVTLNGPLYSGSYQGATPNRQEDNQTTTS

SEQ ID NO: 15312 - protein, 361 aa, Tomato yellow leaf curl China virus-Tb[Y36]
MAPPNKFRINAKNYFLTYPHCSLTKEEALSQIQTLETPVNKLFIRICRELHEDGTPHLHVLIQFEGKFQCKNQRFFDLTSPHRSTHFHPNIQGAKSSTDVKSYMEKDGDVLDHGVFQIDGRSARGGCQSANDAYAEAINSGSKASALNILREKAPKDFVLQFHNLNSNLDRIFTPPMEEYISPFSSSSFDQVPEELDEWAVDNVVSAAARPLRPVSIVIEGDSRTGKTMWARSLGPHNYLCGHLDLSPKVYSNDAWFNVIDDVDPHYLKHFKEFMGAQRDWQSNTKYGKPVQIKGGIPTIFLCNPGPNSSYKEYLEEEKNSALRNWAVKNAIFVTLNGPLYSGSYQGATPNRQEDNQTTTS

SEQ ID NO: 15313 - protein, 361 aa, Tomato yellow leaf curl China virus-Tb[Y38]
MAPPNKFRINAKNYFLTYPHCSLTKEEALSQIQTLETPVNKLFIRICRELHEDGTPHLHVLIQFEGKFQCKNQRFFDLTSPHRSAHFHPNIQGAKSSTDVKSYMEKDGDVLDHGVFQIDGRSARGGCQSANDAYAEAINSGFKASALNILREKAPKDFVLQFHNLNNNLDRIFTPPMEEYISPFSSSSFDQVPEELDEWAVDNVVSAAARPLRPISIVIEGDSRTGKTMWARSLGPHNYLCGHLDLSPKVYSNDAWFNVIDDVDPHYLKHFKEFMGAQRDWQSNTKYGKPVQIKGGIPTIFLCNPGPNSSYKEYLEEEKNSALRNWAVKNAIFVTLNGPLYSGSYQGATPNRQEDNQTTTS

SEQ ID NO: 15314 - protein, 361 aa, Tomato yellow leaf curl China virus-To[Y25]
MAPPHKFRINAKNYFLTYPHCSLTKEDTLSQIQALETPVNKLFIRICRELHEDGSPHLHVLIQFEGKFQCKNQRFFDLTSPSRSAHFHPNIQGAKSSTDVKTYMEKDGDVLDHGVFQIDGRSARGGCQSANDAYAEAINSGSKASALNILREKAPKDFVLQFHNLNSNLDRIFTPPMEIYISPFSSSSFDQVPEELEDWAADNVVSAAARPLRPVSIVIEGDSRTGKTMWARSLGPHNYLCGHLDLSPKVYSNDAWFNVIDDVDPHYLKHFKEFMGAQRDWQSNTKYGKPVQIKGGIPTIFLCNPGPNSSYKEYLDEEKNSALRNWAVKNAIFVTLQGPLYSGSYQGATPNRQEDDQTTES

SEQ ID NO: 15315 - protein, 359 aa, Tomato yellow leaf curl Gezira virus
MAPPKRFQINCKNYFLTYPQCSLTREEALSQLQNLETPTNKKYIKVCRELHENGEPHLHVLIQFEGKFKCQNQRFFDLVSPSRAAHFHPNIQGAKSSSDVKSYIEKEGDTLDWGQFQIDGRSARGGQQSANDAYAAAINSGSKAEALRVLRELAPRDYILQFHNLNSNLDRIFQEPPAPYSSPFLSSSFNQVPEELEVWVSENVMSSAARPWRPNSIIIEGDSRTGKTMWARSLGPHNYLCGHLDLSPKVYSNDAWYNVIDDVDPHYLKHFKEFMGAQRDWQSNTKYGKPIQIKGGIPTIFLCNPGPTSSYREYLDEEKNISLKNWALKNATFVTLYEPLFSSTNQGPTQDSQEETNKA

SEQ ID NO: 15316 - protein, 359 aa, Tomato yellow leaf curl Gezira virus-[1]
MAPPKRFKINAKNYFLTYPQCSLSLSEALSQLQTLETPVNKLYIKICRELHENGEPHLHALVQFEGKYQCTNNRFFDLASPSRSTHFHPNIQGAKSSSDVKSYIDKDGDTIDWGEFQIDGRSARGGQQSANDAYAAALNAGSKSEALRIIKELAPKDYILQFHNLNSNLDRIFQEPPAPYISPFLSSSFNQVPEELEVWVSENVMSSAARPWRPNSIIIEGDSRTGKTMWARSLGPHNYLCGHLDLSPKVYSNDAWYNVIDDVDPHYLKHFKEFMGAQRDWQSNTKYGKPIQIKGGIPTIFLCNPGPTSSYKEYLDEEKNISLKNWALKNATFVTLYEPLFSSTNQGPTQNSQETTNQA

SEQ ID NO: 15317 - protein, 359 aa, Tomato yellow leaf curl Gezira virus-[Shambat]
MAPPKRFQINCKNYFLTYPQCSLTKEETLSQIKNLDTPTNKKYIKICRELHENGEPHIHVLIQFEGKFKCQNQRFFDLVSPSRAAHFHPNIQGAKSSSDVKSYIDKDGDTIDWGEFQIDGRSARGGQQSANDAYAAALNSGSKSEALRIIKELAPKDYILQFHNLTNNLDRIFQEPPAPYISPFLSSSFNQVPEELEVWVSENVMSSAARPWRPNSIVIEGDSRTGKTMWARSLGPHNYLCGHLDLSPKVYSNDAWYNVIDDVDPHYLKHFKEFMGAQRDWQSNTKYGKPIQIKGGIPTIFLCNPGPTSSYKEYLDEEKNISLKNWALKNATFVTLYEPLFSSTNQGPTQASQEETNQA

SEQ ID NO: 15318 - protein, 359 aa, Tomato yellow leaf curl Sardinia virus-[Spain2]
MAQPKRFQINAKHYFLTFPKCSLSKEEALEQLLQLQTPTNKKYIKICRELHEDGQPHLHMLIQFEGKFNCKNNRFFDLVSPTRSAHFHPNIQGAKSSSDVKSYIDKDGDVLEWGTFQIDGRSARGGQQTANDAYAKAINAGRKSEALDVIKELAPRDYILHFHNINSNLNMVFQVPPAPYVSPFLSSSFDQVPDELEHWVSENVMDVAARPWRPVSIVIEGDSRTGKTMWARSLGPHNYLCGHLDLSQKVYSNNAWYNVIDDVDPHYLKHFKEFMGSQRDWQSNTKYGKPIQIKGGIPTIFLCNPGPQSSFKEYLDEEKNQTLKNWAIKNAIFVTIHQPLFTNTNQDPTPHRQEETSEA

SEQ ID NO: 15319 - protein, 359 aa, Tomato yellow leaf curl Sardinia virus-[Sicily]
MAQPKRFQINAKHYFLTFPKCCLTKEEALEQLLKLQTPTNKKYIKICRELHEDGQPHLHILMQFEGKFNCKNNRFFDLVSPTRSAHFHPNIQGAKSSSDVKSYIDKDGDVLEWGTFQIDGRSARGGQQTANDAYAKAINARSKSEALDVIKQLAPRDYVLHFHNISSNLDKVFQVPPAPYVSPFLSSSFDQVPEELEHWVSENVMDVAARPWRPVSIVIEGDSRTGKTMWARSLGPHNYLCGHLDLSQKVYSNNAWYNVIDDVDPHYLKHFKEFMGAQRDWQSNTKYGKPIQIKGGIPTIFLCNPGPQSSFKEYLDEEKNQALKNWAVKNAIFVTIDQPLFTDTHQNTTPHRQEEAGEA

SEQ ID NO: 15320 - protein, 360 aa, Tomato yellow leaf curl Thailand virus-[1]
MPPSKKFLINAKNYFLTYPHCSLTKEEALSQILNLSTPTNKLFIRICRELHEDGTPHLHLLIQFEGKFKCQNNRFFDLTSPTRSAHFHPNIQGAKSSTDVKAYMEKDGDVLDHGIFQIDGRSARGGCQSANDAYAEAINSGSKASALNILREKAPKDFVLQFHNLNSNLDRIFTPPIEEYISPFSSSSFNQVPEELEEWACNNVLSRARPLRPISIVIEGDSRTGKTMWARSLGPHNYLCGHLDLSPKVYNNDAWFNVIDDVDPHYLKHFKEFMGAQRDWQSNTKYGKPVQIKGGIPTIFLCNPGPNSSYKEYLEEEKNSALRNWAIKNAIFVTLEGPLYSGTYQGATPNSQEDNQTTES

SEQ ID NO: 15321 - protein, 361 aa, Tomato yellow leaf curl Thailand virus-[Myanmar]
MAPPNKFRINAKNYFLTYPHCSLTKEEALSQIRALETPTNKLFIRICRELHEDGTPHLHVLIQFEGKFQCKNQRFFDLTSPTRSAHFHPNIQGAKSSTDVKSYMEKDGDVLDHGIFQIDGRSARGGCQSANDAYAEAINSGSKASALNILREKAPKDFVLQFHNLNSNLDRIFTPPIEEYISPFSSSSFNQVPEELEDWACNNVLNAAARPLRPISVVIEGDSRTGKTMWARSLGPHNYLCGHLDLSPKVYNNDAWFNVIDDVDPHYLKHFKEFMGAQRDWQSNTKYGKPVQIKGGIPTIFLCNPGPNSSYKEYLEEEKNSALKNWAIKNAIFVTLQGPLYSGTYQGATPNSQEGNQTEEG

SEQ ID NO: 15322 - protein, 361 aa, Tomato yellow leaf curl Thailand virus-[Y72]
MPPSKKFLINAKNYFLTYPHCSLTKEEALSQILNLSTPTNKLFIRICRELHEDGTPHLHVLIQFEGKFKCQNNRFFDLTSPTRSAHFHPNIQGAKSSTDVKTYMDKDGDVLDHGIFQIDGRSARGGCQTANDAYAEAINSGSKASALNILREKAPKDFVLQFHNLNSNLDRIFSTPKEEYISPFCSSSFDQVPDELEEWASENVVTAAARPLRPVSIVIEGDSRTGKTMWARSLGPHNYLCGHLDLSPKVYNNDAWFNVIDDVDPHYLKHFKEFMGAQRDWQSNTKYGKPVQIKGGIPTIFLCNPGPNSSYKEYLEEEKNSALRNWALKNAIFVTLQGPLYSGTHQGTTPNSQEGNQTKES

SEQ ID NO: 15323 - protein, 361 aa, Abutilon mosaic virus-HW
MPPPEKFRVQAKNYFLTYPQYSLAKEVALSQLQNLETPVNKKFIEICRELHENGEPHLHVLIQFEGKFQCTNYRFFDLVSPTRAAHFHPNIQGAKSSSDVKSYIDKDGDTAEWGEFQIDGRSTRGGQQTANDSYAKALNAIDVQSALNILKEEQPKDYVLQNHNIRSNLERIFAKAPEPWVPPFPLSSFTAVPEEMQEWADDYFGSGAAARPHRPLSLIVEGDSRTGKTMWARALGPHNYLSGHLDFNGRVYSNEVLYNVIDDVAPQYLKLKHWKELLGSQKDWQSNCKYGKPVQIKGGIPAIVLCNPGEGSSYKEYLDKEENTGLKNWTRKNAIFITLTSPLYQESTQAGQEEGNQTAED

SEQ ID NO: 15324 - protein, 358 aa, African cassava mosaic virus-[Cameroon-DO2]
  unsure (1)..(358): unsure at all Xaa locations
MRTPRFRVQAKNVFLTYPKGSIPKEHLLSFIQTLSLPSNPKFIKICRELHQNGEPHLHALIQFEGKITITNNRLFDCVHPSCSTSFHPNIQGAKSSSDVKSYLDKDGDTVEWGXFQIDGRSARGGQQSANDAYAKALNSGSKSEALNVIRELVPKDFVLQFHNLNSNLERIFQEPPAPYISPFPCSSFDQVPVELEEWVADNVRASAARPWRPNSIVIEGDSRTGKTIWARSLGPHNYLCGHLDLSPKVFNNAAWYNVIDDVDPHYLKHFKEFMGSQRDWQSNTKYGKPVQIKGGIPTIFLCNPGPTSSYKEFLDEEKQEALKAWALKNAIFITLTEPLYSGSNQSQSQTIQEASHPA

SEQ ID NO: 15325 - protein, 358 aa, African cassava mosaic virus-[Cameroon]
MRTPRFRVQAKNVFLTYPKCSIPKEHLLSFIQTLSLPSNPKFIKICRELHQNGEPHLHALIQFEGKITITNNRLFDCVHPSCSTRFHPNIQGAKSSSDVKSYLDKDGDTVEWGRFQIDGRSARGGQQSANDAYAKALNSGSKSEALNVIRELVPKDFVLQFHNLNSNLERIFQEPPAPYVSPFTCSSFCQVPVELDEWVADNVRDSAARPWRPNSIVIEGDSRTGKTIWARSLGPHNYLCGHLDLSPKVFNNDAWYNVIDDVDPHYLKHFKEFMGSQRDWQSNTKYGKPVQIKGGIPTIFLCNPGPTSSYKEFLDEEKQEALKAWALKNAIFITLTEPLYSGSNQSQSQTIQEASHPA

SEQ ID NO: 15326 - protein, 358 aa, African cassava mosaic virus-[Ivory Coast]
MRTPRFRVQAKNVFLTYPKCSIPKEHLLSFLQTLSLPSNPKFIKICRELHQNGEPHLHALIQFEGKLTITNNRLFDCVHPSCSTNFHPNIQGAKSSSDVKSYLDKDGDTVEWGQFQIDGRSARGGQQSANDAYAKALNSGSKSEALNVIRELVPKDFVLQFHNLNSNLDRIFQEPPAPYVSPFPCSSFDQVPDEIEEWVADNVRDSAARPWRPNSIVIEGDSRTGKTIWARSLGPHNYLCGHLDLSPKVFNNAAWYNVIDDVDPHYLKHFKEFMGSQRDWQSNTKYGKPVQIKGGIPTIFLCNPGPTSSYKEFLDEEKQEALKAWALKNAIFITLTEPLYSGSNQSQSQTIQEASHPA

SEQ ID NO: 15327 - protein, 358 aa, African cassava mosaic virus-[Nigeria-Ogo]
MRTPRFRVQAKNVFLTYPKCSIPKEHQLSFIQTLSLPSNPKFIKICRELHQNGEPHLHALIQFEGKITITNNRLFDCVHPTCSTNFHPNIQGAKSSSDVKSYLDKDGDTVEWGQFQIDGRSARGGQQSANDAYAKGLNSGSKSEALNVIRELVPKDFVLQFHNLNSNLDRIFQEPPAPYVSPFPCSSFDQVPVEIEEWVADNVRDSAARPWRPNSIVIEGASRTGKTIWARSLGPHNYLCGHLDLSPKVFNNAAWYNVIDDVDPHYLKHFKEFMGSQRDWQSNTKYGKPVQIKGGIPTIFLCNPGPTSSYKEFLDEEKQEALKAWALKNAIFITLTEPLYSGSNQSQSQTIQEASHPA

SEQ ID NO: 15328 - protein, 358 aa, African cassava mosaic virus-Uganda Mild
MRTPRFRIQAKNVFLTYPKCSIPKEHLLSFIQTLSLPSNPKFIKICRELHQNGEPHLHALIQFEGKITITNNRLFDCVHPSCSTCFHPNIQGAKSSSDVKSYLDKDGDTVEWGQFQIDGRSARSGQQSANDAYAKALNSGSKSEALNVIRELVPKDFVLQFHNLNSNLDRIFQEPPAPYVSPFPCSSFDQVPVEIEEWVADNVRDSAARPWRPNSIVIEGDSRTGKTIWARSLGPHNYLCGHLDLSPKVFNNAAWYNVIDDVDPHYLKHFKEFMGSQRDWQSNTKYGKPVQIKGGIPTIFLCNPGPTSSYKEFLDEEKQDALKAWALKNAIFITLTEPLYSGSNPSQSQTIQEASHPA

SEQ ID NO: 15329 - protein, 358 aa, African cassava mosaic virus-Uganda Severe
MRTPRFRIQAKNVFLTYPKCSIPKEHLLSFIQTLSLPSNPKFIKICRELHQTGEPHLHALIQFEGKITITNNRLFDCVHPSCSTNFHPNIQGAKSSSDVKSYLDKDGDTVEWGQFQIDGRSARGGQQSANDAYAKALNSGSKSEALNVIRELVPKDFVLQFHNLNSNLDRIFQEPPAPYVSPFPCSSFDQVPDDIEEWVADNVRDSAARPWRPNSIVIEGDSRTGKTIWARSLGPHNYLCGHLDLSPKVFNNAAWYNVIDDVDPHYLKHFKEFMGSQRDWQSNTKYGKPVQIKGGIPTIFLCNPGPTSSYKEFLDEDKQEALKAWALKNAIFITLTEPLYSGSNQSQSQTIQEARHSA

SEQ ID NO: 15330 - protein, 361 aa, Ageratum yellow vein Sri Lanka virus
MAATNRFKINAKNYFLTYPKCSLTKEEALSQLLNLETPTSKKFIRICRELHEDGTPHLHVLIQFEGKFQCRNNRFFDLTSPTRSAHFHPNIQGAKSSSDVKTYMEKDGDILDHGVFQVDGRSARGGCQSANDAYAEAINSGSKAQALNILKEKAPKDFVLQFHNLNSNLDRIFTPPMEVYVSPFLSSSFDQVPEELEEWACENVVSAAARPIRPISIVIEGDSRTGKTMWARSLGPHNYLCGHLDLSPKVYSNDAWYNVIDDVDPHYLKHFKEFMGAQRDWQSNTKYGKPVQIKGGIPTIFLCNPGPNSSYKEYLDEEKNSALKNWALKNATFVTLEEPLYSGTHQSPTQVSEEEQQTSEG

SEQ ID NO: 15331 - protein, 360 aa, Ageratum yellow vein Taiwan virus
MPRSSSFQVKAKNIFLTYPKCPIPKEEALELIKNIQCPSDKLFIRVAQEKHSDGTLHLHALIQFKGKAQFRNSRHFDITHPNTSTQFHPNFQGAKSSSDVKSYIEKDGDYVDWGVFQIDGRSARGGQQTANDAAAEALNAGSKEAAMAIIREKLPKEYIFQFHNLNTNLDRIFAPPLEVFVCPFLSSSFDQVPEELEEWVSENVSGAAARPWRPKSIVIEGESRTGKTMWARSLGPHNYLCGHLDLSPKVYSNDAWYNVIDDVDPHYLKHFKEFMGAQRDWQSNTKYGKPIQIKGGIPTIFLCNPGPTSSYKEYLDEEKNSALKEWAIKNAEFVTLNNPLYSGTNQSAAQNSEEEASSQA

SEQ ID NO: 15332 - protein, 359 aa, Ageratum yellow vein Taiwan virus-[TaiwanPD]
MPRSSSFQVKAENIFLTYPKCPIPKEEALELIKNIQCPSDKLFIRVAQKKHSDGTLHLHALIQFKGKAQFRNSRHFDLTHPNTSTQFHPNFQGAKSSSDVKSYIEKDGDYVDWGVFQIDGRSARGGQQTANDAAAEALNAGSKEAAMAIIREKLPKEYIFQFHNLNTNLDRIFAPPLEVFVCPFLSSSFDQVPEELEEWVSENVSGAARPWRPKSIVIEGESRTGKTMWARSLGPHNYLCGHLDLSPKVYSNDAWYNVIDDVDPHYLKHFKEFMGAQRDWQSNTRYGKPIQIKGGIPTIFLCNPGPTSSYKECLDEEKNSALKEWAIKNAEFVTLNNPLYSGTNQSAAQDSEEEASSQA

SEQ ID NO: 15333 - protein, 353 aa, Bean golden yellow mosaic virus-[Guatemala]
MPPPQRFRVQSKNYFLTYPRCPIPKEEVLSQLQKIHTATNKKFIKVCEERHENGEPHLHALIQFEGKFVCTNKRLFDLVSSTRSAPFHPNIQGAKSSSDVKAYIDKDGVTIEWGQFQVDGRSARGGQQSANDSYAKALNADSIESALTILKEEQPKDYVLQHHNIRSNLERIFVKVPEPWVPPFPLSSFINVPVVMQEWVDDYFGRGSAARPERPISIIVEGDSRTGKTMWARALGPHNYLSGHLDFNSRVYSNAVEYNVIDDISPNYLKLKHWKELIGAQKDWQSNCKYGKPVQIKGGIPSIVLCNPGEGSSYKDFLDKEENRALHNWTIHNAIFVTLTAPLYQSTTQDCQT

SEQ ID NO: 15334 - protein, 353 aa, Bean golden yellow mosaic virus-[Mexico]
MPPPQRFRVQSKNYFLTYPRCSIPKEEALSQLQKIHTATNKKFIKVCEERHENGEPHLHALIQFEGKFVCTNKRLFDLVSSTRSAHFHPNIQGAKSSSDVKAYIDKGGVTIEWGQFQVDGRSARGGQQSANDSYAKALNADSIESALSVLKEEQPKDYVLQHHNIRSNLERIFVKAPEPWVPPFPLSSFINVPVVMQEWVDDYFGRGSAARPERPISIIVEGDSRTGKTMWARALGPHNYLSGHLDFNSRVYSNAVEYNVIDDISPNYLKLKHWKELIGAQKDWQSNCKYGKPVQIKGGIPSIVLCNPGEGSSYKDFLDKEENRALHNWTIHNAIFVTLTAPLYQSTAQDCQT

SEQ ID NO: 15335 - protein, 362 aa, Chayote yellow mosaic virus
MAPPKRFQINAKNYFLTYPQCSLTKEEALSQLRSLRTPTNQKYIKVCRELHEDGQPHLHALIQFEGKYKCQNQRFFDLVSPTRSTHFHPNVQGAKSCSDVKSYIEKDGDSIEWGEFQVDGRSARGGCHKANDAAAEALNAGSAEAALAIIKEKLPKDYIFQYHNIKANLDKIFQAPPEVYVSPFCASSFTQVPDELQRWASANVMDAAARPWRPSSIIVEGDSRTGKTMWARSLGPHNYLCGHLDLSPKVYSNSAWYNVIDDVDPHYLKHFKEFMGAQRDWQSNTKYGKPIQIKGGIPTIFLCNPGPTSSYKEYLDEDKNISLKAWALKNAAFCTLTQPLYSSADQSSTPNREEESHSAQKD

SEQ ID NO: 15336 - protein, 361 aa, Chino del tomate virus-[H6]
MPSVKRFKVSAKNYFLTYPQCSLSKEEALSQLQTLKTPVNKKYIKICRELHENGEPHLHALIQFEGKYQCTNNRFFDLVSPTRSAHFHPNIQGAKSSSDVKSYIDKDGDTVEWGEFQIDGRSARGGQQSANDSYAKALNAGSVQAAMTVLKEEQPKDFVLHNHNIRSNLERIFAKAPERWVPPFQLSSFTNVPDEMQEWADDYFRRSSAARPERPISIIVEGDSRTGKTMWARALGPHNYLSGHLDFNPKVYSNEVEYNVVDDVAPHYLKLKHWKELLGAQKDWQSNCKYGKPVQIKGGIPAIVLCNPGEGASYKDFLNKEENASLRNWTIKNAIFITLTSALYQDSAQASQEEGHQEEAD

SEQ ID NO: 15337 - protein, 361 aa, Chino del tomate virus-[H8]
MPSVKRFKVSAKNYFLTYPQCSLSKEEALSQLQTLKTPVNKKYIKICRELHENGEPHLHVLIQFEGKYQCTNNRFFDLVSPTRSAHFHPNIQGAKSSSDVKSYIDKDGDTVEWGEFQIDGRSARGGQQSANDSYAKALNAGSVQAAMTVLKEEQPKDFVLHNHNIRSNLERIFAKAPERWVPPFQLSSFTNVPDEMQEWADDYFRRSSAARPERPISIIVEGDSRTGKTMWARALGPHNYLSGHLDFNPKVYSNEVEYNVIDDVAPHYLKLKHWKELLGAQKDWQSNCKYGKPVQIKGGIPAIVLCNPGEGASYKDFLNKEENASLRNWTIKNAIFITLTSALYQDSAQASQEEGHQEEAD

SEQ ID NO: 15338 - protein, 363 aa, Cotton leaf curl Alabad virus
MPRNNSFCINAKNIFLTFPKCPIPKEQMLDILSNISCPSDKLFIRVAQEKHQDGSLHIHALIQFKGKAKFRNPRHFDVTHPHTSTQFHPNFQGAKSSSDVKSYIEKDGDYIDWGTFQIDGRSARGGQQTANDAAAEALNAGSKEAAMAIIREKLPEKFIFQYHNLNSNLDRIFTPPLEVYVSPFLSSSFNQVPEELEEWVSENVMDAAARPLRPQSIVIEGDSRTGKTMWARSLGPHNYLCGHLDLSPKVYSNDAWYNVIDDVDPHFLKHFKEFMGAQRDWQSNTKYGKPVQIKGGIPTIFLCNPGPNSSYKEYLDEEKNQALKNWAVKNAVFITLEEPLYSIAHQSPAQGGQEEDQEEESGS

SEQ ID NO: 15339 - protein, 362 aa, Cotton leaf curl Gezira virus
MAPPHRFQIYAKNYFLTFPKCSLTKEEALEQIQKISTASNKKYIKICRELHEDGQPHLHVLLQFEGKFKCQNQRLFDLVSPNRSAHFHPNIQGAKSSSDVKSYIDKDGDTLEWGEFQIDGRSARGGQQTANDAYAAALNAGSKAEALRVIRELAPKDFVLQFHNLNSNLERIFQEPPAPYVSPFLSSSFDQVPEELEEWAAENVVEAAARPSRPISIVIEGESRTGKTVWARSLGPHNYLCGHLDLSPKVFSNDAWYNVIDDVDPHYLKHFKEFMGAQKDWQSNTKYGKPVQIKGGIPTIFLCNPGPNSSYKEYLDEDKNAHLKSWALKNATFITLSNPLYSGTNQSPASGGQEESNQETQD

SEQ ID NO: 15340 - protein, 362 aa, Cotton leaf curl Gezira virus-[Cotton]
MAPPHRFQIYAKNYFLTFPKCSLTKEEALEQLQQISTASNKKYIKICRELHEDGQPHLHVLLQFEGKFKCQNQRLFDLVSPNRSTHFHPNIQGAKSSSDVKSYIDKDGDTLEWGEFQIDGRSARGGQQTANDAYAAALNAGSKAEALRVIRELAPKDFVLQFHNLNSNLERIFQEPPAPYVSPFLSSSFDQVPEELEEWAAENVVDAAARPSRPISIVIEGESRTGKTVWARSLGPHNYLCGHLDLSPKVFSNDAWYNVIDDVDPHYLKHFKEFMGAQKDWQSNTKYGKPVQIKGGIPTIFLCNPGPNSSYKEYLDEEKNAHLKSWALKNATFITLSNPLYSGTNQSSASGGEEESNQETQD

SEQ ID NO: 15341 - protein, 362 aa, Cotton leaf curl Gezira virus-[Okra/Egypt]
MAPPHRFQIYAKNYFLTFPKCSQTKEEALEQIQQISTASNKKYIKICRELHEDGQPHLHVLLQFEGKFKCQNQRLFDLVSPNRSAHFHPNIQGAKSSSDVKSYIDKDGDTLEWGEFQIDGRSARGGQQTANDAYAAALNAGSKAEALRVIRELAPKDFVLQFHNLNSNLERIFQEPPAPYVSPFLSSSFDQVPEELEEWAAENVVEAAARPSRPISIVIEGESRTGKTVWARSLGPHNYLCGHLDLSPKVFSNDAWYNVIDDVDPHYLKHFKEFMGAQKDWQSNTKYGKPVQIKGGIPTIFLCNPGPNSSYKEYLDEDKNAHLKSWSLKNATFITLSNPLYSGTNQSPASGGQEESNQETQD

SEQ ID NO: 15342 - protein, 362 aa, Cotton leaf curl Gezira virus-[Okra/Gezira]
MAPPHRFQIYAKNYFLTFPKCSLTKEEALEQLQQISTASNKKYIKICRELHEDGQPHLHVLLQFEGKFKCQNQRLFDLVSPNRSTHFHPNIQGAKSSSDVKSYIDKDGDTLEWGEFRIDGRSARGGQQTANDAYAAALNAGSKAEALRVIRELAPKDFVLQFHNLNSNLERIFEEPPAPYVSPFLSSSFDQVPEELEEWAAENVVEAAARPSRPISIVIEGESRTGKTVWARSLGPHNYLCGHLDLSPKVFSNDAWYNVIDDVDPHYLKHFKEFMGAQKDWQSNTKYGKPVQIKGGIPTIFLCNPGPNSSYKEYLDEEKNAHLKSWALKNATFITLSNPLYSGTNQSSASGGEEESNQETED

SEQ ID NO: 15343 - protein, 362 aa, Cotton leaf curl Gezira virus-[Sida]
MAPPHRFQIYAKNYFLTFPKCSLTKEEALEQLQQISTASNKKYIKICRELHEDGQPHLHALLQFEGKFKCQNQRLFDLVSPNRSTHFHPNIQGAKSSSDVKSYIDKDGDTLEWGEFQIDGRSARGGQQTANDAYAAALNAGSKAEALRVIRELAPKDFVLQFHNLNSNLERIFQEPPAPYVSPFLSSSFDQVPEELEEWAAENVVDAAARPSRPISIVIEGESRTGKTVWARSLGPHNYLCGHLDLSPKVFSNDAWYNVIDDVDPHYLKHFKEFMGAQKDWQSNTKYGKPVQIKGGIPTIFLCNPGPNSSYKEYLDEEKNAHLKSWALKNATFITLSNPLYSGTNQNSASGGQEESNQETQD

SEQ ID NO: 15344 - protein, 360 aa, Cotton leaf curl Kokhran virus
MPPKRNGIYSKNYFITYPKCSLTKEEALSQLLNIQTPTSKKYIRICRELHEDGTPHLHVLIQFEGKFKCQNMRFFDLVSPSRSAHFHPNIQGAKSSSDVKSYIEKDGDILDWGQFQIDGRSARGGQQTANDAYAAALNAGSKSEALRVIKELAPKDFVLQFHNLNANLDRIFQEPPAPYVSPFSSSSFDQVPEELEVWAAENVVSAAARANRPISVVIEGDSRTGKTMWARSLGPHNYLCGHLDLSPRVYSNDAWFNVIDDVDPHYLKHFKEFMGAQKDWQSNTKYGKPVQIKGGIPTIFLCNPGPNSSYKEFLDEEKNSALKNWALKNAIFITLESPLYSGSNQSAAQASQEGDQTSES

SEQ ID NO: 15345 - protein, 361 aa, Tobacco curly shoot virus-[Y35]
MPQPRKLLINAKNYFLTYPQCSLTKEEALSQISALSTPTNKLFIRICRELHEDGSPHLHVLIQFEGKFKCQNNRFFDLTSPSRSAHFHPNIQGAKSSTDVKAYMEKDGDVLDHGIFQIDGRSARGGCQSANDAYAEAINSGSKAAALNILKEKAPKDFVLQFHNLNSNLDRIFTPPVEVYVSPFLSSSFDQVPEELEEWAAENVVSAAARPLRPISIVIEGDSRTGKTMWARSLGPHNYLCGHLDLSPKVYNNDAWYNVIDDVDPHYLKHFKEFMGAQRDWQSNTKYGKPVQIKGGIPTIFLCNPGPNSSYKEFLDEEKNTALKNWALKNAIFVTLESPLYSGSNQSEAQASQEGEQTSSC

SEQ ID NO: 15346 - protein, 361 aa, Squash leaf curl Yunnan virus
MPRTNQFQVKAKNIFLTFPKCPIPKEQMLELLQNISCPSDKLFIRVSQEKHQDGSMHIHALIQFKGKCQFRNPRHFDVTHPNTSTQYHPNFQGAKSSSDVKSYIEKDGDYIDWGQFQIDGRSARGGQQTANDAAAEALNAGSAEAALAIMREKLPKDYIFQYHNIKCNLDRIFTPPIEEYISPFSSSSFNQVPGELEEWACNNVLSEAARPFRPISIVIEGDSRTGKTMWARSLGPHNYLCGHLDLSPKVYNNDAWYNVIDDVDPHYLKHFKEFMGAQRDWQSNTKYGKPVQIKGGIPTIFLCNPGPNSSYKEYLEEEKNSALRNWAIKNAIFVTLEGPLYSDTYQGATPNSEEDNQTTES

SEQ ID NO: 15347 - protein, 362 aa, Malvastrum yellow vein virus
MPQPKKFLINAKNYFLTYPKCSLTKEEALSQFLNLQTPTSIKFIRICRELHENGTPHLHVLIQFEGKFKCQNNRFFDLTSPSRSAHFHPNIQGAKSSSDVKTYIKKDGDILDHGIFQVDGRSARGGCQSANDAYAEAINSGSKAAALNILKEKAPKDFVLQFHNLNSNLDRIFTPPLEEYISPFLSSSFDQVPEELEAWACENVVDAAARPLRPQSIVIEGDSRTGKTMWARSLGPHNYLCGHLDLSPKVYSNDAWYNVIDDVDPHFLKHFKEFMGAQRDWQSNTKYGKPVQIKGGIPTIFLCNPGPNSSYKEFLDEKDTALKNWALKNAIFVTLQGPLYSGSNQSTAQGSEETQQEEESRS

SEQ ID NO: 15348 - protein, 360 aa, Cotton leaf curl Kokhran virus-[72b]
MPPKRNGIYSKNYFITYPKCSLTKEEALSQLLNIQTPTSKKYIRICRELHEDGTPHLHVLIQFEGKLKCQNMRFFDLVSPSRSAHFHPNIQGAKSSSDVKSYIEKDGDILDWGQFQIDGRSARGGQQTANDAYAAALNAGSKSEALRVIKELAPKDFVLQFHNLNANLDRIFQEPPAPYVSPFSSSSFDQVPDELEVWAAENVVSAAARANRPISVVIEGDSRTGKTMWARSLGPHNYLCGHLNLSPRVYSNDAWFNVIDDVDPHYLKHFKEFMGAQKDWQSNTKYGKPVQIKGGIPTIFLCNPGPNSSYKEFLDEEKNSALKNWALKNAIFITLESPLYSGSNQSAAQASQEGDQTSES

SEQ ID NO: 15349 - protein, 363 aa, Cotton leaf curl Multan virus
MAPPKRFKVQAKNYFITYPQCSLTKEEALSQIQAINTPSNKKYIKICRELHEDGSPHLHVLIQFEGKFVCTNNRFFDLVSPTRSAHFHPNIQGAKSSSDVKAYIDKDGDTLEWGEFQIDGRSARGGQQTANDAYAEALNAGSKSEALRVIKELAPKDFVLQFHNLNANLDRIFQEPPAPYISPFSPSSFDQVPEELEVWAIDNVVDPAARPLRPRSIVIEGDSRTGKTMWARSLGPHNYLCGHLDLSPKVYSNDAWYNVIDDVDPHFLKHFKEFMGAQRDWQSNTKYGKPVQIKGGIPTIFLCNPGPNSSYKEFLDEEKNTALKNWAVKNAIFITLEGPLYSGTNQSTAQGSEETQQEEESRS

SEQ ID NO: 15350 - protein, 363 aa, Cotton leaf curl Multan virus-[26]
MAPPKRFKVQAKNYFITYPQCSLTKEEALSQIQAINTPSNKKYIKICRELHEDGSPHLHVLIQFEGKFVCTNNRFFDLVSPTRSAHFHPNIQGAKSSSDVKAYIDKDGDTLEWGEFQIDGRSARGGQQTANDAYAEALNAGSKSEALRVIKELAPKDFVLQFHNLNANLDRIFQEPPAPYISPFSPSSFDQVPEELEVWAIDNVVDPAARPLRPRSIVIEGDSRTGKTMWARSLGPHDYLCGHLDLSPKVYSNDAWYNVIDDVDPHFLKHFKEFMGAQRDWQSNTKYGKPVQIKGGIPTIFLCNPGPNSSYKEFLDEEKNTALKNWAVKNAIFITLEGPLYSGTNQSTAQGSEETQQEEESRS

SEQ ID NO: 15351 - protein, 363 aa, Cotton leaf curl Multan virus-[Faisalabad2]
MAPPKRFKVQAKNYFITYPQCSLTKEEALSQIQAINTPSNKKYIKICRELHEDGSPHLHVLIQFEGKFVCTNNRFFDLVSPTRSAHFHPNIQGAKSSSDVKAYIDKDGDTLEWGEFQIDGRSARGGQQTANDAYAAALNAGSKSEALRVIKELAPKDFVLQFHNLNANLDRIFQEPPAPYISPFSPSSFDQVPEELEVWAIDNVVDPAARPLRPRSIVIEGDSRTGKTMWARSLGPHNYLCGHLDLSPKVYSNDAWYNVIDDVDPHFLKHFKEFMGAQRDWQSNTKYGKPVQIKGGIPTIFLCNPGPNSSYKEFLDEEKNTALKNWAVKNAIFITLEGPLYSGTNQSTAQGSEETQQEEESRS

SEQ ID NO: 15352 - protein, 361 aa, Cotton leaf curl Multan virus-[Faisalabad3]
MPRALKTNAKNYFLTYPKCSLTKEETLSQLQNLHTPVSKKYIKICRELHQNGEPHLHVLIQFEGKYQCTNNRFFDLVSPTRSAHFHPNIQGAKSRSDVKAYIDKDGDTLEWGEFQIDGRSARGGQQTADDAYAAALNAGRKSEVLRVIKELAPKDFVQQFHNLNANLDRIFREPPAPNISPFSRSSLDQVPEELEVWAIDNVVDPAARPLRPRSIVIEGDSRTGKTMWARSLGPHNYLCGHLDLSPKVYSNDAWYNVIDEVDPHFLKHFKEFMGAQRDWQSNTKYGKPVQIKGGIPTIFLCNPGPNCSYKEFLDEEKNTALKNWAVKNAIFITLDRPLYSGTNQSTAQGSEEAQQEEESRS

SEQ ID NO: 15353 - protein, 363 aa, Cotton leaf curl Multan virus-[Multan]
MAPPKRFKVQAKNYFITYPQCSLTKQEALSQIQAINTPSNKKYIKLCRELHEDGSPHLHVLIQFEGKFVCTNNRFFDLASPTRSAHFHPNIQGAKSSSDVKAYIDKDGDTLEWGEFQIDGRSARGGQQTANDVYAAALNAGSKSEALRVIKELAPKDFVLQFHNLNANLDRIFQEPPAPYISPFSPSSFDQVPEELEVWAIDNVVDSAARALRPRSIVIEGDSRTGKTMWARSLGPHNYLSGHLDLSPKVFSNDAWYNVIDDVDPHFLKHFKEFMGGQRDWQANTKYGKAVQIKGGIPTIFLCNPGPNRRYKEFLNEEKNSALKNWALKNAIFITLEGPLYSASNQSTAQGSEETQQEEESRS

SEQ ID NO: 15354 - protein, 361 aa, Cotton leaf curl Multan virus-[Okra]
MPRALKTNAKNYFLTYPKCSLTKEETLSQLQNLHTPVNKKYIKICRELHQNGEPHLHVLIQFEGKYQCTNNRFFDLVSPTRSAHFHPNIQGAKSSSDVKAYIDKDGDTLEWGEFQIDGRSARGGQQTANDAYAAALNAGSKSEALRVIKELAPKDFVLQFHNLNANLDRIFQEPPAPYISPFSRSSFDQVPEELEVWAIDNVVDPAARPLRPRSIVIEGDSRTGKTMWARSLGPHNYLCGHLDLSPKVYSNDAWYNVINDVDPHFLKHFKEFMGAQRDWQSNTKYGKPVQIKGGIPTIFLCNPGPNSSYKEFLDEEKNTALKNWAVKNAIFITLEGPLYSGTNQSTAQGSEETQQEEESRS

SEQ ID NO: 15355 - protein, 362 aa, Cotton leaf curl Rajasthan virus
MPPKRNGIYSKNYFITYPKCSLTKEEALSQLLNIQTPTSKKYIRICRELHEDGTPHLHVLIQFEGNFKCQNMRFFDLVSPSRSAHFHPNIQGAKSSSDVKSYTEKDGDILDWGQFQIDGRSARGGQQTANDAYAAALNAGSKSEALRVIKELAPKDFVLQFHNLNANLDRIFQEPPAPYVSPFSSSSFDQVPEELEVWAAENVVSAAARANRPISVVIEGDSRTGKTMWARSLGPHNYLCGHLDLSPRVYSNDAWFNVIDDVNPHYLKHFKEFMGAQKDWQSNTKYGKPVQIKGGIPTIFLCNPGPNSSYKEFLDEEKNSALKNWALKNAIFITLDRPMYSGTNQSTAQGSEEAQQEEESRS

SEQ ID NO: 15356 - protein, 352 aa, Cowpea golden mosaic virus-[Nigeria]
MPRSGAFRVNAKNIFATYPRCSLPKEEALELLRQIPTAVNKKFIKVARELHEDGEPHLHVLLQFEGKLQITNPRLFDLVSGNRSAVFHPNIQGAKSSSDVKSYIEKDGDTISWGEFQIDGRSSRGGQQSANDAYAAAINSGSPTKALNIVKELAPKDFVLHYHNIKSNLDRIFSKPLEPYSCPFRLNSFNNVPQIMKDWASINVVDAAARPDRPISIVIEGESRTGKTMWARSLGAHNYLCGHLDLSPKVYSNNAWYNVIDDVDPHYLKHFKEFMGAQHDWQSNTKYGKPIQIKGGIPTIFLCNPGPNSSYKSFLDEDKNKDLKQWALKNAIFVDISFPLYSNSNKSQTQNS

SEQ ID NO: 15357 - protein, 352 aa, East African cassava mosaic Cameroon virus
MPRAGRFQINAKNYFITYPRCSLAKEEALSQLKAISYPTNIKFIRVCRELHQDGVPHLHVLIQFEGKFQCTNPRFFDLISPSRSTHFHPNIQGAKSSSDVKAYIEKGGEFLDDGIFQVDARSARGEGQHLAQVYAEALNASSKSEALQIIKEKDPKSFFLQFHNISANADRIFQAPPQTYVSPFLSSSFTQVPEEIEVWVSENICRPAARPWRPISIVLEGDSRTGKTMWARSLGPHNYLCGHLDLSPKIYSNDAWYNVIDDVDPHYLKHFKEFMGAQRDWQSNTKYGKPIQIKGGIPTIFLCNPGPNSSYKEYLDEDKNSNLKNWAIKNALFISLTEPLFSSTDQSQAQAS

SEQ ID NO: 15358 - protein, 352 aa, East African cassava mosaic Cameroon virus-[Ivory Coast]
MPRAGRFQINAKNYFITYPRCSLTKAEALSQLKALSYPTNIKFIRVCRELHQDGVPHLHVLIQFEGKFQCTNPRFFDLISPSRSTHFHPNIQGAKSSSDVKAYIEKGGEFLDDGIFQVDARSARGEGQHLAQVYAEALNASSKSEALQIIKEKDPKSFFLQFHNISANADRIFQAPPQTYVSPFLSSSFTQVPEDIEVWVSENICRPAARPWRPISIVLEGDSRTGKTMWARSLGPHNYLCGHLDLSPKIYSNDAWYNVIDDVDPHYLKHFKEFMGAQRDWQSNTKYGKPIQIKGGIPTIFLCNPGPNSSYKEYLDEDKNSNLRNWALKNALFISLTEPLFSSTDQSQAQAS

SEQ ID NO: 15359 - protein, 359 aa, East African cassava mosaic Malawi virus-Malawi[K]
MPRAGRFQINAKNYFITYPRCSLTKEEALSQLQALSYPTNIKFIRVCRELHQDGVPHLHVLIQFEGKFQCTNPKFFDLISPSRSTHFHPNIQGAKSSSDVKAYIEKGGEFLDDGVFQVDARSARGEGQHLAQVYAEALNASSKSEALQIIKEKDPKFFFLQFHNISANADRIFQLPPQPYVSPFLSSSFTHVPDEIEIWVSENICSPAARPWRPISIVLEGDSRTGKTMWARSLGPHNYLCGHLDLSPKVYSNDAWYNVIDDVDPHYLKHFKEFMGAQRDWQSNTKYGKPIQITGGIPTIFLCNPGPTSSYKEFLEEEKNQSLKAWALKNATFITLHEPLFSSAYQSPTPHREEQGTQT

SEQ ID NO: 15360 - protein, 359 aa, East African cassava mosaic Malawi virus-Malawi[MH]
MPRAGRFQINAKNYFITYPRCSLTKEEALSQLQALSYPTNIKFIRVCRELHQDGVPHLHVLIQFEGKFQCTNPRFFDLISPSRSTHFHPNIEGAKSSSDVKAYIEKGGEFLDDGVFQVDARSARGEGQHLAQVYAEALNASSKSEALQIIKEKDPKSFFLQFHNISANADRIFQIPPQTYVSPFLSSSFTHVPDEIEIWVSENICSPAARPWRPISIVLEGDSRTGKTMWARSLGPHNYLCGHLDLSPKVYSNDAWYNVIDDVDPHYLKHFKEFMGAQRDWQSNTKYGKPIQIKGGIPTIFLCNPGPTSSYKEFLEEEKNQSLKAWALKNATFITLHEPLFSSAYQSPTPHREEQGTQT

SEQ ID NO: 15361 - protein, 359 aa, East African cassava mosaic Zanzibar virus
MTPPKRFKIQAKNYFLTYPKCSLSKHEALSQILNIPTPTNKKYIKVCRELHDDGQPHLHMLIQFEGKFSCTNKRFFDLVSPTRSTHFHPNIQGAKSSSDVKSYIDKDGDTTEWGEFQIDARSARGGCHNANDACAEALNSGSKAAALLIIKEKLPKEFIFQYHNLSSNLDRIFQEPPAPYVSPFLSSSFTNVPEELEVWVSENVMGSAARPWRPNSIVIEGDSRTGKTMWARSLGPHNYLCGHLDLSPKVYSNDAWYNVIDDVDPHYLKHFKEFMGAQRDWQSNTKYGKPIQIKGGIPTIFLCNPGPTSSYKEFLDEEKNQSLKAWALKNATFITLHEPLFSSAHQSPTPHSEDQGRQT

SEQ ID NO: 15362 - protein, 362 aa, Eupatorium yellow vein virus-[MNS2]
MPTPNRFKINAKNYFLTYPHCSLTKEEALSQIKQLQTPTNKLFIRICRELHEDGSPHLHVLIQFEGKYTCRNQRFFDLVSPNRSAHFHPNIQAAKSSSDVKTYMEKDGDILDSGVFQVDGRSARGGCQNANDAYAEAINSGSKSSALNILREKAPKDYVLQFHNLNSNLDRIFAPPLEVFVCPFTASSFDQVPEELEEWAVENVKSSAARPWRPISIVIEGDSRTGKTMWARSLGPHNYLCGHLDLSPKIYSNDAWYNVVDDVDPHYLKHFKEFMGAQRDWQSNTKYGKPIQIKGGIPTIFLCNPGPTSSYTEFLDEEKNSALKAWAIKNATFVTLYSPLYSGSHQSPAQDSQEEEEPQEED

SEQ ID NO: 15363 - protein, 362 aa, Eupatorium yellow vein virus-[SOJ3]
MAPPKRFRINSKNYFLTYPQCSLTIEEALSQLRNIQTPVNKKFIRVCQEQHEDGSPHLHSLLQFEGKFQCTNPRFFDLVSPNRSTHFHCNIQGAKSSSDVKSYIEKDGQFSDWGEFQIDGRSARGGQQSANDAYAQAINTGSKSEALRVIKELAPMDYVLQFHNLNSNLDRIFAPPLEVFVCPFTASSFDQVPEELEEWAAENVKSSAARPWRPISIVIEGDSRTGKTMWARSLGPHNYLCGHLDLSPKIYSNDAWYNVVDDVDPHYLKHFKEFMGAQRDWQSNTKYGKPIQIKGGIPTIFLCNPGPTSSYTEFLDEEKNSALKAWAVKNATFVTLYSPLYSGTHQSPAQDSQEEEEPQEED

SEQ ID NO: 15364 - protein, 362 aa, Hollyhock leaf crumple virus-[Giza]
MAPPKRFKIYAKNYFLTYPHCSLSLSETLSQLKTLQTPVNKLYIKICRELHENGEPHLHALIQFEGKYQCTNKRFFDLVSPSRSTHFHPNIQGAKSSSDVKSYLEKDGDTLEWGEFQIDARSARGGQQTANDAYAAALNAGSKSEALRVIRELAPKDFVLQFHNLTSNLDRIFQEPPAPYVSPFLSSSFDQLPEELEEWAAENVVEAAARPSRPISIVIEGESRTGKTVWARSLGPHNYLCGHLDLSPKVFSNDAWYNVIDDVDPHYLKHFKEFMGAQKDWQSNTKYGKPVQIKGGIPTIFLCNPGPNSSYKEYLDEEKNAHLKSWALKNATFITLSNQLYSGTNQSQASGGQEESNQETQD

SEQ ID NO: 15365 - protein, 352 aa, Indian cassava mosaic virus-[Maharashtra]
MSPPKRFQINAKNYFLTYPRCSLTKEEALSQIRNFQTPTNPKFIKICRELHENGEPHLHVLIQFEGKYKCQNQRFFDLVSPTRSAHFHPNIQGAKSSSDVKSYIDKDGDTLEWGTFQIDGRSARGGQQSANDAYAAALNSGSKSEALKILRELAPRDYLRDFHHISSNLDRIFTKPPPPYENPFPLSSFDRVPEELDEWFHENVMGAAARPLRPKSIVIEGDSRTGKTMWSRALGPHNYLCGHLDLSPKVYNNDAWYNVIDDVDPHYLKHFKEFMGAQRDWQSNTKYGKPVQIKGGIPTIFLCNPGPNSSYKEFLDEEKNSALKAWALKNATFISLEGPLYSGTNQGPTQSC

SEQ ID NO: 15366 - protein, 358 aa, Macroptilium mosaic Puerto Rico virus
MPPPKRFRVSSKNYFLTYPRCSISKEETLSQLLNIQTPTDKKYIKICEELHEDGQPHLHVLIQFEGKFVCTNQRLFDLVSPTRSTHFHPNIQGVKSSSDVKAYIDKDGVTIEWGQFQIDGRSARGGQQSANDSYAKALNADCIEAAMTVLKEEQPKDFVVQYHNIRSNLEKIFTPPTEPWVPPFQLSTFNNVPLIMSDWVNENISDSAARPLRPISIIVEGPSRTGKTIWARSLGPHNYLCGHIDLNPRIYSNHAWYNVIDDVDPHYLKHFKEFMGAQRDWQSNCKYGKPIQIKGGIPTIFLCNPGPHSSYKEYLSEEKNKSLNDWAQKNAIYVSIEEPLYSTFNQTASSSRQETDST

SEQ ID NO: 15367 - protein, 349 aa, Macroptilium yellow mosaic Florida virus
MPSRPKRFKINAKNFFLTYPQCSLSKEETLSQIKALNTPTSKKYIKIARELHENGQPHIHVLIQFEGKYQCTNYRFFDLVSPSQSAYFHPNVQGAKSSSDVKSYIDKDGDTLEWGEFQVDGRSARGGCQTVNDSYAKALNASSAEEALKIIREEQPAHFFLQHHNLVVNASKIFQKPPEPWVPTFQLSSFTNVPAEMQDWADQYFGRSAAARSERYMSIIVEGDSRTGKTMWARALGPHNYLSGHLDFNSQVYSNEVEYNVIDDINPNYLKLKHWKELIGAQKDWQSNCKYGKPVQIKGGIPSIVLCNPGEGSSYKEFLDKEENRALHNWTIKNALFVTLTAPLYQSTP

SEQ ID NO: 15368 - protein, 361 aa, Mungbean yellow mosaic India virus
MPREGRFAINAKNYFLTYPKCPLTKEDALEQLLALSTPVNKKFIRICRELHEDGQPHLHVLLQFEGKQQTKNQRFFDLHSRCRSAYYHPNIQRAKSCSDVKTYMEKDGDILDHGTFQIDGRSARGGKQSANDAYAEALNSGSKLEALLILKEKAPKDFILQFHNLNCNLSRIFTEPTQAYESPFTLESFDKVPSYISSWAERNVRDAARPDRPISIVIEGDSRTGKTMWARAIGPHNYLCGHLDLNDKTYSNEAWYNVIDDVDPHYLKHFKEFMGAQRDWQSNVKYGKPTKIKGGIPTIFLCNPGPKSSYKEYLDEENNAALKQWASKNAEFYTLKEPLFSTVNQGSTQGRQEESNSTISN

SEQ ID NO: 15369 - protein, 362 aa, Mungbean yellow mosaic India virus-[Bangladesh]
MPRDGRFSINAKNYFLTYPKCPLTKEEALEQLLALSTPINKKFIRICRELHEDGQPHLHVLIQFEGRQQTENKRFFDLYSRCRSAHYHPNIQAAKSCSDVKTYMEKDGDVLDHGTFQIDGLSARGGKQSANDAYAEALNCGSKLEALLILKEKAPKDFILQFHNLNCNLSRIFTEPVQAYESPFTLESFNKVPSYISSWAERNVREPAARPERTISIVIEGDSRTGKTMWARAIGPHNYLCGHLDLNNKTYSNEAWYNVIDDVDPHYLKHFKEFMGAQRDWQSNVKYGKPTKIKGGIPTIFLCNPGPKSSYKEYLSEENNAALKQWASKNAEFYTLKEPLFSSVNQGSTQGRQEESNSTISN

SEQ ID NO: 15370 - protein, 362 aa, Mungbean yellow mosaic India virus-[Cowpea]
MPREGRFAINARNYFLTYPRCPLTKEDALEQLLALSTPVNKKFIRICRELHEDGQPHLHVLLQFEGKQQTRNQRFFDLYSRCRSTHYHPNIQAAKSCSDVKTYMEKDGDILDHGTFQIDGRSARGGKQSANDAYAEALNSGSKLEALLILKEKAPKDFILQFHNLNCNLSRIFTEPIQTYKSPFTLESFNKVPSYISSWAERNVRDPAARPDRPISIVIEGDSRTGKTMWARAIGPHNYLCGHLDLNDKTYSNEAWYNVIDDVDPHYLKHFKEFMGAQRDWQSNVKYGKPTKIKGGIPTIFLCNPGPKSSYKEYLDEENNAALKQWASKNAEFYTLKEPLFSTVNQGSTQGRQEESNSTISN

SEQ ID NO: 15371 - protein, 362 aa, Mungbean yellow mosaic India virus-[Mungbean]
MPREGRFAINARNYFLTYPKCPLTKEDALEQLLALSTPVNKKFIRICRELHEDGHPHLHVLLQFEGKHQTRNQRFFDLHSRCRSAYYHPNIQAAKSCSDVKTYMEKDGDVLDHGTFQIDGRSARGGKQSANDAYAEALNSGSKLEALLILKEKAPKDFILQFHNLNCNLSRIFTEPVQAYMSPFTLESFDKVPSYISSWAERNVKDPAARPDRPISIVIEGDSRTGKTMWARAIGPHNYLCGHLDLNDKTYSNEAWYNVIDDVDPHYLKHFKEFMGAQRDWQSNVKYGKPTKIKGGIPTIFLCNPGPKSSYKEYLDEENNAALKQWASKNAEFYTLKEPLFSSVNQGSTQGRQEESNSTISN

SEQ ID NO: 15372 - protein, 362 aa, Mungbean yellow mosaic India virus-[Soybean]
MPRDGRFAINAKNYFLTYPKCPLTKEDALEQLLALSTPVNKKFIRICRELHEDGQPYLHVLLQFEGKHQTRNQRFFDLYSRCRSAHYHPNIQAAKSCSDVKTYMEKDGDILDHGTFQIDGRSARGGKQSANDAYAEALNSGSKLEALLILKEKAPKDFILQFHNLNCNLSRIFTEPTQAYESPFTLESFDKVPSYISSWAERNVRDPAVRPDRPISIVIEGDSRTGKTMWARAIGPHNYLCGHLDLNDKTYSNEAWYNVIDDVDPHYLKHFKEFMGAQRDWQSNVKYGKPTKIKGGIPTIFLCNAGPKSSYKEYLDEENNAALKQWASKNAEFYTLKEPLVSSVNQGSTQGRQEESNSTLSN

SEQ ID NO: 15373 - protein, 362 aa, Mungbean yellow mosaic India virus-[SoybeanTN]
MPRDGRFAINAKNYFLTYPKCPLTKEDALEQLLALSTPVNKKFIRICRELHEDGQPHLHVLLQFEGKQQTKNQRFFDLHSRCRSAYYHPNIQAAKSCSDVKTYMEKDGDILDHGTFQIDGRSARGGKQSANDAYAEALNSGSKLEALLILKEKAPKDFILQFHNLNCNLSRIFTEPVQAYVSPFTLESFDKVPSYISSWAERNVRDPAARPDRPISIVIEGDSRTGKTMWARAIGPHNYLCGHLDLNDKTYSNEAWYNVIDDVDPHYLKHFKEFMGAQRDWQSNVKYGKPTKIKGGIPTIFLCNPGPKSSYKEYLDEENNAALKQWASKNAEFYTLKEPLFSSVNQGSTQGRQEESNSTISN

SEQ ID NO: 15374 - protein, 362 aa, Mungbean yellow mosaic virus-Soybean[Madurai]
MPRLGRFAINAKNYFLTYPRCPLTKEDVLEQLLALSTPVNKKFIRVCRELHEDGEPHLHVLLQFEGKLQTKNERFFDLVSPTRSTHYHPNVQAAKSASDVKSYMDKDGDVLDHGSFQVDGRSARGGKQSANDAYAEALNSGSKLQALNILREKAPKDYILQFHNLNCNLSRIFADDVPPYVSPYSLSAFDKVPSYISSWASENVRDAAARTERPISIVIEGDSRTGKTMWARALGPHNYLCGHLDLNNKIYSNDAWYNVIDDVDPHYLKHFKEFMGAQRDWQSNVKYGKPTHIKGGIPTIFLCNPGPKSSYKEYLDEADNTALKLWASKNAEFYTLKEPLFSSVDQGATQGCQEASNSTLSN

SEQ ID NO: 15375 - protein, 361 aa, Mungbean yellow mosaic virus-Vigna
MPRLGRFAINAKNYFLTYPRCPLTKEDVLEQLLALSTPVNKKFIRVCRELHEDGEPHLHVLLQFEGKLQTKNERFFDLVSPTRSTHYHPNIQAAKSASDVKSYMDKDGDVLDHGSFQVDGRSARGGKQSANDAYAEALNSGSKLQALNILREKAPKDYILQFHNLNCNLSRIFADDVPPYVSPYSLSAFDKVPSYISSWASENVRDSCAPERPISIVIEGDSRTGKTMWARALGPHNYLCGHLDLNSKIYSNDAWYNVIDDVDPHYLKHFKEFMGAQRDWQSNVKYGKPTHIKGGIPTIFLCNPGPKSSYKEYLDEPDNTALKLWASKNAEFYTLKEPLFSSVDQGATQGCQEASNSTLSN

SEQ ID NO: 15376 - protein, 362 aa, Mungbean yellow mosaic virus-Vigna[Maharashtra]
MPRLGRFAINAKNYFLTYPRCPLTKEDVLEQLLALSTPVNKKFIRVCRELHEDGEPHLHVLLQFEGKLQTKNERFFDLVSPTRSTHYHPNVQAAKSASDVKSYMDKDGDVLDHGSFQVDGRSARGGKQSANDAYAEALNSGSKLQALNILREKAPKDYILQFHNLNCNLSRIFADDVPPYVSPYSLSAFDKVPSYISSWASENVRDHAARPERPISIVIEGDSRTGKTMWARALGPHNYLCGHLDLNNKIYSNDAWYNVIDDVDPHYLKHFKEFMGAQRDWQSNVKYGKPTHIKGGIPTIFLCNPGPRSSYKEYLDEADNTALKLWASKNAEFYTLKEPLFSSVDQGATQGCQEASNSTLSN

SEQ ID NO: 15377 - protein, 348 aa, Pepper golden mosaic virus
MPLPPKSFRLQCKNIFLTYPQCDIPKDEALEMLRNLKWAVVKPIYLRVSREEHSDGFPHLHCLIQLTGKCNIKDARFFDITHPRRSAQFHPNVQASKDANAVKNYITKDGDYCESGQYKVSGGSKANKDDVYHNAVNAASAGEALDIIKAGDPKTFIVSYHNIKANIERLFTTPPMPWTPPYPLSSFNNVPEDMQHWVAEYFGRSCARPDRPISIVIEGDSRCGKTMWARALGPHNYLSGHLDFNAKVYSNYVEYNVIDDITPQYLKMKHWKELIGAQKDWQSNCKYGKPVQIKGGIPSIVLCNPGEGSSYIAFLNKEENAELRAWTLKNAQFVILHAPLYKSTAQDS

SEQ ID NO: 15378 - protein, 349 aa, Pepper golden mosaic virus-[CR]
MPLPPKSFHLQCKNIFLTYPQCDIPKDEALEMLQSLKWSVVKPIYIRVSREEHSDGFPHLHCLIQLTGKCNIKDARFFDITHPRRSAQFHPNVQAAKDTNAVKNYITKDGDYCETGQYKVSGGSKANKDDVYHNAVNAASAGEALDIIKAGDPRTFIVSYHNVKSNIERLFKPPPKQWTPPYPLSSFNNVPEDMQRCVAEYFGRSSAARPDRPISIIIEGDSRSGKTMWARALGPHNYLSGHLDFNSKVYSNDVEYNVIDDITPHYLKLKHWKELIGAQRDWQSNCKYGKPVQIKGGIPSIVLCNPGEGSSYIAFLNKEENAPLRAWTQKNAQFVILHAPLYKSTAQDS

SEQ ID NO: 15379 - protein, 349 aa, Pepper huasteco yellow vein virus
MPLPKRFRLNAKNYFLTYPQCSISKEERLAQLQNLSTPVNKKYIKICKESHEDGQPHLHVLIQFEGKYQCTNNRFFDLVSSTRSAHFHPNIQGAKSSSDVKTYIDKDGDTVEWGEFQIDGRSARGGQQSANDTYAKALNSASAEEALQIIKEEQPQHFFLQFHNIVSNANRIFQTPPEPWVPPFQQASFNNVPAIMTQWVSDNVCDAAARPMRPLSLVVEGPSRTGKTLWARSLGPHNYICGHMDLSPKIYSNNAWYNVIDDIPPHYVKHFKEFMGAQRDWQSNCKYGKPIQIKGGIPTIFLCNPGPQSSYKDYLSEEKNRSLNDWVQKNAIYVTIEEAIFTTGSQTSP

SEQ ID NO: 15380 - protein, 349 aa, Pepper huasteco yellow vein virus-[Sinaloa]
MPLPKRFRLNAKNYFLTYPQCSISKEEALAQLQNLSTPVNKKYIKICKESHEDGQPHLHVLIQFEGKYQCTNNRFFDLVSSTRSAHFHPNIQGAKSSSDVKTYIDKDGDTVEWGEFQIDGRSARGGQQSANDTYAKALNSASAEEALQIIKEEQPQHFFLQFHNIVSNANRIFQTPPEPWVPPFQQASFNNVPAIMTQWVSDNVCDAAARPLRPLSLVVEGPSRTGKTLWARSLGPHNYICGHMDLSPKIYSNNAWYNVIDDIPPHYVKHFKEFMGAQRDWQSNCKYGKPIQIKGGIPTIFLCNPGPQSSYKEYLSEEKNRSLNDWVQKNAIYVTIEEAIFTTGSEASP

SEQ ID NO: 15381 - protein, 361 aa, Pepper leaf curl Bangladesh virus
MTRTHQFQVKAKNIFLTYPKCPIPKEQMLEILKSINCPSDKLFIRVSQEKHQDGSLHIHALIQFKGKSQFRNPRHFDVTHPNNATQFHPNFQGAKSSSDVKSYIEKDGDYIDWGRFQIDGRSARGGQQTANDAAAEALNAGSAEAALAIIREKLPKDFIFQYHNLKCNLDRIFTPPLEVYVSPFCSSSFDQVPGELEEWASENVVSAAARPLRPMSIVVEGDSRTGKTMWARSLGPHNYLCGHLDLSPKVYSNDAWYNVIDDVDPHYLKHFKEFMGAQRDWQSNTKYGKPVQIKGGIPAIFLCNPGPHSSYKEFLDEEKNSALKNWALKNATFITLEGPLYSGSNQSAAQASQEGDQASSR

SEQ ID NO: 15382 - protein, 356 aa, Pepper leaf curl virus-[Malaysia]
MAPPKKFRINAKNYFLTYPHCSLTKEEALSQIQAIETPTNKLFIRICRELHEDGTPHLHILIQFEGKFQCKNPRFFDLTSPTRSAHFHPNIQGAKSSTDVREYIAKNGDVLDHGVFQIDGRSARGGCQSANDAYAEALNSGSKASALTILKERAPKDYILQFHNLNSNLDKIFSPRIEMYISPFCSSSFDQVPEELNEWVAANVVSAAARPLRPISIVVEGDSRTGKTMWARSLGPHNYLCGHLDLSPKVYNNEAWYNVIDDVDPHYLKHFKEFMGAQRDWQSNTKYGKPVQIKGGIPTIFLCNPGPHSSYKEFLEEEKNTALKNWAVKNAIFVTLRAPLYSGSYQGSTQNRQEDN

SEQ ID NO: 15383 - protein, 351 aa, Potato yellow mosaic Panama virus
MPRAGRFSINARNYFLTYPQCSLTKEEALSQLQNLETPTSKKFIRVSRELHEDGQPHLHVLIQFEGKYQCTNQRFFDLVSPTRSAHFHPNIQRAKSSSDVKTYVEKDGDFIDFGIFQIDGRSARGGCQTANDSYAKALNSGTVSEALNILREEQPKDFVLQNHNIRSNLERIFANAPEPWAPPFPLSSFTNVPDEMLRWADDYFGRSAAARRERPISIIIEGDSRTGKTMWARVLGPHNYLSGHLDFNSRVYSNEVEYNVIDDVAPQYLKLKHWKELIGAQKDWQSNCKYGKPVQIKGGIPSIVLCNPGEGSSYKAFLEKEDNASLKNWTLKNAVFITLTAPLYQESTQAS

SEQ ID NO: 15384 - protein, 350 aa, Potato yellow mosaic Trinidad virus
MPPKRFRINSKNYFLTYPKCSLSKEEALSQLQNLNTPTNKKFIKICRELHENGEPHLHVLVQFEGKYQCTNNRFFDLVSPTRSTHFHPNIQGAKSSSDVKSYIDKDGDSVEWGEFQIDGRSARGGQQSVNDTYAKALNAASAAEALQIIKEEQPQHFFLQHHNLVANAAKIFTKAPEPWVPPFQLSSFTNVPDEMQEWADNYFGRGAAARPERPISIIIEGDSRTGKTMWARVLGPHNYLSGHLDFNSRVYSNGVEYNVIDDVAPQYLKLKHWKELLGAQKDWQSNCKYGKPVQIKGGIPSIVLCNPGEGSSYKAFLEKIENASLKNWTLKNAVFITLTAPLYQESTQTS

SEQ ID NO: 15385 - protein, 361 aa, Potato yellow mosaic virus-[Guadeloupe]
MPRKGSFSIKAKNYFLTYPHCSLSKEDALSQIQNLNIPVNKKFIKICRELHENGEPHLHVLIQFEGKFNCTNNRLFDLVSPTRSTHFHPNIQGAKSSSDVKSYVEKDGDSIEWGLFQIDGRSARGGQQTSNDAAAEALNSGTKEEAMKIIKEKLPEKFLFQYHNLSSNLDRIFMKAPKPWAPPFPLSSFTNVPDEMQEWADEYFGRGAAARPDRPISIIIEGDSRTGKTMWARVLGPHNYLSGHLDFNSRVYSNEVEYNVIDDVAPQYLKLKHWKERLGAQKDWQSNCKYGKPVQIKGGIPSIVLCNPGEGSSYKAFLEKIENASLKTWTLKNALFITLTAPLYQEGAQASKEEGHQEETH

SEQ ID NO: 15386 - protein, 358 aa, Rhynchosia golden mosaic virus-[Chiapas]
MPQPRRFRLNAKNYFLTYPQCSISKEEALEQIQRLSTPVNKKYIKICRETHEDGQPHLHVLIQFEGKYQCTNQRFFDLVSTTRSAHFHPNIQGAKSSSDVKSYIDKDGDTIEWGEFQIDGRSARGGQQSANDTYAKALNASSAEEALQIIKEEQPQHFFLQFHNLITNATRIFQKPPEPWVPPFQQSSFNNVPAIIREWVHENVCDSAARPLRPISIVIEGPSRTGKTQWARSLGPHNYLCGHLDLNPKIYSNDAWYNVIDDVTPHYLKHFKEFMGAQRDWQSNCKYGKPIQIKGGIPAIFLCNPGPHSSYKEYLSEDKNKGLNDWAQKNAIFVTIEEPFYTTFNQASSQIRQETDEA

SEQ ID NO: 15387 - protein, 312 aa, Sida golden mosaic Costa Rica virus
MHEDGQPHLHVLIQFEGKYQCTNQRFFDLVSPTRSVHFHPNIQGAKSSSDVKSYIDKDGDTVEWWEFQIDGRSARGGQQSANDSYAKALNASSAEEALRIIKEEQPQHFFLQHHNLVANATRIFQKAPSPWAPPFPLSSFTNVPEQMQVWADHYFGRGSAARPDRPVSLIVEGDSRTGKTMWARALGPHNYLSGHLDFNSRVFSNEVEYNVIDDVAPHYLKLKHWKELIGSQRDWQSNCKYGKPVQIKGGIPSIVLCNPGEGASYKDFLDKEENTALKNWTLKNAVFITIDSPLYQEDTQASQEEVGQATPH

SEQ ID NO: 15388 - protein, 360 aa, Sida golden mosaic Florida virus
MPSIKRFKVSAKNYFLTYPKCSLSKEEALSQLKNLNTPVKKKYIRVCREFHENGEPHLHMLVQFEGKYQCTNNRFFDLVSPSMSTPFHPNIQGAKSSSDVKSYIEKDGDILEWGQFQIDGRSARGGCQSANDTYAKALNASSAEEALQIIKEEQPQHFFLQHHNLVANAHRIFSKAPEPWAPPFPLSSFTAVPDEMQAWADEYFGRGRARPERPMSIIVEGDSRTGKTMWARALGPHNYLSGHLDFNSRVFSNEVEYNVIDDVAPQYLKLKHWKELLGAQKDWQSNCKYGKPVQIKGGIPSIVLCNPGEGASYKDFLAKEENIGLRNWTIKNAIFITLTAPLYQEGTQACQEEGNQAAQD

SEQ ID NO: 15389 - protein, 361 aa, Sida golden mosaic Honduras virus
MPPPKRFRVNSKNYFLTYPQCSLTKEEALSQFQTLTTPVNKKFIKISRDKHENGEPHQHVLIQFEGKYQCTNNRFFDLVSPTRSVHFHPNIQGAKSSSDVKSYIDKDGDTIEWGQFQIDGRSARGGQQTANDTYAKALNATCAEEALRIIREEQPQHFFLQHHNLVANATKIFQKAPEPWAPPFPLSSFTNVPDDMQEWADEYFGRGSAARPDRPMSLIVEGDSRTGKTMWARALGPHNYLSGHLDFNPRVYSNEVEYNVIDDVAPHYLKLKHWKELLGAQKDWQSNCKYGKPVQIKGGIPSIVLCNPGEGASYKDFLDKEENASLRNWTIKNAIFITLTSALYQDSTQASQEEVHQEEAD

SEQ ID NO: 15390 - protein, 360 aa, Sida golden yellow vein virus
MPSIKRFKINAKNYFITYPDCSITKEEALSQLLNLSTPVNKKFIKICRELHQNGKPHLHVLMQFEGKYACENNRLFDLVSPTRSAHFHPNIQGAKSSSDVKSYIAKDGDTLEWGEFQIDGRSARGGCQSANDSYAKALNADSVESAMAVLKEEQPKDFVLQNHNIRSNLERIFAKAPEPWSPPFPLSSFNAVPDEMQAWADGYFGTDPARPERPVSIIVEGDSRTGKTMWARSLGPHNYLSGHLDFNARVFSNEVEYNVIDDVAPQYLKPKHWKELLGAQKDWQSNCKYGKPLQIKGGIPSIVLCNPGEGASYKDFLDKEENSALRIWTNKNAKFITLTAPLYQEGTQASQEEGHQEAQD

SEQ ID NO: 15391 - protein, 361 aa, Sida yellow vein virus
MPPPKRFRVQSKNYFLTYPQCSLTKEEALSQLENLQTPVNKKFIKICRELHENGEPHLHVLIQFEGKYQCTNNRLFDLVSPTRSVHFHPNIQGAKSSSDVKSYIDKDGDTIEWGEFQVDGRSARGGQQTANDSYAKALNAGSVLGAMTVLKEEQPKDFVLQNHNIRSNLERIFAKAPSPWVPPFQLSSFTNVPERMQEWADDYFGCDSAARPERPVSIIVEGDSRTGKTMWARALGPHNYLSGHLDFNPRVYSNEVEYNVIDDVAPQYLKLKHWKESFWGQKDWQSNCKYGKPVQIKGGIPSIVLCNPGEGASYKDFLNKEENSSLLNWTIKNAVFITLTSALYQDSAQASQEEVDQETAD

SEQ ID NO: 15392 - protein, 359 aa, South African cassava mosaic virus-[M12]
MPRAGRFSIKAKNYFLTYPKCNLSKEAALDQLRQLQTPTNKLFIKICRELHENGEPHLHALIQFEGKYNCTNPRFFDLISPSRSAHFHPNIQGAKSSSDVKSYLDKDGDTIQWGEFQIDGRSARGGQQSANDAYAKALNAASKTEALNVIRELAPKDFVLQFHNLNSNLDRIFQEPPIPYISPFLSSSFTNVPEELEVWVSENVMGSAARPWRPSSIVIEGDSRTGKTMWARSLGPHNYLCGHLDLSPKVYSNDAWYNVIDDVDPHYLKHFKEFMGAQRDWQSNTKYGKPIQIKGGIPTIFLCNPGPTSSYKEFLDEEKNQSLKAWALKNATFVTLHEPLFSSAYQSPTPHSEDQSPQT

SEQ ID NO: 15393 - protein, 349 aa, Squash mild leaf curl virus
MPRNPNSFRFTARNIFLTYPQCDIPKDEAIQMLEHLQWSVVKPTYIRVAREEHSDGFPHLHCLIQLSGKTNIKNARFFDLTHPRRAACFHPNIQAAKDTNAVKNYITKEGDYCESGKYKVSGGTKSSKDDVYHNAVNAGSAGEALDIIKAGDPKTFLVSYHNLKANIERLFHQPPEPWVPPFPLSSFTLVPEELQEWADDYFNKGSAARPYRNISIIVEGDSRTGKTMWARALGRHNYISGHLDFNSRVFSNDAEYNVIDDVAPQYLKLKHWKELIGAQRDWQSNCKYGKPVQIKGGIPSIVLCNPGEGASYKDFLDKAENTALKAWTLKNAKFIFLESPLYQSTAQDC

SEQ ID NO: 15394 - protein, 359 aa, Squash yellow mild mottle virus
MPRNPKSFRLTTRNIFLTYPKCDVPKDEVLQMLQGLSWSVVRPTYIRVAREEHSDGFPHLHCLVQLSGKSNIKDAGFFDLTHPRRSARFHPNIQAAKDTNAVKNYITKEGDYCESGQYKVSGSSKSNKDDVYHNAVNAASAGEALDIIKGGDPKTFIVSYHNITANVERLFQKPPEPWVPPFELSSFTSVPEELKDWAGHYFNECSAARPDLIGKSNSVCNRPISVIVEGDSRTGKTMWARALGPHNYMSGHLDFNSRVFSNDVKYNVIDDVAPHYLKLTHWKELIGAQRDWQSNCKYGKSVQIKGGIPSIVLCNPGEGASYKDFLDKAENAALREWTLKNAKFIFLNCPLYQSTTQDR

SEQ ID NO: 15395 - protein, 361 aa, Tobacco curly shoot virus-[Y1]
MPQLKKFIINAKNYFLTYPQCSLTKEEALSQISALSTPTNKLFIRICRELHEDGSPHLHVLIQFEGKFKCQNNRFFDLTSPSRSAHFHPNIQGAKSSTDVKAYMEKDGDVLDHGVFQIDGRSARGGCQSANDAYAEAINSGSKAAALNILKEKAPKDFVLQFHNLNSNLDRIFTPPIEKTFLLFYLLLSTKFQKNLKNGLLANVVSAVGGPLRPMSIVIEGDSRTGKTMWARSLGPHNYLCGHLDLSPKVYNNDAWYNVIDDVDPHYLKHFKEFMGAQRDWQSNTKYGKPVQIKGGIPTIFLCNPGPNSSYKEFLDEEKNKALKNWSLKNAIFVTLESPLYTGSNQSEAQASQGGEQASTC

SEQ ID NO: 15396 - protein, 363 aa, Tobacco leaf curl Japan virus
MAPPKRFQINAKNYFLTYPHCSLTKEEALSQIQALDTITNKLFIRICRELHEDGSPHLHVLIQFEGKYKCTNQRFFDLVSPTRSAHFHPNIQGAKSSSDVKAYMEKDGDVVDYGVFQVDGRSARGGCQSANDAYAEAINSGSKSAALSILREKAPKDFVLQFHNLNSNLDRIFSPPLEEFVCPFLSSSFDRVPEELEEWAAENARDSAARPWRPISIVIEGDSRTGKTMWARSLSPHHNYLCGHLDLSPKVYSNSAWYNVIDDVDPHYLKHFKEFMGAQRDWQSNTKYGKPIQIKGGIPTIFLCNPGPTSSYTEYLDEDKNAALKAWAIKNASFVTLYGPLYSTSHQGSAQIREEESTSQTED

SEQ ID NO: 15397 - protein, 363 aa, Tobacco leaf curl Japan virus-[JP2]
MAPPKRFKTNSKNYFLTYPHCTLTKEEALSQIQALETPTNKLFIRICRELHEDGSPHLHVLIQFEGKYQCTNQRFFDLVSPTRSAHFHPNIQGAKSSSDVKTYMEKDGDVIDYGVFQVDGRSARGGCQSANDAYAEAINSGSKSSALSILREKAPKDFVLQFHNLNSNLDRIFSPQLEEFVCPFSPSSFDRVPEELEEWAAETVREFAARPWRPISIVIEGDSRTGKTMWARSLSPHHNYLCGHLDLSPKVYSNSAWYNVIDDVDPHYLKHFKEFMGAQRDWQSNTKYGKPIQIKGGIPTIFLCNPGPTSSYTEYLDEDKNAALKAWAIKNASFVTLYGPLYSTSHQGSAQIREEESTSQTED

SEQ ID NO: 15398 - protein, 362 aa, Tobacco leaf curl Kochi virus
MAPPKRFRINSKNYFVTYPHCSLTKEEALTQIKALETPTNKLFIRICRELHEDGSPHLHILIQFEGKYQCTNQRFFDLVSPTRSAHFHPNIQGAKSSSDVKTYMEKDGDIIDFGVFQIDGRSARGGCQSANDAYAEAINSGSKSSALCILREKAPKDFVLQFHNLNSNLDRIFAPPLEEFISPFLSSSFDQVPEQLEEWAAENVRDSARPWRPMSIVIEGDSRTGKTMWARSLSPRHNYLCGHLDLSPKIYSNEAWYNVIDDVDPHYLKHFKEFMGAQRDWQSNTKYGKPIQIKGGIPTIFLCNPGPTSSYTEYLDEDKNAALKAWAIKNATFVTLYGPLYSGTHQGATQIREEETTTQEED

SEQ ID NO: 15399 - protein, 362 aa, Tobacco leaf curl Yunnan virus-[Y3]
MAPPKRFEIQAKNYFLTYPQCSLTKEEALSQLQALETPTNKKYIKICRELHEDGSPHLHVLIQFEGKYVCTNNRFFDLVSPTRSAHFHPNIQGAKSSSGVKSYIDKDGDTLEWGEFQIDGRSARGGQQTANDAYAQALNSGSKSEALNVIKELAPKDFVLQFHNLNANLDRIFAPPLEVLFLLFYLHHLIKFPKNLKSGLLDNVRHAAARPWRPISIVIEGESRTGKTMWARSLGPHNYLCGHLDLSPKVYSNDAWYNVIDDVDPHYLKHFKEFMGAQRDWQSNTKYGKPIQIKGGIPTIFLCNPGPTSSYKEFLEEEKNSALKEWALKNAEFITLNSPLYSGTNQSATQNSQEEASSQAES

SEQ ID NO: 15400 - protein, 359 aa, Tobacco leaf curl Zimbabwe virus
MAPPKRFQINSKNYFVTYPKCSLTKEETLSQLLNLETPTNKKYIKICRELHENGEPHLHVLIQFEGKFNCKNHRFFDLVSPTRSAHFHPNIQGAKSSSDVKSYIDKDGDTLEWGEFQVDGRSARGGCQNANDACADALNAGSAEAAMAIIREKLPKDFIFQYHNLKTNLDRIFQAPPEPYISPFSSSSFDQVPEELEGWVSENVCGAAARPWRPNSIVIEGDSRTGKTIWARSLGPHNYLCGHLDLSPKVYSNDAWYNVIDDVDPHYLKHWKEFFGAQRDWQSNTKYGKPIQVKGGIPTIFLCNPGPTSSYREFLEEAKNYALKSWTLKNATFITLDRPLYSDTNQSPPPQSQDESHSP

SEQ ID NO: 15401 - protein, 352 aa, Tomato chlorotic mottle virus-Crumple
MPPPKHFRVNSKNYFLTYPHCSLSKEEALSQILALNTPTNKLIIRVSRELHEDGQPHLHVLIQFEGKYNCKNNKFFDLVSPSRSAHFHPNIQGAKSSSDVKSYVEKDGDFVDHGVFQIDGRSARGGQQSANDTYAKVLNAGSVMEALNILREEQPKDFVLQHHNIRSNLERIFAKAPEPWVPPFPLSSFTNVPVEMQDWVDDYFGRDAAARPERPISIIIEGDSRSGKTMWARALGSHNSLSGHLDFNSKVYSNDVHYNVIDDVAPHYLKLKHWKELIGAQKDWQSNCKYGKPVQIKGGIPCIGALQSLGEGASYKCFLDKDENSALSSWTKHNAQFIFLNSPLYQSSTSGC

SEQ ID NO: 15402 - protein, 346 aa, Tomato golden mottle virus
MPLPRRFRLQAKNIFLTYPLCSLTKDEALEQLQSIQLTSNKRYIKICRELHENGEPHLHVLVQLEGKVQITNERQFDLVSPTRSAHFHPNIQGAKSSSDVKSYIDKDGDTLEWGQGQIDGRSARGGQQTANDSYAKALNAVGVQEALQILKEEQPRDFVKDFHNLKGNLEKIFAKAPEPWVPPFPLSSFNNMPEELQTWADDYFGNGAAARTLRPISIIIEGDSRTGKTMWARSLGIHNYLSGHLDFNSRVYSNDVMYNVIDDVPPHYLKMKHWKELIGAQTDWQTNCKYRKPFQIKGGIPSIVLCNPGEGPFYKYYLDKQENTHLKAWTLHNAKFVFLDAPLYQT

SEQ ID NO: 15403 - protein, 361 aa, Tomato leaf curl Bangladesh virus
MPQPKRFQIYAKNYFLTYPQCSLTKEEALSQIKNLATPTNKLFIRVSRELHENGEPHLHVLIQFEGKFKCQNNRFFDLVSTTRSANFHPNIQGAKSASDVKAYVEKDGDFIDFGVFQIDGRSARGGCQSANDAYAEAINSGSKAAALNILREKAPKDFVLQFHNLNANLDRIFTPPVEVYVSPFNSSSFDQVPEELEEWAAENVVSAAARPLRPISIVIEGDSRTGKTMWARSLGPHNYLCGHLDLSPKVYNNEAWFNIIDDVDPHYLKHFKEFMGAQRDWQSNTKYGKPVQIKGGIPTIFLCNPGPNSSYKEFLDEEKNAALKNWALKNAIFVTLEGALYSGSNQSAAQDSQEGDQASSC

SEQ ID NO: 15404 - protein, 360 aa, Tomato leaf curl Laos virus
MPRAGRFSIKAKNYFLTYPQCSLTKEEALSQLQTLQTPTNKKYIKICRELHEDGSPHLHVLIQFEGKYNCTNNRFFDLVSPTRSAHFHPNIQGAKSSSDVKSYLEKDGDTLDWGEFQIDGRSARGGQQTANDAYAKALNSGSKSEALNVIKELAPKDYVLQFHNLNSNLDRIFAPPLEVFVCPFLSSSFDQVPEELEEWVSENVRDAAARPWRPKSIVIEGESRTGKTMWARSLGPHNYLCGHLDLSPKVYSNDAWYNVIDDVDPHYLKHFKEFMGAQRDWQSNTKYGKPMQIKGGIPTIFLCNPGPTSSYKEYLDEEKNSALKDWAVKNAEFITLTEPLYSGTHQSQAQNSQEEANSQT

SEQ ID NO: 15405 - protein, 362 aa, Tomato leaf curl Malaysia virus
MAPPRPFKINAKNYFLTYPQCSLTKEDALSQLQNLNTPTNKKYIKICRELHEDGSPHLHVLIQFEGKYQCKNNRFFDLVSPTRSAHFHPNIQGAKSSSDVKSYIDKDGDTLDWGEFQIDGRSARGGQQTANDAYAQALNSGSKSEALNVIKELAPKDFVLQFHNLNSNLDRIFAPPVEVFVCPFLSSSFDQVPEELEEWVSKNVRDAAARPWRPNSIVIEGESRTGKTMWARSLGPHNYLCGHLDLSPKVYSNDAWYNVIDDVDPHYLKHFKEFMGAQRDWQSNTKYGKPIQIKGGIPTIFLCNPGPTSSYKEYLDEEKNSALKEWALKNAEFITLNSPLYSGTNQSATQNSQEEASSQAES

SEQ ID NO: 15406 - protein, 361 aa, Tomato leaf curl New Delhi virus
MASPRRFRVNAKNYFLTYPKCSLTKEEALSQLQTLETPTKKKFIKICRELHEDGSPHIHVLIQFEGKFQCKNNRFFDLVSPSRSAHFHPNIQGAKSASDVKNYIAKDGDVLEWGVFQIDGRSARGGQQTANDAYAQAINTGNKDDALRVLKELAPKDYVLQFHNLNTNLDRIFQPPSEVYVSPFSISSFDRVPADLVDWVSSNVVCAAARPFRPISIVIEGDSRTGKTMWARCLGPHNYLCGHLDLSPKVYSNDAWYNVIDDVDPHYLKHFKEFMGAQRDCQSNTKYGKPVMIKGGIPTIFLCNKGPNSSYKEYLDEEKNAALKQWAIKNAVFITLEEPLYSGRENIALPEEEEEHSQEAS

SEQ ID NO: 15407 - protein, 361 aa, Tomato leaf curl New Delhi virus-[Lucknow]
MPPPSRFRINAKNYFLTYPKCSLTKEEALSQLLTLETPTSKKFIKICRELHEDGTPHIHVLIQFEGKFQCKNNRFFDLVVPSRSAHFHPNIQGAKSASDCKAYIDKDGDVLEWGVFQIDGRSARGGQQTANDAYAQAINTGNKEDAMKVLKELAPKDYVLQFHNLITNLDRIFQPRSEVYVSPFSISSFDRVPPELVDWVTSNVVCAAARPFRPISVVIEGDSRTGKTMWARCLGPHNYLCGHLDLSPKVYSNDAWYNVIDDVDPLYLKHFKVFMGAQRDCQSNTKYGKPVMIKGGIPTIFLCNKGPNSSYKEYLNEEKNAALKQWVIKNAVFITLEEPLYSGRENIAPPEEEEEHSQEAS

SEQ ID NO: 15408 - protein, 361 aa, Tomato leaf curl New Delhi virus-[Luffa]
MAPPRRFRIDAKNYFLTYPKCPLTKEEALSQLQALETPTAKKFIKICRELHEDGSPHIHVLIQFEGKFQCKNNRFFDLVSPSRSAHFHPNIQGAKSASDVKAYIDKDGDVLEWGVFQIDGRSARGGQQTANDAYAKAINTGNKEDALKVLKELAPKDYVLQFHNLISNLDRIFQPPSEVYASPFSISSFDRVPPQLVDWVSSNVVCAAARLFRPISIVIEGDSRTGKTMWARCLGPHNYLCGHLDLSPKVYSNDAWYNVIDDVDPHYLKHFKEFMGAQRVWQSNTKYGKPVQIKGGIPTIFLCNPGPNSSYKEYLDEEKNAALKQWAIKNAVFITLEEPLYSGRENIAPTEEEEEHSQEAS

SEQ ID NO: 15409 - protein, 361 aa, Tomato leaf curl New Delhi virus-Mild
MAPPRRFRIDAKNYFLTYPKCSLTKEEALSQLQTLETPTAKKFIKICRELHDDGSPHIHVLIQFEGKFQCKNNRFFDLVSPSRSAHFHPNIQGAKSASDVKAYIDKDGDVLEWGVFQIDGRSARGGQQTATDAYAKAINTGNKEDALKVLKELAPKDYVLQFHNLISNLDRIFQPRSEVYVSPFSISSFDRVPPELVDWASVNVVCAAARPFRPISIVIEGDSRTGKTMWARCLGPHNYLCGHLDLSPKVYSNDAWYNVIDDVDPHYLKHFKEFMGAQRDWQSNTKYGKPVMIKGGIPTIFLCNKGPPSSYKEYLDEEKNAALKQWAIKNAVFITLEEPLYSGRENIAPTEEEEEHSQEAS

SEQ ID NO: 15410 - protein, 363 aa, Tomato leaf curl Sri Lanka virus
MSPPKRFQIFAKNYFLTYPQCSLTKEEALSQLQNLNTPTNKLFIRICRELHDNGEPHLHVLIQFEGKFKCQNNRFFDLVSPTRSAHFHPNIQGAKSSSDVKSYMEKDGDVLDFGIFQVDGRSARGGCQSANDAYAEAINSGSKSSALNILREKAPKDYVLQFHNLNANLDRIFTPPVEVYISPFSLSSFDQVPDELEEWAAINVVSAAARPIRPIGIIVEGDSRTGKTMWARSIGPHNYLCGHLDLSPRVYSNDAWYNVIDDVDPHYLKHFKEFMGAQRDWQSNTKYGKPVQIKGGIPTIFLCNPGPNSSYKEFLDEEKNSALRNWALKNAIFVTLAGPLYSGTNQGSPQASQEDNQEEENRP

SEQ ID NO: 15411 - protein, 358 aa, Tomato mosaic Havana virus
PKKFRVNSKNYFLTYPQCSITKEEALSQIKNLNTPVNKKFIKICRELHENGEPHLHVLLQFEAKYQCTNSRFFDLVSPSRSAHFHPNIQGAKSSSDVKAYIDKDGDATEWGEFQIDGRSARGGCQSANDTYAKALNASCAEEALQIIKEQQPQHFFLHHHNLVANAQRIFHKPPEPWVPPFHLSSFTDVPEEMQKWADDYFGRGSAARPDRPISIIVEGDSRTGKTMWARALGPHNYLMGHLDFNSRVYSNAVEYNVIDDVAPHYLKLKHWKELLGAQRDWQSNCKYGKPVQIKGGIPAIVLCNPGEGSSYKDFLNKEENTALRNWTIKNALFITLTSALYQDSSQASKEEDNQEKAD

SEQ ID NO: 15412 - protein, 361 aa, Tomato mottle Taino virus
MPRKGSFSVKAKNYFLTYPQCSLSKEEALSQIQNLNTPVDKKFIKICRELHENGEPHLHVLVQFEGKYNCTNNRFFDVVSPTRSAHFHPNIQGAKSSSDVKTYITKDGDTLEWGEFQIDGRSARGGQQSANDSYAKALNAGNVQSAMAVLKEEQPKDFVLHNHNIRSNLERIFAKAPEPWVPPFPLSSFTNVPDEMQEWADVYFGAGSAARPNRPMSIVIEGDSRTGKTMWARALGPHNYLSGHLDFNTRVYSNDVQYNVIDDIAPHYLKLKHWKELLGAQRDWQSNCKYGKPVQIKGGIPAIVLCNPGEGASYKDFLSKDENTSLRDWTIKNAMFITLTTPLYQDSTQARQEEGNQETAC

SEQ ID NO: 15413 - protein, 361 aa, Watermelon chlorotic stunt virus-[IR]
MRPPRFRIQAKNIFLTYPRCSLSKEELLSFLVGLSLPSNLKYVKVCRELHQNGEPHLHVLLQFAGKITITDNRLFDHVHPSRSACFHPNIQSAKSSTDVKSYLDKDGDTVEWGKFQIDGRSARGGQQTANDAYATALNMSNKGEAMSVIKELAPKDFVLHYHNIKSNLDRIFEEPVAPFVCPFPMSSFTLLPPELVEWASTNVCSSAARPWRPKSIVVEGESRTGKTMWARSLGPHNYLCGHLDLSPKIYSNDAWYNVIDDVDPHYLKHFKEFMGAQRDWQSNTKYGKPIQIKGGIPTIFLCNPGPSSSYKEFLEEEKNYALKEWADKNAEFVFLSEPLFSAEHQDQTQTRQKEDDSATTR

SEQ ID NO: 15414 - protein, 361 aa, Watermelon chlorotic stunt virus-[SD]
MRPPRFRIQAKNIFLTYPRCSLSKEELLSFLVGLSLPSNLKYVKVCRELHQNGEPHLHVLLQFAGKITITDNRLFDHVHPSRSACFHPNIQSAKSSTDVKSYLDKDGDTVEWGKFQIDGRSARGGQQTANDAYATALNMSNKGEAMSVIKELAPKDFVLHYHNIKSNLDRIFEEPVAPFVCPFPMSSFTMLPPELVDWASTNVCSSAARPWRPKSIVVEGESRTGKTMWARSLGPHNYLCGHLDLSPKIYSNDAWYNVIDDVDPHYLKHFKEFMGAQRDWQSNTKYGKPIQIKGGIPTIFLCNPGPSSSYKEFLEEEKNYALKEWADKNAEFVFLTEPLFSTEHQDQTQTRQKEDDSATTR

SEQ ID NO: 15415 - protein, 358 aa, Macroptilium mosaic Puerto Rico virus-[Bean]
MPPPKRFRVSSKNYFLTYPRCSISKEETLSQLLNIETPTNKKYIKICEELHEDGQPHLHVLIQFEGKFVCTNQRLFDLVSPTRSTHFHPNIQGVKSSSDVKAYIDKDGVTIEWGQFQIDGRSARGGQQSANDSYAKALNADCIDAAMTVLKEEQPKDFVVQYHNIRSNLEKIFTPPTEPWVPPFQLSTFNNVPLIMSDWVNENISDSAARPLRPISIIVEGPSRTGKTIWARSLGPHNYLCGHIDLNPRIYSNHSWYNVIDDVDPHYLKHFKEFMGAQRDWQSNCKYGKPIQIKGGIPTIFLCNPGPHSSYKEYLSEEKNKSLNDWAQKNAIYVSITEPLYSTVNQTASSSRQETDST

SEQ ID NO: 15416 - protein, 159 aa, Sida rhombifolia Trinidad geminivirus
  unsure (1)..(159): unsure at all Xaa locations
HENGEPHLHVLIQFEGKHQCTNSRQFDLVSTTRSVHFHPNVQGAKSSSDVKSYIDKDGDTIEWGEFQIDGRSARGGQQSANDTYAKALNARSAEXALQIIKEEQPQHFFLQHHNLVANAAKIFAKVPEQWVPPFPLSSFTNVPEQMQEWADDYFGRVPL

SEQ ID NO: 15417 - protein, 364 aa, Sweet potato leaf curl Georgia virus
MPRQPGFRVSAKNVFLTYPKCSLSKETALELLKAINCPSDKLFIRVSQEEHQDGSLHLHALIQFKGKAQFKNPRHFDLQHPNSSNQFHPNFQGAKSSSDVKSYIEKDGDYIDWGTFQVDGRSARGGQQTANDAAAEALNAGSAEAALQIIREKLPRDFIFQYHNLRSNLDRIFSPPPSVYSSPFLSSSFNNVPDIISDWAAENVMDSAARPDRPISIVIEGPSRIGKTVWARSLGPHNYLCGHLDLSPKVYSNSAWYNVIDDVNPQYLKHFKEFMGAQKDWQSNCKYGKPVQIKGGIPTIFLCNPGEGSSFKFWLDKPEQEALKNWAVKNAIFCDVDSPFWIQEEVSHSGTSAHSGEESQEEGS

SEQ ID NO: 15418 - protein, 362 aa, Tobacco leaf curl Japan virus-[JP3]
MAPPKRFKINSKNYFLTYPHCTLTKGEALSQIQALETPTNKLFIRICRELHEDGSPHLHVLIQFEGKYQCTNQRFFDLVSPTRSAHFHPNIQGAKSSSDVKTYMEKDGDVIDYGVFQVDGRSARGGCQSANDAYAEAINSGSKSSALSILREKAPKDFVLQFHNLNSNLDRIFSPQLEEFVCPFSSSSFDRVPEELEEWAAETVRDSARPWRPMSIVIEGDSRTGKTMWARSLSPHHNYLCGHLDLSPKVYSNSAWYNVIDDVDPHYLKHFKEFMGAQRDWQSNTKYGKPIQIKGGIPTIFLCNPGPTSSYTEYLDEDKNAALKAWAIKNASFVTLYGPLYSTSHQGSAQIREEESTSQTAD

SEQ ID NO: 15419 - protein, 363 aa, HYVMV-tobacco [Yamaguchi]
MPPPNRFKINAKNYFLTYPHCSLTKEEALSQIKALQTPTNKLFIRICRELHEDGSPHLHILIQFEGKYTCRNQRFFDLVSPNRSAHFHPNIQGAKSSSDVKTYMEKDGDILDFGVFQVDGRSARGGCQSANDAYAEAINSGSKSSALCILREKAPKDFVLQFHNLNSNLDRIFLPPLEEFVSPFLSSSFDQVPEQLEEWAAENVRDSAARPWRPMSIVIEGDSRTGKTMWARSLSPRHNYLCGHLDLSPKVYSNEAWYNVIDDVDPHYLKHFKEFMGAQRDWQSNTKYGKPIQIKGGIPTIFLCNPGPTSSYTEYLDEDKNAALKAWAIKNAIFVTLYGPLYSGTHQGATQIREEETTTQEED

SEQ ID NO: 15420 - protein, 363 aa, okra yellow vein mosaic virus
MAPPKQFQIYAKNYFITYPTCSLTKKEALSQLQNLQTPVNKKYIRICREFHENGEPHLHVLIQFEGKYKCKNNRFFDLVSPTRSAHFHPNIQGVKSSSDVKSYIAKDGDILDWGEFQIDGRSARGGQQTANDAYAAALNAGSKSEALRVIKELAPKDFVLQFHNLNANLDRIFQEPPAPYVSPFSSSSFDQVPEELEEWVSENVVDAAARPLRPQSIVIEGDSRTGKTMWARSLGPHNYLCGHLDLSPKVYSNDAWYNVIDGVDPHFLKHFKEFMGAQRDWQSNTKYGKPVQIKGGIPTIFLCNPGPNASYKEYLDEEKNSALKAWALKNAAFVFLTQPLYSGTNQSTAQGSEETQQEEESRS

SEQ ID NO: 15421 - protein, 358 aa, Beet mild curly top virus
MPRSPSFQIKAKNIFLTYPRCSIIKEDALEILKNIPCPSDKLFIRVSQEKHQDGSLHLHALIQFKGKAQFRNPRHFDITHPSSSSTFHPNFQGAKSASDVKQYIEKDGDYVDWGTFQVDGRSDRGGQQTANDAAAEALNAGNAAEALQIIREKLPEKFIFQYHNLKPNLEAIFLPPPDIYQPPFPQSSFTQVPEIVQEWADSYFGVDAAARPFRYNSIIIEGDSRTGKTMWARSLGPHNYISGHLDFSLKTYHDDVLYNVIDDVDPAYLKMKHWKHLIGAQREWQTNLKYGKPRVIKGGIPSIILCNPGDGSSYQDFLDKSENEALKSWTIQNSAFVKLSGPLFDKDTEASSQGQSPL

SEQ ID NO: 15422 - protein, 354 aa, Beet severe curly top virus
MPFYKKAKNFFLTYPQCSVTKEDALEQLLAINTPSNKKYIRICRELHENGEPHLHALIQFEGKVQIRNARYFDLQHRSTSKQFHCNIQGAKSSSDVKSYVSKDGDHIDWGEFQVDGRSARGGQQTANDAAAEALNAGNALEALQIIREKLPEKYIFQYHNLKPNLEAIFLPPPDLYQPPFPLSSFTRVPEIIQEWADSYFGLDPAARPFRYNSLIIEGDSRTGKTMWARCLGPHNYITGHLDFSLKTYNDNVLYNVIDDVDPNYLKMKHWKHLIGAQREWQTNLKYGKPRVIKGGIPSIILCNPGEGSSYQDFLNKSENEALRSWTLQNSVFAKLTSPLFDNNQEASSQDQTSL

SEQ ID NO: 15423 - protein, 272 aa, Luffa begomovirus
MASPRRFRVNAKNYFLTYPKCSLTKEEALSQLQTLETPTRKKFIKICRELHEDGSPHIHVLIQFEGKYQCKNNRFFDLVSPSRSAHFHPNIQGAKSASDVKKYIDKDGDVLEWGVFQIDGRSARGGQQTANDAYAQAINTGNKDDALKVLKELAPKDYVLQFHNLNTNLDRIFQPPSEVYVSPFSISSFDRVPAELVDWVSSNVVCAAARPFRPISIVIEGDSRTGKTMWARCLGPHNYLCGHLDLSPKVYSNEAWYNVIDDVDPHYLKHFK

SEQ ID NO: 15424 - protein, 361 aa, Tomato leaf curl virus
MVPPKRFKIQGKNYFLTYPQCSLTKEEALSQIQALDTPTNKKYIKICRESHEDGSPHLHVLIQFEGKYVCTNNRFFDLVSPTRSAHFHPNIQGAKSSSDVKSYIDKDGDTLEWGEFQIDGRSARGGQQTANDAYAQALNSGSKSEALNVIKELAPKDFVLQFHNLNANLDRIFAPPLEVFVCPFLSSSFDQVPEELEEWVSENVSGRRGPWRPISIVIEGDSRSGKTMWARSLGPHNYLCGHLDLSPKVYSNDAWYNVIDDVDPHYLKHFKEFMGAQRDWQSNTKYGKPIQIKGGIPTIFLCNPGPTSSYKEYLDEEKNSALKEWALKNAEFVTLNRPLYSGTNQSATQNSQEEASSQAES

SEQ ID NO: 15425 - protein, 232 aa, Tomato leaf curl virus
MESNRGTPSNNSLTKRFQINAKNYFLTYPHCSLSKSEALSQIRNLNTPTNKKYIKICSELHEDGEPHLHVLIQFEGKFKTKNKRFFDLVSPTRSTHFHPNIQGAKSSSDVKAYIEKDGDTLEWGTFQIDGRSSRGGKQSANDAYAKAMNAGNKAEALNILKELAPKDYILQFHNLNTNLDKIFMTPQPVFTSPFLSSSFDQVPEELEEWVAENIVDPAARPLRPKSLVLQGD

SEQ ID NO: 15426 - protein, 362 aa, Tomato leaf curl virus
MTRPKSFRINAKNYFLTYPKCSLTKEEALSQLNNLETPTSKKYIKVCRELHENGEPHLHVLIQFEGKFQCKNQRFFDLVSPTRSAHFHPNIQGAKSSSDVKSYLEKDGDTLEWGEFQIDGRSARGGQQSANDAYAQALNTGSKSEALNVLRELAPKDYVLQFHNLNSNLDRIFTPPLEVYVSPFLSSSFDRVPEELEEWVAENVKDAAARPLRPISIVIEGESRTGKTVWARSLGPHNYLCGHLDLSPKVYSNDAWYNVIDDVDPHYLKHFKEFMGAQRDWQSNTKYGKPVQIKGGIPTIFLCNPGPNSSYKEYLDEEKNSALKAWALKNAEFITLNEPLYSGTYQGPTQNSEEEVHPEEEN

SEQ ID NO: 15427 - protein, 360 aa, Tomato leaf curl virus
MAPPKRFLINAKNYFLTYPQCSLTKEEALSQLQNLNTPTNKKFIKICRELHEDGSPHLHVLIQFEGKFKCQNNRFFDLTSPTRSAHFHPNIQGAKSSSDVKSYIDKDGDTLEWGEFQVDGRSARGGQQTANDTAAKALNSGSAEAALAIIREELPKDFIFQYHNIKANLDRIFTPRAEVFVCPFLSSSFDQVPEELECWVSENVRDAAARPWRPVSIVIEGESRTGKTMWARSLGPHNYLCGHLDLSPKVYSNDAWYNVIDDVDPHYLKHFKEFMGAQRDWQSNTKYGKPIQIKGGIPTIFLCNPGPTSSYKEYLDEEKNSALKEWAIKNAEFVTLNSPLYSGTNQSATQNSQEEASSQA

SEQ ID NO: 15428 - protein, 362 aa, Tomato leaf curl virus
MAPPRKFQINAKNYFLTYPKCCLTKEETLAQIKTLDTVTNKKFIKICRELHEDGSPHLHVLIQFEGKYRCTNKRFFDLVSPTRSAHYHPNIQGAKSSSDVKSYIDKDGDTLEWGEFQIDGRSARGGQQSANDAYAKAINTGSKSEALNVIRELAPKDFVLQFHNLNANLDRIFAPPLEVFRCPFLSSSFDQVPKELEDWVSENVRDAAARNGRPMSIVIEGDSRTGKTMWARSMGPHNYLCGHLDLSPKVYSNDAWYNVIDDVDPHYLKHFKEFMGAQRDWQSNTKYGKPIQIKGGIPTIFLCNPGPTSSYKEYLDEDKNSPLKDWALKNAEFITLTRPLYSGTHQSPAQNSQEETNTQAEN

SEQ ID NO: 15429 - protein, 361 aa, Tomato leaf curl virus
MAPPRRFRIDAKNYFLTYPKCSLTKEEALSQLQTLETPTAKKFIKICGELHEDGSPHIHVLIQFEGKFQCKNNRFFDLVSPSRSAHFHPNIQGAKSASHVKAYIDKDGDVLEWGVFLIDGRSARGGQQTANDAYAKAINTGNKEDALKVLKELAPKDYVLQFHNLNTNLDRIFQPPSEVYVSPFSISSFDRVPADLVDWVSSNVVCAAARPFRPISIVIEGDSRTGKTMWARCLGPHNYLCGHLDLSPKVYSNDAWYNVIDDVDPHYLKHFKEFMGAQRDWQSNTKYGKPVMIKGGIPTIFLCNKGPNSSYKEYLDEEKNAALKQWAIKNAVFITLEEPLYSGRENIAPQEEEEEHSQEAS

SEQ ID NO: 15430 - protein, 361 aa, Tomato leaf curl virus
MASPRRFRVNAKNYFLTYPKCSLTKEEALSQLQTLETPTKKKFIKICREFHEDGSPHIHVLIQFEGKFQCKNNRFFDLVSPSRSAHFHPNIQGAKSASDVKKYIDKDGDVLEWGVFQIDGRSARGGQQTANDAYAQAINTGNKDDALKVLKELAPKDYVLQFHNLNTNLDRIFQPPSEVYVSLFSISSFDRVPAELVDWVSSNVVCAAARPIRPISIVIEGDSRTGKTMWARCLGPHNYLCGHLDLSPKVYSNDAWYNVIDDVDPHYLKHFKEFMGAQRDWQSNTKYGKPVMIKGGIPTIFLCNKGPNSSYKEYLDEEKNAALKQWAIKNAVFITLEEPLYSGRENIAPTEEEEEHPQEES

SEQ ID NO: 15431 - protein, 361 aa, Tomato leaf curl virus
MAPPRRFRINAKNYFLTYPKCSLTKEEALSQLQTLETPTAKKFIKISRELHEDGSPHIHVLIQFEGKFQCKNNRFFDLVSPSRSAHFHPNIQGAKSASDVKAYIDKDGDVLEWGVFQIDGRSARGGQQTANDAYAQAINTGNKADALKLLKELAPKDYVLQFHNLNSNLDRIFQPPSEVYVSPFLISSFDRVPPELVDWVSSNVVCAAARPFRPISIVIEGDSRTGKTMWARCLGPHNYLCGHLDLSPKVYSNDAWYNVIDDVDPHYLKHFKEFMGAQRDWQSNTKYGKPVMIKGGIPTIFLCNKGPNSSYKEYLDEEKNAALKQWAIKNAVFITLEEPLYSGRENIAPPEEEEEHSQEAS

SEQ ID NO: 15432 - protein, 214 aa, Tomato leaf curl virus
MAPPRRFRIDAKNYFLTYPKCSLTKEETLSQLQTLETPTAKKFIKICRELHEDGSPHIHVLIQFEGKFQCKNNRFFDLVSPSRSAHFHPNIQGAKSASDVKAYIDKDGDVLEWGVFQIDGRSARGGQQTANDAYAKAINTGNKEDALKVLKELAPKDYVLQFHNLISNLDRIFQPPSEVYASPFLISSFDRVPPELVDWVSSNVVLVLRGLLGP

SEQ ID NO: 15433 - protein, 231 aa, Tomato leaf curl virus
MPRINSFCVNAKNIFLTYPKCPIPKEQMLEILKNISCPSDKLFIRVAQEKHQDGSMHIHALIQFKGKSKFRNPRHFDVTHPNNSTQFHPNFQGAKSSSDVKSYIEKDSDYIDWGEFQIDGRSARGGQQTANDAAAEALNAGSAGAALAIIREKLPKDFIFQYHNLKCNLDRIFTPPMEVYVSPFSSSSFDQVPDELEEWAAENVVSAAARPLRPVSIVIEGDSRTGKTMWA

SEQ ID NO: 15434 - protein, 87 aa, Tomato leaf curl virus
MAPPKRFRIQAKNFFLTYPKCSLSKEEALSQLQSLNTPTNKKYLKICRELHENGEPHLHVLIQFEGKYVCTNQRFFDLVSPTRSAHF

SEQ ID NO: 15435 - protein, 351 aa, Indian cassava mosaic virus
MSPPKRFQINAKNYFLTYPRCSLTKEEALSQIRNFQTPTNPKFIKICRELHENGEPHLHVLIQFEGKYKCQNQRFFDLVSPTRSAHFHPNIQGAKSSSDVKSYIDKDGDTWRWGTFQIDGRSARGGQQSANDAYAAALNSGSKSEALKILRELAPRDYLRDFHHISSNLDRIFTKPPPPYENPFPLSSFDRVPEELDEWFHENVMGRARPLRPKSIVIEGDSRTGKTMWSRALGPHNYLCGHLDLSPKVYNNDAWYNVIDDVDPHYLKHFKRIHGGPEDWQSNTKYGKPVQIKGGIPTIFLCNPGPNSSYKEFLDEEKNSALKAWALKNATFISLEGPLYSGTNQGPTQSC

SEQ ID NO: 15436 - protein, 347 aa, Indian cassava mosaic virus
MSPPKRFQINAKNYFLIYPRCSLTKEEALSQLRALQTPTNTKFIKICRELHENGEPHLHVLIQFEGKYKCQNQRFFDLVSPSRSAHFHPNIQGAKSSSDVKSYIDKDGDTLEWGTFQIDGRSARGGQQSANDAYAAALNSGSKSAALTILKELAPRDYLRDFHHINSNLDRIFTTPPPPYQNPFPLSSFDRVPEELDEWFHENVMDAAARPLRPKSIVIEGDSRTGKTMWARALGPHNYLCGRLDLSPKVYNNNAWYNVIDDVDPHYLKHFKEFMGAQRDWQSNTKYGKPVQIKGGIPTIFLCNPGPNSSYKEFLDEDKNSALKAWAIKNATFISLDEPLYSGPNQG

SEQ ID NO: 15437 - protein, 219 aa, bean calico mosaic virus
MPRNPSSFRITARNIFLTYPQCDINKDEALRLLQELPWSVVKPTYIRVAREEHSDGFPHLHCLIQLSGKSNIKDVRFFDLTHPRRSANFHPNVQAAKDTNAVKNYITKEGDYCESGEYKVSGSTKSNKDDVYHNAVNAGSIKEALDIIRAGDPKTFIVNYHNIKANIERLFKKAPEPWVPPFQLSSFTFVPDEMQEWADDYFGRGGARAERPNSIIVEG

SEQ ID NO: 15438 - protein, 220 aa, bean calico mosaic virus
MPRNPSSFRITARNIFLTYPQCDINKDEALRLLQELPWSVVKPTYIRVAREEHSDGFPHLHCLIQLSGKSNIKDVRFFDLTHPRRSANFHPNVQAAKDTNAVKNYITKEGDYCESGEYKVSGSTKSNKDDVYHNAVNAGSIKEALDIIRAGDPKTFIVNYHNIKANIERLFKKAPEPWVPPFQLSSFTFVPDEMQEWADDYFGRGGARAERPNSIIVEGG

SEQ ID NO: 15439 - protein, 349 aa, bean calico mosaic virus
MPRNPSSFRITARNIFLTYPQCDINKDEALRLLQELPWSVVKPTYIRVAREEHSDGFPHLHCLIQLSGKSNIKDVRFFDLTHPRRSANFHPNVQAAKDTNAVKNYITKEGDYCESGEYKVSGSTKSNKDDVYHNAVNAGSIKEALDIIRAGDPKTFIVNYHNIKANIERLFKKAPEPWVPPFQLSSFTFVPDEMQEWADDYFGRGAAARAERPISIIVEGGSRTGKTMWARALGPHNYLSGHLDFNSSVYSNEVEYNVIDDISPQYLKLKHWKELIGAQRDWQSNCKYGKPVQIKGGIPSIVLCNPGEGASYKDFLDKEENASLKNWTIQNAKFIFLNTPLYQSTAQDR

SEQ ID NO: 15440 - protein, 361 aa, mungbean yellow mosaic virus
MPRLGRFAINAKNYFLTYPRCPLRKEDALEELLALSTPVNKKFIRVCRELHEDGEPHLHVLLQFEGKFQTKNERFFDLVSSTRSAHYHPNVQAAKSASDVKSYMDKDGDVVDHGSFQVDGRSARGGKQSANDAYAEALNSGSKLQALNILREKAPKDYILQFHNLNCNLSRIFSDEVPLYVSPYSLSAFDKVPSYISSWASENVRHPAAPERPISIVIEGDSRTGKTMWARALGPHNYLCGHLDLNSKIYSNDAWYNVIDDVDPHYLKHFKEFMGAQRDWQSNVKYGKPTHIKGGIPTIFLCNPGPKSSYKEYLDEADNTALKLWASKNAEFYTLKEPLFSSVDQSATQGCQEASNSTLSN

SEQ ID NO: 15441 - protein, 361 aa, watermelon chlorotic stunt virus
MRPPRFRIQAKNIFLTYPRCSLSKEELLSFLVGLSLPSNLKYVKVCRELHQNGEPHLHVLLQFAGKITITDNRLFDHVHPSRSACFHPNIQSAKSSTDVKSYLDKDGDIVEWGKFQIDGRSARGGQQTANDAYATALNMSNKGEAMSVIKELAPKDYVLHYHNIRSNLDRIFEEPVAPFVCPFPMSSFTLLPPELVDWASTNVCSSAARPWRPKSIVVEGESRTGKTMWARSLGPHNYLCGHLDLSPKIYSNDAWYNVIDDVDPHYLKHFKEFMGAQRDWQSNTKYGKPIQIKGGIPTIFLCNPGPSSSYKEFLEEEKNYALKEWAEKNAEFVFLTEPLFSAEHQDQTQTRQKEDDSATTR

SEQ ID NO: 15442 - protein, 323 aa, Panicum streak virus (Kenyan isolate)
MSTVGSSSEGRHSVRCFRHRNANTFLTYSKCPLEPEFIGEHLFRLTREYEPAYILVVRETHTDGTWHCHALLQCIKPCTTRDERYFDIDRYHGNIQSAKSTDKVREYILKDPKDKWEKGTYIPRKKSFVPPGKEPAEKKPTKDEVMREIMTHATSREEYLSLVQSSLPYDWATKLNYFEYSASRLFPDIAEPYTNPHPTTEYDLHCNETIEDWLKPNIYQVSPQAYKLLEPSCLSLEQAIADLEWLDDTTRMLQEKEREASTSAAQHGQVKHPGLEASDDTTTGKTISTGLHMMKKLSTMSLTTFPSSSVRAGNDSSAAKKTT

SEQ ID NO: 15443 - protein, 359 aa, Tomato yellow leaf curl virus (strain Murcia)
MAQPKRFQINAKHYFLSFPKCSLSKEEALEQLLQLQTPTNKKYIKICRELHEDGQPHLHMLIQFEGKFNCKNNRFFDLVSPTRSAHFHPNIQGAKSSSDVKSYIDKDGDVLEWGTFQIDGRSARGGQQTANDAYAKAINAGSKSEALDVIKELAPRDYILHFHNINSNLDRVFQVPPAPYVSPFLSSSFDQVPDELEHWVSENVMDAAARPWRPVSIVIEGDSRTGKTMWARSLGPHNYLCGHLDLSQKVYSNNAWYNVIDDVDPHYLKHFKEFMGSQRDWQSNTKYGKPIQIKGGIPTIFLCNPGPQSSFKEYLDEEKNQTLKNWAIKNAIFVTIHQPLFTNTNQDPTPHRQEETSEA

SEQ ID NO: 15444 - protein, 356 aa, Nicotiana tabacum
  unsure (1)..(356): unsure at all Xaa locations
MPPSKKFRIRIQAKNYFLTYRHSSLTKDEALTQLQNISTPVNKLLIRVFRELHEDGEPHLHVLIQFEGKYVCTNNRAFDLSSPTRSAHFHPNIQGAKSSSDVKTYVEKDGDFIDFGVFQIDGRSARGGCQSANDSYAKAINSGSTINXLKILXEXQPIDYIRDLDKLRGNLDRHFAPPRQIFVSKWDPQSFVSQMILSSLGEVFEDPSARPVQNNSSDRPLSLILEGPSRTGKTAWARSLGVHNYISGHLDFNIKSYSNNVSYNVIDDVSPTYLKLKHWKELIGAQHDWQTNCKYGKPVQIKGGVPSILLCNPGEGSSYKDYLEGSENSALKDWTIKNAVFVFITQPMYNPQHQSS

SEQ ID NO: 15445 - protein, 360 aa, Ageratum yellow vein virus
MAPPKRFQINAKNYFLTYPQCSLTKEEALSQLQNLNTPTNKKYIKICRELHEDGSPHLHVLMQFEGKYKCQNNRFFDLVSPSRSAHFHPNIQGAKSSSDVKSYIDKDGDTLEWGEFQIDGRSARGGQQTANDAYAQALNSGSKSEALNVIKELAPKDYVLQFHNLNANLDRIFAPPLEVFVCPFLSSSFDQVPEELEEWVSENVSGAAARPWRPISIVIEGDSRTGKTMWARSLGPHNYLCGHLDLSPKVYSNDAWYNVIDDVDPHYLKHFKEFMGAQRDWQSNTKYGKPIQIKGGIPTIFLCNPGPTSSYKEYLDEEKNSALKEWAIKNAEFVTLERPLYSGTNQSAAQNSEEEASSQA

SEQ ID NO: 15446 - protein, 346 aa, Horseradish curly top virus
MPRQPNSFRIQARNIFLTYPQCTIPKDEMLQLLQNLNWTVVKPTYIRVAAERHADGTPHLHCLIQLSGKSNIKDCRFFDITHPQRSTSFHPNVQSAKDTNAVKNYITKEGDYCESGQYKVSGGTKANKDAVYHNAVNAGGVREALDIIKAGDPKTFVTQHHNVKANLEHIFAKPPEPWNPPYPLSSFTNVPEEMQEWADDYFGRPVADSHKAKSIIIEGNSRTGKTCWARALGTHNYLCGHLDFNMRVYSNEVEYNVIDDVAPTYLKMKHWKELIGAQRDWQSNCKYGKPVQIRGGVPTIILCNPGEGSSFRDFLDKPENDGLRQWTLYNAIFIFLDTPLFDNGIH

SEQ ID NO: 15447 - protein, 361 aa, Chino del tomate virus
MPSVKRFKVSAKNYFLTYPQCSLSKEEALSQLQTLKTPVNKKYIKICRELHENGEPHLHVLIQFEGKYQCTNNRFFDLVSPTRSAHFHPNIQGAKSSSDVKSYIDKDGDTVEWGEFQIDGRSARGGQQSANDSYAKALNAGSVQSAMAVLKEEQPKDFVLHNHNIRSNLERIFAKAPERWVPPFQLSSFTNVPDEMQEWADDYFGRGSAARPERPISIIVEGDSRTGKTMWARALGPHNYLSGHLDFNPKVYSNEVEYNVIDDVAPHYLKLKHWKELLGAQKDWQSNCKYGKPVQIKGGIPAIVLCNPGEGASYKDFLNKEENASLRNWTIKNAIFITLTSALYQDSAQASQEKGHQEEAD

SEQ ID NO: 15448 - protein, 349 aa, Tomato pseudo-curly top virus
MPSNPKRFQIAAKNYFLTYPNCSLSKEEALDQLQRLQTPTNKKYIKVARELHENGEPHLHVLIQFEGKFNCKNQRFFDLVSPTRSTHFHPNIQGAKSSSDVNSYVDKDGDTIEWGEFQIDARSARGGQQTANDECAEALNRSSKEEALQIIKEKLPKDFLFCYHNLVSNLDRIFTPAPTPFVPPFQLSSFTNVPEDMQEWADDYFGVSAAARPMRYKSIIIEGESRTGKTMWARSLGPHNYLSGHLDFNSRVYSNSALYNVIDDVTPHYLKLKHWKELIGAQRDWQSNCKYGKPVQIKGGIPSIVLCNPGGDTSFQDFLDKEENEALKDWTLYNAVFIKLTEPLYDGTV

SEQ ID NO: 15449 - protein, 361 aa, sida golden mosaic virus
MPPPKKFRVQSKNYLVTYPQCSLTKEEALSQLQSLNTTVNKKFIKICRELHENGEPHLHVLLQFEGKYQCTNNRFFDLVSPTRSAHFHPNIQGAKSSSDVKSYIDKDGDTVEWGEFQIDGRSARGGQQTANDSYAKALNADSVQSALAVLREEQPKDFVLQNHNIRSNLERIFAKAPEPWVPPFQLSSFTNVPDEMQEWADEFFGSGSAARPDRPLSLIVEGDSRTGKTMWARALGPHNYLSGHLDFNGRVYSNEVEYNVIDDVAPQYLKLKHWKELLGAQKDWQSNCKYGKPVQIKGGIPAIVLCNPGEGASYKEFLDKEENTGLRNWTIKNAIFITLTAPLYQASTQAGQEEGHTEAEN

SEQ ID NO: 15450 - protein, 185 aa, sida golden mosaic virus
SISKEEALSQLQTLKTPVNKKFIKICRELHDNGEPHLHVLIQFEGKYNCTNNRFFDLVSPTRSVHFHPNIQGAKSSSDVKSYVEKDGDTIEWGVFQIDGRSARGGQQTANDAAAEALNSGTKEDALKIIREKLPERYLFQYHNLSSNIDRIFSKPPEPWSHPFPLPSFTAVPGQMQEWADGYFGR

SEQ ID NO: 15451 - protein, 349 aa, cabbage leaf curl virus
MPRNPKSFRLAARNIFLTYPQCDIPKDEALQMLQTLSWSVVKPTYIRVAREEHSDGFPHLHCLIQLSGKSNIKDARFFDITHPRRSANFHPNIQAAKDTNAVKNYITKDGDYCESGQYKVSGGTKANKDDVYHNAVNAGCVEEALAIIRAGDPKTFIVSYHNVRANIERLFTKAPEPWAPPFQLSSFTNVPDEMSSWADDYFGRSAAARAERPISIIVEGDSRTGKTMWARALGPHNYLSGHLDFNSKVFSNNAEYNVIDDIAPHYLKLKHWKELIGAQRDWQSNCKYGKPVQIKGGIPSIVLCNPGEGSSYISFLNKEENASLRAWTTKNAKFITLEAPLYQSTAQDC

SEQ ID NO: 15452 - protein, 233 aa, Macroptilium golden mosaic virus
MPRKGSFSIKAKNYFLTYPQCSLTKEEALSQLTNLNTPVNKKFIKICREFHEDGQPHLHVLIQFQGKFNCTNNRLFDLVSPSRSAHFHPNIQGAKSSSDVKSYVEKDGDTIEWGVFQIDGRSARGGQQTSNDAAAEALNSGTKEAAMRIVKEKLPEKFLFQYHNLSSNLDRIFMKDPEPWAPPFPLSSFTNVPDEMQEWADDYFGRGSAARPERPMSIIVEGDSRTGKTMWAC

SEQ ID NO: 15453 - protein, 148 aa, Macroptilium golden mosaic virus
MPSVKRLKINAKNHFLTYPDCSLTKEEALSQLQNLSTPVSKKYIKICREFHQNGKPHLHVLMQFEGKYACTNNRFFDLVPSTRSTHFHPNIQGAKSSSDVKSYINKDGDTLEWGEFQIDGRSARGGCQSANDTYAKAFNASSAARGIH

SEQ ID NO: 15454 - protein, 362 aa, cotton leaf curl virus
MAPPHRFQIYAKNYFLTFPKCSLTKEEALEQLQQISTASNKKYIKICRELHEDGQPHLHVLLQFEGKFKCQNQRLFDLVSPNRSTHFHPNIQGAKSSSDVKSYIDKDGDTLEWGEFQIDGRSARGGQQTANDAYAAALNAGSKAEALRVIRELAPKDFVLQFHNLNSNLERIFQEPPAPYVSPFLSSSFDQVPEELEEWAVENVVEAAARPSRPISIVIEGESRTGKTVWARSLGPHNYLCGHLDLSPKVFSNDAWYNVIDDVDPHYLKHFKEFMGAQKDWQSNTKYGKPVQIKGGIPTIFLCNPGPNSSYKEYLDEEKNAHLKSWALKNATFITLSNPLYSGTNQSSASGGEEESNQETED

SEQ ID NO: 15455 - protein, 306 aa, cotton leaf curl virus
KCSLTKEEALSQIKNFQTPTSKKYIKICRELHENGEPHLHVLIQFEGKYKCQNQRFFDLVSPSRSAHFHPNIQGAKSSSDVKSYIDKDGDTLEWGEFQIDGRSARGGQQTANDAYAAALNAGSKSEALRVIKELAPKDYVLQFHNLNANLDRIFTPPVEVYVSPFSSSSFDQVPEELEEWAAENVVDAAARPHRPQSIVIEGDSRTGKTMWARSLGPHNYLCGHLDLSPKVYSNEAWYNVIDDVDPHFLKHFKEFMGAQRDWQSNTKYGKPVQIKGGIPTIFLCNPGPNSSYKEFLDEDKNSALKN

SEQ ID NO: 15456 - protein, 307 aa, cotton leaf curl virus
PKCSLTKEETLSQLQNLHTPVNKKYIKICRELHQNGEPHLHVLIQFEGKYQCTNNRFFDLVSPTRSAHFHPNIQGAKSSSDVKAYIDKDGDTLEWGEFQIDGRSARGGQQTANDAYAAALNAGSKSEALRVIKELAPKDFVLQFHNLNANLDRIFQEPPAPYISPFSRSSFDQVPEELEVWAIDNVVDPAARPLRPRSIVIEGDSRTGKTMWARSLGPHNYLCGHLDLSPKVYSNDAWYNVIDDVDPHFLKHFKEFMGAQRDWQSNTKYGKPVQIKGGIPTIFLCNPGPNSSYKEFLDEEKNTALKN

SEQ ID NO: 15457 - protein, 109 aa, cotton leaf curl virus
MPPKRNGIYSKNYFITYPKCSLTKEEALSQLLNIQTPTSKKYIRICRELHEDGTPHLHVLIQFEGKFKCQNMRFFDLVSPSRSAHFHPNIQGAKSSSDVKSYIEKDGDI

SEQ ID NO: 15458 - protein, 116 aa, cotton leaf curl virus
MPRDLKTNAKNYFLTYPKCSLTKEETLSQLLNLHTPVNKKYIKICRELHQNGEPHLHVLIQFEGKYQCTNKRFFDLVSPTRSAHFHPNIQGAKSSSDVKAYIDKDGDTLEWGEFQI

SEQ ID NO: 15459 - protein, 129 aa, cotton leaf curl virus
MPRDLKTNAKNYFLTYPKCSLTKEETLSQLLNLHTPVNKKYIKICRELHQNGEPHLHVLIQFEGKYQCTNKRFFDLVSPTRSAHFHPNIQGAKSSSDVKAYIDKDGDTLEWGQFQIDGRSARGGQQTAN

SEQ ID NO: 15460 - protein, 306 aa, cotton leaf curl virus
KCSLTKEEALSQLQTLETPTAKKFIKICRELHEDGSPHIHVLIQFEGKFQCKNNRFFDLVSPSRSAHFHPNIQGAKSASDVKKYIDKDGDVLEWGVFQIDGRSARGGQQTANDAYAQAINTGSKEDALKVLKELAPKDYVLQFHNLNTNLDRIFQPPSEVYVSPFSISSFDKVPPELVDWVQSNVVCAAARPFRPISIVIEGDSRTGKTMWTRCLGPHNYLCGHLDLSPKVYSNDAWYNVIDDVDPHYLKHFKEFMGAQRDWQSNTKYGKPVMIKGGIPTIFLCNKGPNSSYKEYLDEEKNAALKQ

SEQ ID NO: 15461 - protein, 306 aa, cotton leaf curl virus
KCSLTKEEALSQFQNLQTPVNKRYIKICREFHENGEPHLHVLIQFEGKYKCQNNRFFDLVSPTRSAHFHPNIQGAKSSSDVKSYLEKDGDTLDWGEFQIDGRSARGGQQSANDAYAAALNAGSKSEALRVIKELAPKDYVLQFHNLNANLGRIFTPPVEVYVSPFSSSSFDQVPEELEVWAAENVVDAAARPLRPKSIVIEGDSRTGKTMWARSLGPHNYLCGHLDLSPKVYCNEAWYNVIDDVDPHYLKHFKEFMGAQRDWQSNTKYGKPVQIKGGIPTIFLCNPGPNSSYKEFLDEEKNSALKN

SEQ ID NO: 15462 - protein, 132 aa, cotton leaf curl virus
MPRDLKTNAKNYFLTYPKCSLTKEETLSQLLNLHTPVNKKYIKICRELHQNGEPHLHVLIQFEGKYQCTNKRFFDLVSPTRTAHFHPNIQGAKSSSDVKAYIDKDGDTLGWGEFQIDGRSARGGRQTANDAY

SEQ ID NO: 15463 - protein, 306 aa, cotton leaf curl virus
KCSLTKEEALSQLQTLETPTAKKFIKICRELHEDGSPHIHVLIQFEGKFQCKNNRFFDLVSPSRSAHFHPNIQGAKSASDVKAYIDKDGDVLEWGVFQIDGRSARGGQQTANDAYAKAINTGNKEDALKVLKELAPKDYVLQFHNLISNLDRIFQPRSEVYVSPFSISSFDRVPPELVDWASVNVVCAAARPFRPISIVIEGDSRTGKTMWARCLGPHNYLCGHLDLSPKVYSNDAWYNVIDDVDPHYLKHFKEFMGAQRDWQSNTKYGKPVMIRGGIPTIFLCNKGPNSSYKEYLDEEKNAALKQ

SEQ ID NO: 15464 - protein, 306 aa, cotton leaf curl virus
TLLPNERGSTFPIKKPRNPNNKLFIRICRELHEDGSPHLHVLIQFEGKFQCKNQRFFDLTSPTRSAHFHPNIQGAKSSTDVKTYMEKDGDVLDHGVFQIDGRSARGGCQSANDAYAEAINSGSKHEALNILKEKAPKDYVLQFHNLNSNLDRIFTPPMEVYVSPFLSSSFDQVPEELEEWAAENVMDAAARPLRPMSIVIEGDSRTGKTMWARSLGPHNYLCGHLDLSPKVYNNDAWYNVIDDVDPHYLKHFKEFMGAQKDWQSNTKYGKPVQIKGGIPTIFLCNPGPNSSYKEFLDEEKNAALKS

SEQ ID NO: 15465 - protein, 306 aa, cotton leaf curl virus
KCSLSKEEALSQLQNLSTPTNKKFIRVSRELHENGEPHLHVLIQFEGKFKCQNNRFFDLVSPTRSAHFHPNIQGAKSSSDVKAYVEKDGDFIDFGVFQIDGRSARGGQQSANDAYAEAINSGSKAAALNILREKAPKDFVLQFHNLNSNLDRIFEPPREFYVSPFSSSSFDRVTEELEVWAAENVVGAAARPLRPVSIVIEGDSRTGKTMWARSLGPHNYLCGHLDLSPKIYSNDAWYNIIDDVDPHYLKHFKEFMGAQRDWQSNTKYGKPVQIKGGIPTIFLCNPGPNSSYKEFLDEEKNFALKN

SEQ ID NO: 15466 - protein, 85 aa, cotton leaf curl virus
MAPPRRFRIDAKNYFLTYPKCSLTKEEALSQLQTLETPTAKKFIKICRELHEDGSPHIHVLIQFEGKFQCKNNSSSTCFPKSVST

SEQ ID NO: 15467 - protein, 86 aa, cotton leaf curl virus
MAPPRRFRIDAKNYFLTYPKCSLTKEEALSQLQTLETPTAKKFIKICRELHEDGSPHIHVLIQFEGKFQCKNNRFFDLVSPSRSAH

SEQ ID NO: 15468 - protein, 86 aa, cotton leaf curl virus
MAPPRRFRIDAKNYFLTYPKCSLTKEEALSQLQTLETPTAKKFIKICRELHEDGSPHIHVLIQFEGKFQCKNNRFFDLVSPSRSVH

SEQ ID NO: 15469 - protein, 86 aa, cotton leaf curl virus
MAPPTRFRINAKNYFLTYPKCSLTKEEALSQLQNLETPTSKKFIKICRELHEDGSPHIHVLIQFEGKFQCKNNRFFDLVAPSRAAH

SEQ ID NO: 15470 - protein, 86 aa, cotton leaf curl virus
MAPPKQFQIYAKNYFLTYPKCSLTKEEALSQLQNLQTPVNKKYIKICRELHENGEPHLHVLIQFEGKYKCKNNRFFDLVSPTRSAH

SEQ ID NO: 15471 - protein, 85 aa, cotton leaf curl virus
MAPPKRFKVQAKNYFITYPQCSLTKEEALSQIQAINTPSNKKYIKICRELHEDGSPHLHVFIQFEGKFVCTNNSSSTWYPQPDQH

SEQ ID NO: 15472 - protein, 86 aa, cotton leaf curl virus
MAAPNRFKINAKNYFLTYPKCPLTKEEALSQILNLQTPTSKKFIRICRELHEDGTPHLHVLIQFEGKFQCRNNRFFDLSSPTRSAH

SEQ ID NO: 15473 - protein, 361 aa, papaya leaf curl virus
MPRLNSFCVNAKNIFLTYPKCPIPKEQMLEILQSINCPSDKLFIRVAQEKHQDGSLHIHALIQFKGKSKFRNTRHFDVTHPNNSTQFNPNFQGAKSSSDVKSYIEEDSDYIDWGQFQIDGRYGRGGQQTANDAAAEALNAGSADAALAINREKLPKDFIFQYHNLKCNLDRIFTPPVEVYVSPFLSSSFNQVPEELEEWAVENVMGAAARTLRPMSIVIEGDSRTGKTMWARSLGPHNYLCGHLDLSPKVYNNDAWYNVIDDVDPHYLKHFKEFMGAQRDWQSNTKYGKPVQIKGGIPTIFLCNPGPNSSYKEFLDEEKNNALKNWALKNAIFVTLEGPLYSGSNQSAAQASQEEEQTSSC

SEQ ID NO: 15474 - protein, 231 aa, African tomato leaf curl geminivirus
MPPPKRFQINSKNYFLTYPKCSLNKEEALSQLINTDTPTNKKYIKICRELHEDGEPHLHVLIQFEGKFNCKNNRFFDLVSPTRSTHFHPNIQGAKSSSDVKSYIDKDGDTLEWGEFQIDGRSARGGCHNANDACAEALNAGSAEAALAIIREKLPKDFIFQYHNLKCNLDRIFTPPLEDYVSPFLCSSFDQVPEELEEWAAQNVLTTAARPLRPMSIVIEGDSRTGKTMWA

SEQ ID NO: 15475 - protein, 149 aa, tomato yellow vein streak geminivirus
MPPPKRFSVNAKNFFLTYPHCSLTKDEALSQLQALQTPTNKKFIRVTRELHEDGEPHLHVLIQFEGKFICHNQRFFDLVSPTRSAHFHPNIQGAKSSSDSRPTWRKTETSLILELSKSMEDQLEEVANLQTTLMPRFSTQIIHPRHSIY

SEQ ID NO: 15476 - protein, 292 aa, bean yellow dwarf virus
MPSASKNFRLQSKYVFLTYPKCSSQRDDLFQFLWEKLTPFLIFFLGVASELHQDGTTHYHALIQLDKKPCIRDPSFFDFEGNHPNIQPARNSKQVLDYISKDGDIKTRGDFRDHKVSPRKSDARWRTIIQTATSKEEYLDMIKEEFPHEWATKLQWLEYSANKLFPPQPEQYVSPFTESDLRCHEDLHNWRETHLYHVSIDAYTFIHPVSYDQAQSDLEWMADLTRMREGLGSDTPASTSADQLVPERPPGLEVSGDTTTGTGPSTSPTTMNTPPIISSTTSPSSSSHCGSN

SEQ ID NO: 15477 - protein, 334 aa, bean yellow dwarf virus
MPSASKNFRLQSKYVFLTYPKCSSQRDDLFQFLWEKLTPFLIFFLGVASELHQDGTTHYHALIQLDKKPCIRDPSFFDFEGNHPNIQPARNSKQVLDYISKDGDIKTRGDFRDHKVSPRKSDARWRTIIQTATSKEEYLDMIKEEFPHEWATKLQWLEYSANKLFPPQPEQYVSPFTESDLRCHEDLHNWRETHLYHDEGRTGVRHPSLYICGPTRTGKTTWARSLGRHNYWNGTIDFTNYDEHATYNIIDDIPFKFVPLWKQLIGCQSDFTVNPKYGKKKKIKGGIPSIILWNPDEDWMLSMTSQQKDYFEDNCVTHYMCDGETFFARESSSH

SEQ ID NO: 15478 - protein, 226 aa, Leonurus mosaic virus
MPSKPRRFRVQAKNIFLTYPQCTLTKEEALSQLQAIQLPSNKKFIKICRELHDDGQPHLHVLLQLEGKVQITNNRLFDLVSTTRSAHFHPNIQGAKSSSDVKSYIDKDGDTVEWGEFQVDGRSSRGGQQTVNDAAAEALNAPDKRTALQIIKEKLPEKYLFQFHNLNSNLDRIFAKAPEPWVPPFPLSSFTNVPDEMQEWADEYFGRSSAARPLRPMSLIVEGGSR

SEQ ID NO: 15479 - protein, 359 aa, East African cassava mosaic virus
MTPPKRFKIQAKNYFLTYPKCSLSKHDALSQILNIPTPTNKKYIKVCRELHDDGQPHLHMLIQFEGKFSCTNKRFFDLVSPTRSTHFHPNIQGAKSSSDVKSYIDKDGDTTEWGEFQIDARSARGGCHNANDACAEALNSGSKAAALLIIKEKLPKEFIFQYHNLSSNLDKIFQEPPAPYVSPFLSYSFTNVPEELEVWVSENVMGSAARPWRPNSIVIEGDSRTGKTMWARSLGPHNYLCGHLDLSPKVYSNDAWYNVIDDVDPHYLKHFKEFMGAQRDWQSNTKYGKPIQIKGGIPTIFLCNPGPTSSYKEFLDEEKNQSLKAWALKNATFVTINEPLFSSAHQSPTPHSEDQGHQT

SEQ ID NO: 15480 - protein, 359 aa, East African cassava mosaic virus
MPRAGRFQINAKNYFITYPRCSLTKEEALSQLQALSYPTIIKFIRVCRELHQDGVPHLHVLIQFEGKFQCTNPRFFDLISPSRSTHFHPNIQGAKSSSDVKAYIEKGGEFLDAGLFQVDARSARGEGQHLAQVYADALNASSKSEALQIIKEKDPKSFFLQFHNISANADRIFQAPPQTYVSPFLSSSFTQVPEDIEVWVSENICSPAARPWRPISIVLEGDSRTGKTMWARSLGPHNYLCGHLDLSPKVYSNDAWYNVIDDVDPHYLKHFKEFMGAQRDWQSNTKYGKPIQIKGGIPTIFLCNPGPTSSYKEFLDEEKNQSLKAWALKNATFIALHEPLFSSAHQSPTPHSEDQGRQT

SEQ ID NO: 15481 - protein, 354 aa, South African cassava mosaic virus
MPRAGRFSIKAKNYFLTYPKCTLSKEAALDQLRQLQTPTNKLFIKICRELHENGEPHLHALIQFEGKYNCTNQRFFDLISPSRSTHFHPNIQGAKSSSDVKSYLDKDGDTIQWGEFQIDGRSARGGQQSANDAYAKALNAASKTEALNVIRELAPKDFVLQFHNLNSNLDRIFQEPPIPYISPFLSSSFTHVPEELEDWVSENVMGFAARPWRPSSIVIEGDSRTGKTMWARSLGPHNYLCGHLDLSPKVYSNDAWYNVIDDVDPHYLKHFKEFMGAQRDWQSNTKYGKPIQIKGGIPTIFLCNPGPTSSYKEFLDEEKNQSLKAWALKNATFITLHEPLFSSAHQSPTPHRED

SEQ ID NO: 15482 - protein, 203 aa, tobacco leaf curl virus
YFLTYPHCSLTKEEALSQLQNINTPTNKLYIKICRELHEDGSPHLHVLLQFEGKYKCQNNRFFDLVSPTRSAHFHPNIQGAKSSSDVKSYIDKDGDTLEWGTFQIDGRSARGACQNSNDACAESLNASSKAEALAIIREKLPKDFIFQYHNLNSNLDRIFAPPVEVFVCPFTASSFDQVPEELEEWASENVMSSAARPWRPMS

SEQ ID NO: 15483 - protein, 208 aa, tobacco leaf curl virus
INAKNYFLTYPHCSLTKEEALSQLQNINTPTNKLYIKICRELHDDGSPHLHVLLQFEGKYKCQNNRFFDLVSPTRSTHFHPNIQGAKSSSDVKSYIDKDGDTLEWGTFQVDGRSARGGCQNANDACAEALNAASKAEALSIIREKLPKDFIFQYHNLNSNLDRIFAPPLEVFVCPFSNSSFDQVPEEIEEWAAENVKSSAARPWRPMS

SEQ ID NO: 15484 - protein, 208 aa, tobacco leaf curl virus
INAKNYFLTYPHCSLTKEEALSQLQNLNTPTNKLYIKICRELHDDGSPHLHVLLQFEGKYKCQNKRFFDLVSPTRSAHFHPNIQGAKSSSDVKSYIDKDGDTLEWGTFQIDGRSARGGCQNANDACAEALNASSKADALAIIREKLPKDFIFQYHNLNSNLDRIFAPPLEVFVCPFSSSSFDQVPEELEEWAAENVMSSAARPWRPMS

SEQ ID NO: 15485 - protein, 208 aa, tobacco leaf curl virus
INAKNYFLTYPHCSLTKEEALSQLQNINTPSNKLYIKICRELHDDGSPHLHVLLQFQGKYKCQNNRFFDLVSPTRSAHFHPNIQGAKSSSDVKSYIDKDGDTLEWGTFQIDGRSARGGCQNANDACAEALNAATKAEALSIIREKLPKDFIFQYHNLNSNLDRIFSPPLEVFVCPFSSSSFDQVPEELEEWAQENVMSSVARPWRPMS

SEQ ID NO: 15486 - protein, 208 aa, tobacco leaf curl virus
INAKNYFLTYPHCSLTKEEALSQLQNINTPTNKLYIKICRELHDDGSPHLHVLLQFEGKYKCQNNRFFDLVSPTRSAHFHPNIQGAKSSSDVKSYIDKDGDTLEWGTFQIDGRSARGGCQNANDACAEALNASSKADALAIIREKLPKDFIFQYHNLNSNLDRIFAPPLEVFVCPFSSSSFDQVPEELEEWAAENVMSSAARPWRPMS

SEQ ID NO: 15487 - protein, 208 aa, tobacco leaf curl virus
INAKNYFLTYPHCSITKEEALSQLQNLNTPTNKLYIKICRELHDDGSPHLHVLLQFEGKYKCQNNRFFDLVSPTRSTHFHPNIQGAKSSSDVKSYIDKDGDTLEWGTFQIDGRSARGGCQNANDACAEALNAGSKAAALSIIREKLPKDFIFNYHNLNSNLDRIFAPPLEVFVCPFSSSSFDQVPEELEEWAAENVRSSAARPWRPMS

SEQ ID NO: 15488 - protein, 208 aa, tobacco leaf curl virus
  unsure (1)..(208): unsure at all Xaa locations
INSKNYFLTYPHCSLTKEEALSQIQSLQTPTNKLFIRICRELHEDGSPHLHVLIQFEGKYQCTNQRFFDLVSPTRSAHFHPNIQAAKSSSDVKTYMEKDGDVADFGVFQIDGRSARGGCQSANDAYAEAINSGSKSSALNILREKAPKDFVLQFHNLNSNLDRIFSPPLEVFVSPFLSSSFDXVPEELEEWAAENVRDSAARPWRPMS

SEQ ID NO: 15489 - protein, 208 aa, tobacco leaf curl virus
INAKNYFLTYPHCSLTKEEALSQLKNLNTPTNKLYIKICRELHDDGSPHLHVLLQFEGKYKCQNNRFFDLVSPTRSTHFHPNIQGAKSSSDVKSYIDKDGDTLEWGSFQIDGRSARGGCQNANDACAEALNAGSKAAALSIIREKLPKDFIFNYHNLNSNLDRIFAPPLEVFVCPFSSSSFDQVPEELEEWAAENVKPSAARPWRPMS

SEQ ID NO: 15490 - protein, 208 aa, tobacco leaf curl virus
INSKNYFLTYPHCSLTKEEALSQIQSLQTPTNKLFIRICRELHEDGSPHLHVLIQFEGKYQCTNQRFFDLVSPTRSAHFHPNIQAAKSSSDVKTYMEKDGDVADFGVFQIDGRSARGGCQSANDAYAEAINSGSKSSALNILREKAPKDFVLQFHNLNSNLDRIFTPPLEDFVSPFLSSSFDRVPEELEEWAAENVRDSAARPWRPMS

SEQ ID NO: 15491 - protein, 208 aa, tobacco leaf curl virus
INSKNYFLTYPHCSLTKEEALSQIQSLHTPTNKLFIRVCRELHEDGSPHLHVLIQFEGKYQCTNQRFFDLVSPTRSAHFHPNIQAAKSSSDVKTYMEKDGDVIDTGVFQIDGRSARGGCQSANDAYAEAINSGSKSSALNILREKAPKDFVLQFHNLNSNLDRIFTPPLEVFVSPFLSSSFDRVPEELEEWAAENVRDSAARPWRPMS

SEQ ID NO: 15492 - protein, 208 aa, tobacco leaf curl virus
INSKNYFLTYPQCSLTKEEALSQIKNLQTPTNKLFIRICRELHEDGNPHLHILIQFEGKYRCTNQRFFDLVSPTRSAHFHPNIQGAKSSSDVKAYMEKDGDILDFGIFQVDGRSARGGCQSANDAYAEAINSGSKSSALNILREKAPKDYVLQFHNLNSNLDRIFAPPLEVFVCPFTASSFDQVPEELEEWAQENVMSSAARPWRPMS

SEQ ID NO: 15493 - protein, 202 aa, tobacco leaf curl virus
YFLTYPHCSLTKEEALAQIQALETPTNKLFIRICRELHEDGSPHLHVLVQFEGKYQCTNQRFFDLVSPSRSAHFHPNIQGAKSSSDVKTYMEKDGDVVDYGVFQVDGRSARGGCQSANDAYAEAINSGSKSSALSILREKAPKDFVLQFHNLNSNLDRIFAPPLEEFVSPFLSSSFDQVPEQLEEWAAENIRDSAARPWRPM

SEQ ID NO: 15494 - protein, 208 aa, tobacco leaf curl virus
INAKNYFLTYPHCSLTKEEALSQIKQLQTPTNKLFIRICRELHEDGSPHLHVLIQFEGKYTCRNQRFFDLVSPNRSAHFHPNIQAAKSSSDVKTYMEKDGDILDSGVFQVDGRSARGGCQNANDAYAEAINSGSKSSALNILREKAPKDYVLQFHNLNTNLDRIFAPPLEVFVCPFSNSSFDQVPEEIEEWAAENVKSSAARPWRPMS

SEQ ID NO: 15495 - protein, 208 aa, tobacco leaf curl virus
INSKNYFLTYPHRSLTKEEAFSQLQSLQTPTNKLFIRICRELHEDGSPHLHVLIQFEGKYQCTNQRFFDLVSPTRSAHFHPNIQAAKSSSDVKTYMEKDGDVVDFGVFQIDGRSARGGCQSANDAYAEAINSGSKSSALNILREKAPKDFVLQFHNLNSNLDRIFTPPLEAFVSPFLSSSFDRVPEELEEWAAENVRDSAARPWRPMS

SEQ ID NO: 15496 - protein, 208 aa, tobacco leaf curl virus
INSKNYFLTYPRCSLTIEEALSQLRNIQTPVNKKFIRVCQEQHEDGSPHLHSLLQFEGKFQCTNPRFFDLVSPNRSTHFHCNIQGAKSSSDVKSYIEKDGQFSDWGEFQIDGRSARGGQQSANDAYAQAINTGSKSEALRVIKELAPKDYVLQFHNLNSNLDRIFAPPLEVFVCPFSSSSFDQVPEELEEWAAENVKSSAARPWRPMS

SEQ ID NO: 15497 - protein, 207 aa, tobacco leaf curl virus
NAKNYFLTYPHCSLTKEEALSQIKQLQTPTNKLFIRICRELHEDGSPHLHVLIQFEGKYTCRNQRFFDLVSPNRSAHFHPNIQAAKSSSDVKTYMEKDGDILDSGVFQVDGRSARGGCQNANDAYAEAINSGSKSSALNILREKAPKDYVLQFHNLNTNLDRIFAPPLEVFVCPFTASSFDQVPEELEEWAAENVKPSAARPWRPMS

SEQ ID NO: 15498 - protein, 207 aa, tobacco leaf curl virus
NARNYFLTYPQCSLTKEEALSQIKNLETPTNKLFIRICRELHEDGNPHLHILIQFEGKYKCTNQRFFDLVSPTRSAHFHPNIQGAKSSTDVKAYMEKDGDILDFGVFQVDGRSARGGCQSANDAYAEAINSGSKSSALNILREKAPKDFVLQFHNLNSNLDRIFAPPLEAFVCPFTASSFDQVPEELEEWAVENVMSSAARPWRPMS

SEQ ID NO: 15499 - protein, 204 aa, tobacco leaf curl virus
KNYFLTYPHCSLTKEEALSQIKQLQTNTNKKFIRICRELHEDGSPHLHVLIQFEGKYHCRNQRFFDLISPSRSAHFHPNIQAAKSSSDVKTYMEKDGKILDFGVFQVDGRSARGGCQSANDAYAEAINSGSKSSALNILREKAPKDFVLQFHNLNSNLDRIFAPPLEDFVCPFTASSFDQVPEELEEWAAENVMSSAARPWRPM

SEQ ID NO: 15500 - protein, 208 aa, tobacco leaf curl virus
INAKNYFLTYPHCSLTKEEALSQIKQLQTNINKKFIRICRELHEDGSPHLHVLIQFEGKYHCRNQRFFDLVSPNRSTHFHPNIQAAKSSSDVKTYMEKDGEILDFGVFQVDGRSARGGCQSANDAYAEAINSGSKSSALNILREKAPKDFVLQFHNLNSNLDRIFAPPLEVFVCPFTASSFDQVPEELEEWAVENVMSSAARPWRPMS

SEQ ID NO: 15501 - protein, 206 aa, tobacco leaf curl virus
NSKNYFLTYPHWSLTKEEALAQIPNLETPTNKLFIRICRELHEDGSPHLHILIQFEGKFKCTNQRFFDIVSPSRSAHFHPNIQAAKSSSDVKAYMEKDGDILDFGIFQVDGRSARGGCQSANDAYAEAINSGSKSSALNILREKAPKDFVLQFHNLNSNLDRIFAPPLEAFVCPFSSSSFDQVPEELEEWAAENVKSSAARPWRPM

SEQ ID NO: 15502 - protein, 208 aa, tobacco leaf curl virus
INRKNYFLTYPHCSLTIEEALSQLKNIQSPVNKKFIRVCQEQHEDGTPHLHSLVQFEGKFQCTNPRFFDLVSPNRSTHFHCNIQGAKSSSDVKSYIEKDGQFSDWGEFQVDGRSARGGQQSANDAYAQAINTGSKSEALRVIRELAPKDYVLQFHNLNSNLDRIFAPPLEAFVCPFTSSSFDQVPEELEEWAAENVKSSAARPWRPMS

SEQ ID NO: 15503 - protein, 190 aa, tobacco leaf curl virus
EEALSQLQNINTPTNKLYIKICRELHEDGSPHLHVLLQFEGKYKCQNNRFFDLVSPTRSAHFHPNIQGAKSSSDVKSYIDKDGDTLEWGTFQIDGRSARGGCQNANDACAEALNASSKAEALAIIREKLPKDFIFQYHNLNSNLDRIFAPPLEVFVCPFTASSFDQVPEELEEWASENVMSSAARPWRPM

SEQ ID NO: 15504 - protein, 190 aa, tobacco leaf curl virus
EEALSQLQNINTPTNKLYIKICRELHDDGSPHLHVLLQFEGKYKCQNNRFFDLVSPTRSAHFHPNIQGAKSSSDVKSYIDKDGDTLEWGTFQIDGRSARGGCQNANDACAEALNASSKAEALAIIREKLPKDFIFQYHNLNSNLDRIFAPPLEVFVCPFTASSFDQVPEELEEWASENVMSSPARPWRPM

SEQ ID NO: 15505 - protein, 190 aa, tobacco leaf curl virus
EEALSQLQNINTPTNKLYIKICRELHDDGSPHLHVLLQFEGKYKCQNNRFFDLVSPTRSTHFHPNIQGAKSSSDVKSYIDKDGDTLEWGTFQVDGRSARGGCQNANDACAEALNAASKAEALSIIREKLPKDFIFQYHNLNSNLDRIFAPPLEVFVCPFSNSSFDQVPEEIEEWAAENVKSSAARPWRPM

SEQ ID NO: 15506 - protein, 190 aa, tobacco leaf curl virus
EEALSQLQNINTPTNKLYIKICRELLDDGSPHLHVLLQFEGKYKWPNNRFFDLVSPTRSTHFHPNIQGAKSSSDVKSYIDKDGDTLEWGTFQVDGRSARGGCPNSHDACAEALDAASKAEALSIFREKLPKDFIFQYHNLNSNLDRIFAPPVEVLVSPFSISSIDQVPEEIEEWAAENVKSSAARPWRPM

SEQ ID NO: 15507 - protein, 190 aa, tobacco leaf curl virus
EGALSQLQNINTPTNKLYIKICRELHDDGSPHLHVLLQFEGKYKCQNNRFFDLVSPTRSAHFHPNIQGAKSSSDVKSYIDKDGDTLERGTFQIDGRSARGGCQNANDACAEALNASSKAEALAIIREKLPKDFIFQYHNLNSNLDRIFAPPLEVFVCPFTASSFDQVPEELEEWAAENVMSSAARPWRPM

SEQ ID NO: 15508 - protein, 190 aa, tobacco leaf curl virus
EEALAQIPNLETPTNKLFIRICRELHEDGSPHLHILIQFEGKFKCTNQRFFDIVSPSRSAHFHPNIQAAKSSSDVKAYMEKDGDILDFGIFQVDGRSARGGCQSANDAYAEAINSGSKSSALNILREKAPKDFVLQFHNLNSNLDRIFAPPLEVFVCPFSSSSFDQVPEELEEWAAENVKSSAARPWRPM

SEQ ID NO: 15509 - protein, 190 aa, tobacco leaf curl virus
EEALSQFKQLQTNTNKKFIRICRELHEDGSPHLHVLIQFEGKYHCRNQRFFDLISPSRSAHFHPNIQAAKSSSDVKTYMEKDGEILDFGVFQVDGRSARGGCQSSHDAYAEAINSGSKSSGLNILREKAPKDFVLLFHNLNSNLDRIFAPPVEDFVCPFTASSFDQVPEELEEWAAENVMSSAARPWRPM

SEQ ID NO: 15510 - protein, 225 aa, Cowpea golden mosaic virus
MPPPKRFKINAKNYFLTYPQCSIGKESAIEQLQTLQTPVNKKYIRVCRELHENGEPHLHALIQFEGKFQCTNCRLFDLKHPHTSSVSHPNIQSAKSSSDVKSYIEKDGDYVEWGHFQIDGRSARGGQQTINDAASEALNASSKEEAMQIIKEKLPEKFLFQYHNLSSNLDRIFKKPPEPWSPPFQLSSFTNVPKQMQDWADDYFGRDAAARPERPVSIIIEGDSR

SEQ ID NO: 15511 - protein, 207 aa, tomato dwarf leaf curl geminivirus
MPRKGYFSVKAKNYFLTYPQCSITKEEALSQLQNLNTPVNKKFIKICRELHENGVPHLHVLIQFEGKYNCTNKRFFDLGSPSRSAHFHPNIQGAKSSSDVKSYIDKDGDVLEWGEFQIDGRSARGGCQSANDTYARALNASCAEEALQIIKEQQPQHFFLQHHNLVANAHRIFHKPPEPWVPPFSLSSFTNVPEEMQQWADDYFEGL

SEQ ID NO: 15512 - protein, 226 aa, Havana tomato virus
MPPPKKFRVNSKNYFLTYPQCSITKEEALSQIKNLNTPVNKKFIKICRELHENGEPHLHVLLQFEAKYQCTTTRFFDLGSPSRSAHFHPNIQGAKSSSDVKTYIDKDGDVLEWGEFQIDGRSARGGCQSANDTYAKALNASCAEEALQIIKEQQPQHFFLHHHNLVANAHRIFQKPPEPWVPPFRLSSFTKVPEEMQQWADDYFGRGSAARPDRPISIIVEGDSRA

SEQ ID NO: 15513 - protein, 225 aa, Sinaloa tomato leaf curl virus
MPSVKRFKVSAKNYFLTYPQCSLRKEEALSQLQNLTIPVNKKFIKICRELHENGEPHLHVLIQFEGKYQCTNNRFFDLVSPTRSAHFHPNIQGAKSSSDVKSYIDKDGDTIEWGQFQIDGRSARGGKQSTNDTYAKALNAACADEAMRIIREEQPQHFFLQHHNLVANAAKIFKKAPERWVPPFQLSSFTNVPNEMQEWADDYFGKDSAARPERPISIIIEGDSR

SEQ ID NO: 15514 - protein, 276 aa, Sugarcane streak Egypt virus
MTTVGSTDSGSAVRSFKHRNVNTFLTYPKCHLEPEAVGLHLWSLIGHWNPAYIVVSREAHADGSWHIHALAQSVKPVQTTNPRFFDIEDFHPNIQSAKSADRVKEYVLKNPIKQWEKGTFIPRKKSFATTSSEDRQPKPTKDDIVRDIIEHSTSKQEYLSMLQKALPYEWATKLQYFEYSASRLFPETAEVYTNPHPPTEPDLINFETIEDWLNPNIYQVSPEAYMLLTPTCLTLEDAISDLEWMQSASRTSQGTGNNLSTSLGQQEQGNQHGQEA

SEQ ID NO: 15515 - protein, 276 aa, Sugarcane streak Egypt virus
MTTVGSTESGSASRSFKHRNVNTFLTYSKCHLEPEAVGLHLWSLIGHWNPAYIVVSREAHADGSWHIHALAQSVKPVQTTNPRFFDIEDFHPNIQSAKSADRVKEYVLKNPIKQWEKGTFIPRKKSFATTSSEDRQPKPTKDDIVRDIIEHSTSKQEYLSMLQKALPYEWATKLQYFEYSASRLFPETAEVYTNPHPPTEPDLVNFETIEDWLNPNIYQVSPEAYMLLTPTCLTLEEAISDLEWMQSASRTSQGTGNSLCTSLGQQEQGNQPGPEA

SEQ ID NO: 15516 - protein, 276 aa, Sugarcane streak Egypt virus
MTTVGSAESGSAIRSFKHRNVNTFLTYPKCHLEPEAVGLHLWSLIGHWNPAYIVVSREAHADGSWHIHALAQSVKPVQTTNPRFFDIEDFHPNIQSAKSADRVKEYVLKNPIKQWEKGTFIPRKKSFATTSSEDRQPKPTKDDIVRDIIEHSTSKQEYLSMIQKALPYEWATKLQYFEYSASRLFPETAEVYTNPHPPTEPDLINFETIEDWLNPNIYQVSPEAYMLLTPTCLTLEEAISDLEWMQSASRTSQGTGNSLCTSLGQQEQGNQHGPEA

SEQ ID NO: 15517 - protein, 276 aa, Sugarcane streak Egypt virus
MTTVGSTESGSASRSFKHRNVNTFLTYSKCHLDPEAVGLHLWSLIGHWNPAYIVVSREAHADGSWHIHALAQSVKPVQTTNPRFFDIEDFHPNIQSAKSADRVKEYVLKNPIKQWEKGTFIPRKKSFATTSSEDRQPKPTKDDIVRDIIEHSTSKQEYLSMLQKALPYEWATKLQYFEYSASRLFPETAEVYTNPHPPTEPDLVNFETIEDWLNPNIYQVSPEAYMLLTPTCLTLEEAISDLEWMQSASRTSQGTGNSLCTSWGQQEQGNQPGPEA

SEQ ID NO: 15518 - protein, 275 aa, Sugarcane streak Egypt virus
MTTVGSTESGSAIRSFKHRNVNTFLTYSKCHLEPEAVGLHLWSLIGHWNPAYIVVSREAHADGSWHIHALAQSVKPVQTTNPRFFDIEDFHPNIQSAKSADRVKEYVLKNPIKHWEKGTFIPRKKSFATTSSEDRQPKPTKDDIVRDIIEHSTSKQEYLSMIQKALPYEWATKLQYFEYSASRLFPETAEVYTNPHPATEPDLINFETIEDWLPNIYQVSPEAYMLLTPTCLTLEEAISDLEWMQSASRTSQGTGNSLSTSLGQQEQGNQPGPEA

SEQ ID NO: 15519 - protein, 236 aa, Jatropha mosaic geminivirus
MPSVRRFRVSAKNYFLTYPQCSLPKQEALSQLKNLETPVNKKFIKICRELHENGQPHLHVLIQFEGKYQCTNNRFFDLVSPTRSAHFHPNIQGAKSSSDVKSYIDKDGDTLEWGEFQIDGRSARGGCQSANDSYAKALNADSVQSAMAVLREEQPKDFVLQNHNIRSNLERIFAKAPEPWVPPFPLSSFTNVPDEMQEWADDYFGRGSAARPERPISVIVEGDSRTGKTMWACRCN

SEQ ID NO: 15520 - protein, 354 aa, cotton leaf crumple geminivirus
MPRNPDSFRLQARHIFLTYPKCDIPKNEALQMLQTLSWSVVKPTYIRVAREEHSDGFPHLHCLIQLSGKSNIKNERFFDLTHPRRSTNFHPNIQAAKDANAVKNYITKDGDCCESGQFTVPGGTKNNKDDVYYNAINAPSLAEALAIIRAGDPRAFIVSYHNIKANLERLFKKAPEQWVPPFPLSSFTNVPEQMQEWADDYFGMGPAARPVRPVSLIVEGDSRTGKTMWARALGPHNYLSGHLDFNNRVYSNNVAYNVIDDVAPQYLKLKHWKELLGAQQDWQSNCKYGKPVQIKGGIPSIVLCNPGEGSSYKDFLDKAENASLKHWTLKNVIFITLDAPLYQEGTQASQEEGD

SEQ ID NO: 15521 - protein, 354 aa, cotton leaf crumple geminivirus
MPRNPDSFRLQARHIFLTYPKCDIPKNEALQMLQTLSWSVVKPTYIRVAREEHSDGFPHLHCLIQLSGKSNIKNKRFFDLTHPRRSTNFHPNIQAAKDANAVKNYITKDGDCCESGQFKVPGGTKKNKDDVYYNAINAPSLAEALAIIRAGDPRAFIVSYHNITANLERLFKKAPEQWVPPFPLSSFTNVPEQMQEWADDYFGMGPAARPVRPVSLIVEGDSRTGKTMWARALGPHNYLSGHLDFNNRVYSNNVAYNVIDDVAPQYLKLKHWKELLGAQKDWQSNCKYGKPVQIKGGIPSIVLCNPGEGSSYKDFLDKAENASLKHWTLKNVIFITLDAPLYQEGTQASQEEGD

SEQ ID NO: 15522 - protein, 223 aa, cotton leaf crumple geminivirus
MPRNPDSFRLQARHIFLTYPKCDIPKNEALQMLQTLSWSVVKPTYIRVAREEHSDGFPHLHCLIQLSGKSNIKNERFFDLTHPRRSTNFHPNIQPAKDANAVKNYITKDGDCCESGQFKVPGGTKKNKDDVYYNAINAPNLAEALAIIRAGDPRAFIVSYHNIQANLERLFKKAPEQWVPPFPLSSFTNVPEQMQEWADDYFGMGPAARPVRPVSLIVEGDSR

SEQ ID NO: 15523 - protein, 359 aa, cotton leaf crumple geminivirus
MPRNPDSFRLQARNIFLTYPKCDIPKNEALQMLQALSWSVVSPTFIRVAREEHSDGSPHLHCLIQLSGKPNIKNERFFDLTHPRRSTNFHPNIHAAKDANAVKNYITKDGDCCESGQFEVPRGTKNNKDDVYYNAINAPSVAEALEIIRAGDPRAFIVSYHNIKANLDRLFKKAPEQWVPPFPLSSFTNVPDEMQEWADGYFGLGPAARPVRPVSLIVEGDSRTGKTMWARALGPHNYLSGHLDFNHRVYSNNVAYNVIDDVSPHYLKLKHWKELLGAQKDWQSNCKYGKPVQIKGGIPSIVLCNPGEGSSYKDFLDKAENASLKNWTIKNVIFITLDAPLYQEGTQASQEEGDQTTTN

SEQ ID NO: 15524 - protein, 312 aa, Sugarcane streak Reunion virus
MPSQEDSTVASRPFKHRNANTFLTYSRCRLDPEAVGLILWQLISHWSPAYILVSREAHADGEWHLHALVQSVRPVQTTNQGFFDIESFHPNIQSAKSANKVREYILKNPIAKWEKGTFIPRKQCFVSSSSESKNSKPSKDDIVRDIIEHSTSKEEYLSMLQKALPYDWATKLQYFEYSASKLFPDTVEEYTSPHPTTTPLLRDPTTIDNWVQPNLFQVSPEAYMLCNPHCLSLEEASSDLEWMSSTSRTIQVQESLASTSSAQQELENLLGPVAWEDIITGKTTSTGPATTRTQSTTSLTTSPSSSVLAGSN

SEQ ID NO: 15525 - protein, 354 aa, pepper leaf curl virus
MAPPKNLRINAKNYFLTYPHCSLTKEEALSQIQAIETPTIKLFIRICRELHEDGTPHLHILIQFEGKFQCKNPRFFDLTSPTRSAHFHPNIQGAKSSTDVKEYIAKNGDVLDHGVFQIDGRSARGGCQSANDAYAEALNSGTKASALAILKEEAPKDYILQFHNLNSNLDKIFSLRIEMYISPFLVSFDQVQRNLNEWVAANVVKPARPLRPISIVVEGDSRTGKTMWARSLGPHNYLCGHLDLSPKVYNNDPWYNVIDDVDPHYLKHFKEFMGAQRDWQSNTKYGKPVQIKGGIPTIFLCNPGPHSSYKEFLEEEKNTALKNWALKNAIFVTIEGPLFSGSHQGATQNRQEDN

SEQ ID NO: 15526 - protein, 361 aa, Tomato yellow leaf curl Thailand virus
MPPSKKFLINAKNYFLTYPHCSLTKEEEALSQILNLSTPTNKLIIRICRELHEDGTPHLHLLIQFEGKFKCQNNRFFDLTSPTRSAHFHPNIQGAKSSTDVKAYMEKDGDVLDHGIFQIDGRSARGGCQSANDAYAEAINSGSKASALNILREKAPKDFVLQFHNLNSNLDRIFTPPIEEYISPFSSSSFNQVPEELEEWACNNVLSRARPLRPITIVIEGDSRTGKTMWARSLGPHNYLCGHLDLSPKVYNNDAWFNVIDDVDPHYLKHFKEFMGAQRDWQSNTKYGKPVQIKGGIPTIFLCNPGPNSSYKEYLEEEKNSALRNWAIKNAIFVTLEGPLYSGTYQGATPNSQEDNQTTES

SEQ ID NO: 15527 - protein, 361 aa, soybean crinkle leaf virus
MAPPKPFKINAKNYFLTYPQCSLTKEEALSQLQNINTPTNKKYIKICRELHEDGSPHLHVLVQFEGKYQCKNNRFFDLVSPTRSAHFHPNIQGAKSSSDVKSYIDKDGDTLEWGEFQIDGRSARGGQQSANDAYAKALNSGSKSEALNVIRELAPKDFVLQFHNLNSNLDRIFTPPLEVMFLLFLLLLLIKFRKNLKFGLLIMYGNAARPWRPNSIVIEGESRTGKTMWARSLGPHNYLCGHLDLSPKVYSNDAWYNVIDDVDPHYLKHFKEFMGAQRDWQSNTKYGKPIQIKGGIPTIFLCNPGPTSSYKEYLDEDKNSALKAWAIKNAEFITLTEPLYSGTNQSATPNSQEEVSPQTES

SEQ ID NO: 15528 - protein, 223 aa, soybean crinkle leaf virus
MAPPKPFKINAKNYFLTYPQCSLTKEEALSQLQNINTPTNKKYIKICRELHEDGSPHLHVLVQFEGKYQCKNNRFFDLVSPTRSAHFHPNIQGAKSSSDVKSYIDKDGDTLEWGEFQIDGRSARGGQQSANDAYAKALNSGSKSEALNVIRELAPKDFVLQFHNLNSNLDRIFTPPLEVMFLLFLLLLLIKFRKNLKFGLLIMYGNAARPWRPNSIVIEGESR

SEQ ID NO: 15529 - protein, 351 aa, tomato yellow mottle virus
MPPLKKFSLWAKNIFLTYPRCSLTKEEALFQLQNISLPSNKLFIRVARELHEDGEPHLHVLIQLEGKAQIYNQKLFDLSSTTRSAYFHPNIQGAKSSSDVKSYMEKDGEFIDFGVFQIDGRSSRGGIQTTNDSYAKALNAGSTESALQIIKEEQPAHYFLHYHNLVNNANRIFQKAPEPWVPPFQLSSFNAVPDEMQEWADDYFGRGAAARPERPISIIVEGDSRTGKTMWARSLGPHNYLSGHLDFNSRVYSNEVEYNVIDDVAPHYLKLKHWKELIGAQKDWQSNCKYGKPVQIKGGIPSIVLCNPRDGGSYKDFLDREENASLKQWTLKNAKFIFLNSPLYQTSSQEC

SEQ ID NO: 15530 - protein, 362 aa, Indian mungbean yellow mosaic virus
MPRDGRFAINAKNYFLTYPKCPLTKEDALEQLLALSTPVNKKFIRICRELHEDGQPHLHVLLQFEGKHQTRNQRFFDLYSRCRSAHYHSIIQAAKSCSDVKTYMEKDGDILDHGTFQIDGRSARGGKQSANDAYAEALNSGSKLEALLILKEKAPKDFILQFHNLNCNLSRIFTEPTQAYESPFTLESFDKVPSYISSWAERNVRDPAVRPDRPISIVIEGDSRTGKTMWARAIGPHNYLCGHLDLNDKTYSNEAWYNVIDDVDPHYLKHFKEFMGAQRDWQSNVKYGKPTKIKGGIPTIFLCNAGPKSSYKEYLDEENNAALKQWASKNAEFYTLKEPLVSSVNQGSTQGRQEESNSTLSN

SEQ ID NO: 15531 - protein, 226 aa, tomato mild mottle geminivirus
MPLLPKKFLINSKNYFLTYPHCSLSKEETLEQLLRLNTPTNKKYIKIARELHEDGEYHLHVLIQFEGKFKTQNCRFFDLVSSTRSTHFHPNVQGAKSSTDVKSYVDKDGDTIEWGEFQIDGRSARGGQQTANDAAAEALNASSKEEAMRIIKEKLPKEFLFQYHNLSSNLDRIFAKAPEPWIPPFPLSSFTNVPDEMQEWTDDYFGRGVAARPERPISIIIEGDSR

SEQ ID NO: 15532 - protein, 223 aa, Tomato severe leaf curl virus
MPRNPNLFRLAAKNIFLTYPQCDIPKDEAIEMLQNLPWSVVKPTYIRVAREEHADGFPHLHCLIQLSGKSNIKDARFFDLTHPRSLPIFIPNAQAAKDTNAVQNYITKEGDYCESGQYKVSGGTKSNRDDVYHNAVNAASAGEALNIIKAGDPKTFIVSYHNVKANIERLFQKAPEPWVPPFPLSSFTNVPDEMQEWADDYFGRDAAARPERPISIIIEGESR

SEQ ID NO: 15533 - protein, 344 aa, Tomato severe leaf curl virus
MPRNPNLFRLAAKNIFLTYPQCDIPKDEAIEMLQNLPWSVVKPTYIRVAREEHADGFPHLHCLIQLSGKSNIKDARFFDLTHPRRSANFHPNAQAAKDTNAVQNYITKEGDYCESGQYKVSGGTKSNKDDVYHNAVNAASAGEALDIIRAGDPKTFIVSYHNVKANIERLFQKAPEPWVPPFPLSSFTNVPDEMQEWADDYFGRDAAARPERPISIIIEGESRTGKTMWARALGPHNYLSGHLDFNSRVYSNEAEYNVIDDITPQYLKMKHWKELIGAQKDWQSNCKYGKPVQIKGGIPSIVLCNPGEGASYKSFLEKEENKALKDWTLHNAKFIFLNSTLYQA

SEQ ID NO: 15534 - protein, 223 aa, Tomato severe leaf curl virus
MPRNPNLFRLAAKNIFLTYPQCDIPKDEAIEMLQNLPWSVVKPTYIRVAREEHADGFPHLHCLIQLSGKSNIKDARFFDLTHPRRSANFHPNAQAAKDTNAVQNYITKEGDYCESGQYKVSGGTKSNRDDVYHNAVNAASAGEALNIIKAGDPKTFIVSYHNVKANIERFFQKAPEPWVPPFPLSSFTNVPDEMQEWADDYFGRDAAARPERPISIIIEGESR

SEQ ID NO: 15535 - protein, 223 aa, pepper golden mosaic geminivirus
MPLPPKSFRLQCKNIFLTYPQWDITKDEALGMFRSLKWSVVKPIYIRVSREEHSDGFPHLHCLIQLTGKCNIKDARFFDITHPRRSAQFHPNVQAAKDANAVKNYITKDGDYCEHGQYKVSGGSKANKDDVYHNAVNAASAVEALDIIKAGDPKTFIVSYHNVKANIERIFRTPPQPWTPPYPLSSFNNVPEDMQHWVADYFGRSSAARPDRPISIVIEGDSR

SEQ ID NO: 15536 - protein, 351 aa, Dicliptera yellow mottle virus
MPRKGVFSIKAKNYFLTYPQCSLSKEEALQQLINLKTPTNKKFIKIARELHEDGQPHLHVLIQFEGKYNCTSNRFFDLVSPTRSAHFHPNIQGAKSSSDVKSYVSKDGDTLEWGQYQVDGRSARGGCQTANDSYARALNASSAEQALQILKEEQLKDYVTQQHNLRANLERIFMKAPEPWVPPFQLSSFTNVPEEMQEWADNYFGMSAAARPERPISIIVEGDSRTGKTMWARSLGKHNYLSGHLDFNSRVYSNDVEYNVIDDVSPSYLKLKHWKELIGAQKDWQSNCKYGKPVQIKGGIPSIVLCNPGEGSSYKDFLNKQENQALQNWTIHNAIFITLTGALYQTNSQES

SEQ ID NO: 15537 - protein, 351 aa, Dicliptera yellow mottle virus
MPISYTISVNAKNYFLTYPQCSLSKEEALTQIQSISTPVNKKFIKICRELHENGETHLHVLIQFEGKFNCKNNRFFDLVSPTRSAHFHPNIQGAKSSSDVKSYINKDGDTIEWGVFQVDGRSARGGCQSVNDTYAKALNASSAIEALQILKEEQPQHFFLQHHNLVTNATKIFMKAPEPWVPPFQLSSFTNVPEEMQEWADNYFGMSAAARPERPISIIVEGDSRTGKTMWARTLGKHNYLSGHLDFNSRVYSNDVEYNVIDDVSPNYLKLKHGEDLIGAQKDWQSNCKYGKPVQIKGGIPSIVLCNPGEGSSYKDFLNKEENKGLHNWTIHNAIFITLTLPLYQTNSQES

SEQ ID NO: 15538 - protein, 224 aa, Tomato leaf curl Philippines virus
MAPPRPFKINAKNYFLTYPQCSLTKEDALSQLQNLNTPTNKKFIKICRELHEDGSPHLHVLIQFERKYQCQIQRFFDLVSPTRSAHFHPNIQGAKSSSDVKSYIDKDGDTLEWGEFQVDGRSARGGQQSANDAYAKAINTGSKSEALNVIRELAPKDFVLQFHNLSANLDRIFAPPLEVFVSPFPSSSFNQVPKELEEWVSENVRDAAARPWRPKSIVLEGDSR

SEQ ID NO: 15539 - protein, 690 aa, Marchantia polymorpha
MKFRGRDAMTNFRPVQVTDPEAVFLLEQSKRQASMRVTSPQTPAGMVPNPPNESDDPPSLPPKPTMQREHLFEKAVTPSDVGKLNRLVIPKQHAERCFPLDLALNVPCQTLSFEDVSGKHWRFRYSYWNSSQSYVFTKSWSCFLKGKKLEAGDTVSFERGPNQELYIDFRRRLNNQVAQMLPGPSTSASDFARNREHLFEKAVTPSDVGKLNRLVIPKQHAERCFPLDLALNAPCQTLSFEDVSGKHWRFRYSYWNSSQSYVFTKGWSCFLKGKKLEAGDTVSFERGPNQELYIDFRRRLNNQVAQMLPGPSTSASDFARNRPWVPRLPNPAGGLNPAVWHQLSLQNPQSSLESREQLQMLYVRQAFPQRQQQQHMESGVSLPHQTRTGDDFFSLLTHGRVAAMDRTVVGASTTVVKQQQLLAEGPVSTPSAAPAGASGGTRLFGVDLENTSSSSAQGSTEREYAVVSGLNDWKSQTYAQQLQSLSRASYHQGESSFQQQQQQQHLPTARILPSFQGSLHGQSPAPVLMAASAKQQQQQQEQSPFMGLSIVRGRAGEQSLGTRLAASHSDLQLASSTNMNSGSAARAAGAGAELQEAGARTVVALGLAGPQQFAGDSRKRKVGILECLKNSGTADSYARVGAPDTSLSLAQHSESTTQVSFTTESSHFSSSTQPSGSSSTAEDRELKSPK

SEQ ID NO: 15540 - protein, 360 aa, Glycine max
  unsure (1)..(360): unsure at all Xaa locations
VTLYKSFSDVIXSEKAKPSSMITSSEKVSLSPPPSNRLCRVGSGASAVVDPDGGGSGAEVESRKLPSSKYKGVVPQPNGRWGAQIYEKHQRVWLGTFNEEDEAARAYDIAAQRFRGKDAVTNFKPLAGADDDDGESEFLNSHSKPEIVDMLRKHTYNDELEQSKRSRGVVRRRGSAAAGTANSISGACFTKAREQLFEKAVTPSDVGKLNRLVIPKQHAEKHFPLQSSNPTAAKGVLLNFEDVGGKVWRFRYSYWNSSQSYVLTKGWSRFVKEKNLKAGDTVCFHRSTGPDKQLYIDWKTRNGPVVEPIQMVRLFGVNIFSDTIVGNNNNASGCCNGKRREMXXLFSLECSKKPKIIGAL

SEQ ID NO: 15541 - protein, 369 aa, Glycine max
  unsure (1)..(369): unsure at all Xaa locations
MDAISCLDESTTTESLSISQAKPSSTTSEKASPSPPAAEXRLCRVGSGASAVVDSDGGGGGGSTEVESRKLPSSKYKGVVPQPNGRWGSQIYEKHQRVWLGTFNEEDEAARAYDVAVQRFRGKDAVTNFKPLSGTDDDDGESEFLNSHSKSEIVDMLRKHTYNDELEQSKRSRGFVRRRGXRRPAPETETHSGACVMKAREQLFQKAVTPSDVGKLNRLVIPKQHAEKHFPLQSAANGVSATATAAKGVLLNFEDVGGKVWRFRYSYWNSSQSYVLTKGWSRFVKEKNLKAGDTVCFQRSTGPDRQLYIDWKTRNEPIQMVRLFGVNILNGSDSIANNNNASGCCNGKRREMELFSLECSKKPKIIGAL

SEQ ID NO: 15542 - protein, 341 aa, Glycine max
  unsure (1)..(341): unsure at all Xaa locations
MDGGSVTDETTTTSNSLSVXXANLSPPPXSALSAAAQPPSSTPTVVASPXEAESRKLPSSKYKGVVPQPNGRWGAQIYEKHQRVWLGTFNEEDEAVRAYDIVAHRFRGRDAVTNFKPLAGADDAEAEFLSTHSKSEIVDMLRKHTYDNELQQSTRGGRRRRDAETASSGAFDAKAREQLFEKTVTPSDVGKLNRLVIPKQHAEKHFPLSGSAAAGAKGMLLNFEDVGGKVWRFRYSYWNSSQSYVLTKGWSRFVKEKNLRAGDAVQFFKSTGLDRQLYIDCKARSGKVNNPVQMVRLFGVDLLKLPVPGSDGIGVGCDGKRKEMELFAFECSKKLKVIGAL

SEQ ID NO: 15543 - protein, 353 aa, Glycine max
  unsure (1)..(353): unsure at all Xaa locations
HLQYSTITSNQTKPKPLSALTSHKPNVTDETTTSSDSLSVPPPSRVGSVASAVVDPDGCCVSGEAESRKLPSSKYKGVVPQPNGRWGAQIYEKHQRVWLGTFNEEDEAARAYDIAALRFRGPDAVTNFKPPAASDDAESEFLNSHSKFEIVDMLRKHTYDDELQQSTRGGRRRLDADTASSGVFDAKAREQLFEKTVTPSDVGKLNRLVIPKQHAEKHFPLSAATKARRAWPSAAKGMLLNFEDVGGKVWRFRYSYWNSSQSYVLTKGWSRFVKEKNLRAGDAVQFFKSTGPDRQLYIDCKARSGEVNNMVRLFGVNLLXXYPYPVRXGVGKRKEMELFAFECCKKLKVIGAL

SEQ ID NO: 15544 - protein, 393 aa, Oryza sativa (japonica cultivar-group)
MDSSSCLVDDTNSGGSSTDKLRALAAAAAETAPLERMGSGASAVVDAAEPGAEADSGSGGRVCGGGGGGAGGAGGKLPSSKFKGVVPQPNGRWGAQIYERHQRVWLGTFAGEDDAARAYDVAAQRFRGRDAVTNFRPLAEADPDAAAELRFLATRSKAEVVDMLRKHTYFDELAQSKRTFAASTPSAATTTASLSNGHLSSPRSPFAPAAARDHLFDKTVTPSDVGKLNRLVIPKQHAEKHFPLQLPSAGGESKGVLLNFEDAAGKVWRFRYSYWNSSQSYVLTKGWSRFVKEKGLHAGDVVGFYRSAASAGDDGKLFIDCKLVRSTGAALASPADQPAPSPVKAVRLFGVDLLTAPAPVEQMAGCKRARDLAATTPPQAAAFKKQCIELALV

SEQ ID NO: 15545 - protein, 317 aa, Oryza sativa (japonica cultivar-group)
MEQEAAMVVFSCNSGSGGSSSTTDSKQEEEEEEELAAMEEDELIHVVQAAELRLPSSTTATRPSSRYKGVVPQPNGRWGAQIYERHARVWLGTFPDEEAAARAYDVAALRFRGRDAVTNRAPAAEGASAGELAFLAAHSKAEVVDMLRKHTYDDELQQGLRRGSRAQPTPRWAREPLFEKAVTPSDVGKLNRLVVPKQQAERHFPFPLRRHSSDAAGKGVLLNFEDGDGKVWRFRYSYWNSSQSYVLTKGWSRFVREKGLRPGDTVAFSRSAAAWGTEKHLLIDCKKMERNNLATVDDDARVVVKLFGVDIAGDKTR

SEQ ID NO: 15546 - protein, 365 aa, Oryza sativa (japonica cultivar-group); identical to SEQ ID NO: 342

SEQ ID NO: 15547 - protein, 291 aa, Oryza sativa
MEQEAAMVVFSCNSGSGGSSSTTDSKQEEEEEEETRPSSRYKGVVPQPNGRWGAQIYERHARVWLGTFPDEEAAARAYDVAALRFRGRDAVTNRAPAAEGASAGELAFLAAHSKAEVVDMLRKHTYDDELQQGLRRGSRAQPTPRWAREPLFEKAVTPSDVGKLNRLVVPKQQAERHFPFPLRRHSSDAAGKGVLLNFEDGDGKVWRFRYSYWNSSQSYVLTKGWSRFVREKGLRPGDTVAFSRSAAAWGTEKHLLIDCKKMERNNLATVDDDARVVVKLFGVDIVGDKTR

SEQ ID NO: 15548 - protein, 317 aa, Oryza sativa; identical to SEQ ID NO: 343

SEQ ID NO: 15549 - protein, 317 aa, Oryza sativa; identical to SEQ ID NO: 15545

SEQ ID NO: 15550 - protein, 365 aa, Oryza sativa
MGVVSFSSTSSGASTATTESGGAVRMSPEPVVAVAAAAQQLPVVKGVDSADEVVTSRPAAAAAQQSSRYKGVVPQPNGRWGAQIYERHARVWLGTFPDEEAAARAYDVAALRYRGRDAATNFPGAAASAAELAFLAAHSKAEIVDMLRKHTYADELRQGLRRGRGMGARAQPTPSWAREPLFEKAVTPSDVGKLNRLVVPKQHAEKHFPLRRAASSDASASAAAGKGVLLNFEDGEGKVWRFRYSYWNSSQSYVLTKGWSRFVREKGLRAGDTIVFSRSAYGPDKLLFIDCKKNNAAAATTTCAGDERPTTSGAEPRVVRLFGVDIAGGDCRKRERAVEMGQEVFLLKRQCVVHQRTPALGALLL

SEQ ID NO: 15551 - protein, 338 aa, Oryza sativa
  unsure (1)..(338): unsure at all Xaa locations
STSSGASTATTESGGAVRMSPEPVVAVAAAAQQLPVVKGVDSADEVVTSRPAAAAAQQSSRYKGVVPQPNGRWGAQIYERHARVWLGTFPDEEAAARAYDVAALRYRGRDAATNFPGAAASAAELAFLAAHSKAEIVDMLRKHTYADELRQGLRRGRGMGARAQPTPSWAREPLFEKAVTPSDVGKLNRLVVPKQHAEKHFPLRRAASSDSASAAATGKGVLLNFEDGEGKVWRFRYSYWNSSQSYVLTKGWSRFVREKGLRAGDTIVFSRSAYGPDKLLFIDXXPTTSGAEPRVVRLFGVDIAGGDCRKRERAVEMGQEVFLLKRQCVVHQRTPALG

SEQ ID NO: 15552 - protein, 369 aa, Oryza sativa
  unsure (1)..(369): unsure at all Xaa locations
MGVVSFSSTSSGASTATTESGGAVRMSPDPVVAAPAAAQQLPVVKGVDSADEVVTSKPAAAAVAQQSSRYKGVVPQPNGRWGAQIYERHARVWLGTFPDEEAAARAYDVAAARYRGRDAATNFPGAAASAAELAFLAAHSKAEIVDMLRKHTYADELRQGLRRGRGMGARAQPTPSWAREPLFEKAVSPPVLGXLQRLAVPQQHADKHFPLRRAASSDSASAAATGKGVLLNFEDGEGKVWRFRYSYWNSSQSYVLTKGXWSRFVREKGLRAGDTIVFSRSAYAPDKLLFIDCKKNNAAAAATPSCPGDGRPTPTSTAXRVVRLFXGVARAGGDCRKRERAVEMGQEVSLLKSQGLVHPRTPALAALLV

SEQ ID NO: 15553 - protein, 272 aa, Triticum aestivum
  unsure (1)..(272): unsure at all Xaa locations
HARVWLGTFPDQDSAARAYDVASLRYRGRHAAFNFPCATVEAELAFLAAHSKAEILDMLRKQTYAXDELRQGLRRGRGMGARAQPTPSWAREPLFEKAVTPSDVGKLNRLVVPKHHAEKHFPLKRTPHTTTXXTXQGVLLNFEDGQGKVWRFRYSYWNSSQSYVLTKGWSRFVREKGLGAGDSIVFSCSAYGQEKQFFIDCKKNNADGGAATASPPVAEAANGEQVRVVRLFGVDIAGXXKRGRAAPAEQELFKRQCVAHSQHSPALGAIVL

SEQ ID NO: 15554 - protein, 163 aa, Triticum aestivum
  unsure (1)..(163): unsure at all Xaa locations
XAHTSTQTHTLQRTPGQETTEKQPAMGVEILSSTGEHSSQYSSGAVSTATTESASSRFKGVVPQPNGRWGAQIYERHARVWLGTFPDEDSAARAYDVAALRYRGREXTTNFPCAAAEAELAFLAAHSKAEIVDMLRKHTYADELRQGFRRGRGMGARAQPTPS

SEQ ID NO: 15555 - protein, 160 aa, Triticum aestivum
  unsure (1)..(160): unsure at all Xaa locations
XACQLSPPMASGKPTNPEIDNDMECSSPESGAEDAVESSSPAPAPSSRFKGVVPQPNGRWGAQIYEKHSRVWLGTFADEESAARAYDVAALRFRGRDAVTNSAPAGGGASTSELAFLADHSKAEIVDMLRKHTYADXLRQGLRRGHGRAQPTPAWAREFL

SEQ ID NO: 15556 - protein, 393 aa, Zea mays
  unsure (1)..(393): unsure at all Xaa locations
MDSASRLLDDTRSGSGGGGGASTDKLRALAVFAAASAPLERMGSGASAVXVDAAEPGAEADSGSGAAAVSVGGKLPSSRYKGVVPQPNGRWGAQIYERHQRVWLGTFAGEADAARAYDVAAQRFRGRDAVTNFRPLADADPDAAAELRFLASRSKAEVVDMLRKHTYFDELAQNKRAFAAASAATASSLANTSYASLSPATATAAAAAAREHLFDKTVTPSDVGKLNRLVIPKQHAEKHFPLQLPSAGGESKGVLLNLEDAAGKVWRFRYSYWNSSQSYVLTKGWSRFVKEKGLQAGDVVGFYRSAAGADTKLFIDCKLRPNSVVAASTAGPSPPAPVAKAVRLFGVDLLTAPATAAAAPAEAVAVAGCKRARDLGSPPQAAFKKQLVELALV

SEQ ID NO: 15557 - protein, 225 aa, Zea mays
  unsure (1)..(225): unsure at all Xaa locations
MDSTSCLLDDASSGASTGKKAPVPAPAAATGKPLQRVGSSGTSAVMDAAEPGAEADSGKLPSSKYKGVVPQPNGRWGAQIYERHQRVWLGTFTGEAEAARAYDVAAQRFRGRDAVTNFRPLAESEPEAAVELRFLASRSKAEVVDMLRKHTYGEELAHNRRAFAAASPAASPPPENNRRPPAASSSSSPAAAREHLFDKTVTPSDVGKLNRLVIPKQHAEKHVPX

SEQ ID NO: 15558 - protein, 237 aa, Zea mays
  unsure (1)..(237): unsure at all Xaa locations
MDSTSCLLDDASSGASTGKKAPVPAPAAATGKPLQRVGSSGTSAVMDAAEPGAEADSGGAGRAXXGGVSGKLPSSKYKGVVPQPNGRWGAQIYERHQRVWLGTFTGEAEAARAYDVAAQRFRGRDAVTNFRPLAESEPEAAVELRFLASRSKAEVVDMLRKHTYGEELAHNRRAFAAASPAASPPPENNRRPPAASSSSSPAAAREHLFDKTVTPSDVGKLNRLVIPKQHAEKHVPX

SEQ ID NO: 15559 - protein, 223 aa, Zea mays
  unsure (1)..(223): unsure at all Xaa locations
LGTSRPAGMPLSLYTAHGTPPXHSPLPLLAAREHLFDKTVTPSDVGKLNRLVIPKQHAEKHFPLQLPSGGGESTGVLLNLEDAAGKVWRFRYSYWNSSQSYVLTKGWSRFVKEKGLQAGDVVGFYRSAAGADSKLFIDCKLRPNSVDTASTTSPVGSSPPPAPVAKAVRLFGVDLLTAPADAMARCKRARDLASPPQAAIKKQLVELALASVDQCYGAGRSFS

SEQ ID NO: 15560 - protein, 238 aa, Zea mays
  unsure (1)..(238): unsure at all Xaa locations
XWRRTTWPRATRSVAVGDGHVHQPALPPPPAAAAVLRXREHLFEKPLTPSDVGKLNRLVIPKQHAERHFPLGGGDGNGNEKGLLLEFDDEGGRPWRFRYSYWVSSQSYVLTKGWSRYVKEKRLDAGDVVGFYRSAAGADTKLFIDCKLRPNSVVVASTAGPSPPAPVAKAVRLFGVDLLTAPATAAAPAEAVAGCKRARDLGSPPQAAFKKQLVELALVFQMLPAIHDPSTSTGGRGA

SEQ ID NO: 15561 - protein, 148 aa, Zea mays
  unsure (1)..(148): unsure at all Xaa locations
SRAQPTPAWARVLLFDKAVTPSDVGKLNRLVVPKQHAEKHFPLKRAPPSVEAQAPTTAKGVLLNFEDGEGKVWRFRYSYWNSSQSYVLTKGWSRFVREKGLRAGDTIVFSHSTYGSEKQLFIDCKKTKTTTPATDGVPVPLXSTSGEX

SEQ ID NO: 15562 - protein, 352 aa, Arabidopsis thaliana
MDSSCIDEISSSTSESFSATTAKKLSPPPAAALRLYRMGSGGSSVVLDPENGLETESRKLPSSKYKGVVPQPNGRWGAQIYEKHQRVWLGTFNEQEEAARSYDIAACRFRGRDAVVNFKNVLEDGDLAFLEAHSKAEIVDMLRKHTYADELEQNNKRQLFLSVDANGKRNGSSTTQNDKVLKTREVLFEKAVTPSDVGKLNRLVIPKQHAEKHFPLPSPSPAVTKGVLINFEDVNGKVWRFRYSYWNSSQSYVLTKGWSRFVKEKNLRAGDVVTFERSTGLERQLYIDWKVRSGPRENPVQVVVRLFGVDIFNVTTVKPNDVVAVCGGKRSRDVDDMFALRCSKKQAIINAL

SEQ ID NO: 15563 - protein, 352 aa, Arabidopsis thaliana
MDSSCIDEISSSTSESFSATTAKKLSPPPAAALRLYRMGSGGSSVVLDPENGLETESRKLPSSKYKGVVPQPNGRWGAQIYEKHQRVWLGTFNEQEEAARSYDIAACRFRGRDAVVNFKNVLEDGDLAFLEAHSKAEIVDMLRKHTYADELEQNNKRQLFLSVDANGKRNGSSTTQNDKVLKTREVLFEKAVTPSDVGKLNRLVIPKQHAEKHFPLPSPSPAVTKGVLINFEDVNGKVWRFRYSYWNSSQSYVLTKGWSRFVKEKNLRAGDVVTFERSTGLERQLYIDWKVRSGPRENPVQVVVRLFGVDIFNVTTVKPNDVVAVCGGKRSRDVDDMFALRCSNKQAIINAL

SEQ ID NO: 15564 - protein, 361 aa, Arabidopsis thaliana
MEYSCVDDSSTTSESLSISTTPKPTTTTEKKLSSPPATSMRLYRMGSGGSSVVLDSENGVETESRKLPSSKYKGVVPQPNGRWGAQIYEKHQRVWLGTFNEEEEAASSYDIAVRRFRGRDAVTNFKSQVDGNDAESAFLDAHSKAEIVDMLRKHTYADEFEQSRRKFVNGDGKRSGLETATYGNDAVLRAREVLFEKTVTPSDVGKLNRLVIPKQHAEKHFPLPAMTTAMGMNPSPTKGVLINLEDRTGKVWRFRYSYWNSSQSYVLTKGWSRFVKEKNLRAGDVVCFERSTGPDRQLYIHWKVRSSPVQTVVRLFGVNIFNVSNEKPNDVAVECVGKKRSREDDLFSLGCSKKQAIINIL

SEQ ID NO: 15565 - protein, 334 aa, Arabidopsis thaliana
ATTAKKLSPPPAAALRLYRMGSGGSSVVLDPENGLETESRKLPSSKYKGVVPQPNGRWGAQIYEKHQRVWLGTFNEQEEAARSYDIAACRFRGRDAVVNFKNVLEDGDLAFLEAHSKAEIVDMLRKHTYADELEQNNKRQLFLSVDANGKRNGSSTTQNDKVLKTCEVLFEKAVTPSDVGKLNRLVIPKQHAEKHFPLPSPSPAVTKGVLINFEDVNGKVWRFRYSYWNSSQSYVLTKGWSRFVKEKNLRAGDVVTFERSTGLERQLYIDWKVRSGPRENPVQVVVRLFGVDIFNVTTVKPNDVVAVCGGKRSRDVDDMFALRCSKKQAIINAL

SEQ ID NO: 15566 - protein, 344 aa, Arabidopsis thaliana
MESSSVDESTTSTGSICETPAITPAKKSSVGNLYRMGSGSSVVLDSENGVEAESRKLPSSKYKGVVPQPNGRWGAQIYEKHQRVWLGTFNEEDEAARAYDVAVHRFRRRDAVTNFKDVKMDEDEVDFLNSHSKSEIVDMLRKHTYNEELEQSKRRRNGNGNMTRTLLTSGLSNDGVSTTGFRSAEALFEKAVTPSDVGKLNRLVIPKHHAEKHFPLPSSNVSVKGVLLNFEDVNGKVWRFRYSYWNSSQSYVLTKGWSRFVKEKNLRAGDVVSFSRSNGQDQQLYIGWKSRSGSDLDAGRVLRLFGVNISPESSRNDVVGNKRVNDTEMLSLVCSKKQRIFHAS

SEQ ID NO: 15567 - protein, 333 aa, Arabidopsis thaliana
MDAMSSVDESSTTTDSIPARKSSSPASLLYRMGSGTSVVLDSENGVEVEVEAESRKLPSSRFKGVVPQPNGRWGAQIYEKHQRVWLGTFNEEDEAARAYDVAAHRFRGRDAVTNFKDTTFEEEVEFLNAHSKSEIVDMLRKHTYKEELDQRKRNRDGNGKETTAFALASMVVMTGFKTAELLFEKTVTPSDVGKLNRLVIPKHQAEKHFPLPLGNNNVSVKGMLLNFEDVNGKVWRFRYSYWNSSQSYVLTKGWSRFVKEKRLCAGDLISFKRSNDQDQKFFIGWKSKSGLDLETGRVMRLFGVDISLNAVVVVKETTEVLMSSLRCKKQRVL

SEQ ID NO: 15568 - protein, 333 aa, Arabidopsis thaliana
MDAMSSVDESSTTTDSIPARKSSSPASLLYRMGSGTSVVLDSENGVEVEVEAESRKLPSSRFKGVVPQPNGRWGAQIYEKHQRVWLGTFNEEDEAARAYDVAAHRFRGRDAVTNFKDTTFEEEVEFLNAHSKSEIVDMLRKHTYKEELDQRKRNRDGNGKETTAFALASMVVMTGFKTAELLFEKTVTPSDVGKLNRLVIPKHQAEKHFPLPLGNNNVSVKGMLLNFEDVNGKVWRFRYSYWNSSQSYVLTKGWSRFVKEKRLCAGDLISFKRSNDQDQKFFIGWKSKSGLDLETGRVMRLFGVDISLNAVVVVKETTEVLMSSLRCKNQRVL

SEQ ID NO: 15569 - protein, 337 aa, Arabidopsis thaliana
MRLDDEPENALVVSSSPKTVVASGNVKYKGVVQQQNGHWGAQIYADHKRIWLGTFKSADEAATAYDSASIKLRSFDANSHRNFPWSTITLNEPDFQNCYTTETVLNMIRDGSYQHKFRDFLRIRSQIVASINIGGPKQARGEVNQESDKCFSCTQLFQKELTPSDVGKLNRLVIPKKYAVKYMPFISADQSEKEEGEIVGSVEDVEVVFYDRAMRQWKFRYCYWKSSQSFVFTRGWNSFVKEKNLKEKDVIAFYTCDVPNNVKTLEGQRKNFLMIDVHCFSDNGSVVAEEVSMTVHDSSVQVKKTENLVSSMLEDKETKSEENKGGFMLFGVRIECP

SEQ ID NO: 15570 - protein, 352 aa, Arabidopsis thaliana
MDEMSNVAKTTTETSGLTDSVLSLTKRMKPTEVTTTTKPALSNTTKFKGVVQQQNGHWGAQIYADHRRIWLGTFKSAHEAAAAYDSASIKLRSFDANSHRNFPWSDFTLHEPDFQECYTTEAVLNMIRDGSYQHKFRDFLRIRSQIVANINIVGSKQVLGGGEGGQESNKCFSCTQLFQKELTPSDVGKLNRLVIPKKYAVKYMPFISDDQSEKETSEGVEDVEVVFYDRAMRQWKFRYCYWRSSQSFVFTRGWNGFVKEKNLKEKDIIVFYTCDVPNNVKTLEGQSKTFLMIDVHHFSGNGFVVPEEVNKTVHEISDEEMKTETLFTSKVEEETKSEEKKGGFMLFGVRIQ

SEQ ID NO: 15571 - protein, 202 aa, Triticum aestivum
  unsure (1)..(202): unsure at all Xaa locations
MAEKNWPIHTLQRDVPPKGRGQATEKQQSMGLQILSSTPEHSSQHSSGASTATTESGAAGRLPTPLGLPVAIPDEAVTSRSASASAQSASSRFKGVVPQPNGRWGAQIYDRHARVWIGTFPDEDAAARAYDVAALRYRGLDAATNFPRTAGSXXELAFLXAAHSKAEIVDMLRKHTYSDELRRGLRRGRGIGGRAEPTPSWA

SEQ ID NO: 15572 - protein, 533 aa, Pisum sativum
MWDLNGSPSKRKDQESEGCSSPKTSLDGDEDKAKRVGVGGSVSNSSSSAIVIEEDSEEDNNNNNNRSMVKKKNSKIFGFSVTQEQEQEQEEEESLDSENFPVTRNFFPMDQEAENMVVASSGGNGTSSCSSTFPRAHWVGVKFCQSETLGSGKSMEVSSSSQPMKKSRRGPRSRSSQYRGVTFYRRTGRWESHIWDCGKQVYLGGFDTAHAAARAYDRAAIKFRGVEADINFNIEDYEEDLKQMSNLTKEEFVHVLRRQSTGFPRGSSKYRGVTLHKCGRWEARMGQFLGKKYVYLGLFDTEVEAARAYDKAAIKCNGKEAVTNFEPSIYDSELNTAEPASSGSDHNLDLSLGNSSSKHMNNTQSFGNNTSNVANHDQSNWQNGGNINKPKLVNILPKPYNRPNNMEPYGRDLHGENEALRMLSQTHLQSSSPNGIHRYGSLSRSTTNVHSFAHTNHQPPNFHFPSSSYGGRVGSDLSLSTNNHQQQQQQWQPGSHYLSSAAAASSGFPPQIRTPSSQTWLHKNGFHTLMRPS

SEQ ID NO: 15573 - protein, 296 aa, Streptomyces coelicolor A3(2)
MAERIVHRRGYRKGLGGEMCAEFLGTFVLILFGVGSVAVAVAGLPGSGRQTADFGPANWLIISWGWGLAVVFGVYVAGGISGAHLNPAVTLGFAVRRDFPWRKVLPYWLAQVVGAFVAAALVYACYRWAIDAAIAKAGETRETSLNTYSIFATFPAEYFGDSWWGPLLDQIVGTGILLLLICALIDTRNTAPMANLHPYLIGLVVVAIGLTFGTNAGYAINPARDFGPRLFTFFEGWGDIALPGTFQWFSGYWWIPIVGPLIGGVVGVLVYDLLVSPVLKARLTEREEGPATEEPS

SEQ ID NO: 15574 - protein, 355 aa, Mus musculus
MVHGFGCFVFFFLISLSSLWASEDSTCNSTLPLCHLATTLDCCKCGHSCSRESIMVAFKGVWTQAFWKAVSAEFLATLIFVLLGVGSTINWGGSENPLPVDMVLISLCFGLSIATMVQCFGHISGGHINPAVTVAMVCTRKISIAKSVFYIIAQCLGAIIGAGILYLVTPPSVVGGLGVTTVHGNLTAGHGLLVELIITFQLVFTIFASCDSKRTDVTGSIALAIGFSVAIGHLFAINYTGASMNPARSFGPAVIMGNWANHWIYWVGPIMGAVLAGALYEYVFCPDVELKRRLKEAFSKAAQQTKGSYMEVEDNRSQVETEDLILKPGVVHVIDIDRGEEKKGKDSSGEVLSSV

SEQ ID NO: 15575 - protein, 301 aa, Mus musculus
MVAFKGVWTQAFWKAVSAEFLATLIFVLLGVGSTINWGGSENPLPVDMVLISLCFGLSIATMVQCFGHISGGHINPAVTVAMVCTRKISIAKSVFYIIAQCLGAIIGAGILYLVTPPSVVGGLGVTTVHGNLTAGHGLLVELIITFQLVFTIFASCDSKRTDVTGSIALAIGFSVAIGHLFAINYTGASMNPARSFGPAVIMGNWANHWIYWVGPIMGAVLAGALYEYVFCPDVELKRRLKEAFSKAAQQTKGSYMEVEDNRSQVETEDLILKPGVVHVIDIDRGEEKKGKDSSGEVLSSV

SEQ ID NO: 15576 - protein, 323 aa, Mus musculus
MSDRAAARRWGKCGHSCSRESIMVAFKGVWTQAFWKAVSAEFLATLIFVLLGVGSTINWGGSENPLPVDMVLISLCFGLSIATMVQCFGHISGGHINPAVTVAMVCTRKISIAKSVFYIIAQCLGAIIGAGILYLVTPPSVVGGLGVTTVHGNLTAGHGLLVELIITFQLVFTIFASCDSKRTDVTGSIALAIGFSVAIGHLFAINYTGASMNPARSFGPAVIMGNWANHWIYWVGPIMGAVLAGALYEYVFCPDVELKRRLKEAFSKAAQQTKGSYMEVEDNRSQVETEDLILKPGVVHVIDIDRGEEKKGKDSSGEVLSSV

SEQ ID NO: 15577 - protein, 323 aa, Mus musculus
MSDGAAARRWGKCGHSCSRESIMVAFKGVWTQAFWKAVSAEFLATLIFVLLGVGSTINWGGSENPLPVDMVLISLCFGLSIATMVQCFGHISGGHINPAVTVAMVCTRKISIAKSVFYIIAQCLGAIIGAGILYLVTPPSVVGGLGVTTVHGNLTAGHGLLVELIITFQLVFTIFASCDSKRTDVTGSIALAIGFSVAIGHLFAINYTGASMNPARSFGPAVIMGNWANHWIYWVGPIMGAVLAGALYEYVFCPDVELKRRLKEAFSKAAQQTKGSYMEVEDNRSQVETEDLILKPGVVHVIDIDRGEEKKGKDSSGEVLSSV

SEQ ID NO: 15578 - protein, 354 aa, Mus musculus
MVHGFGCFVFFFLISLSSLWASEDSTCNSTLPLCHLATTLDCCKCGHSCSRESIMVAFKGVWTQAFWKAVSAEFLATLIFVLGVGSTINWGGSENPLPVDMVLISLCFGLSIATMVQCLGHISGGHINPAVTVAMVCTRKISIAKSVFYIIAQCLGAIIGAGILYLVTPPSVVGGLGVTTVHGNLTAGHGLLVELIITFQLVFTVFASCDSKRTDVTGSIALAIGFSVAIGHLFAINYTGASMNPARSFGPAVIMGNWANHWIYWVGPIMGAVLAGALYEYVFCPDVELKRRLKEAFSKAAQQTKGSYMEVEDNRSQVETEDLILKPGVVHVIDIDRGEEKKGRDSSGEVLSSV

SEQ ID NO: 15579 - protein, 322 aa, Mus musculus
MSDGAAARRWGKCGHSCSRESIMVAFKGVWTQAFWKAVSAEFLATLIFVLGVGSTINWGGSENPLPVDMVLISLCFGLSIATMVQCLGHISGGHINPAVTVAMVCTRKISIAKSVFYIIAQCLGAIIGAGILYLVTPPSVVGGLGVTTVHGNLTAGHGLLVELIITFQLVFTVFASCDSKRTDVTGSIALAIGFSVAIGHLFAINYTGASMNPARSFGPAVIMGNWANHWIYWVGPIMGAVLAGALYEYVFCPDVELKRRLKEAFSKAAQQTKGSYMEVEDNRSQVETEDLILKPGVVHVIDIDRGEEKKGRDSSGEVLSSV

SEQ ID NO: 15580 - protein, 300 aa, Mus musculus
MVAFKGVWTQAFWKAVSAEFLATLIFVLGVGSTINWGGSENPLPVDMVLISLCFGLSIATMVQCLGHISGGHINPAVTVAMVCTRKISIAKSVFYIIAQCLGAIIGAGILYLVTPPSVVGGLGVTTVHGNLTAGHGLLVELIITFQLVFTVFASCDSKRTDVTGSIALAIGFSVAIGHLFAINYTGASMNPARSFGPAVIMGNWANHWIYWVGPIMGAVLAGALYEYVFCPDVELKRRLKEAFSKAAQQTKGSYMEVEDNRSQVETEDLILKPGVVHVIDIDRGEEKKGRDSSGEVLSSV

SEQ ID NO: 15581 - protein, 263 aa, Mus musculus
MWELRSASFWRAIFAEFFATLFYVFFGLGASLRWAPGPLHVLQVALAFGLALATLVQTVGHISGAHVNPAVTFAFLVGSQMSLLRAFCYIAAQLLGAVAGAAVLYSVTPPAVRGNLALNTLHAGVSVGQATTVEIFLTLQFVLCIFATYDERRNGRMGSVALAVGFSLTLGHLFGMYYTGAGMNPARSFAPAILTRNFSNHWVYWVGPIIGGGLGSLLYDFLLFPRLKSVSERLSILKGARPSDSNGQPEGTGEPVELKTQAL

SEQ ID NO: 15582 - protein, 263 aa, Mus musculus
MWELRSASFWRAIFAEFFATLFYVFFGLGASLRWAPGPLHVLQVALAFGLALATLVQTVGHISGAHVNPAVTFAFLVGSQMSLLRAFCYIAAQLLGAVAGAAVLYSVTPPAVRGNLALNTLHTGVSVGQATTVEIFLTLQFVLCIFATYDERRNGRMGSVALAVGFSLTLGHLFGMYYTGAGMNPARSFAPAILTRNFSNHWVYWVGPIIGGGLGSLLYDFLLFPRLKSVSERLSILKGARPSDSNGQPEGTGEPVELKTQAL

SEQ ID NO: 15583 - protein, 271 aa, Mus musculus
MWELRSIAFSRAVLAEFLATLLFVFFGLGSALQWASSPPSVLQIAVAFGLGIGTLVQALGHVSGAHINPAVTVACLVGCHVSFLRAAFYVAAQLLGAVAGAAILHEITPVEIRGDLAVNALHNNATAGQAVTVELFLTMQLVLCIFASTDERRSDNLGSPALSIGFSVTLGHLLGIYFTGCSMNPARSLAPAVVTGKFDDHWVFWIGPLVGAVIGSLLYNYLLFPSTKSLQERLAVLKGLEPDTDWEEREVRRRQSVELHSPQSLPRGSKA

SEQ ID NO: 15584 - protein, 271 aa, Mus musculus
MWELRSIAYCRAVLAEFLATLLFVFFGLGSALQWASSPPSVLQIAVAFGLGIGTLVQALGHVSGAHINPAVTVACLVGCHVSFLRAAFYVAAQLLGAVAGAAILHEITPVEIRGDLAVNALHNNATAGQAVTVELFLTMQLVLCIFASTDERRSDNLGSPALSIGFSVTLGHLLGIYFTGCSMNPARSLAPAVVTGKFDDHWVFWIGPLVGAIIGSLLYNYLLFPSTKSLQERLAVLKGLEPDTDWEEREVRRRQSVELHSPQSLPRGSKA

SEQ ID NO: 15585 - protein, 249 aa, Vitis berlandieri x Vitis rupestris
MPKIAFGRFDDSFSLASFKAYLAEFHSTILFVFAGVGSVMAYNKLTSDAALDPAGLVAVAVAHGFALFVAVAVSANISGGHVNPAVTFGLVVGGQITILTGILYWIAQLVGSILACFLLKLVTGGLTTPVHSLGAGVGVIDAIVFEIVITFALVYTVYATAVDPKKGSLGIIAPIAIGLVVGANILAAGPFSGGSMNPARSFGPAVVSGDFKDNWIYWVGPLIGGGMGGSVYAFMYLGSDHQPLASSEF

SEQ ID NO: 15586 - protein, 289 aa, Rhodobacter sphaeroides
MKATFRVHIGRRARRSQPALRRLRRAEAPSRLEELPRPIPSSRRPFMTKKLLAELLGTFILVFFGCGAAVLMGPQIGMLGISLAFGLSIVAAAYSLGAISGAHLNPAVSLGFLMAGRMPMAEFGGYVLAQIAGALLGSLVVFLIASGKAGYVLATDGLGQNGFGAGYLGEYSMGAALIFELIATFVFVSVILAATASHVSSASTALAGLAIGLTLTGIHLVGINVTGVSVNPARSLAPALFVGGKALSDLWVFIVAPLAGGAAAGLAHASGFFRPGGIEPAPATGAATL

SEQ ID NO: 15587 - protein, 247 aa, Rhodopseudomonas palustris
MTIEETHMNTNKYLAEMIGTFWLTFAGCGSAVIAAGFPQVGIGLVGVSLAFGLSVVTMAYAIGHISGCHLNPAVTLGLAAGGRFPVKQIAPYIIAQVLGAIAAAALLYLIASGAAGFDLAKGFASNGYGAHSPGQYNLVACFVMEVVMTMMFLFVIMGSTHGKAPAGFAPLAIGLALVMIHLVSIPVTNTSVNPARSTGPALFVGGWAIGQLWLFWVAPLLGGVLGGVIYRVLSPEPTGVVEGVKAR

SEQ ID NO: 15588 - protein, 281 aa, Chloroflexus aurantiacus
MLRVRIGAHHVLCLNAGSRVIRRNWFRLFCVARRRPSMPASFLGEVFGTMVLILFGNGVVANVLLTQSKGNGGGWIVITTGWAFAVMSGVFTAAALGSPGADLNPAVTIAVMIRGGYDVGTAVMHIIAQFIGAFIGATLVWLTYLSHWEVTKDPGLKLACFSTGPAINNPVNNIITEVIGTFALVFIIFAIFSGDGATGGSPASGLGPYLVAALVWGIGLSLGGPTGYAINPARDLGPRIAHFVLPIAGKGDSNWGYSWVPVVGPIIGGSIAALLANALGM

SEQ ID NO: 15589 - protein, 247 aa, Synechocystis sp. PCC 6803
MKKYIAEFIGTFWLVLGGCGSAVFAAFIAAPGGGNTNEFGLGYLGVALAFGLTVFTGAYALGHISGGHFNPAVSFGLWMGKRFPGSQLAPYIGAQVLGAIVASLFIFIVAQGGPNFSLDGSNPLATNGFGDHSPQGYGFLAALLIEFVLTFIFLIVILGVTDKTAPAGFAPAAIGLALTLIHLISIPITNTSVNPARSTGVALFCGNPALIGQLWLFWLAPIAGALLAGFVYHNVLEDLGRPEPEAE

SEQ ID NO: 15590 - protein, 242 aa, Thermoanaerobacter tengcongensis
MSDFAKYLAEFFGTMILIWLGDGVVANVVLNKSKGQNSGWIVITAGWGFAVMVGAYTVGWLSGAHLNPAVTIGLATIGKFSWSLVPGYIIAQVLGAFVGAIIVYLMYIDHFAATEDPTAKLGTFATIPAIRNLGKNFITEAFGTAMLLIGILGITNSNNPIGGMGPLLVGLLVWAIGLSLGGPTGYAINPARDFGPRLAHAILPIPGKRDSDWGYGLIVPIFGPIVGGIIGAWIYQLIMSVH

SEQ ID NO: 15591 - protein, 234 aa, Ralstonia metallidurans
MNIGKRFTAEWLGTFWLVFGGCGAAVFAAAFPNVGIGLLGVSLAFGLTVVTMAYAIGPVSGCHLNPAVTVGLAVAGRFPVAEAPLYILAQLLGAICAAGTLLYLASANPGFDLMANGLATNGYGAASPGGYGLRAVVTTETLMTAFFLIIIIGATSYRRTRAAAPVAIGLALTLIHLISIPISNTSVNPARSTGPAIIVGGVAIQQLWVFWVAPICGAILAGLLGRLLFVNEAD

SEQ ID NO: 15592 - protein, 274 aa, Deinococcus radiodurans
MSTMKFTAAQEFVAELLGTLVLILFGCGVVAMVKLFGSSPAIPGEVVMGGYTNIVLGWGFAVLMGIFVAGTITGAHLNPAVTIALAATGRFPWAKVGYFILAQMIGAFLGAAIVFAVYHAKWLGVDPGLDHTAGIFSTFPAVPGFLPGFIDQVVGTALLVGLILAIGDKLNNPAGAAWGSLAVAFVVMAVGISFGGMNGYAINPARDLGPRLFALLAGFKNLGDINVWLVPVIGPIVGGLVGAFIYDFCIGRPLLRAGEAHVGVQGVDPEFNRQ

SEQ ID NO: 15593 - protein, 233 aa, Streptococcus pneumoniae
MMNELFGEFLGTLILILLGNGVVAGVVLPKTKSNSSGWIVITMVGIAVAVAVFVSGKLSPAHLNPAVTIGVALKGGLPWASVLPYILAQFAGAMLGQILVWLQFKPHYEAEENAGNILATFSTGPAIKDTVSNLISEILGTFVLVLTIFALGLYDFQAGIGTFAVGTLIVGIGLSLGGTTGYALNPARDLGPRIMHSILPIPNKGDGDWSYAWIPVVGPVIGAALAVLVFSLF

SEQ ID NO: 15594 - protein, 286 aa, Rhodnius prolixus
MPAATRNRRMSSICKTRIGETKDMSNVEIESSLKIEDNHLSHRPSLAVQTFSWRKCIEIFIAEVVATSLLLCLGCMSTVVGFDGSQSVHKLQPALAFGFLVSSLITSFGHISGAHMNPVVTICFYMMGTIEAFLIPIYLAAEIIGSVLGMGLLLLVTPVGIIGSRDVCTTIPNPTLNSFQALGVEFVCTSLLLLVLLGCSDVRNADKQDSVPLKFAGVIITLSLLGGPYTGASVNPVRSFAPALWSHNWTANWVYWVGPSLSGFDNTFFLPMLFSTRKKMKTCIIK

SEQ ID NO: 15595 - protein, 259 aa, Tulipa gesneriana
MPISRIAIGSPQEATQAGALKAALAEFISTLIFVYAGQGSGIAFGKLSVDGVTTPAGLVAAAIAHAFALFVAVSVGANISGGHVNPAVTFGAFLGGNITLLRGVLYIIAQLLGSSVACLLLRFTTGLGTGHFGLVAGVSIWSGLVMEIVMTCGLVYTVYATAVDPKKGDIGTIAPIAIGFIVGANILVGGAFTGASMNPARSRSGRALVSWSWTSHWVYWVGPLIGGGIAGIVYDLFFINSTHEPAPKHRLLIGGWRRR

SEQ ID NO: 15596 - protein, 248 aa, Burkholderia fungorum
MVALGKRLLVESAGTAWLVFIGCGSIVLNVGAIQQAGGVLEAALAFGLALATASYCVGSLSGGHFNPAVTVGFTVAQRFPVRDLLPYIASQIFGAIVAAALLLYVAGGRPGFDLHATEFAANGFGDHSPADYQMHSALAIEFVLSFCFVMATLVISRRHDMEPIAPLVAGACLVLVYLVSIPVTNGSVNPARSTAQALFVGDWALDQLWLFWAAPLSGGVIAGALFSFLHGKPDNHTAALAEGRGEVV

SEQ ID NO: 15597 - protein, 260 aa, Burkholderia fungorum
MRASGSIIFLGLPIMQLSKRLAAELFGTFWLVLGGCGSAVLAASFDGPVHGLGIGFVGVALAFGLTVLTMAYAIGHISGCHLNPAVSVGLTVAGRFPARDLLPYIVAQVIGAVLGAFVLSLIATGKPGFDLVASGFASNGYGERSPGHYSLAAAFICEVVMTGFFLFVILGATDKRAPAGFAPIAIGLCLTLIHLISIPVTNTSVNPARSTGPALFVGGAAVDQLWLFWLAPILGAVIAGVLYPALAESRDSNSQKLALD

SEQ ID NO: 15598 - protein, 237 aa, Burkholderia fungorum
MHPYIAEFIGTALVVLLGDGAVANVLLARTKGKGADLIVIVMGWAMAVFIAVYVTASFSGAHLNPVVTISLALAGKFAWTKVPGYVAAQMLGGMAGALLVWIAYRQHFAKEGDADVKLGVFCTAPAIRSVPHNLLTEMIATFVLILGVLYLASPQVGLGALDALPVGLLVLGIGISLGGPTGYAMSPARDLSPRLMHALLPIPGKRDSDWHYAWIPVCGPLLGGAAAACLYLYLHVH

SEQ ID NO: 15599 - protein, 245 aa, Lactococcus lactis subsp. lactis
MHSEMVQLLGEFLGTFILILLGNGVVSGVVLNKTKATGAGWVAITLGWGFAVMMGVYISGFMSPAHLNPAVTIAMAMIGSFSWSLVLPYIIAQMLGAMVASIILYLMFYPHYAETKNPADILGTFSTGPAIRQTSSNLISEIVGTAVLTTGILAFGQYAITQTSGVSPLLVGAIITAIGLSLGATTGYSLNPARDLGPRIMHAILPIKGKGDSDWSYAWIPVVGPIIGGSLGALLFNMVIQFASK

SEQ ID NO: 15600 - protein, 282 aa, Adiantum capillus-veneris
MSSVRVDSPRSSVDPSCSNGEVAVRHHKGCLAMETPSWMPPSITNAGILQKVGAELISTYILVFAGCGAAMVDEKSGGAITHFGVSAAFGLVVMIMIYSVGHISGAHMNPAVTLAFATVRHFPWAQVPAYIGAQVVAAISAAFSLRLILGGAAKIGATLPVGSDVQSLALEVITSYILMFVVSAVATDTRAIGELAGLAVGSAVALDAIFAGPICGASMNPARSIGPAVASYDFKSLWVYIVGPILGCLLGAWSYTMIKLPEQPQDLAMISQSKSFKSSRRG

SEQ ID NO: 15601 - protein, 246 aa, Methanothermobacter thermautotrophicus
MVSLTKRCIAEFIGTFILVFFGAGSAAVTLMIASGGTSPNPFNIGIGLLGELGDWVAIGLAFGFAIAASIYALGNISGCHINPAVTIGLWSVKKFPGREVVPYIIAQLLGAAFGSFIFLQCAGIGAATVGGLGATAPFPGISYWQAMLAEVVGTFLLMITIMGIAVDERAPKGFAGIIIGLTVAGIITTLGNISGSSLNPARTFGPYLNDMIFAGTNLWNYYPIYVIGPIVGAVLAALTYQYLTSE

SEQ ID NO: 15602 - protein, 231 aa, Escherichia coli O157:H7 EDL933
MFRKLAAECFGTFWLVFGGCGSAVLAAGFPELGIGFAGVALAFGLTVLTMAFAVGHISGGHFNPAVTIGLWAGGRFPAKEVVGYVIAQVVGGIVAAALLYLIASGKTGFDAAASGFASNGYGEHSPGGYSMLSALVVELVLSAGFLLVIHGATDKFAPAGFAPIAIGLALTLIHLISIPVTNTSVNPARSTAVAIFQGGWALEQLWFFWVVPIVGGIIGGLIYRTLLEKRN

SEQ ID NO: 15603 - protein, 272 aa, Staphylococcus aureus subsp. aureus Mu50
MNVYLAEFLGTAILILFGGGVCANVNLKRSAANGADWIVITAGWGLAVTMGVFAVGQFSGAHLNPAVSLALALDGSFDWSLVPGYIVAQMLGAIVGATIVWLMYLPHWKATEEAGAKLGVFSTAPAIKNYFANFLSEIIGTMALTLGILFIGVNKIADGLNPLIVGALIVAIGLSLGGATGYAINPARDLGPRIAHAILPIAGKGGSNWSYAIVPILGPIAGGLLGAVVYAVFYKHTFNIGCAIAIVVVIITLILGYILNKSSKKGDIESIY

SEQ ID NO: 15604 - protein, 230 aa, Pseudomonas putida KT2440
MSLGKRMGAELIGTFWLVLGGCGSAVLAASSPLGIGVLGVAFAFGLTVLTMAFAIGHISGCHLNPAVSFGLVVGGRFPAKELLPYVIAQVIGAILAAGVIYLIASGKAGFELSAGLASNGYADHSPGGYTLGAGFVSEVVMTAMFLVVIMGATDARAPAGFAPIAIGLALTLIHLISIPVTNTSVNPARSTGPALFVGGWALQQLWLFWVAPLIGAAIGGALYRGLAKEP

SEQ ID NO: 15605 - protein, 288 aa, Beta vulgaris
MTKDVEAVSEQQQPEFSTKDYHDPPPAPLIDMEELKKWSFYRAIIAEFVATLLFLYVTVLTVIGHFRSADLENGGENCTGVGILGIAWAFGGMIFILVYCTAGISGGHINPAVTFGLFLARKVSLIRALAYMVAQCLGAICGVGFVKAFQSAYYDRYGGGANQMAHGYNKGTGLGAEIIGTFVLVYTVFAATDPKRSARDSHVPVLAPLPIGFAVFMVHLATIPITGTGINPARSFGAAVIFNEEKSWNEHWIFWVGPFVGAAIAAFYHQYILRAGAIKALGSFRSSA

SEQ ID NO: 15606 - protein, 281 aa, Beta vulgaris
MTKEVSEEAQVHQHGKDYVDPPPAPLFDMGELKLWSFWRAVIAEFIATLLFLYITVATVIGYKNETDPCATVGLLGIAWSFGGMIFILVYCTAGISGGHINPAVTFGLFLARKVSLLRAFFYMVGQCAGAICGVGLVKAFMSGAYVRLGGGANSVQPGYNKGTALGAEIIGTFVLVYTVFSATDPKRSARDSHVPILAPLPIGFAVFMVHLATIPITGTGINPARSFGAAVIFNDKKAWDDHWIFWVGPFVGALAAAAYHQYILRAAAIKALGSFRSNPTN

SEQ ID NO: 15607 - protein, 234 aa, Listeria innocua
MSAYLAEFIGTMVLIMFGNGLLAGLTLNKSLSQGANWVVVTFGWGFAVMIGIYVAGAYSGAHLNPAVTIALAVGGSFSWAAVVPYIIAQIAGAFVGASIIILHYYPHFKATPQEIDTHGIFSTGPAIRNTPFNLISEIIATFAFIFGLLMIGENSFTNGLNPLILGFLVVAIGMSFGPTTGYAINPARDLGPRLAYFLLPVPNKSGSDWRYAWIPIVGPIIGGLLAIGLFNILL

SEQ ID NO: 15608 - protein, 272 aa, Listeria innocua
MIDTSLATQFLGEVIGTAILIILGAGVVAGVSLKKSKAENGGWVVVTLAWGLGVTMGVYVSGYMSMAHLNPAVTIGMALAGAFPWNYVLPYIVAQFIGAFIGATLVWLHYYPHWKKTEDKPTKLGVFATAPAIRHFTSNFFGEALGTFMLVFGLLSLGANSFSDGLNPLVVGALIVAIGMSLGGTTGYAINPARDLGPRIAHFVWPISGKGGSDWGYSWVPVIGPIMGGALGALGYNAIINGELGMWFWVFAVLFVLILILTMQLDKKKDLA

SEQ ID NO: 15609 - protein, 234 aa, Listeria monocytogenes EGD-e
MSAYLAEFIGTMVLIMFGNGLLAGLTLNKSLSQGANWVVVTFGWGFAVMIGIYVAGAYSGAHLNPAVTIALAVGGSFPWADVVPYIIAQIAGAFVGASIVILHYYPHFKATPPEIDTHGIFSTGPAIRNTPFNLISEIIATFAFIFGLLMIGANSFTDGLNPLILGFLVVAIGMSFGPTTGYAINPARDLGPRLAYFLLPVPNKSGSDWRYAWIPIVGPIIGGLLAIGLFNILL

SEQ ID NO: 15610 - protein, 272 aa, Listeria monocytogenes EGD-e
MIDTSLATQFLGEVIGTAILIILGAGVVAGVSLKRSKAENGGWVVITLAWGLGVTMGVYVSGYMSMAHLNPAVTIGMALAGAFPWNYVLPYILAQFIGAFIGATLIWLHYYPHWKQTEDKPTKLGVFATAPAIRHFTSNFFGEALGTFILVFGLLSLGANSFSDGLNPLVVGALIVAIGMSLGGTTGYAINPARDLGPRIAHFVWPISGKGGSDWGYSWVPVIGPIMGGALGALGYNAIINGELGMWFWVFAVLFVLILILTMQLDKKKDLA

SEQ ID NO: 15611 - protein, 222 aa, Streptococcus pneumoniae TIGR4
MKKFVAELIGTFMFVFVGTGAVVFGNGLDGLGHLGIAFAFGLAIVVAAYSIGTVSGAHLNPAVSIAMFVNKRLSSSELVNYILGQVVGAFIASGAVFFLLANSGMSTASLGENALANGVTVFGGFLFEVIATFLFVLVIMTVTSESKGNGAIAGLVIGLSLMAMILVGLKITGLSVNPARSLAPAVLVGGAALQQVWIFILAPIAGGVLAALVAKNFLGTEE

SEQ ID NO: 15612 - protein, 234 aa, Streptococcus pneumoniae TIGR4
MMNELFGEFLGTLILILLGNGVVAGVVLPKTKSNSSGWIVITMGWGIAVAVAVFVSGKLSPAYLNPAVTIGVALKGGLPWASVLPYILAQFAGAMLGQILVWLQFKPHYEAEENAGNILATFSTGPAIKDTVSNLISEILGTFVLVLTIFALGLYDFQAGIGTFAVGTLIVGIGLSLGGTTGYALNPARDLGPRIMHSILPIPNKGDGDWSYAWIPVVGPVIGAALAVLVFSLF

SEQ ID NO: 15613 - protein, 222 aa, Streptococcus pneumoniae R6
MKKFVAELIGTFMLVFVGTGAVVFGNGLDGLGHLGIAFAFGLAIVVAAYSIGTVSGAHLNPAVSIAMFVNKRLSSSELVNYILGQVVGAFIASGAVFFLLANSGMSTASLGENALANGVTVFGGFLFEVIATFLFVLVIMTVTSESKGNGAIAGLVIGLSLMAMILVGLKITGLSVNPARSLAPAVLVGGAALQQVWIFILAPIAGGVLAALVAKNFLGTEE

SEQ ID NO: 15614 - protein, 234 aa, Streptococcus pneumoniae R6
MMNELFGEFLGTLILILLGNGVVAGVVLPKTKSNSSGWIVITMGWGIAVAVAVFVSGKLSPAHLNPAVTIGVALKGGLPWASVLPYILAQFAGAMLGQILVWLQFKPHYEAEENAGNILATFSTGPAIKDTVSNLISEILGTFVLVLTIFALGLYDFQAGIGTFAVGTLIVGIGLSLGGTTGYALNPARDLGPRIMHSILPIPNKGDGDWSYAWIPVVGPVIGAALAVLVFSLF

SEQ ID NO: 15615 - protein, 251 aa, Anopheles gambiae str. PEST
KMTESAGVKQIVGVSDITENRNIWRMLVAEFLGTFFLVAIGIGSTTGWTDYSPTLTQIAFTFGLVVATLAQAFGHVSGCHINPAVTIGLIVTADVSILKGAFYIVSQCIGAIAGAAVIKAATPSEVVGGLGVTGIAPGLSTGQGVLIEALITFMLVFVVHGVCDNRRTDVKGSAPLAIGLSITAGHLAAIKYTGASMNPARSFGPAVVMGNYTDLWVYWVGPIVGGIVAGAVYRLFFKVRKGDEESNSYDF

SEQ ID NO: 15616 - protein, 241 aa, Agrobacterium tumefaciens str. C58 (Cereon)
MSRKFISEFLGTFWLVFGGCGSAVFAAAFPELGIGFLGVAFAFGLTVLTMAYAVGGISGGHFNPAVSVGLTVAGKFPAANLVPYIVAQVLGAVVAAAALYVILTGKAGAEIGGFAANGYGEHSPGGYSLLSALLIEIILTAFFLVVILGSTHGRVPVGFAPVAIGLALTLIHLISIPVTNTSVNPARSTGQALFVGGWALQQLWLFWLAPILGGAIGAVVWKIFGEEEKAGHAGSVQPAKT

SEQ ID NO: 15617 - protein, 228 aa, Agrobacterium tumefaciens str. C58 (Cereon)
MGRKLLAEFFGTFWLVFGGCGSAVFAAAFPELGIGFTGVALAFGLTVLTMAYAVGGISGGHFNPAVSVGLTVAGRFPASSLVPYVIAQVAGAIVAAAALYVIATGKAGIDLGGFASNGYGEHSPGGYSLVSALLIEIILTAFFLIVILGSTHGRVPAGFAPIAIGLALTLIHLISIPVTNTSVNPARSTGQALFVGGWALQQLWLFWLAPIVGGAAGAVIWKLFGEKD

SEQ ID NO: 15618 - protein, 236 aa, Streptococcus pyogenes MGAS8232
MNFIGELLGTFILVLLGDGVVSACILNKTKAQNSGWIAIVLGWGIAVTVAVYISGFMSGAHLNPAVTLAMAAIGSLPWSQVVTYLVAQFLGAMLGALVLYLHYYPHWNETKDAGTILACFSTGPAIRHTWSNLFGEALGTAVLVITVMAIGPNKVAAGFGPIIVGFVVMAVGFSLGATTGYAINPARDLGPRIMHALLPIPNKGDSDWSYAWIPVLGPILGGVAGALIYQAILNMM

SEQ ID NO: 15619 - protein, 246 aa, Methanothermobacter thermautotrophicus str. Delta H
MVSLTKRCIAEFIGTFFLVFFGAGAAAITLMIASGGTAPNPFNIGIGLLGGLGDWVAIGLAFGFAIAASIYALGNISGCHINPAVTIGLWSVKKFPGRDVVPYIIAQLLGAAFASFIFLQCAGITAATIGGLGATAPFPGIGYWQAMLAETVGTFLLMITIMGIAVDERAPKGFAGIIIGLTVAGIITTIGNITGSSLNPARTFGPYLNDMVFAGTNLWNYFPIYVIGPVVGAVLAALTYQYLTSE

SEQ ID NO: 15620 - protein, 274 aa, Magnetospirillum magnetotacticum
PAPRHAHRSLRTDRSMSASRPHETRGVAMDHDTLRRTTAEFFGTFWLTFGGCGAAVLSAAFPELGIGFLGVAFAFGFTVLTMAYAVGHISGGHFNPAVTLGLWSARRCANRHVLPYIVAQVIGAIVAAFALYTIASGKAGWVPNGFASNGYGALSPGKYGLAACLLTEVLTTFIFLFIIVGTTSKGAATGFAGIPIGLALVLIHLISIPVTNTSVNPARSTGPALFAGGEYVAQLWMFWLAPIVGAIAAGAMARWLYEPADVVDTTIVERRAEV

SEQ ID NO: 15621 - protein, 221 aa, Bacillus anthracis str. A2012
MLKKAIAEFIGTFVLVLFGTGVAVIGGGIEGIGTLGIAMAFGLSIVAMAYSIGTISGCHINPAVSVAMFINKRMNAMELCYYVLAQILGGLLGAATLVTILQSAKTPLDNLGQNGFGTLGLSGAFLVEFILTFVFILVIVAVTGKKGSSSLAGLVIGFTLVLVHLLGIPLTGTSVNPARSIAPALFVGGEALSQLWVFIVAPILGGIVAAIVGKFILNTEK

SEQ ID NO: 15622 - protein, 250 aa, Bacillus anthracis str. A2012
WCKFKEVVCESSGWIVITMGWGLAVAVAAYVVGSISGAHLNPALTIGLAFKGAFPWGDVPGYIAAQMIGAIIGAVIVYLHYLPHWKETEDPGTKLGVFATGPAIPNTFANLLSEMIGTFVLVFGILAIGANKFADGLNPFIVGFLIVSIGLSLGGTTGYAINPARDLGPRIAHFFLPIAGKGGSNWKYAWIPVVGPILGGSLAGLFHQVVFEGKQNAALIYVIIATVIVLAISYMTSKKSGSNTNSRKVA

SEQ ID NO: 15623 - protein, 268 aa, Chlorobium tepidum TLS
MVSGNDNNHHAAQRARMLLTQIAPNFLDPKHEWQRIFAELWGTFLLVLVAAGGPVAATSSGNHAGDALLPVAPGLMVMAIIYFMGTVSGAHLNPAVTLAFAMRRNFPWVRVPGYILAQVAGGWLAALFLGFMFGNAAVAPGMTLPGHEVTPLKALVMEMVLTAALVNTILGTSSGARNIGTNGAIAVGGYIALAGMWAAPVSGASMNPVRSLAPALVCGDTTLAWVYVAGPIAGALIGVVFEWILKGPPTTAGTVAAQGTLDIDDREG

SEQ ID NO: 15624 - protein, 235 aa, Clostridium perfringens str. 13
MVNQFLAELFGTALLILLGDGVVANIALKKTKGNGADLIVVTVGWAIAVAIPVYIFSRVSGAVFNPAVTIALGITGGLTWSQVIVFCIAQFIGAFIGAVLVYLTYYTHFESTEDHDAKLGTFCTIPAIRNFKWNFFTEFIGTFVLMFGILGLGDAKMADGIMPIAVGLLILVIGVSLGGPTGYAINPARDFSPRLAHFLLPMKNKGGSDWAYAWIPIVGPILGAIAGAMVYTNIF

SEQ ID NO: 15625 - protein, 233 aa, Shigella flexneri 2a str. 301
MDMFRKLAAECFGTFWLVFGGCGSAVLAAGFPELGIGFAGVALAFGLTVLTMAFAVGHISGGHFNPAVTIGLWAGGRFPAKEVVGYVIAQVVGGIVAAALLYLIASGKTGFDAAASGFASNGYGEHSPGGYSMLSALVVELVLSAGFLLVIHGATDKFAPAGFAPIAIGLALTLIHLISIPVTNTSVNPARSTAVAIFQGGWALEQLWFFWVVPIVGGIIGGLIYRTLLEKRD

SEQ ID NO: 15626 - protein, 250 aa, Leuconostoc mesenteroides subsp. mesenteroides ATCC 8293
MRKYIAEFLGTFMLVFFGTGSVVYSAATTQSAITVGLAFGLSLAVAIYAFGHISGGHFNPAVSLAMAIQKRLPWVTFIGYVIAQLLGAIVASAAVYGGVTAYLKSSTVTTALSGQSMTVKQFVSLAGLGQTNFSDGSGWYAFAFELVLTFLFVLVIAIVTKLNNVPAPFIIGIWLAVLIVVVLPITGGAFNPARALAPAIFVQGKALTHVWVYLVADLLGGALAAFAANFLDKKEEVASTPKEVKETKKA

SEQ ID NO: 15627 - protein, 228 aa, Brucella suis 1330
MLNKLSAEFFGTFWLVFGGCGSAILAAAFPELGIGFLGVALAFGLTVLTMAYAVGGISGGHFNPAVSLSLTVAGRLPAKDLIPYWVAQVLGAIATAAILYVIASGKDGFSAGGLASNGYGELSPGGYSMMAGLLIEIILTAFFIIIILGSTSSLAPAGFAPIAIGFGLTLIHLVSIPVTNTSVNPARSTGVALFADTAALSQLWLFWVAPLVGAVIGAIIWKGLLGRD

SEQ ID NO: 15628 - protein, 231 aa, Pseudomonas fluorescens PfO-1
MSLFKRSVTELLGTFWLVLGGCGSAVIAASSPLGIGVLGVALAFGLTVLTMAFAIGHISGCHLNPAVSVGLVVGGRFPAKELPAYVIAQVLGGILAAALLYHIASGKEGFDIAAGLASNGYGEHSPGKYSMASGFVTELVMTAMFVVIILGATDKRAPAGLAPIAIGLALTLIHLISIPVTNTSVNPARSTGPALMVGGWAIAQLWMFWVAPLLGAVVGGVLYRWLGKEDS

SEQ ID NO: 15629 - protein, 232 aa, Streptococcus agalactiae 2603V/R
MDIFGEFLGTALLVLLGNGVVAGVVLPKTKNHNSGWIVITFGWGLAVAIAALVSGNISPAHLNPAVSLAFAIKGDLAWGTAILYMIAQIIGAMLGSLLVYLQFRPHYEAAENRADILGTFATGPALKDNFSNFLSEVLGTLVLVLTIFAIGKYNMPPGVGTMSVGMLVVGIGLSLGGTTGYAINPARDFGPRLLHALLPMKNKGDSDWTYSWIPIVGPMVGAILAALIFAMM

SEQ ID NO: 15630 - protein, 237 aa, Streptococcus agalactiae 2603V/R
MTQFLGEFLGTFILVLLGDGVVAGNVLSKTKEEGTGWTAIVFGWGIACTVAVYVSGLFSPAHLNPAVTLAMASIGAISWGQVIPFIIAQMLGAMVAATILWLHYYPHWKETKDSGLILASFSTGPAIRHTPSNLLGEIIGTAILVITIMAIGPSKVAAGLGPIIVGIVIFAVGFSLDPTTGYAINPARDLGPRLMHAILPIENKGNSDWSYAWIPVVGPIIGGVLGAILYNIALTLV

SEQ ID NO: 15631 - protein, 229 aa, Pseudomonas aeruginosa PAO1
MKQYGAEFFGTFWLVLGGCGSAVLAAGVPELGIGYLGVALAFGLSVLTMAYAIGPISGAHLNPAVSVGLWVGGRFPASQLLPYVVAQVLGGLAAGGVLYLIASGKAGFDLAAGFASNGYGEHSPGGYSLQAALVSEVVLTGMFLLIILGATSKRAPQGFAPIAIGLTLTLIHLISIPVTNTSVNPARSTAVALYVGDWAVSQLWLFWVAPILGAVLGALAYRLIGDKND

SEQ ID NO: 15632 - protein, 232 aa, Streptococcus agalactiae NEM316
MDIFGEFLGTALLVLLGNGVVAGVVLPKTKNHNSGWIVITFGWGLAVAIAVLVSGNISPAHLNPAVSLAFAIKGDLAWGTAILYMIAQIIGAMLGSLLVYLQFRPHYEAAENKADILGTFATGPALKDNFSNFLSEVLGTLVLVLTIFAIGKYNMPPGVGTMSVGMLVVGIGLSLGGTTGYAINPARDFGPRLLHALLPMKNKGDSDCTYSWIPIVGPMVGAILAALIFAMM

SEQ ID NO: 15633 - protein, 237 aa, Streptococcus agalactiae NEM316
MTQFLGEFLGTFILVLLGDGVVAGNVLSKTKEEGTGWTAIVFGWGIACTVAVYVSGLFSPAHLNPAVTLAMASIGAISWGQVIPFIIAQMLGAMVAATILWLHYYPHWKETKDSGLILASFSTGPAIRHTPSNLLGEIIGTAILVITIMAIGPSKVAAGLGPIIVGIVIFAVGFSLGPTTGYAINPARDLGPRLMHAILPIENKGDSDWSYAWIPVVGPIIGGVLGAILYNIALTLI

SEQ ID NO: 15634 - protein, 229 aa, Shewanella oneidensis MR-1
MSQKMAAEFLGTLWLVLGGCGSAVLAAAFPEVGIGLLGVSLAFGLTVLTMAFAIGHISGCHLNPAVSFGLWAGGRFPTSELLPYIIAQVAGGIAGAGVLYLIASGQEGFSLAAGFASNGFGEHSPGGYSMISVMICEIVMTLFFLLVILGSTDERAPKGFAPIAIGLCLTLIHLISIPISNTSVNPARSTGPALFVGDWAVSQLWLFWAAPIIGAILAGVIYRYFNAAK

SEQ ID NO: 15635 - protein, 234 aa, Clostridium tetani E88
MSAFMGELLGTMILILLGNGVVANNVLKHSKGEGSGWIVITTGWAIAVAIPVYIFGPISGAHFNPAVTIAFASIGQFSWADVPGYIIAQLVGAIIGATLVWLTYLPHWEATEDQATKLAAFSTAPAIKNTTANLITEIIGTFFLVFGILGVANTSMADGLAPLVVGLIILAAGVSLGGPTGYAINPARDLGPRIAHAILPIKGKGDSDWGYAWIPIVGPIIGGLIGAIFFNIMF

SEQ ID NO: 15636 - protein, 231 aa, Vibrio vulnificus CMCP6
MNKYLAELFGTFWLVLGGCGSAVLAAAFPDVGIGLLGVSLAFGLTVLTMAFAIGHISGCHLNPAVTIGLWAGGRFEAKEIVPYILAQVIGGVIAGGVLYTIASGQMGFDATSSGFASNGYGEHSPGGYSLTSALVTEVVMTMMFLLVILGATDQRAPQGFAPIAIGLCLTLIHLISIPVTNTSVNPARSTGVALYVGDWATAQLWLFWVAPILGALLGAVAYKLISGSNKD

SEQ ID NO: 15637 - protein, 240 aa, Lactobacillus plantarum WCFS1
MMKDPLALQLLGEFLGTFILILLGDGVVAGVTLNKSKAQNAGWVAITLGWGFAVTMGVYASSFMSPAHLNPAVSLGMAVAGKFPWAYVIPYSAAQIAGGVIGGLVVWLHYYPHWQATKDAGAILGIFATGPGIRRYFWNFISEVIGTFVLVFGLLAFTKGQFTAGLNPIVVGILIIAIGLSLGGTTGYAINPARDLGPRIAHAVLPIANKGTSDWAYSWVPIAGPLVGGALGALLFNVLP

SEQ ID NO: 15638 - protein, 216 aa, Lactobacillus plantarum WCFS1
MRKYLAEFLGTFMLVFLGTATVVIAKGDVLAIGLAFGLAITVSAYAFGGISGGHFNPAVTTAMLINRRIDAADAIGYIIAQIIGAIVASAAVKSFVSALGLSATLLGQTDFPKIGSGMAFFVEALVTFLFLMVILNVTSNDHGNADFAGLTIGVTLAFLIIVALNLTGGSLNPARSIGPAIFAGGSALSHLWVYILAPEVGAILAAFCARVMGSED

SEQ ID NO: 15639 - protein, 249 aa, Methanosarcina barkeri
MTVPNLMKRALAELVGTYVLVFLGTGSVITTVLLMEGWEAFPGNQFYIGIDIAAWFAIGMSFAIAITSMIYAFGHISGTHINPAVSLALWATGRFPTKDLPAYIISQLIGASLASFTLVAILGMRAVDAGLGATSMFYGVGYGQAIFCEAVCTFFLMLTIMGTAVDRRAPPGFAGLAIGLVVAADVIVVGNITGSSLNPARTFGPYLAESLLGGANLWAQFPIYIIGPIAGALVAAFLYDFIAEPKKAD

SEQ ID NO: 15640 - protein, 276 aa, Oceanobacillus iheyensis HTE831
MSEFIAELVGTMILIIFGGGVVAGVVLKKSKAEGTGWVLITLGWGLAVALGVYAVGNFTGAHINPAVTIGFAAVGDFPWSKVPLYILAQVIGAIIGAIIVFLNYLPHWKVTESKEDKLGVFATGPAIRSPFSNLISEMIGTFALLLGLMFIGSNDFTEGLNPLIVGALIAAIGMSLGGTTGYAINPARDLGPRIAHAILPIPGKGSSDWGYAWIPVVGPIIGGVYGALFYDSVFLANYTFPFWVMTIFVIVLFIGAAVSELKTGSNPAEKMNQKLR

SEQ ID NO: 15641 - protein, 285 aa, Pseudomonas syringae pv. tomato str. DC3000
MTIALKQPTLTGQCVAEFLGTALMIFFGTGCVAALKVAGATFGLWEICIIWGMAVSMGIYLSAGISGAHLNPAVSIALSLFAGFEKRKLPFYISAQIAGAFCGAGLVYLLYISLFFDFEHAHHIIRGSEQSLELASVFSTYPNPAISVGQAFLVEVVITTILMGVIMALGDDNNGLPRGALAPLLIGLLVAVIGSAMGPLTGFAMNPARDFGPKLMTFFAGWGEIAFTGGRDIPYFLVPIFAPILGACLGAAGYRALIARHLPSTVTVENEKEAPVVRGKVQASS

SEQ ID NO: 15642 - protein, 232 aa, Vibrio parahaemolyticus RIMD 2210633
MNKYLAEAFGTFWLVLGGCGSAVLAAGFPDVGIGLLGVALAFGLTVLTMAFAIGHISGCHLNPAVTVGLWAGGRFDTKDVAPYIIAQVIGGLIAGGILYVIATGQAGFDVVGSGFAANGYGEHSPGQYSMLAALVSEIVMTMMFLIVIMGATDKRAPQGFAPIAIGLCLTLIHLISIPVTNTSVNPARSTAVAMYVGDWAVSQLWLFWVAPIVGGVLGAVIYKNLLGKESND

SEQ ID NO: 15643 - protein, 274 aa, Bacillus subtilis subsp. subtilis str. 168
MTAFWGEVIGTMLLIIFGAGVCAGVNLKKSLSFQSGWIVVVFGWGLGVAMAAYAVGGISGAHLNPALTIALAFVGDFPWKEVPVYIAAQMIGAIIGAVIIYLHYLPHWKSTDDPAAKLGVFSTGPSIPHTFANVLSEVIGTFVLVLGILAIGANQFTEGLNPLIVGFLIVAIGISLGGTTGYAINPARDLGPRIAHAFLPIPGKGSSNWKYAWVPVVGPILGGSFGGVFYNAAFKGHITSSFWIVSVILVVVLLGLYVYTKSHSAKTLSNSKYI

SEQ ID NO: 15644 - protein, 246 aa, Archaeoglobus fulgidus DSM 4304
MTMTLAKRFTAEVVGTFILVFFGPGAAVITLMIANGADKPNEFNIGIGALGGLGDWFAIGMAFALAIAAVIYSLGRISGAHINPAVTIALWSIGRFPGREVVPYIVAQFIGAALGSLLFLACVGPAAATVGGLGATAPFPGIGYGQAILTEAIGTFLLMLVIMGVAVDERAPPGFAGLVIGLTVGGIITTIGNITGSSLNPARTFGPYLGDSLMGINLWQYFPIYVIGPIVGAVAAAWLYNYLAKE

SEQ ID NO: 15645 - protein, 254 aa, Borrelia burgdorferi B31
MNYTKFQEFISEFLGTFILLALGTGSVAMTVLFSSSPEIPGEIIKGGYTNIVFGWGLGVTFGIYTAARMSGAHLNPAVSIGLASVGKFPVSKLLHYIVAQILGAFTGALMTLVVFYPKWIEMDPGLENTQGIMATFPAVPGFLPGFIDQIFGTFLLMFLISVVGDFTKKHSDNPFIPFIVGAVVLSIGISFGGMNGYAINPARDLGPRILLLFAGFKNHGFNNLSIVIVPIIGPIIGAILGATIYEFTLKNNKD

SEQ ID NO: 15646 - protein, 240 aa, Bradyrhizobium japonicum USDA 110
MDMKKYAAEAIGTFWLTFAGCGSAVIAAGFPQVGIGLVGVSLAFGLSVVTMAYAIGHISGCHLNPAVTVGLAAGGRFPAGQILPYVIAQVCGAIVAAELLYIIASGAPGFDVTKGFASNGYDAHSPGQYSMMACFLTEVVMTMMFLFIIMGATHGRAPAGFAPLAIGLALVMIHLVSIPVTNTSVNPARSTGPALFVGGWAMAQLWLFWVAPLIGGALGGVIYRWLSEEPTGVVAGAKAA

SEQ ID NO: 15647 - protein, 228 aa, Brucella melitensis 16M
MLNKLSAEFFGTFWLVFGGCGSAILAAAFPELGIGFLGVALAFGLTVLTMAYAVGGISGGHFNPAVSLGLTVAGRLPAKDLIPYWVAQVLGAIAAAAILYVIASGKDGFSAGGLASNGYGELSPGGYSMMAGLLIEIILTAFFIIIILGSTSSLAPAGFAPIAIGFGLTLIHLVSIPVTNTWVNPARSTGVALFADTAALSQLWLFWVAPLVGAVIGAIIWKGLLGRD

SEQ ID NO: 15648 - protein, 221 aa, Enterococcus faecalis V583
MKKAIAECLGTFILVFFGTGTAVLGNGMEGIGTTGIALAFGLTIVAAAYSIGTISGAHLNPAVSIGMWLNKRMTTMELIYYVVGQIVGGLIASFALLSILKGAGKSIENLGQNGVGELSVAGALTVEIILTFIFVLVVMTVTSAKKGNASLAGIVIGLTLTMIHLVGIPLTGTSVNPARSIAPAVFAGGSALSELWIFIVAPLIGGLLAALVAKFVLDTEE

SEQ ID NO: 15649 - protein, 222 aa, Bacteroides thetaiotaomicron VPI-5482
MIGTMVLVLMGCGSAVFAGSMAGTVGAGVGTVGVALAFGLSVVAMAYAIGGISGCHINPAITLGVFLSGRMNGKDAGMYMLFQVIGAIIGSAILYALVTTGGHDGPTATGSNGFGDGEMLQAFIAEVVFTFIFVLVVLGSTDPKKGAGAFAGLAIGLSLVLVHIVCIPITGTSVNPARSIGPALFQGGEALSQLWLFIVAPFVGAAVSALVWNYFGDKNEKK

SEQ ID NO: 15650 - protein, 278 aa, Bacillus cereus ATCC 14579
MWRDTMSAFLGELIGTALLIVLGGGVCAGVSLKKSFAKDSGWIVITMGWGLAVAVAAYAVGSISGAHLNPALTIGLAFKGAFPWSDVPGYIVAQMIGAIIGAVIVYLHYLPHWKETEDPGTKLGVFATGPAIPNTFANLLSEMIGTFVLVFGILAIGANKFADGLNPFIVGFLIVSIGLSLGGTTGYAINPARDLGPRIAHFFLPIAGKGGSNWKYAWIPVVGPILGGSLAGLFHQVVFEGKQNSALIYVIIATVIVLAISYMTSKKSGSNTNSRKVA

SEQ ID NO: 15651 - protein, 221 aa, Bacillus cereus ATCC 14579
MLKKAIAEFIGTFVLVLFGTGVAVTGGGIEGIGILGIAMAFGLSIVAMAYSIGTISGCHINPAVSVAMFINKRMNAMELCYYVLAQILGGLLGTATLVTILKSAKTPLDNLGQNGFGTLGLSGAFLVEFILTFVFILVIVAVTGKKGSSSLAGLVIGFTLVLIHLLGIPLTGTSVNPARSIAPALFVGGEALSQLWVFIVAPILGGIFAAIVGKFILNTEK

SEQ ID NO: 15652 - protein, 281 aa, Streptomyces avermitilis MA-4680
MAERLKRLGLIGELSAEFAGTMILILFGAGVVAQVVAGGALTTPPGGLGNHDSIAWAWGIGVTMGVYVAARLSGAHLNPAVTVTLAAFKGFPWSKVAPYAVAQTLGAFVAALLVRWNYTEALAKADPGHTLKTQGVFSTLPANGNPNLPVHEWGAFRDQVIGTAILLLLILAITDLLNTPPGANLAPFIIGLVVVAIGMAWGTNAGYAINPARDFGPRLASFITGYGSAWRDQYGNFYFWVPIIGPLIGGLLGGVVYKFFVGRFLPTAEPEPPGRVPTPEA

SEQ ID NO: 15653 - protein, 249 aa, Streptomyces avermitilis MA-4680
MSNGDIFVGEIIGTAILILFGAGVCAAVTLRYSKARASGWVVIAFGWGFGVLAGAYTAAPLSGGHLNPAVTIGIAIDTGTWGKVWIYLLGQLVGAVLGAVLAYLVYLAQFQANVRKEGTTEGTADEPVPTLGIFSTIPEIRNPVANLITEIIATIALVLPILAFGLTKGLGESGITVLIVSLLVVGIGLSLGGPTGYAINPARDLGPRIVHTFLPIPNKGTSDWGYAWIPVVGPLIGGALAGLIYHVAF

SEQ ID NO: 15654 - protein, 234 aa, Thermotoga maritima
MSVYLAEFLGTMLLIILGDGVVANVVLKKSKGHNSGWIVITTGWGLAVAMSVYLVGRISGAHINPAVTIGLAFIGQFPWSKVPGYIFSQILGAFVGAILVYLTYLPHWKETDDPDAKLAVFCTGPAVRKYGANLLTEIIGTMVLLMGVLGIGANKLADGLNPLLVGFLVWSIGLSLGGPTGYAINPARDFGPRLAHAILPIPGKRDSDWSYSWVPIIGPIIGGILGASLYNWLF

SEQ ID NO: 15655 - protein, 228 aa, Brucella melitensis biovar Abortus
MLNKLSAEFFGTFWLVFGGCGSAILAAAFPELGIGFLGVALAFGLTVLTMAYAVGGISGGHFNPAVSLGLTVAGRLPAKDLIPYWVAQVLGAIAAAAILYVIASGKDGFSAGGLASNGYGELSPGGYSMMAGLLIEIILTAFFIIIILGSTSSLAPAGFAPIAIGFGLTLIHLVSIPVTNTSVNPARSTGVALFADRAALSQLWLFWVAPLVGAVIGAIIWKGLLGRD

SEQ ID NO: 15656 - protein, 272 aa, Thermus aquaticus
MSPFLGELIGTALLIIFGAGVCAGVNLKKSYAANSGWIVITMGWGLAVAVAVYAVGQYSGAHLNPALTVALALAGDFPWKDVPGYIAAQVLGAVMGAVIVYLHYWPHWKETDDPGVKLGVFATGPAVPNAAANLLSEIIGTFVVGVAILAIGANQFADGLNPFVVGFLIVAIGLSLGGTTGYAINPARDFGPRLAHFLLPIPGKGSSNWAYAWVPIVGPLLGGALGSLVYKAVFLGKPTGALWGVLAATAVVLAAAKMAKGKTANAASRRSL

SEQ ID NO: 15657 - protein, 257 aa, Rhizobium etli
MKKYVCEFFGTFTLVFLGCGTLLYMRQEVGLLGVALAFGTTVVAMAYTIGPVSGAHLNPAVSLGFLVSRRLRVWDFLAYVSAQCAGAIAAAGTLYLIAMNKVGGYDITLEGFAQTGWVVYGWRAAFLFEFIATFLFVTVFLKCTAGRGAVARLAIGLALVAIHLGGITVSGSSVNPARSIGPALFAGGAALSQLWLYICAPMLGAIAAGLLQLRGIVASSEPQSLRQFESREMTSDISSPVSFFRHRRRGIPKRESH

SEQ ID NO: 15658 - protein, 249 aa, Vitis vinifera
MPKIAFGRFDDSFSLASFKAYLAEFHPTILFVFAGVGSVMAYNKLTSDAALDPAGLVAVAVAHGFALFVAVAISANISGGHVNPAVTFGLVVGGQITILTGILYWIAQLVGSILACFLLKLVTGGLTTPVHSLGAGVGVIDAIVFEIVITFALVYTVYATAVDPKKGSLGIIAPIAIGLVVGANILAAGPFSGGSMNPARSFGPAVVSGDFKDNWIYWVGPLIGGGMGGSVYAIMYMGSDHQPLASSEF

SEQ ID NO: 15659 - protein, 264 aa, Pinus taeda
MAIEILLGVAPMEEGRRGRSCGSLLPSVRKVVAEFIGTFFLIFVGCGSVVVDKISNGSITHLGVSLVWGMAAMIVIYSIGHISGAHLNPAVTLALAAVKRFPWVQVPGYIVAQVFGSISAGFLLRFMFGEVAFMGATVPSGSEMQSFALEIITTSLLVFVVSAVATDTKAVGELGGLAIGATIAMNVAISGPISGASMNPARTIGSAVAGNKYTSIWVYMVGPVIGALMGAMSYNMIRETKMSEREIMKSGSFVKDMGSSESTA

SEQ ID NO: 15660 - protein, 291 aa, Blumeria graminis
MPTDGIPPMLGQSSPLKLRKYEGRLSDDNFRNHVIAAIGEFLGTTLFLFYGFLAAQIINSKPDNLSDAPSLLQLIFVASAFGVSGAVNVWLFYRVSGGHLNPAITIGLTLIGAVPVTRALLLVSVQLLGGILAASLVLAVTPGSLNVQTALGNATSVKQGFFLEMILTATLVLTVFMLAVEKHRTTPLAPLGIGLILFLDVLLAAQFSGGSLNPARSFGPAVVELNFATYHWIYWFGPIAGAVLAAAIFKVLKFLAYETAVAGQDHDGLDVYRLIDDAGGHEVDREIQLEV

SEQ ID NO: 15661 - protein, 251 aa, Haematobia irritans exigua
MVEKLDMSAVVGVKDITDNKKIWRQLMAELIGTFFLVVIGVGSCTGGSEWSPSIPQIAFTFGLTVATLAQAIGHISGCHINPAVTVGFLIVGEMSIIKSVLYIAVQCVGAIAGAAVIKVGVSEAVSGLDLGVSSFSSTLTVGQAVLIEALITFILVVVVKGVSDPGRTDIKGSAPLAVGLSIAAGHLCAIKLTGASMNPARSFGPAVVQNMWIDHWVYWVGPIVGAIVAALLYKFVFKVRKGDDEANSYDF

SEQ ID NO: 15662 - protein, 237 aa, Azotobacter vinelandii
MNRYGAEFLGTFWLVLGGCGSAVLAAAFPEVGIGLHGVSLAFGLTVLTMAFAIGHISGCHLNPAVSIGLWAGGRFPAKDLLPYIVAQVLGGIAAGAVLYVIASGTAGFDVTKGFASNGYGAHSPGGYSLLSALVTEVVMTLFFLLIILGATDKRAPAGFAPIAIGLALTLIHLISIPVTNTSVNPARSTGVAVFAGGWAIAQLWLFWIAPIVGALLGAAAYRLIAEQPGLASQPARG

SEQ ID NO: 15663 - protein, 248 aa, Mesembryanthemum crystallinum
MAGLAFGRFDDSFSWASIKAYIAEFISTLLFVFAGVGSCIAFNKLTADAALSPSGLVAVAVCHAFALFVAVSVGANISGGHVNPAVTFGLAVGGQITILTGVLYWIAQLAGSVAGCFLLKAATGGLTTPIHSVASGVGAIEAVVMEIIITFALVYTVYATAVDPKRGSVGTIAPIAIGFIVGANILAAGPFSGGSMNPARSFGPALASGDFHDHWVYWVGPLIGGGLAGLTYSNVFMHHEHAPLSSEY

SEQ ID NO: 15664 - protein, 206 aa, Mesembryanthemum crystallinum
LTSDGALDPAGLVAVALAHAFALFVGVSMAANVSGGHLNPAVTFGLAIGGHITVLTGLIYWVAQVLGSIVACLLLKFVTNGMSIPAHGVASGMNAFEGIVMEIVITFALVYTVYATAADPKKGTIGTIAPIAIGFIVGANILAAGPFSGGSMNPARSFGPAIVSGDLSQSWIYWVGPLIGGGLAGLVYGDVFIGSYAPLPTPENYP

SEQ ID NO: 15665 - protein, 247 aa, Spinacia oleracea
MAIAFGRFDDSFSWASIKAYIAEFISTLLFVFAGVGSCIAFAKLTEDAALSPSGLVAVAVCHAFALFVAVSVGANISGGHVNPAVTFGLALGGQITILTGILYWIAQCAGSVAACLLLKASTGGLATPIHSVAAGVGSIEAVVMEIIITFALVYTVYATAVDPKKGSIGTIAPIAIGFIVGANILAAGPFSGGSMNPARSFGPAVASLDFSDHWVYWVGPLVGGGLAGLIYGNVFMQDDHAPLSNEY

SEQ ID NO: 15666 - protein, 282 aa, Atriplex canescens
MSKEVISEEGQVHQHGKDYVDPPPAPFFDMGELKLWSFWRAAIAEFIATLLFLYITVATVIGYKKETDPCASVGLLGIAWSFGGMIFVLVYCTAGISGGHINPAVTFGLFLARKVSLLRALVYMIAQCAGAICGVGLVKAFMKGPYNQFGGGANSVALGYNKGTAFGAELIGTFVLVYTVFSATDPKRSARDSHVPILAPLPIGFAVFMVHLATIPITGTGINPARSFGAAVIYNKKRVWDDHWIFWVGPFVGALAAAAYHQYVLRAAAIKALGSFRSNPTN

SEQ ID NO: 15667 - protein, 255 aa, Cicadella viridis
MAADKSVDNTKKIIGIDDITDTKTIWRCLAAELIGTLLLVLIGTGSCTGVQISEGDVVVRIALTFGFIIATMVQCIGHVSGCHINPAVTCGLLVTGHISILKAIFYIIVQCVGAIAGSAILKVITPAEFRGTLCMTSLAPGVTPPMGFLVEACITFVLILLVQSVCDDRRKNLGNAAPVAVGLAITCCHLAAIKYTGSSMNPARSFGPAVNGDDNWANHWVYWAGPIVGGVVAGITYRALFRARKPEEEASSYDF

SEQ ID NO: 15668 - protein, 248 aa, Gossypium hirsutum
MAGIAFGRFDDSFSLGTVKAYLAEFISTLVFVFAGVGSAIAYNKLTTDAALDPDGLVAIAVCHGFALFVAVAIGANISGGHVNPAVTFGLALGGQITILTGIFYWIAQLLGSIVACFLLKAVTGGLTVPIHGLGAGVGAIQGVVMEIIITFALVYTVYATAADPKKGSLGTIAPIAIGFIVGANILAAGPFSGGSMNPARSFGPAVASGDFNGIWIYWVGPLIGGGLSGLIYGNVFMNSDHAPLSNDF

SEQ ID NO: 15669 - protein, 105 aa, Gossypium hirsutum
LPLGGQITILTGIFYWIAQLLGSIVACFLLKAVTGGLTVPIHGLGAGVGAIQGVVMEIIITFALVYTVYATAADPKKGSLGTIAPIAIGFIVGANILAAGPFSGG

SEQ ID NO: 15670 - protein, 187 aa, Carica papaya
INPAVTFGLLLARKLSLTRAIFYMVMQCLGAICGAGVVKGFEGSATFELKGGGANVRQPWIHKGDGLGAEIVGTFVLVYTVLSATDAKRNARDSHVPILAPLPIGFAVFLVHLATIPITGTGINPARSLGAAIIFNRDKAWDDHWIFWVGPFIGAALAALYQQVVIRAIPFKSKCKFPKWVSIKYVI

SEQ ID NO: 15671 - protein, 250 aa, Arabidopsis thaliana
MVKIEVGSVGDSFSVSSLKAYLSEFIATLLFVFAGVGSAVAFAKLTSDGALDPAGLVAIAIAHAFALFVGVSIAANISGGHLNPAVTLGLAIGGNITLITGFFYWIAQCLGSIVACLLLVFVTNGKSVPTHGVSAGLGAVEGVVMEIVVTFALVYTVYATAADPKKGSLGTIAPIAIGFIVGANILAAGPFSGGSMNPARSFGPAVVSGDLSQIWIYWVGPLVGGALAGLIYGDVFIGSYEAVETREIRV

SEQ ID NO: 15672 - protein, 250 aa, Arabidopsis thaliana
MVKIEIGSVGDSFSVASLKAYLSEFIATLLFVFAGVGSALAFAKLTSDAALDPAGLVAVAVAHAFALFVGVSIAANISGGHLNPAVTLGLAVGGNITVITGFFYWIAQCLGSIVACLLLVFVTNGESVPTHGVAAGLGAIEGVVMEIVVTFALVYTVYATAADPKKGSLGTIAPIAIGFIVGANILAAGPFSGGSMNPARSFGPAVVSGDFSQIWIYWVGPLVGGALAGLIYGDVFIGSYAPAPTTESYP

SEQ ID NO: 15673 - protein, 250 aa, Arabidopsis thaliana
MAGVAFGSFDDSFSLASLRAYLAEFISTLLFVFAGVGSAIAYAKLTSDAALDTPGLVAIAVCHGFALFVAVAIGANISGGHVNPAVTFGLAVGGQITVITGVFYWIAQLLGSTAACFLLKYVTGGLAVPTHSVAAGLGSIEGVVMEIIITFALVYTVYATAADPKKGSLGTIAPLAIGLIVGANILAAGPFSGGSMNPARSFGPAVAAGDFSGHWVYWVGPLIGGGLAGLIYGNVFMGSSEHVPLASADF

SEQ ID NO: 15674 - protein, 250 aa, Arabidopsis thaliana
MAGVAFGSFDDSFSLASLRAYLAEFISTLLFVFAGVGSAIAYAKLTSDAALDTPGLVAIAVCHGFALFVAVAIGANISGGHVNPAVTFGLAVGGQITVITGVFYWIAQLLGSTAACFLLKYVTGGLAVPTHSVAAGLGSIEGVVMEIIITFALVYTVYATAADPKKGSLGTIAPLAIGLIVGANILAAGPFSGGSMNPARSFGPAVAAGDFSGHWVYWVGPLIGGELAGLIYGNVFMGSSEHVPLASADF

SEQ ID NO: 15675 - protein, 286 aa, Brassica rapa
MEGKEEDVRVGANKFPERQPIGTSAQSDKDYKEPPPAPLFEPGELASWSFWRAGIAEFIATFLFLYITVLTVMGVKRSPSMCASVGIQGIAWAFGGMIFALVYCTAGISGGHINPAVTFGLFLARKLSLTRAVYYIVMQCLGAICGAGVVKGFQPKQYQALGGGANTVAPGYTKGSGLGAEIIGTFVLVYTVFSATDAKRNARDSHVPILAPLPIGFAVFLVHLATIPITGTGINPARSLGAAIIFNKDNAWDDHWVFWVGPFIGAALAALYHVIVIRAIPFKSRS

SEQ ID NO: 15676 - protein, 248 aa, Raphanus sativus
MAGVAFGSFDDSFSLASLRAYLAEFISTLLFVFAGVGSAIAYAKLTSDAALDTPGLVAIAVCHGFALFVAVAIGANISGGHVNPAVTFGLAVGGQITLITGVFYWVAQLLGSTAACFLLKYVTGGLAVPTHSVAAGVGAIEGVVMEIIITFSLVYTVYPTAADPKKGSLGTIAPLAIGLIVGANILAAGPFSGGSMNPARSFGPAVAAGDFSGHWVYWVGPLIGGGLAGVTYGNVFMTSEHVPLASEF

SEQ ID NO: 15677 - protein, 136 aa, Prunus persica
GGHVNPAVTFGAFIGGNISLVRSVLYWIAQLLGAVIACLLLRFATGGLETSAFSLSSGVSVWNAVVLEIVITFGLVYTVYATALDPKKGNIGIIAPIVIGFIVGANILVAGAFDGASMNPAVSFGPAVVSWTWTNH

SEQ ID NO: 15678 - protein, 225 aa, Mesorhizobium loti
MKTYLAEVLGTFLLVFIGTASVVTGGFGGALPLGQEGIGLAFGIGLIAAAYAIGPISGAHLNPAVTLGVFLAGRLPAKDVIPYWIAQIIGAILASLALWIIVSGQAGGHTGGFGANGWDETKWGMSSAFLWELIGTFTFVTVILGVTAEKHSTAFAGLVIGLTLAGIHFAMIPVTGTSVNPARSIGPALFTGGAALSQLWLFIVAPLIGGAIAGVVAKARIFEKD

SEQ ID NO: 15679 - protein, 232 aa, Sinorhizobium meliloti
MFKKLCAEFLGTCWLVLGGCGSAVLASAFPQVGIGLLGVSFAFGLTVLTMAYTVGGISGGHFNPAVSLGLAVAGRVPAASLVSYVIAQVAGAIIAAAVLYVIATGKADFQLGSFAANGYGEHSPGGYSLTAALVTEVVMTFFFLIIILGSTHRRVPAGFAPIAIGLALTLIHLVSIPVTNTSVNPARSTGQALFVGGWALSQLWLFWIAPLFGAAIAGIVWKSVGEEFRPVD

SEQ ID NO: 15680 - protein, 228 aa, Sinorhizobium meliloti
MFRKLSVEFLGTFWLVLGGCGSAVLAAAFPEVGIGLLGVSFAFGLTVLTMAYAVGGISGGHFNPAVSVGLAVAGRMPPASLVGYILAQVTGAIAAAAVLYVIASGKADFQLGGFAANGYGEHSPGGYSLTAALVTEVVMTAFFLLIILGSTHSRVPVGFAPIAIGLGLTLIHLVSIPVTNTSVNPARSTGQALFVGDWAISQLWLFWVAPLIGAVIAGIVWKIVGDDS

SEQ ID NO: 15681 - protein, 142 aa, Cicer arietinum
AQLLGSIVASLLLVFATGLSVPAFSLSAGVGVGPALVLEIVLTFGLVYTVYATAVDPKKGNIGIIAPIAIGFIVGANILVGGAFTGASMNPAVSFGPAVVSWSWSNHWIYWAGPLIGGGLAGLIYEVVFISHTHEQLPTTDY

SEQ ID NO: 15682 - protein, 248 aa, Glycine max
MGGIAFGRLDDSFSLTSIKAYIAEFHSTLLFVFAGVGSAIAYGKLTSDAALDPAGLLAVAICHGFALFVAVSVGANISGGHVNPAVTFGLALGGHITILTGFFYWIAQLLGSIVACFLLNYVTGGLPTPIHSVASGVGAVEGVVTEIIITFGLVYTVYATAADPKKGSLGTIAPIAIGFIVGANILAAGPFSGGSMNPARSFGPAVVSGDFHDNWIYWVGPLIGGGLAGLIYGNVFIRSDHAPLSSEF

SEQ ID NO: 15683 - protein, 248 aa, Glycine max
MAGIAFGSFNDSFSLASIKAYIAEFISTLLFVFAGVGSAIAYAKLTSDAPLDPTGLVAVAICHGFALFVAVSVGANISGGHVNPAVTFGLALGGHITILTGLFYWIAQLLGSIVACFLLNYVTGGLPTPIHSVASGVGAVEGVVTEIIITFGLVYPVYATAADPKKGSLGTIAPIAIGFIVGANILAAGPFSGGSMNPARSFGPAVVSGDFHDNWIYWVGPLIGGGLAGLIYGNVFIRSDHAPLSSEF

SEQ ID NO: 15684 - protein, 250 aa, Glycine max
  unsure (1)..(250): unsure at all Xaa locations
MGGIAFGRLDDSFSLTSIKAYIAEFHSTLLFVFAGVGSAIAYGKLTSDAALDPAGLLAVAICHGFALFVAVSVGANISGGHVNPAVTFGLALGGHILIXLTGLYYWIAQLLGSIVACFLLNYVTGGLPTPIHSVAPGVGAVEGVVTEIIITFGLVYTVYATAADPKKGSLGTIAPIAIGFIVGXANILAAGPFSGGSMNPARSFGPAVVSGDFHDNWIYWVGPLIGGGLAGLIYGNVFIRSDHAPLSSEF

SEQ ID NO: 15685 - protein, 247 aa, Glycine max
MAGIAFGSFNDSVSFASIKAYIAEFISTLLFVFAGVGSAIAYAKLTSDAALDPTGLVAVAICHGFALFVAVSVGANISGGHVNPAVTFGLALGGHITILTGLFYWIAQLLGSIVASLLLKFVTGYDTPIHSVAAGIGAGEGVVTEIIITFGLVYTVYATAADPKKGSLGTIAPIAIGFIVGANILAAGPFSGGSMNPARSFGPAVVSGDFHDNWIYWVGPLIGGGLAGLIYTYAFIPTNHAPLATEF

SEQ ID NO: 15686 - protein, 253 aa, Glycine max
  unsure (1)..(253): unsure at all Xaa locations
MVKITLGTFDDSFGVASLKAYLAEFHATLIFVFAGVGSAIAYNELTKDAALDPTGLVAVAVAHAFALFVGVSVAANISGGHLNPAVTFGLAIGGNITLITGFLYWIAQLLGSIVACLLLNFITAKSIPSHAPATGVNDFQAVVFEIVITFGLVYTVYATAADPKKGSLGIIAPIAIGFVVGANILAAGPFSGGSMNPARSFGPXAVVSGDFAANWIXYWVGPLXLGGGLAGLIXYGDVFIGPICGCPTSETYP

SEQ ID NO: 15687 - protein, 227 aa, Glycine max
  unsure (1)..(227): unsure at all Xaa locations
MVKITLGTFDDSFGVASLKAYLAEFHATLIFVFAGVGSAIAYXRAYKRCSLGSNGAGGHLNPAVTFGLAIGGNITLITGFLYWIAQLLGSIVACLLLNFITAKSIPSHAPATGVNDFQAVVFEIVITFGLVYTVYATAADPKKGSLGIIAPIAIGFVVGANILAAGPFSGGSMNPARSFGPAVVSGDFAANWIYWVGPLIGGGLAGLIYGDVFIGSYAAVPASETYP

SEQ ID NO: 15688 - protein, 249 aa, Medicago sativa
MPIRNIAVGTPQEATHPDTLKAGLAEFISTFIFVFAGSGSGIAYNKLTNDGAATPAGLISASIAHAFALFVAVSVGANISGGHVNPAVFGAFVGGNITLLRGIVYIIAQLLGSIVCSALLVFVTASSVPAFGLSEGVGVGPALVLEIVMTFGLVYTVYATAVDPKKGNIGIIAPIAIGFIVGANILVGGAFTGASMNPAVSFGPAVVSWSWSNHWVYWAGPLIGGGIAGLVYEVLFINSTHEQLPTTDY

SEQ ID NO: 15689 - protein, 250 aa, Medicago truncatula
MPIRNIAVGTPQEATHPDTLKAGLAEFISTFIFVFAGSGSGIAYNKLTNDGAATPAGLISASIAHAFALFVAVSVGANISGGHVNPAVTFGAFVGGNITLLRGIVYIIAQLLGSIVASALLVFVTASSVPAFGLSEGVGVGPALVLEIVMTFGLVYTVYATAVDPKKGNIGIIAPIAIGFIVGANILVGGAFTGASMNPAVSFGPAVVSWSWSNHWVYWAGPLIGGGIAGLVYEVLFINSTHEQLPTTDY

SEQ ID NO: 15690 - protein, 256 aa, Phaseolus vulgaris
MATRRYSFGRTDEATHPDSMRASLAEFASTFIFVFAGEGSGLALVKIYQDSAFSAGELLALALAHAFALFAAVSASMHVSGGHVNPAVTFGALIGGRISVIRAVYYWIAQLLGSIVAALVLRLVTNNMRPSGFHVSPGVGVGHMFILEVVMTFGLMYTVYGTAIDPKRGAVSNIAPLAIGLIVGANILVGGPFDGACMNPALAFGPSLVGWQWHQHWIFWVGPLLGAALAALVYEYAVIPIEPPPHHHQPLATEDY

SEQ ID NO: 15691 - protein, 256 aa, Phaseolus vulgaris
MATRRYSFGRTDEATHPDSMRASLAEFASTFIFVFAGEGSGLALVKIYQDSAFSAGELLALALAHAFALFAAVSASMHVSGGHVNPAVSFGALIGGRISVIRAVYYWIAQLLGSIVAALVLRLVTNNMRPSGFHVSPGVGVGHMFILEVVMTFGLMYTVYGTAIDPKRGAVSYIAPLAIGLIVGANILVGGPFDGACMNPALAFGPSLVGWQWHQHWIFWVGPLLGAALAALVYEYAVIPIEPPPHHHQPLATEDY

SEQ ID NO: 15692 - protein, 169 aa, Phaseolus vulgaris
FSTCIFVFVGEGSVLALNHIYKEPGSSATELVVVAVAHAFALFAAISISAHVSGGHVNPAVTFGALLGGRISVLKALYYWIAQILGSIVAALLLRLVTNNMRPEGFGLSSGVGAVHGLILEISLTFGLMYTVYATAIDPKRGANSTIAPLAIALVVGANILAGGPFDGA

SEQ ID NO: 15693 - protein, 250 aa, Pisum sativum
MPIRNIAIGTPQEATHPDTLKAGLAEFISTFIFVFAGSGSGIAYNKLTDNGAATPAGLISASIAHAFALFVAVSVGANISGGHVNPAVTFGAFVGGNITLLRGIVYIIAQLLGSIVASALLVFVTASSVPAFALSAGVGVGPALVLEIVMTFGLVYTVYATAVDPKKGNIGIIAPIAIGFIVGANILVGGAFTGASMNPAVSFGPAVVSWSWANHWIYWAGPLIGGGLAGLIYEVLFINSTHEQLPTTDY

SEQ ID NO: 15694 - protein, 247 aa, Trifolium repens
NIAVGTPAEATHPDTLKAGLAELISTFIFVFAGSGSGIAYNKLTDNGAASPAGLISASIAHAFALFVAVSVGANISGGHVNPAVTFGAFVGGNITLFRGIVYIIAQLIGSVLASLLLVFVTASSVPAFALSEGVGIGPALVLEIVMTFGLVYTVYATAVDPKKGNIGIIAPIAIGFIVGANILVGGAFTGASMNPAVSFGPAVVSWSWSNHWIYWAGPLIGGGIAGIIYEVLFISHTGHEQLPTTDY

SEQ ID NO: 15695 - protein, 181 aa, Oryza sativa (indica cultivar-group)
HINPAVTFGLFLARKVSLVRAILYIVAQCLGAICGVGLVKAFQSAYFNRYGGGANTLAAGYSKGTGLAAEIIGTFVLVYTVFSATDPKRNARDSHVPVLAPLPIGFAWFMVQLATIPITGTGINPARTTGPAVIFNNEKAWHNQWIFWVGPFVGAAIAAFYHQYILRAGPIKALGSFRSNA

SEQ ID NO: 15696 - protein, 252 aa, Oryza sativa (japonica cultivar-group)
MPVSRIAVGAPGELSHPDTAKAAVAEFISMLIFVFAGSGSGMAFSKLTDGGGTTPSGLIAASLAHALALFVAVAVGANISGGHVNPAVTFGAFVGGNISLVKAVVYWVAQLLGSVVACLLLKIATGGAAVGAFSLSAGVGAWNAVVFEIVMTFGLVYTVYATAVDPKKGDLGVIAPIAIGFIVGANILAGGAFDGASMNPAVSFGPAVVTGVWDNHWVYWLGPFVGAAIAALIYDIIFIGQRPHDQLPTADY

SEQ ID NO: 15697 - protein, 248 aa, Daucus carota
MVKLAIGSVGDSFSAVSLKSYLAEFIATLLFVFAGVGSAIAYGHLTADAALDPAGLVAIAIAHAFALFVGVSMAANISGGHLNPAVTLGLAIGGNITIITGLFYWIAQCLGSTVACFLLKFVTAGKAIPTHGVGAGLGAAEGVVFEIVITFALVYTVYATAADPKKGSLGTIAPIAIGFIVGANILAAGPFSGGSMNPARSFGPAVASFDFSGHWIYWVGPLIGGGLAGLVYGDVFIGSYAPIAEDYA

SEQ ID NO: 15698 - protein, 226 aa, Petroselinum crispum
MVKIAIGSIGDSFTHGSLKCYLAEFIATLLFVFAGVGSAIAFNNLTADAGLDPAGLVAIAVAHAFALFVGVSIAANISGGHLNPAVTFGLAVGGHITLITGFFYWIAQLLGATVASFLLIFVNGGKAVPIHGVGAGLGAAEGVVFEIIITFALVYTFYATAADPKKGSLGTIAPIAIGFIVGANILAAGPFSGGSMNPARHSGQLLLAETFLDTGSTGLVLSLEEA

SEQ ID NO: 15699 - protein, 250 aa, Lycopersicon esculentum
MVRIAFGSIGDSLSVGSLKAYLAEFIATLLFVFAGVGSAIAFNKLTSGAALDPAGLVAIAVAHAFALFVGVSMAANISGGHLNPAVTLGLAVGGNITILTGLFYWVAQLLGSTVACLLLKYVTNGLAVPTHGVAAGMSGAEGVVMEIVITFALVYTVYATAADPKKGSLGTIAPIAIGFIVGANILAAGPFSGGSMNPARSFGPAVVAGDFSQNWIYWVGPLIGGGLAGFIYGDVFIGCHTPLPTSEDYA

SEQ ID NO: 15700 - protein, 270 aa, Nicotiana alata
MAKKDGNQEEEISQMEEGNIHSASNSDSNVGFCSSVSVVVILQKLIAEAIGTYFVIFAGCGSVAVNKIYGSVTFPGICVTWGLIVMVMVYTVGYISGAHFNPAVTITFSIFGRFPWKQVPLYIIAQLMGSILASGTLALLFDVTPQAYFGTVPVGSNGQSLAIEIIISFLLMFVISGVATDDRAIGQVAGIAVGMTITLNVFVAGPISGASMNPARSIGPAIVKHVYTGLWVYVVGPIIGTLAGAFVYNLIRSTDKPLRELAKSASSLRS

SEQ ID NO: 15701 - protein, 248 aa, Nicotiana glauca
MPGIAFGRIDDSFSVGSLKAYLAEFISTLLFVFAGVGSAIAYNKLTANAALDPAGLVAVAVCHGFALFVAVAVGANISGGHVNPAVTFGLALGGQITLLTGLFYIIAQLLGSIVACLLLKVVTGGLAVPTHNVAAGVGALEGVVMEIIITFALVYTVYATAADPKKGSLGTIAPIAIGFIVGANILAAGPFSGGSMNPARSFGPAVASGDFTNNWIYWAGPLVGGGLAGLTYSNVFMQHEHAPLSSDF

SEQ ID NO: 15702 - protein, 250 aa, Nicotiana tabacum
MVRIAFGSIGDSFSVGSLKAYVAEFIATLLFVFAGVGSAIAYNKLTADAALDPAGLVAVAVAHAFALFVGVSIAANISGGHLNPAVTLGLAVGGNITILTGFFYWIAQLLGSTVACLLLKYVTNGLAVPTHGVAAGLNGLQGVVMEIIITFALVYTVYATAADPKKGSLGTIAPIAIGFIVGANILAAGPFSGGSMNPARSFGPAVVAGDFSQNWIYWAGPLIGGGLAGFIYGDVFIGCHTPLPTSEDYA

SEQ ID NO: 15703 - protein, 250 aa, Nicotiana tabacum
MVLIAFGSIGDSFSVGSLKAYVAEFIATLLFVFAGVGSAIAYNKLTADAALDPAGLVAVAVAHAFALFVGVSIAANISGGHLNPAVTLGLAVGGNITILTGFFYWIAQLLGSTVACLLLKYVTNGLAVPTHGVAAGLNGFQGVVMEIIITFALVYTVYATAADPKKGSLGTIAPIAIGFIVGANILAAGPFSGGSMNPARSFGPAVVAGDFSQNWIYWAGPLIGGGLAGFIYGDVFIGCHTPLPTSEDYA

SEQ ID NO: 15704 - protein, 250 aa, Petunia x hybrida
MPINQISLGSHEELRHSGALKAALAEFISTLIFVFAGQGSGMAYNKLTADGAASPAGLISASLAHAFGLFVAVSVGANISGGHVNPAVTFGAFIGGNITFFRGILYIIAQLLGSTAACFILEFTTGMSTGSFALSDGVGVWNALVFEIVMTFGLVYTVYATAVDPKKGDLGVIAPIAIGFIVGANILAGGAFTGASMNPAVSFGPSLVSWTWTHQWIYWAGPIIGGGLAGVVYELLFINHSHEPLPSGDF

SEQ ID NO: 15705 - protein, 250 aa, Solanum tuberosum
MVRIAFGSIGDSLSVGSLKAYLAEFIATLLFVFAGVGSAIAYNKLTSDAALDPAGLVAIAVAHAFALFVGVSMAANISGGHLNPAVTLGLAVGGNITTLTGLFYWVAQLLGSTVACLLLKYVTNGLAVPTHGVAAGMNGAEGVVMEIVITFALVYTVYATAADPKKGSLGTIAPIAIGFIVGANILAAGPFSGGSMNPARSFGPAVVAGDFSQNWIYWVGPLIGGGLAGFIYGDVFIGSHTPLPTSEDYA

SEQ ID NO: 15706 - protein, 250 aa, Antirrhinum majus
MVKIAFGSIGDSFSVASIKAYVAEFIATLLFVFAGVGSAIAYNKLTSDAALDPAGLVAVAVAHAFALFVGVSMAANVSGGHLNPAVTLGLAVGGNITILTGLFYWIAQCLGSTVACLLLKFVTNGLSVPTHGVAAGMDAIQGVVMEIIITFALVYTVYATAADPKKGSLGVIAPIAIGFIVGANILAAGPFSGGSMNPARSFGPAVASGDFSQNWIYWAGPLIGGALAGFIYGDVFITAHAPLPTSEDYA

SEQ ID NO: 15707 - protein, 228 aa, Antirrhinum majus
FGSIGDSFSVASIKAYVAEFIATLLFVFAGVGSAIAYNKLTSDAALDPAGLVAVAVAHAFALFVGVSMAANVSGGHLNPAVTLGLAVGGNITILTGLFYWIAQCLGSTVACLLLKFVTNGLSVPTHGVAAGMDAIQGVVMEIIITFALVYTVYATAADPKKGSLGVIAPIAIGFIVGANILAAGPFSGGSMNPARSFGPAVASGDFSQNWIYWAGPLIGGALAGFIYG

SEQ ID NO: 15708 - protein, 287 aa, Craterostigma plantagineum
MEAKEEDVRLGANKFSERNPIGTAAQTHDDKDYTEPPPAPLFEPGELSSWSFYRAGIAEFMATFLFLYITILTVMGVNRAPNKCASVGIQGIAWAFGGMIFALVYCTAGISGGHINPAVTFGLFLARKLSLTRAVFYMVMQCLGAICGAGVVKGFYKPTYNLEGGGANVVANGYTKGDGLGAEILGTFVLVYTVFSATDAKRSARDSHVPILAPLPIGFAVFLVHLATIPITGTGINPARSLGAAIIYNHDRAWHDHWVFWVGPFIGAALAALYHVVVIRAIPFKSK

SEQ ID NO: 15709 - protein, 288 aa, Craterostigma plantagineum
MAENREEDVRLGANKYRETQPIGTSAQTDKDYKEPPPAPLFEPGELKSWSFYRAGIAEFVATFLFLYITILTVMGVSRAPNKCASVGIQGIAWAFGGMIFALVYCTAGISGGHINPAVTFGLFLARKLSLTRAIFYMIMQCLGAICGAGVVKGFQVGPYQRLGGGANTVAHGYTKGAGLGAEIIGTFVLVYTVFSATDAKRSARDSHVPILAPLPIGFAVFLVHLATIPITGTGINPARSLGAAIIYNKDHAWDDHWVFWVGPFIGAALAAVYHQIVIRAIPFKSGRA

SEQ ID NO: 15710 - protein, 198 aa, Craterostigma plantagineum
MIFILVYCTAGISGGHINPAVTFGLFLARKVSLIRAVSYMIAQCLGAICGVGLVKAFMHNPYNRLGGGANTVAPGYNKGTALGAEIIGTFVLVYTVFSATDPKRSARDSHVPVLAPLPIGFAVFMVHLATIPITGTGINPARSFGAAVIFNNGKAWDDHWIFWVGPFLGALAAAIYHQYILRAQAAKALGSFRSNPTN

SEQ ID NO: 15711 - protein, 250 aa, Helianthus annuus
MVKLAIGSIGDSLSAGSIKSYLAEFIATLLFVFAGVGSAIAYGKLTTDAALDPAGLVAIAIAHAFALFVGVSMAANISGGHLNPAVTFGLAIGGNITIITGLFYWIAQCLGSIVACFLLQFVTGGLAVPTHGVADGMNGVQGVVMEIIITFALVYTVYATAVDPKKGSLGTIAPMAIGFIVGANILAAGPFSGGSMNPARSFGPAVVSGDFSQNWIYWVGPLIGGGLAGFIFGDVFIGSYETLPDSGDYA

SEQ ID NO: 15712 - protein, 248 aa, Helianthus annuus
MPGIAFGSFDDSFSSSSIKAYIAEFISTLLFVFAGVGSAIAYAKLTADAALDPSGLVAIAVCHGLALFVAVSIAANISGGHVNPAVTFGLAVGGQITILTGLFYWIAQLLGSVAACFLLSFVTGGLAVPTHGVAAGVGVLQGVVFEIIITFALVYTVYATACDPKKGALGTISPIAIGFIVGANILAAGPFSGGSMNPARSFGPTVAAFDFSGHWFYWVGPLIGGGLAGAIYPNVFISNEHIPLTNDY

SEQ ID NO: 15713 - protein, 248 aa, Helianthus annuus
MPGIAFGSFDDSFSLSSIKSYVAEFISTLLFVFAGVGSAIAFAKLTADADLDPAGLVAIAVCHGLALFVAVSIAANISGGHVNPAVTFGLAVGGQITILTGIFYWIAQCIGSIAACYLLSFVTGGLAVPTHAVAAGVGAIQGVVMEIIITFALVYNVYATAVDPKKGDLGTIAPLAIGLIVGANILAAGPFSGGSMNPARSFGPAVAAGDFSGHWIYWVGPLVGGGLAGAIYSNVFISNEHAPLSSEF

SEQ ID NO: 15714 - protein, 248 aa, Helianthus annuus
MPGIAFGSFDDSFSSSSIKAYIAEFISTLLFVFAGVGSAIAYAKLTADAALDPPGLVAVAVCHGFALFVAVCIAANICGGHVNPAVTLGLAVGGQITFLTGLFYWIAQLLGSTVACFLLSFVTGGLAVPTHGVAEGVGTIQGVVFEIIITFAMVYTVYATACDPKKGALGTIAPIAIGFIVGANILAAGPFSGGSMNPARSFGPAVASFDFSGHWIYWVGPLVGGGLAGLIYPNVFISNEHIPLTNEY

SEQ ID NO: 15715 - protein, 277 aa, Dictyostelium discoideum
MPFLHLFTPYTNADNTKLILRVNESRLRLFTRQLLAEFFGTLFVVYIVSGSTLAANFAVSDPIVRVCLICLVQGFAFAAIIWSISGISGCQLNPAVTVGCVTTGRMGILNGIAFIIFQCVGALVGAGMMKASLPTFYERDLSATTLATGVNVARGFFLEMVTTSFLVFVVLGVAVYNEWDPRDPKISRVAPLAIGCAVIAGVGFLNLFTGGSLNPARSFGPAVFSDTWHRHYIYWFGPICGGIIAGLFWRIFLSEKVLLIDRPYTDFHRSTYGTATK

SEQ ID NO: 15716 - protein, 279 aa, Dictyostelium discoideum
MVKVVPLRFITYDPLKDPSKMIYRRPISKPVKAFKGFFSEFLGTLYLVYFCGGSVCAAFAVAGDSAARALLGGLIQGMALAALIWAVSGVSGCNLNPAVTLANLLSGRVGLIDSLYYVAAQILGCIAGAGILYGCLPNMYRIDLGVPHLAPGMNTGQAFLMEMMLTSILCLCVLGTSVFNVWDRRLNRIAPFAIGLALFIGVAIGFNFSGGALNPVRVLGPSIISGVWSHHWVYWLGPIVGAILAAFIYRCLLQERFDVIERPGYIAPLIDPSTAVSSY

SEQ ID NO: 15717 - protein, 249 aa, Hordeum vulgare
MVKLAFGSFGDSFSATSIRSYVAEFIATLLFVFAGVGSAISYGQLTQGGALDPAGLVAIAIAHAFALFVGVAMAANISGGHLNPAVTFGLAVGGHVTILTGLFYWVAQLLGASVACLLLQFVTHAQAMPTHAVSGISEVEGVVMEIVITFALVYTVYATAADPKKGSLGTIAPMAIGFIVGANILAAGPFSGGSMNPARSFGPAVAAGNFSGHWVYWVGPLIGGGLAGLVYGDVFIASYQPVGHQQEYP

SEQ ID NO: 15718 - protein, 248 aa, Oryza sativa
MVKLAFGSLGDSFSATSVKAYVAEFIATLLFVFAGVGSAIAYGQLTNGGALDPAGLVAIAIAHALALFVGVSVAANISGGHLNPAVTFGLAVGGHITILTGLFYWIAQLLGASIACLLLKFVTHGKAIPTHGVAGISELEGVVMEIVITFALVYTVYATAADPKKGSLGTIAPIAIGFIVGANILAAGPFSGGSMNPARSFGPAVAAGNFAGNWVYWVGPLIGGGLAGLVYGDVFIGSYQPVADQDYA

SEQ ID NO: 15719 - protein, 248 aa, Oryza sativa; identical to SEQ ID NO: 15718

SEQ ID NO: 15720 - protein, 249 aa, Triticum aestivum
MVKLAFGSCGDSFSATSVRAYVAEFIATLLFVFAGVGSAIAYGKLTDDGALDPAGLVAIAIAHAFALFVGVAIAANISGGHLNPAVTFGLAVGGHITILTGIFYWVAQLLGSTAACFLLKFVTHGKAIPTHGVTAGMNEFEGVVMEIVITFALVYTVYATAADPKKGSLGTIAPIAIGFIVGANILAAGPFSGGSMNPARSFGPAVAAGNFAGNWVYWVGPLIGGGLAGFVYGDVFIASYQPVADQDYA

SEQ ID NO: 15721 - protein, 111 aa, Allium cepa
ELQGVVMEIVITFALVYTVYATAADPKKGSLGTIAPIAIGFIVGANILAAGPFSGGSMNPARSFGPAVAAANFAGHWVYWVGPLVGGALAGLVYGDIFIGTSYEPVAQDYP

SEQ ID NO: 15722 - protein, 288 aa, Lilium longiflorum
MEGKEEDVKLGANKYSERQPIGTAAQTQDRDYKEPPPAPFFEPGELKSWSFYRAGIAEFVATFLFLYITILTVMGVSKNATNKCVTVGIQGIAWSFGGMIFALVYCTAGISGGHINPAVTFGLFLARKLSLTRAIFYIIMQCLGAICGAGVVKGFQKGLYESNGGGANVVNHGYTKGDGLGAEIIGTFVLVYTVFSATDAKRNARDSHVPILAPLPIGFAVFLVHLATIPITGTGINPARSLGAAIIYNKSHAWHDHWVFWVGPFIGAALAAVYHQIVIRAIPFKSRS

SEQ ID NO: 15723 - protein, 327 aa, Saccharomyces cerevisiae
MSSNDSNDTDKQHTRLDPTGVDDAYIPPEQPETKHHRFKISRDTLRNHFIAAVGEFCGTFMFLWCAYVICNVANHDVALVAAPDGSHPGQLIMIAIGFGFSVMFSIWCFAGVSGGALNPAVSLSLCLARAVSPTRCVVMWVSQIVAGMAAGGAASAMTPGEVLFANSLGLGCSRTRGLFLEMFGTAILCLTVLMTAVEKRETNFMAALPIGISLFIAHVALTAYTGTGVNPARSLGAAVAARYFPHYHWIYWIGPLLGSILAWSVWQLLQILDYTTYVTAEKAASTKEKAQKKVKPAVPLLWLKSNFPLLFFISRSLALNVIIFGKN

SEQ ID NO: 15724 - protein, 289 aa, Saccharomyces cerevisiae
MSNESNDLEKNISHLDPTGVDNAYIPPEQPETKHSRFNIDRDTLRNHFIAAVGEFCGTFMFLWCAYVICNVANHDVALTTEPEGSHPGQLIMIALGFGFSVMFSIWCFAGVSGGALNPAVSLSLCLARAISPARCVVMWFPQIIAGMAAGGAASAMTPGKVLFTNALGLGCSRSRGLFLEMFGTAVLCLTVLMTAVEKRETNFMAALPIGISLFMAHMALTGYTGTGVNPARSLGAAVAARYFPHYHWIYWIGPLLGAFLAWSVWQLLQILDYTTYVNAEKAAGQKKED

SEQ ID NO: 15725 - protein, 305 aa, Saccharomyces cerevisiae
MSSNDSNDTDKQHTRLDPTGVDDAYIPPEQPETKHHRFKISRDTLRDHFIAAVGEFCGTFMFLWCAYVICNVANHDVALVAAPDGSHPGQLIMIAIGFGFSVMFSIWCFAGVSGGALNPAMSLSLCLARAVSPTRCVVMWVSQIVAGMAAGGAASAMTPGEVLFANSLGLGCSRTRGLFLEMFGTAILCLTVLMTAVEKRETNFMAALPIGISLFIAHVALTAYTGTGVNPARSLGAAVAARYFPHYHWIYWIGTLLGSILAWSVWQLLQILDYTTYVTAEKAASTKEKAQKKGETSSSSAVAEV

SEQ ID NO: 15726 - protein, 237 aa, Desulfitobacterium hafniense
MIKRLGAEFIGTFWLVLGGCGSAVLAANFGGAGNPLGIGLLGVALAFGLTVLTGAYALGHISGGHFNPAVSFGLWAGGRFPAKDLLPYIVAQVLGAILAGFVLFHIASGTGSFSIDPNAAGTFASNGYDLMSPGGYSAASAFLTEVVMTAMFLVIILGATHKNAPAGFAPIAIGLGLTLIHLISIPVTNTSVNPARSTGVALFAGAAALSQLWMFWVAPILGGLIGGAVYRWLGKDD

SEQ ID NO: 15727 - protein, 289 aa, Neurospora crassa
MSQPMRTHLVFGIGEFVGTFMFLFFAFAGTQVANTAPANAAKLPSTSNLLYIAFAFGFSLMVNVWAFFRVTGGAFNPAVTLALVLVGGFPAVRAVIVIVAQILGATAAAGLVQVIFPGPLAVETTLGGGATVAQGFFIELFLTCELVFVILMMAVEKHQGTFVAPVAIGLALFLSELVGVYFTGGSLNPVRSLGPAIVNRHFPGYHWIYWLGPVLGALLACGFFKLLQALRYDDINSGADDDGRGDLEGARHAHQDGLKHTPTNLTQPLANGEAAALHNQPAQVPREEL

SEQ ID NO: 15728 - protein, 250 aa, Posidonia oceanica
MPFSRIAMGRREEVTHGDALKATLAEFISTLIFVFAGEGSGIAYNNLSGDGDTTASSLIAAALAHGLGLFVAVSVGANISGGHVNPAVTFGAFVGGNITFLRGILYWHGQLLGSIVACLLLKFVTGGMTTGGFAVSGVSVWNALVFEIVMTFGLVYTVYATAIDPKKGAIGTIAPLAIGLIVAANIFVGGVFTGASMNPAVAFGPALVSWNWVNHWIYWVGPLVGAAIAGIVYQLLFINHTHEQLPTTDY

SEQ ID NO: 15729 - protein, 142 aa, Posidonia oceanica
ISGGHLNPAVTFGAFVGGNITFLRGILYWHGQLLGSIVACLLLKFVTGGMTTGGFAVSGVSVWNALVFEIVMTFGLVYTVYATAIDPKKGAIGTIAPLAIGLIVAANIFDGGVFTGASMNPAVAFGPALVSWNWVNQWVYWV

SEQ ID NO: 15730 - protein, 231 aa, Escherichia coli
MFRKLAAECFGTFCLVFGGCGSAVLPAGFPELGIGFAGVALAFGLTVLTMAFAVGHISGGHFNPAVTIGLWAGGRFPAKEVVGYVIAQVVGGIVAAALLYLIASGKTGFDAAASGFASNGYGEHSPGGYSMLSALVVELVLSAGFLLVIHGATDKFAPAGFAPIAIGLALTLIHLISIPVTNTSVNPARSTAVAIFQGGWALEQLWFFWVVPIVGGIIGGLIYRTLLEKRD

SEQ ID NO: 15731 - protein, 231 aa, Escherichia coli
MFRKLAAECFGTFWLVFGGCGSAVLAAGFPELGIGFAGVALAFGLTVLTMAFAVGHISGGHFNPAVTIGLWAGGRFPAKEVVGYVIAQVVGGIVAAALVYLIASGKTGFDAAASGFASNGYGEHSPGGYSMLSALVVELVLSAGFLLVIHGATDKFAPAGFAPIAIGLALTLIHLISIPVTNTSVNPARSTAVAIFQGGWALEQLWFFWVVPIVGGIIGGLIYRTLLEKRD

SEQ ID NO: 15732 - protein, 250 aa, Sporobolus stapfianus
MPMRNIAVGNTQEVTHPGALKAALAEFISTLIFVFAGQGSGVAYSKLSGGITTPSSLISAAVAHAFALFVAVSVSANISGGHVNPAVTFGAFLGGNISLFRSILYWIAQLLGSIVACLLLRFVTGGLPTGTFGLTGISVWEALVLEIVMTFGLVYTVYATAVDPKKGSLGTIAPIAIGFIVGANILVGGAFDGASMNPAVSFGPSLVSWSWNNHWVYWVGPFIGAALAALIYDMLFISSHTHEQLPTTDY

SEQ ID NO: 15733 - protein, 231 aa, Trypanosoma cruzi
MTFSPGMSEIVAEFVGTFLFVLTIPLASLGVGSLAPLPIGFMLAAMTFSFGYISGAHFNPAITFATFINGKIPFRKMFFYMISQILAAFLASLYGSAIVGLRIPVPSTDVALVSVWQAILCEMVYTFALASVVLHVNYSRQRGNEFYGFAIGMTVLSASFAVGGFTGGAFNPAVATGTQLVGCIGGNCKPLIFFWIYWVAPLGGSFLASIAYQILDTHDRVAPIELSGQVF

SEQ ID NO: 15734 - protein, 252 aa, Kandelia candel
MPIRQIAVGHPHEATRPDVLKAALAEFISTLIFVFAGEGSGMAFNKLTDNGSTTPAGLIAASIAHAFGLFVGVSVSANISGGHVNPAVTFGAFIGGNITLLRGILYWIGQLLGSTVACLLLKFSTGGLTTSAFSLSSGVSVWNAFVFEIVMTFGLVYTVYATAIDPKKGNLGTIAPSPSVSLWVPSVWTGGAFDGASMNPAVSFGPALVSWTWENHWVYWAGPLIGSAIAALIYDSFFIGYGTHEQLPTADY

SEQ ID NO: 15735 - protein, 287 aa, Nicotiana excelsior
MAENKEEDVKLGANKFRETQPLGTAAQTDKDYKEPPPAPLFEPGELSSWSFYRAGIAEFMATFLFLYITILTVMGLKRSDSLCSSVGIQGVAWAFGGMIFALVYCTAGISGGHINPAVTFGLFLARKLSLTRAIFYMVMQCLGAICGAGVVKGFMVGPYQRLGGGANVVNPGYTKGDGLGAEIIGTFVLVYTVFSATDAKRNARDSHVPILAPLPIGFAVFLVHLATIPITGTGINPARSLGAAIIYNDEHAWDDHWIFWVGPFIGAALAAVYHQIIIRAIPFHKSS

SEQ ID NO: 15736 - protein, 285 aa, Nicotiana excelsior
MENKEEDVRLGANKYSERQAIGTAAQSDKDYTEPPPAPLFEAGELTSWSFYRAGIAEFMATFLFLYITILTVMGVSKSESKCSTVGIQGIAWAFGGMIFALVYCTAGISGGHINPAVTFGLFLARKLSLTRAVFYMVMQCLGAICGAGVVKGFGKTLYQTKGGGANVVNHGYTKGSGLGAEIVGTFVLVYTVFSATDAKRSARDSHVPILAPLPIGFAVFLVHLATIPITGTGINPARSLGAAIIYNQDHAWDDHWIFWVGPFIGAALAALYQQVVIRAIPFKSK

SEQ ID NO: 15737 - protein, 287 aa, Nicotiana excelsior
MAENKEEDVKLGANKYRETQPLGTAAQTDKDYKEPPPAPLFEPGELSSWSFYRAGIAEFMATFLFLYITILTVMGLKRSDSLCSSVGIQGVAWAFGGMIFALVYCTAGISGGHINPAVTFGLFLARKLSLTRALFYMVMQCLGAICGAGVVKGFMVGPYQRLGGGANVVQPGYTKGDGLGAEIIGTFVLVYTVFSATDAKRNARDSHVPILAPLPIGFAVFLVHLATIPITGTGINPARSLGAAIIFNHDQAWDDHWIFWVGPFIGAALAAVYHQIIIRAIPFKTKS

SEQ ID NO: 15738 - protein, 289 aa, Saccharomyces chevalieri
MSNESNDLEKNISHLDPTGVDNAYIPPEQPETKHSRFNIDRDTLRNHFIAAVGEFCGTFMFLWCAYVICNVANHDVALTTEPEGSHPGQLIMIALGFGFSVMFSIWCFAGVSGGALNPAVSLSLCLARAISPARCVVMWFSQIIAGMAAGGAASAMTPGKVLFTNALGLGCSRSRGLFLEMFGTAVLCLTVLMTAVEKRETNFMAALPIGISLFMAHMALTGYTGTGVNPARSLGAAVAARYFPHYHWIYWIGPLLGAFLAWSVWQLLQILDYTTYVNAEKAAGQKKED

SEQ ID NO: 15739 - protein, 231 aa, Shigella flexneri
MFRKLAAECFGTFWLVFGGCGSAVLAAGFPELGIGFAGVALAIGLTVLTMAFAVGHISGGHFNPAVTIGLWAGGRFPAKEVVGYVIAQVVGGIVAAALVYLIASGKTGFDAAASGFASNGYGEHSPGGYSMLSALVVELVLSAGFLLVIHGATDKFAPAGFAPIAIGLALTLIHLMSIPVTNTSVNPARSTAVAIFQGGWALEQLWFFWVVPIVGGIIGGLIYRTLVEKRD

SEQ ID NO: 15740 - protein, 244 aa, Caenorhabditis elegans
MVEDEKDYTIYSKCAAEFIAVLLFVYIGSMQAAGVFLHDGVLHAAFAHGVAIFVLAATFGGVSGAHINPAVTFGIALVGRISPIHAVCYVVSQLLGSVFGALLVRISLPYKMYNVISAGATLCGKGYNWQEGLTAEIVTTYILVQTVLLCAVDTDKNRLAPLAIGFSLIIEILAAGAISGASMNPARSFGPNIMGQVFLKPEHLDAQYMYWNYHWIYYIGPIIGAFIAAGVYRMFFARDYRVLA

SEQ ID NO: 15741 - protein, 273 aa, Caenorhabditis elegans
MVSPYEEDSRPPYMSSYAEETWGQPATTNRKSSYTSRKKEYSLLTKCVAEFLGDLTFVYVGTMQASLFQYADGILHAAFAHGFTIFILVTAFGHISGGHFNPAVSWAIAGAGKMPIFHLPFYVVSQLLGGICGAFLTAAVLSQEQLTSCEAGATLLSPGSQWWQGLIAETVVTFFLVHTILITAADTDTVTLAPLAIGLTLSIDILSTGSITGASMNPARSLGPSIIGSIFATQKTSFYWNNHYIYWAGPLLGSTIALCIYKLFESREERIVR

SEQ ID NO: 15742 - protein, 279 aa, Caenorhabditis elegans
MVSPYEEDSRPPYMSSYAEETWGQPATTNRKSSYTSRKKEYSLLTKCVAEFLGDLTFVYVGTMQASLFQYADGILHAAFAHGFTIFILVTAFGHIRMFPNYSGGHFNPAVSWAIAGAGKMPIFHLPFYVVSQLLGGICGAFLTAAVLSQEQLTSCEAGATLLSPGSQWWQGLIAETVVTFFLVHTILITAADTDTVTLAPLAIGLTLSIDILSTGSITGASMNPARSLGPSIIGSIFATQKTSFYWNNHYIYWAGPLLGSTIALCIYKLFESREERIVR

SEQ ID NO: 15743 - protein, 291 aa, Blumeria graminis f. sp. hordei
MPTDGIPPMLGQSSPLKLRKYEGRLSDDNFRNHVIAAIGEFLGTTLFLFYGFLAAQIINSKPDNLSDAPSLLQLIFVASAFGVSGAVNVWLFYRVSGGHLNPAITIGLTLIGAVPVTRALLLVSVQLLGGILAASLVLAVTPGSLNVQTALGNATSVKQGFFLKMILTATLVLTVFMLAVEKHRTTPLAPLGIGLILFLDVLLAAQFSGGSLNPARSFGPAVVELNFATYHWIYWFGPIAGAVLAAAIFKVLKFLAYETAVAGQDHDGLDVYRLIDDAGGHEVDREIQLEV

SEQ ID NO: 15744 - protein, 233 aa, Plesiomonas shigelloides
MFKPFSAEFFGTFWLVLGGCGSALISAAFPQLGIGFLGVALAFGLTVVTMAYAVGHISGAHFNPAVTLGLWAGGRFPAARVLPYIIAQVIGGIAAAAVLYGIASGKAGFDATTSGFAANGYGIHSPGGYALSACMLSEFVLSAFFVIVIHGATEKRAPAGFAPLAIGLTLTIIHLVSIPVTNTSVNPARSIAAAVFQGTWALDQLWMFCLIPSLGGIAGGLIYRALLARPAEA

SEQ ID NO: 15745 - protein, 271 aa, Pyrocoelia rufa
MGGFSEVLGINEFKTKRESIWKALLAEFVGNIILNYFGCASCMMIAPNVAKPNLVLIALSFGLSVLSLFRHWPYKWRTYNPAVTIAMLYQNISPLKAILYYVIVQCIGAIVGSGLLMASLPERYHDTKMGVTELSVPAGNGIIVEIMLGFILVFTVFGVVDINKHEVKPIAAFAIGVSVVIGHLATVDYTGSSMNPARTFGASVINNDWEDHWVYWVGPIIGGIIAGLLYKYVFAAPPTGPLKIIERYTAVVTDEKELQRLAGGKQDESMP

SEQ ID NO: 15746 - protein, 249 aa, Aedes aegypti
MTESAGVKQLVGVADITENRNIWRMLVAEFLGTFFLVSIGIGSTMGWGGDYAPTMTQIAFTFGLVVATLAQAFGHVSGCHINPAVTIGLMITADISILKGAFYIVSQCVGAIAGAALIKAATPSDVIGGLGVTGIDPRLTAGQGVMMEALITFILVFVVHGVCDNRRSDIKGSAPLAIGLSITAGHLSAIKYTGASMNPARSFGPAVVMGNWTDQWVYWVGPIVGGILAGAVYRLFFKVRKGDEESYDF

SEQ ID NO: 15747 - protein, 239 aa, Drosophila melanogaster
MSKFVGVADITENKKIWRMLLGELVGTFFLIFVGVGSTTSGSVPQIAFTFGLTVATIAQGLGHLSGCHINPAVTLGFLIVGEISILKAAFYIIVQCVGAIAGAAVIKVALDGVAGGDLGVSSFDPSLNCAQAVLIEALITFILVFVVKAVSDPGRQDIKGSAPLAVGLAIAAGHLCAIKLSGASMNPARSFGPAVVQGVWTYHWVYWVGPIAGGLLAGIIYRLIFKVRKGDDETDSYDF

SEQ ID NO: 15748 - protein, 245 aa, Drosophila melanogaster
MVEKTEMSKFVGVADITENKKIWRMLLGELVGTFFLIFVGVGSTTSGSVPQIAFTFGLTVATIAQGLGHLSGCHINPAVTLGFLIVGEISILKAAFYIIVQCVGAIAGAAVIKVALDGVAGGDLGVSSFDPSLNCAQAVLIEALITFILVFVVKAVSDPGRQDIKGSAPLAVGLAIAAGHLCAIKLSGASMNPARSFGPAVVQGVWTYHWVYWVGPIAGGLLAGIIYRLIFKVRKGDDETDSYDF

SEQ ID NO: 15749 - protein, 699 aa, Drosophila virilis
MADESLHTMPLEHNIDYHIVTLFERLEAMRKDSHGNAINNRLSSTLQAPKRSMQAEIRTLEFWRSIISECLASFLYVFIVCGAAAGAGVGASVSSVLLATALASGLAMATLTQCFLHISGAHINPAVTLACCVVRSISPIRAAMYMTAQCGGGIAGAALLYGVTVPGYQGNSQAAISHSAALAAWERFGVEFILTFVVVLCYFVSTDAIKKFMGNSAFAIGAAYSACCFVSMPYLNPARSLGPSFVLNKWDNHWVYWFGPLVGGMASGLVYEHIFSSRRSVRHAKGSIDNDSSSIHSEDELNYDMDLEKPNKYQQSQGTYPRGQSNGGGAAAAQHAAANMAPMGVVNAGAGNYCQNLYTAPPLSSKYEQQQQEPLYGGTRSLYCRSPTLTRSNLNRSQSVYAKSNTAINRDIVPRPGPLVPAQSLYPLRTHQQQQQQQQQQQQQQHQQAVTATQSSHLQNQNVQNQMQQRTESIYAMRGSMRGQQQPLQQQQQQQQQAPVGMQQQQQQQQQQQQLHQGAQLISEPQAQPQGFQPVYGSRNNPTPLDGNHKFERRDQQQQQQQLYGMTGPRNRGQSAQSDDSSYGSYHGSAVTPPARHPSVEPSPPPPPMLMYAPPPQPNAAHPQPIRTQSERKVSAPVVVSQPATCAVTYTTSQVPPTITTSTAQQQQQQQQQQQQQMMMQQQQQAHQQHYGMLPLRPN

SEQ ID NO: 15750 - protein, 248 aa, Vernicia fordii
MARIAFGRFDDSFSLGSFKAYLAEFISTLLYVFAGVGSAIAYNKLTANAALDPAGLVAIAICHGFALFVAVAVGANISGGHVNPAVAFGLALGGQITILTGIFYWIAQLLGSIVACFLLKLVTGGLAIPTHSVAGRVGAIEGVVMEIIITFALVYTVYATAADPKKGSLGTIAPIAIGFIVGANILAAGPFSGGSMYPARSFGPAVVSGDFHDNWIYWVGPLIGGGLAGLIYGNLYISGDHTPLSNDF

SEQ ID NO: 15751 - protein, 262 aa, Pasteurella multocida
MDKSLKAACIGEFLGTALLIFFGVGCVAALKVAGANFGQWEISIMWGLGVAIAVYASAGLSGAHLNPAVTIALWQFACFDGKKVVPYILAQLAGAFCSAALVYFLYHNLFIDVEIAQQMVRGTPESLSLASTFSTYPHPSISVLHAFIVEFVITAVLMALILALTDDGNGLPRGPLAPLLIGFLIAIIGGAMGPLTGFAMNPARDLGPKVFASLAGWGEIALTGGREIPYIFIPVIAPILGGLFGGWIYTKFVGKNLPCHCE

SEQ ID NO: 15752 - protein, 107 aa, Aster tripolium
GGHVNPAVTFGLAVGGNITILTGLFYWIAQLLGSVVACFLLQFVTGGLAVPTHGVADGMNGLQGVVMEIIITFALVYTVYATAADPKKGSLGTIAPIAIGFIVGANI

SEQ ID NO: 15753 - protein, 107 aa, Aster tripolium
GGHVNPAVTFGLAIGGNITILTGLFYWIAQLLGAVVASFLLGFVTGGLAVPTHGVADGMNAIQGVVFEIIITFALVYNVYANAADPKKGSFGTIAPVAIGFIVGANI

SEQ ID NO: 15754 - protein, 107 aa, Aster tripolium
GGHVNPAVTFGLAVGGQITILTGIIYVVAQLAGSIVACYLLSFVTGGLAVPIHGVADGVGAIQGVVMEIIITFALVYTVYATACDPKKGALGTIAPIAIGFIVGANI

SEQ ID NO: 15755 - protein, 107 aa, Aster tripolium
GGHVNPAVTFGLAVGGQITIITGVFYWIAQLLGSVAASFLLSFVTGGLAVPIHGCADGVGAIQGMVMEIIITFALVYTVYGTACDPKKGDVGTIAPIAIGFIVGANI

SEQ ID NO: 15756 - protein, 107 aa, Aster tripolium
GGHVNPAVTFGAFVGGNITLLRGIVYIIAQLLGSTVACLLLKFVTNDMAVGVFSLSAGVGVTNALVFEIVMTFGLVYTVYATAIDPKKGSLGTIAPIAIGFIVGANI

SEQ ID NO: 15757 - protein, 107 aa, Aster tripolium
GGHVNPAVTFGAFVGGHISFFKSILYWIAQCLGSVVACLLLKFATGGLETSAFALSSGVGEWNAVVFEIVMTFGLVYTVYATAIDPKKGDLGIIAPIAIGFIVGANI

SEQ ID NO: 15758 - protein, 287 aa, Samanea saman
MAKDVEVAERGSYSAKDYHDPPPAPLIDAEELGKWSFYRALIAEFIATLLFLYITVLTVIGYKSQSDTKAGGDVCGGVGILGIAWAFGGMIFILVYCTAGISGGHINPAVTFGLFLARKVSLIRAILYMVAQCLGAICGVGLVKAFQKAYYSRYGGGANTLSDGYSTGTGLGAEIIGTFVLVYTVFSATDPKRSARDSHVPVLAPLPIGFAVFMVHLATIPVTGTGINPARSLGAAVIFNQQKAWDDHWIFWVGPFIGAAIAAFYHQFILRAGAAKALGSFRSNPSV

SEQ ID NO: 15759 - protein, 231 aa, Escherichia coli K12
MFRKLAAECFGTFWLVFGGCGSAVLAAGFPELGIGFAGVALAFGLTVLTMAFAVGHISGGHFNPAVTIGLWAGGRFPAKEVVGYVIAQVVGGIVAAALLYLIASGKTGFDAAASGFASNGYGEHSPGGYSMLSALVVELVLSAGFLLVIHGATDKFAPAGFAPIAIGLALTLIHLISIPVTNTSVNPARSTAVAIFQGGWALEQLWFFWVVPIVGGIIGGLIYRTLLEKRD

SEQ ID NO: 15760 - protein, 262 aa, Xenopus laevis
WEFRSFSFWRAVFAEFFGTMFYVFFGLGASLKWAAGPANVLVIALAFGLVLATMVQSIGHVSGAHINPAVTFAFLIGSQMSLFRAIFYIAAQLLGAVAGAAVLYGVTPAAIRGNLALNTLHPGVSLGQATTVEIFLTLQFVLCIFATYDERRNGRLGSVSLAIGFSLTLGHLFGLYYTGASMNPARSFAPAVLTRNFTNHWVYWVGPIIGGALGGLVYDFILFPRMRGLSERLSILKGARPAEPEGQQEATGEPIELKTQSL

SEQ ID NO: 15761 - protein, 273 aa, Xenopus laevis
MRNEICSLAFVRAVFAEFLATMIFVFLGLGSALSWKPSLPNVLQISLAFGLAISTLVQAFGHVSGAHINPAVTVAFLIGCHISFLRALFYIIAQLVGAIAGAAIVRAVAPLDVRGNLAINAINSGSPGQACAVELFLTFQLVLCVFASTDSRRSDNVGSPALSIGLSVTVGHLLGIYLTGCSMNPARSFGPAAITGIFTDHWVFWIGPLVGGIMASLFYNYIFFPHKKSFSDRLAILKGTYQPEEAWDNKQEQRRQSVELYSAHPLPKVIDKF

SEQ ID NO: 15762 - protein, 274 aa, Bufo marinus
MRNEICSLAFVRAVFSEFLATLIFVFLGLGSALNWPSALPTVLQISIALGLAIGTLVQTLGHVSGAHINPAVTVAFLLGSHISILRAVFYIVAQLVGAIAGAGILHALAPGDVRGNLAINQVSAGSPGLALVVELVLTFQLVLCIFASTDGRRTDNVGSPALSIGLSVTLGHLLGIYFTGCSMNPARSLGPAAITGIFTDQWVFWIGPLVGGILASLLYNYLLYPYNKSLSERIAVLKGTYEPEEESWDNKQDHKRQSVELYSAHPLPKVTEKF

SEQ ID NO: 15763 - protein, 263 aa, Rana pipiens
MWEFRSFSFWRAVFAEFFGTMFYVFFGLGASLKWAAGPANVLVIALAFGLVLATMVQSIGHVSGAHINPAVTFAFLIGSQMSLFRAIFYIAAQLLGAVAGAAVLYGVTPAAIRGNLALNTLHPGVSLGQATTVEIFLTLQFVLCIFATYDERRNGRLGSVSLAIGFSLTLGHLFGLYYTGASMNPARSFAPAVLTRNFTNHWVYWVGPIIGGALGGLVYDFILFPRMRGLSERLSILKGARPAEPEGQQEATGEPIELKTQSL

SEQ ID NO: 15764 - protein, 276 aa, Bacillus halodurans
MSPFLGEVIGTMILIILGGGVVAGVVLKGTKSENGGWIVITAAWGLAVATAVYCVGQISGAHLNPAVTIGLALVGAFEWSQVAGYIVAQMLGAMIGATLVFLHYYPHFKATEDQGAKLAVFSTDPAIKHLPANFFSEVLGTFVLVLGILAIGANEFTEGLNPLIVGLLIVVIGLSLGGTTGYAINPARDLGPRIAHFLLPIPGKGSSNWSYAWIPIVGPIIGGGIGALTYAALFEGIVYSALWLFLAAFALVLLYASFIEKKHEAKGKDQPVAMAK

SEQ ID NO: 15765 - protein, 262 aa, Gallus gallus
MRELRSSSFWRAILAEFLGSLLYTLLGLGASLRWAPGPHGVLGSALAFGLAQATLVQALGHVSGGHINPAITLAFLLASQLSLPRALGYLLAQLLGALAGAGVLYGVTPAAVRGTLGLSALHPSVGPGQGTVVELLLTAQFILCVFASFDDRHDGRPGSAALPVGFSLALGHLFGIPFTGAGMNPARSFAPAVITRNFTNHWVFWAGPLLGAALAALLYELALCPRARSMAERLAVLRGEPPAAAPPPEPPAEPLELKTQGL

SEQ ID NO: 15766 - protein, 264 aa, Salmonella enterica subsp. enterica serovar Typhi
MNDSLKAQCGAEFLGTGLFLFFGIGCLSALKVAGASLGLWEICIIWGLGISLAVYLTAGISGGHLNPAVTIALWLFACFPKQKVLPYIIAQFAGAFGGDLLAYVLYSSLFTEFETAHHMVRGSVESLQLASIFSTYPAAALNVWQAALVEVVITSILMGMIMALTDDGNGIPKGPLAPLLIGILVAVIGASTGPLTGFAMNPARDFGPKLFTWLAGWGNMAMSGGREIPYFIVPIVAPVIGACAGAAIYRYFIGKNLPCNRCKL

SEQ ID NO: 15767 - protein, 153 aa, Macaca radiata
AQCVGAIVAAAILSGITSSLPGNSLGRNDLADGVNSGQGLGIEIIGTLQLVLCVLATTDRRRRDLGGSAPLAIGLSVALGHLLAIDYTGCGINPARSFGSAVITHNFSNHWIFWVGPFIGGALAVLIYDFFLAPRSSDFTTPVKVWTSGQERG

SEQ ID NO: 15768 - protein, 214 aa, Thellungiella halophila
MGVKRSPNMCASVGIQGIAWAFGGMIFALVYCTAGISGGHINPAVTFGLFLARKLSLTRAVYYIVMQCLGAICGAGVVKGFQPKQYQALGGGANTIAHGYTKGSGLGAEIIGTFVLVYTVFSATDAKRNARDSHVPILAPLPIGFAVFLVHLATIPITGTGINPARSLGAAIIFNKDNAWDDHWVFWVGPFIGAALAALYHVIVIRAIPFKSRS

SEQ ID NO: 15769 - protein, 109 aa, Orycteropus afer
SIAFSKAVFSEFLATLLFVFFGLGSALNWPQALPSGLQIAMAFGLAIGTLVQTLGHISGAHINPAVTVACLVGCHVSFLRAIFYVAAQLLGAVAGAALLHELTPPDIRG

SEQ ID NO: 15770 - protein, 323 aa, Bos taurus
MSDRPAATRWGKCGPLCTRESIMVAFKGVWTQTFWKAVTAEFLAMLIFVLLSLGSTINWGGAEKPLPVDMVLISLCFGLSIATMVQCFGHISGGHINPAVTVAMVCTRRISIAKSVFYIAAQCLGAIIGAGILYLVTPPSVVGGLGVTTVHGNLSAGHGLLVELIITFQLVFTIFASCDSKRTDVTGSIALAIGISVAIGHLFAINYTGASMNPARSFGPAVIMGNWENHWIYWVGPIIGAVLAGGLYEYVFCPDVELKRRFKEAFSKAAQQTKGSYMEVEDNRSQVETDDLILKPGVVHVIDIDRGEEKKGKDPSGEVLSSV

SEQ ID NO: 15771 - protein, 323 aa, Bos taurus
MSDRPAARRWGKCGPLCTRESIMVAFKGVWTQTFWKAVTAEFLAMLIFVLLSLGSTINWGGAEKPLPVDMVLISLCFGLSIATMVQCFGHISGGHINPAVTVAMVCTRRISIAKSVFYIAAQCLGAIIGAGILYLVTPPSVVGGLGVTTVHGNLSAGHGLLVELIITFQLVFTIFASCDSKRTDVTGSIALAIGISVAIGHLFAINYTGASMNPARSFGPAVIMGNWENHWIYWVGPIIGAVLAGGLYEYVFCPDVELKRRFKEAFSKAAQQTKGSYMEVEDNRSQVETDDLILKPGVVHVIDIDRGEEKKGKDPSGEVLSSV

SEQ ID NO: 15772 - protein, 301 aa, Bos taurus
MVAFKGVWTQTFWKAVTAEFLAMLIFVLLSLGSTINWGGAEKPLPVDMVLISLCFGLSIATMVQCFGHISGGHINPAVTVAMVCTRRISIAKSVFYIAAQCLGAIIGAGILYLVTPPSVVGGLGVTTVHGNLSAGHGLLVELIITFQLVFTIFASCDSKRTDVTGSIALAIGISVAIGHLFAINYTGASMNPARSFGPAVIMGNWENHWIYWVGPIIGAVLAGGLYEYVFCPDVELKRRFKEAFSKAAQQTKGSYMEVEDNRSQVETDDLILKPGVVHVIDIDRGEEKKGKDPSGEVLSSV

SEQ ID NO: 15773 - protein, 263 aa, Bos taurus
MWELRSASFWRAICAEFFASLFYVFFGLGASLRWAPGPLHVLQVALAFGLALATLVQAVGHISGAHVNPAVTFAFLVGSQMSLLRAICYMVAQLLGAVAGAAVLYSVTPPAVRGNLALNTLHPGVSVGQATIVEIFLTLQFVLCIFATYDERRNGRLGSVALAVGFSLTLGHLFGMYYTGAGMNPARSFAPAILTRNFTNHWVYWVGPVIGAGLGSLLYDFLLFPRLKSVSERLSILKGSRPSESNGQPEVTGEPVELKTQAL

SEQ ID NO: 15774 - protein, 264 aa, Salmonella typhimurium LT2
MNDSLKAQCGAEFLGTGLFLFFGIGCLSALKVAGASLGLWEICIIWGLGISLAVYLTAGISGGHLNPAVTIALWLFACFPKQKVLPYIIAQFAGAFGGALLAYVLYSSLFTEFETAHHMVRGSVESLQLASIFSTYPAAALNVWQAALVEVVITSILMGMIMALTDDGNGIPKGPLAPLLIGILVAVIGASTGPLTGFAMNPARDFGPKLFTWLAGWGNMAMSGGREIPYFIVPIVAPVIGACAGAAIYRYFIGKNLPCNRCEL

SEQ ID NO: 15775 - protein, 323 aa, Ovis aries
MSDRPAARRWGKCGPLCTRESIMVAFKGVWTQTFWKAVTAEFLAMLIFVLLSLGSTINWGGAEKPLPVDMVLISLCFGLSIATMVQCFGHISGGHINPAVTVAMVCTRRISIAKAVFYIAAQCLGAIIGAGILYLVTPPSVVGGLGVTTVHRNLSAGHGLLVELIITFQLVFTIFASCDSKRTDVTGSIALAIGISVAIGHLFAINYTGASMNPARSFGPAVIMGNWENHWIYWVGPIIGAVLAGGLYEYVFCPDVELKRRFKEAFSKAAQQTKGSYMEVEDNRSQVETDDLILKPGVVHVIDIDRGEEKKGKDPSGEVLSSV

SEQ ID NO: 15776 - protein, 259 aa, Mus musculus
MGRKKIQITRIMDERNRQVTFTKRKFGLMKKAYELSVLCDCEIALIIFNSSNKLFQYASTDMDKVLLKYTEYNEPHESRTNSDIVETLRKKGLNGCESPDADDYFEHSPLSEDRFSKLNEDSDFIFKRGPPGLPPQNFSMSVTVPVTSPNALSYTNPGSSLVSPSLAASSTLADSSMLSPPPATLHRNVSPGAPQRPPSTGSASGMLSTTDLTVPNGAGNSPVGNGFVNSRAPPIPMPSRRKMNWSVWPSLTADFPAAA

SEQ ID NO: 15777 - protein, 498 aa, Mus musculus
MGRKKIQITRIMDERNRQVTFTKRKFGLMKKAYELSVLCDCEIALIIFNSSNKLFQYASTDMDKVLLKYTEYNEPHESRTNSDIVETLRKKGLNGCENPDADDYFEHSPLSEDRFIKLNEDSDFIFKRGPPGFPPQNFSMSVTVPVTSPNPLSDTNPGSSLVSPSLAASSTLAETSMLSPPPATLHRNVSPGAPQRPPSTGSASGMLSTTDLTVPNGAGNSPVGNGFVNSRASPNLIGNTGANSLGKVMPTKSPPPPGGGSLGMNSRKPDLRVAIPPSSKGMMPPLSEEEELELNAQRISSSQATQPLATPVVSVTTPSLPPQGLVYSAMPTAYNTDYSLTSADLSALQGFTSPGMLSLGQASAWQEHHLGQTTLSSLVAGGQLSQGSNLSINTNQNINIKSEPISPPRDRMTPSGFQHHHHHPQQQPPPQPPQPQPRQEMGRSPVDSLSSSSSSYDGSDREDPRGDFHSPIVLGRPANTEDRESPSVKRMRMDTWVT

SEQ ID NO: 15778 - protein, 125 aa, Harmonia nutans
TNRQVTYSKRRNGIFKKAHELTVLCDAKVSLIMFSNTGKFHEYISPSTTTKKIYDMYQTTLGFDLWSSHYERMTETMKKLKDSNNKLRREIRQRVLGEDLDGLDMNDLTILEQQMQDSLTVVRER

SEQ ID NO: 15779 - protein, 228 aa, Hieracium piloselloides
MARGKIQIKKIENSTNRQVTYSKRRNGLFKKASELTVLCDAKVSIIMVSCTDKLHEYISPSTTTKQFFDQYQKAAGIDLWNSHYEKMQEELRQLKEVNKNLRRQIRQRLGDCLEHLGFEKLLDLEKESQEAVYIIRERKLKVIGNKLETSKKKVRSAQDVYKKLMHEFGIRGEDPQFGMIEDGEYDAVYGYPPQMSAPRILTFRLQPNNHPNNLHATASDLTTYALLG

SEQ ID NO: 15780 - protein, 224 aa, Hieracium piloselloides
MARGKIQIKKIENSTNRQVTYSKRRNGLFKKASELTVLCDAKVSIIMVSCTDKLHEYISPSTTTKQFFDQYQKAAGIDLWNSHYEKMQEELRQLKEVNKNLRRQIRQRLGDCLEHLGFEKLLDLEKESQEAVYIIRERKLKVIGNKLETSKKKVRSAQDVYKKLMHEFGIRGEDPQFGMIEDGEYDAVYGYPPQMSAPRILTFRLHPNNLHATASDLTTYALLG

SEQ ID NO: 15781 - protein, 208 aa, Sagittaria montevidensis
MGRGKIEIKRIENSANRQVTYSKRRNGIIKKAREISVLCGCEVSLVIFSSSGKMSEFHSTTLSKILETFQQNQGQTLWGAKHESLKAEIDRMKKENDNMRIQLRHMKGEDLTSMEPRDLYTIETALINGIANVRGKQMEIFKKKAKNQKALEEENKQLAYILHQQSLAMNGNLREMPQDYHQKDRDFTAPVPFGFRVQPMQPNLQENK

SEQ ID NO: 15782 - protein, 248 aa, Rosa hybrid cultivar
MAYENKPNTVLDADAQRRLGRGKIEIKRIENTTNRQVTFCKRRNGLLKKAYELSVLCDAEVALIVFSNRGRLYEYSNNSVRETIERYKKACADSSNNGSVSEATTQYYQQEAAKLRAQITTLQNSNRGYMAEGLSNMSIKELKGVETKLEKAISRIRSKKNELLFAEIEYMQKRELDLHNNNQLLRAKIADNERHQQSINAIAGGHGSYEIMQPTQPFHEARNYFQVNALEPNIHQYSRHDQISLQLV

SEQ ID NO: 15783 - protein, 200 aa, Chloranthus spicatus
IENSTNRQVTFSKRRNGIVKKAKEITVLCDAKVSFIIFSTTGKMFEFVSPSTTLMDMLERYQTNSGKRLWDAKHERLSAELDRIKKENDSMQIELRHLKGEDINSLHPKELIPIEEALQSGLTNVRAKQMDFLKMLKKNERTLEDENKRLSYILHHQQLALDGNMRDLDNGFHPKERDYSSQMPFIFRVQPIQPNLQQSK

SEQ ID NO: 15784 - protein, 194 aa, Chloranthus spicatus
GGILKKAKELSVLCDAQVSLIMSSSTGKFYEYCSPGTNTKKIFDRYQQASGINLWNSQYEKMQEYFEKLKETNNKLRKEIRQRRGEDLNGLNINELRSLEQNLDDSLKIIRERKYHVIKTQTETYGKKLKHRQEEHEKLLHRLEGIDMNQGYDMLDREGDYETAFGLANGGGHVFAFRLQPIQPNLHDNGYGTH

SEQ ID NO: 15785 - protein, 187 aa, Akebia quinata
NGIMKKAKEITILCDAQVSLVIFSSSGKMSDYCSPSTTLTKVLDRYQKTSGKRLWDAKHEYLSTEVDRVKKENDCMQIELRHLKGEDITSLNPKELIPIEEALENGLVNVRAKQMEYLKMLKKNERYLEEENKHLRCILHHQQIEIEGNMRMEMENGYNTQKGRDYPSQMPFAFRAQPIQPNLQENK

SEQ ID NO: 15786 - protein, 187 aa, Akebia quinata
NGIMKKAKEITILCDAQVSLVIFSSTGKMCDYCSPSTTLTKVLDRYQKTSGKRLWDAKHEYLSTEVDRIKKENDCMQIELRHLKGEDITSLNPKELIPIEEALENGLVNVRAKQMEYLKMLKKNERYLEEENKHLRCILHHQQIEIEGNMRMEMENGYNTQKGRDYPSQMPFAFRAQPIQPNLQENK

SEQ ID NO: 15787 - protein, 203 aa, Akebia quinata
AGIIKKARELSVLCDAQVSLIMFSGTEKLSEYISPTVTTKKVFDRYQQTAGINLWSTHYERLQENLNKQKEINRRLRKEIRQRMGEDLNELSIDVLRGLEQNMEHSLNIVRERKLKVIRTQSDTYRKKVTHLEQVHNNLMRELVQEGRNEDPHYVFANHNGDYQSALELANNGGSHIFALRLQPSQPILREGGGYGSHDLRLA

SEQ ID NO: 15788 - protein, 143 aa, Cichorium intybus
MAREKIKIRKIDNITARQVTFSKRRRGLLKKAEELAVLCDADVALVIFSATGKLFEYASSSMQELLGKYKLHSTNNVNKVDEPSLDLQLVESQESRMSQEVLEKDRELSQLRGEDLQGLTLEELQRLESLLEGRLNRVAPDKG

SEQ ID NO: 15789 - protein, 189 aa, Michelia figo
GGIMKKAKELTVLCDAQVSLIMFSSTGKFSEYCSPSTTTKNIFDRYQQASGTSLWNSHYERMQGHLIKLKEENNNLRREIRQRIGEDLDDLEIEELRGLEQNLESSIKVVRERKYHVIQTQTETYKKKLRSLNDEQAKLIRVLEGQAENGAYGLVDNGGPDYESALVLANGGAHILHDTGFGIHDLRLA

SEQ ID NO: 15790 - protein, 256 aa, Selaginella remotifolia
ETWLVTTTSSSNPEVGLATGLAATGGAQDLLNPPLNKQKEPPVGRGKIEIKRIENATSRQVTFSKRRGGLLKKAHELSVLCDAQVALIIFSSTGKLFEYASTSMKEILDRYGKYPESVQGGNMASHHEASDFISHEIRRLKQQLQRSQQSRRHLLGDDLSHLPIKDLQNLEQQLEVGLSRVRSRKDQVLMDQVDELRRRELTLHKDNEMLRRRLSDVQGMAESGRSTLIVNPWRQGNLLQTWQMYPCHFLDTKAAA

SEQ ID NO: 15791 - protein, 183 aa, Helleborus orientalis
NGILKKAKEIAVLCDAQLSLVIFSSTGKMTDYTSPNTSLIKILDRYQTSSGNKLWDAKHEHLHHEVDRVKKENDSMRIELRHLKGEDLTSLNPRELIPIEEGLEHGLSKVRDKKTEIWKRIKKNDRMLEEENEHLHNIVKQQAMDGNVRDFENEYHQKGMDYHSQMPFAFHIQPMQPNLQDTE

SEQ ID NO: 15792 - protein, 185 aa, Helleborus orientalis
NGILKKAKEIAVLCDAQLSLVIFSSTGKMTDYTSPNSSLIKILDRYQKSSGNKLWDAKHEYLHHEVDRIKKENDSMQIELRHLKGEDLTSLNPRELIPIEEALEHGLSKVRDKKTEIWKKMKKNDRMLEEENTHLHNIVKQQTVDGNVRDFQNGYHHQKGGMDYHSQIPYNFHVQQMQPNLQDAK

SEQ ID NO: 15793 - protein, 200 aa, Helleborus orientalis
AGILKKAKELTVLCDAQVSLLMFSSSGKVHEYTSPSTTMKNVYDRYQQVLGVNLWQSHYERLQDNLKKQKEINSKLRREIRQRNGEDLDNLSCQQLRGLEQNMEKSVNCVRARKFHVLHTQTETFKKKVKHLEQEQTNLFRTCERDNGDEHYAVIGPEGDYQSAIGLANGGSHIFAFRLQPSQANIQDEEGYDPYSLSLA

SEQ ID NO: 15794 - protein, 164 aa, Cleisostoma racemiferum
IENKINRQVTFAKRRNGLLKKAYELSVLCDAEVALIIFSNRGKLYEFCSSTSMLKTLEKYQKCNFGSPESTIISRETQSSQQEYLKLKSRVEALQRSQRNLLGEDLGPLGSKELEQLERQLDSSLKQIRSTRTQFMLDQLADLQRREHMLCEANKALKRRFEES

SEQ ID NO: 15795 - protein, 242 aa, Gerbera hybrid cultivar
MGKGRLELKRIENKINRQVTFAKRRNGLLKKAYELSVLCDAEVALIVFSTRGKLYEFSSTSSMLKTLERYEKCSFGPPEQRRPAAKEDLQEQSSYQEYMRLKERYDALKRLERNYYGEEIDSLTTSELESLERQLHCSLKQIRTIRTQSLLDKLYEQQKMEHQLYESNKTLRLRLDEEGQAEALQWDAHAHANGMVYAHQHQVSQPMRDTFYHPTGCETTLQIGYQSEQMSAVNHQMQGWPA

SEQ ID NO: 15796 - protein, 243 aa, Agapanthus praecox
MGRGRVELKRIENKINRQVTFSKRRNGLLKKAYELSVLCDAEVALIVFSSRGKLYEFGSAGTSKTLERYQRCCYTSQDATIADREKQNWYQEVARLKAKFESLQSAQRHLLGEDLGPLSVKELQQLERQLEASLSQARQRKTQIMFDQMEELRKKEHHLGEINKQLKTKLEAEGENLRAIQGSWESDATNVGGGNVFSMHPSHSSAMECEPTLQIGYHQLVQPEGSLPRNSGGENNFMLGWVL

SEQ ID NO: 15797 - protein, 185 aa, Aquilegia alpina
NGILKKAREIHILCGAEIALVIFSSTGKMSEYISPPGPTTLIKILDKYQKTSGKKLWDAKHEYLSSELDRIKKENDNMQIELRHLKGEDINSLNAKELIPIEEALQNGLSKVRDKKSDIWRMMRKNTGLLEEENKRLSYHLHSLEIGGNDREMENGYHQKGRDYPAQMPFTFRVQPIQPNLQESK

SEQ ID NO: 15798 - protein, 203 aa, Clematis chiisanensis
NRLVTYSKRRTGIMKKARELTVLCDAEVSLIMFSCTGKLAEYTSPSTTPKKVYDQYQRVTRINLWKSYYEKLQESLKQQKEVNMKLHKEIGQRTGKESLDGVSFEKLHGLEQDLDGTLKVVRERKYHVIATQTETSKKKLKNKQEAHKRLVREIEARNEVAYYGGDFESIMAMSNGGAHLFSYHLQPNPQEVEAHGACDFHLA

SEQ ID NO: 15799 - protein, 185 aa, Berberis gilgiana
NGIMKKAKEISVLCEAEVSLVIYSGTGKMSEYCSPSTSLIKILDRYQKASGKKLWDAKHEYLNTEVDRVKKENDNMQIELRHLKGEDITSLHPKELIPIEEALQNGLTKVKAKQNEYIKMMKKKERMLEEENKHLSCILHQQQVEMDGNVREMENGYQQKSRDFLNHIPFAFCVQPIQPNLQQNK

SEQ ID NO: 15800 - protein, 185 aa, Berberis gilgiana
NGIMKKAKEITVLCEAEVSLVIFSGTGKMSEYCSSSTSLIKILDRYQKASGKRLWDAKHEYLNTEVDRVKKENDSMQIELRHLKGEDITSLHPKELIPIEAALQHGLTKVIAKQTEYVKMMKKKERMLEEENKHLSYILHQQQGEMDGNLREMENGYQQNNRDFPNNIPFAFRGQPIQPNLQGNK

SEQ ID NO: 15801 - protein, 210 aa, Gerbera hybrid cv. 'Terra Regina'
MGRGKVQLKRIENKINRQVTFSKRRGGLLKKAHEISVLCDAEVALIVFSAKGKLFEYSTDSCMENILDRYEQYSNIDRQHVAVDTDSPIRWTQECNKLKSRAELLQRNLRHYMGEDIESLGLREIQNLEQQLDTALKRIHSKKNQLLHQSISELQKKEKAIQEQNNTLIKNIKEKEKTITQKAQWEPHNYGPNTTPLLFSLPPHSSLNIG

SEQ ID NO: 15802 - protein, 187 aa, Hydrangea macrophylla
NGILKKAKEITVLCDASVSLIVFASSGKMHEYCSPKTTLIDILDKYHTQSGKRLWDAKHENLSNEIDRIKKENDNMQIELRHLKGEDVTSLNHKELMALELALENGLASIRDRKDEVFEMIKKNVKIQALEDDNKRLIYELHQQEMNMECNVREMENGYQRVGDYQSHQMPFAFRVQPIQPNLQERM

SEQ ID NO: 15803 - protein, 125 aa, Osmadenia tenella
TNRQVTYSKRRNGIFKKAHELTVLCDAKVSLIMFSNTGKFHEYISPSTTTKKIYDMYQTTLGFDLWSSHYERMTETMKKLKDSNNKLRREIRQRVLGEDLDGLDINDLTILEQQMQDSLTVVRER

SEQ ID NO: 15804 - protein, 222 aa, Canavalia lineata
MARQKIKIKKIDNVTARQVTFSKRRRGIFKKAEELSVLCDAEVGLIIFSATGKLFEYPSSSMKDIITKYNQHSHDNNQLGRPQNLQVEQCVDLSKEVAERNQQLRQMKGEDFQGLNLDDLQQLEKTLETGLERVNETKEKRIMDEIVALHKKGLKLEEENKHLKQKMAMLCMGKSSFLVDSDITLQEVVSSESMNVCSCNSGPSLEDDSSDTSLKLGLPFPN

SEQ ID NO: 15805 - protein, 221 aa, Pinus radiata
MVRGKTQMKRIENDTSRQVTFSKRRNGLLKKAYELSVLCDAEVGLIIFSPRGKLYEFASPSMEEILEKYKKRSKENGMAQTTKEQDTQYSKHSKQKLANMEEQIRILESTQRKMLGEGLESCSMAELNKLESQAERGLSHIRARKTEILVDQIECLKRKERLLSEENALLSRKWVDRQSVDGSGSTSSSIGLGSIEQIEVETQLVIRPPNAQDHCSVNSGH

SEQ ID NO: 15806 - protein, 208 aa, Gnetum gnemon
LKKAYELSILCDAEVALIIFSSTGKLYDYCSSSMKVLLERYENDFREKGTARDQEIDNGDVLKAQQQVAELERARRQMLGEDLEGLSLKQLQILEANLETALNRVRNRKGVQILKDINDLQRKGQEILEENNRLRQQLRQRYNNRAPLENFEAEESLPIGQLLAHEPPQSQSSDSISTSFSLKLGNGVVIPDNEVSDTSLHLGLPSHS

SEQ ID NO: 15807 - protein, 244 aa, Gnetum gnemon
  unsure (1)..(244): unsure at all Xaa locations
MVRGKTQMKRIENATSRQVTFSKRRNGLLKKAYELSILCDAEVGLIIFSPRGKLYEFANPSMQKMLDRYQKCCQESTANTSKNLVEDTQHLKREVAIMEEKIKMLEYAQKKLLGENLESLSMKELTQLENQAERGLVNIRARKTEILMDQINQLKRKSQLLGEENAVLRKKCNGPYMGGGLLSILHAGASGAGPXNNNNNNGGSGVTHHDDNNNNNRSNNVNVEDVETQLNIGPPDVHCSINQC

SEQ ID NO: 15808 - protein, 253 aa, Gnetum gnemon
MGRGRVQLRRIENKINRQVTFSKRRNGLLKKAYELSVLCDAEVALIIFSTRGKLYEFASSSMSKTLERYEKCSYSMQENASTDRDAQNWHHEVTKLKAKLESLHKAQRSLMGEDLGPLNIKELQSLEQQLEVALGHVRNRKTQLLIQTIDELRDKERTLQEVNKSLQKKLSETEGRNVIPALPHAPNGSGEWESSTLTTTTYALQTQQTSNIHHVDCEPTLHIGPYHQAVHHEAITAPPATHSEPHNQYIWWV

SEQ ID NO: 15809 - protein, 185 aa, Liriodendron tulipifera
GGILKKAKEITVLCDAQVSLVIFSSTGKISEYCSPSTTLVKILDRYQKSSGKKLWDAKHEHLSNEVERIKKENDSMQIKLRHLKGEDITSLHPRELIPIEEALQNGLACVRSKQMEYLKMLKKNERTLEEENKRLSYILHQQQLAMDGNAREMDHGYNQREREYHQQLPFTFRLQPIQPNLHQNQ

SEQ ID NO: 15810 - protein, 200 aa, Syringa vulgaris
NRQVTYSERRNGLMKKAKEISVLCDAQVSVVIFASSGKMHEFCSPSTTLIDMLDQYHKLSGKKLWDAKHEHLDNEINRIKKENDRMQTELRHLVGEDITTLNYKELMVLEEVLENGISSLKAKQMEFVPAMRKHNEMLGGRRTGGLQFKLRQMHLDPTMDEHNVLENGDVYHQQGVGDYEYQMPFAFRVQPMQPNLQDRF

SEQ ID NO: 15811 - protein, 184 aa, Calycanthus floridus
SGLLKKAKEITVLCDADVSLIIFSATGKMSEYCSPSTSLIKILDRYQKASGNKLWDAKHEYLSMEVERIKKENDSMQIELRHLKGEDLTSLRPKELIPIEEALQNGLTNVRERQEELLKILKKNEKVLEEENMRLSYILHHQQLAMDGSMREMEQGYHHEESDYPSDMQLAFRVQPLQPNLQNK

SEQ ID NO: 15812 - protein, 186 aa, Calycanthus floridus
GGILKKAKEITVLCDAQVSLVIFSSTGKMSEYCSPSTTLVKILDRYQKASGKRLWDAKHEYLNNEVERIKKENDSMQIKLRHLKGEDLTSLHPKELIPIEEALENGLASVRDRQMECLRIYKKNERTLEDENKRLTYILHQQQQMAMDGNVREVDHGYHHKIRDYSNQMPFAFRIQPIQPNLHQDK

SEQ ID NO: 15813 - protein, 245 aa, Eucalyptus globulus
MGRGRVQLKRIENKINRQVTFSKRRCGLLKKAHEISVLCDADVALIVFSTKGKLFEYATDCCMERILERYERYSYAESQVLTNNAETNGNWTLEHAKLKARMEILQKNQKNLMGEELDSLSLKELQNLEHQLDTALKNIRSRKIQLMCESISELQRKDKALQEQNNMLAKKVKEKEKALAQQTQWDNPQDDGLTSSSVILSQSLQPLNIGGPYHPSGIEEGAALGPPQHRNATLFPSWMLSHLQE

SEQ ID NO: 15814 - protein, 205 aa, Eucalyptus globulus
MGRGRVQLKRIENKINRQVTFSKRRCGLLKKAHEISVLCDADVALIVFSTKGKLFEYATDCCMERILERYERYSYAESQVLTNNAETNGNWTLEHAKLKARMEILQKNQKNLMGEELDSLSLKELQNLEHQLDTALKNIRSRKIQLMCESISELQRKDKALQEQNNMLAKKVKEKEKALAQQTQWDNPQDDGLTSSSGSLPSEWN

SEQ ID NO: 15815 - protein, 244 aa, Eucalyptus globulus
MGRGRLQLKRIENKINRQITFSKRRAGLLKKAHEISVLCDAEVALIVFSAKGKLFEYSTDSCMERILERYERYSYAEHQVLASETESIGSWTLEHAKLKARLEVLHRNYRHFMGEDLDSLSLKDLQNLEQQLESALKHIRSRKNQLMHESISVLQKKDRALQEQNNLLTKKIKEKERALAQQAQWEQQDHALDSPVVLPHYLPSLDINGSYQARHNGHDDGENLTQPRAGTLLPPWISASQLRL

SEQ ID NO: 15816 - protein, 198 aa, Sanguinaria canadensis
AGIMKKARELTVLCDAEVSLIMFSSTGKFSEYISPSATTKRIYDRYQQVSGTNLWNSHYESMQNHLNKQKEINNRLRREIRQRMGEDLDDLTFEELRGLEQNLDTSLKVVRDRKYHVITTQTDTTRKKIRSLTETHHNLLREFEGRDEDPHYALANQEEDYEAVLELANGGPNIFAFRLQPSQPNLHDGYSSNDLRLA

SEQ ID NO: 15817 - protein, 247 aa, Ipomoea nil
MGRGRVQLKRIENKINRQVTFSKRRTGLLKKAHEISVLCDAEVALIVFSTKGKLFEYATESCMEKILERYERYSYAERQLNSTDQNSQGSWTLEHAKLKARMEVLQRNQRHYEGEDLDSLSLKELQNLERNLIQHSNIRSKRNQLMYESILCSEKDKHCRTKYQLSKKIKEREKEMATQQQQQQEVQWEQPNDDINSSYVVPPPLVHLSSEGEYQGEGEYGETEGTQRQQQNNTSAMPQWMLSHLQG

SEQ ID NO: 15818 - protein, 126 aa, Actinidia deliciosa
  unsure (1)..(126): unsure at all Xaa locations
IENKINRQVTFSKRRSGLLKKANXISVLCDAEVALIVFSHRGKLFEYSTDACMEKILERYERYSYAERELVNDPETPFLNVQKNWSLECTRLGEKIELLQRNIGHYMGQHLDSLSLKDLQHFEQQL

SEQ ID NO: 15819 - protein, 236 aa, Gossypium hirsutum
MGRGRVELKRIENKINRQVTFAKRRNGLLKKAYELSVLCDAEVALIIFSNRGKLYEFCSSSSMIKILERYQKCNYGAPEPNVSSREAALELSSRQEYLKLKARYDALQRSQRNLLGEDLGPLSSKELESLEKQLDSSLKLIRSTRTQYMLDQLNDLQRKEHLLNEANRTLKQRLVEGYQVNSLQLNPNATEDVGYGRQQVHHQPHGDAFFHPLDCEPTLQIGYQHDPMSVVTAGPV

SEQ ID NO: 15820 - protein, 240 aa, Arabidopsis thaliana
MAREKIQIRKIDNATARQVTFSKRRRGLFKKAEELSVLCDADVALIIFSSTGKLFEFCSSSMKEVLERHNLQSKNLEKLDQPSLELQLVENSDHARMSKEIADKSHRLRQMRGEELQGLDIEELQQLEKALETGLTRVIETKSDKIMSEISELQKKGMQLMDENKRLRQQGTQLTEENERLGMQICNNVHAHGGAESENAAVYEEGQSSESITNAGNSTGAPVDSESSDTSLRLGLPYGG

SEQ ID NO: 15821 - protein, 210 aa, Arabidopsis thaliana
MAREKIQIRKIDNATARQVTFSKRRRGLFKKAEELSVLCDADVALIIFSSTGKLFEFCSSSMKEVLERHNLQSKNLEKLDQPSLELQLVENSDHARMSKEIADKSHRLRQMRGEELQGLDIEELQQLEKALETGLTRVIETKSDKIMSEISELQKKGMQLMDENKRLRQQVCVLPSLLITNPFLLSTINVHTPKFNPQLSTTHMFDHTVR

SEQ ID NO: 15822 - protein, 220 aa, Arabidopsis thaliana
MAREKIRIKKIDNITARQVTFSKRRRGIFKKADELSVLCDADVALIIFSATGKLFEFSSSRMRDILGRYSLHASNINKLMDPPSTHLRLENCNLSRLSKEVEDKTKQLRKLRGEDLDGLNLEELQRLEKLLESGLSRVSEKKGECVMSQIFSLEKRGSELVDENKRLRDKLETLERAKLTTLKEALETESVTTNVSSYDSGTPLEDDSDTSLKLGLPSWE

SEQ ID NO: 15823 - protein, 264 aa, Brassica napus
MGRGKIEIKRIENANSRQVTFSKRRAGLLKKAHELSVLCDAEVAVIVFSKSGKLFEFSSTSMKKTLLRYGNYQISSDVPGINCKTENQEECTEVDLLKDEISMLQEKHLHMQGKPLNLLSLKELQHLEKQLNFSLISVRERKELLLTKQLEESRLKEQRAELENETLRRQVQELRSFLPSINQHYAPSYIRCFAIDPKNSLLSNTCLGDINCSLQNTNSDTTLQLGLPGEAHDTRKNEGDRESPSSDSVTTSTTRATAQRISLV

SEQ ID NO: 15824 - protein, 265 aa, Brassica napus
MDRGKIEIKRIENANSRQVTFSKRRAGLLKKAHELSVLCDSEVAVIVFSKSGKLFEFSSTGMKRTVLRYENYQRSSDAPLIKYKPENQEEDCTEVDFLKNEISKLQEKHLQMQGKGLNALCLKELQHLEQQLNVSLISVRERKELLLTKQIEESRIREQRAELENETLRRQVQELRNFLPSINQNYVPSYITCFAIDPKNSPVNNSGLDDTNYSLQKTNSDTTLQLGLPGEAQARRRSEANRESPSSDSVTTSTTKATPQRINLV

SEQ ID NO: 15825 - protein, 205 aa, Brassica oleracea var. botrytis
VLCDADVALIIFSSTGKLFEFCSSSMREVLERHNLQSKNLEKLDQPSLELQLVENSDHALLSKEIAGKSHRLRQMRGEELQGLNIEELQQLEKALESGLTRVIETKSEKIMNEISYLQRKGMQLMDVNKRLRQQGTQLTEENERLGQQIYNNVHERYGGGESENTAVYEEGHSSESITNAGNSTGAPVDSESSDISLRLGLPYGG

SEQ ID NO: 15826 - protein, 106 aa, Eranthis hyemalis
STNRQVTYSKRKNGILKKAKEITVLCDAEVSLVIFSSTGKMSEFCSPSIPLIKILENYHKSSGRKLWDAKHEYLHSEVERIKKENDNMQIQLRHLKGEDLTSLNPK

SEQ ID NO: 15827 - protein, 246 aa, Silene latifolia
MGRGRVQLKMIENKINRQVTFSKRRSGIIKKAHEISVLCDAEVALIIFSHRGKLFDFASDSCMEKILERYERYCYAEKQLASNDPDAQVNWTFDYAKLKAKLDLLQRNHRQYLGQDLDALNLKELQSLEQQLDVGLKHIRSKKNQLMHDSISELQKKERSMEEQNKMLTKKIKEKGKAATTETQQMQWQQQQQNHQDVATSSDYLIHPPVPLNMSNSYEKEQGGEGSRNDLNLTLESNCWAHHSLF

SEQ ID NO: 15828 - protein, 231 aa, Glycine max
  unsure (1)..(231): unsure at all Xaa locations
MVREKIQIKKIDNATARQVTFSKRRRGLFKKAEELSVMCDADVALIIFSSTGKLFEYSSSSMKEILERHHLHSKNLARMEQPSLELQLVENSNCSRLSKEVAEKSHQLRQLRGEDLQGLNIEELQQLERSLETGLGRVIEKKGEKIMSEIADLQRKGMLLMEENERLKRHVAGIINXAKGMGGAESENFVMDEGXQSSESVTVRXCNSXLGPPQDFESSDTSLKLGLPYSG

SEQ ID NO: 15829 - protein, 212 aa, Glycine max
  unsure (1)..(212): unsure at all Xaa locations
MTRKRIQIKKIDNISSRQVTFSKRRKGLFKKAQELSTLCDADIALIVFSATSKLFEYASSSMHQVIERRDSHSAMNRLDRPSIELQIENDSNEILRKKVEDKNRELRQMNGEDLQGLTLQELHKLEEHLKRGLINVSKVKDEKLMQEISTLKRKGVELMEENQRLKQVVPXXLIHVHRQSSESILSNSSNLPEDGGSDTSLKLGLPXVFNKM

SEQ ID NO: 15830 - protein, 251 aa, Glycine max
  unsure (1)..(251): unsure at all Xaa locations
MTRKRIQIKKIDNISSRQVTFSKRRKGLFKKAQELSTLCDADIALIVFSATSKLFEYASSSMHQVIERHDRYSAIHRLDRPSIELQIESDSNNILRKKVEDKTRELRQMNGEDLQGLTLQELQKLEEHLKRSLTNVSKVKDAKFMQEISTFKRKGVELMEENQRLKQVPSLIHAXXSYRQSSESILSTSNLPEDGGSNTSLKLGLPXIMNKMXIIXKXSVSLPLYVSQNQLNILCCLLFKNNSCKVSKSKG

SEQ ID NO: 15831 - protein, 212 aa, Glycine max
  unsure (1)..(212): unsure at all Xaa locations
MVRRKIPIKKIDDVTARQVTFSKRKSGLFKKARELSLLCDAEIALIVFSPGGKLFDYGSSSMQKVIERHILRSELNLEKLDQSCPTEQVRCNYADLNKEFADRTREMRQLNGEELQGLTLRELQKLEERLDSSLNRVYKAKVENFIKEIGILKEKGKKLMEDNMLIKQXCIIVAMIKLPRNEICSVQRHEHEQGQLFDTSLTLGLPFPAGSK

SEQ ID NO: 15832 - protein, 240 aa, Medicago sativa
RGKIQIKRIENTTNRQVIFSKRRNGLLKKAKELAILCDAEVGVMIFSSTAKLYDFASTSLRSVIGRYNKSKEEHNQLGSTASEIKFGQREAAVLRQQLHNLQESHRQIMGEELSGLTVKELQGLENQLEISLRGVRMKKEQLFMDEIQELNRKGDIIHQENVELYRKVYGTKDKNGTNRVLSLTNGVGIGDDSNRTCESPAQPATETRTTTALMHSLEISVLTCKQGKWTQILISYMNGI

SEQ ID NO: 15833 - protein, 247 aa, Pisum sativum
MGRGRVELKRVENKINRQVTFAKRRNGLLKKAYELSVLCDAEVALIVFSNRGKLYEFCSTSSMLKTLERYQKCNYGAPEGNVTSKEALVLELSSQQEYLKLKARYESLQRSQRNLMGEDLGPLSSKDLETLERQLDSSLKQIRSTRTQFMLDQLGDLQRKEHLLCEANRALRQRMEGYQINSLQLNLSAEDMGYGRHHQGHTHGDELFQVQPIECEPTLQIGYHQGDPGSVVTAGPSMNNYMGGWLP

SEQ ID NO: 15834 - protein, 240 aa, Pisum sativum
MGRGRVQLKRIENKINRQVTFSKRRAGLLKKAHEISVLCDAEVALIVFSHKGKLFEYATDSCMEKILERYERYSYAERQLVANDSESQGNWTIEYTRLKAKIDLLQRNYRHYMGEDLGTMSLKELQSLEQQLDTALKLIRTRRNQLMYESISELQKKEKVIQEQNNMLAKKIKEKEKIAAEQQVQWEHPNHHGVNPNYLLHQQLPSLNMGGNYREEAPEMGRNELDLTLEPLYTCHLGCF

SEQ ID NO: 15835 - protein, 228 aa, Oryza sativa (japonica cultivar-group)
MARERREIKRIESAAARQVTFSKRRRGLFKKAEELSVLCDADVALIVFSSTGKLSHFASSSMNEIIDKYNTHSNNLGKAEQPSLDLNLEHSKYAHLNEQLAEASLRLRQMRGEELEGLSIDELQQLEKNLEAGLHRVMLTKDQQFMEQISELQRKSSQLAEENMQLRNQVSQISPAEKQVVDTENFVTEGQSSESVMTALHSGSSQSQDNDDGSDVSLKLGLPCGAWK

SEQ ID NO: 15836 - protein, 265 aa, Lycopersicon esculentum
MAREKIQIKKIDNSTARQVTFSKRRRGLFKKAEELSVLCDADVALIIFSSTGKLFDYSSSSMKQILERRDLHSKNLEKLDQPSLELQLVENSNYSRLSKEISEKSHRLRQMRGEELQGLNIEELQQLERSLETGLSRVIERKGDKIMREINQLQQKGMHLMEENEKLRQQVMEISNNNNNNNNGYREAGVVIFEPENGFNNNNNEDGQSSESVTNPCNSIDPPPQDDDSSDTSLKLGLATLLRLKRSKARCGYFCMLLEEGEKKK

SEQ ID NO: 15837 - protein, 241 aa, Nicotiana sylvestris
MGRGRVELKRIENKINRQVTFAKRRNGLLKKAYELSVLCDAEVALIIFSNRGKLYEFCSSSSMLKTLERYQKCNYGAPETNISTREALEISSQQEYLKLKARYEALQRSQRNLLGEDLGPLNSKELESLERQLDMSLKQIRSTRTQLMLDQLTDLQRKEHALNEANRTLKQRLMEGSQLNLQWQQNAQDMGYGRQTTQTQGDGFFHPLECEPTLQIGYQNDPITVGGAGPSVNNYMAGWLP

SEQ ID NO: 15838 - protein, 245 aa, Nicotiana sylvestris
MGRGRVQLKRIENKINRQVTFSKRASGLLKKAHEISVLCDAEVGLIVFSTKGKLFEYSTDSCMERILERYERYSYAERQLTATDDETPGSWTLEHAKLKARLEVLQRNQRHYAGEDLDSLSMKELQNLEHQLDSALKHIRSRKNQLMHESISELQKKDKALQEQNNNLSKQVKEREKELAQQTQWEQQSHDHLNSSSFVLTQPLSSLHLGEAYPTAGDNGEVEGSSRQQQQNTVMPPWMLRHLNG

SEQ ID NO: 15839 - protein, 242 aa, Nicotiana sylvestris
MGRGKVQLRRIENKINRQVTFSKRRGGLVKKALEISVLCDAEVALIVFSHKGKIFEYSSDSCMEQILERYERYSYTERRLLASNSESSVQENWSLEYAKLKAKIDLQQRNHKHYMGEDLDSLSLKDLQNLEQQLDTSLKLIRSRKNQLMHESISMLQKKEKAIQEENNMLSKKIKEKDNTVGQQVEWHQQNQVPTSASFLLQPHPCLNIGGNYQEEREERRRNELDLNLDSLYPCHMGCFAT

SEQ ID NO: 15840 - protein, 245 aa, Petunia x hybrida
MAREKIKIKKIDNITARQVTFSKRRRGLMKKAAELSVLCDAEVALIIFSATGKLFEYASSSMEDILGKYKFHSASLEKDDQPSLDLQLENSLNMRLSKEIADKNRELRQMRGEELEGLSLNELQKIEKKLEAGLTRVLQIKGTRIMDEITNLQKKGADLMEENKQLKQKMVIMSEGKLPLHSELECMVMEEGQSSESITTHVCSCSSGPPEDDYSNASLKLGCSNGPTVEDDCSDTFLKLGLPFN

SEQ ID NO: 15841 - protein, 219 aa, Petunia x hybrida
MVRQKIQIKKIDNLTAGQVTFSKRRRGLFKKAQELSTLCDADIGLIVFSATGKLFEYSGSSMMQLIEKHKIHSERDMDNPEQLQSSNLQCQKKTYGMLSKEFLEKNRELRQIKGEELQGLGLEELMKLEKLVEGGIGRVMKMKGDKFMKEISSLKKKEAQLQEENSQLKQQSEARLSQNATEPGHSANSITNCPSFVYGDHQDYNDSDTSLKLGLPFPY

SEQ ID NO: 15842 - protein, 250 aa, Solanum commersonii
  unsure (1)..(250): unsure at all Xaa locations
MGRGRVQLKRIENKINRQVTFSKRRSGLLKKAHEISVLCDAEVGLIVFSTKGKLFEYATDSCMERLLERYERYSFAEKQLVPTDHTSPGSWTLENAKLKARLEVLQRNEKLYVGEDLESLNMKELQNLEHQLASALKHIRSRKNQLMHESISVLQKQDRALQEQNNQLSKKVKEREKEVEQQNQWDQQNHEINSSTFVLPQQLDSPHLGEASQNTNVVDNGEVEGGNSSQXQGAANNTVMPQWMVRHLNG

SEQ ID NO: 15843 - protein, 234 aa, Solanum tuberosum
MAREKIKIKKIDNITARQVTFSKRRRGLFKKAEELSVLCDADVALIIFSSTGKLFDFASTSMKDILGKYKLQSASLEKVDEPSLDLQLENSLNMRLSKQVADKTRELRQMRGEELEGLSLEELQQIEKRLEAGFNRVLEIKGTRIMDEITNLQRKGAELMEENKQLKHKMEIMKGKLPLLTDMVMEEGQSSESIITTNNPDQDDSSNASLKLGGTTAVEDDCSITSLKLGLPFS

SEQ ID NO: 15844 - protein, 221 aa, Solanum tuberosum
MVRQKIQIKKIDNLTARQVTFSKRRRGLFKKAQELSTLCDADIGLIVFSATGKLFEYSSSSMMQLIEKHKMQSERDSMDNPEQLHSSNLLSEKKTHAMLSRDFVEKNRELRQLHGEELQGLGLDDLMKLEKLVEGGISRVLRIKGDKFMKEISSLKKKEAQLQEENSQLKQQSQARLNEEGQNVIEQGHSADSITNNRSLVNSHQDYNDSDTSLKLCLAFP

SEQ ID NO: 15845 - protein, 227 aa, Ipomoea batatas
MAREKIKIKKIDNITARQVTFSKRRRGLFKKAEELSVLCDADVALIIFSSTGKLFDYASSSMKGILERRNLHSKNLEKMDQPSLELQLVENANHSRLSKEIADMTHRLRQMRGEDLQGMSIEELQQLERSLETGLSRVIEKKGEKIMKEINELQQKGMNLMEEKERLTQQVMAISNGQRVTAVINSDNMLNEEGLSSESITNVCNSTSPPQDYDDSSDTSLKLGLPY

SEQ ID NO: 15846 - protein, 229 aa, Ipomoea batatas
MAREKIKIKKIDNITARQVTFSKRRRGLFKKAEELAVLCDADVALIVFSATGKLFEFASSNMKDILGKYELHSSNLDQATQPSRELQLENSLHVRLSKEVADKTRELRQMKGEELQGLSLEELQKLEKRLENGLTRVLETKGERVVTEIATLQRKGAELMKENKQLKEKMARVNGEKFPVIADVEAAGLIPEEGQSSESITTNVCSCNSGPPPEDDCSDTSLKLGLPIN

SEQ ID NO: 15847 - protein, 234 aa, Antirrhinum majus
MGRGKIVIQRIDKSTSRQVTFSKRRSGLLKKAKELAILCDAEVGVVIFSSTGKLYEFSSTSMKSIIERHTKTKEDHHQLLNHGSEVKFWQREAATLRQQLQDLQENHRKLMGEELQGLNVEDLHRLENQLEMSLRGVRMKKVQMLTDEVHELRRKGHLIHQENNELYEKVKLLQQENKELCKKAYGTRDVSAANGTALVPFGFAIGREQFEPIQLHLSQPEPENIETSRASGSK

SEQ ID NO: 15848 - protein, 216 aa, Chrysanthemum x morifolium
MVRGKTQMRRIENATSRQVTFSKRRNGLMKKAFELSVLRDAEVALIIFSPRGKLYEFANSSMQETIERYRSHVKDIQTDTSSVEDVQNLKHETAAMAKKVEALEVAKRKLLGEGLGTSTIDELVQIEQQLERSVRIIRARKMQVYNEQIEQLHAKEKMLAAENAILTEKCIIKTDKATEEMGVDLNVLESGENSDVETELFIGLPETRMKQLSWPK

SEQ ID NO: 15849 - protein, 237 aa, Chrysanthemum x morifolium
MGRGRVTLKRIENKINRQVTFSKRRSGLLKKAHEISVLCDADVALIVFSTKGKLCEYSTDSSMDRILERYERYSYAEMQLTSTHNESQGSWTLEHAKLKARIELLQKSKRHLMGEELDSLTLKELQGLEQQLDTALKHVRLRKNQLMFESISALQKKDKDMQERNNILSKQIKEKEKDAAHHDKEPQIHAAVPSLHLGILNNCDAHQAGSDWEVEDIPRPAQPLTFMPPWMVQHMSK

SEQ ID NO: 15850 - protein, 246 aa, Chrysanthemum x morifolium
MGRGKVQLRRIENKINRQVTFSKRRGGLLKKAHEISVLCDAEVALIVFSNKGKLFEFSTDSCMESILERYERYSYTERQLVATDATPRSWTLEYNKLKSRADLLQRNHRHYMGEDIESLSLKEIQNLEQQLDTGLKNIRTRKNQLLHESISELQKKGKAIQEQNTTLTKKIKEKEKDKTITENVQWEQHNYVDHDTSFLMPQPPPGLNMGGNYNQSGGGAGERADGMTNELDLSLQYSCHMRCFPS

SEQ ID NO: 15851 - protein, 243 aa, Chrysanthemum x morifolium
MGRGRVQMKRIENKISRQVTFSKRRTGLLKKAHEISVLCDADVALIVFSTKGKLFEYSTHSSMESILERYERYSYAEKLLTAPENETQASWTLESSRLKAKIEVLERNIRHYGGEDLEPLSLRDLQSVEQQLDTALKRIRTKKNQLMHESISELHKKEKTLQERNNSLSKKLKENEKNSEQQNERVELPQPPPPPPQPQPYSVPSFATSRPFIGAAMREEELARAHHVSTTMMPLWMIRHLNQ

SEQ ID NO: 15852 - protein, 249 aa, Chrysanthemum x morifolium
MGRGRVELKRIENKINRQVTFAKRRNGLLKKAYELSVLCDAEVALIIFSNRGKLYEFCSSSSMLKTLERYQKCNYGAPETNVSAREALELSSQQEYLKLKARYEALQRSQRNLLGEDLGPLNCKELESLERQLDTSLKQIRSARTQFMLDTLTDLQKKEHALNDANRTLKQRLMEGHQVTSLHWNPHVQQEMGYDQQHEPQHQNGEAFFHPLDCGPTLQMGYPSDSLTAEAAASVAGPSCSNYMPGWYQ

SEQ ID NO: 15853 - protein, 250 aa, Chrysanthemum x morifolium
MGRGRVELKRIENKINRQVTFSKRRNGLLKKAYELSVLCDAEVGLIIFSSRDKLYEFGSVGVMKTLERYQRCCFNPQDNNNERETQSWYQEVSKLKAKFESLQRTQRHLLGEDLGPLSVKELHNLEKQLEGALTQARQRKTQILVEQMEELRCKERELGDMNKHLKIKVSHELSTFETEGQGYRTHQLPCPWNSSNNNTFLMHPSQSNPMGCQQEQPILQIGDNQFMQGEGSSGQRNMVDETNIHGNWVI

SEQ ID NO: 15854 - protein, 246 aa, Chrysanthemum x morifolium
MGKGRLELKRIENKINRQVTFAKRRNGLLKKAYELSVLCDAEVALIIFSTRGKLYEFSSTSSMLKTLERYEKSSFGPPEQRRPAKEDLQEQSSYQEYMRLKERYDALKQLERNYYGEEIDNLSTNELESLERQLHCSLKQIRTIRTQSLVDRLYEQQKMEHHLYESNKTLRLKFEEESQAEALQWEAHARANGMVYGHPQHQLSQTTHDAFYHPTGCETTLQIGYQTDMSAVTSTSMNHQMQGWPA

SEQ ID NO: 15855 - protein, 229 aa, Dicentra eximia
NRQVTYSKRRNGIMKKAKEITVLCDAEVSLVIFSSTGKMSEYCSPSTTLIKILDRYQKASGKRLWDAKHEYLSSEVDRVKKENDNMQIELRHLKGEDLTSLHPKELISIEDALQNGLVGVRAKQMEFMKMMKKNERMLEEENKRLSYILHNQQIEMADGSNVGEMENNGYHQHHHHHHHHHQKGRGDHYGQAAAAHASSQQMPPFAFRVQPIQPNLHNNNNNTNNTNNK

SEQ ID NO: 15856 - protein, 251 aa, Helianthus annuus
MGRGKVQLRRIENKINRQVTFSKRRGGLLKKAHEISVLCDAEVALIVFSNKGKLFEFSTDSCMESILERYERYCYSERQLVATDATPRSWTLEYNKLKSRAELLQRNHRHYMGEDIESLSLKEIQNLEQQLDTGLKNIRARKNQLLHESINELQKKGKAIQEQNTTLTKQLKEKEKDKTIPQNTQWEQHNYVDHDTTFFLPQPHPALNIGGDYNQATTSAASGGEGADGRTSQLDLSLQPIYSHHLRCFPS

SEQ ID NO: 15857 - protein, 248 aa, Helianthus annuus
MGRGKVQLRRIENKINRQVTFSKRRGGLLKKAHEISVLCDAEVALIVFSNKGKLFEFSTDSCMDSILERYERYSYTERQLVAADATPRSWTLEYNKLKSRAELLQRNHRHYMGEDIESLSLKEIQNLEQQLDTGLKNIRTRKNQLLHESISELQKKGKAIQEQNTTLTKKIKEKEKDKTIPQNTQWEMHNYVDHDTTFLMPPPPPALNMGGDYNHGGGGSSEGADGRTNELDLSLQPIYSCHMRCFPS

SEQ ID NO: 15858 - protein, 253 aa, Helianthus annuus
MGKGRLELKRIENKINRQVTFAKRRNGLLKKAYELSVLCDAEVALIIFSTRGKLYEFSSTSSMLKTLERYEKCSFGPPEQRKPAKEDLQEQSSYQEYMRLKERYDALKQLERNYYGEEIDSLTTNELESLERQLHCSLKQIRTIRTQSLIDKLYEQQKMEHQLYEYNKTLRLRLDEESQAEALQWDVHAHAHANGMVYGHHHQHQVSHPAHGAFYHPTGCETTLQIGYQTEQISGATSSSMSHHHHQMQGWPA

SEQ ID NO: 15859 - protein, 125 aa, Adenothamnus validus
TNRQVTYSKRRNGIFKKSHELTVLCDAKVSLIMFSNTGKFHEYISPSTTTKKIYDMYQTTLGFDLWSSHYERMTETMKKLKDSNNKLRREIRQRVLGEDLDGLDMNDLTILEQQMQDSLTVVRER

SEQ ID NO: 15860 - protein, 125 aa, Argyroxiphium caliginis
TNRQVTYSKRRNGIFKKAHELTVLCDAKVSLIMFSNTGKFHEYISPSTTTKKIYDMYQTTLGFDLWSSHYERMTETMKKLKDSNNKLRREIRQRVLGEDLDGLDMNDLTTLEQQMQDSLTVVRER

SEQ ID NO: 15861 - protein, 125 aa, Kyhosia bolanderi
TNRQVTYSKRRNGIFKKAHELTVLCDAKVSLIMFSNTGKFHEYVSPSTTTKKIYDMYQTTLGFDLWSSHYERMTETMKKVKESNNKLRREIRQRVLGEDLDGLDMNDLTILEQQMQDSLTVVRER

SEQ ID NO: 15862 - protein, 125 aa, Carlquistia muirii
TNRQVTYSKRRNGIFKKAHELTVLCDAKVSLIMFSNTGKFHEYISPSTTTKKIYDMYQTTLGFDLWSSHYERMTEIMKKLKDSNNKLRREIRQRVLGEDLDGLDMNDLTILEQQMQDSLTVVRER

SEQ ID NO: 15863 - protein, 125 aa, Anisocarpus scabridus
TNRQVTYSKRRNGIFKKAHELTVLCDAKVSLIMFSNTGKFHEYISPSTTTKKIYDMYQTTLGFDLWSSHYERMTETMKKLKESNNKLRREIRQRVLGEDLDGLDMNDLTILEQQMQDSLTVVRER

SEQ ID NO: 15864 - protein, 200 aa, Platanus occidentalis
GGITKKAQELSVLCDAEVSLIMFSSTGKFHEYISPTTTTKKIFDRYQQISRIDLWQPHYEKMQNNLNKLKEVNNNLRREIRQRMGEDLNDLSIEELRGLEQNLDDSLNIVREQKYHKIQTQTDTCKKKLKNSQETHRELLRHFEVRDEDLDYGLGDNEEDYESELGVANVGSHSFAYRLQPIQLNIQDGGIYGFRDLRLA

SEQ ID NO: 15865 - protein, 228 aa, Oryza sativa; identical to SEQ ID NO: 15835

SEQ ID NO: 15866 - protein, 229 aa, Triticum aestivum
  unsure (1)..(229): unsure at all Xaa locations
MARERREIKRIESAAARQVTFSKRRRGLFKKAEELSVLCDADVALIVFSSTGKLSQFASSSMNEIIDKYSTHSPARAXPDLPALHVCLVHRXYANLNDQLAEXASLRLRQMRGEELEGLSVDELQLLEKNLETGLHRVLQTKDQQFLEQINELHRKSSQLAEENMKLRNQVGQIPTAGKLVVADTENVVAEDGQSSESVMTALHSGSSQDNDDGSDVSLKLGLPCLPWK

SEQ ID NO: 15867 - protein, 226 aa, Triticum aestivum
  unsure (1)..(226): unsure at all Xaa locations
MARERRAIRRIESAAARQVTFSKRRRGLFKKAEELAVLCDADVALVVFSSTGKLSQFASSSMNEIIDKYSTHSKNLGKSEQPAIDLNLEHCKYDSLNEQLAEXASLRLRHMRGEELDGLSVGELQQMEKNLETGLQRVLCTKDRQFMQQISDLQHKGTQLAEENMRLKNQMHEVPTASTVAVAEAENVVPEDAHSSDSVMTAVHSGSSQDNDDGSDISLKLALPWK

SEQ ID NO: 15868 - protein, 87 aa, Triticum aestivum
  unsure (1)..(87): unsure at all Xaa locations
MARERREIKRIESAAARQVTFSKRRRGLFKKAEELSVLCDADVALIVFSSTGKLSQFASSSMNEIIDKYSTHSKNLGKTDQPALDLX

SEQ ID NO: 15869 - protein, 186 aa, Thalictrum thalictroides
NGILKKAREIHVLCDAQIALVIFSSTGKMSEYISPSPGPSTTLIGILDKYQKTSGKKLWDAKHEFLSSELDRIKKENDSMQIELRHLKGEDITSLNAKELIPIEEALNNGLSKIRDKKNDVWRMMTKNTSMLEEENKRLSYHLHSLEIGGNDRDMENGYHQKGRDYPAQMPFTFRVQPIQPNLQEK

SEQ ID NO: 15870 - protein, 187 aa, Trollius laxus
NGILKKAREIAVLCDAQVSLVIFSATGKIDEFSSSPLVTILDRYQNSSGNKLWDAKHEYLNSEVERVKKENDNMQIQLRHLKGEDITSLNPKELIPIEEALLDGLTKVRDKKMEYWNRMKKNGRMLEEENKRLRCMLNPKQHMEMEEKADLENGYHHNCRNYPSQIPFSLQIQTIQPNLQEPRGHNY

SEQ ID NO: 15871 - protein, 182 aa, Trollius laxus
NGILKKAKEITVLCDAKVSLVIFSSTGKLTQFSSDPLVTILDKYQKSSGNKLWDAKHEYLNSEVERVKKENDNMQIQLRHLKGEDITSLNPRELIPIEEALLNGLTKVRDKKMEFCNRMKKTGRMLEEENKRLKDMLNPKQHMEMEEKEDLEHCRSYPSQIPFSLQIQPIHPNLQDPKGYNY

SEQ ID NO: 15872 - protein, 184 aa, Trollius laxus
NGILKKAKELTVLCDAKVSLVIFSSTGKMTEFSSSPLETILDKYQRSSGNKLWDAKHEYLNSEVERVKKENDNMQIQLRHLKGEDITALNPKELIPIEEALLDGLTKVRDKKMEYWNRMKNNGRMLEEENKRLKYMENPKQYMEMEEKGELENCRNYPSQIPFSSLHIKPIHPDLQEPKGYYNF

SEQ ID NO: 15873 - protein, 184 aa, Trollius laxus
NGILKKAKELTVLCDAKVSLVIFSSTGKMTEFSSSPLEIILDKYQRSSGNKLWDAKHEYLNSEVERVKKENDNMQIQLRHLKGEDITALNPKELIPIEEALLDGLTKVRDKKMEYWNRMKNNGRMLEEENKRLKYMENPKQYMEMEEKGELENCRNYPSQIPFSSLHIKPIHPDLQEPKGYYNF

SEQ ID NO: 15874 - protein, 187 aa, Trollius laxus
NGILKKAREIAVLCDAQVSLVIFSATGKIDEYSSSPLVTILDRYQNSAGNKLWDAKHEYLNSEVERVKKENDNMQIQLRHLKGEDITSLNPKELIPIEEALLDGLAKVRDKKMEYWNRMKKNGRTLEEENKRLRCMLNPKQHMEMEEKADLENGYHHNCRNYPSQIPFSLQIQTIHPNLQEPRGHNY

SEQ ID NO: 15875 - protein, 173 aa, Trollius laxus
NGILKKAKEITVLCDAKVSLVIFSSTGKLTQFSSDPLVTILDRYQKSSGIKLWDAKHEYLNSEVERVKKENDNMQIQLRHLKGEDITSLNPRELIPIEEALLNGLTKVRDKKMEFCDRMKKNGRMLEEENKRLKDMLNPKQHMEMEEREDLEHCRSYPLQIPFSLQDPKGYNY

SEQ ID NO: 15876 - protein, 207 aa, Trollius laxus
NRQVTYSKRRTGIIKKATELAVLCDAEVSLIMFSSTGKLSEFTSPNTTTKKLFDQYQRVTGTPLWDTHYERMQESLKQQKEVNMKLRKQIRQRIGEGSLDNLSFEELRNLEQDLDTSVKAVRDRKYHMIATQTETHRKKLRNMQETHTHLVRELEARGEDPYYEGDYESSYIGMTNGGAHLLSYRLQPNQPNLQDEEGYGSYNLRLA

SEQ ID NO: 15877 - protein, 170 aa, Trollius laxus
NGILKKAKELTVLCDAIVSLVIFSSSGKMVAYASNPLGEILDKYHKISGKRLWDAKHEYLNSEVERVKKENDSMQIELRHLKGEDLTSLNPKELIPIEDALQNGLAKVREKKNEFLKVVKKNGRMLEEDNKRLTYILQKQQMEINGYHQNDSQIPFNFRVQPIQPNLQEP

SEQ ID NO: 15878 - protein, 167 aa, Trollius laxus
NGILKKAKELTVLCDAIVSLVIFSSSGKMVAYASHPLGEILDRYHKISGKRLWDAKHEYLNSEVERVKKENDSMQIELRHLKGEDLTSLNPKELIPIEDALQNGLAKVREKKNEFLKVVKKNGRMLEEDNKRLTYILQKQQMEINGYHQNDSQIFRVQPIQPNLQEP

SEQ ID NO: 15879 - protein, 210 aa, Asarum europaeum
GGLLKKARELAILCDAQLGVIIFSSSGKMFEFSSPPISMREIIDRYQKLSGNCAPVYDNQQVYCEITRMKNEIDKLQATMRHFAGEDLTSLTMNEMLQLEQQLEISVNKVRSRKEQLLQQQLDNLRRKENMLEEQNRELYRVIQDHHAASMEQKMVDPSMLDHFGVFYQDDHQAARSSMLQLSPQLHPFRLQPAQPNLQDANLLPHDLQL

SEQ ID NO: 15880 - protein, 200 aa, Asarum europaeum
GGIFKKAQELTVLCDAQVSLIMFSSTGKYSEYCSPSTTTKQIYDKYQEASGINLWSSHYEKMQNLLNKLNDDNNKLRKEIRQRIGEDLSGLEIEELRGLEQNLESSLKVVRDKKYQVISSQTETKKKKVKNLEQTHKNLGCALAGKDAICAYGIAYNETLDYKSVLGLANDASHIFAFRIQPCQPNLHNAGYGIHDLRLA

SEQ ID NO: 15881 - protein, 313 aa, Ceratopteris richardii
MAMPCSDIDLLDSDNDNVDDQHISLELRQVHEDTDDGSHDEPRELSLLNHESNLCKIVNSKGKGAEAGNSLLPSTGTSRGKIQIRRIENTTSRQVTFSKRRNGLLKKAHELSVLCDAEIALIIFSSTGKLFEYSSSRGIKKILERYKRCSGILQDVGGTVIRDVEYWKQEAERLKERLTYMEEIQRNMLGESLGSLQIKDLQNLEAKLDSGLYKIRGAKTQLMARQVQELQKKEQILLQQNEALRAKLAELSCLQAPVSGLTTATTSQDVQESSSGRGSRQRETSLSAAETTLQLASHNEQTFLLRAVPHMRL

SEQ ID NO: 15882 - protein, 205 aa, Juglans regia
KRRNGLLKKAYELSVLCDAEVALIVFSSRGRLYEYANNSVKSTIDRYKKARADSSNTGSVSEANTQFYQREAATLRQQINSVQESNRKMLGESLSGMAFRDLKSLESKLESGIRRIRSKKNELLFAEIEYMQKREVDLHNNNQLLRAKIAENERNQQNLNVMPGGGNLELMHSQPFDSRNYFQVDALQPNHDQYPRQDQMALQLV

SEQ ID NO: 15883 - protein, 215 aa, Juglans regia
IENETNRQVTYSKRRKGLFKKAHELTVLCDAKVSLIMISSNKKLRDYVSPSTTTKQIFDQYQHTMGVDLWSSHYERMQEELKKLNDVNRSLRREIRHRRGESLIDLNLEELYHLEQNVESAVKVIRDRKYHVIGKKTDILKKKKKRAESIHKVLLHELVARDEDPYGLVDNGGGDYCDPDIIGCSNTDSCMFALRLQPNFHMGEGSDLTTYTLLE

SEQ ID NO: 15884 - protein, 254 aa, Brassica rapa subsp. pekinensis
MGRGRVEMKRIENKINRQVTFSKRRAGLLKKAHEISILCDAEVSLIVFSHKGKLFEYSSESCMEKVLERYERYSYAEKQLKAPDSHVNAQTNWSMEYSRLKAKIELLERNQRHYLGEDLESISIKELQNLEQQLDTSLKHIRSRKNQLMHESLNHLQRKEKEILEENSMLTKQIKERESILRTHQNQSEQQNRSHHVAPQPQPQLNPYMISHQASPFLSMGGMYQGEDPTAVRRNRLDLTLEPIYNCNLGYFAA

SEQ ID NO: 15885 - protein, 214 aa, Elaeis guineensis
MVRGKTEMKLIENATSRQVTFSKRRNGLLKKAFELSVLCDAEVAVIVFSPRGKLYEFSSTSMEKTIDRYRRHAKSGINNNEVTQQWKFEAASMSRKIESLEVSKRKLLGENLESCSAEELHEIEGKIEQSLCHVRGKKNQLLEEQIATLKEQEQTLMEENALLREKCKLQSQLRPAAAPEETVPCSQDGENMEVETELYIGWPGRGRTNCRSQG

SEQ ID NO: 15886 - protein, 242 aa, Pinus resinosa
MGRGRVELKRIENKINRQVTFSKRRNGLLKKAYELSVLCDAEVALIIFSSRGKLYEFGSAGMLKTLERYQKCSYVLQDATVSDREAQNWHQEVGKLKARVELLQRSQRHLLGEDLGPLSIKELQQLERQLEVALTHVRSRKTQVMLEMMDELRRKERILQEVNKSLRKKLQEAEGQAFNAMQPPPHAWDSHAVANNAYAMQHPSNAVDCEPTLQTGYQYAPPESSMPRHEQAQNNYMQGWMV

SEQ ID NO: 15887 - protein, 199 aa, Ceratopteris pteridoides
RNGLLKKAHELSVLCDAEIALIIFSSTGKLFEHSSSRGIKKILERYKRCSGILQDVGGTVIRDVEYWKQEAERLKERLTYMEEIQRNMLGESLGSLQIKDLQNLEAKLDSGLYKIRGAKTQLMVRQVQELQKKEQILLQQNEALRTKLAELSRLQAPVSGLTTATTSQDVQESSSGSGSRQHETSLSAAETTLQLGFAQ

SEQ ID NO: 15888 - protein, 217 aa, Ceratopteris pteridoides
SKRRGGLIKKAHDLSVLCDADVAVIIFSSKGKLFHFANPSMETVLGKYVKASGDPGAGDNGSSTDNLDTDRLTVFTEKLKMLQSNVIGDDLERLSLRDLIHLEQQVHESLGRIRAKKDELILDQIDDFNQKVADTRKTMNASMSMLDRLVDFCSSDITGSQEFVESEAGHVLRVPTTDALRAAQIASSDQSNDDPEYVASGRRFGITEDLNESPASE

SEQ ID NO: 15889 - protein, 193 aa, Ceratopteris pteridoides
RTGLLKKAYELSVLCDAEVAVIVFSSTGRLSEFATPSMPKMLEKYHRAIQRSQGNEHSLQNIEHWQHEAINLRKRIQLLQLRQSHLMGENLTCFQLKDLDILESRLSVTVEKIREEKMRRFHVHAEEMHKQECLLHQENTLLKLKIENVESMKHSAHVIDLLSDDDCMLESPKISQESGLKDSRFSLQLGLKP

SEQ ID NO: 15890 - protein, 218 aa, Ceratopteris pteridoides
SKRRGGLFKKAHDLSVLCDAEVAVIIFSSKGKLFHFGNPSMETVLKRYMKANGDPKAGDNGSSTDNVEADHLTVFTEKLKLLQSVVIGDDLERLSVRDIIYLEQQFHENLGRIRAKKDELMLERNNDLMQKVADTRRRTNVNTSMLNRLADFCSSDIIGSRTFVENEPADHVVGVPRTDTSRAGRIAPSDRNNNEREIVPFAKRFRIIEDLNESPASE

SEQ ID NO: 15891 - protein, 251 aa, Arabidopsis lyrata
MGRGRVQLKRIENKINRQVTFSKRRAGLLKKAHEISVLCDAEVALVVFSHKGKLFEYSTDSCMEKILERYERYSYAERQLIAPESDVNTNWSMEYNRLKAKIELLERNQRHYLGEDLNAMSPKELQNLEQQLDTALKNIRTRKNQLMYESINELQRKEKAIQEQNSMLSKQIKEREKILRAQQEQWDQQNHGHNMPPPPPPQQHQIQHPYMLSHQPSPFLNMGGLYQEEDPMAMRRNELELTLEPVYNCNL

SEQ ID NO: 15892 - protein, 217 aa, Ophioglossum pedunculosum
RSGLLKKAYELSVLCDAEVALIIFSGTGKLFEFASSSMKKILERYRKYGGGLHDNSIATRDAEYWRNEVMRMKEHIACLEESQRHLLGENLVSLSVKNLQKLEHQLEIGANRIRTRKTQILLEQIQELQKKEHFLHGENNILKTKLEQLSTRQVPSLGTLIYTSTVTTTSTTSAGAGVEDNAGGHDSMNAMQKMTLHSNFQPATSAQNTLQLGYYPD

SEQ ID NO: 15893 - protein, 216 aa, Ophioglossum pedunculosum
SKRRNGLLKKAYELSVLCDAEVAVIVFSGTGKLSEFASSSMMRRILEKHRQVVEGSQSIKPTSQDVVEYWRHEATRLKHQLGVVQETQRHMLGESLETLTYRDLQKLESKLNGALNQVRGRKNQIISERLVYLQEKEDLLNAENIMMRAKLAEIMAGGVPLMSQSMQDPAARESFLNESSTQPNPPIMKNQNGEETNLQLGLELFPTTSFGDGAST

SEQ ID NO: 15894 - protein, 186 aa, Ophioglossum pedunculosum
RGGLMKKAFELSVLCDVEIAVIIFSSTGKLYEYASSCMQKILSKYTSRPEGLQSLRVLNDDQAYYYCYQMAWLRQQITQLERLQRQMTGEDLTSLNMEELNDLEHSIYLALLRVQARKERLLMEKLQNGGLKAAQQLHEDECGGGSREVREEEAMPAQPSSVKRVLEKSTYSEASLELRLRLLSES

SEQ ID NO: 15895 - protein, 232 aa, Ophioglossum pedunculosum
RRGLLKKAEELAVLCDAEVGVVILSNTGKVFEYPIGRTKAILERYIKHVQEKRKSSSSEHGDGSFQEMESLKQEILHLEATQKHFGGGELSSLTLQDVHQLELQVEMGLSNVRSRKVQLLLEQTEHLKRKEHCLHEESRTLQEKISEVCGYIQSNARTTNTGQTQAFRDNDPQVSQVLFSLQPSRSDIQDSANIRTSLRLGMYETSPQMNERSTAESSDVNSVLYTPQDWMH

SEQ ID NO: 15896 - protein, 340 aa, Caenorhabditis elegans
MGRKKIQITRIQDERNRQVTFTKRKFGLMKKAYELSVLCDCEIALIVFNSTNKLFQYASTDMDKVLLKYTEYNEPHESRTNNDIMEALNRKEGNQGGGNSDDESPGPSTSPVIQITMPAVVNGHSSNNSVASAASASAAAVAAAAAAVAAVEGTSSGAAAAAAALQASNAQRHHNLNLYQNLIFNPNYTRHLNQRNDPLSSTSVAPSSSSSKHLDIPPSTSFAYDTSRLHPIAAADADGDLVPSSRAAADQNIWSSALQQRPVSQPAPSISNSSTNGISNGTSSLLSPNVSSLNGHSVLDLGGPNLPYKLDPNTYVKMEPHSPPEKRPRITTEWRPQQLT

SEQ ID NO: 15897 - protein, 340 aa, Caenorhabditis elegans
MGRKKIQITRIQDERNRQVTFTKRKFGLMKKAYELSVLCDCEIALIVFNSTNKLFQYASTDMDKVLLKYTEYNEPHESRTNNDIMEALNRKEGNQGGGNSDDESPGPSTSPVIQITMPAVVNGHSSNNSVASAASASAAAVAAAAAAVAAVEGTSSGAAAAAAALQASNAQRHHNLNLYQNLIFNPNYTRHLNQRNDPLSSTSVAPSSSSSKHLDFPPSTSFAYDTSRLHPIAAADADCDLVPSSRAAADQNIWSSALQQRPVSQPAPSISNSSTNGISNGTSSLLSPNVSSLNGHSVLDLGGPNLPYKLDPNTYVKMEPHSPPEKRPRITTEWRPQQLT

SEQ ID NO: 15898 - protein, 339 aa, Caenorhabditis elegans
MGRKKIQITRIQDERNRQVTFTKRKFGLMKKAYELSVLCDCEIALIVFNSTNKLFQYASTDMDKVLLKYTEYNEPHESRTNNDIMEALNRKEGNQGGGNSDDESPGPSTSPVIQITMPAVVNGHSSNNSVASAASASAAAVAAAAAAVAAVEGTSSGAAAAAAALQASNAQRHHNLNLYQNLIFNPNYTRHLNQRNDPLSSTSVAPSSSSSKHLDFPPSTSFAYDTSRLHPIAAADADCDLVPSSRAAADQNIWSSALQQRPVSQPAPISNSSTNGISNGTSSLLSPNVSSLNGHSVLDLGGPNLPYKLDPNTYVKMEPHSPPEKRPRITTEWRPQQLT

SEQ ID NO: 15899 - protein, 119 aa, Metrosideros excelsa
NKINRQVTFSKRRCGLLKKAHEISVLCDAEVALIVFSTKGKLFEYATDACMEKILERYERYSYAERQILTNNAETNGNWTLEHAKLKARMEILQKNQKNLMGEELDSLSLKELQNLEHQ

SEQ ID NO: 15900 - protein, 191 aa, Cimicifuga racemosa
NRQVTYSKRRNGILKKAKEITVLCDAQVSLVIFSSSGKMSEFTSQSTPLIKILDKYQKSSGRKLWDAEHESLNNGVERIKKENDSMQIQLRHLKGEDITSLTPRELIPTEEAPQDGLSKVTAKKMEVWERMKRNDTQLEEENRRLRFIMHQMQRMEMDGTSRDMADGYHQNGGRDYPTEMPFAFHNLQLNK

SEQ ID NO: 15901 - protein, 181 aa, Cimicifuga racemosa
NGILKKAKEITVLCDAQVSLVIFSSSGKMSEFTSQSTPLIKILDKYQKSSGRKLWDAEHESLNNEVERIKKENDSMQIQLRHLKGEDITSLTPRELIPIEEALQDGLSKVTAKKMEVWERMKRNDTQLEEENRRLRFIMHQMQRMEMDGTSRDMAGGYHQNGGRDYPTEMPLAFHNLQLNK

SEQ ID NO: 15902 - protein, 187 aa, Cimicifuga racemosa
NGILKKAKEITVLCDAEVSLVIFSSTGKMSEFSSPSTPLIKILDKYQKSSGRKLWDAKHEYLNSEVERVKKENDSMQIQLRHLKGEDLTSLNPKELIPIEEALLDGLSKVKDKQMEVWRKMKKNDRALEEENKRLNLILHQQQQMKMDGNVRDMENGYHQNGGRDYPTQMPFSFRVQPIQPNLQENK

SEQ ID NO: 15903 - protein, 187 aa, Cimicifuga racemosa
NGILKKAKEITVLCDAQVSLVIFSSSGKMSEFTSQSTPLIKILDKYQKSSGRKLWDAEHESLNNEVERIKKENDSMQIQLRHLKGEDITSLTPRELIPIEEALLDGLSKVKDKQMEVWRKMKKNDRALEEENKRLNLILHQQQQMKMDGNARDMENGYHQNGGRDYPTQMPFSFRVQPIQPNLQENK

SEQ ID NO: 15904 - protein, 227 aa, Paulownia kawakamii
MAREKIQIKKIDNATARQVTFSKRRRGIFKKAEELSVLCDADVGLIIFSSTGKLFEYASSSMKEILGRHNLHSKNLDKLEQPSLELQLVEDSNYSRLSKEVAERSHQLRRMRGEELQGLSIEKLQHLKKSLESGLSRVIEKKGEKIMKGDQSTSRKGKQLMEENERLRQQVADISNDCKNNAASDSENIVYDEGQSSESVNACNSVGPPQDYDSSDTSLKLGLPYSG

SEQ ID NO: 15905 - protein, 245 aa, Eucalyptus grandis
  unsure (1)..(245): unsure at all Xaa locations
MGRGKVELKRIENKINRQVTFAKRRNGLLKKAYELSVLCDAEVALIIFSNRGKLYEFCSSSSMMKTIEKYQKCSYGSLETNCSINEMQNSYQDYLKLKARVEVLQRSQRNPPWEELGPLNSKELEQLEHQLENSLKQIRSAKTQFMFDQLXHLQHKEQMLVEANRELWKKLEESNTRIPLRLGWEAEDHNNISYSRLPTQSQGLIFQPLGGNPTLQIGYNPAGSNELNVSAADQHPNGFIPGWML

SEQ ID NO: 15906 - protein, 205 aa, Eucalyptus globulus subsp. globulus
MVRGKTQMKRIENDTSRQVTFSKRRNGLLKKAFELSVLCDAEVALIIFSPRGKLYEFSSSSLCKTIEKYQTRAKDMEAKTAEISMQPSKGNTLDMEKKIEHFEISRRRLLGEGLDSCSVEELQQTENQLERSLTKIRARKNHLIREHIERLKAEERKLLEEKRKLLQEIECGKGLTPVSSERPREEIRAESMDVETELFIGPPKR

SEQ ID NO: 15907 - protein, 196 aa, Delphinium ajacis
NRQVTYSKRRNGILKKAKEITVLCDAEVSLVVFSSTGKMSEFISPNASLIKILDKYQRTSGRRLWDAKHEYLNSEVERIKKENDNMQIELRHLKGEDLTSLNPKELIPIEAALQNGLTEVRAKQAEVWKMMKKNDRLLEEENKHLNYVLQKQQQMHMNGNARDLENEYHQNGRDYPSHMPFTFRAQPMQPNLQENQ

SEQ ID NO: 15908 - protein, 234 aa, Papaver californicum
IENPTNRQVTYSKRRSGIFKKAKELTILCDAQVCLIMFSNTGKVCEYVSPSTTMKEFFDRFRRVTNIDLWASQYETLQEELKKQKEINSRLKKEIRQRTGQDDLNELTFEELRSLEANLLSSVEIVRLRKFHVLGSHTETSKKRNKAMEETHKNLLRATYSQADRDEEFLFYAIPADREGDHNRDYLSSSSSMRTLSINGGDCENSQITFQLQPSQPNLHHAAGGGYLYNQHYV

SEQ ID NO: 15909 - protein, 201 aa, Pachysandra terminalis
NGIFKKAKELSVLCDAKVSIIMVATNRKLHEYTSPHTTTKDLYDLYQKASGNSLWNSHYERMKDNLNKLKDINNKLRTEIRQRMGEDLNDLRLEELRGLEQNIQESLMIVGDRKEHQLRNQIGTYKKKSRNAEEINRKLLRRLDGIDDDSQYGLEDDGGDDESAIALTNGNSHIFAFRLQPNQPNLHINGGGYGFHNLHLA

SEQ ID NO: 15910 - protein, 216 aa, Peperomia hirta
IENDTNRQVTFSKRRNGLFKKAQELTVLCDAQISIILISSTNRLYDYCSPSTSHKKVYDQYQDGRKVDLWKKRYENMKHQLNEQSERSNKLKKEIRQFMGEELDGLSFEQLHGLEQKVERASNIVRERKEKAISTKVDTLNKKVKGYEKQHEGYRQKLEMMEVDYGGTQYKGIPMCGPHFLGYNMQGNPYHESAHSDVTTANNISSAYGIYDLRLA

SEQ ID NO: 15911 - protein, 194 aa, Piper magnificum
IENMTNRQVTYSKRKKGIIKKAQEISVLCDTQVSLVIFSSAGNMGEFCSPKTTMDAILTRYQNSKGSQLWNAKHEYLKQEKERIEKENGRLQLRLRQLKGEDITSLKPEELIEIENILEDGLTNIRNKSDGLLEGSNQEYKGFGGEEPAHGLYLHQQMGLYSGETKGLLNKCAPKSIPIAFHVQPLHPNLQEMK

SEQ ID NO: 15912 - protein, 196 aa, Piper magnificum
IENVSNRQVTFNKRKAGLLKKAREISVLCDAEVALVIVSSSANVKVEEFCSPQNKLEDVLKKYQDLSGNKLWDAKHECLSQEIDRIRKENDAMSIRLRHLEGIDVSSLNHQELEVLEKTLENGLASIRRQEMEIRDARENNIKTEEEEKRRLTYIMHEQHMRMGESLRDLESGSMKRDLPFAFRVQPIQPNLQEQK

SEQ ID NO: 15913 - protein, 180 aa, Ranunculus bulbosus
NRQVTFSKRRNGILKKAKEIAILCEAKVSLVIFTSNSKMFEFNSHPLPEILHKYQKDTGNKLWDAKHEYLHQECARIKKENESMQRELGHLKGEDINSLQPIELIPIEQALDDGIARVKERKNEIYRMMKRNDKMLEEENKLLVLKLQQMMNGNSREHPSQMPMPFTFRVQPAQPNLQDN

SEQ ID NO: 15914 - protein, 188 aa, Ranunculus bulbosus
NRQVTYTKRKNGILKKAKEISILCSAEVSLVIFSCNNKMSEFHSHSLINSLKRYHKLCPGKRLWDAKHEFLHQEIERIENENKSMQIELRHLKGEDINSLQPRELIPIERALDNGITKVRAKIDEIPRILEKNGRMIEEENKLLAFKLEQQQQQINGNGRNVDHGYPPPSQMPFTFLVQPIHPNFQDN

SEQ ID NO: 15915 - protein, 125 aa, Argyroxiphium sandwicense
TNRQVTYSKRRNGIFKKAHELTVLCDAKVSLIMFSNTGKFHEYISPSTTTKKIYDMYQTTLGFDLWTSHYERMTETMKKLKESNNKLRREIRQRVLGEDLDGLDMNDLTILEQQMQDSLTVVRER

SEQ ID NO: 15916 - protein, 125 aa, Argyroxiphium sandwicense
TNRQVTYSKRRNGIFKKAHELTVLCDAKVSLIMFSNTGKFHEYISPSTTTKKIYDMYHTTLGFDLWSSHYERMTETMKKLKDSNNKLRREIRQRVLGEDLDGLDMNDLTILEQQMQDSLTVVRER

SEQ ID NO: 15917 - protein, 125 aa, Dubautia laevigata
TNRQVTYSKRRNGIFKKAHELTVLCDAKVSLVMFSNTGKFHEYISPSTTTKKIYDMHQTTLGFDLWTSHYERMTETMKKLKESNNKLRREIRQRVLGEDLDGLDMNDLTILEQQMQDSLTVVRER

SEQ ID NO: 15918 - protein, 125 aa, Dubautia latifolia
TNRQVTYSKRRNGIFKKAHELTVLCDAKVSLIMFSNTGKFHEYISPSTTTKKIYDMYQTTLGFDLRTSHYERMTETMKKLKESNNKLRREIRQRVLGEDLDGLDMNDLTILEQQMQDSLTVVRER

SEQ ID NO: 15919 - protein, 125 aa, Dubautia plantaginea
TNRQVTYSKRRNGIFKKAHELTVLCDAKVSLIMFSNTGKFHEYISPSTTTKKIYDMYQTTLGFDLWTSHYERMTETLKTLKESNNKLRREIRQRVLGEDLDGLDMNDLAILEQQMQDSLTVVRER

SEQ ID NO: 15920 - protein, 125 aa, Dubautia raillardioides
TNRQVTYSKRRNGIFKKAHELTVLCDAKVSLIMFSNTGKFREYISPSTTTKKIYDMYQTTLGFDLWISHYERMTETMKKLKESNNKLRREIRQRVLGEDLDGLDMNDLTILEQQMQDSLTVVRER

SEQ ID NO: 15921 - protein, 125 aa, Dubautia raillardioides
TNRQVTYSKRRNGIFKKAHELTVLCDAKVSLIMFSNTGKFHEYISLSTTTKKIYDMYQTTLGFDLWSSHYERMTETMKKLKDSNNKLRREIRQRVLGEDLDGLDMNDLTILEQQMQDSLTVVRER

SEQ ID NO: 15922 - protein, 125 aa, Dubautia scabra
TNRQVTYSKRRNGIFKKAHELTVLCDAKVSLIMFSNTGKFHEYISPSTTTKKIYDMYQTTLGFDLWTSHYERMTETMKKLKESNNKLRREIRQKVLGEDLDGLDMNDLTILEQQMQDSLTVVRER

SEQ ID NO: 15923 - protein, 125 aa, Dubautia sherffiana
TNRQVTYSKRRNGIFKKAHELTVLCDAKVSLIMFSNTGKFHEYISPSTTTKKIYDMYQTTLGFDLWSSHYERMTETMKKLKDSNNKLRREIRQRVVGEDLDGLDMNDLTILEQQMQDSLTVVRER

SEQ ID NO: 15924 - protein, 183 aa, Ranunculus ficaria
NRQVTYSKRRNGIIKKAKEIAILCAAEVSLVIFSSSDKMSEFNSRPLPQILEKYQKSSGNKLWDAKHEYLSQEIARVEKENQSMRQELKHLKGEEINSLQPKELIPIEHALENGITKVKEKQMEIYRMMKRNDRKLEEDNKRLVLKLQHQQQLMNGNGREYPSQMPPFTFQLHPSQPNLQEIK

SEQ ID NO: 15925 - protein, 193 aa, Ranunculus ficaria
AGIMKKAQELTVLCDAKVALLMFSSSGKVSEYVSPGTSFKSVYDQYQAINKMSLWDSEYEKMQGTLKKVKETNNNLRREIRQRQGDDLDGLSFMELRGLEQNLESSVDRVRHRKNHVIRTQTDTTNKKIKSHEETNRNFMSALEQMGKVEPQYAYVPQDEDYDANNMGSRIYAIHMQTHQNGEDYGSYGLSLA

SEQ ID NO: 15926 - protein, 195 aa, Ranunculus ficaria
TGIVKKARELTVLCDAQVSLIMFSSTGKLSEYISPTTTRKKVYDMYQKVAEVDLWNSEYERMQKELKKLKETNMELRKEIRQRVGEEIDDLSIDQLRGLEQDLDESVKAVRDRKYHTIATQTETYRKKLRNLHETHTHLVREIEARGEDAYYDGDYEAIMALTNAGAHFLPYGLHPGQPDHHDGDGYALHNLRLA

SEQ ID NO: 15927 - protein, 202 aa, Ranunculus ficaria
NRQVTYSKRRAGIMKKAKELTVLCDAKVSLIMFSSTGKCVDFISPSISPKAFYDKYRDVTGDDLWKSQYDKMQQELKTLVETNRKLRREIGQRVGEDLSNLSIKELRGLEQDLRDTEKVVRQRKFGLLSSQGETQRKKIRNLAEINGNLWQEYQERMEDEYALANGMSTLELGNGVFSFRLRPSQTNLHNDEEYEIHDLRLA

SEQ ID NO: 15928 - protein, 229 aa, Magnolia praecocissima
MARGKIQIKKIDNVTARQVTFSKRRRGLFKKAEELSILCDAEVALIIFSATGKLFEYSSSSMKEIIERHTMHSKNLQKLDQQPSLELQLENSNYNRLSKQVAEKSHLIRQMRGEDIQGLTVEELQKLEKTLETGLSRVMERKAEQIMKEISGLQIKGVKLMEENMRLRQRIIEMSRGDSKGDRQIIESEIVVNEDGQSSDSVTNACNSGAPQDYESSDTSLKLGVPFSS

SEQ ID NO: 15929 - protein, 220 aa, Dendrobium grex Madame Thong-IN
MGRGRVELKRIENKINRQVTFAKRRNGLLKKAYELSVLCDAEVALIVFSNRGRLFEFCSSTSMTKTLERYQKCSYNASESAVPSKDAQNSYHEYLTLKAKVEYLQRSQGNLLGEDLIELSSKELDQLELQLEMSLKQIRSTKTQLMLDQLCDIKRKEQMLHEANRALSMKLKEDGPEIPLELSWPGGETNGSSERQQPQSDKFFQPLPCSNPSLQIGYSP

SEQ ID NO: 15930 - protein, 174 aa, Dendrobium grex Madame Thong-IN
MGRGRVEMKRIENKINRQVTFAKRRTGLLKKAYELSVLCDVEVALIIFSNRGKLYEFCSSRSMLKTLEKYQKCSDGAPEMTMTSRETQSSQVEYLKLKSQVEALQRSQRNLLGEDLNPLGGKDLDQLERQLEASLKQIISTRMQYMLDQLGDLQQRELLLFETNKSLGTRVSAL

SEQ ID NO: 15931 - protein, 247 aa, Dendrobium grex Madame Thong-IN
MGRGRVQLKRIENKINRQVTFSKRRSGLLKKAHEISVLCDAEVALIVFSNKGKLYEYSTDSSMEKILERYERYSYAERALFSNEANPQADWRLEYNKLKARVESLQKSQRHLMGEQLDSLSIKELQRLEQQLESSLKFIRSRKTQLILHSISELQKMEKILLEQNKTLEKEIIAKEKAKALVQHAPWEKQNQSQYSSALPPVISDSVPTPTSRTFQARANEEESPQPQLRVSNTLLPPWMLSHMNGQ

SEQ ID NO: 15932 - protein, 186 aa, Tacca chantieri
NGIIKKAREISVLCDAQVSVVIFSSSGKMSEYCSPSTSLSKMLEKYQQNSGKKLWDAKHENLSAEIDRMKKENDNMQIELRHLKGEDLNQLNAKELIPIEDALHNGLTNVREKQMDFLKMLKKNERLLEEENKRLTYILHHQQLAMNGNVREMDLAYHQKDREYPPQMPLAFRVQPLQPNLQEDKQ

SEQ ID NO: 15933 - protein, 200 aa, Tacca chantieri
QGIMKKAKELTVLCDAEVSIIMFSSTGKFAEYCSPSTDTKKVYDRYQQVTGIDLWSSQYERMQNNLNHLEEINRNLRREIRQRTGEDLDGLDIKELRGLEQNVDEALRIVRQRKYHVITTQTDTYKKKLKNSHEAHRNLMRELEMRDEHPVYGFVDNDPTNYDSALALANAGSHVYAYRVQPSQPNLHGIGYSSHDLRLA

SEQ ID NO: 15934 - protein, 499 aa, Gallus gallus
MGRKKIQITRIMDERNRQVTFTKRKFGLMKKAYELSVLCDCEIALIIFNSSNKLFQYASTDMDKVLLKYTEYNEPHESRTNSDIVETLRKKGLNGCESPDADDYFEHSPLSEDRFSKLNEDSDFIFKRGPPGLPAQNFSMSVTVPVSNPNTLTYSNPGSSLVSPSLAASSSLTSTTMLSPPQTTLHRNVSPGAPQRPPSTGNAGGILGTTDLTVPNGAGTSPVGNGVWNSRASPSLLGTAGGGNGLGKVMPTKSPPPPGGGGLGMNNRKPDLRVVIPPSSKGMMPPLTEEDELELNTQRISSSQSTQPLATPVVSVTTPSFPPAGLVYSAMPTAYNTDYSLTSADLSAFEGFNSPGMLSLGQVSPWQQHHLGPATLSSLVSGSQLSQGSNLSINTNQNINIKSEPISPPRDRVNSSGFPQQQPPQQPQPPQPPQQPPQRQEMGRSPVDSLSSSSSSYDGSDREDPRSDFHSPVVLGRPPNSEDRESPSVKRMRMDTWVT

SEQ ID NO: 15935 - protein, 81 aa, Camelina sativa
ENSDHARMSKEIADKSHRLRQMRGEELHGLNIEELQQLEKALEAGLTRVIETKSGKIMNEISELQRKGMQLMDENKRLRQN

SEQ ID NO: 15936 - protein, 504 aa, Homo sapiens
MGRKKIQITRIMDERNRQVTFTKRKFGLMKKAYELSVLCDCEIALIIFNSSNKLFQYASTDMDKVLLKYTEYNEPHESRTNSDIVETLRKKGLNGCESPDADDYFEHSPLSEDRFSKLNEDSDFIFKRGPPGLPPQNFSMSVTVPVTSPNALSYTNPGSSLVSPSLAASSTLTDSSMLSPPQTTLHRNVSPGAPQRPPSTGNAGGMLSTTDLTVPNGAGSSPVGNGFVNSRASPNLIGATGANSLGKVMPTKSPPPPGGGNLGMNSRKPDLRVVIPPSSKGMMPPLSEEEELELNTQRISSSQATQPLATPVVSVTTPSLPPQGLVYSAMPTAYNTDYSLTSADLSALQGFNSPGMLSLGQVSAWQQHHLGQAALSSLVAGGQLSQGSNLSINTNQNISIKSEPISPPRDRMTPSGFQQQQQQQQQQPPPPPQPQPQPPQPQPRQEMGRSPVDSLSSSSSSYDGSDREDPRGDFHSPIVLGRPPNTEDRESPSVKRMRMDAWVT

SEQ ID NO: 15937 - protein, 495 aa, Homo sapiens
MGRKKIQITRIMDERNRQVTFTKRKFGLMKKAYELSVLCDCEIALIIFNSSNKLFQYASTDMDKVLLKYTEYNEPHESRTNSDIVETLRKKGLNGCESPDADDYFEHSPLSEDRFSKLNEDSDFIFKRGPPGLPPQNFSMSVTVPVTSPNALSYTNPGSSLVSPSLAASSTLTDSSMLSPPQTTLHRNVSPGAPQRPPSTGNAGGMLSTTDLTVPNGAGSSPVGNGFVNSRASPNLIGATGANSLGKVMPTKSPPPPGGGNLGMNSRKPDLRVVIPPSSKGMMPPLNTQRISSSQATQPLATPVVSVTTPSLPPQGLVYSAMPTAYNTDYSLTSADLSALQGFNSPGMLSLGQVSAWQQHHLGQAALSSLVAGGQLSQGSNLSINTNQNISIKSEPISPPRDRMTPSGFQQQQQQQQQPPPPPQPQPQPPQPQPRQEMGRSPVDSLSSSSSSYDGSDREDPRGDFHSPIVLGRPPNTEDRESPSVKRMRMDAWVT

SEQ ID NO: 15938 - protein, 486 aa, Homo sapiens [sequence omitted]

SEQ ID NO: 15939 - protein, 472 aa, Mus musculus
MGRKKIQITRIMDERNRQVTFTKRKFGLMKKAYELSVLCDCEIALIIFNSTNKLFQYASTDMDKVLLKYTEYNEPHESRTNSDIVEALNKKENKGSESPDPDSSYALTPRTEEKYKKINEEFDNMIKSHKIPAVPPPSLEMPVTIPVSSHNSLVYSNPVSTLGNPNLLPLAHPSLQRNSMSPGVTHRPPSAGNTGGLMGGDLTSGAGTSAGNGYGNPRNSPGLLVSPGNLNKNIQAKSPPPMNLGMNNRKPDLRVLIPPGSKNTMPSVSEDVDLLLNQRINNSQSAQSLATPVVSVATPTLPGQGMGGYPSAISTTYGTEYSLSSADLSSLSGFNTASALHLGSVTGWQQQHLHNMPPSALSQLGACTSTHLSQSSNLSLPSTQSLSIKSEPVSPPRDRTTTPSRYPQHTTRHEAGRSPVDSLSSCSSSYDGSDREDHRNEFHSPIGLTRPSPDERESPSVKRMRLSEGWAT

SEQ ID NO: 15940 - protein, 229 aa, Hordeum vulgare subsp. vulgare
MAGKRERIAIRRIENLAARQVTFSKRRRGLFKKAEELSILCDAEVGLAVFSATGKLFQFASSSMNQIIDRYNSHSKILKKVDEPSQLDLHEDSNCARLRDELAEASLWLQQMRGEELQSLNVQQLQALEKSLESGLSSVLKTKSQKIMDQISELEKKRVQLIEENARLKEQLQASKMEMQVAADPLVVVYDEGQSSESVTNTSYPRPPLDTEDSSDTSLRLGLSLFNSK

SEQ ID NO: 15941 - protein, 227 aa, Hordeum vulgare subsp. vulgare
MAGKRERIAIRRIENLAARQVTFSKRRRGLFKKAEELSILCDAEVGLAVFSATGKLFQFASSSMNQIIDRYNSHSKILKKVDEPSQLDLHEDSNCARLRDELAEASLWLQQMRGEELQSLNVQQLQALEKSLESGLSSVLKTKSQKIMDQISELEKKRVQLIEENARLKEQASKMEMQVAADPLVVVYDEGQSSESVTNTSYPRPPLDTEDSSDTSLRLGLSLFNSK

SEQ ID NO: 15942 - protein, 186 aa, Michelia figo
GGILKKAKEITVLCDAQVSLVIFSSTGKMSEYCSPSTELVNVLDRYHKSAGKKLWDAKHEHLSNELERIKKENDSMHVKLRHLKGEDITSLHPKELIPIEEALENGLACVRSRQMQCLKMLKKNERSLEEENRRLSYILQHQQQLAMDVNVREMDHGYHQREREYHPQMPFTFRVQPIQPNLHQNK

SEQ ID NO: 15943 - protein, 237 aa, Lycopodium annotinum
MGRGKIEIKRIENATCRQVTFSKRRSGLLKKAHELSVLCDAQVAVIIFSSTGKLFQFASTRMKEILERYERNSDPLQIDAVIPRDLEYWSREAAKAKDELDRCHQKNRHMLGEDLSALNLNELEELEQQLDSGLRRVRCRKDQVLRDRIEELTKQESFLREENRMLRSKIAVPKESTEPILDEMNMETREPPSMAIVEEELSLKLNSKTWPDIHFSLQLGQYQPPRTETPTANHRPN

SEQ ID NO: 15944 - protein, 231 aa, Lycopodium annotinum
MGRGKIEIKRIENATSRQVTFSKRRGGLLKKAHELSVLCDAQVALIIFSSTGKLFEYASPSMKEILDRYGKYPEGVQTGTVTDPNNDVMLQYLNREVIRMKQQIERTHQTQRHMMGEDLAILPLKDLQQLEEQLDIGLRRIRARKDQLLVEQLEELHRKERHWLEENEALRRKLAGGQALSGPVPSPLSIVNPLETREPPSLGTVSLPFSVQFNQQNMQDTPNLQTSLQLG

SEQ ID NO: 15945 - protein, 182 aa, Clematis integrifolia
NGILKKARELNVLCDAQVSLVVFSSTGNMFEFHSKPLSKTLERYQSASGNKLWDAKLEYLSKEVDRIKKENDRMQIELRHLKGEDINSLQPRDLIPIEDALSNGLRKVKDKQMEFLENTKRRTLKVEEDNKLLCYTLQQQEQQMEMNRNADKGYHQNGGEYPSHVPFTFRVQPIQPNLQENK

SEQ ID NO: 15946 - protein, 221 aa, Hemerocallis hybrid cultivar
MGRGKIEIKKIENSTNRQVTYSKRRSGIMKKAKELTVLCDADVSIIMFSSTGKFSEYCSPGTDTKTVFERYQQATQTNLWSTQYEKMQNTLNHLKEINHNLRKEIRQRIGEELDGMDFKELRGLEQNLDEALKSVRARKYHVITTQTDTYKKKVKNSQEAHKTLLHELDDAVYGYADEDPGNYDSSLALAHGGSNMYAYRVQPSQPNLHGMSYGPHDLRLA

SEQ ID NO: 15947 - protein, 189 aa, Liriodendron tulipifera
GGIMKKAKELTVLCDAEVSLIMFSSTGKFSEYCSPSTTTKKIFDRYQQVSGSSLWNSHYEKMQSHLNKLKEDNNSLRRAIRHRIGEDLDDLEIEELRGLEQNLESSIKVVRERKYHVINTQTETYKKKLRNLHEAHANLIRELEGQAENGGYGLVDNGGPDYESALVLANGGAHRLHNTGFGIHDLRLA

SEQ ID NO: 15948 - protein, 202 aa, Calycanthus floridus
GGILKKARELTVLCDAEVSLIMFSSTGKFSEYCSPSSTAKKIFDRYQQVSGINLWNSHYEKMQNHLNKLKEDNNNLRREIRQRMGEDLNDLEIDELRGLEQNLDNSLKVVRERKYHVINTQTETYKKKLRSLHEAHANLLRALEEGNDDNGDYGMGNNGGADYQAAAFGWANEGSQMFALCVQPCHPNLQDARSGHHDLRLA

SEQ ID NO: 15949 - protein, 214 aa, Sanguinaria canadensis
NGILKKAKEITVLCDAKVSLVIFSSTGKMAEYCSPCPLIEILDRYQKSSGKRLWDAKHEYLSAEVDRIKKENDNMQIELRHLKGEDLTSLHPKELIPIEKALEVGYASVRAKQMEIWKTLKKNGRLLEDEHKRLSYKYHQQHQMEIEGGARGEMEQNGGTAGGGSGGYNHQKAAAGAAGRPDYPPSHHQQQQQQMPFAFCVQAIQPNVHNNNNK

SEQ ID NO: 15950 - protein, 260 aa, Betula pendula
MGRGRVQLKRIENKISRQVTFSKRRTGLLKKAHEISVLCDAEVALIVFSTKGKLFEFSSDSSMDRILERYERYSYADRHLMATESESQGSWSLEFPKLSARIEVLERNIRNLLGEDLDPLSLRELQNMEQQLDTGLKRLRTRKNQVMHESIMELQKKEKALQEQNNLLSKKIKENEKAVAEHAHLEQPSIGQNLSTFMLSLPQQPQPQPQLQPQPPTLPLPSLTIGGTFQAGAGDEDAGAQTRPSANRLMPPWMLSHING

SEQ ID NO: 15951 - protein, 244 aa, Betula pendula
MGRGRVQLKRIENKINRQVTFSKRRSGLLKKAHEISVLCDAEVALIVFSTKGKLFEYSTDSCMERILERYERYSYADRQLLANDLEQNGSWTLEHAKLKARIEVLQRNQKHFVGEDLDSLSLKELQNLEQQLDSALKHIRSRKNQLMYESISELQRKDKALQEQNNVLAKKVKEKEKELAQQAQWEQQSHTLDSVPSLLPQPLQSSLNIGGSQQARGNGRVDEGTPPHRANALLPPWMLRHLNQ

SEQ ID NO: 15952 - protein, 243 aa, Betula pendula
MGRGRVQLKRIENKINRQVTFSKRRGGLLKKAHEISVLCDAEVAVIVFSHKGKLFEYATDSSMEKILERYERYSYAEAQLVAADSEGQGSWTMEFARLKGKVELLQRNHRHYLGDDLESLSHKELQNLEQQLDTALKHVRTRKNQLMYESISQLQKKEKAIQEQNTILAKKIKEKEKTVAQHVDWEQQNQGAPNGSSSFLLPQPLPCLNIGGNYQEEAPEVRRNELELTLEPIYSCHLGCFAT

SEQ ID NO: 15953 - protein, 203 aa, Cucumis sativus
MGRGKVELKRIENPTSRQVTFSKRRNGLLKKAYELSVLCDAQVALLIFSPSGKAYQFSSHDMDGTLARYRTDVGLPQSNHPHSRALFWKTEMDDMKRSISSMEARLRHFVGEDLEPLNVKELKQLERQMSVGIERIRSKKRRIIAEHINLLKRKYKGLQEEHSRLQKRLNQLKDVVVTNSSRNSDANPASALEIEFQVDGLLI

SEQ ID NO: 15954 - protein, 200 aa, Cucumis sativus
GKVELKRIENPTSRQVTFSKRRNGLLKKAYELSVLCDAQVALLIFSPSGKAYQFSSHDMDGTLARYRTDVGLPQSNHPHSRALFWKTEMDDMKRSISSMEARLRHFVGEDLEPLNVKELKQLERQMSVGIERIRSKKRRIIAEHINLLKRKYKGLQEEHSRLQKRLNQLKDVVVTNSSRNSDANPASALEIEFQVDGLLI

SEQ ID NO: 15955 - protein, 227 aa, Momordica charantia
MGRGKIEIKRIENTTNRQVTFCKRRNGLLKKAYELSVLCDAEVALIVFSSRGRLYEYSNNSIKTTIGRYKKACSDSSATSSVTELNTQYYQQESAKLRQQIQMLQNSNSNLVRHLMGDSLSALTVKELKQLENRLERGITRIRSKKHEMLLAEIEYLQKREIELENENVCIRTKIAEVERLQQANMVSGQELNAIQALASRNFFTPNMMEGGAVTFSHQDKKMLHLG

SEQ ID NO: 15956 - protein, 245 aa, Populus tremuloides
MGRGRVELKRIENKINRQVTFAKRRNGLLKKAYELSVLCDAEVALIIFSNRGKLYEFCSTSNMLKTLERYQKCSYGAEEVNKPAKELENSYREYLKVKARFEGLQRTQRNLLGEDLGPLNTKDLEQLERQLESSLNQVRSTKTQYMLDQLADLQNKEHLLQEANRGLTIKLDEISARNSLRPSWEGDDQQNMSYGHQHAQSQGLFQALECNPTLQIGYNPVGSDQVSAITHATQQVHGFIPGWML

SEQ ID NO: 15957 - protein, 248 aa, Populus tremuloides
MGRGRVQLKRIENKINRQVTFSKRRTGLLKKAHEISVLCDAEVALIVFSHKGKLFEYSTDDCMEEILERYERYSYAERQLVATDLDSQGDWTLEYNRLKAKVELLQRNHRNYVGEDLDSMSLKELQNLEQQIETALKHIRARKNHLMSQSISEMQRKEKAIQVQNNMLVKQIKEKEKKDKAVAQPAFWDQQNHGPDASSFLLSQPAGLPLPCLNIGGSYQEEAPEARRNGLGHTLEPIYSFHLGGYGA

SEQ ID NO: 15958 - protein, 237 aa, Populus tremuloides
SGTENKINRQVTFAKRRNGLLKKAYELSVLCDAEVALIIFSNRGKLYEFCSTSNMLKTLERYQKCSYGAEEVNKPAKELENSYREYLKVKARFEALQRTQRNLLGEDLGPLNTKDLEQLERQLESSLNQVRSTKTQYMLDQLADLQNKEHLLLEANRGLTIKLDEISARNSLRPSWEGDDQQNMSYGHQHAQSQGLFQALECNPTLQIGYNAVGSDQVSAITHATQQVHGFIPGWML

SEQ ID NO: 15959 - protein, 240 aa, Populus tremuloides
MGRGRVQLKRIENKINRQVTFSKRRAGLLKKAHEISVLCDAEVALIVFCHKGKLFEYSTNACMEKILERHERYSYAERQLVATDLDSQGNWTLEYNRLKEKVELLQRNHRHYLGEDLDSVSLKELQNLEKQIDTALELIRERKNHLMYQSISELQIKEKAIKEQNNMLVKQIKEKEKALAQPALWDQQDHGPNASSFLLPQPPLPCLNISYQEEDPIARRNELDLTLEPIYSCHLGCFGT

SEQ ID NO: 15960 - protein, 263 aa, Glycine max
  unsure (1)..(263): unsure at all Xaa locations
MTRKKIPIKKIDNINARQVTFSKRRKGLFKKAQELSTLCDAEIALIVFFATGKLFEYASSSMQQTLERRNQHSGIQGLDNPSIGQQLGSDSFGMLPLRKEIEDKTNELSQLNEEELQGLKIKELQKLEDILQRRWTTISKTKDEKVIQEINHLKTKEAKLMEENQKLKQSFLQXNKGNHTSHLPVVHLXFPPDNGSSDTSLKLGLSLFEXNKNVGSEDXQVNAFASISVSVKINVVFRIXQFAGECTAGFILGKNSQLXQLIC

SEQ ID NO: 15961 - protein, 233 aa, Oryza sativa
EGEGRAATGKRERIAIRRIDNLAARQVTFSKRRRGLFKKAEELSILCDAEVGLVVFSATGKLFQFASTSMEQIIDRYNSHSKTLQRAEPSQLDLQGEDSSTCARLKEELAETSLRLRQMRGEELHRLNVEQLQELEKSLESGLGSVLKTKSKKILDEIDGLERKRMQLIEENLRLKEQVSRMSRMEEMQPGPDSEIVYEEGQSSESVTNASYPRPPPDNDYSSDTSLKLGLHS

SEQ ID NO: 15962 - protein, 247 aa, Oryza sativa
  unsure (1)..(247): unsure at all Xaa locations
MAGGGGGGGRGEGEGRAATGXKRERIAIRRIDNLAARQVTFSKRRRGLFKKAEELSILCDAEVGLVVFSATGKLFQFASTSMEQIIDRYNSHSKTLQRAEPSQLDLQGEDSSTCARLKEELAETSLRLRQMRGEELHRLNVEQLQELEKSLESGLGSVLKTKSKKILDEIDGLERKRMQLIEENLRLKEQLQVSRMSRMEEMQPGPDSEIVYEEGQSSESVTNASYPRPPPDNDYSSDTSLKLGLHS

SEQ ID NO: 15963 - protein, 268 aa, Oryza sativa
  unsure (1)..(268): unsure at all Xaa locations
XPGKKERIPIGGFANLAARQVTXSKRRRGLFKKAEELSILCNTEVGLVVFSATGKLFQFASTSMEQIIDRYNSHSKTLQRAEPSQLDLQDSSTCARLKEELAETSLRLRQMKGEELHRLNVEQLQELEKSLESGLGSVLKTKSKKILDEIDGLERKRMQLIEENLRLKEQVSRMSRMEEMQPGPDSEIVYEEGQSSESVTNASYPRPPPDNDYSSDTSLRLGDPRPRVTGGEEDEDEDGDGDGGFVTRAWGSLAKKLLEAPSEAANIL

SEQ ID NO: 15964 - protein, 213 aa, Oryza sativa
  unsure (1)..(213): unsure at all Xaa locations
GKKERIPIGGFANLAARQVTXSKRRRGLFKKAEELSILCNTEVGLVVFSATGKLFQFASTSMEQIIDRYNSHSKTLQRAEPSQLDLQVSDSSTCARLKEELAETSLRLRQMKGEELHRLNVEQLQELEKSLESGLGSVLKTKSKKILDEIDGLERKRMQLIEENLRLKEQVSTLXQSSESVTNASYPRPPPDNDYSSDTSLRLGXVLPYFQFQ

SEQ ID NO: 15965 - protein, 166 aa, Triticum aestivum
  unsure (1)..(166): unsure at all Xaa locations
XSRDLLPPPDRPRPPLLXCAAAPSLRGGPGGGRWAGLSDGLAVPSLGLLPARGEELQSLNVQQLQALEKSLESGLGSVLKTKSQKIMDQISELENKRVQLIEENARLKEQASKMEMQVAADSXXVVYEEGQSSESVTNTSYPRPPLDTEDSSDTSLRLGLPLFNSK

SEQ ID NO: 15966 - protein, 244 aa, Triticum monococcum
MGRGKVQLKRIENKINRQVTFSKRRSGLLKKAHEISVLCDAEVGLIIFSTKGKLYEFSTESCMDKILERYERYSYAEKVLVSSESEIQGNWCHEYRKLKAKVETIQKCQKHLMGEDLESLNLKELQQLEQQLESSLKHIRSRKNQLMHESISELQKKERSLQEENKVLQKELVEKQKAHAAQQDQTQPQTSSSSSSFMLRDAPPAANTSIHPAAAGERAEDAAVQPQAPPRTGLPPWMVSHING

SEQ ID NO: 15967 - protein, 228 aa, Lilium longiflorum
MGRGKIEIKKIENSTNRQVTYSKRRTGIIKKATELTVLCDAEVSLLMFSSTGKLSEFCSPSTDTKKIFDRYQQLSGINLWSAQYEKMQNTLNHLSEINRNLRKEISQRMGEELDGLDIKDLRGLEQNLDEALKLVRHRKYHVINTQTETYKKKVKNSEEAHKNLLRDLVNREMKDENPVYGYVDEDPSNYDGGLGLANGASHLYEFRVQPSQPNLHGMGYGSHDLRLA

SEQ ID NO: 15968 - protein, 57 aa, Perilla frutescens
MGRGRVQLKRIENKINRQVTFSKRRSGLLKKAHEISILCDADVGLIVFSTKGKLFEY

SEQ ID NO: 15969 - protein, 198 aa, Saururus chinensis
NRQVTYSKRRNGLFKKAHELSVLCDAQVSIILIPNTRRHHDYCSPSATHKQVYDRYQQVRGVDLWSTQYEKNKSESFYWRQRMGKDLGHLTYNELRGLEQTVENAVNVIRDRKIKQIQNQIQKYDKKCKSLDDDNDVRLLQLQAIHENCRYYGFMENGGADHRTGFKLANQASHIFAFRGQPCQPNLHDASFRDRDTH

SEQ ID NO: 15970 - protein, 209 aa, Orchis italica
MGRGNTEIKRIENSTNRQVTFSKRRSGIIKKAREISVLCDAQVSLVIFSSLGKLSEYCSPSTTLSKMLERYQQNSGKKLWDATHENLSAEIDRIKKENDTMQIELRLKGEDLNSLTPKELIPIEEGLQNGLTSVREKQMDFLKMLKKNERMLEEENKRLKYLLQHQQLAIEGSMRELEISYHQKDPEYADQMPMTFRVQPFQPNLHGNN

SEQ ID NO: 15971 - protein, 430 aa, Podocoryne carnea
MGRKKIQISRINDERNRQVTFTKRKFGLMKKAYELSILCDCEIALIIFNSGNKLFQYASTDMDKILLKYTEYNEPHESRTNADIHETISRKENKQCGSPEDGDAASFVLTPRTEMKYQKINEEFEMMMKKTNGSGTESPSIPSLYVSQEQRYSQQQPLQQQSMMRMQTLGPQGYQQMPSITHPLPSPREDSNTGKDPRSNTPLQRDGRLSISPHPSLHHALSPPPQSLPLPTRSPHTMNQQMPQNGNMVQSRGGTPNLKTAMQNSRAQQNQTPNQMMHVNADSSLSTPIVSLATPSFPGIPSNFPSGLPSSYTGYSDMDSGQIQYHHGSTINNNHPGSTSLTMSHHQQDMGNPMSRSHPNMVGSKHGVNIKVEPPDHLRVTSPSLHAFQSHPTQYTSQRHKDLMDQSNLIPGGGPMSKRPRIDAHNDGWQ

SEQ ID NO: 15972 - protein, 183 aa, Eucalyptus grandis
MGRGRVELKRIENKINRQVTFAKRRNGLLKKAYELSVLCDAEVGLIIFSNRGKLYEFCSSSSMLKTLERYQKCNYGALEPNVSARESLELSCQQEYLRLKARYEGLQRTQRNLLGEELGQLCSKELESLERQLDGSLKQIRSRRTQYMLDQVTDLQHREQVVHEANRTLNQRLMEGYQVMRSS

SEQ ID NO: 15973 - protein, 465 aa, Homo sapiens
MGRKKIQITRIMDERNRQVTFTKRKFGLMKKAYELSVLCDCEIALIIFNSTNKLFQYASTDMDKVLLKYTEYNEPHESRTNSDIVETLRKKGLNGCDSPDPDADDSVGHSPESEDKYRKINEDIDLMISRQRLCAVPPPNFEMPVSIPVSSHNSLVYSNPVSSLGNPNLLPLAHPSLQRNSMSPGVTHRPPSAGNTGGLMGGDLTSGAGTSAGNGYGNPRNSPGLLVSPGNLNKNMQAKSPPPMNLGMNNRKPDLRVLIPPGSKNTMPSVNQRINNSQSAQSLATPVVSVATPTLPGQGMGGYPSAISTTYGTEYSLSSADLSSLSGFNTASALHLGSVTGWQQQHLHNMPPSALSQLGACTSTHLSQSSNLSLPSTQSLNIKSEPVSPPRDRTTTPSRYPQHTRHEAGRSPVDSLSSCSSSYDGSDREDHRNEFHSPIGLTRPSPDERESPSVKRMRLSEGWAT

SEQ ID NO: 15974 - protein, 204 aa, Oncidium cv. 'Gower Ramsey'
MGRGKIEIKKIENPTSRQVTYSKRRLGITKKAMELTVLCDAKVSLIMFSSSGKLSDYCSPSTEIKDAFQRYQQVTGFDIWDAQYQRMQSTLMNLREVNHKLQMEIRQRKGENLEGLDVKELRGLEQKLEESIKIVRERKYHVIATQTDTYKKKLRSTREMYPALLNELQEVDDENQQRSFIAEDLSGVYNSAISMANQRLAHCL

SEQ ID NO: 15975 - protein, 442 aa, Mus musculus
MGRKKIQITRIMDERNRQVTFTKRKFGLMKKAYELSVLCDCEIALIIFNSTNKLFQYASTDMDKVLLKYTEYNEPHESRTNSDIVETLRKKGLNGCDSPDPDADDSVGHSPESEDKYRKINEDIDLMISRQRLCAVPPPSFEMPVTIPVSSHNSLVYSNPVSTLGNPNLLPLAHPSLQRNSMSPGVTHRPPSAGNTGGLMGGDLTSGAGTSAGNGYGNPRNSPGLLVSPGNLNKNIQAKSPPPMNLGMNNRKPDLRVLIPPGSKNTMPSVSEDVDLLLNQRINNSQSAQSLATPVVSVATPTLPGQGMGGYPSAISTTYGTEYSLSSADLSSLSGFNTASALHLGSVTGWQQQHLHNMPPSALSQLGDRTTTPSRYPQHTTRHEAGRSPVDSLSSCSSSYDGSDREDHRNEFHSPIGLTRPSPDERESPSVKRMRLSEGWAT

SEQ ID NO: 15976 - protein, 466 aa, Mus musculus
MGRKKIQITRIMDERNRQVTFTKRKFGLMKKAYELSVLCDCEIALIIFNSTNKLFQYASTDMDKVLLKYTEYNEPHESRTNSDIVETLRKKGLNGCDSPDPDADDSVGHSPESEDKYRKINEDIDLMISRQRLCAVPPPSFEMPVTIPVSSHNSLVYSNPVSTLGNPNLLPLAHPSLQRNSMSPGVTHRPPSAGNTGGLMGGDLTSGAGTPAGNGYGNPRNSPGLLVSPGNLNKNIQAKSPPPMNLGMNNRKPDLRVLIPPGSKNTMPSVNQRINNSQSAQSLATPVVSVATPTLPGQGMGGYPSAISTTYGTEYSLSSADLSSLSGFNTASALHLGSVTGWQQQHLHNMPPSALSQLGACTSTHLSQSSNLSLPSTQSLSIKSEPVSPPRDRTTTPSRYPQHTTRHEAGRSPVDSLSSSSSSYDGSDREDHRNEFHSPIGLTRPSPDERESPSVKRMRLSEGWAT

SEQ ID NO: 15977 - protein, 507 aa, Mus musculus
MGRKKIQIQRITDERNRQVTFTKRKFGLMKKAYELSVLCDCEIALIIFNHSNKLFQYASTDMDKVLLKYTEYNEPHESRTNADIIETLRKKGFNGCDSPEPDGEDSLEQSPLLEDKYRRASEELDGLFRRYGSSVPAPNFAMPVTVPVSNQSSMQFSNPSSSLVTPSLVTSSLTDPRLLSPQQPALQRNSVSPGLPQRPASAGAMLGGDLNSANGACPSPVGNGYVSARASPGLLPVANGNSLNKVIPAKSPPPPTHNTQLGAPSRKPDLRVITSQGGKGLMHHLNNAQRLGVSQSTHSLTTPVVSVATPSLLSQGLPFSSMPTAYNTDYQLPSAELSSLPAFSSPAGLALGNVTAWQQPQPPQQPQPPQPPQSQPQPPQPQPQQPPQQQPHLVPVSLSNLIPGSPLPHVGAALTVTTHPHISIKSEPVSPSRERSPAPPPPAVFPAARPEPGEGLSSPAGGSYETGDRDDGRGDFGPTLGLLRPAPEPEAEGSAVKRMRLDTWTLK

SEQ ID NO: 15978 - protein, 514 aa, Mus musculus
MGRKKIQIQRITDERNRQVTFTKRKFGLMKKAYELSVLCDCEIALIIFNHSNKLFQYASTDMDKVLLKYTEYNEPHESRTNADIIETLRKKGFNGCDSPEPDGEDSLEQSPLLEDKYRRASEELDGLFRRYGSSVPAPNFAMPVTVPVSNQSSMQFSNPSSSLVTPSLVTSSLTDPRLLSPQQPALQRNSVSPGLPQRPASAGAMLGGDLNSANGACPSPVGNGYVSARASPGLLPVANGNSLNKVIPAKSPPPPTHNTQLGAPSRKPDLRVITSQGGKGLMHHLTGDHLDLNNAQRLGVSQSTHSLTTPVVSVATPSLLSQGLPFSSMPTAYNTDYQLPSAELSSLPAFSSPAGLALGNVTAWQQPQPPQQPQPPQPPQSQPQPPQPQPQQPPQQQPHLVPVSLSNLIPGSPLPHVGAALTVTTHPHISIKSEPVSPSRERSPAPPPPAVFPAARPEPGEGLSSPAGGSYETGDRDDGRGDFGPTLGLLRPAPEPEAEGSAVKRMRLDTWTLK

SEQ ID NO: 15979 - protein, 432 aa, Mus musculus
MGRKKIQITRIMDERNRQVTFTKRKFGLMKKAYELSVLCDCEIALIIFNSTNKLFQYASTDMDKVLLKYTEYNEPHESRTNSDIVEALNKKENKGSESPDPDSSYALTPRTEEKYKKINEEFDNMIKSHKIPAVPPPSFEMPVTIPVSSHNSLVYSNPVSTLGNPNLLPLAHPSLQRNSMSPGVTHRPPSAGNTGGLMGGDLTSGAGTSAGNGYGNPRNSPGLLVSPGNLNKNIQAKSPPPMNLGMNNRKPDLRVLIPPGSKNTMPSVNQRINNSQSAQSLATPVVSVATPTLPGQGMGGYPSAISTTYGTEYSLSSADLSSLSGFNTASALHLGSVTGWQQQHLHNMPPSALSQLGDRTTTPSRYPQHTTRHEAGRSPVDSLSSCSSSYDGSDREDHRNEFHSPIGLTRPSPDERESPSVKRMRLSEGWAT

SEQ ID NO: 15980 - protein, 349 aa, Mus musculus
MGRKKIQISRILDQRNRQVTFTKRKFGLMKKAYELSVLCDCDIALIIFNSAQRLFQYASSDMDRVLLKYTEYSEPHESRTNADILQTLKRRGVGLDGPELDMEEGPEGPGEKLLRTLGGDRGSASPRPRIYPVAPAMSVSELSYRVPPATPGCDPGGLGEVPSVHSRPAYFRPPGLGHPIFSPSHLASKTPPPLYLATDGRRPDLPPGLVGARGGLGTSRSLYSGLQSPGAPGPALGSFAFLPSGSTDCSPGDAAQGPLQPSPWPPTRDAVDPARPVARSLCKEGPPSRGGSPPTPPVSIKSERLSPVTGTSGDFPRSFPYPLLLARPLAEPLRPSASLHRLTPDSWPR

SEQ ID NO: 15981 - protein, 339 aa, Mus musculus
MGRKKIQISRILDQRNRQVTFTKRKFGLMKKAYELSVLCDCDIALIIFNSAQRLFQYASSDMDRVLLKYTEYSEPHESRTNADILQTLKRRGVGLDGPELDMEEGPEGPGEKLLRTLGGDRGSASPPPRIYPVAPAMSVSELSYRVPPATPGCDPGGLGEAPSVHSRPPHFRPPGLGHPIFSPSHLASKTPPPLYLATDGRRPDLPPGLRSLYSGLQSPGAPGPALGSFAFLPSGSTDCSPGDAAQGPLQPSPWPPTRDAVDPARPVARSLCKEGPPSRGASPPTPPVSIKSERLSPVTGTSGDFPRSFPYPLLLARPLAEPLRPSASLHRLTPDSWPR

SEQ ID NO: 15982 - protein, 242 aa, Mus musculus
MGRKKIQISRILDQRNRQVTFTKRKFGLMKKAYELSVLCDCDIALIIFNSAQRLFQYASSDMDRVLLKYTEYSEPHESRTNADILQTLKRRGVGLDGPELDMEEGPEGPGEKLLRTLGGDRGSASPRPRIYPVAPAMSVSELSYRVPPATPGCDPGGLGEVPSVHSRPAYFRPPGLGHPIFSPSHLASKTPPPLYLATDGRRPDLPPGLVGARGGLGTSIAARETQLRDPCNPHPGHQRGTL

SEQ ID NO: 15983 - protein, 232 aa, Mus musculus
MGRKKIQISRILDQRNRQVTFTKRKFGLMKKAYELSVLCDCDIALIIFNSAQRLFQYASSDMDRVLLKYTEYSEPHESRTNADILQTLKRRGVGLDGPELDMEEGPEGPGEKLLRTLGGDRGSASPRPRIYPVAPAMSVSELSYRVPPATPGCDPGGLGEVPSVHSRPAYFRPPGLGHPIFSPSHLASKTPPPLYLATDGRRPDLPPGLIAARETQLRDPCNPHPGHQRGTL

SEQ ID NO: 15984 - protein, 349 aa, Mus musculus
MGRKKIQISRILDQRNRQVTFTKRKFGLMKKAYELSVLCDCDIALIIFNSAQRLFQYASSDMDRVLLKYTEYSEPHESRTNADILQTLKRRGVGLDGPELDMEEGPEGPGEKLLRTLGGDRGSASPRPRIYPVAPAMSVSELSYRVPPATPGCDPGGLGEVPSVHSRPAYFRPPGLGHPIFSPSHLASKTPPPLYLATDGRRPDLPPGLVGARGGLGTSRSLYSGLQSPGAPGPALGSFAFLPSGSTDCSPGDAAQGPLQPSPWPPTRDAVDPARPVARSLCKEGPPSRGASPPTPPVSIKSERLSPVTGTSGDFPRSFPYPLLLARPLAEPLRPSASLHRLTPDSWPR

SEQ ID NO: 15985 - protein, 339 aa, Mus musculus
MGRKKIQISRILDQRNRQVTFTKRKFGLMKKAYELSVLCDCDIALIIFNSAQRLFQYASSDMDRVLLKYTEYSEPHESRTNADILQTLKRRGVGLDGPELDMEEGPEGPGEKLLRTLGGDRGSASPRPRIYPVAPAMSVSELSYRVPPATPGCDPGGLGEVPSVHSRPAYFRPPGLGHPIFSPSHLASKTPPPLYLATDGRRPDLPPGLRSLYSGLQSPGAPGPALGSFAFLPSGSTDCSPGDAAQGPLQPSPWPPTRDAVDPARPVARSLCKEGPPSRGGSPPTPPVSIKSERLSPVTGTSGDFPRSFPYPLLLARPLAEPLRPSASLHRLTPDSWPR

SEQ ID NO: 15986 - protein, 339 aa, Mus musculus
MGRKKIQISRILDQRNRQVTFTKRKFGLMKKAYELSVLCDCDIALIIFNSAQRLFQYASSDMDRVLLKYTEYSEPHESRTNADILQTLKRRGVGLDGPELDMEEGPEGPGEKLLRTLGGDRGSASPRPRIYPVAPAMSVSELSYRVPPATPGCDPGGLGEVPSVHSRPAYFRPPGLGHPIFSPSHLASKTPPPLYLATDGRRPDLPPGLRSLYSGLQSPGAPGPALGSFAFLPSGSTDCSPGDAAQGPLQPSPWPPTRDAVDPARPVARSLCKEGPPSRGASPPTPPVSIKSERLSPVTGTSGDFPRSFPYPLLLARPLAEPLRPSASLHRLTPDSWPR

SEQ ID NO: 15987 - protein, 172 aa, Mus musculus
MGRKKIQITRIMDERNRQVTFTKRKFGLMKKAYELSVLCDCEIALIIFNSTNKLFQYASTDMDKVLLKYTEYNEPHESRTNSDIVEAVPPPSFEMPVTIPVSSHNSLVYSNPVSTLGNPNLLPLAHPSLQRNSMSPGVTHRPPSAGNTGRSLRGLHVHKVLEGSTSSESFLI

SEQ ID NO: 15988 - protein, 506 aa, Mus sp.
MGRKKIQIQRITDERNRQVTFTKRKFGLMKKAYELSVLCDCEIALIIFNHSNKLFQYASTDMDKVLLKYTEYNEPHESRTNADIIEALHNNDRECESPEVDEAFALTPQTEEKYKKIDEEFDKMMQSYRLASSVPAPNFAMPVTVPVSNQSSMQFSNPSSSLVTPSLVTSSLTDPRLLSPQQPALQRNSVSPGLPQRPASAGAMLGGDLNSANGACPSPVGNGYVSARASPGLLPVANGNSLNKVIPAKSPPPPTHNTQLGAPSRKPDLRVITSQGGKGLMHHLNNAQRLGVSQSTHSLTTPVVSVATPSLLSQGLPFSSMPTAYNTDYQLPSAELSSLPAFSSPAGLALGNVTAWQQPQPPQQPQPPQPPQSQPQPPQPQPQQPPQQQPHLVPVSLSNLIPGSPLPHVGAALTVTTHPHISIKSEPVSPSRERSPAPPPPAVFPAARPEPGEGLSSPAGGSYETGDRDDGRGDFGPTLGLLRPAPEPEAEGSAVKRMRLDTWTLK

SEQ ID NO: 15989 - protein, 437 aa, Rattus norvegicus
MGRKKIQITRIMDERNRQVTFTKRKFGLMKKAYELSVLCDCEIALIIFNSTNKLFQYASTDMDKVLLKYTEYNEPHESRTNSDIVELLKKIEKFYTGILQVSDHPAYKTLRKKGLNGCDSPDPDADDSVGHSPESEDKYRKINEDIDLMISRQRLCALNKKENKGSESPDPDSSYALTPRTEEKYKKINEEFDNMIKSHKIPAVPPPNFEMPVTIPVSSHNSLVYSNPVSSLGNPNLLPLAHPSLQRNSMSPGVTHRPPSAGGLMGGDLTSGAGTSAGEILDFSGLLGGEKMRLAGVLLPRPERRRKGPSLEGLSPPNCGPARQVSRCVVTLTICFGVMFFNGFTAQPCFVSVYRGDGAAYFVLVSPKDNYESWLGQLTRSTGLALETYNQLAEAKPRTGPRSGPHQALGGVRDNHRHCGPGAARRAYSLHAAKILT

SEQ ID NO: 15990 - protein, 507 aa, Rattus norvegicus
MGRKKIQIQRITDERNRQVTFTKRKFGLMKKAYELSVLCDCEIALIIFNHSNKLFQYASTDMDKVLLKYTEYNEPHESRTNADIIETLRKKGFNGCDSPEPDGEDSLEQSPLLEDKYRRASEELDGLFRRYGSSVPAPNFAMPVTVPVSNQSSMQFSNPSSSLVTPSLVTSSLTDPRLLSPQQPALQRNSVSPGLPQRPASAGAMLGRDLNSANGACPNPVGNGYVSARASPGLLPVANGNGLNKVIPAKSPPPPTHNTQLGAPSRKPDLRVITSQGGKGLMHHLNNAQRLGVSQSTHSLTTPVVSVATPSLLSQGLPFSSMPTAYNTDYQLPSAELSSLPAFSSPAGLALGNVTAWQQPQQPQQPQPPQPPQSQPQPPQPQPQQPPQQQPHLVPVSLSNLIPGSPLPHVGAALTVTTHPHISIKSEPVSPSRERSPAPPPPAVFPAARPEPGEGLSSPAGGSYETGDRDDGRGDFGPTLGLLRPAPEPEAEGSAVKRMRLDTWTLK

SEQ ID NO: 15991 - protein, 230 aa, Sagittaria montevidensis
MGRGKIEIKKIENSTNRQVTYSKRRAGLIKKAEELTVLCDAQINLILISGSRKVHHYCSPSTDIHTVMDRYQQLTDSDLWQPQYEGMQKTLNHLKETNNNLRKQIRQRMGEDLEDLNMNELLALEREMDESITVVRDKKYHVLTTRTDTAKKKWKNGQQRYNSLVQDLVKLEGVEILDYACASIEASDYKPPIAMSIASRPADVGYAFHHSAGQSNVHDVGYGFHELRLA

SEQ ID NO: 15992 - protein, 200 aa, Akebia quinata
AGIMKKAQELTVLCDAEVSLIMFSNTGKFTEYISPSVTTKQIFDQYQKVSGINIWQPHYERMQDNLNKQKEINNKLRREIRQRIGEDLNDLTIHELRGLEQNMESSLKTVRDRKFQVISTRTETHKKKFKNMQETHAKLLREFEGRDDEPHFAMAGHEGEYESVLGLGNGGSHVFAFRLQQNQPNLQSGGEFGMNDLRLA

SEQ ID NO: 15993 - protein, 200 aa, Akebia quinata
AGIMKKAQELTVLCDAEVSLIMFSNTGKFTEYISPSVTTKQIFDQYQKVSGINIWQPHYERMQDNLNKQKEINNKLRREIRQRIGEDLDDLTIHELRGLEQNMESSLKTVRDRKFQVISTRTETHKKKFKNMEQTHAKLLREFEGRNDEPHFAMAGHEGEYESVLGLGNGGSHVFAFRLQQSQPNLQSGGEFGMNDLRLA

SEQ ID NO: 15994 - protein, 242 aa, Corylus avellana
MEFQNQSMSVSPQRKLGRGKIEIKRIENTTNRQVTFCKRRNGLLKKAYELSVLCDAEIALIVFSSRGRLYEYANNSSVKTTIERYKKACADSSNSGSVSEANTQFYQQEAAKLRGQIRSVQDSNRHMLGEALSELNFKELKNLEKNLEKGINRIRSKKNELLLAEIEYMHKREVDLHNNNQFLRAKIAENERNQQNLNVMPGGGNYELMQSQSFDSRNYFQVDALQPNHHYPRQDQMALQLV

SEQ ID NO: 15995 - protein, 224 aa, Cycas edentata
MGRGKIEIKRIENTTNRQVTFCKRRNGLLKKAYELSVLCDAEVALIVFSSRGRLYEFANNSVKRTIERYKKTCADNTQGGAISESNSQYWQQEAGKLRQQIDILQNANRHLMGDALTSLSVKELKQLEIRLERGLSRVRSKKNEMLLEEIEIMQRREHILLAENQFLRTKIAEYESNQNTNVLIPGPEFDALPAFDSRNFLHANLIEAAAHHYTQQDQAALQLG

SEQ ID NO: 15996 - protein, 560 aa, Anopheles gambiae str. PEST
MGRKKIQISRITDERNRQVTFNKRKFGVMKKAYELSVLCDCEIALIIFSSSNKLYQYASTDMDKVLLKYTEYNEPHESLTNKNIIEVPLTVNAQKENKNGTMSPDSPEPEDSYTLTPRTEAKYNKIDEDFQIMMQRNQQLTAGGARPNMATNSYSLPVSVPVSVPVIGTYNDSMLQSSPQMAHNSISPRPSSSETDSVYPSGGILEMSNGYPHSASPLGGSPSPGPSPGIGSHQAHNNNNNSHNTHNKMQTIKQSPSGGSGSSGSRSLRVVIPAPMNPTITADDISYVEHTRQQTNLNTPVVALQTPIPGLTNYTTTLGSFGAQDFSLNPDIMIGPWSAASSHSQNTSAAAAAAAMGSLQHSSTPPPSTSPLSVKIKAEPISPPRDHHNTSHHHGGAPGGGSSSGASGSAPGANGVQSASGGGASSTATGVNANSSNNNGSGNSQQQNGAQQLTAMGNVVVTGGGGGGSGGGGAGTSSLGANLNHSHLIHSRPSSTGHLTPTPDSYMPIGGHLAGSVTPTNAPSPVDIRHLSTGGSHLPEYDAPTAQAHKRPRISEGWAT

SEQ ID NO: 15997 - protein, 235 aa, Agapanthus praecox
MGRGKIEIKRIENTTNRQVTFCKRRNGLLKKAYELSVLCDAEVALIVFSTRGRLYEYSNNSIKSTIERYKKACADSSNSTAVVEVNTQQYYQQEAAKLRHQIQSLQNSNRHLMGDSLSSLSIKELKQLENRLERGITRIRSKKHELLFAEIEYMQKREAELQNDNMYLRAKITDNERAHQVSVVQSGTEYDTLPTFDSRNYYTHVTMLEAAPHFSHHQDHTALHLGYETKADPTE

SEQ ID NO: 15998 - protein, 250 aa, x Aranda deborah
MGRGRVELKMIENKINRQVTFAKRRKRLLKKAYELSVLCDAEVALIIFSNRGKLYEFCSSTSMLKTLEKYQKCNFGSPESTIISRETQSSQQEYLKLKNRVEALQRSQRNLLGEDLGPLGSKELEQLERQLDSSLRQIRSTRTQFMLDQLADLQRREQMLCEANKTLKRRFEESSQANQQQVWDPSNTHAVGYGRQPAQHHGEAFYHPLECEPTLQIGYHSDITMATATASTVNNYMPPGWLGQISGSYE

SEQ ID NO: 15999 - protein, 283 aa, Physcomitrella patens
MGRGKIEIKKIENTTSRQVTFSKRRGGLLKKAHELAVLCDAEVALVIFSSTGKLFEYASSGSMRDIIERYKKSPNGAMKSGASTDFLGREVVKLQEQVERLKSSQRRMLGEDLSALKVPDLLQLEQQLDLGASRVRARKNQLILEEIEGLQKKEQELMVANEDLRKKIADAEAVARANLSEARPESPRHLARTLSRDVSASSHPAATVYPHPNLRDVQRSQTSLQLGMFSSESYPPSSSRWPSEQQFPSASEGCAGESSMKWDHPHYHIQNRLHANILPSVRI

SEQ ID NO: 16000 - protein, 284 aa, Physcomitrella patens
MGRGKIEIKKIENTTSRQVTFSKRRGGLLKKAHELAVLCDAEVALVIFSSTGKLFEYASSGSIRDIIDRYKKGSDGMQNGARNDFMGCEVVKLREQLEQLKASHRHMLGEDLSLLKVPDLLQLEQQLDLGASRVRARKNQLILEEVESLRRKEHELLIANEDLRQKLADAQGIADAVTARANVSESPRPLTSALTRDIVMSSQQQEVTVHPHPNLRDAQRSQTSLQLGMFSSESYLPSSSRGPSEHPIPVGPEGCAGESAMRWEHPHFHSQNRLHANISPSVRI

SEQ ID NO: 16001 - protein, 222 aa, Picea mariana
MGRGKIEIKRIENTTNRQVTFCKRRNGLLKKAYELSVLCDAEVALIVFSSRGRLYEFANHSVKRTIERYKKTCVDNNHGGAISESNSQYWQQEAGKLRQQIEILQNANRHLMGDGLTALNIKELKQLEVRLEKGIGRVRSKKNEMLLEEIDIMQRREHILIQENEILRSKIAECQNSHNTNMLSAPEYDALPAFDSRNFLHANLIDAAHHYAHQEQTTLQLG

SEQ ID NO: 16002 - protein, 222 aa, Picea mariana
MGRGKIEIKRIENTTNRQVTFCKRRNGLLKKAYELSVLCDAEVALIVFSSRGRLYEFANHSVKRTIERYKKTCVDNNHGGAISESNSQYWQQEAGKLRQQIEILQNANRHLMGDGLTALNIKELKQLEVRLEKGIGRVRSKKNEMLLEEIDIMQRREHILIQENEILRSKIAECQNSHNTSMLSAPEYDALPAFDSRNFLHANLIDAAHHYAHQEQTTLQLG

SEQ ID NO: 16003 - protein, 218 aa, Picea mariana
KIEIKRIENTTNRQVTFCKRRNGLLKKAYELSVLCDAEVALIVFSSRGRLYEFANHSVKRTIERYKKTCVDNNHGGAISESNSQYWQQEAGKLRQQIEILQNANRHLMGDGLTALNIKELKQLEVRLEKGIGRVRSKKNEMLLEEIDIMQRREHILIQENEILRSKIAECQNSHNTNMLSAPEYDALPAFDSRNFLHANLIDAAHHYAHQEQTTLQLG

SEQ ID NO: 16004 - protein, 210 aa, Gnetum gnemon
MGRGKIEMKKIENTNNRQVTFSKRRNGLMKKAQELAVLCDAEVGLIIFSSTGKLFQYCNTSMSQVLEKYHKSPGVDHWDIELQIMGQELIKERRENEKLRSKLRYMMGEDIGELKIAQLEKLEHDLESALRLVRRKKDHAWDYQRTILLKKVKLQYALHEQMSRQLPMEVLAKAEEEARQILASTAEEEARQNMTFSFLPNASTQYARIA

SEQ ID NO: 16005 - protein, 233 aa, Dianthus caryophyllus
MGRGRVELKRIENKINRQVTFAKRRNGLLKKAYELSVLCDAEVALIVFSNRGKLYEFCSTSCMNKTLERYQRCSYGSLETSQPSKETESSYQEYLKLKAKVDVLQRSHRNLLGEDLGELSTKELEQLEHQLDKSLRQIRSIKTQHMLDQLADLQKKEEMLFESNRALKTKLEESCASFRPNWDVRQPGDGFFEPLPLPCNNNLQIGYNEATQDQMNATTSAQNVHGFAQGWML

SEQ ID NO: 16006 - protein, 225 aa, Cucumis sativus
MGRGKIEIKRIENTTNRQVTFCKRRNGLLKKAYELSVLCDAEVALIVFSSRGRLYEYSNNSIKTTIERYKKACSDSSATSSVTELNTQYYQQESAKLRQQIQMLQNSNRHLMGDSLSALTVKELKQLENRLERGITRIRSKKHEMLLAEIEYLQKREIELENENVCIRTKIAEVERVQQANMVSGQELNAIQALANSRNFFSPNIMEPAGPVSYSHQDKKMLHLG

SEQ ID NO: 16007 - protein, 229 aa, Cucumis sativus
MGRGKIEIKRIENTTNRQVTFCKRRNGLLKKAYELSVLCDAEVALIVFSSRGRLYEYSNNSIKTTIERYKKACSDSSATSSVTELNTQYYQQESAKLRQQIQMLQNSNSNLVRHLMGDSLSALTVKELKQLENRLERGITRIRSKKHEMLLAEIEYLQKREIELENENVCIRTKIAEVERVQQANMVSGQELNAIQALANSRNFFSPNIMEPAGPVSYSHQDKKMLHLG

SEQ ID NO: 16008 - protein, 241 aa, Populus balsamifera subsp. trichocarpa
MEYQNESLESSPLRKLGRGKVEIKRIENTTNRQVTFCKRRSGLLKKAYELSVLCDAEVALIVFSSRGRLYEYSNDSVKSTIERYKKASADSSNTGSVSEANAQYYQQEAAKLRSQIGNLQNSNRHMLGEALSSLSVKELKSLEIRLEKGISRIRSKKNELLFAEIEYMQKREVDLHNNNQLLRAKISENERKRQSMNLMPGGADFEIVQSQPYDSRNYSQVNGLQPASHYSHQDQMALQLV

SEQ ID NO: 16009 - protein, 238 aa, Populus balsamifera subsp. trichocarpa
MAYQNEPQESSPLRKLGRGKVEIKRIENTTNRQVTFCKRRNGLLKKAYELSVLCDAEVALIVFSSRGRLYEYSNNSVKSTIERYKKACADSSNNGSVSEANAQFYQQEAAKLRSQIGNLQNSNRNMLGESLSALSVKELKSLEIKLEKGIGRIRSKKNELLFAEIEYMQKREIDLHNNNQLLRAKIAENERKRQHMNLMPGGVNFEIMQSQPFDSRNYSQVNGLPPANHYPHEDQLFS

SEQ ID NO: 16010 - protein, 249 aa, Fragaria x ananassa
MGRGRVELKRIENKINRQVTFAKRRNGLLKKAYELSILCDAEVALIIFSNRGKLYEFCSSSSMLKTLERYQKCSYGAMEVQKPAKELEESSYREYLKLKTRCESLQQTQRNLLGEDLGPLNTKELEQLERQLESSLKHVRSTKTQHMIDLLSDLQSKEHMLIEANRDLKTKLDEIDSRTQLRQTWEHGHDHQTMLYGTQHAQTQGLMFQPLDCNPTLQIGYNAVVSQEMPAATPAHAQPVNGFIPGWML

SEQ ID NO: 16011 - protein, 197 aa, Anemone nemorosa
TGIMKKAEELTILCDAQVSLLMFSTTGKLHEYISPSITQKEFYDKYQQISGVSLWDSQYEKMQDTLKKLKETNSKLRREIRQRHGEDLEGLQFQQLRGLEQNMEKSAERIRNKKFHVIGTQTETCKKKIKSHEETQNNLLRGFDMGDPTCHYGFIPHEDDYDHDNEGSQVFAFRLQPAQHSLQDAEAAYGSYGLTLA

SEQ ID NO: 16012 - protein, 257 aa, Silene latifolia
MGRGRVQLKRIENKINRQVTFSKRRTGLLKKAHEISVLCDADVGLIVFSTKGKLFEYATDSCMEKILERYERYSYAERQLTAPDPDSHVSWTLEHAKLKARLEILQKNHRHYMGEDLDTLSLKELQNFEHQLDTALKHIRSKKNQLMYESIHELQKKDKALQEHNNTLSKKVKEKEKEKEKEKAIADQQAQWVQQNQELNPSAFFSSQVLPALNIRGNYETGSSVIVNEVAQTQNRSNSSNNNSLVPSWMLNHLAEQ

SEQ ID NO: 16013 - protein, 242 aa, Panax ginseng
MSFYDDQSGNLSPQRKLGRGKIEIKRIENTTNRQVTFCKRRNGLLKKAYELSVLCDAEVALIVFSTRGRLYEYANNSVKGTIERYKKACTDSPNTSSVSEANAQFYQQEASKLRQEISSIQKNNRNMMGESLGSLTVRDLKGLETKLEKGISRIRSKKNELLFAEIEYMQKKEIDLHNNNQYLRAKIAENERAQQHMNLMPGSSDYELAPPQSFDGRNYIQLNGLQPNNHYSRQDQTALQLV

SEQ ID NO: 16014 - protein, 247 aa, Capsicum annuum
MGRGRVQLRRIENKINRQVTFSKRRSGLLKKAHEISVLCDAEVGLIVFSSKGKLFEYSTDSCMERILERYERYSYAERQLNATDVETPGSWTLEHAKLKARLEVLQRNQRHYAGEDLDSLSMKELQNLEQQLDSALKHIRSRKNQLMHESISELQKKDKALQEQNNNLSKQMKEREKQLAQQHTPWEQQNHDHLNSSSFGLPHPFNNNHLGEVYPTAGDNGEVEGSSRQQQQNAAVMPPWMLRHLNG

SEQ ID NO: 16015 - protein, 219 aa, Nicotiana tabacum
MVRGKTQMRRIENATSRQVTFSKRRNGLLKKAFELSVLCDAEVGLVIFSPRGKLYEFASSSMQEIIERYKRHTKDKVQPENQVGEQNLQHMQHAAASLMKKIELLEESKRKLLGEGLQSCSLVELQQIEKQLERSVSTIRARKIQVFKEQIERLKEKEKILASENAILREKFGGLQQRQGSSGEKEGEALCTESSEKSDVETELFIGPPECRIRRPLQN

SEQ ID NO: 16016 - protein, 253 aa, Rumex acetosa
MEFSNELSRDMEDGSPQRKMGRGKIEIKRIENVTNRQVTFCKRRNGLLKKAYELSVLCDAEVALIVFSSRGRLYEYANHSVKATIERYKKTCSDSTGVTSVEEANAQQEAAKLRNQIRTLQNQTRNTSRNLMGEGLTSMNMKDLKNLETRLEKGISRVRAKKNELLFGEIEFMQKKEIELHNNNQFLRAKIAESERSQQSMNLMPGSSSGEQHYELMPQSQAGPFDSRNFFQVSDLQPDERYSCQNQTPLQLV

SEQ ID NO: 16017 - protein, 125 aa, Argyroxiphium caliginis
TNRQVTYSKRRNGIFKKALELTVLCDAKVSLIMFSNTGKFHEYISPSTTTKKIYDMYQTTLRFDLWTSHYERMTETMKKLKESNNKLRREIRRRVLGEDLDGLDMNDLTILEQQTQDSLTVVRER

SEQ ID NO: 16018 - protein, 123 aa, Kyhosia bolanderi
RQVTYSKRRNGIFKKAHELTVLCDAKVSLIMFSNTGKFHEYISPSTTTKKIYDMYQTTLGFDLWSSHYERMTETMKKLKDSNNKLRREIRQRVLGEDLDCLDMNDLTILEQQMQDSLTVVRER

SEQ ID NO: 16019 - protein, 125 aa, Wilkesia gymnoxiphium
TNRQVTYSKRRNGIFKKAHELTVLCDAKVSLIMFSNTGKFHEYISPSTTTKKIYDMYHTTLGFDLWSSHYERMTETMKKLKDSNNKLRREIRQRVLGEDLDDLDMNDLTILEQQMQDSLTVVRER

SEQ ID NO: 16020 - protein, 199 aa, Platanus occidentalis
GGITKKAQELSVLCDAEVSLIMFSSTGKFHEYISPTTTTKEIFDRYQQTLRINLWQAHYEKMQDSLNRLKEINNNLRREIRHRIGEDLNDLSIEELRGLEQNMDNSMKIVRDQKYHKIQTQTDTYKKKLKSSEETHRNLLRQFEGRDDDPDYGLVDNEGDYESEMGVANGGSHSFAFRLQPIQPNLQEGVYGFHDLRLA

SEQ ID NO: 16021 - protein, 217 aa, Pimpinella brachycarpa
MVRGKTQMRRIENATSRQVTFSKRRNGLLKKAFELSVLCDAEVALIIFSPRGKLHEFASSSMHETIERYRKHTKDVQSNNTPVVQNMQHLKHETASLAKKIELLEVSKRKLLGEGLGTCSINELQQIEQQLEKSVCTVRARKMQVFKEQIEQLKEKEKTLAADNAILLAKYDVQPRQESPEDGGNLTSTTENSENSDVETELFIGPPEKRFKRIMEK

SEQ ID NO: 16022 - protein, 228 aa, Zea mays
MARERREIKRIESAAARQVTFSKRRRGLFKKAQELSVLCDADVALIVFSSTGKLSQFASSSMNEIIDKYNTHSKNLGKTEQPSLDLNLEHSKYANLNEQLAEASLRLRQMRGEELEGLNVEELQQLEKNLESGLHRVLQTKDSQFLEQINDLERKSTQLAEENMQLRNQVSQIPPAGKQAVADTENVIAEEGQSSESVMTALHSGSSQDNDGGSDVSLKLGLPCVAWK

SEQ ID NO: 16023 - protein, 228 aa, Zea mays; identical to SEQ ID NO: 379

SEQ ID NO: 16024 - protein, 351 aa, Zea mays
MPTCQLEQIPFPAPPPPPFLSLALLLSSPLLSFRITHHDSQPPCGALDPAGPGPFLPLPLRLSSLSLSSSPLLSSPSASHTTTPNRRLALLLRALPLPHPPSLLWVGGRVSASSTEIRDRRRGMARERREIKRIESAAARQVTFSKRRRGLFKKAEELSVLCDADVALIVFSSTGKLSQFASSSMNEIIDKYSTHSKNLGKAEQPSLDLNLEHSKYANLNEQLVEASLRLRQMRGEELEGLSVEELQQLEKNLESGLHRVLQTKDQQFLEQISDLEQKSTQLAEENRQLRNQVSHIPPVGKQSVADAENVIAEDGQSSESVMTALHSGSSQDNDDGSDVSLKLGLPCVAWK

SEQ ID NO: 16025 - protein, 228 aa, Zea mays
MARERREIKRIESAAARQVTFSKRRRGLFKKAEELSVLCDADVALIVFSSTGKLSQFASSSMNEIIDKYSTHSKNLGKAEQPSLDLNLEHSKYANLNEQLVEASLRLRQMRGEELEGLSVEELQQLEKNLESGLHRVLQTKDQQFLEQISDLEQKSTQLAEENRQLRNQVSHIPPVGKQSVADTENVIAEDGQSSESVMTALHSGSSQDNDDGSDVSLKLGLPCVAWK

SEQ ID NO: 16026 - protein, 228 aa, Zea mays; identical to SEQ ID NO: 16025

SEQ ID NO: 16027 - protein, 284 aa, Zea mays
LAAGRAFAQKSTLSLLPHTASGLLRTRASDLLQHLRSGGARGWRSRSRSGGAMVGTGKRERIAIRRIDNLAARQVTFSKRRRGLFKKAEELSILCDAEVGLVVFSATGKLFHFASSSMKQVIDRYDSHSKTLQKSEPQSSQLQSQDDGTCARLKEELAETSLKLRQMRGEELQRLSVQQLQELEKTLESGLGSVLKTKSQKILDEISGLERKRTQLIEENSRLKEQVTRMSRMETQLGADPEFVYEEGQSSESVTNTSYPRPSTDTDDCSDTSLRLGLPFFSSK

SEQ ID NO: 16028 - protein, 294 aa, Zea mays
LGFSFSPPSARLLLDGASSSLPASQSNHACCFISPFLPAVWLLAAAAAAPAGGGAGAGGAMVGTGKRERIAIRRIDNLAARQVTFSKRRRGLFKKAEELSILCDAEVGLVVFSATGKLFHFASSSMKQVIDRYDSHSKTLQRSEPQSSQLQSQDDGTCARLKEELAETSLKLRQMRGEELQRLSVEQLQELEKTLESGLGSVLKTKSQKILDEISGLERKRTQLIEENSRLKEQLQVTRMSRMETQLGADPEFVYEEGQSSESVTNTSYPRPSTDTDDCSDTSLRLGLPLFSSK

SEQ ID NO: 16029 - protein, 237 aa, Zea mays
  unsure (1)..(237): unsure at all Xaa locations
MARERREIRRIESAAARQVTFSKRRRGLFKKAEELAVLCDADVALVVFSATGRLSQFASSSVNDIVDKYSTHSKNLGKSHQQPSIDLNVEQSKYSGLNEQLAEETNGLRQMRGEDLEGLSVEELHRMERKLEAGLHRVISTKDQLFMQQIGELLQKGTQLEDENRRLKEQMPQVLTAGTMVVAAAAENILTEDGQSSESVMTALHSGSSLDCDDGSDISLKLSLPXKEGPSHRMLSA

SEQ ID NO: 16030 - protein, 237 aa, Zea mays; identical to SEQ ID NO: 16029
  unsure (1)..(237): unsure at all Xaa locations

SEQ ID NO: 16031 - protein, 237 aa, Zea mays; identical to SEQ ID NO: 16029
  unsure (1)..(237): unsure at all Xaa locations

SEQ ID NO: 16032 - protein, 225 aa, Zea mays; identical to SEQ ID NO: 666

SEQ ID NO: 16033 - protein, 218 aa, Zea mays
  unsure (1)..(218): unsure at all Xaa locations
MARERREIRRIESAAARQVTFSKRRRGLFKKAEELAVLCDADVALVVFSATGRLSQFASSSVNDIVDKYSTHSKNLGKSHQQPSIDLNVEQSKYSGLNEQLAEETNGLRQMRGEDLEGLSVEELHRMERKLEAGLHRVISTKDQLFMQQIGELLQKGTQLEDENRASKRTKNILTEDGQSSESVMTALHSGSSLDCDDGSDISXLKLSLPXKEDHRIA

SEQ ID NO: 16034 - protein, 235 aa, Zea mays
  unsure (1)..(235): unsure at all Xaa locations
MARERREIRRIESAAARQVTFSKRRRGLFKKAEELAVLCDADVALVVFSATGRLSQFASSSVNDIVDKYSTHSKNLGKSHQQPSIDLNVEQSKYSGLNEQLAEETNGLRQMRGEDLEGLSVEELHRMERKLEAGLHRVISTKLFMQQIGELLQKGTQLEDENRRLKEQMPQVLTAGTMVVAAAAENILTEDGQSSESVMTALHSGSSLDCDDGSDISLKLSLPXKEGPSHRMLSA

SEQ ID NO: 16035 - protein, 237 aa, Zea mays
  unsure (1)..(237): unsure at all Xaa locations
MARERREIRRIESAAARQVTFSKRRRGLFKKAEELAVLCDADVALVVFSATGRLSQFASSSVNDIVDKYSTHSKNLGKSHQQPSIDLNGEQSKYSGLNEQLAEETNGLRQMRGEDLEGLGGEELHRMERKLEAGLHRVISTKDQLFMQQIGELLQKGPQLEDETRRLKEQMPQVLTAGPMVVAAAAENILPEDGQSSESVMTALHSGSSLDCDDGSDISLKLSLPXKEGPSHRMLSA

SEQ ID NO: 16036 - protein, 272 aa, Zea mays
  unsure (1)..(272): unsure at all Xaa locations
LAAAPAGGGAGARRGRAMVGTGKRERIAIRRIDNLAPRQVTFSKRRRGLLKKAEALSILCDAEVGLVGFSATGKLCHFASSSMKQVIDRDDSHSKTLQRPEPQSSQLQSQDDGTCARLKEELAETSLKLRQMRGEELQRLSVEQLQELEKTLESGLGSVLKTKSXKKILDEISGLERXRTQLIEENSRLKERXVSSISXXMERHLGVHPXFVYEEGQSSESVRNTSYPRPSTDTEGCSYTSLRLGLPFFSSKWRRFGMSGNGAVPIACPFPL

SEQ ID NO: 16037 - protein, 160 aa, Zea mays
  unsure (1)..(160): unsure at all Xaa locations
MARERREIKRIESAAARQVTFSKRRRGLFKKAEELSVLCDADVALIVFSSTGKLSQFASSSMNEIIDKYSTHSKNLGKAEQPSLDLNLEHSKYANLNEQLVEASLRLRQMRGEELEGLSVEELQQLEKNLESGLHRVLQTKDQQFLEQISDLEQKVTNNX

SEQ ID NO: 16038 - protein, 205 aa, Zea mays
RNGLLKKAYELSVLCDAEVGLVVFSATGKLFHFASSSMKQVIDRYDSHSKTLQRSEPQSSQLQSHMDDGTCARLKEELAETSLKLRQMRGEELQRLSVEQLQELEKTLESGLGSVLKTKSQKILDEISGLERKRTQLIEENSRLKEQVTRMSRMETQLGADPEFVYEEGQSSESVTNTSYPRPSTDTDDCSDTSLRLGLPLFSSK

SEQ ID NO: 16039 - protein, 217 aa, Zea mays
PRVLLHLSLPSCRVVVGCRSGGARGWRSRSGGAMVGTGKRERIAIRRIDNLAARQVTFSKRRRGLFKKAEELSILCDAEVGLVVFSATGKLFHFASSRQMRGEELQRLSVEQLQELEKTLESGLGSVLKTKSQKILDEISGLERKRTQLIEENSRLKEQVTRMSRMETQLGADPEFVYEEGQSSESVTNTSYPRPSTDTDDCSDTSLRLGLPLFSSK

SEQ ID NO: 16040 - protein, 201 aa, Trollius laxus
AGILKKAKELTVLCDAEVSLLMFSSTGKLHEFVSPCTTTKKVYDRYQQTSGINLWQSHYERMQDNLNKLKEINRKLRREIRQRNGEDLDGLTFQQLCTLEQNMDKSSECVRNRKFHVIGTQTDTYKKKVKNHEETQNDLLREMQRREAEYHYAFGDQEGDYPSAVNGNAAHIFAFRLQPSQPNLHLQDDASGYGSYGLSLA

SEQ ID NO: 16041 - protein, 222 aa, Pinus resinosa
MGRGKIEIKRIENTTNRQVTFCKRRNGLLKKAYELSVLCDAEVALIVFSSRGRLYEFANHSVKRTIERYKKTCVDNNHGGAISESNSQYWQQEAGKLRQQIEILQNANRHLMGDGLTALNIKELKQLEVRLEKGISRVRSKKNEMLLEEIDIMQRREHILIQENEILRSKIAECQNSHNTNMLSAPEYDALPAFDSRNFLHANLIDAAHHYAHQEQTTLQLG

SEQ ID NO: 16042 - protein, 201 aa, Cimicifuga racemosa
AGITKKAQELTVLCDAQVSLIMISSTGKLFEYTSSSTTTKSIYDRYQQTTGLNLWQSHYEKMQENLNKLKETNSKLRREIRQRNGEDIDDLTFQQLRGLEQHMEKSVERVRHRKFHVIGTSTDTYKKKIKSLEETHNNLLRAFEERIEEDCHYALVDQEGDYQSAIGLANGGPHIFSIRLQPSQPNLRDDEGYASYGLRLA

SEQ ID NO: 16043 - protein, 516 aa, Drosophila melanogaster
MGRKKIQISRITDERNRQVTFNKRKFGVMKKAYELSVLCDCEIALIIFSSSNKLYQYASTDMDRVLLKYTEYNEPHESLTNKNIIEKENKNGVMSPDSPEAETDYTLTPRTEAKYNKIDEEFQNMMQRNQMAIGGAGAPRQLPNSSYTLPVSVPVPGSYGDNLLQASPQMSHTNISPRPSSSETDSVYPSGSMLEMSNGYPHSHSPLVGSPSPGPSPGIAHHLSIKQQSPGSQNGRASNLRVVIPPTIAPIPPNMSAPDDVGYADQRQSQTSLNTPVVTLQTPIPALTSYSFGAQDFSSSGVMNSADIMSLNTWHQGLVPHSSLSHLAVSNSTPPPATSPVSIKVKAEPQSPPRDLSASGHQQNSNGSTGSGGSSSSTSSNASGGAGGGGAVSAANVITHLNNVSVLAGGPSGQGGGGGGGGSNGNVEQATNLSVLSHAQQHHLGMPNSRPSSTGHITPTPDFIILNAGAPSSDQDVRLAAVAVQQQQQQPHQQQQLGDYDAPNHKRPRISGGWGT

SEQ ID NO: 16044 - protein, 509 aa, Drosophila melanogaster
MGRKKIQISRITDERNRQVTFNKRKFGVMKKAYELSVLCDCEIALIIFSSSNKLYQYASTDMDRVLLKYTEYNEPHESLTNKNIIEKENKNGVMSPDSPEAETDYTLTPRTEAKYNKIDEEFQNMMQRNQMAIGGAGAPRQLPNSSYTLPVSVPVPGSYGDNLLQASPQMSHTNISPRPSSSETDSVYPSGSMLEMSNGYPHSHSPLVGSPSPGPSPGIAHHLSIKQQSPGSQNGRASNLRVVIPPTIAPIPPNMSAPDDVGYADQRQSQTSLNTPVVTLQTPIPALTSYSFGAQDFSSSGVMNSADIMSLNTWHQGLVPHSSLSHLAVSNSTPPPATSPVSIKVKAEPQSPPRDLSASGHQQNSNGSTGSGGSSSSTSSNASGGAGGGGAVSAANVITHLNNVSVLAGGPSGQGGGGGGGGSNGNVEQATNLSVLSHAQQHHLGMPNSRPSSTGHITPTPGAPSSDQDVRLAAVAVQQQQQQPHQQQQLGDYDAPNHKRPRISGGWGT

SEQ ID NO: 16045 - protein, 515 aa, Drosophila melanogaster
MGRKKIQISRITDERNRQVTFNKRKFGVMKKAYELSVLCDCEIALIIFSSSNKLYQYASTDMDRVLLKYTEYNEPHESLTNKNIIEKENKNGVMSPDSPEAETDYTLTPRTEAKYNKIDEEFQNMMQRNQMAIGGAGAPRQLPNSSYTLPVSVPVPGSYGDNLLQASPQMSHTNISPRPSSSETDSGGMSLIIYPSGSMLEMSNGYPHSHSPLVGSPSPGPSPGIAHHLSIKQQSPGSQNGRASNLRVVIPPTIAPIPPNMSAPDDVGYADQRQSQTSLNTPVVTLQTPIPALTSYSFGAQDFSSSGVMNSADIMSLNTWHQGLVPHSSLSHLAVSNSTPPPATSPVSIKVKAEPQSPPRDLSPAVISRIAMVPRAGGGSSSSTSSNASGGAGGGGAVSAANVITHLNNVSVLAGGPSGQGGGGGGGGSNGNVEQATNLSVLSHAQQHHLGMPNSRPSSTGHITPTPGAPSSDQDVRLAAVAVQQQQQQPHQQQQLGDYDAPNHKRPRISGGWGT

SEQ ID NO: 16046 - protein, 515 aa, Drosophila melanogaster
MGRKKIQISRITDERNRQVTFNKRKFGVMKKAYELSVLCDCEIALIIFSSSNKLYQYASTDMDRVLLKYTEYNEPHESLTNKNIIEKENKNGVMSPESPEGETDYTLTPRTGGMYNKIDEEFQNMMQRNQMAIGGAGAPRQLPNSSYTLPVSVPVPGSYGDNLLQASPQMSHTNISPRPSSSETDSGGMSLIIYPSGSMLEMSNGYPHSHSPLVGSPSPGPSPGIAHHLSIKQQSPGSQNGRASNLRVVIPPTIAPIPPNMSAPDDVGYADQRQSQTSLNTPVVTLQTPIPALTSYSFGAQDFSSSGVMNSADIMSLNTWHQGLVPHSSLSHLAVSNSTPPPATSPVSIKVKAEPQSPPRDLSPAVISRIAMVPRAGGGSSSSTSSNASGGAGGGGAVSAANVITHLNNVSVLAGGPSGQGGGGGGGGTNGNVEQATNLSVLSHAQQHHLGMPNSRPSSTGHITPTPGAPSSDQDVRLAAVAVQQQQQQPHQQQQLGDYDAPNHKRPRISGGWGT

SEQ ID NO: 16047 - protein, 539 aa, Drosophila melanogaster
MGRKKIQISRITDERNRQVTFNKRKFGVMKKAYELSVLCDCEIALIIFSSSNKLYQYASTDMDRVLLKYTEYNEPHESLTNKNIIEKENKNGVMSPDSPEAETDYTLTPRTEAKYNKIDEEFQNMMQRNQMAIGGAGAPRQLPNSSYTLPVSVPVPGSYGDNLLQASPQMSHTNISPRPSSSETDSGGMSLIIYPSGSMLEMSNGYPHSHSPLVGSPSPGPSPGIAHHLSIKQQSPGSQNGRASNLRVVIPPTIAPIPPNMSAPDDVGYADQRQSQTSLNTPVVTLQTPIPALTSYSFGAQDFSSSGVMNSADIMSLNTWHQGLVPHSSLSHLAVSNSTPPPATSPVSIKVKAEPQSPPRDLSASGHQQNSNGSTGSGGSSSSTSSNASGGAGGGGAVSAANVITHLNNVSVLAGGPSGQGGGGGGGGSNGNVEQATNLSVLSHAQQHHLGMPNSRPSSTGHITPTPHDKYEGYPYRALMGHNPRWNLNFAGAPSSDQDVRLAAVAVQQQQQQPHQQQQLGDYDAPNHKRPRISGGWGT

SEQ ID NO: 16048 - protein, 515 aa, Drosophila melanogaster
MGRKKIQISRITDERNRQVTFNKRKFGVMKKAYELSVLCDCEIALIIFSSSNKLYQYASTDMDRVLLKYTEYNEPHESLTNKNIIEKENKNGVMSPDSPEAETDYTLTPRTEAKYNKIDEEFQNMMQRNQMAIGGAGAPRQLPNSSYTLPVSVPVPGSYGDNLLQASPQMSHTNISPRPSSSETDSGGMSLIIYPSGSMLEMSNGYPHSHSPLVGSPSPGPSPGIAHHLSIKQQSPGSQNGRASNLRVVIPPTIAPIPPNMSAPDDVGYADQRQSQTSLNTPVVTLQTPIPALTSYSFGAQDFSSSGVMNSADIMSLNTWHQGLVPHSSLSHLAVSNSTPPPATSPVSIKVKAEPQSPPRDLSASGHQQNSNGSTGSGGSSSSTSSNASGGAGGGGAVSAANVITHLNNVSVLAGGPSGQGGGGGGGGSNGNVEQATNLSVLSHAQQHHLGMPNSRPSSTGHITPTPGAPSSDQDVRLAAVAVQQQQQQPHQQQQLGDYDAPNHKRPRISGGWGT

SEQ ID NO: 16049 - protein, 540 aa, Drosophila melanogaster
MGRKKIQISRITDERNRQVTFNKRKFGVMKKAYELSVLCDCEIALIIFSSSNKLYQYASTDMDRVLLKYTEYNEPHESLTNKNIIEKENKNGVMSPDSPEAETDYTLTPRTEAKYNKIDEEFQNMMQRNQMAIGGAGAPRQLPNSSYTLPVSVPVPGSYGDNLLQASPQMSHTNISPRPSSSETDSGGMSLIIYPSGSMLEMSNGYPHSHSPLVGSPSPGPSPGIAHHLSIKQQSPGSQNGRASNLRVVIPPTIAPIPPNMSAPDDVGYADQRQSQTSLNTPVVTLQTPIPALTSYSFGAQDFSSSGVMNSADIMSLNTWHQGLVPHSSLSHLAVSNSTPPPATSPVSIKVKAEPQSPPRDLSASGHQQNSNGSTGSGGSSSSTSSNASGGAGGGGAVSAANVITHLNNVSVLAGGPSGQGGGGGGGGSNGNVEQATNLSVLSHAQQHHLGMPNSRPSSTGHITPTPGHDKYEGYPYRALMGHNPRWNLNFAGAPSSDQDVRLAAVAVQQQQQQPHQQQQLGDYDAPNHKRPRISGGWGT

SEQ ID NO: 16050 - protein, 193 aa, Drosophila melanogaster
MGRKKIQISRITDERNRQVTFNKRKFGVMKKAYELSVLCDCEIALIIFSSSNKLYQYASTDMDRVLLKYTEYNEPHESLTNKNIIEKENKNGVMSPDSPEAETDYTLTPRTEAKYNKIDEEFQNMMQRNQMAIGGAGAPRQLPNSSYTLPVSVPVPGSYGDNLLQASPQMSHTNISPRPSSSETDSGGMSLIS

SEQ ID NO: 16051 - protein, 515 aa, Drosophila melanogaster
MGRKKIQISRITDERNRQVTFNKRKFGVMKKAYELSVLCDCEIALIIFSSSNKLYQYASTDMDRVLLKYTEYNEPHESLTNKNIIEKENKNGVMSPDSPEAETDYTLTPRTEAKYNKIDEEFQNMMQRNQMAIGGAGAPRQLPNSSYTLPVSVPVPGSYGDNLLQASPQMSHTNISPRPSSSETDSGGMSLIIYPSGSMLEMSNGYPHSHSPLVGSPSPGPSPGIAHHLSIKQQSPGSQNGRASNLRVVIPPTIAPIPPNMSAPDDVGYADQRQSQTSLNTPVVTLQTPIPALTSYSFGAQDFSSSGVMNSADIMSLNTWHQGLVPHSSLSHLAVSNRTPPPATSPVSIKVKAEPQSPPRDLSASGHQQNSNGSTGSGGSSSSTSSNASGGAGGGGAVSAANVITHLNNVSVLAGGPSGQGGGGGGGGSNGNVEQATNLSVLSHAQQHHLGMPNSRPSSTGHITPTPGAPSSDQDVRLAAVAVQQQQQQPHQQQQLGDYDAPNHKRPRISGGWGT

SEQ ID NO: 16052 - protein, 249 aa, Rosa rugosa
MEFPKQITPADDPESSSQKKLGRGKIEIKRIENTTNRQVTFCKRRNGLLKKAYELSVLCDAEVALIVFSTRGRLYEYANNSVRATIERYKKACDSSNTGSVTETNVQFYQQEASKLRRQIREIQNSNRHILGEALSTLNVKELKNLEGRLEKGISRIRSKKNEMLFAEIEYMQKREIELQNHNNFLRAKIAENDRAQQQQANMMPGTLSAYDQSMPPPQSYDRSFLPVILESNHHYNRQGQNQTPLQLV

SEQ ID NO: 16053 - protein, 125 aa, Dubautia laevigata
TNRQVTYSKRRNGIFKKAHELTVLCDAKVSLIMFSNTGKFHEYISPSTTTKKIYDMYQTTLRFDLWSSHYERMTETMKKLKDSNNKLRREIRQRVLGEGLDGLDMNDLTILEQQMQDSLTVVRER

SEQ ID NO: 16054 - protein, 125 aa, Dubautia latifolia
TNRQVTYSKRRNGIFKEADELTVLCDAKVSLIMFSNTGKFHEYISPSTTTKKIYDMYQTTLGFDLWGSHYERMTETMKKLKDSNNKLRREIRQRVLGEDLDGLDMNDLTILEQQMQDSLTVVRER

SEQ ID NO: 16055 - protein, 125 aa, Dubautia scabra
TNRQVTYSKRRNGIFKKAHELTVLCDAKVSLIMFSNTGKFHEYISPSTTTKKIYDMYQTTHGFDLWSSHYERMTETMKKLKDSNNKLRREIRQRVLGEDLDGLDMNDLTILEQQMQDSLTVVRER

SEQ ID NO: 16056 - protein, 337 aa, Halocynthia roretzi
MGRKKIQISRIGDERNRQVTFTKRKFGLMKKAYELSVLCDCEIALIIFNSSNKLFQYASTDMDKVLLKYTEYNEPHESRTNADIIEMLNKKEHKNCDSPDPDSTGYILTPNTLKRYDTINQEFDDMMKNVRPSHAIPPHVHTAGGDFLPMPVTVPVSSIQNSQTVSPTMDRRCISSYSSTTVAWSNPNLLHPPNIHHGRHSTSPLPRSPLAQSPSRSPGPMYGSDMSIMSDASSPAGANGYSNIHRTSPSVVHMERTSPMPQKHSSGGGGPGGMQKHSPRQPSPPRKQLHISIPASRSGMQSMDGIDNQQAFNTDCQSSHAEFTAWKSLSTCYIFSI

SEQ ID NO: 16057 - protein, 239 aa, Phalaenopsis equestris
MDSSSMEPKEKMGRGKIEIKRIENTTNRQVTFCKRRNGLLKKAYELSVLCDAEVALIIFSTRGRLYEYANNSVKGTIERYKKASTDNSNTGSISEANSQYYQQEATKLRQQITNLQNSNRNLLGDALTTMSLRDLKQLETRLEKGINKIRAKKNELLHAEIDYMQKREMELQTDNMFLRNKISDNERAQQQHQHMSILPSTSTEYEVMPPFDSRSFLHVNLMDPNDRYSHQQQTALQLG

SEQ ID NO: 16058 - protein, 449 aa, Danio rerio
MGRKKIQIARIMDERNRQVTFTKRKFGLMKKAYELSVLCDCEIALIIFNSTNKLFQYASTDMDKVLLKYTEYNEPHESRTNSDIVETLRKKGLNGCDSPDIDAEDSGHSPESEDKYRKINEDIDLMISRQRLCAIPQSNYDMPVSIPVSNPNSLIYGHPGASMGNPNLLPLTHPSLQRNSMSPGVTHRPPSAGNTGNGYGNHRNSPGLLVSPGNMSKNLQAKSPPSMNMSLSRKPDLRVLIPPGAKNTMPSINQRISSSQSAQSLSTPVVSVATPTLPGEVMGGYPSAINTSYGTEYSLSSGDLSSLSAFNSSASLHLGSMTGWPQNMQHSGLGHLGNCSSAQLCQSSALSLPSNQNLHIKSEPVSPPRDRASGTPGLYGVPQQTPLRQDSGRSPVDSLSSCGSSYDGSDRDEHRANFHSPVGLMRAAENERQSPSVKRMRLSEAGWAS

SEQ ID NO: 16059 - protein, 529 aa, Danio rerio
MGRKKIQIQRITDERNRQVTFTKRKFGLMKKAYELSVLCDCEIALIIFNHSNKLFQYASTDMDKVLLKYTEYNEPHESRTNADIIEALNKKEHRDSESPDPEEPFSLTPRTEEKYKKIDEEFDKMMQSYRLSSTVPAPTFSMPVTVPVSNQSPLPFSNPSSLVTTSFVTSTLTDPRLLSPQQPQLQRNTVSPGLPQRPASAGALLGGDLNNSNGACPSPVANGYVSARASPGLLSVSNGNSMGKVVQAKSPPPPSTQMANSRKPDLRVITSQSSKGLMQLTDEELELVSENAQRLGTSQVTQPLTTPVVSVATPSLLTPFSMPTAYNTEYQLTSADLTALQAFTPSGALLPGNMTTWQQQQQPSVSQQPQQQPSVSQQQTQQQQQQQQQPQQLTLASLSNLVPVGTIPHGATLTVNTNPSISIKSEPVSPNRDRSTPSSTPGAVGGVSGLTVSQYPGTLRLEPTGRSPVDSISSNGSSYEGSDRDDSGQPRPPDFSSLGLLRATGDQPAQAEQQESANVKRMRLDTWVT

SEQ ID NO: 16060 - protein, 460 aa, Danio rerio
MGRKKIQITRIMDERNRQVTFTKRKFGLMKKAYELSVLCDCEIALIIFNSSNKLFQYASTDMDKVLLKYTEYNEPHESRTNSDIVEKLRNKGHNDCPSPDPDDCFGHSPLMDDRFGKLNEESDLMYKRCGPTALPPQNFSMHVAVPVTNPNAMSYNPGASLSSQSLSAAAAASLSDGAMLSPPQGSMHRSVVPPQRPPSTGSTGNGFVNPRGSPGLLGTPSGNGLGKVMPAKSPPPPGGNMGIGSRKPDLRVVIPPSSKGMMPPLNTQRISSSQSTQPLATPVVSVTTPSLAPQGLVYSGMPTAYNSEYSLSSAELSSLQGFGSPGLSIGSVSAWQQHQLGQAALSSLVGGGHLPQGSNLSINTSQNVNIKSEPISPPRERVTPSGFPPQQQQPPSGRPDMGRSPVDSLSSSCSSYDGSDREDHRPDFHSPLGLGRPPAGGADERESPSVKRMRMDTWVT

SEQ ID NO: 16061 - protein, 474 aa, Cyprinus carpio
MGRKKIQIARIMDERNRQVTFTKRKFGLMKKAYELSVLCDCEIALIIFNSTNKLFQYASTDMDKVLLKYTEYNEPHESRTNSDIVETLRKKGLNGCDSPDIDAEDSGHSPESGDKYCKINEDIDLMISRQRLCAIPQSNYDMPISIPVSNPNSLIYSHPGASLGNPNMLPLAHPSLQRNSMSPGVTHRPPSAGNTGGLMGPDLSSGVGTSAGNGYGNHRNSPGLLVSPGSMSKNMQAKSPPPMTMSMSNRKPDLRVLIPPGSKNTMPSINQRINNSQSAQSLSTPVVSVATPTLPGQGMGGYPSALSTSYGTEYSLSSGDLSSLTGFNSSASLHLGSMTGWPQNMQHSGLVHLGNCTSTPLCQSSTLSLPSNQSLHIKSEPVSPPRDRAGGTPGGYAQPPPQQQQPASQQGQLRQDAGRSPVDSLSSCGSSYEGSDREEHRIDFHSPMGLLRPSPDERQSPSVKRMRLSEGWAS

SEQ ID NO: 16062 - protein, 472 aa, Cyprinus carpio
MGRKKIQITRIMDERNRQVTFTKRKFGLMKKAYELSVLCDCEIALIIFNSSNKLFQYASTDMDKVLLKYTEYNEPHESRTNSDIVEKLRNKGHNDCASPDPDDCFGHSPLMDDRFSKLNEESDLMYKRCGPTALPPQNFSMHVAVPVTNPNAMSYNHGASLSSQSLSAATASLSDGAMLSPPQGSLHRNLVSAGPPQRPPSTGSAAGNGFVNSRGSPGLLGTPSGNGLGKVMPAKSPPPPGGNMGIGSRKPDLRVVIPPSSKGMMPPLQSEEEEMELNTHRISSSQSTQPLATPVVSITTPSLPPQGLVYSGMPTAYNSEYSLSSAELSSLQGFGSPGLSIGSMSAWQQHQLGQAALNSLVGGGHLPQGSNLSINTSQNVNIKSEPISPPRERITPSGFPPQQQQQPPSSRPDMGRSPVDSLSSSCSSYDGSDREDHRHDFHSPLGLGRPRPPGQREGDPTVKRMRMDTWVT

SEQ ID NO: 16063 - protein, 234 aa, Hyacinthus orientalis
MGRGKIEIKRIENTTNRQVTFCKRRNGLLKKAYELSVLCDAEVALIVFSTRGRLYEYSNNSIKSTIERDKKACADSSSSSAVIEVNTQRYYQQEASKLRQQIQILQNANRHLMGESLDPLNVKELKQLETRLERGITRVRSKKHELLFAELEYMQKREVELQTDNMYLRAKIGENERAHQASVVQAGTEFDALPTFDSRNYYQVHMLQAASHYSHHQDQTALHLGYETKADPSA

SEQ ID NO: 16064 - protein, 181 aa, Lilium regale
MGRGKIEIKRIENSTNRQVTFSKRRNGIIKKARELSVLCEAHVSVVIFSSSGKMSEYCSPSTSLPKILERYQLNSGKKIWDAKHEHLSAEIDRIKKENDNMQIELRHLKGEDLNSLQPKELIPIEEALENGVRGVREKQNDVLRMLKKNERILEEDNKRLAYILHHHQLTRGEYEGHGTCM

SEQ ID NO: 16065 - protein, 516 aa, Xenopus laevis
MGRKKIQITRIMDERNRQVTFTKRKFGLMKKAYELSVLCDCEIALIIFNSSNKLFQYASTDMDKVLLKYTEYNEPHESRTNSDIVETLRKKGLNGCESPDDQRYFEEETFSKLIEDSDFVFKRDPALNKKENRGCDSPDPDGSYVLTPHTEEKYKKINEEFDNMMRSHKISPGLPQQTFPMSVTVPVSNPNTLTYSSPGNTMVTASLAASASLTDARMLSPPPTTLHRNVVSPGLPQRPPSTGNAGVMLCSSDLSVPNGAGTSPVGNGFVNPRASPSHLGPTGGNVLGKVMPTKSPPPPGGNLVMNSRKPDLRVVIPPSSKGMMPPLNTQRVTSSQGTQPLATPIVSVATPSLAPQGLIYSAMPTAYNTDYPLTSADLSMLQGFNSPGILPLGQVSAWQQHHVGQAALSSFVATGQLSQGSNLSINTNQNINIKSEPISPPRDRITPSGFQSHQHHQHQPRPEMDSLSSSSSSYDGSDREDVRNDFHSPIGLGRPANNEDRDSPSVKRMRMDAWVT

SEQ ID NO: 16066 - protein, 498 aa, Xenopus laevis
MGRKKIQIQRITDERNRQVTFTKRKFGLMKKAYELSVLCDCEIALIIFNHSNKLFQYASTDMDKVLLKYTEYNEPHESRTNADIIETLRKKGFNGCDSPEPDGDDSIDQSPLMEDKYRKSSEDLDILFKRYGSAVPAPNFAMPVTVPVTNQNALHFSNPGGSLITQSLMTSSLTDPRLLSPPQPSLQRNTVSPGLPQRPASAGAMLGGELNNSNGTCPSPVGNGYISARASPGLLPVSNGNSLGKVIQAKSPPSPNQNSQLGANSRKPDLRVITSQGGKGLMHHLTEEQLEMSVQRLGGVSQATHSLTTPVVSVATPSLLSHHGLPFSAMSTAYNTDYQLTSADLASLSTFSSPGSLSLGNVTAWQHQQQQQQQHNQPQQLIPVSLSNLVSSSHLPHTATLTVNTNPINISIKREPASPNRERSTGTPLSCFSHQSRHEATGRSPVDSLSSNASSFEGNDREDPRGDYTSSLGLLRPSGDTESESQSVKRMRLDAWVT

SEQ ID NO: 16067 - protein, 516 aa, Xenopus laevis
MGRRKIQITRIMDDRNKQVTFTKRKFGLMKKAYELSVLCDCEIALIIFNSSNKLFQYASTDMDKVLLKYTEYNEPHESRTNSDIVETLRKKGLNGCESPDDQRYFEEETFSKLIEDSDFVFKRDPALNKKENRGCDSPDPDGSYVLTPHTEEKYKKINEEFDNMMRSHKISPGLPQQTFPMSVTVPVSNPNTLPYSSPGNTMVTASLAASASLTDARMLSPPPTTLHRNVFPQGYPSEPPSTGNAGVMLCSSDLSVPNGAGTSPVGNGFVNPRASPSHLGPTGGNVLGKVMPTKSPPPPGGNLVMNSRKPDLRVVIPPSSKGMMPPLNTQRVTSSQGTQPLATPIVSVATPSLAPQGLIYSAMPTAYNTDYPLTSADLSMLQGFNSPGILPLGQVSAWQQHHVGQAALSSFVATGQLSQGSNLSINTNQNINIKSEPISPPRDRITPSGFQSHQHHQHQPRPEMDSLSSSSSSYDGSDREDVRNDFHSPIGLGRPANNEDRDSPSVKRMRMDAWVT

SEQ ID NO: 16068 - protein, 516 aa, Xenopus laevis
MGRKKIQIIRIMDERNRQVIFTKRKFGLMKKAYELSVLCDCEIALIIFNSSNKLFQYASTDMDKVLLKYTEYNEPHESRTNSDIVETLRKKGLNGCESPDDQRYFEEETFSKLIEDSDFVFKRDPALNKKENRGCDSPDPDGSYVLTPHTEEKYKKINEEFDNMMRSHKISPGLPQQTFPMSVTVPVSNPNTLPYSSPGNTMVTASLAASASLTDARMLSPPPTTLHRNVVSPGLPQRPPSTGNAGVMLCSSDLSVPNGAGTSPVGNGFVNPRASPSHLGPTGGNVLGKVMPTKSPPPPGGNLVMNSRKPDLRVVIPPSSKGMMPPLNTQRVTSSQGTQPLATPIVSVATPSLAPQGLIYSAMPTAYNTDYPLTSADLSMLQGFNSPGILPLGQVSAWQQHHVGQAALSSFVATGQLSQGSNLSINTNQNINIKSEPISPPRDRITPSGFQSHQHHQHQPRPEMDSLSSSSSSYDGSDREDVRNDFHSPIGLGRPANNEDRDSPSVKRMRMDAWVT

SEQ ID NO: 16069 - protein, 259 aa, Poa annua
MGRGRVELKRIENKINRQVTFSKRRNGLLKKAYELSVLCDAEVALIIFSSRGKLYEFGSAGTTKTLERYQHCCYNAQDSNSALSETQSWYQEMSKLKAKFEALQRTQRHLLGEDLGPLSVKELQQLEKQLECSLSQARQRKTQLMVEQVEELRRKERQLGEINRQLKHKLDAEGSSSNNYRAMQQLTWAAGTVVDEGAAAYHMQHQQQQQPNHSAAMDCEPTLQIGYPHQFAAPEQAANNIPRSSGQGGENNFMLGWVL

SEQ ID NO: 16070 - protein, 522 aa, Coturnix japonica
MGRKKIQIQRITDERNRQVTFTKRKFGLMKKAYELSVLCDCEIALIIFNHSNKLFQYASTDMDKVLLKYTEYNEPHESRTNADIIETLRKKGFNGCEQPEPDGDDSIDQSPLMEDKYRKWPARLLVLFKRYGLQEFWNEESLRAERVVPTAKIRLVTSSTTPTSCSNMPAPIWTRGYPVSSDTVLQRNTVSPGLPQRPASAGAMFGGDLNNTNGACPSPVGNGYVSARASPGLLPVSNGSTLGKIIPAKSPPPPPHSTQLASNSRKPDLRVITSQSGKGLMHHLTEDHLALNTQGLGVSQATHSLTTPVVSVATPSLLTQACPSPPCRPHTTQIISESAELSSLPAFSSPGGLSLGNISAWQQQQQQQQQQQQQQQQQQQQQQQQQQQQQQQQQQQQQQQQQHLVPVSLGNLIQGSHLSHTTTLTVNTNPNISIKSEPVSPNRERNTATPLSTFPHQPRHEPTGRSPVDSLSSNTSSYEGSSERDDPSRTDFSSSLGLLRPGGEPEGESPSVKRMRLDTWVT

SEQ ID NO: 16071 - protein, 469 aa, Homo sapiens
MGRKKIQITRIMDERNRQVTFTKRKFGLMKKAYELSVLCDCEIALIIFNSTNKLFQYASTDMDKVLLKYTEYNEQHESRTNSDIVETLRKKGLNGCDSPDPDADDSVGHSPESEDKYRKINEDIDLMISRQRLCAVPPPNFEMPVSIPVSSHNSLVYSNPVSSLGNPNLLPLAHPSLQRNSMSPGVTHRPPSAGNTGGLMGGDLTSGAGTSAGNGYGNPRNSPGLLVSPGNLNKNMQAKSPPPMNLGMNNRKPDLRVLIPPGSKNTMPSVSEDVDLLLNQRINNSQSAQSLATPVVSVATPTLPGQGMGGYPSAISTTYGTEYSLSSADLSSLSGFNTASALHLGSVTGWQQQHLHNMQPSALSQLGACTSTHLSQSSNLSLPSTQSLNIKSEPVSPPRDRTTTPSRYPQHTRHEAGRSPVDSLSSCSSSYDGSDREDHRNEFHSPIGLTRPSPDERESPSVKRMRLSE

SEQ ID NO: 16072 - protein, 473 aa, Homo sapiens
MGRKKIQITRIMDERNRQVTFTKRKFGLMKKAYELSVLCDCEIALIIFNSTNKLFQYASTDMDKVLLKYTEYNEPHESRTNSDIVETLRKKGLNGCDSPDPDADDSVGHSPESEDKYRKINEDIDLMISRQRLCAVPPPNFEMPVSIPVSSHNSLVYSNPVSSLGNPNLLPLAHPSLQRNSMSPGVTHRPPSAGNTGGLMGGDLTSGAGTSAGNGYGNPRNSPGLLVSPGNLNKNMQAKSPPPMNLGMNNRKPDLRVLIPPGSKNTMPSVSEDVDLLLNQRINNSQSAQSLATPVVSVATPTLPGQGMGGYPSAISTTYGTEYSLSSADLSSLSGFNTASALHLGSVTGWQQQHLHNMPPSALSQLGACTSTHLSQSSNLSLPSTQSLNIKSEPVSPPRDRTTTPSRYPQHTRHEAGRSPVDSLSSCSSSYDGSDREDHRNEFHSPIGLTRPSPDERESPSVKRMRLSEGWAT

SEQ ID NO: 16073 - protein, 521 aa, Homo sapiens
MGRKKIQIQRITDERNRQVTFTKRKFGLMKKAYELSVLCDCEIALIIFNHSNKLFQYASTDMDKVLLKYTEYNEPHESRTNADIIETLRKKGFNGCDSPEPDGEDSLEQSPLLEDKYRRASEELDGLFRRYGSTVPAPNFAMPVTVPVSNQSSLQFSNPSGSLVTPSLVTSSLTDPRLLSPQQPALQRNSVSPGLPQRPASAGAMLGGDLNSANGACPSPVGNGYVSARASPGLLPVANGNSLNKVIPAKSPPPPTHSTQLGAPSRKPDLRVITSQAGKGLMHHLTEDHLDLNNAQRLGVSQSTHSLTTPVVSVATPSLLSQGLPFSSMPTAYNTDYQLTSAELSSLPAFSSPGGLSLGNVTAWQQPQQPQQPQQPQPPQQQPPQPQQPQPQQPQQPQQPPQQQSHLVPVSLSNLIPGSPLPHVGAALTVTTHPHISIKSEPVSPSRERSPAPPPPAVFPAARPEPGDGLSSPAGGSYETGDRDDGRGDFGPTLGLLRPAPEPEAEGSAVKRMRLDTWTLK

SEQ ID NO: 16074 - protein, 514 aa, Homo sapiens
MGRKKIQIQRITDERNRQVTFTKRKFGLMKKAYELSVLCDCEIALIIFNHSNKLFQYASTDMDKVLLKYTEYNEPHESRTNADIIETLRKKGFNGCDSPEPDGEDSLEQSPLLEDKYRRASEELDGLFRRYGSTVPAPNFAMPVTVPVSNQSSLQFSNPSGSLVTPSLVTSSLTDPRLLSPQQPALQRNSVSPGLPQRPASAGAMLGGDLNSANGACPSPVGNGYVSARASPGLLPVANGNSLNKVIPAKSPPPPTHSTQLGAPSRKPDLRVITSQAGKGLMHHLNNAQRLGVSQSTHSLTTPVVSVATPSLLSQGLPFSSMPTAYNTDYQLTSAELSSLPAFSSPGGLSLGNVTAWQQPQQPQQPQQPQPPQQQPPQPQQPQPQQPQQPQQPPQQQSHLVPVSLSNLIPGSPLPHVGAALTVTTHPHISIKSEPVSPSRERSPAPPPPAVFPAARPEPGDGLSSPAGGSYETGDRDDGRGDFGPTLGLLRPAPEPEAEGSAVKRMRLDTWTLK

SEQ ID NO: 16075 - protein, 486 aa, Homo sapiens [sequence omitted]

SEQ ID NO: 16076 - protein, 506 aa, Homo sapiens
MGRKKIQITRIMDERNRQVTFTKRKFGLMKKAYELSVLCDCEIALIIFNSSNKLFQYASTDMDKVLLKYTEYNEPHESRTNSDIVEALNKKEHRGCDSPDPDTSYVLTPHTEEKYKKINEEFDNMMRNHKIAPGLPPQNFSMSVTVPVTSPNALSYTNPGSSLVSPSLAASSTLTDSSMLSPPQTTLHRNVSPGAPQRPPSTGNAGGMLSTTDLTVPNGAGSSPVGNGFVNSRASPNLIGATGANSLGKVMPTKSPPPPGGGNLGMNSRKPDLRVVIPPSSKGMMPPLSEEEELELNTQRISSSQATQPLATPVVSVTTPSLPPQGLVYSAMPTAYNTDYSLTSADLSALQGFNSPGMLSLGQVSAWQQHHLGQAALSSLVAGGQLSQGSNLSINTNQNISIKSEPISPPRDRMTPSGFQQQQQQQQQQPPPPPQPQPQPPQPQPRQEMGRSPVDSLSSSSSSYDGSDREDPRGDFHSPIVLGRPPNTEDRESPSVKRMRMDAWVT

SEQ ID NO: 16077 - protein, 497 aa, Homo sapiens
MGRKKIQITRIMDERNRQVTFTKRKFGLMKKAYELSVLCDCEIALIIFNSSNKLFQYASTDMDKVLLKYTEYNEPHESRTNSDIVEALNKKEHRGCDSPDPDTSYVLTPHTEEKYKKINEEFDNMMRNHKIAPGLPPQNFSMSVTVPVTSPNALSYTNPGSSLVSPSLAASSTLTDSSMLSPPQTTLHRNVSPGAPQRPPSTGNAGGMLSTTDLTVPNGAGSSPVGNGFVNSRASPNLIGATGANSLGKVMPTKSPPPPGGGNLGMNSRKPDLRVVIPPSSKGMMPPLNTQRISSSQATQPLATPVVSVTTPSLPPQGLVYSAMPTAYNTDYSLTSADLSALQGFNSPGMLSLGQVSAWQQHHLGQAALSSLVAGGQLSQGSNLSINTNQNISIKSEPISPPRDRMTPSGFQQQQQQQQQPPPPPQPQPQPPQPQPRQEMGRSPVDSLSSSSSSYDGSDREDPRGDFHSPIVLGRPPNTEDRESPSVKRMRMDAWVT

SEQ ID NO: 16078 - protein, 486 aa, Homo sapiens [sequence omitted]

SEQ ID NO: 16079 - protein, 499 aa, Homo sapiens
MGRKKIQITRIMDERNRQVTFTKRKFGLMKKAYELSVLCDCEIALIIFNSSNKLFQYASTDMDKVLLKYTEYNEPHESRTNSDIVEALNKKEHRGCDSPDPDTSYVLTPHTEEKYKKINEEFDNMMRNHKIAPGLPPQNFSMSVTVPVTSPNALSYTNPGSSLVSPSLAASSTLTDSSMLSPPQTTLHRNVSPGAPQRPPSTGNAGGMLSTTDLTVPNGAGSSPVGNGFVNSRASPNLIGATGANSLGKVMPTKSPPPPGGGNLGMNSRKPDLRVVIPPSSKGMMPPLNTQRISSSQATQPLATPVVSVTTPSLPPQGLVYSAMPTAYNTDYSLTSADLSALQGFNSPGMLSLGQVSAWQQHHLGQAALSSLVAGGQLSQGSNLSINTNQNISIKSEPISPPRDRMTPSGFQQQQQQQQQQQPPPPPQPQPQPPQPQPRQEMGRSPVDSLSSSSSSYDGSDREDPRGDFHSPIVLGRPPNTEDRESPSVKRMRMDAWVT

SEQ ID NO: 16080 - protein, 507 aa, Homo sapiens
MGRKKIQITRIMDERNRQVTFTKRKFGLMKKAYELSVLCDCEIALIIFNSSNKLFQYASTDMDKVLLKYTEYNEPHESRTNSDIVEALNKKEHRGCDSPDPDTSYVLTPHTEEKYKKINEEFDNMMRNHKIAPGLPPQNFSMSVTVPVTSPNALSYTNPGSSLVSPSLAASSTLTDSSMLSPPQTTLHRNVSPGAPQRPPSTGNAGGMLSTTDLTVPNGAGSSPVGNGFVNSRASPNLIGATGANSLGKVMPTKSPPPPGGGNLGMNSRKPDLRVVIPPSSKGMMPPLSEEEELELNTQRISSSQATQPLATPVVSVTTPSLPPQGLVYSAMPTAYNTDYSLTSADLSALQGFNSPGMLSLGQVSAWQQHHLGQAALSSLVAGGQLSQGSNLSINTNQNISIKSEPISPPRDRMTPSGFQQQQQQQQQQQPPPPPQPQPQPPQPQPRQEMGRSPVDSLSSSSSSYDGSDREDPRGDFHSPIVLGRPPNTEDRESPSVKRMRMDAWVT

SEQ ID NO: 16081 - protein, 365 aa, Homo sapiens
MGRKKIQISRILDQRNRQVTFTKRKFGLMKKAYELSVLCDCEIALIIFNSANRLFQYASTDMDRVLLKYTEYSEPHESRTNTDILETLKRRGIGLDGPELEPDEGPEEPGEKFRRLAGEGGDPALPRPRLYPAAPAMPSPDVVYGALPPPGCDPSGLGEALPAQSRPSPFRPAAPKAGPPGLVHPLFSPSHLTSKTPPPLYLPTEGRRSDLPGGLAGPRGGLNTSRSLYSGLQNPCSTATPGPPLGSFPFLPGGPPVGAEAWARRVPQPAAPPRRPPQSASSLSASLRPPGAPATFLRPSPIPCSSPGPWQSLCGLGPPCAGCPWPTAGPGRRSPGGTSPERSPGTARARGDPTSLQASSEKTQQ

SEQ ID NO: 16082 - protein, 77 aa, Homo sapiens
GRKKIQITRIMDERNRQVTFTKRKFGLMKKAYELSVLCDCEIALIIFNSSNKLFQYASTDMDKVLLKYTEYNEPHES

SEQ ID NO: 16083 - protein, 197 aa, Clematis integrifolia
TGIMKKAEELTVLCDAQVSLLMFSTTNKLHEYISPSITQKEFYDKYQRSSGVNLWDSQYEKMQENLKKLKETNNRLRKEIRQRHGEDLEGLQLQQLCGLEQNMLKSAERIRHKKFHVLGTQTETCKKKIKSHLEAHNNLLRGFEEGDTSCHYGFIPHGDDYDDDNGGSQVFAFRLQPTQPSLQDAQAAYGSYGLTLA

SEQ ID NO: 16084 - protein, 223 aa, Vitis vinifera
MGRGKIEIKRIENTTNRQVTFCKRRNGLLKKAYELSVLCDAEVALIVFSSRGRVYEYSNNNIKSTIDRYKKASSDSTNGGFTMEINAQYYQQESAKLRQQIQMLQNSNRHLMGDSLASLTVKELKQLENRLERGITRIRSKKHELLLAEIEYLQKREIELENESVYLRTKIAEVERLQQANMVSTHEFNAIQALVSRNFFQPNMIEGGSTGYPLHDKKVLHLG

SEQ ID NO: 16085 - protein, 203 aa, Picea abies
MECFEEKGKGVQKTRMVRGKTQMKRIENDTSRQVTFSKRRNGLLKKAYELSVLCDAEVALIVFSPRGKLYEFANPSMQKMLERYDKCSEGSNTTNTTKERDIQYLKREIANREERIKILESRQRKMVGEELASCALSDLNLLESQVERGLRHIRARKTQILVAEIEELKRKERISSEENAFHRKSLSILCMRMVPFWQLLQVH

SEQ ID NO: 16086 - protein, 206 aa, Cryptomeria japonica
MGRGKIEIKRIESTTNRQVTFSKRRSGLFKKAKEISILCASDVAVIVFNSTGRLFDFASSSMKRILERYRNASGRGVWNNEYEQMLSQFRNLKKENEELQKELSCVTGENVETLAPKQLDYLEENLVLAAKKVRERKTEVLKYERRKTESKVIGLQQKQSILMELLAHAENHEEYGFTVSNSEGQTTPPPAFRVQPSQPNLQGSGH

SEQ ID NO: 16087 - protein, 194 aa, Cryptomeria japonica
MGKGKIEIKRIEIKKNRQVTFSKRRSGLFKKAKEISILCAADVAVIVFNSTGRLFDFASSRNASGGKAWNNEYEQMLSQFRNLKNENEELQKELSCVRGEDVEKLARNQLDCLEGNLVLAAKKVQERKTEVLKYEGRKTESKKCSIPKDSLPHSPPLMETQFNEALEALHSLKDYGDDDAQDQNAGDGHRMRKP

SEQ ID NO: 16088 - protein, 184 aa, Anemone nemorosa
QGILKKAKEITVLCEAKVSLVIFSNTNKMFEYNSDPVQDILAKYQTTSGKKLWDAKHEYLSKEMDRIKKENDSMQIELRHLKGEDLTSLQPRELIPIEEALLDGLIKVRDKKMDYVMRKQIEMKKMEEENEQLNWTVNQQEIKMNGNSRSMQVNGFHQNGTDYPSEVPFTFLVHSTKPNLQEKK

SEQ ID NO: 16089 - protein, 248 aa, Silene latifolia
MEFSSQITREEGSPSSQRKLGRGKIEIKRIENTTNRQVTFCKRRNGLLKKAYELSVLCDAEVALIVFSSRGRLYEYANHSVKGTIDRYKKASSDNSGASSAAEANAQYYQQEAAKLRNQIRTVTENNRHLMGEGLSSLNMKDLKSLENKLERGISRIRSKKNELLFAEIEFMQKREVELHNNNQYLRAKIAENERAQQSMSLMPGGSSEYELAPPPQSFDSRNYFQVNALQPNNTHYSRPDQTTLQLN

SEQ ID NO: 16090 - protein, 248 aa, Nicotiana tabacum
MDFQSDLTREISPQRKLGRGKIEIKRIENTTNRQVTFCKRRNGLLKKAYELSVLCDAEVALIVFSSRGRLYEYANNSVKATIERYKKACSDSSNTGSISEANAQYYQQEASKLRAQIGNLQNQNRNMLGESLAALSLRDLKNLEQKIEKGISKIRSKKNELLFAEIEYMQKREIDLHNNNQYLRAKIAETERAQQQQQQQQMNLMPGSSSYELVPPPHQFDTRNYLQVNGLQTNNHYTRQDQPSLQLV

SEQ ID NO: 16091 - protein, 626 aa, Neurospora crassa
MGRRKIEIKAIKDDRNRSVTFLKRKGGLFKKAHELSVLCSVDVAVIIFGNNKKLYEYSSSNIRDILQRYTYHGGPNEHKGPSDFNGGADDDDDDDENGTNSQGEQHMMYQPNPPVSYPFLRHTSLSDSPPVPNGAFGPQPGHQMSRAHTPQPPFVARPPSVNDIRRLRPGQPVRPAGVAQELQNRSAFVPSPPIYNSQPPASMAPTHGLPTQLHPQYPFQPSQPPAHSMQQFEDQRRSPLPPTFVSQPPPHPAHRHSTSPPELLQPQIPQQQVHRHSASPQVHQAQLPQQPQRLPSANMSPPPPQPAQPPQQQQQQHRHQQQQPQSMPNQNLQPPAPPKPESMERPRRLIPALNTSVKNPGQGSVFTPIEPENKSILSQHFAAFRPEIKSESPNNRSQSVDGGNVSKPNTSTPSIQLSSAHGQGSAQRTNSLTVISQSTLPPPSRPQHLRVGGGPLRPRLKVQIPDDSDSGSAAGSASSPRVTTTTDSAPQPLKTGSVLPPPSPSASNLPSAGATGPPNPFAPRSTIQHNNNMNIDTPVSALPSRFLGDLLPSPSRFYPEWGYGISAESNTLPSPLNFATPVNGTGPSFLRDDPTPLKRKSPETKSTGPENDTGNNQDAKRMRLES

SEQ ID NO: 16092 - protein, 208 aa, Eucalyptus grandis
MGRGKIEIKRIENSNNRQVTYSKRRNGLIKKAKEISVLCDAQVSVIIFGSSGKMHEYCSSNTSLVDILDQYHTQCGKRLWDAKQENLSNELDRIKKENDNLQIQLRHLKGEDITSLNHRELIILEDTLENGVGCVRDQKDEVLMTHRRNQKQLEEDAKELHFYAQQKDMMMAETGRAGNDGYHQRMKADFGPSTYHVQPIQPNLQRRF

SEQ ID NO: 16093 - protein, 231 aa, Papaver nudicaule
MGRGKIEIKRIENSTNRQVTYSKRKNGILKKAKEITILCDAHVSLVIFSSTGKMNEYCSSPLIKQLDRYQKASGNKLWDAKHEYLSAEVDRVKKENDNMQIELRHLKGEDLTPLNPRELIPIESALDDGIVGVKAKIKEHYRALKKRTRMLEEDNKRLLTRLSQQQMEIHGRVEMDTMENTGYNNNNQKADGTRDYPAHNDNHHQVPFGFQVPPMQPNLTTVTTTTTTNNK

SEQ ID NO: 16094 - protein, 232 aa, Hordeum vulgare subsp. vulgare
MGRGRIEIKRIENTTNRQLTFCKRRNGLLKKAYELSVLCDAEVALVVFSSRGRLYEYSNNSVKATIERYKKATSDTSSAGTVAEINAQHYQQESAKLRQQITTLQNSNRTLIGDTMATMSHRDLKQLEGRLDKGLGKIRARKNELLSAEIEYMQRREMELQNNNFYLREKVAETERGQQQTLNMMGAASTSNEYDQNMIQCDPRTFLQFNIMQQPQYYTQQEDRKTLNSVER

SEQ ID NO: 16095 - protein, 234 aa, Hordeum vulgare subsp. vulgare
MGRGRIEIKRIENTTNRQVTFCKRRNGLLKKAYELSVLCDAEVALVVFSSRGRLYEYSNNSVKATIERYKKANSDTSNSGTVAEVNAQYYQQESSKLRQQISSLQNSNSRSLVRDSVSTMTLRDLKQLEGRLEKGIAKIRARKNELMYAEVEYMQKREMELHNDNIYLRSKVSENERGQQPMNMMASGSTSSEYDHMVAPYDSRNFLQVNMQQQQHYSQQLQPTALQLGQQYFN

SEQ ID NO: 16096 - protein, 276 aa, Hordeum vulgare subsp. vulgare
MGRGKVQLKRIENKINRQVTFSKRRNGLLKKAHEISVLCDAEVAVIVFSPKGKLYEYATDSSMDKILERYERYSYAEKALISAESESEGNWCHEYRKLKAKIETIQKCHKHLMGEDLDSLNLKELQQLEQQLESSLKHIRSRKSHLMMESISELQKKERSLQEENKALQKELVERQKAASRQQQLQQQQQQQQMQWEHQAQTQTHTHTQNQPQAQTSSSSSSFMMRDQQAHAPQQNICSYPPVTMGGEATAAAAAPEQQAQLRICLPPWMLSHLNA

SEQ ID NO: 16097 - protein, 244 aa, Hordeum vulgare subsp. vulgare
MGRRKVQLKRIENKINRQVTFSKRRSGLLKKAHEISVLYDAEVGLIIFSTKGKLYEFSTESCMDKILERYERYSYAEKVLVSSESEIQGNWCHEYRKLKAKVETIQKCQKHLMGEDLESLNLKELQQLEQQLESSLKHIRARKNQLMHESISELQKKERSLQEENKVLQKELVEKQKAQAAQQDQTQPQTSSSSSSFMMRDAPPVADTSNHPAAAGERAEDVAVQPQVPLRTALPLWMVSHING

SEQ ID NO: 16098 - protein, 246 aa, Hordeum vulgare subsp. vulgare
MGRGRVELKRIENKINRQVTFAKRRNGLLKKAYELSVLCDAEVALIVFSNRGKLYEFCSTQSMTKTLDKYQKCSYAGPETTVQNRENEQLKNSRNEYLKLKTRVDNLQRTQRNLLGEDLDSLGIKELESLEKQLDSSLKHIRTTRTQHMVDQLTELQRREQMFSEANKCLRIKLEESNQVHGQQLWEHNNNVLSYERQPEVQPQMHGGNGFFHPLDAAGEPTLHIGYPPESLNSSCMTTFMPPWLP

SEQ ID NO: 16099 - protein, 250 aa, Hordeum vulgare subsp. vulgare
MGRGKVEMRRIENKISRQVTFAKRRNGLLKKAYELSLLCDAEVALIIFSGRGRLFEFSSSSCMYKTLERYRTCNSNSQEATPQVENEINYQEYLKLKTRVEFLQSSQRNILGEDLGPLSMKELDQIENQIDASLQHIRSKKNQVLLDQLFELKSKEQELQDENKDLRKKLQDTTTTSCGENAVHMSWQDGGQSSSRRHATEPYPGVLQHPEHDTSMQIGYPQAYMDQLNNRDHMASQRPGGHPGSSAGWI

SEQ ID NO: 16100 - protein, 265 aa, Hordeum vulgare subsp. vulgare
MGRGPVQLRRIENKINRQVTFSKRRSGLLKKAHEISVLCDAEVALIVFSTKGKLYEYSSQDSSMDVILERYQRYSFEERAVLDPSTGDQANWGDEYGSLKIKLDALQKSQRQLLGEQLDPLTTKELQQLEQQLDSSLKHIRSRKNQLLFESISELQKKEKSLKDQNGVLQKHLVETEKEKNNVLSNIHHREQLNEATNIHHQEQLSGATTSSPSPTPPTAQDSMAPPNIGPYQSRGGGDPEPQPSPAQANNSNLPPWMLRTIGNR

SEQ ID NO: 16101 - protein, 238 aa, Populus tomentosa
MGRGKIEIEKIENPTNRQVTYSKRRNGIFKKAQELTVLCDAKVSLIMFSNTNKLNEYISPSTSTKKIYDQYQNTLGIDLWGTQYEKMQEHLRKLNDINHKLRKEIRQTRGEGLNDLSIDHLRGLEQHMTEALNGVRGRKFHVIKTQNETYRKKVKNLEERHGNLLMEYEAKLEDLQGGLVDNEAAVALVDGASDNEAAVALADGASNLYAIRLHHGHNHHHPNLHLEDGFGAHELRLP

SEQ ID NO: 16102 - protein, 203 aa, Akebia quinata
VGIIKKARELSVLCDAQVSLIMFSATEKLSEYISPTVTTKKVFDRYQQTAGINLWSTHYERMQENLNKQKEINRRLRKEIRQRMGEDLNELSIDVLRGLEQNMEHSLNIVRERKLKVIRTQSGTYRKKVTNLEQVHKKLMRELEGRNEDPHYVFANHNGDGDYQSALELANNGGSHIFALRLQPSQPILREGGGYGSHDLRLA

SEQ ID NO: 16103 - protein, 234 aa, Lycopodium annotinum
MGRGKIEIKRIENSTSRQVTFSKRRGGLLKKAHELAVLCDAQVALIIFSNTGKLFEYASTSMKEILDRYRKYPDGIQTGRVMEYDNDVMVQHWSREVMRMKQQIERSYQTQRHMMGEDLGLLPLKELQHLEQQLDTGLNRVRARKDQVLREQIDSLRIKELQWHEENEILRRKIAGAHGMTEVAVRSFSSQNIVNPLETREPPSIGQVSVPFSLHVNQKNLRENQNLQTSLQLG

SEQ ID NO: 16104 - protein, 127 aa, Lycopodium annotinum
MGRGKVEIKRIENATCRQATFSKRRSGLLKKAHELSVLCDAQLVAVIFSSTGKLFHYASSSMKEMLARYEQYSLDVQIGPIFHRDLEYQSHQAKKIKEELYQCTQRIRYKLVLMAFYRSYQFRRPAS

SEQ ID NO: 16105 - protein, 281 aa, Physcomitrella patens subsp. patens
MGRGKIEIKKIENTTSRQVTFSKRRGGLLKKAHELAVLCDAEVALVIFSSTGKHFEFASSGSMRDIIERYRKSSDGAVKRGTNTDLLGREVIKLKQQVERLESSQRHMLGEDLSALKVSDLLELEQQLDQGASRVRARKNQLILEEIEDLRRKEHELMIANEALRKKIADAEGAAEAAARANFPDARLESPKPFASDFSRDMSVSSQLAASVYPHPNLLQAQRSQTSLQLGWLSEQQIPSTEEGCAGESSLKWDHPHFHIQNRLHANISPSVRTYKLHVDR

SEQ ID NO: 16106 - protein, 320 aa, Physcomitrella patens subsp. patens
MGRVKLEIKKIENPTNRQVTFSKRRNGLIKKAYELSVLCDIDLALIMFSPSGKLTQYCNCSIEEVIARFANLPMHERNKSFEDMLARFSNNHMHHDRSKYNRKVENLEQLQRALKKLAEEHGLAASQDHLSGSKSTYEIELLQQELKKAQQEKELVQQRARLYLADEQLLQGVTSVPQLANMESELEQALERVRARKNYVSSAYQNVIQRQQHEFLGNSLQMMALRQQQSQQAQQQQAGMTPSQVPYMHWTMQQERPEPTPQDFMDSKRIQLLHSGMHRSTESQEVTVNQIQVWDISHLDHNHRTWKHCGKLGWGVSVED

SEQ ID NO: 16107 - protein, 306 aa, Physcomitrella patens subsp. patens
MGRVKLEIKKIENPTNRQVTYSKRRNGLIKKAYELSVLCDIDLALIMFSPSGKLTQYCNCSIEEVIARFANLPMHERNKSFEDMLTRFANNQMHHDRSKYTRKIENLEYLHKALKKLAGEKDLVSNQQLLSGSKSSSYEAEVLQQELKKAQQEKELVQQRARLYLADEQLLQGVTSVQQLANMETELEQALERVRARKNYVSSAYQTANALQRQQHEFLGNSLQMMALRQQQQQQQQQAGMGGTPSFLHWTMQPSVQSPPRISWSSKQTPRRHSCLHRSVFGNQGTTGEQIQQRRLISPLDRNREH

SEQ ID NO: 16108 - protein, 184 aa, Helleborus orientalis
QGLLKKAKEITVLCGAKLSLVIFSSAGKMSDYNSSNSSLLEILERYQNASGKRLWDAKHEYLHKEVDRIKKENDSMQIELRHLKGEDITSLGPRELIPIEEALEHGLSRVRDKMGEMWRRLKKNGRKLEEENAQLNCIRRHKQEQRGVDGNENGYHQQAIMEYPSQRPFSFRVQPMQPNLHETN

SEQ ID NO: 16109 - protein, 193 aa, Helleborus orientalis
AGIMKKAQELHVLCDAEVALIMLSSTGKVIHYISPNTTDKAIYDKYQQSLGHSIWEPQYQQMQETLRKLKDINSKLRREIRQRVGEDLDDLTFNQLRGLEQHLNESAEIVRQRKFHQIKTQIETTKKKITHHEQTHNNLVHDYHEKLEDAFALVTHESVSLELSNGDGAHVFAFRNPYEADKAGYDLSDLRSG

SEQ ID NO: 16110 - protein, 210 aa, Agapanthus praecox
MGRGKIEIKRIENSTNRQVTFSKRRNGIIKKAREISVLCESQVSVVIFSSCGKMSEYCSPNTSFPRILERYQHNCGKKLWDAKHENLNAQIDRVKKENDNMQIELRHLKGEDLNSLNPKELIPIEEALENGLNGVRAKQMEYLKMLKKNERLLEEENKRLTYILRHQQLAMEGNVRQLDLGYHQREREFAAQMPMAFRVQPIHPNLQQNK

SEQ ID NO: 16111 - protein, 247 aa, Petunia integrifolia subsp. inflata
MVFPNQEFESSSSQRKSGRGKIEIKRIENTTNRQVTFCKRRNGLLKKAYELSVLCDAEVALIVFSSRGRLYEYANNSVRATIDRYKKHHADSTSTGSVSEANTQYYQQEAAKLRRQIRDIQTYNRQIVGEALSSLSPRDLKNLEGKLEKAIGRVRSKKNELLFSEIELMQKREIEMQNANMYLRAKIAEVERATQQMNLMPGGGSEYQQQPMSSTSQPYDARNFLPVNLLEPNPHYSRQDQTALQLV

SEQ ID NO: 16112 - protein, 201 aa, Aquilegia alpina
AGIVKKAKELTVLCDAEVSLLMVSSTGKMHEYISPSCTHKNLYDRYQQASGSNLWQPHYERMQDTLQKLKEVNNKLRKEIRQRNGEDLDELSFQQLRGLEQNMEKSVECVRNRKFHQISTSTDTYKKKIKNHEETHNSLLREFEERDADFSFPALDFEGDYQSTIGFATGNPQIFAFRLQPKLQSDLQDEEAYGSYGLSLA

SEQ ID NO: 16113 - protein, 202 aa, Clematis integrifolia
NGIIKKAQELSVLCDAEVSLIMFSSTGKCTSFISPTISPKEFYDRYQQAAGTDLWQSQYQEMHNNLRKLMEINSKLRREIRIRVGEDDLTELDFDELHRLEQHLENSSKIVRQRKFSQIATHTETARKKIRSQEQIHTNLMQDNYEQIEKQYALANHQSISSLELATDGAGGSHIFAFRLHPGQPHVHGDEGDYDFHQLRLA

SEQ ID NO: 16114 - protein, 193 aa, Berberis gilgiana
TGIMKKAKELTVLCDAEVSLIMFSSTRKLSEFISPSTSVKKIFDRYQQVTGKQLWQHHYEKMQETLNKLKDVNNNLRREIRQRKGDDDLDDLNIQELRDLEQNMEKSVKAVRDRKFHVIGTQTNTSKKKIKNLQETHKFLLCELDQIELASHFESSSFGLANRSSHEFAFRLQPSTPNLQDGRGYGSYDFHLA

SEQ ID NO: 16115 - protein, 193 aa, Berberis gilgiana
TGIMKKAKELTVLCDAEVSLIMFSSTRKLSEFISPSTSVKKIFDRYQQVTGKQLWQHHYEKMQETLNKLKDVNNNLRREIRQRKGDDDLDDLNIQELRDLEQNMEKSVKAVRDRKFHVICTQTDTSKKKIKNHQETHKFLLSELDQIEQASHFESSSFGLANRSSHEFAFGLQPSTPNLQDGRGYGSYDFHLD

SEQ ID NO: 16116 - protein, 197 aa, Gerbera hybrid cv. 'Terra Regina'
MGRGKIEIKRIENTSNRQVTYSKRKNGIIKKAKEITVLCDANVSLVIYGSSGKMYEYCSPKTNLIDMLDRYQRLSGNKLWDAKHENLQNEIDRIKKENESMQIELRHLKGEDITSLNYEELIAYEDALENGLTNIREKKDEIPKIMRKHEQVLEEENKHLMYLVQQSEMAAMGDYQAAHEPFSFRVQPMQPNLHERM

SEQ ID NO: 16117 - protein, 228 aa, Gerbera hybrid cv. 'Terra Regina'
MARGKIQIKKIENSTNRQVTYSKRRNGLFKKASELTVLCDAKVSIIMVSCTDKLHEYISPSITTKQFFDQYQKASGIDLWNSHYEKMQEELRQLKEVNRNLRRQIRQRLGDCLEDLGFEEFLDLEKESQEAVYIIRERKLKVIGNKLETSKKKVRSAQDVYKKLMHEFDIRGEDPQYGMIEDGVEYEALYGYPPHISAPRILTLRLQPNHPDNLHAAASDLTTYALLG

SEQ ID NO: 16118 - protein, 226 aa, Gerbera hybrid cv. 'Terra Regina'
MGRGKIEIKKIENNTNRQVTYSKRRNGIFKKAHELTVLCDAKVSLIMFSNTGKFHEYISPSTTTKKMYDQYQSTVGFDLWSSHYERMKETMKKLKDTNNKLRREIRQRVLGEDFDGLDMNDLTSLEQHMQDSLTLVRERKYHVIKTQTDTCRKRVRNLEQRNGNLRLDYETIHQLDKKYDTGENEGDYESVVAYSNGVSNLYAFCVHPNNIPHGAGYELHDHQHTN

SEQ ID NO: 16119 - protein, 264 aa, Gerbera hybrid cv. 'Terra Regina'
MENSDVLELDFSCVDRSMSFPDDTGDMSPQRKMGKGKIEIKRIENTTNRQVTFCKRRNGLLKKAYELSVLCDAEVALIVFSSRGRLYEYANNSVKGTIDKYKKACLDPPTSGTVAEANTQYYQQEAAKLRQQIANLQNQNRQFYRNIMGESLGDMPVKDLKNLEGKLEKAISRIRAKKNELLFAEIEYMQKRELELHNSNQFLRAKIVENERAQQHHMSLMPGSSDYELVTPHQPFDGRNYLQTNDLQPNNDYSCQDQTPLQLV

SEQ ID NO: 16120 - protein, 246 aa, Gerbera hybrid cv. 'Terra Regina'
MSFPNDSGEMSPQRKLGRGKIEIKRIENTTNRQVTFCKRRNGLLKKAYELSVLCDAEVALIVFSSRGRLYEYANNSVKGTIDRYKKACLDPPSSGSVAEANAQFYQQEAAKLRQQIANLQNQNRQFYRNIMGESLGNMPAKDLKNLESKLEKGIGKIRSKKNEILFAEIEYMQKRENELHNSNQFLRSKIAENERAQQHMSLMPGSSDYELVAPHQPFDGRNYLQVNDLQPNNNYSCQDQTPLQLV

SEQ ID NO: 16121 - protein, 202 aa, Hydrangea macrophylla
NGLFKKANELTVLCDAKVSIIMFSTTNKLHEYISPSISTKELFDLYQTTMGIDLWSSHYERMQENLKKLKDVNRNLRMEIRQRMGESLNDLSWKDLRGLEQEMDSSVKIIRERKYRVLGNQIDTHRKKVRNAEEIHRYIIHEFEVKEEDPHYGLVDNGGNYDSVLGFPNDGPPRIVAFRLQTNQHSLCTGGGSDLTTYALLD

SEQ ID NO: 16122 - protein, 244 aa, Vitis vinifera
MGRGRVELKRIENKINRQVTFAKRRNGLLKKAYELSVLCDAEVALIIFSTRGKLYEFCSSSSMLKTLERYQKCSYGAVEVSRPSKELEQSSYREYLKLKSKFEALQRTQRNLLGEDLGPLNTKELEQLERQLETSLKQVRSTKTQFMLDQLSDLQNKEQVLVESNKALTRKLDEISVKNHLQLSWESGEQSMPYGHQQAQSQGFFQPLECNPTLQIGYNPAGSSQLSAPSNAQNVNGFIPGWML

SEQ ID NO: 16123 - protein, 244 aa, Vitis vinifera
MGRGRVELKRIENKINRQVTFSKRRNGLLKKAYELSVLCDAEVALIIFSSRGKLYEFGSAGTTKTLERYQRVCYTPQDNNMECETQSWYQEVSKLKAKYESLQRTQRHLLGEDLGPLSVKELQNLEKQLEGALAQARQRKTQMMIEQMEDLRRKERQLGDLNKQLKLKLEAEGQSLKAIQGSWNPSTATAGNSSFPVHPSQSNPMDCEPEPILQIGYHHYVPAEGPSVSKSMAGESNFIQGWVL

SEQ ID NO: 16124 - protein, 225 aa, Vitis vinifera
MGRGKIEIKRIENTTNRQVTFCKRRNGLLKKAYELSVLCDAEVALIVFSSRGRLYEYANNSVRTTIERYKKVCSDSSNTGSVSEANAQFYQQEASKLRRQIRDIQNLNRHILGEALSSLNFKELKNLETRLEKGISRIRSKKNELLFAEIEYMQKREIELQNSNLFLRAQIAENERAQQQMNLMPGSQYESVPQQPYDSQNLLPVNLLDPNHHYSRHDQTALQLV

SEQ ID NO: 16125 - protein, 242 aa, Vitis vinifera
MGRGRVELKRIENKINRQVTFAKRRNGLLKKAYELSVLCDAEVALIIFSNRGKLYEFCSSSSMLKTLERYQKCNYGAPETNVSTREALELSSQQEYLKLKARYEALQLSQRNLLGEDLGPLSTKELESLERQLDVSLKQIRSTRTQYMLDQLTDLQRKEHMLNEANKTLKQRLLEGTQVNQLQWNPNAQDVGYGRQQAQPQGDGFFHPLECEPTLQIGYQPDPITVAAAGPSVNNYMPGWLP

SEQ ID NO: 16126 - protein, 372 aa, Physcomitrella patens
MGRVKLEIKKIENSANRQVTYSKRRNGLTKKAYELSVLCDIDLALIMFSPSGKLTQYSNCSIEDIIDRFANLPTQERNKRKIENLEYLQKALRKLTGEKEWVPNQIISGSKSEEVELLQEELKKTQHEKELIQQRIRLYLADEQLLQSVTSVQQLANMETELEQALERVRTRKAYVTSAYQAVSVMQRQMLALQAQQQKQQRDTLGQQPLPLQWNNPECGHSMLQEFMDQHANPQAIVPVQHMNREMGSNSEASPSSFFSQSGSQSNLHNLAGQLNLVGANRGLNIHDMALERSGSGQYDEQKKSKGGANAGFASSSSSGAAAEGSAETFTGQSEPNASNWQLSHQAHHHMHAYSSAQYPTGFSNQNEEAWK

SEQ ID NO: 16127 - protein, 380 aa, Physcomitrella patens
MGRVKLEIKKIENPTNRQVTYSKRRNGLVKKAYELSVLCDIDLALIMFSPSGKLTQYSNCSIEDIIGRFANLPMHERNKRKLENLEYLHKALKKLAGDKELVSNQLISGSKSYEVGLLQEELKKSQQEKELVQQRARLYLADQQLLQSVTSVQQLANMETELEQAIERVRARKAYVSSAYEAASVMQRQVMALQVRAQQQQQQQGLSGSTHPPFLQWNNPERGEAILQDFMEQQTNSQSIVPVQMNREIGSSNEAGPSTFFPQTGSQSNLHSLAGQMSLVGVNRGLSIHDMALERSRGQYEDRKKSKGESNTGFGASSSSSGAAADQGTGETFTGQSEPAHGSAPSASNWQLSHQAHHAQAYSAAHYPTGYFNQNTDTWK

SEQ ID NO: 16128 - protein, 372 aa, Physcomitrella patens
  unsure (1)..(372): unsure at all Xaa locations
MGRVKLEIKKIENSXXRQVTYSKRRNGLTKKAYELSVLCDIDLALIMFSPSGKLTQYSNCSIEDIIDRFANLPTQERNKRKIENLEYLQKALRKLTGEKEWVPNQIISGSKSEEVELLQEELKKTQHEKELIQQRIRLYLADEQLLQSVTSVQQLANMETELEQALERVRTRKAYVTSAYQAVSVMQRQMLALQAQQQKQQRDTLGQQPLPLQWNNPECGHSMLQEFMDQHANPQAIVPVQHMNREMGSNSEASPSSFFSQSGSQSNLHNLAGQLNLVGANRGLNIHDMALERSGSGQYDEQKKSKGGANAGFASSSSSGAAAEGSAETFTGQSEPNASNWQLSHQAHHHMHAYSSAQYPTGFSNQNEEAWK

SEQ ID NO: 16129 - protein, 380 aa, Physcomitrella patens
  unsure (1)..(380): unsure at all Xaa locations
MGRVKLEIKKIENPTNRQVTYSKRRNGLVKKAYELSVLCDIDLALIMFSPSGKLTQYSNCSIEDIIGRFANLPMHERNKRXLENLEYLHKALKKLAGDKELVSNQLISGSKSYEVGLLQEELKKSQQEKELVQQRARLYLADQQLLQSVTSVQQLANMETELEQAIERVRARKAYVSSAYEAASVMQRQVMALQVRAQQQQQQQGLSGSTHPPFLQXNNPERGEAILQDFMEQQTNSQSIVPVQMNREIGSSNEAGPSTXFPXTGSQSNLHSLAGXMSLVGVNRGLSIHDMALERSRGQYEDRKKSKGESNTGFGASSSSSGAAADQGTGETFTGQSEPAHGSAPSAPNWQLSHQAHHAQAYSAAHYPTGYXNQNTDTWK

SEQ ID NO: 16130 - protein, 252 aa, Gnetum parvifolium
MGRGRVQLRRIENKINRQVTFSKRRNGLLKKAYELSVLCDAEVALIIFSTRGKLYEFASSSMSKTLERYEKCSYSMQENASTDRDAQNWHHEVTKLKAKLESLHKAQRNLMGEDLGPLNIKELQSLEQQLEVALGHVRNRKTQLLIQTIDELRDKERTLQEVNKSLQKKLSETEGRNVIPALPHATTGSGEWESSTLTTTYALQTQQPSGIHHVDCEPTLHIGPYHQAVHHEAIPGPPATHSEPHNQYIWWV

SEQ ID NO: 16131 - protein, 266 aa, Gnetum parvifolium
MGRGKIEMKKIECTSSRQVTFSKRRSGLLKKAHELSVLCDAEVAVIIFSNTGKLYEYASSSMRKTIERYQKFEENSTNSTKSFKTKSEQGSSADVGSLLLEMKAMENKHRNSMGEELSSLSVPELKRLEQELEVGINRVRARQNELFEAEICGLKRKEHDLIEENMMLHKLLSETGSSSEMAASAPAHSFGDESAMMACQYRQQVCMGESSSSRNQTRHHIYGVSDVARHLALQISCPNQSRNDYNLVLDGWEYMPEYAPPLVSMD

SEQ ID NO: 16132 - protein, 218 aa, Gnetum parvifolium
MTKTKLQLSRIESSTRRKVTFSKRRNGLLKKAFELSVLCDADIALLVFSESGKLHQFSNPEMNMIITRYKSFIQRHGDSKNNEQHQTPGWKLQKLHGRIERLHKMKKNIGGEDLDSLSFKALDRLQRQLEVAKKRVFNRKIKILSQTVKLLTEEVNVKGRENKTLKSNVETLGNETNSSDGASILHQSMEEGPTAETDLQLRLPEISNVGDCNVFFAD

SEQ ID NO: 16133 - protein, 215 aa, Picea abies
MGRGKIEIKMIENPTNRQVTFSKRRGGLTKKAQELSVLCNAEVALIVFSNTGKLHQWSSSSMKKVLERYQKSEQGLGLMDYQHQQLLFEMRRITKENESLQARLRHMRGEDINSLKLPELFNLEEQLELAGTQVRRRKDHVLDNEKTKRQNKERRLQQENMILQEMVDQHHGHMEEDNGEINFVLCQPLKRLSTAFPAPLLRLQPNQPNLQDIGY

SEQ ID NO: 16134 - protein, 261 aa, Picea abies
MGRGRVQLRRIENKINRQVTFSKRRNGLLKKAYELSVLCDAEVALIIFSTRGKLYEFASSSMNKTLERYEKCSYAMQDTTGVSDREAQNWHQEVTKLKGKVELLQRSQRHLLGEDLGPLNVKELQQLERQLEVALAHLRSRKTQVMLDQIEELRQRERLLHEVNKSLQKKLSETEGRDVITGIEQTSNTNTGTNGPWDSSITNTAYALSHPQQNSNASLHHVDCEPTLQIGYQPVPPESIGPPHQPQHNQTQNQYMQGWWV

SEQ ID NO: 16135 - protein, 219 aa, Picea abies
MGRGKIEIKMIENPTNRQVTFSKRRGGLTKKAQELSVLCNAEVALIVFSNTGKLHQWSSSSMKKVLERYQKSEQGLGLMDYQHQQLLFEMRRITKENESLQARLRILYRHMRGEDINSLKLPELFNLEKQPELAGTQVRRRKDHVLDNEKIKGKNKERRLQQENMILQEMVDQHHGHMEEDNGEINFVLCQPLKRLSAAFPAPLLRLQPNQPNLQDIGY

SEQ ID NO: 16136 - protein, 222 aa, Picea abies
MGRGKIEIKRIENTTNRQVTFCKRRNGLLKKAYELSVLCDAEVALIVFSSRGRLYEFANHSVKRTIERYKKTCVDNNHGGVISESNSQYWQQEAGKLRQQIEILQNANRHLMGDGLTALNIKELKQLEVRLEKGIGRVRSKKNEMLLEEIDIMQRREHILIQENEILRSKIAECQNSHNTNMLSAPEYDALPAFDSRNFLHANLIDAAHHYAHQEQTTLQLG

SEQ ID NO: 16137 - protein, 220 aa, Picea abies
MGRGKIEIKMIENESNRKVTFSKRRGGLFKKARELSVLCEAEVALIVFSSTGNHQEFASSSMKNILERYKASTGIGLLDYQDQMLSDMAQIKRENEILHAELRYMMGEDLDSSDIKDMMSLEDHLDKVSGLVRKRKDKLMDNRLELQKKKTGLEWQIHNQLNENIACYHRARMEEQDKHDLYSNYGFYQLERPSTPLHALPPDPELRLQPNQPNLKDSGY

SEQ ID NO: 16138 - protein, 220 aa, Picea abies
MGRGKIEIKMIENESNRKVTFSKRRGGLFKKARELSVLCEAEVALIVFSSTGNHQEFASSSMKNILERYKASTGIGLLDYQDQMLSDMARIKRENEILHADLRYMMGEDLDSSDIKDMMSLEDHLDKVSGLVRKRKDKLMDNRLELQKKKTGLEWQIHNQLNENIACYHRARMEEQDKHDLYSNYGFYQLERPSTPLHALPPDPELRLQPNQPNLKDSGY

SEQ ID NO: 16139 - protein, 238 aa, Picea abies
MGRGKIEIKKIENLTNRQVTFSKRKAGLQKKAKELSILCSAEVALIIFSSSGKHYEYSSPCSSVEQIVEKYMNVSGSKLGEDQINTLIDGCVVKGDIEIVGLRRVIRHLTGGDLESLSVNELQKLEDQLEIVTSRVRKKRFQRMQEQLEAMTQELEESKRRLRYNEGFTQKKNDLYMFSDCRRSLGETVDDYPFCQLEDKNPIYVTPSAPVFCVQPGQPHLHETDYRYLDLKLGYNRN

SEQ ID NO: 16140 - protein, 236 aa, Picea abies
MGRGKIEIKKIENLTNRQVTFSKRKAGLQKKAKELSILCSAEVALIIFSSSGKHYEYSSPCSSVEQIVEKYMNVSGSKLGEDQINTLIDGCVVKGDIEIVGLRRVIRHLTGGDLESLSVNELQKLEDQLEIVTSRVRKKRFQRMQEQLEAMTQELEESKRRLRYNEGFTQKKNDLYMFSDCRGSLGETVDDYPFCQDKNPIYVTPSAPVFCVQPGQPHLHETDYRYLDLKLGYNRN

SEQ ID NO: 16141 - protein, 220 aa, Pinus radiata
MGRGKIEIKMIENATNRQVTFSKRRGGLKKKAQELSVLCNAEVALIIFSSTGKLHEWSSSSSFFMLQKSMKKILERYQKSEQGLGLMDYQHQQLLCEMRRITKENESLQERLRHMNGEEVNSLKLPELFKLEEQLDKAATQVRRRKDHVLENERIKQRNKMRRMEEENIILHGMNQGHMEEDNGQFNFVLYQPVKKMRTAFPAPLLRLQPNQPNLQDIGY

SEQ ID NO: 16142 - protein, 261 aa, Pinus radiata
MGRGRVQLRRIENKINRQVTFSKRRNGLLKKAYELSVLCDAEVALIIFSTRGKLYEFASSSMNKTLERYEKCSYAMQDTTGVSDREAQNWHQEVTKLKGKVELLQRSQRHLLGEDLGPLNVKELQQLERQLEVALTHLRSRKTQVMLDQIEELRQRERLLHEVNKSLQKKLSETEGRDVITGIEQTSNTNTGTNGPWDSSITNTAYALSHPQQDSNSSLHHVDCEPTLQIGYQPVAPESIVPPHQPPHNQTPNQYMQGWWV

SEQ ID NO: 16143 - protein, 222 aa, Pinus radiata
MGRGKIEIKRIENTTNRQVTFCKRRNGLLKKAYELSVLCDAEVALIVFSSRGRLYEFANHSVKRTIERYKKTCVDNNHGGAISESNSQYWQQEAGKLRQQIDILQNANRHLMGDGLTALNIKELKQLEVRLEKGISRVRSKKNEMLLEEIDIMQRREHILIQENEILRSKIAECQNSHNTNMLSAPEYDALPAFDSRNFLHANLIDAAHHYAHQEQTTLQLG

SEQ ID NO: 16144 - protein, 242 aa, Pinus radiata
MGRGRVELKRIENKINRQVTFSKRRNGLLKKAYELSVLCDAEVALIIFSSRGKLYEFGSAGMLKTLERYQKCSYVLQDATVSDREAQNWHQEVGKLKARVELLQRSQRHLLGEDLGPLSIKELQQLERQLEVALTHVRSRKTQVMLEMMDELRRKERILQEVNKSLRKKLQEAEGQAFNAMQPPPHAWDSHAVANNAYAMQHPSNAVDCEPTLQIGYQYAPPESSMPRHEQAQNNYMQGWMV

SEQ ID NO: 16145 - protein, 245 aa, Pinus radiata
MGRGKVELKRIENKINRQVTFAKRRNGLLKKAYELSVLCDAEVALIIFSNRGKLYEFCSSSSMMKTIEKYQKCSYGSLETNCSINEMQNSYQDYLELKARVEVLQRSQRNLLGEELGPLNSKELEQLEHQLENSLKQIRSAKTQFMFDQLAHLQHKEQMLVEANRELRKKLEESNTRIPLRLGWEAEDHNNISYRRLPTQSQGLIFQPLGGYPNMQIGYNPAGSNELNVSPADQHPNGFIPGWML

SEQ ID NO: 16146 - protein, 223 aa, Pinus radiata
MVRGKTQMKRIENATSRQVTLSKRRNGLLKKAYELSVLCDAEVGLIVFSPSGKLYEFASTSMQKLLEKYEICSQECGTSESNKKQDPQCLKQEIENMEKRVRILQSTQRKMLGEGLALCSIKELNQLEGQVERGLNHVRATKTKVLLDEIEKLKQKEHVFREEKALLHKKSVNLRGANGCTIPSIGLTSIERVEVQTQLVMRPPHATEMDDNFMDVDNVPLSG

SEQ ID NO: 16147 - protein, 214 aa, Pinus radiata
MARGKTQMRKIESATSRQVTFSKRRNGLLKKAYEMSVLCDAQLGLIVFSPRGKVYEFSSTCMQKMLARYENFSEGSKATSTAKEQDVQGLKRQIANMEERIEILESMHRKMLGDELASCALKDLNELESQVERGLRNVRARKTEILVTEIEQLQRKEWILSEENAFLGKKFVHPHSVSKTPGSESGSIQNSEVETQLVMRPPCTNAHFLINSSH

SEQ ID NO: 16148 - protein, 199 aa, Pinus radiata
  unsure (1)..(199): unsure at all Xaa locations
MARGKTQMRKIESATSRQVTFSKRRNGLMKKAYELSVLCDAQLGLIVFSPRGKVYEFSSTCMQKMLARYEKCSEGSDTSTSKEQDVQCLKRESANMEERIEILESMQRKMLGEELASCALKDLNQLESQVERXLRNVRARKERILSEENAFLSKKFVDPQSFSTTPGSESGSIQNSEVETQLVMRPPCTNAHFLINSSH

SEQ ID NO: 16149 - protein, 214 aa, Pinus radiata
MGRGRIRLRKIESATSRQVTFSKRKNGLLKKAYELSVLCDVELGLIVLSPRGKVHEFSSTCMQKMLERYEKCSEGSKTTSIAKEEDPKALKREIANMEERIEILERTQRKMLGEELASCALKDLNQLESQVERGLRNIRARKSEILVTQIEQLQRKERMFSEENNFLRKRIVDPHSVLTTPASGSGSLQRSEVETQLVMRPPSSNADFLFNSSH

SEQ ID NO: 16150 - protein, 163 aa, Pinus radiata
MDLMESFEAKGKGEKRRTVRGKTQLKRIENGTSRQVTFCKRRNGLLKKAYELSVLCDAEVALIVFSPRGKRYEFANPSMQKMLARYENFSEGSKATSTAKEQDVQEWILSEENAFLGKKFVDPHSVSKTPGSESGSIQNSEVETQLVMRPPCTNAHFLINSSH

SEQ ID NO: 16151 - protein, 237 aa, Gnetum gnemon
MGRGKIEIKRIENTTNRQVTFSKRRGGLLKKAHELSVLCDAELGLIIFSSSGKLFEYSSASSSMKKIIERYQKVSGARITEYDNQHLYCEMTRMKNENEKLQTNIRRMMGEDLTSLTMTELHHLGQQLESASSRVRSRKNQLMLQQLENLRRKERILEDQNSHLCRLLAEQQAAVEGVQEPLLEFGVFCPPPDNKTAAAANAGPLHLGHHLPAFRLQPTQPNLQESSIVPNRPVLQL

SEQ ID NO: 16152 - protein, 225 aa, Gnetum gnemon
MGRGKLEIKRIENLTNRQTTFAKRKNGLMKKAKELSILCDAQVALIVFSPTGKQFIEAHGNNAECTIESVRDVIERYKQQSKEKLLDSEDENLANELEKQKKQSADLQTKLKHLTGQDINLLSPDALGDLEHILQEALTRVRQKKIQRWLSKKIEMERRVAKLNEYKNALNGMYSQAQGYQHYNHAHHGIMAASVSAAYHRVQPYPGNLDDVCYQPQPNLQLRFL

SEQ ID NO: 16153 - protein, 247 aa, Gnetum gnemon
MGRGKIEIKRIENTTNRQVTFCKRRNGLLKKAYELSVLCDAEVALIVFSSRGRLYEFANNSVKRTIERYRKTCADNNQGGAIAESNAQYWQQEAVKLKQQIDVLNNQIRHYMGECLQSMTIKELKQLEGKLEKGLGRVRSKRNEKLLEDIDTLQRREDNLIRENEYIRNKIAECQSHQHANMLTAAAVEYDAIPAAYDSRNFMHANLIEAAAAHHHYAQQEQTALHLGSEHKYSVHYPDPQAHKFQT

SEQ ID NO: 16154 - protein, 207 aa, Gnetum gnemon
MGRGKIEIKRIENYTSRQATFSKRRGGLLKKARELAVLCDAEIALIIFSSSGRLFQFASSSMNATLARYCRRCEETKNPAANHGLENEDNKTGNADPDESKSLQKVPDLSLSRTPLVNEGLESLKLQKEQLQRSVKRLMGEQIEDMRLDELAQLERDVEAAMRRLRASKESKMIGRIEEARVCKERDLAEQNRELRLQLDLFRNTTV

SEQ ID NO: 16155 - protein, 254 aa, Gnetum gnemon
MGRGRVELKRIENKINRQVTFSKRRNGLLKKAYELSVLCDAEVALIIFSSRGKLYEFGSAGTLKTLERYQKCSYALQESNNSDRDAQTWHHEVSKLKTKVEILQRSQRHLLGEDLGPLSIRELQTLERQIEVALTQVRARKTQVMMDMMDDLKKKERLLQEVNKSLRKKLDETEGQVYSNAQLQAAPPPEWDSNAIANPVYALPPTPQNAVDCEPTCKLGIMLLLSQAFPGMIILRTTTYRGGWSNLIPDANNQ

SEQ ID NO: 16156 - protein, 193 aa, Gnetum gnemon
KINRQVSFSKRRNGLMKKAYELSVLCDAQLALIVFSNHGKLYQYSSTSINSILERYKKCSALHFENDTQESQQVKLSKHHAKVMILEKSIRNLRGEDIHDLNVKELQSLEHTLEQTLKQVRSYKVDAIRGIIHELERKEQVLEDANMALRMKIAYANARRNSRTQLHFDGSPWTLTQQITSAPAAVNSACTHF

SEQ ID NO: 16157 - protein, 211 aa, Gnetum gnemon
MGRGKIEIKKIENPSSRQVTFSKRRGGLIKKARELAVLCDAEIALIIFSSTGKLTDWCSHNMKDTLKKFERIAGSSSAEYERHQLRLDIETRKRQNEELQNLINYKLGVGIDHLSCEELECLEEDLENIVRNVKRTKDKQEERLTDRLRRRVGFQQQHLRRFMGEIRYHDTYVEKELWEVCCQLAQEKITAREEKHHGDHHDCALLHFRHE

SEQ ID NO: 16158 - protein, 216 aa, Gnetum gnemon
MGRGKIEIKKIENSVHRQVTFCKRRGGLMKKAYELSVLCDAEVALIIFSSRGKLYELATSNKSMMSTLERYQRSSATGKQLNLYPGSSNEKLDLEVKFLRNQVEQLKATNRYLMGEELATMSLDELNELEAQLQKGINQVRAKKTDLMLEEIKALQNKEHILRMSNIMLQGKLDECTNCKDSRFHGFITTSSTSHAPAYTCGFNLNNQSLSSTIEM

SEQ ID NO: 16159 - protein, 243 aa, Gnetum gnemon
MGRGKLAMKYIEQKNSRQVTFSKRKNGLKKKVTELSILCGAEIALVIFSNTGKLYSHVGKHGSLNQIIHRYLQNPHAQLRYDQIFQTTLTYAKEDKKFDLCRFFSDLRELMQELESVPNLELQSLEDELQLATYKVRKKKEEAAAKEYDSLQMDLELMLKQNSELQKELRRKELLEDRHRALQWQFQQLMGVDDPGSISQTMESSCVYSSVDDRTSFLALQVSSPAVSSFRSVKPQKTLLNLI

SEQ ID NO: 16160 - protein, 261 aa, Lolium temulentum
MGRGKVQLKRIENKINRQVTFSKRRNGLLKKAHEISVLCDAEVAVVVFSPKGKLYEYATDSSMDKILERYERYSYAEKALISAESESEGNWCHEYRKLKAKIETIQKCHKHLMGEDLECLNLKELQQLEQQLESSLKHIRSRKSHLMMESISELQKKERSLQEENKALQKELVERQKAARQQQQEQWDRQTQTQQAQNQPQAQTSSSSSSFMMRDQQAHAQQNICYPLVTMGGEAVAAAPGQQGQLRIGGLPPWMLSHLNA

SEQ ID NO: 16161 - protein, 245 aa, Lolium temulentum
MGRGKVQLKRIENKINRQVTFSKRRSGLLKKAHEISVLCDAEVGLIIFSTKGKLYEFATDSCMDKILERYERYSYAEKVLISTESEIQGNWCHEYRKLKAKVETIQRCQKHLMGEDLESLNLKELQQLEQQLESSLKHIRSRKSQLMHESISELQKKERSLQEENKILQKELIEKQKAHTQQAQLEQTQPQTSSSSSSFMMGEATPATNRSNPPAAASDRAEDATGQPPARTVLPPWMVSHLNNG

SEQ ID NO: 16162 - protein, 242 aa, Betula pendula
MEFQNQSMSVSPQRKLGRGKIEIKRIENTTNRQVTFCKRRNGLLKKAYELSVLCDAEIALIVFSSRGRLYEYANNSSVKTTIERYKKACAESSNSGSVSEANTQFYQQEAAKLRGQIRSVQNSNRHLLGEALSELNFKELKNLEIKLEKGINKIRSKKNELLFAEIEYMQKREAELHNNNQILRAKIAENERNQQNLNVMPGGGNYELMQSQSYDSRTYFQVDALQPNHHYPRQDQIPLQLV

SEQ ID NO: 16163 - protein, 211 aa, Betula pendula
MGRGKIEIKRIENSSNRQVTYSKRMKGIIKKAKEISILCDAKVPLVIFDSSGKMKEYCSPSTTLINILDMYHKRSEKRLWDAKHENLSNEIARIKKENDNMQIELRHMKGEDITSLNHRELMILEEALQNGHSSIRERQMDLLMRARKKDKILEEENKCLNFTLHQQQMAMEAASCRDVEDDYEQRVRDYNSQMPFAFRVQPIQPNLQDRM

SEQ ID NO: 16164 - protein, 251 aa, Betula pendula
MGRGRVELKRIENKINRQVTFAKRRNGLLKKAHELSVLCDAEVALIIFSNRGKLCEFCSSPSMLKTLERYQKCNFGAPEPNVSAREALELSSQQEYLKLKARYEALQRTQRNLMGEDLGPLSSKELELLERQLNMSLKQIRSIRTQCMLDQLTDLQRKEHMLNEANRTLKQRLVDGYHIDTVLQLDQSANDVGYGRQPAQTQDDCFFHPLCEPTLQIGYQHDHPMTVVTAGSGSVVTAGPSVNNYMSGWMP

SEQ ID NO: 16165 - protein, 214 aa, Dianthus caryophyllus
MGRGKLEIRKIENKTNRQVTFSKRRNGIMKKAQELTVLCDAKVSLLMISSTHKLHHYLSPGVSLKKMYDEYQKIEGVDLWRKQWERMQEQHRKVLELNSLLRREISRRMGGDLEGLTLVELSALQQEMEEAIIQIRNKKYHTIKNQTGTTRKKIKNLEERHTDLVMELEAKFRGPQFAIGEDDPRNYEAAAAAAVYGNDVAAANLFALSRHPIT

SEQ ID NO: 16166 - protein, 57 aa, Ipomoea nil
MGRGRVQLKRIENKINRQVTFSKRRSGLLKKANEISVLCDADVGVIVFSTKGKLFEY

SEQ ID NO: 16167 - protein, 244 aa, Gossypium hirsutum
MVYPNESLEDSPQKKMGRGKIEIKRIENTTNRQVTFCKRRNGLLKKAYELSVLCDAEVALVAFSSRGRLYEYANNSVKATIERYKKASDSSNTGSVAEVNAQFYQQEADKLRNQIRNLQNANRHMLGESIGGLPMKELKSLESRLEKGISRIRSKKNELLFAEIEYMQKREIDLHNNNQLLRAKIAENERKQQSMNLMPGGSSANFEALHSQPYDSRNYFQVDALQPATNYYNPQLQQDQIALH

SEQ ID NO: 16168 - protein, 223 aa, Gossypium hirsutum
MGRGKIEIKRIENTTNRQVTFCKRRNGLLKKAYELSVLCDAEVALIVFSSRGRLYEYSNNNIRSTIDRYKKACSDTSNTNTVTEINAQYYQQESAKLRQQIQMLQNSNRHLMGDSLSSLTVKELKQVENRLERGITRIRSKKHEMLLAEIEFLQKREIELENESVCLRTKIAEIERLQQANMVTGPELNAIQALASRNFFSPNVIEHPSAYSHPSDKKILHLG

SEQ ID NO: 16169 - protein, 211 aa, Cucumis sativus
MGRGKIEIKRIENSSNRQVTYSKRRNGIIKKAKEITVLCDAQVSLVIFASSGKMHEYCSPSTPLVDILDKYHKQSGKRLWDAKHENLSNEMDRVKKENDNMQIELRHLRGEDITSLNYKELMALEEALENGLTGVREKQSEFMKMMRTNERMMEEENKRLNYELYQKEMVAMGDSVREMDIGYNQRMRDFNSQMPFAFRVQPIQPNLQERE

SEQ ID NO: 16170 - protein, 221 aa, Cucumis sativus
MGRGKIEIKRIENTTNRQVTFCKRRNGLLKKAYELSVLCDAEVVLIVFSSRGRLYEYANNSVKATIDRYKKASSDSSNTGSTSEDNTQFYQQEAAKLRVQIGNLQNSNRNMLGESLSSLTAKDLKGLETKLEKGISRIRSKKNELLFAEIEYMRKREIDLHNNNQMLRAKIAVSERNVSMMGGEFELMQSHPYDPRDFFQVNGLQHNHQYPRQDNMALQLV

SEQ ID NO: 16171 - protein, 237 aa, Cucumis sativus
MFQNQEEKMSDSPQRKMGRGKIEIKRIENTTNRQVTFCKRRNGLLKKAYELSVLCDAEVALIVFSSRGRLYEYANNSVKATIDRYKKASSDSSNTGSTSEANTQFYQQEAAKLRVQIGNLQNSNRNMLGESLSSLTAKDLKGLETKLEKGISRIRSKKNELLFAEIEYMRKREIDLHNNNQMLRAKIAESERNVNMMGGEFELMQSHPYDPRDFFQVNGLQHNHQYPRQDNMALQLV

SEQ ID NO: 16172 - protein, 262 aa, Cucumis sativus
MSKHYQSPLTRMIKEEGKGKLQIKGMFQNQEEKMSDSPQRKMGRGKIEIKRIENTTNRQVTFCKRRNGLLKKAYELSVLCDAEVALIVFSSRGRLYEYANNSVKATIDRYKKASSDSSNTGSTSEANTQFYQQEAAKLRVQIGNLQNSNRNMLGESLSSLTAKDLKGLETKLEKGISRIRSKKNELLFAEIEYMRKREIDLHNNNQMLRAKIAESERNVNMMGGEFELMQSHPYDPRDFFQVNGLQHNHQYPRQDNMALQLV

SEQ ID NO: 16173 - protein, 254 aa, Cucumis sativus
  unsure (1)..(254): unsure at all Xaa locations
MSCYEEEDEESGVVGLRRSSSSSRTGRGKIEIKRIENTTNRQVTFCKRRNGLLKKAYELSVLCDAEVALIVFSSRGRLYEYANNSVRATISRYKKAYSDPSTAMTVSEANTQFYQQESAKLRAQIGNLQNLNRHLLGESISSLSVKDLKSLEVKLEKGISRIRSRKNELLFSEIEYMQKREIELHTNNQLIRAKIAETERSXQNTNASNNNGIATRRGEEGSMGTNLEDNNHHQYDSTNYFDPHHNHPISLQLV

SEQ ID NO: 16174 - protein, 254 aa, Cucumis sativus
MSCYEEEDEESGVVGLRRSSSSSRTGRGKIEIKRIENTTNRQVTFCKRRNGLLKKAYELSVLCDAEVALIVFSSRGRLYEYANNSVRATISRYKKAYSDPSTAMTVSEANTQFYQQESAKLRAQIGNLQNLNRHLLGESISSLSVKDLKSLEVKLEKGISRIRSRKNELLFSEIEYMQKREIELHTNNQLIRAKIAETERSQQNTNASNNNGIATRRGEEGSMGTNLEDNNHHQYDSTNYFDPHHNHPISLQLV

SEQ ID NO: 16175 - protein, 236 aa, Cucumis sativus
MGRGKIEIKRIENTTNRQVTFCKRRNGLLKKAYELSVLCDAEVALIVFSTRGRLYEYANNSVRGTIERYKKAFADSSNSGLSVAEANVQFYQQEATKLKRQIREIQNSNRHILGEALSSLPLKELKSLEGRLERGISKVRAKKNETLFAEMEFMQKREMELQSHNNYLRAQIAEHERIQQQQQQQQQTNMMQRATYESVGGQYDDENRSTYGAVGALMDSDSHYAPQDHLTALQLV

SEQ ID NO: 16176 - protein, 246 aa, Cucumis sativus
MGRGRVELKRIENKINRQVTFAKRRNGLLKKAYELSVLCDAEVALIIFSNRGKLYEFCSTSNMLKTLERYQKCSYGAVEVTKPAKELESSYREYLKLKSRFESLQRTQRNLLGEDLGPLNSKELEQLERQLVSSLKQVRSTKTQYMLDQLSDLQNKEQMLIETNRALQIKLEEISSRNNIRLTWDGGDQSMSYGPQNAQTQGFFQPLECNPTLQIGYTSAVSDQITSTTTPTHAQQVNGFLPGWML

SEQ ID NO: 16177 - protein, 215 aa, Cucumis sativus
EIKRIENTTNRQVTFCKRRNGLLKKAYELSVLCDAEVALIVFSSRGRLYEYANNSVKATIDRYKKASSDSSNTGSTSEANTQFYQQEAAKLRVQIGNLQNPNRNMLGESLSSLTAKDLKGLETKLEKGISRIRSKKNELLFAEIEYMRKREIDLHNNNQMLRAKIAESERNVNMMGGEFELMQSHPYDPRDFFQVNGLQHNHQYPRQDNMALQLV

SEQ ID NO: 16178 - protein, 227 aa, Populus balsamifera subsp. trichocarpa
MGRGKIEIKKIENPTNRQVTYSKRRNGIFKKAQELTVLCDAKVSLIMFSNTNKLNEYISPSTSTKKIYDQYQNALGIDLWGTQYEKMQEHLRKLNDINHKLRQEIRQRRGEGLNDLSIDHLRGLEQHMTEALNGVRGRKYHVIKTQNETYRKKVKNLEERHGNLLMEYEAKLEDRQYGLVDNEAAVALANGASNLYAFRLHHGHNHHHHLPNLHLGDGFGAHELRLP

SEQ ID NO: 16179 - protein, 242 aa, Arabidopsis thaliana
MGRGRVQLKRIENKINRQVTFSKRRSGLLKKAHEISVLCDAEVALIVFSSKGKLFEYSTDSCMERILERYDRYLYSDKQLVGRDVSQSENWVLEHAKLKARVEVLEKNKRNFMGEDLDSLSLKELQSLEHQLDAAIKSIRSRKNQAMFESISALQKKDKALQDHNNSLLKKIKEREKKTGQQEGQLVQCSNSSSVLLPQYCVTSSRDGFVERVGGENGGASSLTEPNSLLPAWMLRPTTTNE

SEQ ID NO: 16180 - protein, 208 aa, Arabidopsis thaliana
MGRGKIEIKRIENANNRVVTFSKRRNGLVKKAKEITVLCDAKVALIIFASNGKMIDYCCPSMDLGAMLDQYQKLSGKKLWDAKHENLSNEIDRIKKENDSLQLELRHLKGEDIQSLNLKNLMAVEHAIEHGLDKVRDHQMEILISKRRNEKMMAEEQRQLTFQLQQQEMAIASNARGMMMRDHDGQFGYRVQPIQPNLQEKIMSLVID

SEQ ID NO: 16181 - protein, 208 aa, Arabidopsis thaliana
MGRGKIEIKRIENANNRVVTFSKRRNGLVKKAKEITVLCDAKVALIIFASNGKMIDYCCPSMDLGAMLDQYQKLSGKKLWDAKHENLSNEIDRIKKENDSLQLELRHLKGEDIQSLNLKNLMAVEHAIEHGLDKVRDHQMEVLISKRRNEKMMAEEQRQITFQLQQQEMAIASNARGMMMRDHDGQFGYRVQPIQPNLQEKIMSLVID

SEQ ID NO: 16182 - protein, 208 aa, Arabidopsis thaliana
MGRGKIEIKRIENANNRVVTFSKRRNGLVKKAKEITVLCDAKVALIIFASNGKMIDYCCPSMDLGAMLDQYQKLSGKKLWDAKHENLSNEIDRIKKENDSLQLELRHLKGEDIQSLNLKNLMAVEHAIEHGLDKVRDHQIEILISKRRNEKMMAEEQRQLTFQLQQQEMAIASNARGMMMRDHDGQFGYRVQPIQPNLQEKIMSLVID

SEQ ID NO: 16183 - protein, 208 aa, Arabidopsis thaliana
MGRGKIEIKRIENANNRVVTFSKRRNGLAKKAKEITVLCDAKVALIIFASNGKMIDYCCPSMDLGAMLDQYQKLSGKKLWDAKHENLSNEIDRIKKENDSLQLELRHLKGEDIQSLNLKNLMAVEHAIEHGLDKVRDHQMEILISKRRNEKMMAEEQRQLTFQLQQQEMAIASNARGMMMRDHDGQFGYRVQPIQPNLQEKITSLVID

SEQ ID NO: 16184 - protein, 208 aa, Arabidopsis thaliana
MGRGKIEIKRIENANNRVVTFSKRRNGLVKKAKEITVLCDAKVALIIFASNGKMIDYCCPSMDLGAMLDQYQKLPGKKLWDAKHENLSNEIDRIKKENDSLQLELRHLKGEDIQSLNLKNLMAVEHAIEHGLDKVRDHQMEILISKRRNEKMMAEEQRQLTFQLQQQEMAIASNARGMMMRDHDGQFGYRVQPIQPNLQEKIMSLVID

SEQ ID NO: 16185 - protein, 251 aa, Arabidopsis thaliana
MGRGRVQLRRIENKIRRQVTFSKRRTGLVKKAQEISVLCDAEVALIVFSPKGKLFEYSAGSSMERILDRYERSAYAGQDIPTPNLDSQGECSTECSKLLRMIDVLQRSLRHLRGEEVDGLSIRDLQGVEMQLDTALKKTRSRKNQLMVESIAQLQKKEKELKELKKQLTKKVKAGEREDFQTQNLSHDLASLATPPFESPHELRRTISPPPPPLSSGDTSQRDGVGEVAAGTLIRRTNATLPHWMPQLTGE

SEQ ID NO: 16186 - protein, 216 aa, Arabidopsis thaliana
MGRGKIEIKRIENSTNRQVTFCKRRNGLLKKAYELSVLCDAEVALIVFSTRGRLYEYANNNIRSTIERYKKACSDSTNTSTVQEINAAYYQQESAKLRQQIQTIQNSNRNLMGDSLSSLSVKELKQVENRLEKAISRIRSKKEIELDNENIYLRTKVAEVERYQQHHHQMVSGSEINAIEALASRNYFAHSIMTAGSGSGNGGSYSDPDKKILHLG

SEQ ID NO: 16187 - protein, 255 aa, Arabidopsis thaliana
MGRGRVELKRIENKINRQVTFSKRRTGLLKKAQEISVLCDAEVSLIVFSHKGKLFEYSSESCMEKVLERYERYSYAERQLIAPDSHVNAQTNWSMEYSRLKAKIELLERNQRHYLGEELEPMSLKDLQNLEQQLETALKHIRSRKNQLMNESLNHLQRKEKEIQEENSMLTKQIKERENILKTKQTQCEQLNRSVDDVPQPQPFQHPHLYMIAHQTSPFLNMGGLYQGEDQTAMRRNNLDLTLEPIYNYLGCYAA

SEQ ID NO: 16188 - protein, 239 aa, Arabidopsis thaliana
MGRGKIAIKRINNSTSRQVTFSKRRNGLLKKAKELAILCDAEVGVIIFSSTGRLYDFSSSSMKSVIERYSDAKGETSSENDPASEIQEMYIVTLEKYAYSEELVLDRQMMGEELSGLSVEALQNLENQLELSLRGVRMKKDQMLIEEIQVLNREGNLVHQENLDLHKKVNLMHQQNMELHEKVSEVEGVKIANKNSLLTNGLDMRDTSNEHVHLQLSQPQHDHETHSKAIQLNYFSFIA

SEQ ID NO: 16189 - protein, 208 aa, Arabidopsis thaliana
MGRGKIEIKRIENANNRVVTFSKRRNGLVKKAKEITVPCDAKVALIIFASNGKMIDYCCPSMDLGAMLDQYQMLSGKKLWDAKHENLSNEIDRIKKENDSLQLELRHLKGEDIQSLNLKNLMAVEHAIEHGLDKVRDHQMEILISKRRNEKMMAEEQRQLTFQLQQQEMAIASNARGMMMRDHDGQFGYRVQPIQPNLQEKIMSLVID

SEQ ID NO: 16190 - protein, 255 aa, Arabidopsis thaliana
MGRGRVELKRIENKINRQVTFSKRRTGLLKKAQEISVLCDAEVSLIVFSHKGKLFEYSSESCMEKVLERYERYSYAERQLIAPDSHVNAQTNWSMEYSRLKAKIELLERNQRHYLGEELEPMSLKDLQNLEQQLETALKHIRSRKNQLMNESLNHLQRKEKEIQEENSMLTKQIKERENILRTKQTQCEQLNRSVDDVPQPQPFQHPHLYMIAHQTSPFLNMGGLYQEEDQTAMRRNNLDLTLEPIYNYLGCYAA

SEQ ID NO: 16191 - protein, 208 aa, Arabidopsis thaliana
MGRGKIEIKRIENANNRVVTFSKRRNGLVKKAKEITVLCDAKVALIIFASDGKMIDYCCPSMDLGAMLDQYQKLSGKKLWDAKHENLSNEIDRIKKENDSLQLELRHLKGEGIQSLNLKNLMAVEHAIEHGLDKVRDHQMEILISKRRNEKMMAEEQRQLTFQLQQQEMAIASNARGMMMRDHDGQFGYRVQPIQPNLQEKIMSLVID

SEQ ID NO: 16192 - protein, 208 aa, Arabidopsis thaliana
MGRGKIEIKRIENANNRVVTFSKRRNGLVKKAKEITVLCDAKVALIIFASNGKMIDYCCPSMDLGAMLDQYQKLSGKKLWDAKHENLSDEIDRIKKENDSLQLELRHLKGEDIQSLNLKNLMAVGHAIEHGLDKVRDHQMEILISKRRNEKMMAEEQRQLTFQLQQQEMAIASNARGMMMRDHDGQFGYRVQPIQPNLQEKIMSLVID

SEQ ID NO: 16193 - protein, 221 aa, Arabidopsis thaliana
MVRGKTEMKRIENATSRQVTFSKRRNGLLKKAFELSVLCDAEVALIIFSPRGKLYEFSSSSSIPKTVERYQKRIQDLGSNHKRNDNSQQSKDETYGLARKIEHLEISTRKMMGEGLDASSIEELQQLENQLDRSLMKIRAKKYQLLREETEKLKEKERNLIAENKMLMEKCEMQGRGIIGRISSSSSTSELDIDDNEMEVVTDLFIGPPETRHFKKFPPSN

SEQ ID NO: 16194 - protein, 232 aa, Arabidopsis thaliana
MARGKIQIKRIENQTNRQVTYSKRRNGLFKKAHELTVLCDARVSIIMFSSSNKLHEYISPNTTTKEIVDLYQTISDVDVWATQYERMQETKRKLLETNRNLRTQIKQRLGECLDELDIQELRRLEDEMENTFKLVRERKFKSLGNQIETTMKKNKSQQGIQKNLIHELELRAEDPHYGLVDNGGDYDSVLGYQIEGSRAYALRFHQNHHHYYPNHGLHAPSASDIITFHLLE

SEQ ID NO: 16195 - protein, 232 aa, Arabidopsis thaliana
MARGKIQIKRIENQTNRQVTYSKRRNGLFKKAHELTVLCDARVSIIMFSSSNKLHEYISPNTTTKEIVDLYQTISDVDVWATQYERMQETKRKLLETNRNLRTQIKQRLGECLDKLDIQELRRLEDEMENTFKLVRERKFKSLGNQIETTKKKNKSQQDIQKNLIHELELRAEDPHYGLVDNGGDYDSVLGYQIEGSRAYALRFHQNHHHYYPNHGLHAPSASDIITFHLLE

SEQ ID NO: 16196 - protein, 232 aa, Arabidopsis thaliana
MARGKIQIKRIENQTNRQVTYSKRRNGLFKKAHELTVLCDARVSIIMFSSSNKLHEYISPNTTTKEIVDLYQTISDVDVWATQYERMQETKRKLLETNRNLRTQIKQRVGECLDELDIQELRRLEDEMENTFKLVRERKFKSLGNQIETTKKKSKSQQDIQKNLIHELELRAEDPHYGLVDNGGDYDSVLGYQIEGSRAYALRFHQNHHHYYPNHGLHAPSASDIITFHLLE

SEQ ID NO: 16197 - protein, 232 aa, Arabidopsis thaliana
MARGKIQIKRIENQTNRQVTYSKRRNGLFKKAHELTVLCDARVSIIMFSSSNKLHEYISPNTTTKEIVDLYQSISDVDVWATQYERMQETKRKLLETNRNLRTQIKQRLGECLDELDIQELRRLEDEMENTFKLVRERKFKSLGNQIETTKKKNKSQQNIQKDLIHELELRAEDPHYGLVDNGGDYDSVLGYQIEGSRAYALRFHQNHHHYCPNHGLHAPSASDIITFHLLE

SEQ ID NO: 16198 - protein, 232 aa, Arabidopsis thaliana
MARGKIQIKRIENQTNRQVTYSKRRNGLFKKAHELTVLCDARVSIIMFSSSNKLHEYISPNTTTKEIVDLYQTISDVDVWATQYERMQETKRKLLETNRNLRTQIKQRLGECLDELDIQELRRLEDEMENTFKLVRERKFKSLGNQIETTKKKNKSQQDIQKNLIHELELRAEDPHYGLVDNGGDYDSVLGYQIEGSRAYALRFHQNHHHYYPNHGLHAPSASDIITFHLLE

SEQ ID NO: 16199 - protein, 232 aa, Arabidopsis thaliana
MARGKIQIKRIENQTNRQVTYSKRRNGLFKKAHELTVLCDARVSIIMFSSSNKLHEYISPNTTTKEIVDLYQTISDVDVWATQYERMQETKRKLLETNRNLRTQIKQRLGECLDELDIQELRRLEDEMENTFKLVRERKFKSLGNQIETTKKKNKSQQDIQKNLIHELELRAEDPHYGLVDNGGDYDSVLGYQIEGSRRYALRFHQNHHHYYPNHGLHAPSASDIITFHLLE

SEQ ID NO: 16200 - protein, 232 aa, Arabidopsis thaliana
MARGKIQIKRIENQTNRQVTYSKRRNGLFKKAHELTVLCDARVSIIMFSSSNKLHEYISPNTTTKEIVDLYQTISDVDVWATQYERMQETKRKLLETNRNLRTQIKQRLGECLDELDIQELRRLEDEMENTFKLVRERKFKSLGSQIETTKKKNKSQQDIQKNLIHELELRAEDPHYGLVDNGGDYDSVLGYQIEGSRAYALRFHQNHHHYYPNHGLHAPSASDIITFHLLE

SEQ ID NO: 16201 - protein, 232 aa, Arabidopsis thaliana
MARGKIQIKRIENQTNRQVTYSKRRNGLFKKAHELTVLCDARVSIIMFSSSNKLHEYISPNTTTKEIVDLYQTISDVDVWATQYERMQETKRKLLETNRNLRTQIKQRLGECLNKLDIQELRRLEDEMENTFKLVRERKFKSLGNQIETTKKKNKSQQDIQKNLIHELELRAEDPHYGLVDNGGDYDSVLGYQIEGSRAYALRFHQNHHHYYPNHGLHAPSASDIITFHLLE

SEQ ID NO: 16202 - protein, 232 aa, Arabidopsis thaliana
MARGKIQIKRIENQTNRQVTYSKRRNGLFKKAHELTVLCDARVSIIMFSSSNKLHEYISPDTTTKEIVDLYQTISDVDVWATQYERMQETKRKLLETNRNLRTQIKQRLGECLDELDIQELRRLEDEMENTFKLVRERKFKSLGNQIETTKKKNKSQQDIQKNLIHELELRAEDPHYGLVDNGGDYDSVLGYQIEGSRAYALRFHQNHHHYYPNHGLHAPSASDIITFHLLE

SEQ ID NO: 16203 - protein, 232 aa, Arabidopsis thaliana
MARGKIQIKRIENQTNRQVTYSKRRNGLFKKAHELTVLCDARVSIIMFSSSNKLHEYISPNTTTKEIVDLYQTISDVDVWATQYERMQETKRKLLETNRNLRTQIKQRLGECLDELDIQELRRLEDEMENTFKLVRARKFESLGNQIETTKKKNKSQQDIQKNLIHELELRAEDPHYGLVDNGGDYDSVLGYQIEGSRAYALRFHQNHHHYYPNHGLHAPSASDIITFHLLE

SEQ ID NO: 16204 - protein, 232 aa, Arabidopsis thaliana
MARGKIQIKRIENQTNRQVTYSKRRNGLFKKAHELTVLCDARVSIITFSSSNKLHEYISPNTTTKEIVDLYQTISDVDVWATQYERMQETKRKLLETNRNLRTQIKQRLGECLDELDIQELRRLEDEMENTFKLVRERKFKSLGNQIETTKKKNKSQQDIQKNLIHELELRAEDPHYGLVDNGGDYDSVLGYQIEGSRAYALRFHQNHHHYYPNHGLHAPSASDIITFHLLE

SEQ ID NO: 16205 - protein, 232 aa, Arabidopsis thaliana
MARGKIQIKRIENQTNRQVTYSKRRNGLFKRAHELTVLCDARVSIIMFSSSNKLHEYISPNTTTKEIVDLYQTISDVDVWATQYERMQETKRKLLETNRNLRTQIKQRLGECLDELDIQELRRLEDEMENTFKLVRERKFKSLGNQIETTKKKNKSQQDIQKNLIHELELRAEDPHYGLVDNGGDYDSVLGYQIEGSRAYALRFHQNHHHYYPNHGLHAPSASDIITFHLLE

SEQ ID NO: 16206 - protein, 251 aa, Arabidopsis thaliana
MGRGRVQLKRIENKINRQVTFSKRRAGLLKKAHEISVLCDAEVALVVFSHKGKLFEYSTDSCMEKILERYERYSYAERQLIAPESDVNTNWSMEYNRLKAKIELLERNQRHYLGEDLQAMSPKELQNLEQQLDTALKHIRTRKNQLMYESINELQKKEKAIQEQNSMLSKQIKEREKILRAQQGQWDQQNQGHNMPPPLPPQQHQIQHPYMLSHQPSPFLNMGGLYQEDDPMAMRRNDLELTLEPVYNCNL

SEQ ID NO: 16207 - protein, 252 aa, Arabidopsis thaliana
MGRGRVEMKRIENKINRQVTFSKRRNGLLKKAYELSVLCDAEVALIIFSSRGKLYEFGSVGIESTIERYNRCYNCSLSNNKPEETTQSWCQEVTKLKSKYESLVRTNRNLLGEDLGEMGVKELQALERQLEAALTATRQRKTQVMMEEMEDLRKKERQLGDINKQLKIKFETEGHAFKTFQDLWANSAASVAGDPNNSEFPVEPSHPNVLDCNTEPFLQIGFQQHYYVQGEGSSVSKSNVAGETNFVQGWVL

SEQ ID NO: 16208 - protein, 232 aa, Arabidopsis thaliana
MARGKIQIKRIENQTNRQVTYSKRRNGLFKKAHELTVLCDARVSIIMFSSSNKLHEYISPNTTTKEIVDLYQTISDVDVWATQYERMQETKRKLLETNRNLRTQIKQRLGECLDELDIQELRRLEDEKENTFKLVRERKFKSLGNQIETTKKKNKSQQDIQKNLIHELELRAEDPHYGLVDNGGDYDSVLGYQIEGSRAYALRFHQNHHHYYPNHGLHTPSASDIITFHLLE

SEQ ID NO: 16209 - protein, 207 aa, Arabidopsis thaliana
MVRGKIEIKKIENVTSRQVTFSKRRSGLFKKAHELSVLCDAQVAAIVFSQSGRLHEYSSSQMEKIIDRYGKFSNAFYVAERPQVERYLQELKMEIDRMVKKIDLLEVHHRKLLGQGLDSCSVTELQEIDTQIEKSLRIVRSRKAELYADQLKKLKEKERELLNERKRLLEEVNMHHSSKGNTEGGHRTKHSSEVETDLFIGLPVTRL

SEQ ID NO: 16210 - protein, 251 aa, Arabidopsis thaliana
MGRGRVQLKRIENKINRQVTFSKRRAGLLKKAHEISVLCDAEVALVVFSHKGKLFEYSTDSCMEKILERYERYSYAERQLIAPESDVNTNWSMEYNRLKAKIELLERNQRHYLGEDLQAVSPKELQNLEQQLDTALKHIRTRKNQLMYESINELQKKEKAIQEQNGMLSKQIKEREKILRAQQEQWDQQNQGHNMPPPLPPQQHQIQHPYMLSHQPSPFLNMGGLYQEDDPMAMRRNDLELTLEPVYNCNL

SEQ ID NO: 16211 - protein, 251 aa, Arabidopsis thaliana
MGRGRVQLKRIENKINRQVTFSKRRAGLLKKAHEISVLCDAEVALVVFSHKGKLFEYSTDSCMEKILERYERYSYAERQLIAPESDVNTNWSMEYNRLKAKIELLERNQRHYLGEDLQAMSPKELQNLEQQLDTALKHIRTRKNQLMYESINELQKKEKAIQEQNSMLSKQIKEREKILRAQQEQWDQQNQGHNMPPPLPPQQHQIQHPYMLSHQPSPFLNMGGLYQEDDPMAMRRNDLELTLEPVYNCNL

SEQ ID NO: 16212 - protein, 248 aa, Arabidopsis thaliana
MEEGGSSHDAESSKKLGRGKIEIKRIENTTNRQVTFCKRRNGLLKKAYELSVLCDAEVALVIFSTRGRLYEYANNSVRGTIERYKKACSDAVNPPSVTEANTQYYQQEASKLRRQIRDIQNSNRHIVGESLGSLNFKELKNLEGRLEKGISRVRSKKNELLVAEIEYMQKREMELQHNNMYLRAKIAEGARLNPDQQESSVIQGTTVYESGVSSHDQSQHYNRNYIPVNLLEPNQQFSGQDQPPLQLV

SEQ ID NO: 16213 - protein, 285 aa, Arabidopsis thaliana
HFLQLLQISYFPENHFPKKNKTFPFVLLPPTAITAYQSELGGDSSPLRKSGRGKIEIKRIENTTNRQVTFCKRRNGLLKKAYELSVLCDAEVALIVFSSRGRLYEYSNNSVKGTIERYKKAISDNSNTGSVAEINAQYYQQESAKLRQQIISIQNSNRQLMGETIGSMSPKELRNLEGRLERSITRIRSKKNELLFSEIDYMQKREVDLHNDNQILRAKIAENERNNPSISLMPGGSNYEQLMPPPQTQSQPFDSRNYFQVAALQPNNHHYSSAGRQDQTALQLV

SEQ ID NO: 16214 - protein, 256 aa, Arabidopsis thaliana
MGRGRVQLKRIENKINRQVTFSKRRAGLLKKAHEISVLCDAEVALVVFSHKGKLFEYSTDSCMEKILERYERYSYAERQLIAPESDVNTNWSMEYNRLKAKIELLERNQRHYLGEDLQAMSPKELQNLEQQLDTALKHIRTRKNQLMYESINELQKKEKAIQEQNSMLSKQIKEREKILRAQQEQWDQHNQGHNMPPPLPPQQHQIQHPYMLSHQPSPFLNMGGLYQEDDPMAMRRNDLELTLEPVYNCNLGCFAA

SEQ ID NO: 16215 - protein, 251 aa, Arabidopsis thaliana
MGRGRVQLKRIENKINRQVTFSKRRAGLLKKAHEISVLCDAEVALVVFSHKGKLFEYSTDSCMEKILERYERYSYAERQLIAPESDVNTNWSMEYNRLKAKIELLERNQRHYLGEDLQAMSPKELQNLEQQLDTALKHIRTRKNQLMYESINELQKKEKAIQEQNSMLSKQIKEREKILRAQQEQWDQQNQGHNMPPPLPPQQHQIQHPYMLSHQPSPFLNMGGLYQEDDPMVMRRNDLELTLEPVYNCNL

SEQ ID NO: 16216 - protein, 284 aa, Arabidopsis thaliana
FLQLLQISYFPENHFPKKNKTFPFVLLPPTAITAYQSELGGDSSPLRKSGRGKIEIKRIENTTNRQVTFCKRRNGLLKKAYELSVLCDAEVALIVFSSRGRLYEYSNNSVKGTIERYKKAISDNSNTGSVAEINAQYYQQESAKLRQQIISIQNSNRQLMGETIGSMSPKELRNLEGRLERSITRIRSKKNELLFSEIDYMQKREVDLHNDNQILRAKIAENERNNPSISLMPGGSNYEQLMPPPQTQSQPFDSRNYFQVAALQPNNHHYSSAGRQDQTALQLV

SEQ ID NO: 16217 - protein, 251 aa, Arabidopsis thaliana
MGRGRVQLKRIENKINRQVTFSKRRAGLLKKAHEISVLCDAEVALVVFSHKGKLFEYSTDSCMEKILERYERYSYAERQLIAPESDVNTNWSMEYNRLKTKIELLERNQRHYLGEDLQAMSPKELQNLEQQLDTALKHIRTRKNQLMYESINELQKKEKAIQEQNSMLSKQIKEREKILRAQQEQWDQQNQGHNMPPPLPPQQHQIQHPYMLSHQPSPFLNMGGLYQEDDPMAMRRNDLELTLEPVYNCNL

SEQ ID NO: 16218 - protein, 310 aa, Arabidopsis thaliana
RKLKRKKIFLYKCIYPSLHQHNLTFHFLQLLQISYFPENHFPKKNKTFPFVLLPPTAITAYQSELGGDSSPLRKSGRGKIEIKRIENTTNRQVTFCKRRNGLLKKAYELSVLCDAEVALIVFSSRGRLYEYSNNSVKGTIERYKKAISDNSNTGSVAEINAQYYQQESAKLRQQIISIQNSNRQLMGETIGSMSPKELRNLEGRLERSITRIRSKKNELLFSEIDYMQKREVDLHNDNQILRAKIAENERNNPSISLMPGGSNYEQLMPPPQTQSQPFDSRNYFQVAALQPNNHHYSSAGRQDQTALQLV

SEQ ID NO: 16219 - protein, 255 aa, Arabidopsis thaliana
MGRGRVQLKRIENKINRQVTFSKRRAGLLKKAHEISVLCDAEVALVVFSHKGKLFEYSTDSCMEKILERYERYSYAERQLIAPESDVNTNWSMEYNRLKAKIELLERNQRHYLGEDLQAMSPKELQNLEQQLDTALKHIRTRKNQLMYESINELQKKEKAIQEQNSMLSKQIKEREKILRAQQEQWDQQNQGHNMPPPLPPQQHQIQHPYMLSHQPSPFLNMGGLYQEDDPMAMRNDLELTLEPVYNCNLGCFAA

SEQ ID NO: 16220 - protein, 252 aa, Arabidopsis thaliana
MAYQSELGGDSSPLRKSGRGKIEIKRIENTTNRQVTFCKRRNGLLKKAYELSVLCDAEVALIVFSSRGRLYEYSNNSVKGTIERYKKAISDNSNTGSVAEINAQYYQQESAKLRQQIISIQNSNRQLMGETIGSMSPKELRNLEGRLERSITRIRSKKNELLFSEIDYMQKREVDLHNDNQILRAKIAENERNNPSISLMPGGSNYEQLMPPPQTQSQPFDSRNYFQVAALQPNNHHYSSAGRQDQTALQLV

SEQ ID NO: 16221 - protein, 230 aa, Arabidopsis thaliana
MGRGKIEIKRIENSTNRQVTFCKRRNGLLKKAYELSVLCDAEVALIVFSTRGRLYEYANNNIRSTIERYKKACSDSTNTSTVQEINAAYYQQESAKLRQQIQTIQNSNRNLMGDSLSSLSVKELKQVENRLEKAISRIRSKKHELLLVEIENAQKREIELDNENIYLRTKVAEVERYQQHHHQMVSGSEINAIEALASRNYFAHSIMTAGSGSGNGGSYSDPDKKILHLG

SEQ ID NO: 16222 - protein, 256 aa, Arabidopsis thaliana
MGRGRVQLKRIENKINRQVTFSKRRAGLLKKAHEISVLCDAEVALVVFSHKGKLFEYSTDSCMEKILERYERYSYAERQLIAPESDVNTNWSMEYNRLKAKIELLERNQRHYLGEDLQAMSPKELQNLEQQLDTALKHIRTRKNQLMYESINELQKKEKAIQEQNSMLSKQIKEREKILRAQQEQWDQQNQGHNMPPPLPPQQHQIQHPYMLSHQPSPFLNMGGLYQEDDPMAMRRNDLELTLEPVYNCNLGCFAA

SEQ ID NO: 16223 - protein, 215 aa, Arabidopsis thaliana
EMKRIENATSRQVTFSKRRNGLLKKAFELSVLCDAEVALIIFSPRGKLYEFSSSSSIPKTVERYQKRIQDLGSNHKRNDNSQQSKDETYGLARKIEDLEISTRKMMGEGLDASSIEELQQLENQLDRSLMKIRAKKYQLLREETEKLKEKERNLIAENKMLMEKCEMQGRGIIGRISSSSTSSELDIDDNEMEVVTDLFIGPPETRHFKKFPPSN

SEQ ID NO: 16224 - protein, 246 aa, Arabidopsis thaliana
MEGGASNEVAESSKKIGRGKIEIKRIENTTNRQVTFCKRRNGLLKKAYELSVLCDAEVALVIFSTRGRLYEYANNSVRGTIERYKKACSDAVNPPTITEANTQYYQQEASKLRRQIRDIQNLNRHILGESLGSLNFKELKNLESRLEKGISRVRSKKHEMLVAEIEYMQKREIELQNDNMYLRSKITERTGLQQQESSVIHQGTVYESGVTSSHQSGQYNRNYIAVNLLEPNQNSSNQDQPPLQLV

SEQ ID NO: 16225 - protein, 258 aa, Arabidopsis thaliana
MEGGASNEVAESSKKIGRGKIEIKRIENTTNRQVTFCKRRNGLLKKAYELSVLCDAEVALVIFSTRGRLYEYANNSVRGTIERYKKACSDAVNPPTITEANTQYYQQEASKLRRQIRDIQNLNRHILGESLGSLNFKELKNLESRLEKGISRVRSKKHEMLVAEIEYMQKREIELQNDNMYLRSKITERTGLQQQESSVIHQGTVYESGVTSSHQSGQYNRNYIAVNLLEPNQNSSNQDQPPLQLRDLIIYIYLDYVS

SEQ ID NO: 16226 - protein, 219 aa, Arabidopsis thaliana
MVRGKTEMKRIENATSRQVTFSKRRNGLLKKAFELSVLCDAEVALVIFSPRSKLYEFSSSSIAATIERYQRRIKEIGNNHKRNDNSQQARDETSGLTKKIEQLEISKRKLLGEGIDACSIEELQQLENQLDRSLSRIRAKKYQLLREEIEKLKAEERNLVKENKDLKEKWLGMGTATIASSQSTLSSSEVNIDDNMEVETGLFIGPPETRQSKKFPPQN

SEQ ID NO: 16227 - protein, 256 aa, Arabidopsis thaliana
MGRGRIEIKKIENINSRQVTFSKRRNGLIKKAKELSILCDAEVALIIFSSTGKIYDFSSVCMEQILSRYGYTTASTEHKQQREHQLLICASHGNEAVLRNDDSMKGELERLQLAIERLKGKELEGMSFPDLISLENQLNESLHSVKDQKTQILLNQIERSRIQEKKALEENQILRKQVEMLGRGSGPKVLNERPQDSSPEADPESSSSEEDENDNEEHHSDTSLQLGLSSTGYCTKRKKPKIELVCDNSGSQVASD

SEQ ID NO: 16228 - protein, 251 aa, Arabidopsis thaliana
MGRGRVQLKRIENKINRQVTFSKRRAGLLKKAHEISVLCDAEVALVVFSHKGKLFEYSTDSCMEKILERYERYSYAERQLIAPEPDVNTNWSMEYNRLRAKIELLERNQRHYLGEDLQAMSPKELQNLEQQLDTALKHIRTRKNQLMYESINELQKKEKAIQEQNSMLSKQIKEREKILRAQQEQWDQQNQGHNMPPPLPPQQHQIQHPYMPSHQPSPFLNMGGLYQEDDPMAMRRNDLELTLEPVYNCNL

SEQ ID NO: 16229 - protein, 228 aa, Arabidopsis thaliana
MGRGKVEVKRIENKITRQVTFSKRKSGLLKKAYELSVLCDAEVSLIIFSTGGKLYEFSNVGVGRTIERYYRCKDNLLDNDTLEDTQGLRQEVTKLKCKYESLLRTHRNLVGEDLEGMSIKELQTLERQLEGALSATRKQKTQVMMEQMEELRRKERELGDINNKLKLETEDHDFKGFQDLLLNPVLTAGCSTDFSLQSTHQNYISDCNLGYFYRLGFNNTMSKVKDLR

SEQ ID NO: 16230 - protein, 244 aa, Arabidopsis thaliana
MGRGKVEVKRIENKITRQVTFSKRKSGLLKKAYELSVLCDAEVSLIIFSTGGKLYEFSNVGVGRTIERYYRCKDNLLDNDTLEDTQGLRQEVTKLKCKYESLLRTHRNLVGEDLEGMSIKELQTLERQLEGALSATRKQKTQVMMEQMEELRRKERELGDINNKLKLETEDHDFKGFQDLLLNPVLTAGCSTDFSLQSTHQNYISDCNLGYFLQIGFQQHYEQGEGSSVTKSNARSDAETNFVQ

SEQ ID NO: 16231 - protein, 258 aa, Arabidopsis thaliana
MGRGKVELKRIENKINRQVTFAKRRNGLLKKAYELSVLCDAEIALLIFSNRGKLYEFCSSPSGMARTVDKYRKHSYATMDPNQSAKDLQDKYQDYLKLKSRVEILQHSQRHLLGEELSEMDVNELEHLERQVDASLRQIRSTKARSMLDQLSDLKTKEEMLLETNRDLRRKLEDSDAALTQSFWGSSAAEQQQQHQQQQQGMSSYQSNPPIQEAGFFKPLQGNVALQMSSHYNHNPANATNSATTSQNVNGFFPGWMV

SEQ ID NO: 16232 - protein, 257 aa, Arabidopsis thaliana
MGRGKVELKRIENKINRQVTFAKRRNGLLKKAYELSVLCDAEIALLIFSNRGKLYEFCSSPSGMARTVDKYRKHSYATMDPNQSAKDLQDKYQDYLKLKSRVEILQHSQRHLLGEELSEMDVNELEHLERQVDASLRQIRSTKARSMLDQLSDLKTKEEMLLETNRDLRRKLEDSDAALTQSFWGSSAAEQQQQHQQQQQGMSSYQSNPPIQEAGFFKPLQGNVALQMSHYNHNPANATNSATTSQNVNGFFPGWMV

SEQ ID NO: 16233 - protein, 251 aa, Arabidopsis thaliana
MGRGRVQLKRIENKINRQVTFSKRRAGLLKKAHEISVLCDAEVALVVFSHKGKLFEYSTDSCMEKILERYERYSYAERQLIAPESDVNTNWSTEYNRLKAKIELLERNQRHYLGEDLQAMSPKEPQNLEQQLDTALKHIRTRKNQLMYESINELQKKEKAIQEQNSMLSKQIKEREKILRAQQEQWDQQNQGHNMPPPLPPQQHQIQHPYMLSHQPSPFLNMGGLYQEDDPMAMRRNDLELTLEPVYNCNL

SEQ ID NO: 16234 - protein, 196 aa, Arabidopsis thaliana
MGRKKVEIKRIENKSSRQVTFSKRRNGLIEKARQLSILCESSIAVLVVSGSGKLYKSASGDNMSKIIDRYEIHHADELEALDLAEKTRNYLPLKELLEIVQSKLEESNVDNASVDTLISLEEQLETALSVTRARKTELMMGEVKSLQKTENLLREENQTLASQVGKKTFLVIEGDRGMSWENGSGNKVRETLPLLK

SEQ ID NO: 16235 - protein, 178 aa, Arabidopsis thaliana
MGRKKVEIKRIENKSSRQVTFSKRRNGLIEKARQLSILCESSIAVLVVSGSGKLYKSASGDNMSKIIDRYEIHHADELEALDLAEKTRNYLPLKELLEIVQSKLEESNVDNASVDTLISLEEQLETALSVTRARKTELMMGEVKSLQKTENLLREENQTLASQVTKTSLEANSSVDTQ

SEQ ID NO: 16236 - protein, 256 aa, Arabidopsis thaliana
MGRGRIEIKKIENINSRQVTFSKRRNGLIKKAKELSILCDAEVALIIFSSTGKIYDFSSVCMEQILSRYGYTTASTEHKQQREHQLLICASHGNEAVLRNDDSMKVELERLQLAIERLKGKELEGMSFPDLISFENQLNESLHSVKDQKTQILLNQIERSRIQEKKALEENQILRKQVEMLGRGSGPKVLNERPQDSSPEADPESSSSEEDENDNEEHHSDTSLQLGLSSTGYCTKRKKPKIELVCDNSGSQVASD

SEQ ID NO: 16237 - protein, 248 aa, Arabidopsis thaliana
MGRGRVELKRIENKINRQVTFAKRRNGLLKKAYELSVLCDAEVALIIFSNRGKLYEFCSSSNMLKTLDRYQKCSYGSIEVNNKPAKELENSYREYLKLKGRYENLQRQQRNLLGEDLGPLNSKELEQLERQLDGSLKQVRSIKTQYMLDQLSDLQNKEQMLLETNRALAMKLDDMIGVRSHHMGGWEGGEQNVTYAHHQAQSQGLYQPLECNPTLQMGYDNPVCSEQITATTQAQAQPGNGYIPGWML

SEQ ID NO: 16238 - protein, 251 aa, Arabidopsis thaliana
MGRGRVELKRIENKINRQVTFAKRRNGLLKKAYELSVLCDAEVALIIFSNRGKLYEFCSSSNMLKTLDRYQKCSYGSIEVNNKPAKELENSYREYLKLKGRYENLQRQQRNLLGEDLGPLNSKELEQLERQLDGSLKQVRSIKTQYMLDQLSDLQNKEQMLLETNRALAMKLDDMIGVRSHHMGGGGGWEGGEQNVTYAHHQAQSQGLYQPLECNPTLQMGYDNPVCSEQITATTQAQAQQGNGYIPGWML

SEQ ID NO: 16239 - protein, 262 aa, Arabidopsis thaliana
MGRGRVELKRIENKINRQVTFAKRRNGLLKKAYELSVLCDAEVALIIFSNRGKLYEFCSSSNMLKTLDRYQKCSYGSIEVNNKPAKELENSYREYLKLKGRYENLQRQQRNLLGEDLGPLNSKELEQLERQLDGSLKQVRSIKTQYMLDQLSDLQNKEQMLLETNRALAMKLDDMIGVRSHHMGGGGGWEGGEQNVTYAHHQAQSQGLYQPLECNPTLQMGCCFGDDDDDDRYDNPVCSEQITATTQAQAQQGNGYIPGWML

SEQ ID NO: 16240 - protein, 214 aa, Arabidopsis thaliana
MVRGKTQMKRIENATSRQVTFSKRRNGLLKKAFELSVLCDAEVSLIIFSPKGKLYEFASSNMQDTIDRYLRHTKDRVSTKPVSEENMQHLKYEAANMMKKIEQLEASKRKLLGEGIGTCSIEELQQIEQQLEKSVKCIRARKTQVFKEQIEQLKQKEKALAAENEKLSEKWGSHESEVWSNKNQESTGRGDEESSPSSEVETQLFIGLPCSSRK

SEQ ID NO: 16241 - protein, 228 aa, Arabidopsis thaliana
MGRGKIVIQRIDDSTSRQVTFSKRRKGLIKKAKELAILCDAEVGLIIFSSTGKLYDFASSSMKSVIDRYNKSKIEQQQLLNPASEVKFWQREAAVLRQELHALQENHRQMMGEQLNGLSVNELNSLENQIEISLRGIRMRKEQLLTQEIQELSQKRNLIHQENLDLSRKVQRIHQENVELYKKAYMANTNGFTHREVAVADDESHTQIRLQLSQPEHSDYDTPPRANE

SEQ ID NO: 16242 - protein, 211 aa, Arabidopsis thaliana
MVRGKIEIKKIENVTSRQVTFSKRRSGLFKKAHELSVLCDAQVAAMIFSQKGRLYEFASSDIRNTIKRYAEYKREYFVAETHPIEQYVQGLKKEMVTMVKKIEVLEVHNRKMMGQSLDSCSVKELSEIATQIEKSLHMVRLRKAKLYEDELQKLKAKERELKDERVRLSLKKTIYTHLCQVGERPMGMPSGSKEKEDVETDLFIGFLKNRP

SEQ ID NO: 16243 - protein, 268 aa, Arabidopsis thaliana
MGRGKIEIKRIENANSRQVTFSKRRSGLLKKARELSVLCDAEVAVIVFSKSGKLFEYSSTGMKQTLSRYGNHQSSSASKAEEDCAEVDILKDQLSKLQEKHLQLQGKGLNPLTFKELQSLEQQLYHALITVRERKERLLTNQLEESRLKEQRAELENETLRRQVQELRSFLPSFTHYVPSYIKCFAIDPKNALINHDSKCSLQNTDSDTTLQLGLPGEAHDRRTNEGERESPSSDSVTTNTSSETAERGDQSSLANSPPEAKRQRFSV

SEQ ID NO: 16244 - protein, 234 aa, Arabidopsis thaliana
MGRGKIVIRRIDNSTSRQVTFSKRRSGLLKKAKELSILCDAEVGVIIFSSTGKLYDYASNSSMKTIIERYNRVKEEQHQLLNHASEIKFWQREVASLQQQLQYLQECHRKLVGEELSGMNANDLQNLEDQLVTSLKGVRLKKDQLMTNEIRELNRKGQIIQKENHELQNIVDIMRKENIKLQKKVHGRTNAIEGNSSVDPISNGTTTYAPPQLQLIQLQPAPREKSIRLGLQLS

SEQ ID NO: 16245 - protein, 251 aa, Arabidopsis thaliana
MGRGRVELKRIENKINRQVTFAKRRNGLLKKAYELSVLCDAEVALIIFSNRGKLYEFCSSSSMLRTLERYQKCNYGAPEPNVPSREALAVELSSQQEYLKLKERYDALQRTQRNLLGEDLGPLSTKELESLERQLDSSLKQIRALRTQFMLDQLNDLQSKERMLTETNKTLRLRLADGYQMPLQLNPNQEEVDHYGRHHHQQQQHSQAFFQPLECEPILQIGYQGQQDGMGAGPSVNNYMLGWLPYDTNSI

SEQ ID NO: 16246 - protein, 227 aa, Arabidopsis thaliana
MGRGKIVIQKIDDSTSRQVTFSKRRKGLIKKAKELAILCDAEVCLIIFSNTDKLYDFASSSVKSTIERFNTAKMEEQELMNPASEVKFWQREAETLRQELHSLQENYRQLTGVELNGLSVKELQNIESQLEMSLRGIRMKREQILTNEIKELTRKRNLVHHENLELSRKVQRIHQENVELYKKAYGTSNTNGLGHHELVDAVYESHAQVRLQLSQPEQSHYKTSSNS

SEQ ID NO: 16247 - protein, 250 aa, Arabidopsis thaliana
MGRGRVELKRIENKINRQVTFAKRRNGLLKKAYELSVLCDAEVALIIFSNRGKLYEFCSSSSMLRTLERYQKCNYGAPEPNVPSREALAELSSQQEYLKLKERYDALQRTQRNLLGEDLGPLSTKELESLERQLDSSLKQIRALRTQFMLDQLNDLQSKERMLTETNKTLRLRLADGYQMPLQLNPNQEEVDHYGRHHHQQQQHSQAFFQPLECEPILQIGYQGQQDGMGAGPSVNNYMLGWLPYDTNSI

SEQ ID NO: 16248 - protein, 234 aa, Arabidopsis thaliana
MGRGKIVIRRIDNSTSRQVTFSKRRSGLLKKAKELSILCDAEVGVIIFSSTGKLYDYASNSSMKTIIERYNRVKEEQHQLLNHASEIKFWQREVASLQQQLQHLQECHRKLVGEELSGMNANDLQNLEDQLVTSLKGVRLKKDQLMTNEIRELNRKGQIIQKENHELQNIVDIMRKENIKLQKKVHGRTNVIEGNSSVDPISNGTTTYAPPQLQLIQLQPAPREKSIRLGLQLS

SEQ ID NO: 16249 - protein, 250 aa, Arabidopsis thaliana
MGRGRVELKRIENKINRQVTFAKRRNGLLKKAYELSVLCDAEVSLIVFSNRGKLYEFCSTSNMLKTLERYQKCSYGSIEVNNKPAKELENSYREYLKLKGRYENLQRQQRNLLGEDLGPLNSKELEQLERQLDGSLKQVRCIKTQYMLDQLSDLQGKEHILLDANRALSMKLEDMIGVRHHHVGGGWEGGDQQNIAYGHPQAHSQGLYQSLECDPTLQIGYSHPVCSEQMAVTVQGQSQQGNGYIPGWML

SEQ ID NO: 16250 - protein, 250 aa, Arabidopsis thaliana
MGRGRVELKRIENKINRQVTFAKRRNGLLKKAYELSVLCDAEVSLIVFSNRGKLYEFCSTSNMLKTLERYQKCSYGSIEVNNKPAKELENSYREYLKLKGRYENLQRQQRNLLGEDLGPLNSKELEQLERQLDGSLKQVRCIKTQYMLDQLSDLQGKEHILLDANRALSMKLEDMIGVRHHHIGGGWEGGDQQNIAYGHPQAHSQGLYQSLECDPTLQIGYSHPVCSEQMAVTVQGQSQQGNGYIPGWML

SEQ ID NO: 16251 - protein, 252 aa, Arabidopsis thaliana
MGRGKIEIKKIENQTARQVTFSKRRTGLIKKTRELSILCDAHIGLIVFSATGKLSEFCSEQNRMPQLIDRYLHTNGLRLPDHHDDQEQLHHEMELLRRETCNLELRLRPFHGHDLASIPPNELDGLERQLEHSVLKVRERKNELMQQQLENLSRKRRMLEEDNNNMYRWLHEHRAAMEFQQAGIDTKPGEYQQFIEQLQCYKPGEYQQFLEQQQQQPNSVLQLATLPSEIDPTYNLQLAQPNLQNDPTAQND

SEQ ID NO: 16252 - protein, 238 aa, Arabidopsis thaliana
MGRGKIEIKKIENQTARQVTFSKRRTGLIKKTRELSILCDAHIGLIVFSATGKLSEFCSEQNRMPQLIDRYLHTNGLRLPDHHDDQEQLHHEMELLRRETCNLELRLRPFHGHDLASIPPNELDGLERQLEHSVLKVRERKRRMLEEDNNNMYRWLHEHRAAMEFQQAGIDTKPGEYQQFIEQLQCYKPGEYQQFLEQQQQQPNSVLQLATLPSEIDPTYNLQLAQPNLQNDPTAQND

SEQ ID NO: 16253 - protein, 210 aa, Arabidopsis thaliana
MVRGKIEMKKIENATSRQVTFSKRRNGLLKKAYELSVLCDAQLSLIIFSQRGRLYEFSSSDMQKTIERYRKYTKDHETSNHDSQIHLQQLKQEASHMITKIELLEFHKRKLLGQGIASCSLEELQEIDSQLQRSLGKVRERKAQLFKEQLEKLKAKEKQLLEENVKLHQKNVINPWRGSSTDQQQEKYKVIDLNLEVETDLFIGLPNRNC

SEQ ID NO: 16254 - protein, 196 aa, Arabidopsis thaliana
MGRRKVEIKRIENKSSRQVTFSKRRKGLIEKARQLSILCESSIAVVAVSGSGKLYDSASGDNMSKIIDRYEIHHADELKALDLAEKIRNYLPHKELLEIVQSKLEESNVDNVSVDSLISMEEQLETALSVIRAKKTELMMEDMKSLQEREKLLIEENQILASQVGKKTFLVIEGDRGMSRENGSGNKVPETLSLLK

SEQ ID NO: 16255 - protein, 173 aa, Arabidopsis thaliana
MGRRKIEIKRIENKSSRQVTFSKRRNGLIDKARQLSILCESSVAVVVVSASGKLYDSSSGDDISKIIDRYEIQHADELRALDLEEKIQNYLPHKELLETVQSKLEEPNVDNVSVDSLISLEEQLETALSVSRARKAELMMEYIESLKEKEKLLREENQVLASQLSEKKGMSHR

SEQ ID NO: 16256 - protein, 196 aa, Arabidopsis thaliana
MGRRKIEIKRIENKSSRQVTFSKRRNGLIDKARQLSILCESSVAVVVVSASGKLYDSSSGDDISKIIDRYEIQHADELRALDLEEKIQNYLPHKELLETVQSKLEEPNVDNVSVDSLISLEEQLETALSVSRARKAELMMEYIESLKEKEKLLREENQVLASQMGKNTLLATDDERGMFPGSSSGNKIPETLPLLN

SEQ ID NO: 16257 - protein, 196 aa, Arabidopsis thaliana
MGRKKLEIKRIENKSSRQVTFSKRRNGLIEKARQLSVLCDASVALLVVSASGKLYSFSSGDNLVKILDRYGKQHADDLKALDHQSKALNYGSHYELLELVDSKLVGSNVKNVSIDALVQLEEHLETALSVTRAKKTELMLKLVENLKEKEKMLKEENQVLASQMENNHHVGAEAEMEMSPAGQISDNLPVTLPLLN

SEQ ID NO: 16258 - protein, 262 aa, Arabidopsis thaliana
EIKRIENANSRQVTFSKRRSGLLKKARELSVLCDAEVAVIVFSKSGKLFEYSSTGMKQTLSRYGNHQSSSASKAEEDCAEVDILKDQLSKLQEKHLQLQGKGLNPLTFKELQSLEQQLYHALITVRERKERLLTNQLEESRLKEQRAELENETLRRQVQELRSFLPSFTHYVPSYIKCFAIDPKNALINHDSKCSLQNTDSDTTLQLGLPGEAHDRRTNEGERESPSSDSVTTNTSSETAERGDQSSLANSPPEAKRQRFSV

SEQ ID NO: 16259 - protein, 205 aa, Arabidopsis thaliana
IQKIDDSTSRQVTFSKRRKGLIKKAKELAILCDAEVCLIIFSNTDKLYDFASSSVKSTIERFNTAKMEEQELMNPASEVKFWQREAETLRQELHSLQENYRQLTGVELNGLSVKELQNIESQLEMSLRGIRMKREQILTNEIKELTRKRNLVHHENLELSRKVQRIHQENVELYKKAYGTSNTNGLGHHELVDQFMNPMHRLGCS

SEQ ID NO: 16260 - protein, 211 aa, Arabidopsis thaliana
MARGKIQLKRIENPVHRQVTFCKRRTGLLKKAKELSVLCDAEIGVVIFSPQGKLFELATKGTMEGMIDKYMKCTGGGRGSSSATFTAQEQLQPPNLDPKDEINVLKQEIEMLQKGISYMFGGGDGAMNLEELLLLEKHLEYWISQIRSAKMDVMLQEIQSLRNKEGVLKNTNKYLLEKIEENNNSILDANFAVMETNYSYPLTMPSEIFQF

SEQ ID NO: 16261 - protein, 211 aa, Arabidopsis thaliana
MARGKIQLKRIENPVHRQVTFCKRRTGLLKKAKELSVLCDAEIGVVIFSPQGKLFELATKGTMEGMIDKYMKCTGGGRGSSSATFTAQEQLQPPNLDPKDEINVLKQEIEMLQKGISYMFGGGDGAMNLEELLLLEKHLEYWISQIRSAKMDVMLQEIQSLRNKEGVLKNTNKYLLDKIEENNNSILDANFAVMETNYSYPLTMPSEIFQF

SEQ ID NO: 16262 - protein, 198 aa, Arabidopsis thaliana
MGRRRVEIKRIENKSSRQVTFCKRRNGLMEKARQLSILCGSSVALFIVSSTGKLYNSSSGDSMAKIISRFKIQQADDPETLDLEDKTQDYLSHKELLEIVQRKIEEAKGDNVSIESLISMEEQLKSALSVIRARKTELLMELVKNLQDKEKLLKEKNKVLASEVGKLKKILETGDERAVMSPENSSGHSPPETLPLLK

SEQ ID NO: 16263 - protein, 184 aa, Arabidopsis thaliana
MGRRRVEIKRIENKSSRQVTFCKRRNGLMEKARQLSILCGSSVALFIVSSTGKLYNSSSGDSMAKIISRFKIQQADDPETLDLEDKTQDYLSHKELLEIVQRKIEEAKGDNVSIESLISMEEQLKSALSVIRARKTELLMELVKNLQDKVGKLKKILETGDERAVMSPENSSGHSPPETLPLLK

SEQ ID NO: 16264 - protein, 185 aa, Arabidopsis thaliana
MGRRKVEIKRIENKSSRQVTFSKRRKGLIEKARQLSILCESSIAVVAVSGSGKLYDSASGDNMSKIIDRYEIHHADELKALDLAEKIRNYLPHKELLEIVQSVDSLISMEEQLETALSVIRAKKTELMMEDMKSLQEREKLLIEENQILASQVGKKTFLVIEGDRGMSRENGSGNKVPETLSLLK

SEQ ID NO: 16265 - protein, 85 aa, Arabidopsis thaliana
MGRGRVELKRIENKINRQVTFSKRRTGLLKKAQEISVLCDAEVSLIVFSHKGKLFEYSSESCIPIILIKFRKKLFIFSHLIMVYS

SEQ ID NO: 16266 - protein, 136 aa, Arabidopsis thaliana
MGRRKVEIKRIENKSSRQVTFCKRRNGLMEKARQLSILCESSVALIIISATGRLYSFSSGDSMAKILSRYELEQADDLKTLDLEEKTLNYLSHKELLETIQCKIEEAKSDNVSIDCLKSLEEQLKTALSVTRARKN

SEQ ID NO: 16267 - protein, 200 aa, Arabidopsis thaliana
MGRRKVEIKRIENKSSRQVTFCKRRNGLMEKARQLSILCESSVALIIISATGRLYSFSSGDSMAKILSRYELEQADDLKTLDLEEKTLNYLSHKELLETIQCKIEEAKSDNVSIDCLKSLEEQLKTALSVTRARKTELMMELVKTHQEKEKLLREENQSLTNQLIKMGKMKKSVEAEDARAMSPESSSDNKPPETLLLLK

SEQ ID NO: 16268 - protein, 68 aa, Arabidopsis thaliana
MGRGRVQLRRIENKIRRQVTFSKRRTGLVKKAQEISVLCDAEVALIVFSPKGKLFEYSAGSRFESFLS

SEQ ID NO: 16269 - protein, 192 aa, Arabidopsis thaliana
MGRRKIEIKRIENKSSRQVTFSKRRNGLIDKARQLSILCESSVAVVVVSASGKLYDSSSGDEIEALFKPEKPQCFELDLEEKIQNYLPHKELLETVQSKLEEPNVDNVSVDSLISLEEQLETALSVSRARKAELMMEYIESLKEKEKLLREENQVLASQMGKNTLLATDDERGMFPGSSSGNKIPETLPLLN

SEQ ID NO: 16270 - protein, 197 aa, Arabidopsis thaliana
MGRRKIEIKRIENKSSRQVTFSKRRNGLIDKARQLSILCESSVAVVVVSASGKLYDSSSVIVSTGKYKNFTIFLTIPFLHVQDLEEKIQNYLPHKELLETVQSKLEEPNVDNVSVDSLISLEEQLETALSVSRARKAELMMEYIESLKEKEKLLREENQVLASQMGKNTLLATDDERGMFPGSSSGNKIPETLPLLN

SEQ ID NO: 16271 - protein, 231 aa, Arabidopsis thaliana
MGRRKVEIKRIENKSSRQVTFCKRRNGLMEKARQLSILCESSVALIIISATGRLYSFSSGDSMAKILSRYELEQADDLKTLCLNIVERDQHRITLFFTVGIALESPRRGSKLDLEEKTLNYLSHKELLETIQCKIEEAKSDNVSIDCLKSLEEQLKTALSVTRARKTELMMELVKTHQEKEKLLREENQSLTNQLIKMGKMKKSVEAEDARAMSPESSSDNKPPETLLLLK

SEQ ID NO: 16272 - protein, 204 aa, Arabidopsis thaliana
MCRKSEAMGRRRVEIKRIENKSSRQVTFCKRRNGLMEKARQLSILCGSSVALFIVSSTGKLYNSSSGDRVVYVSWKRKNFTIFLSWQDLEDKTQDYLSHKELLEIVQRKIEEAKGDNVSIESLISMEEQLKSALSVIRARKTELLMELVKNLQDKEKLLKEKNKVLASEVGKLKKILETGDERAVMSPENSSGHSPPETLPLLK

SEQ ID NO: 16273 - protein, 217 aa, Arabidopsis thaliana
RRNGLLKKAKELAILCDAEVGVIIFSSTGRLYDFSSSSMKSVIERYSDAKGETSSENDPASEIQFWQKEAAILKRQLHNLQENHRQMMGEELSGLSVEALQNLENQLELSLRGVRMKKDQMLIEEIQVLNREGNLVHQENLDLHKKVNLMHQQNMELHEKVSEVEGVKIANKNSLLTNGLDMRDTSNEHVHLQLSQPQHDHETHSKAIQLNYFSFIA

SEQ ID NO: 16274 - protein, 335 aa, Arabidopsis thaliana
MGRVKLEIKRIENTTNRQVTFSKRRNGLIKKAYELSILCDIDIALIMFSPSDRLSLFSGKTRIEDVFSRFINLPKQERESALYFPDQNRRPDIQNKECLLRILQQLKTENDIALQVTNPAAINSDVEELEHEVCRLQQQLQMAEEELRRYEPDPIRFTTMEEYEVSEKQLLDTLTHVVQRRDHLMSNHLSSYEASTMQPNIGGPFVNDVVEGWLPENGTNQTHLFDASAHSNQLRELSSAMYEPLLQGSSSSSNQNNMSECHVTNHNGEMFPEWAQAYSSSALFASMQQQHEGVGPSIEEMMPAQQSDIPGVTAETQVDHEVSDYETKVPQLSSQ

SEQ ID NO: 16275 - protein, 127 aa, Arabidopsis thaliana
MGRKKVEIKRIENKSSRQVTFSKRRNGLIEKARQLSILCESSIAVLVVSGSGKLYKSASGDNMSKIIDRYEIHHADELEALDLAEKTRNYLPLKELLEIVQRLAQRHFYLPLLLMKNTFFFFSFGEL

SEQ ID NO: 16276 - protein, 223 aa, Arabidopsis thaliana
MGRRKIEIKRIENKSSRQVTFSKRRNGLIDKARQLSILCESSVAVVVVSASGKLYDSSSGDDISKIIDRYEIQHADELRALDLEEKIQNYLPHKELLETVQRLAVRHIFLPSSSDKKNVFFLLSTCEYSKLEEPNVDNVSVDSLISLEEQLETALSVSRARKAELMMEYIESLKEKEKLLREENQVLASQMGKNTLLATDDERGMFPGSSSGNKIPETLPLLN

SEQ ID NO: 16277 - protein, 145 aa, Arabidopsis thaliana
MGRKKVEIKRIENKSSRQVTFSKRRNGLIEKARQLSILCESSIAVLVVSGSGKLYKSASGDNMSKIIDRYEIHHADELEALDLAEKTRNYLPLKELLEIVQRLAQRHFYLPLLLMKNTFFFLFFWRIMNTASLKNQMSIMQVWIL

SEQ ID NO: 16278 - protein, 224 aa, Brassica napus
MARGKIQIKRIENQTNRQVTYSKRRNGLFKKAHELTVLCDARVSIIMFSSSNKLHEFISPNTTTKEIIDLYQTVSDVDVWSAHYERMQETKRKLLETNRNLRTQIKQRLGECLDELDIQELRSLEEEMENTFKLVRERKFKSLGNQIETTKKKNKSQQDIQKNLIHELELRAEDPHYGLVDNGGDYDSVLGYQLRFHQNHHHHYPNHALHAASASDIITFHLLE

SEQ ID NO: 16279 - protein, 252 aa, Brassica napus
MAYQMELGGESSPQRKAGRGKIEIKRIENTTNRQVTFCKRRNGLLKKAYELSVLCDAEVALIVFSSRGRLYEYSNNSVKGTIERYKKAISDNSNTGSVAEINAQYYQQESAKLRQQIISIQNSNRQLMGETIGSMSPKELRNLEGRLDRSVNRIRSKKNELLFAEIDYMQKREVDLHNDNQLLRAKIAENERNNPSMSLMPGGSNYEQIMPPPQTQPQPFDSRNYFQVAALQPNNHHYSSAGREDQTALQLV

SEQ ID NO: 16280 - protein, 249 aa, Brassica napus
MDEGGSSHDAESSKKIGRGKIEIKRIENTTNRQVTFCKRRNGLLKKAYELSVLCDAEVALVIFSTRGLLYEYASNSVKGTIERYKKACSDAVNPPTVTEANTKHYQQEASKLRRQIRDIQNSNRHIVGESLGSLNFKELKNLEGRLEKGISRVRSKKSELLVAEIEYMQKREMELQHVNMYLRAKIEQGARLNPEQHGSGVIQGTAVYESGLSSSHDQSQHYNRNYIPVNLLEPNQQFSGQDQPPLQLV

SEQ ID NO: 16281 - protein, 197 aa, Brassica napus
MGRKKLEIKRIENKSSRQVTFSKRRNGLIEKARQLSVLCDASVALLVVSASGKLYSFSSGDNLVKILDRYGKQHDDDLKALDRQSKALDCGSHHELLELVESKLEESNVDNVSVGSLVQLEEHLENALSVTRARKTELMLKLVENLKEKEKLLEEENHVLASQMEKSNLVRAEADNMDVSPGQISDINLPVTLPLLN

SEQ ID NO: 16282 - protein, 196 aa, Brassica napus
MGRKKLEIKRIENKSSRQVTFSKRRNGLIEKARQLSVLCDASVALLVVSASGKLYNFSAGDNLVKILDRYGKQHADDLKALDLQSKAPKYGSHHELLELVESKLVESNSDVSVDSLVQLEDHLETALSVTRARKTELMLKLVDSLKEKEKLLKEENQGLASQMEKNNLAGAEADKMEMSPGQISDINRPVTLRLLY

SEQ ID NO: 16283 - protein, 196 aa, Brassica napus
MGRKKLEIKRIENKSSRQVTFSKRRNGLIEKARQLSVLCDASVALLVVSASGKLYNFSAGDDLVKIVDRYGKQHADDRKALDLQSEAPKYGSHHELLELVESKLVESNSDVSVDSLVQLENHLETALSVTRARKTELLLKLVDSLKEKEKLLKEENQGLASQMEKNNLAGAEADKMEVSPGQISDINCPVTLPLLY

SEQ ID NO: 16284 - protein, 196 aa, Brassica napus
MGRKKLEIKRIEKNSSRQVTFCKRRNGLIEKARQLSVLCEASVGLLVVSASDKLYSFSSGDRLEKILDRYGKKHADDLNALDLQSKSLNYSSHHELLELVESKLVESIDDVSVDSLVELEDHLETALSVTRARKAELMLKLVESLKEKENLLKEENQVLASQIEKKNLEGAEADNIEMSSGQISDINLPVTLPLLN

SEQ ID NO: 16285 - protein, 197 aa, Brassica napus
MGRKKLEIKRIENKSSRQVTFSKRRSGLIEKARQLSVLCDASVALLVVSSSGKLYSFSAGDNLVRILDRYGKQHADDLKALNLQSKALSYGSHNELLELVDSKLVESNVGGVSVDTLVQLEGVLENALSLTRARKTELMLKLVDSLKEKEKLLKEENQALAGQKEKKNLAGAEADNMEMSPGQISDINLPVTLPLLN

SEQ ID NO: 16286 - protein, 256 aa, Brassica oleracea
MGRGRVQLKRIENKINRQVTFSKRRAGLFKKAHEISVLCDAEVALVVFSHKGKLFEYSTDPCMEKILERYERYSYAERQLIAPESDVNTNWSMEYNRLKAKIELLERNQRHYLGEDLQAMSPKELQNLEQQLDTALKHIRSRKNQLMYESINELQRKEKAIQEQNSMLSKQIKERENVLRAQQEQWDEQNHGHNMPPPPPPQQHQIQHPYMLSHQPSPFLNMGGLYQEEDQMAMRRNDLDLSLEPVYNCNLGSFAA

SEQ ID NO: 16287 - protein, 256 aa, Brassica oleracea
MGRGRVQLKRIENKINRQVTFSKRRAGLFKKAHEISVLCDAEVALVVFSHKGKLFEYSTDSCMEKILERYERYSYAERQLIAPESDVNTNWSMEYNRLKAKIELLERNQRHYLGEDLQAMSPKELQNLEQQLDTALKHIRSRKNQLMYDSVNELQRKEKAIQEQNSMLSKQIKEREKVLMAQQEQWDQQNHGQNMPSPPPPQQHQIQHPYMLSHQPSPFLNMGGLYQEEDPMAMRRNDLDLSLEPVYNCNLGCFAA

SEQ ID NO: 16288 - protein, 232 aa, Brassica oleracea
MARGKIQIKRIENQTNRQVTYSKRRNGLFKKAHELTVLCDARVSIIMFSSSNKLHEFISPNTTTKEIIDLYQTVSDVDVWSAHYERMQETKRKLLETNRKLRTQIKQRLGECLDELDIQELRSLEEEMENTFKLVRERKFKSLGNQIETTKKKNKSQQDIQKNLIHELELRAEDPHYGLVDNGGDYDSVLGYQIEGSRAYALRYHQNHHHHYPNHALHAPSASDIITFHLLE

SEQ ID NO: 16289 - protein, 251 aa, Brassica oleracea
MGRGRVEMKRIENKINRQVTFSKRRAGLLKKAHEISILCDAEVSLIVFSHKGKLFEYSSESCMEKVLEHYERYSYAEKQLKVPDSHVNAQTNWSVEYSRLKAKIELLERNQRHYLGEDLESISIKELQNLEQQLDTSLKHIRSRKNQLMHESLNHLQRKEKEILEENSMLAKQIRERESILRTHQNQSEQQNRSHHVAPQPQPQLNPYMASSPFLNMGGMYQGEYPTAVRRNRLDLTLEPIYNCNLGYFAA

SEQ ID NO: 16290 - protein, 256 aa, Brassica oleracea
MGRGRVQLKRIENKINRQVTFSKRRAGLMKKAHEISVLCDAEVALVVFSHKGKLFEYSTDSCMEKILERYERYSYAERQLIAPESDSNTNWSMEYNRLKAKIELLERNQRHYLGEDLQAMSPKELQNLEQQLDTALKHIRSRKNQLMYDSINELQRKEKAIQEQNSMLSKQIKERENVLRAQQEQWDEQNHGHNMPPPPPPQQHQIQHPYMLSHQPSPFLNMGGLYQEEDQMAMRRNDLDLSLEPVYNCNLGCFAA

SEQ ID NO: 16291 - protein, 241 aa, Brassica oleracea var. botrytis
MGRGRVQLKRIENKINRQVTFSKRRSGLLKKAHEISVLCDAEVALVIFSSKGKLFEYSTDSCMERILERYDRYLYSDKQLVGREISQSENWVLEHAKLKARVEVLEKNKRNFMGEDLDSLSLKELQSLEHQLHAAIKSIRSRKNQAMFESISALQKKDKALQDHNNALLKKIKEREKNTVQQGGQLIQCSNNASILQPQYCLTSSRDGFVGRVGEENGVASLLAEPNSLLPAWMLRPTTKE

SEQ ID NO: 16292 - protein, 242 aa, Brassica oleracea var. botrytis
MGRGRVQLKRIENKINRQVTFSKRRSGLLKKAHEISVLCDAEVALVVFSSKGKLFEYSTDSSMERILERYDRYLYSDKQLVGRDISQSENWVLEHAKLKARVEVLEKNKRNFMGEDLDSLSLKELQSLEHQLDAAIKSIRSRKNQAMFESISALQKKDKALQDHNNTLLKKIKEKEKEKNTGQQEGQLIQCSNNSSVLQPQYCVTSSRDGLVERVGGENGGTSSLIEPNSLLPAWMLRPTTK

SEQ ID NO: 16293 - protein, 243 aa, Brassica oleracea var. botrytis
MGRGRVQLKRIENKINRQVTFSKRRSGLLKKAHEISVLCDAEVALVVFSSKDKLFEYSTDSSMERILERYDRYLYSDKQLVGRDISQSENWVLEHAKLKARVEVLEKNKRNFMGEDLDSLSLKELQSLEHQLDAAIKSIRSRKNQAMFESISALQKKDKALQDHNNTLLKKIKEKEKEKNTGQQEGQLIQCSNNSSVLQPQYCVTSSRDGLVERVGGENGGASSLIGPNSLLPAWMLRPATNE

SEQ ID NO: 16294 - protein, 239 aa, Brassica oleracea var. botrytis
RGRVQLKRIENKINRQVTFSKRRSGLLKKAHEISVLCDAEVALIVFSSKGKLFEYSTDSCMESILERYDRYLYSDKQLVGRDISQIENWVLEHAKLKARVEVLEKNKRNFMGEELESLSLKDLQSLEHQLDAAIKSIRSRKNQAMFESISALQKKDKALQDHNNTLLKKIKEREKKTGHQEGQLNHCSNNSSIVQPQYCLTSSRDGFVGRVGGENGGASSLTEPNSLLPAWMLRPTTNE

SEQ ID NO: 16295 - protein, 224 aa, Brassica oleracea var. botrytis
MARGKIQIKRIENQTNRQVTYSKRRNGLFKKAHELTVLCDARVSIIMFSSSNKLHEFISPNTTTKEILDLYQTVSDVDVWSAHYERMQETKRKLLETNRNLRTQIKQRLGECLDEFDIQELLSLEEEMENTFKLVRERKFKSLGNQIETTKKKNKSQQDIQKNLIHELELRAEDPHYGLVDNGGDYDSVLGYQLRFHQNHHHHYPNHALHEASASDIITFHLLE

SEQ ID NO: 16296 - protein, 252 aa, Brassica oleracea var. botrytis
MGRGRVEMKRIENKINRQVTFSKRRNGLLKKAYELSVLCDAEVALIVFSSRGKLYEFGSVGVERTIERYHRCYNCSVTNNRPEESKQNWCQEVAKLKAKYESLVRTNRHLLGEDIGEMGVKQLQALERQLEAALTATRQRKTQVMMEEMEDLRKKERQLGDINKQLKIKFEAGGHAFKSFQDFWPNSAASMAGDPNNSKFPVQPSHPDSVDCNTEPFLQIGFQQHYYVQGEGSSVPKSNVACETNFVQDWFL

SEQ ID NO: 16297 - protein, 259 aa, Brassica oleracea var. botrytis
MGRGRVEMKRIENKINRQVTFSKRRNGLLKKAYELSVLCDAEVALIVFSSRGKLYEFGSVGVERTIERYHRCYNCSVTNNRPEESKQNWCQEVAKLKAKYESLVRTNRHLLGEDIGEMGVKQLQALERQLEAALTATRQRKTQVMMEEMEDLRKKERQLGDINKQLKIKFEAGGHAFKSFQDFWPNSAASMAGDPNNSKFPVQPSHPDSVDCNTEPFLQIGLVLVYIRFQQHYYVQGEGSSVPKSNVACETNFVQDWFL

SEQ ID NO: 16298 - protein, 224 aa, Brassica oleracea var. botrytis
MARGKIQIKRIENQTTGQVTYSKRRNGLFKKAHELTVLCDARVSIIMFSSSNKLHEFISPNTTTKEILDLYQTVSDVDVWNAHYERMQETKRKLLETNRNLRTQIKQRLGECLDEFDIQELCSLEEEMENTFKLVRERKFKSLGNQIETTKKKTRASKTYKKNLIHELELRAEDPHYGLVDNGGDYDSVLGYQLRFHQNHHHHYPNHALHEASASDIITFHLLE

SEQ ID NO: 16299 - protein, 256 aa, Brassica oleracea var. botrytis
MGRGKVELKRIENKINRQVTFAKRRNGLLKKAYELSVLCDAEIALLIFSNRGKLYEFCSNPSGMAKMVEKYRKHSYATMDPNQSAKDLQERYQDYLNLKSRVEVLQHSQRHLLGEEIAGIGVDELEQLECQVDTSLRQIRSTKARSMLDQLSDLKSKEEMLLETNRDLKRKLEESDAALNQTLWGASSSAEHSQQQQEGMTSYHANPLSQEVGFFRPLQGNVALQMSHYNPGVPNASNSATTSQNVINGFFPGWMV

SEQ ID NO: 16300 - protein, 250 aa, Brassica oleracea var. botrytis
MGRGRVELKRIENKINRQVTFAKRRNGLLKKAYELSVLCDAEVALIIFSNRGKLYEFCSSSNMIKTLERYQKCSYGSIEVNNKPAKELENSYREYLKLKGRYEGLQRQQRNLLGEDLGPLNSKELEQIERQLDGSLKQVRSIKTQYMLDQLSDLQTKEQMLLETNRALAMKLDDMIGVRSHHMGGGGGGWEGNEHNVSYAHHQAQSQGLFQPLECNPTLQMGYDNPVCSEQITATTQAQAQPGYIPDWML

SEQ ID NO: 16301 - protein, 150 aa, Brassica oleracea var. botrytis
MGRGRVEMKRIENKINRQVTFSKRRAGLLKKAHEISILCDAEVSLIVFSHKGKLFEYSSESCMEKVLERYERYSYAEKQLKAPDSHVNAQTNWSMEYSRLKAKIELWERNQRHYLGEDLESISIKELQNLEQQLDTSLKHIRSRKNQLMH

SEQ ID NO: 16302 - protein, 241 aa, Sinapis alba
MGRGRVQLKRIENKINRQVTFSKRRSGLLKKAHEISVLCDAEVALVIFSSKGKLFEYSTDSCMEKILERYDRYLYSDKQLVGRDISQSENWVLEHAKLKARVEVLEKNKRNFMGEDLDSLSLKELQSLEHQLHAAIKSIRSRKNQAMFESISALQKKDKVLQDHNNALLKKIKEREKNTVHQEVQLIQCSNNSSILQPQYCLTSSRDGFVGRVEGENEGASSLAEPNSLLPAWMLRPTTNE

SEQ ID NO: 16303 - protein, 254 aa, Sinapis alba
MGRGRVQLKRIENKINRQVTFSKRRAGLLKKAHEISVLCDAEVALVVFSHKGKLFEYSTDSCMEKILERYERYSYAERQLIAPESDVNTNWSMEYNRLKAKIELLERNQRHYLGEDLQAMSSKELQNLEQQLDTALKHIRSRKNQLMHDSINELQRKEKAIQEQNSMLSKQIKEREKILRAQQEQWDQQNHGHNMPPPPPPQQIQHPYMLSHQPSPFLNMGGLYQEEDPMEMRRNDLDLSLEPVYNCNLGCFAA

SEQ ID NO: 16304 - protein, 254 aa, Sinapis alba
MGRGRVQLKRIENKINRQVTFSKRRAGLMKKAHEISVLCDAEVALVVFSHKGKLFEYSTDSCMEKILERYERYSYAERQLIAPESDSNTNWSMEYNRLKAKIELLERNQRHYLGEDLQAMSPKELQNLEQQLDTALKHIRSRKNQLMYDSINELQRKEKAIQEQNSMLSKQIKEREKVLRAQQEQWDEQNHGHNMPPPPPLQQQIQHPYMLSHQPSPFLNMGGLYQEDQIAMRRNDLDLSLEPVYNCNLGCFAA

SEQ ID NO: 16305 - protein, 213 aa, Sinapis alba
MVRGKTQMKRIENATSRQVTFSKRRNGLLKKAFELSVLCDAEVSLIIFSPKGKLYEFASSNMQDTVDRYLRHTKDRVSSKPVSEENMQHFKHEAANMMKKIEQLEASKRKLLGEGIGSCSIEELQQIEQQLEKSVKCVRARKTQVFKEQIEQLKQKEKALAAENEKLAEKWGSHEIEVWSNKKQESGRGDEESSPSSEVETQLFIGLPCSSRK

SEQ ID NO: 16306 - protein, 254 aa, Sinapis alba
MGRGRVELKRIENKINRQVTFAKRRNGLLKKAYELSVLCDAEVALIIFSNRGKLYEFCSSSSMIRTLERYQKCNYGPPEPNVPSREALAVELSSQQEYLKLKERYDALQRTQRNLLGEDLGPLSTKELELLERQLDSSLKQIRALRTQFMLDQLNDLQSKERMLNETNKTLRLRLADGYQMPLQLNPNQEDHHVDYGRHDQQQQQNSHHAFFQPLECEPILQMGYQGQQDHGMEAGPSENNYMLGWLPYDTNSI

SEQ ID NO: 16307 - protein, 249 aa, Fragaria x ananassa
MAYENKPNTDLDADAQRRLGRGKIEIKRIENTTNRQVTFCKRRNGLLKKAYELSVLCDAEVALIVFSNRGRLYEYSNNSSVRETIERYKKACADTSTNGSASEATTQYYQQEAAKLHNQINALQNINRGYMAEGLSNKNIKELKGMERKLERAITRIRSKKNELLFAEIEYMQKRELDLHNNNQLLRAKIAENERQQQSIIAITGGHGSYEIVQPTQPFHEARNYFQVNALQPNIHQYSCHDQVSLQLV

SEQ ID NO: 16308 - protein, 245 aa, Malus x domestica
MAYESKSLSLDSPQRKLGRGKIEIKRIENTTNRQVTFCKRRNGLLKKAYELSVLCDAEVALIVFSNRGRLYEYANNSVKGTIERYKKASADSSNTGSVSEASTQYYQQEAAKLRARIVKLQNDNRNMMGDALNSMSVKDLKSLENKLEKAISRIRSKKNELLFAEIEYMQKRELDLHNNNQLLRAKIAENERASRTLNVMAGGGTSSYDILQSQPYDSRNYFQVNALQPNHQYNPRHDQISLQLV

SEQ ID NO: 16309 - protein, 215 aa, Malus x domestica
MGRGKVEIKRIENSSNRQVTYSKRRNGIIKKAKEITVLCDAKVSLIIYSSSGKMVEYCSPSTTLTEILDKYHGQSGKKLWDAKHENLSNEVDRVKKDNDSMQVELRHLKGEDITSLNHVELMALEEALENGLTSIRDKQSKFVDMMRDNGKALEDENKRLTYELQKQQEMKIKENVRNMENGYHQRQLGNYNNNQQQIPFAFRVQPIQPNLQERI

SEQ ID NO: 16310 - protein, 215 aa, Malus x domestica
MGRGKVEIKRIENSSNRQVTYSKRRNGIIKKAKEITVLCDAKVSLIIYSSSGKMVEYCSPSTTLTEILDKYHGQSGKKLWDAKHENLSNEVDRVKKDNDSMQVELRHLKGEDITSLNHVELMALEEALENGLTSIRDKQSKFVDMMRDNGKALEDENKRLTYELQKQQEMKIEENVRNMENGYHQRQLGNYNNNQQQIPFAFRVQPIQPNLQERI

SEQ ID NO: 16311 - protein, 235 aa, Malus x domestica
MGRGKVELKRIENKINRQVTFAKRRNGLLKKAYELSVLCDAEVALIVFSTSGKLYEFCSGPSIAKTLERHQRCTYGELGASQSAEDEQSRYQEYLKLKTKVEALQRTQRHLLGEDLVHLGTKELQQLENQLDVSMKKIRSTKTQFMHVQISELQRKEEMLLEANTGLRRKLEEITAGHQRSWNGNHQAAQLEGFPEHLQYNNALQIGTPVVTNDEANVATSSAQNGTGFFPGWML

SEQ ID NO: 16312 - protein, 248 aa, Malus x domestica
MGRGRVELKRIENKINRQVTFAKRRNGLLKKAYELSVLCDAEVALIIFSSRGKLYEFCSSFSMMKTLEKYQSCSYGSLEANLPANETQNSYQDYLMLKARVEVLQQSQRNLLGEDLSHLNTKELEHLEHQLETSLKQIRSRKTQFILDQLSDLQNREQMLVEANKALKRKLEETSVHAPEGMAWEAAGHGPNNIQQTRLPSHSEAFFHPLEGNNSSSQIGYTHMGSDNEMNVGNPGQYVNGYIPGWML

SEQ ID NO: 16313 - protein, 248 aa, Malus x domestica
MGRGRVELKRIENKINRQVTFAKRRNGLLKKAYELSVLCDAEVALIIFSSRGKLYEFCSSFSMMKTLEKYQSCSYGSLEANLPANETQNSYQDYLMLKARVEVLQQSQRNLLGEDLSHLNTKELEHLEHQLETSLKQIRSRKTQFILDQLSDLQNREQMLVEANKALKRKLEETSVQAPEGMAWEAAGHGPNNIQQTRLPSHSEAFFHPLEGNNSSSQIGYTHMGSDNEMNVGNPGQYVNGYIPGWML

SEQ ID NO: 16314 - protein, 239 aa, Malus x domestica
MGRGRVQLKRIENKINRQVTFSKRRTGLLKKAHEISVLCDAQVALIVFSNKGKLFEYATDSCMEQILERYERYSYAERQLVEPDFESQGNWTFEYSRLKAKAEVLQRNHRHYLGEDLDSLTLKEIQNLEQQLDTALKQIRLRKNQLMNESISELQRKRKAIQEENNLLAKKIKEKEKAAAQPQVQNWEQQNHGLDLLPQPLPCLNNGGTQQDEFLQVRRNQLDLTLEPLYECHLGCFAA

SEQ ID NO: 16315 - protein, 243 aa, Malus x domestica
MGRGRVELKRIENKINRQVTFSKRRNGLLKKAYELSVLCDAEVGLIIFSSRGKLYEFASAGMSKTLERYQRCSFTPPENSIERETQSWYQEVTKLKAKYESLQRTQRHLLGEDLGPLSVKELQNLEKQLEGALAQTRQRKTQLMIEQMEDLRKKERHLGDLNKQLRVKLEAEGQNLNVIQNMWSSDAAAGSSNFSLHSSQTNPMDCTPEPVIQMGYHQYHPAEGSSIPRSLTGETNFIQGWVL

SEQ ID NO: 16316 - protein, 255 aa, Malus x domestica
MGRGRVQLKRIENKINRQVTFSKRRSGLMKKAHEISVLCDAEVALIIFSTKGKLFEYSNDSCMERILERYERYSYTERQLLANDNESTGSWTLEHAKLKARVEVLQRNQRHYMGEDLQSLSLKELQNLEQQLDSALKHIRSRKNQVMYESISELQKKDKALQEQNNLLAKKVKEKENAVAQQAQLEHVQEQRLNSSSSLLPRALQSLNFGSGSNYQAIRSSEGIPGDNQQYGDETPTPHRPNMLLPAWIVRHLNE

SEQ ID NO: 16317 - protein, 232 aa, Malus x domestica
MGRGKIEIKLIENQTNRQVTYSKRRNGIFKKAQELTVLCDAKVSLIMLSNTNKMHEYISPTTTTKSMYDDYQKTMGIDLWRTHEESMKDTLWKLKEINNKLRREIRQRLGHDLNGLSFDELASLDDEMQSSLDAIRQRKYHVIKTQTETTKKKVKNLEQRRGNMLHGYFDQEAAGEDPQYGYEDNEGDYESALALSNGANNLYTFHLHHRNLHHGGSSLGSSITHLHDLRLA

SEQ ID NO: 16318 - protein, 246 aa, Malus x domestica
MGRGRVELKRIENKINRQVTFAKRRNGLLKKAYELSVLCDAEVALIIFSNRGKLYEFCSSSSILKTLDRYQKCSYGAVDQVNRPAKELESSYREYMKLKGRYESLQRTQRNLLGEDLGPLNTKELEQLERQLEGSLKQVRSTKTQYMLDQLSDLQNKEQLLIEANRDLTMKLDEISSRNQLRQSWEGGDQGMAYATQHHHAQSQGFFQPLDCNPTLQMGYSAVGSEQMSATTNAQQVNCFIPGWML

SEQ ID NO: 16319 - protein, 237 aa, Malus x domestica
MGRGKIEIKLIENQTNRQVTYSKRRNGIFKKAQELTVLCDAKVSLIMLSNTSKMHEYISPTTTTKSMYDDYQKTMGIDLWRTHYESMKDTLWKLKEINNKLRREIRQRLGHDLNGLSYDDLRSLEDKMQSSLDAIRERKYHVIKTQTETTKKKVKNLEERRGNMLHGYEAASENPQYCYVDNEGDYESALVLANGANNLYTFQLHRNSDQLHHPNLHHHRGSSLGSSITHLHDLRLA

SEQ ID NO: 16320 - protein, 245 aa, Malus x domestica
GKVELKRIENKSNRQVTFSKRRNGLLKKAFELSVLCDAEVALIIFSGRGKLYEFSSSLSMMKTLERYQRCSYSSLDANRPANETQNSYQEYLQLETRVEALQQSQRNLLGEDLATLNTKKLEELEHQLETSLNKIRSTKTQFMLDQLSDLQNREQMLVEANKALRRKLEETSVQAPQFMAWEAAGDGHNNIQQTWLPSNSEAFFHPFGGNNSTSQIGYAHLGSHNGMDVGNPGQHVNGYIPGWML

SEQ ID NO: 16321 - protein, 246 aa, Malus x domestica
MGRGRVELKRIENKINRQVTFAKRRNGLLKKAYELSVLCDAEVALIIFSNRGKLYEFCSSSSMLKTLDRYQKCSYGAVDQVNRPAKELESSYREYMKLKGRYESLQRTQRNLLGEDLGPLNTKELEQLERQLEGSLKQVRSTKTQYMLDQLSDLQNKEQLLIEANRDLTMKLDEISSRNQLRQSWEGGDQGMAYATQHHHAQSQGFFQPLDCNPTLQMGYSAVGSEQMSATTNAQQVNCFIPGWML

SEQ ID NO: 16322 - protein, 242 aa, Malus x domestica
RVELKRIENKINRQVTFAKRRNGLLKKAYELSVLCDAEVALIVFSNRGKLYEFCSSPSILQTVDRYQKCSYGAVDQVNIPAKELESSYREYMKLKGRCESLQRTQRNLLGEELGPLNTKELEQLERQLEASLKQVRSTKTQYMLDQLSALQNKEQLLIEANRDLTMKLDEIGSRNQLRQSWEGGDQGMAYGTQHHHAQSQGFFQPLDCNPTLQIGYPAEGSEQMGATTHAQQVNCFIPGWML

SEQ ID NO: 16323 - protein, 242 aa, Malus x domestica
MEFANQAPESSTQKKLGRGKIEIKRIENTTNRQVTFCKRRNGLLKKAYELSVLCDAEVALIVFSTRGRLYEYANNSVRATIDRYKKACADSTDGGSVSEANTQFYQQEASKLRRQIREIQNSNRHILGESLSTLKVKELKNLEGRLEKGISRIRSKKNEILFSEIEFMQKRETELQHHNNFLRAKIAESEREQQQQQTHMIPGTSYDPSMPSNSYDRNFFPVILESNNNHYPRQGQTALQLV

SEQ ID NO: 16324 - protein, 207 aa, Malus x domestica
MGRGKIEIKRIENTTNRQVTFCKRRNGLLKKAYELSILCDAEVALIVFSTRGRLYEYSNNNSIRNTIERYKKACSDSTGSSSVTEINAQNSNRHLMGDALSTLTVKELKQVENRLERGITRIRSKKHELLLAEIEYFQKKEIELENENVYFRTKVSEVERLQQANMVSGSEMNAIQALASRHFFSQNMIEGGEATFPQQDKKNLHLG

SEQ ID NO: 16325 - protein, 190 aa, Malus x domestica
NGIIKKAKEITVLCDAKVSLIIYSSSGKMVEYCSPSTTLTEILDKYHGQSGKKLWDAKHENLSNEVDRVKKDNDSMQVELRHLKGEDITSLNHVELMALEEALENGLTSIRDKQSKFVDMMRDNGKALEDENKRLTYELQKQQEMKIEENVRNMENGYHQRQLGNYNNNQQQIPFAFRVQPIQPNLQERI

SEQ ID NO: 16326 - protein, 213 aa, Silene latifolia
MGRGKIEIKRIENSTNRQVTYSKRRNGIIKKAGEITVLCEAKVSLIIFSNNGKMHAYHSPETAVEDILDQYHKISGKRLWDAKHENLSNEIDRVKKENDNMQIELRHLKGEDITSLPYPDLMRLEDALENGLVGVREKQMEMYKLHKKNHKMLEDENNQLAYMLHKQEMDGNMREMEAGVCSNPSDRDYHYQNPIPPYGFRVQPMQPNLQDRM

SEQ ID NO: 16327 - protein, 227 aa, Silene latifolia
MARRKIQIKKIENLTNRQVTYSKRRNGLFKKANELTVLCDATVSIIMLSSNLKLHEFLSPGSNLTTKDVYDRYQKALGVDIWVTHEKRMQDDLQKLNELNRKLQTDIRQRMGDCLEDLSFEELCRLGQEMQEAVTLIRERKYKKIDNQIDTTKKKVRNGQEVHKGLLQEFEIPKDEPPYGLVDNGDYSNVMGYNDASRVLALRLQPCQPNLHAGAGSGSCVTTYALL

SEQ ID NO: 16328 - protein, 208 aa, Glycine max
MGRGKIEIKRIENSSNRQVTYSKRKNGILKKAKEITVLCDAQVSLIIFAASGKMHDYISPSTTLIDILERYHKTSGKRLWDAKHENLNGEIERLKKENDSMQIELRHLKGDDINSLNYKELMALEDALETGLVSVREKQMDVYRMLRRNDKILEEENRELNFLWQQRLAEEGAREVDNGFDQSVRDYNSHMPFAFRVQPMQPNLQERI

SEQ ID NO: 16329 - protein, 250 aa, Glycine max
  unsure (1)..(250): unsure at all Xaa locations
MGRGKIEIKRIENSSNRQVTYSKRKNGILKKAKEISVLCDAQVSLIIFGVSGKMHEYISPYTTLIDVLDRYQRASGKTLWDAKHENLSNEIDRLKKENDSMQIELRHLKGEDITSLNYKELMALEDALENGLSGVREKKMEVHRMFKRNGKILEEQNKELSFLLQQHLAVEGIGNMXXNNGFDEIKRGFNSHMQRAASLKQPNLKELLNSYFLKLGSVRSSKTCYTIIEFDLITKLSILYNVYAAYHYDY

SEQ ID NO: 16330 - protein, 208 aa, Glycine max
MGRGKIEIKRIENSSNRQVTYSKRKNGILKKAKEITVLCDAQVSLIIFAASGKMHDYISPSTTLIDILERYQKTSGKRIWDAKHENLNGEIERLKKENDSMQIELRHLKGEDINSLNYKELMALEDALETGLVSVREKQMDVYRMFRRNDKILEEENRELTFLWQQRLAVEGAREVDNGFDQSVRDYNSHMPFAFRVQPMQPNLQERI

SEQ ID NO: 16331 - protein, 244 aa, Glycine max
MGRGRVQLKRIENKINRQVTFSKRRSGLLKKAHEISVLCDAEVALIVFSTKGKLFEYSSDPCMERILERYERYSYAERQLVASDQPQTENWTLEHAKLKARLEVLQKNQRNFMGQDLEGLSIKELQNLEHQLDSALKHIRSRKNQIMHESISELHKKDKVLQEQNNTLAKKIKEKEKALAQHAQMEQRGDEMDLTSSALVPHPLETSNIRESSQIRGEGDNEGTPTPTRANAILPSWMLRPSNE

SEQ ID NO: 16332 - protein, 244 aa, Glycine max
MGRGRVQLKRIENKINRQVTFSKRRSGLLKKAHEISVHCDAEVALIVFSTKGKLFEYSSDPCMEKILERYERYSYAERQLVASDQPLTENWTLEHAKLKARLEVLQKNQRNFMGQDLEGLSIKELQNLEHQLESALKHIRSRKNQLMYESISELHKKDKALQEQNNTLAKKIKEKEKALAQQAQLERLGDEVDLTSSALVPQPLVTSNIRTSSQIRGEGDNEGTPTPTQANAILPPWMLRPTNE

SEQ ID NO: 16333 - protein, 247 aa, Glycine max
  unsure (1)..(247): unsure at all Xaa locations
MGRGKIVIRRIDNSTSRQVTFSKRRNGLLKKAKELAILCDAEVGVMIFSSTGKLYDFASSSMKSVMDRYSKSKEEPCQLGSSASEIKFWQREAAMLRQQLHNLQESHRRKMMGEELSGLTVKELQNLENQLEISLHGVRMKKDQLLMGEIQELNRKGNLIHQENVELYKKVYGTQDDNETNRDSVLTNGLGIGEDLQXACESPAKPATATATTLALIHIQDVCVYNCYQEKWTQIXTSMSSYKCCGI

SEQ ID NO: 16334 - protein, 246 aa, Glycine max
  unsure (1)..(246): unsure at all Xaa locations
MGRGRVQLKQIENKISRQVTFSKRRTGLRKKANEISVLCDAQVALIVFNAKGKLFEYSSESSMENVLERYERHTHIGKLVGDGDESQGNWSLQCFKLTGKVEVLERNLRNFVGEDLDPLNLRELQSLEHQLETAIKRIRTRKNQVMNESISDLQKKARQLQEQNGILTKKIKEKGKEVVERPHCGPETLGXNLSXPELQRQQRVXXPSLTLCETLQAGHLEEVVEARTVPTASTHIPPWMLHPFTR

SEQ ID NO: 16335 - protein, 227 aa, Glycine max
MARGKIQIKRIENNTNRQVTYSKRRNGLFKKANELTVLCDAKVSIIMFSSTGKLHQYISPSTSTKQFFDQYQMTLGVDLWNSHYENMQENLKKLKEVNRNLRKEIRQRMGDCLNELGMEDLKLLEEEMDKAAKVVRERKYKVITNQIDTQRKKFNNEKEVHNRLLHDLDAKAEDPRFALIDNGGEYESVIGFSNLGPRMFALSIQPSHPSAHSGGAGSDLTTYPLLF

SEQ ID NO: 16336 - protein, 274 aa, Glycine max
VAKKERKKISRAETSIFNCILPLFPHQLIQVANMAFPDPSMSASPQRKMGRGKIEIKRIENTTNRQVTFCKRRNGLLKKAYELSVLCDAEVALIVFSSRGRLYEYANNSVKATIERYKKASSDSSGAGSASEANAQFYQQEADKLRQQISNLQNNNRQMMGDSLGSLTAKDLKNLETKLEKGISRIRSKKNELLFAEIEYMQKREIDLHNNNQLLRAKIAESERNHHNMAVLPGGSNYDSMPQQQFDSRGYFQVTGLQPNNQYARQDQMSLQLV

SEQ ID NO: 16337 - protein, 223 aa, Glycine max
  unsure (1)..(223): unsure at all Xaa locations
MGRGKIEIKRIENTTNRQVTFCKRRNGLLKKAYELSVLCDAEVSLIVFSSRGRLYEYSNNNIRSTIERYKKACSDHSSASTTTEINAQYYQQESAKLRQQIQMLQNSNRHLMGDALSTLTVKELKQLENRLERGITRIRSKKHEMLLAEIEYFQKREIELENENLCLRTKITDVERIQQVNMVSGPELNVIQALASRNFFNPNMLDGGTVYPXXTDKKILHLG

SEQ ID NO: 16338 - protein, 222 aa, Glycine max
MGRGKIEIKRIENTTNRQVTFCKRRNGLLKKAYELSVLCDAEVALIVFSSRGRLYEYSNNNIRSTIERYKKACSDHSSASTTTEINAQYYQQESAKLRQQIQMLQNSNRHLMGDALSTLTVKELKQLENRLERGITRIRSKKHEMLLAEIEYFQKREIELENENLCLRTKITDVERIQQVNMVSGPELNAIQALASRSFFNPNMLEGGTVYPHSDKKILHLG

SEQ ID NO: 16339 - protein, 208 aa, Glycine max
  unsure (1)..(208): unsure at all Xaa locations
MGRGKIEIKRIENSSNRQVTYSKRKNGILKKAKEISVLCDAQVSLIIFGVSGKMHEYISPSTTLIDVLDRYQRASGKTLWDAKHENLSNEIDRIKKENDSMQIELRHLKGEDITSLNYKELMALEDALENGLSGVREKKMEVHRMFKRNDKILEEQNKELNFLLQQHLALEGVGNMXMDNGFNEIKRVFNSHMQRAASLKQPNLKERI

SEQ ID NO: 16340 - protein, 228 aa, Glycine max
  unsure (1)..(228): unsure at all Xaa locations
MARGKIQIKRIENTTNRQVTYSKRRNGLFKKANELTVLCDAKVSIIMFSSTGKLHEYISPSTSTKQFFDQYQMTLGVDLWNSHYENMQENLKKLKDVNRNLRKEIRQRMGDCLNDLGMEDLKLLEEEMDKAAKVVRERKYKVITNQIDTQRKKFNNEKEVHNRLLRDLDARAEDPRFALIDNGGEYESVIGFSNLGPRMFALSLQPSHPSAQSGXXAGSDLTTYPLLF

SEQ ID NO: 16341 - protein, 240 aa, Glycine max
  unsure (1)..(240): unsure at all Xaa locations
MGRGRVDLKRIENKINRQVTFSKRRSGLLKKAREISVLCDADVALIVFSTKGKLFDYSNEPCMKRILERYERYSYAERQLAGDDQAPNENWVIEHEKLKARVEVLQRNQRNFMGEDLDSLNLRGLQSLEQQLDSALKLIRSRKNQAMNESISALQKKDKSLREHNNLLSKKIKDKEKELAPQEQDGLQNNMDVTSVLVTQPXXESLTIGGFPEAKCNEETPTSSRPKTILPPWMPLPTNE

SEQ ID NO: 16342 - protein, 239 aa, Glycine max
MGRGRVDLKRIENKINRQVTFSKRRSGLLKKAREISVLCDADVALIVFSTKGKLLDYSNQPCTERILERYERYSYAERQLVGDDQPPNENWVIEHEKLKARVEVLQRNQRNFMGEDLDSLNLRGLQSLEQQLDSALKHIRSRKNQAMNESISELQKKDRTLREHNNLLSKKIKEKEKELTPQEQEGLQNNMDVSSVLVTQPLESLTIGGSPEVKSNEETPTSCRPKTILPPLMPLPTNE

SEQ ID NO: 16343 - protein, 214 aa, Glycine max
  unsure (1)..(214): unsure at all Xaa locations
MVRGKTQLRRIENATSRQVTFSKRRNGLLKKAFELSVLCDAEVALIIFSPRGKLYEFASSSMQDTIERYRRHNRSAQTVNRSDEQNMQHLKQETANLMKKIELLEASKRKLLGEGLGSCSLEELQQIEQQLERSVSSVRARKNQVYKEQIDQLKEKERALYAENARLCEQYGGIQPQXSNKGSERNXXPYAESSPSSEVETELFIGLLRSSYXT

SEQ ID NO: 16344 - protein, 214 aa, Glycine max; identical to SEQ ID NO: 16343
  unsure (1)..(214): unsure at all Xaa locations

SEQ ID NO: 16345 - protein, 214 aa, Glycine max; identical to SEQ ID NO: 16343
  unsure (1)..(214): unsure at all Xaa locations

SEQ ID NO: 16346 - protein, 221 aa, Glycine max
  unsure (1)..(221): unsure at all Xaa locations
MVRGKTQMRRIENATSRQVTFSKRRNGLLKKAFELSVLCDAEVALIIFSPRGKLYEFASSSMQDTIERYRRHNRSAQTVNRSDEQNMQHLKQETANLMKKIELLEASKRKLLGEGLGSCSLEELQQIEQQLERSVSNGRARKNQVYKGQIDQLKEKERALYAENARLCEQYGIQPQPATKDPKEIQPYAESSPSSEVETELFIGLPRSIXLKIIXSLPSMK

SEQ ID NO: 16347 - protein, 157 aa, Glycine max
  unsure (1)..(157): unsure at all Xaa locations
MVRGKTQMKRIENETSRQVTFSKRRNGLLKKAFELSVLCDAEVALIIFSTRGRLYEFSSSRCSSINKTVERYQRKIEDLGVSNKGNENTQHLKEVDMSMAKKIEHLEDSRRKLLGDELDKCSIDELQQLENQLERSLDKIRATXNQLFRKRIEKLKX

SEQ ID NO: 16348 - protein, 293 aa, Glycine max
  unsure (1)..(293): unsure at all Xaa locations
MYLFLNPPVTFFCFRVRFLFLGLALLRIASYVGELSTKKMGRGRVQLKRIENKTSQQVTFFKRRSGLLKKASEISVLCDAQVALIIFSTKGKLFEYSSERSMEDLLERYERCSHXQHLLXANNVESPGFWSFEHIKLTAKVEVLERNIMNFFGNDLDPLSLKELHSLEQQIETSLKRIRTRKNQVMNQSVSDLHKKARTLQVQNRWLGKXXKEKAKTVTEGPHNGPETLGFDSSTLNLSSPQLPPPPSPQRLVPSLTLSETMQGSSWKKRVKAQTVPSGNSLIPPWMLRCMSD

SEQ ID NO: 16349 - protein, 289 aa, Glycine max
  unsure (1)..(289): unsure at all Xaa locations
MYLFLNPPVTLFSYFYLCCFHRIASYVGELSTKKMGRGRVQLKRIENKTSQQVTFFKRRSGLLKKASEISVLCDAQVALIIFSTKGKLFEYSSERSMEDLLERYERCSHXQHLLXANNVESPGFWSFEHIKLTAKVEVLERNIMNFFGNDLDPLSLKELHSLEQQIETSLKRIRTRKNQVMNQSVSDLHKKARTLQVQNRWLGKXXKEKAKTVTEGPHNGPETLGFDSSTLNLSSPQLPPPPSPQRLVPSLTLSETMQGGTPVEETGEAQTVPSGNSLIPPWMLRCMSD

SEQ ID NO: 16350 - protein, 224 aa, Glycine max
MVRGKTQMKRIENETSRQVTFSKRRNGLLKKAFELSVLCDAEVALIIFSTRGRLYEFSSSSSINKTVERYQRKIEDLGVSNKGNENTQHLKEVDMSMAKKIEHLEDSRRKLLGDELDKCSIDELQQLENQLERSLDKIRATKNQLFRKRIEKLKEEEKCLLEVNKRLREQYRIERQRCLSDQDVEFATKKEGEEVETELFIGRPERRMPLKLKPTTYSAHAYIA

SEQ ID NO: 16351 - protein, 249 aa, Glycine max
MGRGRVELKRIENKINRQVTFAKRRNGLLKKAYELSVLCDAEVALIIFSTRGKLYEFCSTNSMLKTLERYQKCSYGAVEVSKPGKELEQSSYREYLKLKARFESLQRTQRNLLGEDLGPLNTKDLEQLERQLDSSLKQVRSTKTQFMLDQLADLQNKEHMLVEANRSLTMKLEEINSRNQYRQTWEAGEQSMSYGTQNAHSQGFFQPLECNPTLQIGSDYRYNPEASEQQLAATTQAQQVNGFIPGWML

SEQ ID NO: 16352 - protein, 252 aa, Glycine max
  unsure (1)..(252): unsure at all Xaa locations
MFPHKVASMAFPNPSMSVSPQKKMGRGKIEIKRIENTTXNRQVTFCKRRNGLLKKAYELSVLCDAEVALIVFSSRGRLYEYANNSVKATIERYKKACSDSSGAGSASEANAQFYQQEADKLRAQISSLQNNNRQMMGESLGPLTAKELKNLETKLEKGISRIRSKKNELLFAEIEYMQKREIDLHNNNQLLRAKIAEGERNHHNLAVLPGGSNYDSLQTSQQQFDSRGSFQVTGLQPNNQYARQDQMSLQLV

SEQ ID NO: 16353 - protein, 219 aa, Glycine max
MVRGKTQMKRIENATSRQVTFSKRRNGLLKKAFELSVLCDAEVALIIFSPRGKLYEFASSSMQESIERYRRHTKHVNPTTFRSVEQNMQHLKQEAENMMKKIDLLEAAKRKFLGEGLGACSIEELQRIEQQLERSLSNVRARKVFKEQIEQLKEKEKALLDENAKLTENARLSETSTASNKESECESKCNAESSSSSDVETELFIGLPDTRARHISHHV

SEQ ID NO: 16354 - protein, 239 aa, Glycine max
  unsure (1)..(239): unsure at all Xaa locations
MGRGKIVIRRIDNSTSRQVTFSKRRNGLVKKARELSILCDAEVGLIVFSSTGKLYDYASTSMKSVIERYNKVKEDHQQLINPASEVKLWQREVASLRQQVQYMQECHRQMMGQELSGLGIEELGNLEKRLEMSLKGVRMKKDQILIDEVKELHQKGSLAHQENVELNRKINLIRKENEEXYKRLLKLSVEXGVAASNPPFTINYGCNMLAPISLQLSLPXSQRSKPSAKAMKLGYSLKL

SEQ ID NO: 16355 - protein, 243 aa, Glycine max
  unsure (1)..(243): unsure at all Xaa locations
MGRGKIVIRRIDNSTSRQVTFSKRRNGLLKKAKELAILCDAEVGVMIFSSTGKLYDFASSSMKSVMDRYSKSKEEPCQLGSSASEIKFWQREAAMLRQQLHILQESHRRKMMGEELSGLTVKELQNLENMLEFNLQGFRIIKDQLLMGEIQELNRKGNLIHQENVELYKKVYGTQDDNETNRDSVLTNGLGIGEDLQXACESPAKPATATRIAIALIHLQDVCFTXCYQEKWTQILSSYKCGI

SEQ ID NO: 16356 - protein, 263 aa, Glycine max
  unsure (1)..(263): unsure at all Xaa locations
MGRGRVELKRIENKINRQVTFSKRRSGLLKKAREISVLCDADVALIVFSTKGKLLDYSNQPCTERILEPSERDSYAGRELVGDDQPPNENWGIEHXKAQARVEVLQXRNQRNLMGEDLDRLNLTGLQRWEHQLDSALKHIRSRKNQAMNESISELQKKDRTLREHNSLLSKKIKEKEKELTPQEQEGLQNNMDVSSVPGVPDYWVSIFLXCITEMLQTLFLRVCGVYSXIVTVYVHMHDFILTFHLVLLCVYTTSSWMHETNE

SEQ ID NO: 16357 - protein, 195 aa, Glycine max
  unsure (1)..(195): unsure at all Xaa locations
MGRGRVQLKRIENKINRQVTFSKRRAGLLKKAHEISVLCDAEVALIVFSHKGKLFEYATDSCMEKILERYERYAYAERQLVANDSESQGNWTIEYTRLKAKIDLLQRNHRHYMGEDLGSMSLKELQSLEQQLDTALKQIRTRRNQLMYESISELEKKXYLLKSXHNFMQLGLXXMVXTVHRNKFQXPXLDYACPX

SEQ ID NO: 16358 - protein, 239 aa, Glycine max
  unsure (1)..(239): unsure at all Xaa locations
MGRGKIPIRRIENSTNRQVTFCKRRNGLLKKTRELSILCDAEVGVIVFSSTGKLYEYSNTSMETIIERFNKQNNNHHRLMDATSAIKXXEAASLRQQLQHLQENHRQLMGEELSGLGINQLKHLENQLQMSLNNVRNKKDHIFSDEIKELQQKGSLIRRQNEELHKKIDLIHNENAELKKVIEARHKEEERAALKPPCAIKNRYDTLDPNSLQQRQSQPQPSEPSAEVMIMGYSLKLKM

SEQ ID NO: 16359 - protein, 241 aa, Glycine max
MGRGRVQLKRIENKINRQVTFSKRRGGLLKKAHEISVLCDAEVALIIFSHKGKLFEYATDSCMEKILERHERYAYAERQLVANDSETQENWTIEYTRLKAKIDLLQRNHRHYMGEDLASMSLKELQSLEQQLVTGIKNIRTRRNDLMSESISELQKKEKRIQEENNTLAKKIKEKEQAVAQQAAQWEQPNYRVDTSFMPQQQPPSLNICGNNYCQEAAPELGRNGLDLTLEPLYSCNLGCF

SEQ ID NO: 16360 - protein, 233 aa, Glycine max
MGRGKIEIKLIENPTNRQVTYSKRRNGIFKKAHELSVLCDAKVSLIMFSKNNKMHEYISPGLTTKRIIDQYQKTLGDIDLWRSHYEKMLENLKKLIDINNKLRRQIRHRIGEGLDMDDMSFQQLRTLEEDLVSSIGKIRERKFHVIKTRTDTCRKKVKSLEQMNRDLLFELEKCAIHPQFILHDEGDEESAVALANGASTLYAFCHQHHSHLNLPSHHSHGEEPFKTDDLRLA

SEQ ID NO: 16361 - protein, 247 aa, Glycine max
MGRGRVELKRIENKINRQVTFAKRRNGLLKKAYELSVLCDAEVALIIFSNRGKLYEFCSSSSMLKTLERYQKCSYGAVEVTKPAKELESSYREYLKLKARFESLQRTQRNLLGEDLGPLNIKELEHLERQLDSSLKQVRSTKTQFMLDQLSDLQTKEQMLVEANRSLTVKLEEINSRNHYRQSWEAGDQSMPYGGGGPETQGFFQPLECNPTLHIGPDYRYNAVASDQITATTQPQQVSGFIPGWML

SEQ ID NO: 16362 - protein, 243 aa, Glycine max
MGRGKIEIKLIENPTNRQVTYSKRRNGIFKKAHELSVLCDAKVSLIMFSKNNKMHEYISPGLTTKKIIDQYQKTLGDIDLWHSHYEKMLENLKKLKDINNKLRRQIRHRIGEGLDMDDMSFQQLRTLEEDMVSSIGKIRERKFHVIKTRTDTCRKKVKSLKQMNGNLLLELKEKCVIHPQFLLHDEGDEESAAAAAAAAVALANGASTLYAFCHQHHSHLNLFSHHSNGEEQPFKTDHDLRLA

SEQ ID NO: 16363 - protein, 247 aa, Glycine max
  unsure (1)..(247): unsure at all Xaa locations
MGRGRVELKRIENKINRQVTFAKRRNGLLKKAYELSVLCDAEVALIIFSTRGKLYEFCSTNSMLKTLERYQKCSYGAVEVSKPGKELESSYREYLKLKARFESLQRTQRNLLGEDLGPLNTKDLEQLERQLDSSLKQVRSTKTQFMLDQLADLQNKEHMLVEANRSLTMKLEEINSRNQYRQTWEAGEQSMSYGTQNAHSQGFFQPLECNPTLQIGXLTTGTTLKPQSSSXPTQAQQVNGFIPGWML

SEQ ID NO: 16364 - protein, 247 aa, Glycine max
  unsure (1)..(247): unsure at all Xaa locations
MGRGRVELKRIENKINRQVTFAKRRNGLLKKAYELSVLCDAEVALIIFSTRGKLYEFCSTNSMLKTLERYQKCSYGAVEVSKPGKELESSYREYLKLKARFESLQRTQRNLLGEDLGPLNTKDLEQLERQLDSSLKQVRSTKTQFMLDQLADLQNKEHMLVEANRSLTMKLEEINSRNQYRQTWEAGEQSMPYGTQNAHSQGFFQPLECTPTLQIGXLTTGTSLKPQSSSXPTQAQQVNGFIPGWML

SEQ ID NO: 16365 - protein, 247 aa, Glycine max
  unsure (1)..(247): unsure at all Xaa locations
MGRGKVELKRIENKINRQVTFAKRRNGLLKKAYELSVLCDAEVALIIFSNRGKLYEFCSGHSTAKTLERYHRCSYGALEVQHQPEIETQRRYQEYLKLKSRVEALQQTQRNLLGEELEHLDVNDLEQLERQLDSSLKQIRSNKTQQMLDQLSDLHRKEEMLLETNNILRNKLEEINVALQPTWEAREQNAPYNCHPPQXXEGYYETATAHCSSTLRIGYDSSGLNEAGGAAGASAQNASEFMHGWMN

SEQ ID NO: 16366 - protein, 241 aa, Glycine max
MGRGKVQLKRIENKINRQVTFSKRRSGLLKKAHEISVLCDAEVALIVFSHKGKLFEYATDSCMEKILERHERYAYAERQLVANDSETQGNWTIEYTRLKAKIDLLQRNHRHYMGEDLASMSLKELQSLEQQLDTAIKNIRTRRNDLMYASISELQKKEKMIQEQNNILAKKIKEKEQAVAQQAAQWEQPNYRVDTSFMPQQQPPSLNIGGNNYNQEAAPELGRNGLDLTLEPLYSCHLGCF

SEQ ID NO: 16367 - protein, 256 aa, Glycine max
PGRPTRPPTRPYGCEKTTEGEAQEGSSQKKMGRGKIEIKRIENTTNRQVTFCKRRNGLLKKAYELSVLCDAEVALVVFSTRGRLYEYANNSVRATIERYKKANAAASNAESVSEANTQFYQQESSKLRRQIRDIQNLNRHILGEALGSLSLKELKNLEGRLEKGLSRVRSRKHETLFADVEFMQKREIELQNHNNYLRAKIAEHERAQQQQSNMMSGTLCESLPSQSYDRNFFPVIIASDDQQQYSSQDHTALQLV

SEQ ID NO: 16368 - protein, 250 aa, Glycine max
  unsure (1)..(250): unsure at all Xaa locations
MGRGRXVELKRIENKINRQETFEKRRNGLLKKAYELSVLCDAEVSLIIFSTRGNLYEFCSTNSMLKTLERYQKCSYGAVEVSKPGKELEQSSYREYLKLKARFESLQRTQRNLLGEDLGPLNTKDLEQLERQLDSSLKQVRSTKTQFMLDQLADLQNKEHMLVEANRSLTMKLEEINSRNQYRQTWEAGEQSMSYGTQNAHSQGFFQPLECNPTLQIGSDYRYNPEASEQQLAATTQAQQVNGFIPGWML

SEQ ID NO: 16369 - protein, 244 aa, Glycine max
  unsure (1)..(244): unsure at all Xaa locations
MEDPNQAPEGSSQKKMGRGKIEIKRIENTTNRQVTFCKRRNGLLKKAYELSVLCDAEVALVVFSTRGRLYEYANNSVRATIERYKKANAAASNAESVSEANTQFYQQESSKLRRQIRDIQNLNRHILGEALGSLSLKELKNLEGRLEKGLSRVRSRKHETLFADVEFMQKREIELQNHNNYLRAKIAEHERAQQQQSNMNMSGTLCXXSLPSQSYDRNFFPVNLIASDDQQQYSRQDHTALQLV

SEQ ID NO: 16370 - protein, 244 aa, Glycine max
MGRGKVELKRIENKINRQVTFAKRRNGLLKKAYELSVLCDAEVALIIFSNRGKLYEFCSGHSMAKTLERYHRCSYGALEVQHQPEIETQRRYQEYLKLKSRVEALQQTQRNLLGEELEHLDVKDLEQLERQLDSSLKQIRSNKTQQMLDQLADLHRKEEMLLETNNILRNKLEEINVALQPTWETREQNAPYNYHPSQSEGYYETAHCNSTLRIGYDSSGLNEAGGAAGTSAQNASEFMNGWMN

SEQ ID NO: 16371 - protein, 244 aa, Glycine max
MGRGRVELKRIENKINRQVTFSKRRNGLLKKAYELSVLCDAEVALIIFSSRGKLYEFGSVGTTNTIERYQRSSFTPQDEHVECETQSWYQEVSKLKAKYESLQRTQRHLLGEDLGPLNIKELQNIEKQLEGALAQARQRKTQIMIEQMEELRRRERHLGDMNKQLRLKLEAEGFNLKATESLLSFTSAAGNSGFHLQPPQTNPIDYQQPEPFLQIGYHQYVQSEASNVPKSMACETNFMQGWIL

SEQ ID NO: 16372 - protein, 244 aa, Glycine max
  unsure (1)..(244): unsure at all Xaa locations
MEFPNEAIPEGCSQKKTGRGKIEIKRIENTTNRQVTFCKRRNGLLKKAYELSVLCDAEVALVVFSSRGRLYEYANNSVRGTIERYKKACAASTNAESVSEANTQFYQQEASKLKRQIRDIQNLNRHILGEGLSSLSLKELKNLESRLEKGLSRVRSRKHETLFADIEFMQKREIELQNHNNFLRAKIAENERAQQRQQXXMIPGTECESTIPNSQSYDRNFFPVIIDSNNNQYSRQDQTALQLV

SEQ ID NO: 16373 - protein, 487 aa, Glycine max
  unsure (1)..(487): unsure at all Xaa locations
MGRGRVVLERIENKINRQVTFSKRRSGLLKKAFELSVLCDAEVGLIIFSSRGKLFQYSSTDITKIIERYRQCRYSKSHNSLEHDSQSAYHEFLKLRAKYESLERTQRHFQGEDLEPLSFKDLQSLEKQLDITLALTRQHQTKKLMARADELREKDXSKSKSSKEVKVKRKSNGHPGFILQTKWTKDSKIRSLSLSLDSLXXDYTDKDVEESXISELSLFAESFYEMLQFQMGSRILTFLQKLRIKFVIKRNQKKRQREDEQEKDDVKKSPVKRQKGNDPSVKNEPTNMDTLNPTQLDDEKAVARNENSSNKEDDVKMEDGSDEEEDPEEDPEEYEEMENGSPQHEASNDKNAEQEANADTKSENITTNDKTADETSKEEIKVKDEVQESKADLQVKEEKEGKDEIKKETPTAKEVVVDRELLQAFRFFDRNRVGYIRVEDMRIIIHNLGMFFSHRDVKELVQSALLESNTGRDDRILYNKLVRMSDI

SEQ ID NO: 16374 - protein, 247 aa, Glycine max
MGRGRVELKRIENKINRQVTFAKRRNGLLKKAYELSVLCDAEVALIIFSNRGKLYEFCSSSSMLKTLERYQKCSYGAVEVSKPAKELESSYREYLKLKARFESLQRTQRNLLGEDLGPLNIKELEHLERQLDSSLKQVRSTKTQFMLDQLSDLQTKEQMLVEANRSLTVKLEEINSRNHYRQSWEAGDQSMPYGGGGPETQGFFQPLECNPTLHIGPDYRYNAVASDQITATTQPQQVSGFIPGWML

SEQ ID NO: 16375 - protein, 175 aa, Glycine max
  unsure (1)..(175): unsure at all Xaa locations
MGRGRVELKRIENKINRQVTFAKRRNGLLKKAYELSVLCDAEVALIIFSNRGKLYEFCSSSSMLKTLERYQKCXYGAVEVXKPAKELEQSSXXEYLKLKARFESLQRTQRNLLGEDLGPLNTKELEHLERQLDSSLKQVRSTKVIMDNLCIKNVFNFQQIIIYCNEKIIRMVNIX

SEQ ID NO: 16376 - protein, 185 aa, Glycine max
  unsure (1)..(185): unsure at all Xaa locations
GRGRVVLERIENKINRQVTFSKRRSGLLKKAFELSVLCDAEVGLIIFSSRGKLFQYSSTDITKIIERYRQCRYSKSHNSLEHDSQSAYHEFLKLRAKYESLERTQRHFQGEDLEPLSFKDLQSLEKQLDITLALTRQHQTKKLMARADELREKVKKIDILFKEVGLDVQVSIIHYNLVSFIIRFX

SEQ ID NO: 16377 - protein, 241 aa, Glycine max
MGRGRVELKRIENKINRQVTFAKRRNGLLKKAYELSVLCDAEVALIIFSNRGKLYEFCSSSSMLKTLERYQKCNYGAPEANVSTREALELSSQQEYLKLKARYEALQRSQRNLMGEDLGPLSSKELESLERQLDSSLKQIRSTRTQFMLDQLSDLQRKEHLLSEANRSLRQRLEGYQINPLQLNPGVEEMGYGRHPAQTHGEALFQQMECEPTLQIGYQPDPVSVVTAGPSMSNYMAGWLP

SEQ ID NO: 16378 - protein, 183 aa, Glycine max
  unsure (1)..(183): unsure at all Xaa locations
NIKMADDEYSFXCINHDGXKLIQVANMAFPDPSMSVSPQRKMGRGKIEIKRIENTTNRQVTFCKRRNGLLKKAYELSVLCDAEVALIVFSSRGRLYEYANNSVKATIERYKKASSDSSGAGSASEANAQFYQQEADKLRQQISNLQNNNRQMMGDSLGSLTAKDLKNLETKLEKGISRDSVQK

SEQ ID NO: 16379 - protein, 270 aa, Glycine max
LRVGGRVGEHNFFTLFPHQLTRGRTPCKNMAFPNQSMSSESPQRKMGRGKIEIKRIENTTSRQVTFCKRRNGLLKKAYELSVLCDAEVALIVFSNRGRLYEYANNSVKASIERYKKASSDSSSGGRSASEANAQFYQQEAAKLRVQISNLQNHNRQMMREGLSTMNGKDLKNLETKLEKGISRIRSKSGSRLFAEIEHMKKREIHLNNDNQLLRAKIAAGERSHHNVNGLSGSISYESMHQFDSRGFFQVTGLQHNNQYAGQDNMSLQFV

SEQ ID NO: 16380 - protein, 166 aa, Glycine max
  unsure (1)..(166): unsure at all Xaa locations
MGRGRVELKRIENKINRQVTFAKRRNGLLKKAYELSVLCDAEVALIIFSNRGKLYEFCSSSSMLKTLERYQKCNYGAPEDNVSTKEALELSSQQEYLRLKARYEALQRSQRNLMGEDLGPLSSKELESLERQLDSSLKQIRSIRTQFMLDQLSDLQRKAHRFNYAX

SEQ ID NO: 16381 - protein, 243 aa, Glycine max
  unsure (1)..(243): unsure at all Xaa locations
MEFPNEAIPEGCSQKKTGRGKIGIKRIENTTNRQVTFCKRRNGLLKKAYELSVLCDAEVALVVFSSRGRLYEYANNSVRGTIDRYKKACAASTNPESVSEANTQFYQQEASKLKRQIRDIQNLNRHILGEALSSLSLKELKNLESRLEKGLSRVRSRKHETLFADIEFMQKREIELQNHNNFLRAKIAEHEKAQQRQQXXMIPGNVCESTIPPQSYDRNFFPVNLIDSNNQYSNQDQTALQLV

SEQ ID NO: 16382 - protein, 171 aa, Glycine max
  unsure (1)..(171): unsure at all Xaa locations
MEDPNQAQEGSSQKKMGRGKIEIKRIENTTNRQVTFCKRRNGLLKKAYELSVLCDAEVALVVFSTRGRLYEYANNSVRATIERYKKANAAASNAESVSEANTQFYQQESSKLRRQIRDIQNLNRHILGEALGSLSLKELKNLEGRXLEKGLSRVRSRKEIVLQNHNNYLGA

SEQ ID NO: 16383 - protein, 246 aa, Glycine max
  unsure (1)..(246): unsure at all Xaa locations
MEFPTEAILSEGSISQKKPXGGKLEIRRIENTTNRQVTFCKRRNGLLKKAYELSVLCDAEVALVVFSSRGRLYEYANNSVRGTIERYKKACAASTNAESVSEANTQFYQQEASKLKRQIRDIQNLNRHILGEGLSSLSLKELKNLESRLEKGLSRVRSRKHETLFADIEFMQKREIELQNHNNFLRAKIAENERAQQRQQXXMIPGTECESTIPNSQSYDRNFFPVIIDSNNNQYSRQDQTALQLV

SEQ ID NO: 16384 - protein, 221 aa, Glycine max
  unsure (1)..(221): unsure at all Xaa locations
MGRGRVELKRIENKINRQVTFAKRRNGLLKKAYELSVLCDAEVALIIFSNRGKQYEFCSGSSMLKTLERYQKCNYGAPEDNVATKEALELSSQQEYLRLKARYEALQRSQRNLMGEDLGPLSSKELESLERQLDSSLKQIRSIRTQFMLDQLSDLQRKEHFLGESDRDLRQRLEEFQINPLQLNPSAEDMGYGRHPXYHPDPVSVVTEGPSMNNYMAGWLP

SEQ ID NO: 16385 - protein, 241 aa, Glycine max
MGRGRVELKRIENKINRQVTFAKRRNGLLKKAYELSVLCDAEVALIIFSNRGKQYEFCSGSSMLKTLERYQKCNYGAPEDNVATKEALELSSQQEYLRLKARYEALQRSQRNLMGEDLGPLSSKELESLERQLDSSLKQIRSIRTQFMLDQLSDLQRKEHFLGESNRDLRQRLEEFQINPLQLNPSAEDMGYGRHPGQPQGHALFQPLECEPTLQIGYHPDPVSVVTEGPSMNNYMAGWLP

SEQ ID NO: 16386 - protein, 204 aa, Glycine max
  unsure (1)..(204): unsure at all Xaa locations
MARGKVQLKRIENPVHRQVTFCKRRAGLLKKAKELSVLCDAEIGLFIFSAHGKLYELATKGTMQGLIERYMKFTRGAQPEAAAPEAHPLLVAKEETNALKQEIQTLQKGISYLFEGGNKTMAIDELQLLEKNLETWIYHIRSMKMNIMLQEIQALKDKEGTLKAANKYLHDKIVENTAIXXNFAEFATDTSYPLIVQDGGFQLY

SEQ ID NO: 16387 - protein, 159 aa, Glycine max
  unsure (1)..(159): unsure at all Xaa locations
MGRGRVELKRIENKINRQVTFAKRRNGLLKKAYELSVLCDAEVALIIFSSRGKQYEFCSSSSMLRTLDRYQKCNYGAPEPNVPSREALAELNSQQEYLKLKERYDALQRTQRNLLGEDLGPLSTKELESLERQLDSSLKQIRALRTQFMLDQLNDLQSX

SEQ ID NO: 16388 - protein, 244 aa, Glycine max
  unsure (1)..(244): unsure at all Xaa locations
MGRGRVELKRIENKINRQVTFAKRRNGLLKKAYELSVLCDAEVALIIFSNRGKQYEFCSGSSMLKTLERYQKCNYGAPEDNVATKEALVLELSSQQEYLRLKARYEALQRSQRNLMGEDLGPLSSKELESLERQLDSSLKQIRSIRTQFMLDQLSDLQRKEHFLGESNRDLRQRLEEFQINPLQLNPSAEDMGYGRHXXGQPQGHALFQPLECEPTLQIGYHPDPVSVVTEGPSMNNYMAGWLP

SEQ ID NO: 16389 - protein, 197 aa, Glycine max
MGKKKVEIKRIENKSTRQITFSKRRNGLMKKARELSILCDAKVALLIFSSTGKLYELCNGDSLAEVVQQYWDQSGTDTKSQELCFEIADIWSGSAFSQMIKRHFGVSELEHLSVSDLMELEKLTHAALSRIRSAKMRLMMESVVNLKKKIEALEKTNDVNNVVTRSIDCDQTDGVTHNLFPGQLKATTLGLTCTLNP

SEQ ID NO: 16390 - protein, 209 aa, Glycine max
MVRGKVQLKKIEDTTSRQVTFSKRRSGLLKKAYELSVLCDAEVAVIVFSQNGRLYEFSSSDMTKILERYREHTKDVPASKFGDDYIQQLKLDSASLAKKIELLEHSKRELLGQSVSSCSYDELKGIEEQLQISLQRVRQRKTQLYTEQIDQLRSQESNLLKENAKLSAKKSSQQQWPRHTQAEAEPHCSSSQSLDVDTELFIGLPKQQC

SEQ ID NO: 16391 - protein, 198 aa, Glycine max
  unsure (1)..(198): unsure at all Xaa locations
MGKKKLEIKRIENKSNRQITFSKRRKGLMKKARELSILCDAKLALLIFSSTGKLYELCNGDSLAEVVQRYWDKGASGTDTKGLRFEIADIWSDEAFSQLVQSHFGVSELEHLSVTDLMELEKLVHSALSRIRSAKMRLMMESGENLKKKEHILRNEGEVWGKRMEGQXXRGGGGNNVVTRFIDYDQTDRVTHNLLPGL

SEQ ID NO: 16392 - protein, 89 aa, Glycine max
MGRGKIEIKRIENSSNRQVTYSKRKNGILKKAKEISVLCDAQVSLIIFGVSGKMHEYISPYTTLIDVLDRYQRASGKTLWDAKHEVGFF

SEQ ID NO: 16393 - protein, 136 aa, Glycine max
  unsure (1)..(136): unsure at all Xaa locations
MGRGRVELKRIENKINRQVTFAKRRNGLLKKAYELSVLCDAEVALIIFSNRGKLYEFCSGQSITKTLERYEKNSYGGPDTAVQNKENCAAVNCCLIIINYYGLKKKKKKKKKKKKKKKKKKKKKKKKKKKKKKKKX

SEQ ID NO: 16394 - protein, 147 aa, Glycine max
  unsure (1)..(147): unsure at all Xaa locations
MGRGRVVLERIENKINRQVTFSKRRSGLLKKAFELSVLCDAEVGLIIFSSRGKLFQYSSTDITKIIERYRQCRYSXSHTGDSLEHDSXRHFQGEDLEPLSFKDLQSLEKQLDITLALTRQHQTKKLMARADELREKVRSLSXLDFNX

SEQ ID NO: 16395 - protein, 150 aa, Glycine max
  unsure (1)..(150): unsure at all Xaa locations
MGRGRVELKRIENKINRQVTFAKRRNGLLKKAYELSVLCDAEVALIIFSNRGKLYEFCSSSSMLKTLERYQKCSYGAVEVTKPAKELESSYREYLKLKARFESLQRTQRNLLQAIMGRCKSKXLTKGQSQKCILVLARCKCNPASIIILV

SEQ ID NO: 16396 - protein, 72 aa, Glycine max
MGRGKIAIRRIDNSTSRQVTFSKRRNGLLKKARELSILCDAEVGLMVFSSTGKLYDYASTSRFKYCLNRFYL

SEQ ID NO: 16397 - protein, 177 aa, Glycine max
  unsure (1)..(177): unsure at all Xaa locations
MGRGKVVLERIQNKINRQVTFSKRRNGLLKKAFELSVLCDAEIALVIFSSRGKLFQYSSTDINRIIEKYRQCCFNMSQTGDVAEHQSEQCLYQELLVLRVKHESLQRTQRNLLGEELEPLSMKELHSLEKQLDRTLAQARKHLTQKLVSRIDELHGKVHSLEQANKHLKNRHTAEEX

SEQ ID NO: 16398 - protein, 123 aa, Glycine max
  unsure (1)..(123): unsure at all Xaa locations
GRGKIVIRRIDNSTSRQVTFSKRRSGLLKKAKELAILCDAEVGVMIFSSTGKLYDFASSGMKSVMDRYSKSKEEPCQLGSSASEIKVVIIXXILRQYMHGKREGERMKRVKEVRGREENIKSX

SEQ ID NO: 16399 - protein, 135 aa, Glycine max
  unsure (1)..(135): unsure at all Xaa locations
MGRGRVQLKRIENKINRQVTFSKRRAGLLKKAHEISVLCDAEVALIVFSHKGKLFEYATDSCMEKILERYERYAYAERQLVANDSESQNSCVLISFSLSSXSVFFPKNSTHALLSYFSLMIIKFIQSKEVCAFFX

SEQ ID NO: 16400 - protein, 137 aa, Glycine max
  unsure (1)..(137): unsure at all Xaa locations
MGRGRVQLKRIENKINRQVTFSKRRAGLLKKAHEISVLCDAEVALIVFSHKGKLFEYATDSCMEKILERYERYAYAERQLVANDSESQGCYXWSTEYSSRKAKSVFFPKNSTHALLSYFSLMIIKFIQSKEVCAFFX

SEQ ID NO: 16401 - protein, 153 aa, Glycine max
  unsure (1)..(153): unsure at all Xaa locations
MGRGKIEIKKIENLNSRQVTFSKRRNGLLKKAKELSVLCDAEVAVIIFSSTGKLYEFSNTSMEHTLSRYSKGAESDSAEQXLLMCPQXDVMAVEPDTNLLMEEITKLRSAYLRMMGKELDGLSLKELQQLENQLSEGMQSVKDKKEQVLVEQL

SEQ ID NO: 16402 - protein, 182 aa, Glycine max
MVRRKIPIKKIDNVTARQVTFSKRKSGLFKKARELSLLCDSEIALIVFSPGGKLFDYASSSMQKVIERHILWSELNLEKLDQSCPTEQLRCNYADLNKEFGDRIREMRQLNGEELQGLALRELQKLEERLVSSLNRVYKAKVENFTREIDILKQKGNKLMEDNRLMKQRIIRKKKKKKKNDQ

SEQ ID NO: 16403 - protein, 122 aa, Glycine max
  unsure (1)..(122): unsure at all Xaa locations
LLAERTQRQRSSWARGKTQIXKRIENATSRQVTFSKRRNGLLKKAFELSVLCDADVALIIFSSSGKLYEFASSSIQCSIERYRMHTKHDNSTTFRSAEQNMQHLKQDAANMMNKIGLLETAX

SEQ ID NO: 16404 - protein, 92 aa, Glycine max
MGRGRVQLKRIENKINRQVTFSKRRGGLLKKAHEISVLCDAEVALIIFSHKGKLFEYATDSCMEKILERHERYAYAERQLVANDSETQENWT

SEQ ID NO: 16405 - protein, 101 aa, Glycine max
  unsure (1)..(101): unsure at all Xaa locations
MGRGRVELKRIENKINRQVTFAKRRNGLLXKAYELSVLCDAEVALIIFSNXGKLYEFSSTSSMMKTLEKYQKYSYSALETTRPINDTXNYQEXLRLKARVX

SEQ ID NO: 16406 - protein, 114 aa, Glycine max
  unsure (1)..(114): unsure at all Xaa locations
MEDPNQAPQASSQKKMGRGTIEIKRIENTTNRQVTFCKRRNGLLKKAYELSVLCDAEVALVVFSTXRGRLYEYANNSVRATIERYKKANAAASNAESVSEANTQFYQQESSKLX

SEQ ID NO: 16407 - protein, 86 aa, Glycine max
  unsure (1)..(86): unsure at all Xaa locations
MGRGRVELKRIENKINRQVTFAKRRNGLLKKAYELSVLCDAEVALIIFSNRGKLYEFCSSSRYAVCVDPFFSVSYDLVDIXKKKKR

SEQ ID NO: 16408 - protein, 96 aa, Glycine max
MGRGKVELKRIENKINRQVTFAKRRNGLLKKAYELSVLCDAEVALIIFSNRGKLYEFCSGHSRTRAVIHTQTPSSLLFMTDFVCALLSSSRSRTRA

SEQ ID NO: 16409 - protein, 84 aa, Glycine max
MGRGRVQLKRIENKINRQVTFSKRRAGLLKKAHEISVLCDAEVALIVFSHKGKLFEYATDSCEAQVLSRPFTYHSLEARMLHPF

SEQ ID NO: 16410 - protein, 74 aa, Glycine max
  unsure (1)..(74): unsure at all Xaa locations
MGRGRVQLKRIENKINRQVTFSKRRAGLLKKAHEISVLCDAEVALIVFSHKGKLFEYATDSCMQKKKKKKKKKX

SEQ ID NO: 16411 - protein, 78 aa, Glycine max
  unsure (1)..(78): unsure at all Xaa locations
MGRGRVQLKRIENKINRQVTFSKRRAGLLKKAHEISVLCDAEVALIVFSHKGKLFEYATDSCMRSVMQKKKKKKKKKX

SEQ ID NO: 16412 - protein, 83 aa, Glycine max
  unsure (1)..(83): unsure at all Xaa locations
MVRGRVELKRIENKINRQVTFAKRRNGLLKKAYELSVLCDAEVALIIFSNRGKLYEFCSSSSMLKTLERXQKCSYXAPKPSLX

SEQ ID NO: 16413 - protein, 77 aa, Glycine max
  unsure (1)..(77): unsure at all Xaa locations
MTRTRIKIKKIDNITARQVTFSKRRRGLFKKAEELSVLCDAEVGLIVFSSTGKLFDYSSSSFLXIFEKKKKKKKXKK

SEQ ID NO: 16414 - protein, 90 aa, Glycine max
MGRGKVVLERIQNKINRQVTFSKRRNGLLKKAFELSVLCDAEIALVIFSSRGKLFQYSSTEYFSSISHLFYHYNPSLLSSKKKKKKKKKK

SEQ ID NO: 16415 - protein, 303 aa, Glycine max
  unsure (1)..(303): unsure at all Xaa locations
MGRVKLPIKKIENTTNRQVTFSKRRNGLIKKAYELSVLCDVDVALIMFSPSGRATFFSGNKSIEEILERYVNLSEGEHGRXXHNKEHIQKLLSKLKDEAGQICQAPSSMTSDSQIEDLRREIFTCKSQLEEMEKRLRIFEGDPSEITTLSEAEYREYVLRDTLKQVQLRKCVLEEYNSHATHSPQVHAAKTVDVNGFISRASKNPVDWFPQGDPLHVQTLNFANVYDTALVRDQQSHHCTVVDMLTPTSTLLHSANMDLNGQMNPRSSLDAGISNTLHPQFGQAIHTNSSSWQHLNPLGTYWS

SEQ ID NO: 16416 - protein, 237 aa, Glycine max
  unsure (1)..(237): unsure at all Xaa locations
GXQLTGENKINRQVTFAKRMNGLLKKAYELSVLCDAEVALIIFSNRGKLYEFCSSSSMLKTLERYQKCNYGAPEANVSTREALELSSQQEYLKLKARYESLQRSQRNLMGEDLGPLSSKELESLERQLDSSLKQIRSTRTQFMLDQLSDLQRKEHLLSEANRSLRQRVMEGYQINPLQLNPGVEEMGYGRHPAQTHGEALFQQMECEPTLQIGYQPDPVSVVTAGPSMSNYMAGWLP

SEQ ID NO: 16417 - protein, 229 aa, Medicago sativa
MARGKIQIKRIENTTNRQVTYSKRRDGLFKKANELTVLCDAKVSIIMFSSTGKLHEYISPSASTKQFFDQYQMTVGIDLWNSHYENMQENLKKLKDVNRNLRKEIRQGMGECLNDLSMEELRLLEDEMDKAAKAIRERKYKVITNQIDTQRKKSNNEREVHNRLLRDLDARAEDPRFEMMDNGGEYESVIGFSNLGPRMFALSLQPTHPNPHNGGASAASDLTTYPLLF

SEQ ID NO: 16418 - protein, 247 aa, Medicago sativa
MARGKIQIKRIENTTNRQVIYSKRRNGLFKKANELTVLCDAKVSIIMFSSTGKLHEYISPSASTKQFFDQYQTTVGIDLWNSHYENMQENLKKLKDVNRNLRKEIRQGMGECLNDLSMEELRLLEDEMDKALKAIRERKYKVITNQIDTQRKKFNNEREVDNRLLRDLDARAEDPRFEMMDNGGEYESVIGFSNLGPRMFALSLQPTHPNPHNGGASAASDLTTYPLLFSHFSLRIRTTNTTITFQQ

SEQ ID NO: 16419 - protein, 212 aa, Medicago sativa
MGRGKIEIKRIENSSNRQVTYSKRKSGILKKANEINVLCDAQVSTIIFAPSGKMHEYISPSTTLIDMLERYQKASGKRLWDAKHENLRNEIEKLKKENEDMEIKLRHLKGKDINTLNYKKLMSLEDVLENGLLTIRDKQMEVYQMVTRNDKILEEENRELNFILQQQHMAVEGGREMDYNDEFDESSGSDFNSQMPFSFRLQPMQLHSLLQL

SEQ ID NO: 16420 - protein, 224 aa, Oryza sativa (indica cultivar-group)
MARGKVQLRRIENPVHRQVTFCKRRAGLLKKARELSILCEADIGIIIFSAHGKLYDLATTGTMEELIERYKSASGEQANACGDQRMDPKQEAMVLKQEINLLQKGLRYIYGNRANEHMTVEELNALERYLEIWMYNIRSAKMQIMIQEIQALKSKEGMLKAANEILQEKIVEQNGLIDVGMMVADQQNGHFSTVPLLEEITNPLTILSGYSTCRGSENGLFLLT

SEQ ID NO: 16421 - protein, 233 aa, Oryza sativa (indica cultivar-group)
MVRGRTELKRIENPTSRQVTFSKRRNGLLKKAFELSVLCDAEVALIVFSPRGRLYEFASAPSLQKTIDRYKAYTKDHVNNKTIQQDIQQVKDDTLGLAKKLEALDESRRKILGENLEGCSIEELRGLEMKLEKSLHNIRLKKTELLERQIAKLKEKERTLLKDNENLRGKHRNLEAAALVANHMTTTTAPAAWPRDVPMTSSTAGAADAMDVETDLYIGLPGTERSSNRSETG

SEQ ID NO: 16422 - protein, 246 aa, Oryza sativa (indica cultivar-group)
MGRGKVQLKRIENTINRQVTFSKRRSGLLKKANEISVLCDAEVALIIFSTKGKLYKYATDSCMDKILERYERYSYAEKVLISAESDTQGNWCHEYRKLKAKVETIQKCQKHLMGEDLESLNLKELQQLEQQLENSLKHIRSRKSQLMLESINELQRKEKSLQEENKVLQKELVEKQKVQKQQVQWDQTQPQTSSSSSSFMMREALPTTNISNYPAAAGERIEDVAAGQPQHVRIGLPPWMLSHING

SEQ ID NO: 16423 - protein, 213 aa, Oryza sativa (indica cultivar-group)
ENSTNRQVTFCKRRAGLLKKARELSILCEADIGIIIFSAHGKLYDLATTGTMEELIERYKSASGEQANACGDQRMDPKQEAMVLKQEINLLQKGLRYIYGNRANEHMTVEELNALERYLEIWMYNIRSAKMQIMIQEIQALKSKEGMLKAANEILQEKIVEQNGLIDVGMMVADQQNGHFSTVPLLEEITNPLTILSGYSTCRGSENGLFLLT

SEQ ID NO: 16424 - protein, 238 aa, Oryza sativa (indica cultivar-group)
ENTMNRQVTFFKRRNGLLKKAHEISVLCDADVALIVFSTKGKLYEFSSHSSMEGILERYQRYSFDERAVLEPNTEDQENWGDEYGILKSKLDALQKSQRQLLGEQLDTLTTKELQQLEHQLEYSLKHIRSKKNQLLFESISELQKKEKSLKNQNNVLQKLMETEKEKNNAIINTNREEQNGATPSTSSPTPVTAPDPIPTTNNSQSQPRGSGESEAQPSPAQAGNSKLPPWMLRTSHT

SEQ ID NO: 16425 - protein, 238 aa, Oryza sativa (indica cultivar-group)
ENSTNRQVTFAKRRNGLLKKAYELSVLCDAEVALIVFSNRGKLYEFCSTQSMTKTLEKYQKCSYAGPETAVQNRESEQLKASRNEYLKLKARVENLQRTQRNLLGEDLDSLGIKELESLEKQLDSSLKHVRTTRTKHLVDQLTELQRKEQMVSEANRCLRRKLEESNHVRGQQVWEQGCNLIGYERQPEVQQPLHGGNGFFHPLDAAGEPTLQIGYPAEHHEPMNSACMNTYMPPWLP

SEQ ID NO: 16426 - protein, 196 aa, Oryza sativa (japonica cultivar-group)
MGRGRSEIKRIENPTQRQSTFYKRRDGLFKKARELAVLCDADLLLLLFSASGKLYHFLSPTVPSVREFVERYEATTHTKVWADIRQERRAELEKVGSMCDLLEKQLRFMTVDDGEEYTVPSLEALEHNLEAAMRKVRSEKDRKIGGEICYLQNIIRGRQEERYGLCDKIAHAQTLKDVECGSTSLSNGLDLKLGFN

SEQ ID NO: 16427 - protein, 233 aa, Oryza sativa (japonica cultivar-group)
MVRGRTELKRIENPTSRQVTFSKRRNGLLKKAFELSVLCDAEVALIVFSPRGRLYEFASAPSLQKTIDRYKAYTKDHVNNKTIQQDIQQVKDDTLGLAKKLEALDESRRKILGENLEGFSIEELRGLEMKLEKSLHKIRLKKTELLEQQIAKLKEKERTLLKDNENLRGKHRNLEAAALVANHMTTTTAPAAWPRDVPMTSSTAGAADAMDVETDLYIGLPGTERSSNRSETG

SEQ ID NO: 16428 - protein, 265 aa, Oryza sativa (japonica cultivar-group)
MGRGKIEIKRIENKTSRQVTFCKRRNGLLKKAYELAILCDAEIALIVFSSRGRLYEFSNVNSTRSTIERYKKASASTSGSAPVIDVNSHQYFQQEAAKMRHQIQTLQNANRHLIGESIGNMTAKELKSLENRLEKGISRIRSKKHELLFSEIEYMQKREADLQNENMFLRAKVAEAERAEHDDQQAAEDDEMAPAPAVGGGSSSGTELEALPATFDTREYYQPAPPVSMLAAAAAAAAAQYSSDHHQTALHLGYFKVDSGKGGLL

SEQ ID NO: 16429 - protein, 222 aa, Oryza sativa (japonica cultivar-group)
MARGKVQLRRIENPVHRQVTFCKRRAGLLKKARELSILCEADIGIIIFSAHGKLYDLATTGTMEELIERYKSASGEQANACGDQRMDPKQEAMVLKQEINLLQKGLRYIYGNRANEHMTVEELNALERYLEIWMYNIRSAKMQIMIQEIQALKSKEGMLKAANEILQEKIVEQNGLIDVGMMVADQQNGHFSTVPLLEEITNPLTILSGYSTCRGSEMGYSF

SEQ ID NO: 16430 - protein, 224 aa, Oryza sativa (japonica cultivar-group)
MGRGKIEIKRIENATNRQVTYSKRRTGIMKKARELTVLCDAQVAIIMFSSTGKYHEFCSPSTDIKGIFDRYQQAIGTSLWIEQYENMQRTLSHLKDINRNLRTEIRQRMGEDLDGLEFDELRGLEQNVDAALKEVRHRKYHVITTQTETYKKKVKHSYEAYETLQQELGLREEPAFGFVDNTGGGWDGGAGAGAAADMFAFRVVPSQPNLHGMAYGGNHDLRLG

SEQ ID NO: 16431 - protein, 224 aa, Oryza sativa (japonica cultivar-group)
MGRGKIEIKRIKNATNRQVTYSKRRTGIMKKARELTVLCDAQVAIIMFSSTGKYHEFCSPSTDIKGIFDRYQQAIGTSLWIEQYENMQRTLSHLKDINRNLRTEIRQRMGEDLDGLEFDELRGLEQNVDAALKEVRHRKYHVITTQTETYKKKVKHSYEAYETLQQELGLREEPAFGFVDNTGGGWDGGAGAGAAADMFAFRVVPSQPNLHGMAYGGNHDLRLG

SEQ ID NO: 16432 - protein, 235 aa, Oryza sativa (japonica cultivar-group)
MGRGKIVIRRIDNSTSRQVTFSKRRNGIFKKAKELAILCDAEVGLVIFSSTGRLYEYASTSMKSVIDRYGRAKEEQQHVANPNSELKFWQREAASLRQQLHSLQENHRQLMGQDLSGLGVKELQTLENQLEMSIRCIRTKKDQLMIDEIHELNRKGSLIHQENMELYRKVNLIRQENAELYKKLYETGAENEANRDSTTPYNFAVIEEANTPARLELNPPSQQNDAEQTTPPKLG

SEQ ID NO: 16433 - protein, 247 aa, Oryza sativa (japonica cultivar-group)
MGRGKIEIKRIENTTNRQVTFCKRRNGLLKKAYELSVLCDAEVALIVFSSRGRLYEYANNSVKSTVERYKKANSDTSNSGTVAEVNAQHYQQESSKLRQQISSLQNANSRTIVGDSINTMSLRDLKQVENRLEKGIAKIRARKNELLYAEVEYMQKREVELQNDNMYLRSKVVENERGQQPLNMMGAASTSEYDHMVNNPYDSRNFLQVNIMQQPQHYAHQLQPTTLQLGSRPSISFGVDTVRTHVR

SEQ ID NO: 16434 - protein, 246 aa, Oryza sativa (japonica cultivar-group)
MGRGKVQLKRIENKINRQVTFSKRRSGLLKKANEISVLCDAEVALIIFSTKGKLYEYATDSCMDKILERYERYSYAEKVLISAESDTQGNWCHEYRKLKAKVETIQKCQKHLMGEDLESLNLKELQQLEQQLENSLKHIRSRKSQLMLESINELQRKEKSLQEENKVLQKELVEKQKVQKQQVQWDQTQPQTSSSSSSFMMREALPTTNISNYPAAAGERIEDVAAGQPQHVRIGLPPWMLSHING

SEQ ID NO: 16435 - protein, 267 aa, Oryza sativa (japonica cultivar-group)
MGRGKVQLKRIENKINRQVTFSKRRNGLLKKAHEISVLCDAEVAAIVFSPKGKLYEYATDSRMDKILERYERYSYAEKALISAESESEGNWCHEYRKLKAKIETIQKCHKHLMGEDLESLNLKELQQLEQQLESSLKHIISRKSHLMLESISELQKKERSLQEENKALQKELVERQKNVRGQQQVGQWDQTQVQAQAQAQPQAQTSSSSSSMLRDQQALLPPQNICYPPVMMGERNDAAAAAAVAAQGQVQLRIGGLPPWMLSHLNA

SEQ ID NO: 16436 - protein, 249 aa, Oryza sativa (japonica cultivar-group)
MGRGPVQLRRIENKINRQVTFSKRRNGLLKKAHEISVLCDADVALIVFSTKGKLYEFSSHSSMEGILERYQRYSFDERAVLEPNTEDQENWGDEYGILKSKLDALQKSQRQLLGEQLDTLTIKELQQLEHQLEYSLKHIRSKKNQLLFESISELQKKEKSLKNQNNVLQKLMETEKEKNNAIINTNREEQNGATPSTSSPTPVTAPDPIPTTNNSQSQPRGSGESEAQPSPAQAGNSKLPPWMLRTSHT

SEQ ID NO: 16437 - protein, 230 aa, Oryza sativa (japonica cultivar-group)
MVRGKTQMKRIENPTSRQVTFSKRRNGLLKKAFELSVLCDAEVALIVFSPRGKLYEFASASTQKTIERYRTYTKENIGNKTVQQDIEQVKADADGLAKKLEALETYKRKLLGEKLDECSIEELHSLEVKLERSLISIRGRKTKLLEEQVAKLREKEMKLRKDNEELREKCKNQPPLSAPLTVRAEDENPDRNINTTNDNMDVETELFIGLPGRSRSSGGAAEDSQAMPHS

SEQ ID NO: 16438 - protein, 241 aa, Oryza sativa (japonica cultivar-group)
  unsure (1)..(241): unsure at all Xaa locations
MGRGKIVIRRIDNSTSRQVTFSKRRNGLLKKAKELSILCDAEVGLVVFSSTGXLYEFSSTNMKTVIDRYTNAKEELLGGNATSEIKIWQREAASLRQQLHNLQESHKQLMGEELSGLGVRDLQGLENRLEISLRNIRMRKDNLLKSEIEELHVKGSLIHQENIELSRSLNVMSQQKLELYNKLQACEQRGATDANESSSTPYSFRIIQNANMPPSLELSQSQQREGECSKTAAPELGLHLP

SEQ ID NO: 16439 - protein, 233 aa, Oryza sativa (japonica cultivar-group)
MGRGKVQVRRIENEVSRQVTFSKRRPGLLKKAHEIAVLCDVDVAAIVFSAKGNLFHYASSHTTMERILEKYDRHELLSEGNNVIEEFPELEGSMRYDHIKLRGKIEALKKSQRNLMGQELDSLTLQDIQQLEDQIDTSLNNIRSRKEKLLMEKNTILEKKITELETLHTSIRASPTEAAAPPACNIADAFVPNLNICCGDSGEPETVTAPLGWTSSNNGLPWWMLQSSSNGKS

SEQ ID NO: 16440 - protein, 239 aa, Oryza sativa (japonica cultivar-group)
MGRGKVVLQRIENKISRQVTFAKRRNGLLKKAYELSILCDAEVALVLFSHAGRLYQFSSSSNMLKTLERYQRYIYASQDAAAPTSDEMQNNYQEYVNLKAHVEILQQSQRNLLGEDLAPLATNELEQLESQVVRTLKQIRSRKTQVLLDELCDLKRKEQMLQDANRVLKRKLDEIDVEAAPPQPPWNGNCSNGHGGGGGVFSSEPPQPEHFFQALGLHAVDVNQPPAPPPGGYPPEWMA

SEQ ID NO: 16441 - protein, 116 aa, Oryza sativa (japonica cultivar-group)
MVRGKTQMKRIENPTSRQVTFSKRRNGLLKKAFELSVLCDAEVALIVFSPRGKLYEFASARKIRPEKTAKTIFPRVAIELPSKQSHYFHKEISCETGKVRNSENIGNLVLAFRRAI

SEQ ID NO: 16442 - protein, 320 aa, Oryza sativa (japonica cultivar-group)
MGRGKVQLKRIENKINRQVTFSKRRNGLLKKAHEISVLCDAEVAAIVFSPKGKLYEYATDSSLTILLIIKESVNTYTYGYRIMGRMDKILERYERYSYAEKALISAESESEITLPQLTTCTASRSTHGICFQYCLMSKTLGNWCHEYRKLKAKIETIQKCHKHLMGEDLESLNLKELQQLEQQLESSLKHIISRKSHLMLESISELQKKERSLQEENKALQKELVERQKNVRGQQQVGQWDQTQVQAQAQAQPQAQTSSSSSSMLRDQQALLPPQNICSYPPVMMGERNDAAAAAAVAAQGQVQLRIGGLPPWMLSHLNA

SEQ ID NO: 16443 - protein, 175 aa, Capsicum annuum
MGRGKVELKRIDNKINRQVTFAKRRNGLLKKAYELSVLCDAEIALIIFSSRGKLYEFCSSSSMSKTLERYHKHNYGALEGTQPSADSQNNYQEYLKLKTRVEVLQQSQRHMLGEDLGELNTKDLEQLERQLDSSLRQIRSTKTQHMFDQLAELHQKEQSLTEMNKSLKTKVSISP

SEQ ID NO: 16444 - protein, 245 aa, Capsicum annuum
MGRGRVELKRIENKINRQVTFAKRRNGLLKKAYELSVLCDAEVALIIFSNRGKLYEFCSTSSMVKTIEKYQRCSYATLEANQSATDTQNNYHEYLRLKARVELLQRSQRNFLGEDLGTLSTKDLEQLENQLESSLKQIRSRKTQFMLDQLADLQQREQMLAESNRLLRRKLEESTAGFPVRLSWEDGADQAMHQHNRLPHTEGFLQPLGLHSSPPHFGYNPVNTDEVNAAATAHNMNGFIHGWML

SEQ ID NO: 16445 - protein, 227 aa, Lycopersicon esculentum
MGRGRVQLKRIENKINRQVTFSKRRSGLLKKAHEISVLCDAEVGLIVFSTKGKLFEYANDSCMERILERYERYSFAEKQLVPTDHTSPVSWTLEHRKLKARLEVLQRNQKHYVGEDLESLSMKELQNLEHQLDSALKHIRSRKNQLMHESISVLQKKDRALQEQNNQLSKKVKEREKSAQQISGINSSSLFAHTDFYLGTYQSTNVIDNGKWKEVVLHSSKVQLIIL

SEQ ID NO: 16446 - protein, 245 aa, Lycopersicon esculentum
MGRGRVHLKRIENKINRQVTFSKRRSGLLKKAHEISVLCDAEVGLIVFSTKGKLFEYANDSCMERILERYERYSFAEKQLVPTDHTSPVSWTLEHAKLKARLEVLQRNQKHYVGEDLESLSMKELQNLEHQLDSALKHIRSRKNQLMHESISVLQKKDRALQEQNNQLSKKVKEREKEVAQQNQWEINSSSFVLPQQLDSPHLGEAYQSTNVIDNGEVEGGSSSQQQGAANNTVMPQWMLRHLNN

SEQ ID NO: 16447 - protein, 223 aa, Lycopersicon esculentum
MGRGKIEIKRIENNTNRQVTFCKRRNGLLKKAYELSVLCDAEIALIVFSTRGRLYEYSNNNVKATIERYKKATAETSSAYTTQELNAQFYQQESKKLRQQIQMMQNTNRHLVGEGLSSLNVRELKQLENRLERGITRIRSKKHEAILAETEDLHKREIQLEQENAFLRSKIAENERLQELSMMPSGGEEYNAFQQYLARNMLQLNMMETALPSYDPLSPDHKR

SEQ ID NO: 16448 - protein, 201 aa, Lycopersicon esculentum
MARGKVQMKRIENPVHRQVTFCKRRAGLLKKAKELSVLCDAEVGLFIFSAHGKLYELATKGSMQGLIERYIKSTKGVEVAEEAKDTQPLDPKEEINMLKNEIDVLQKGLSYMYGGGAGTMTLDELHSLEKYLEIWMYHIRSAKMDIMFQEIQLLKNKGGILEAANKYLQDKIDEQYTVTNMTQNLTDFQCPLTVQNEIFQF

SEQ ID NO: 16449 - protein, 397 aa, Lycopersicon esculentum
MGRGKVELKRIENKINRQVTFAKRRNGLLKKAYELSILCDAEIALIIFSSRGKLYEFCSNSSMSKTLERYHRYNYGTLEGTQTSSDSQNNYQEYLKLKTRVEMLQQSQRHLLGEDLGQLGTKDLEQLERQLDSSLRQIRSTKTQHILDQLAELQQKEQSLTEMNKSLRIKLEELGVTFQTSWHCGEQSVQYRHEQPSHHEGFFQHVNCNNTLPISMEQILERYERYSYAERRLLANNSESPVQENWSLEYTKLKARIDLLQRNHKHYMGEDLDSMSLKDLQNLEQQLDSALKLIRSRKNQLMHESISELQKKERAILEENNMLTKKIKEKDKIVEQQGEWHQQTNQVSTSTSFLLQPHQCLNMGGNYQDEVAEARRNNELDLNLDSLYPLYNMNKHL

SEQ ID NO: 16450 - protein, 242 aa, Lycopersicon esculentum
MGRGKVELKRIENKINRQVTFAKRRNGLLKKAYELSILCDAEIALIIFSSRGKLYEFCSNSSMSKTLERYHRYNYGTLEGTQTSSDSQNNYQEYLKLKTRVEMLQQSQRHLLGEDLGQLGTKDLEQLERQLDSSLRQIRSTKTQHILDQLAELQQKEQSLTEMNKSLRIKLEELGVTFQTSWHCGEQSVQYRHEQPSHHEGFFQHVNCNNTLPISYGYDNVQPENAAPSTHDATGVVPGWML

SEQ ID NO: 16451 - protein, 248 aa, Lycopersicon esculentum
MDFQSDLTREISPQRKLGRGKIEIKRIENTTNRQVTFCKRRNGLLKKAYELSVLCDAEVALVVFSNRGRLYEYANNSVKATIERYKKACSDSSNTGSVSEANAQYYQQEASKLRAQIGNLMNQNRNMMGEALAGMKLKELKNLEQRIEKGISKIRSKKNELLFAEIEYMQKREVDLHNNNQYLRAKIAETERAQHQHQQMNLMPGSSSNYHELVPPPQQFDTRNYLQVNGLQTNNHYPRQDQPPIQLV

SEQ ID NO: 16452 - protein, 244 aa, Lycopersicon esculentum
MGRGKVELRKIENKINRQVTFSKRRGGLVKKAHEISVLCDAEVALIVFSQKGKIFEYSSDSCMEQILERYERYSYAERRLLANNSESPVQENWSLEYTKLKARIDLLQRNHKHYMGEDLDSMSLKDLQNLEQQLDSALKLIRSRKNQLMHESISELQKKERAILEENNMLTKKIKEKDKIVEQQGEWHQQTNQVSTSTSFLLQPHQCLNMGGNYQDEVAEARRNNELDLNLDSLYPLYNMNKHL

SEQ ID NO: 16453 - protein, 222 aa, Lycopersicon esculentum
GKIEIKKIENLTNRQVTFSKRRNGIFKKRKELTVLCDAKISLIMLSSTRKYHEYTSPNTTTKKMIDQYQSALGVDIWSIHYEKMQENLKRLKEINNKLRREIRQRTGEDMSGLNLQELCHLQENITESVAEIRERKYHVIKNQTDTCKKKARNLEEQNGNLVLDLEAKCEDPKYGVVENEGHYHSAVAFANGVHNLYAFRLQPLHPNLQNEGGFGSRDLRLS

SEQ ID NO: 16454 - protein, 222 aa, Lycopersicon esculentum
GKIEIKKIENSTNRQVTYSKRRNGIFKKRKELTVLCDAKISLIMLSSTRKYHEYTSPNTTTKKMIDQYQSALGVDIWSIHYEKMQENLKRLKEINNKLRREIRQRTGEDMSGLNLQELCHLQENITESVAEIRERKYHVIKNQTDTCKKKARNLEEQNGNLVLDLEAKCEDPKYGVVENEGHYHSAVAFANGVHNLYAFRLQPLHPNLQNEGGFGSRDLRLS

SEQ ID NO: 16455 - protein, 222 aa, Lycopersicon esculentum
GKIEIKKIENSTNRQVTYSKRRNGIFKKRKELTVLCDAKISLIMLSSTRKYHEYTSPNTTTKKMIDQYQSALGVDIWSIHYEKMQENLKRLKEINNKLRREIRQRTGEDMSGLNLQELCHLQENITESVAEIRERKYHVIKNQTDTCKKKARNLEEQNGTLVLDLEAKCEDPKYGVVENEGHYHSAVAFANGVHNLYAFRLQPLHPNLQNEGGFGSRDLRLS

SEQ ID NO: 16456 - protein, 246 aa, Lycopersicon esculentum
MGRGRVELKRIENKINRQVTFAKRRNGLLKKAYELSVLCDAEVALLVFSNRGKLYEFCSTSNMLKTLDRYQKCSYGTLEVNRSIKDNEQSSYREYLKLKAKYESLQRYQRHLLGDELGPLTIDDLEHLEVQLDTSLKHIRSTRTQMMLDQLSDLQTKEKLWNEANKVLERKMEEIYAENNMQQAWGGGEQSLNYGQQQHPQSQGFFQPLECNSSLQIGYDPITTSSQITAVTNAQNVNGMIPGWML

SEQ ID NO: 16457 - protein, 246 aa, Lycopersicon esculentum
MGRGRVELKRIENKINRQVTFAKRRNGLLKKAYELSVLCDAEVALLVFSNRGKLYEFCSTNNMLKTLDRYQKCSYGTLEVNRSIKDNEQSSYREYLKLKAKYESLQRYQRHLLGDELGPLTIDDLEHLEVQLDTSLKHIRSTRTQMMLDQLSDLQTKEKLWNEANKVLERKMEEIYAENNMQQAWGGGEQSLNYGQQQHPQSQGFFQPLECNSSLQIGYDPITTSSQITAVTNAQNVNGMIPGWML

SEQ ID NO: 16458 - protein, 269 aa, Lycopersicon esculentum
MVFPINQELLVDESSSQLRKTSGGTGGGGRGKIEIKRIENTTNRQVTFCKRRNGLLKKAYELSVLCDAEVSLIVFSSRGRLYEYANNSVRATIDRYKKHHADSTSTGSVSEANTQYYQQEASKLRRQIRDIQTYNRQIVGEALGSLSPRDLKNLEGKLEKAIGRVRSKKNELLFSEIELMQKREIELQNANMYLRAKIAEVERAQEQMNLMPGGGGGGGGGGGGGSDHQYHHQPNYEDARNNSLPVNLLEPNPHYSRRDNGDQTPLQLV

SEQ ID NO: 16459 - protein, 173 aa, Lycopersicon esculentum
MGRGKVELKRIENQTNRQVTFSKRRNGLLKKAYELSILCDAEVALLLFSPSGKAYHFASHDIERTILRYKNEVGLSKNSDQGPRAMEVWRTKIDDMTRTIHELEARDKHFCWRRVIKSWYERLKQLERQLRVGVERIRSKKHKILHEENIHLQKQVKLYEVEGAQGFSIQIQG

SEQ ID NO: 16460 - protein, 224 aa, Lycopersicon esculentum
MGRGRVELKRIEGKINRQVTFAKRRNGLLKKAYELSVLCDAEVALIIFSNRGKLYEFCSSSSMLKTLERYQKCNYGAPEPNISTREALEISSQQEYLKLKGRYEALQRSQRNLLGEDLGPLNSKELESLERQLDMSLKQIRSTRTQLMLDQLTDYQRKEHALNEANRTLKQRLMEGSQLNLQCSQMHKLWAMAGKQLKLRAMASFILWIVNLLCKLGIRMIQLQ

SEQ ID NO: 16461 - protein, 159 aa, Lycopersicon esculentum
MVRGKTQMRRIENATSRQVTFSKRRNGLLKKAFELSVLCDAEVGLIIFSPRGKLYEFASSSTQEIIRGNKRHTKDRVQPENQAGPQYLQYMQHEAANLMKKIELLETAKRKFLGEGLQSCTLQEVQQIEKQLERSVGTIRARKLQVFKEQVERLKKKKK

SEQ ID NO: 16462 - protein, 227 aa, Nicotiana tabacum
MARGKIQIKRIENQTNRQVTYSKRRNGLFKKANELTVLCDAKVSIIMISSTGKLHEFISPSVTTKQLFDLYQKTVGVDLWNSHYEKMQEQLRKLKDVNRNLRREIRQRMGESLNDLNYEQLEELNENVDNSLKLIRERKYKVIGNQIDTYKKKVRNVEEIHRNLLLEFDARQEDPYGLVEQEGDYNSVLGFPNGGPRILALRLQPNHQPNHHLHSGGGSDITTFALA

SEQ ID NO: 16463 - protein, 242 aa, Nicotiana tabacum
MGRGKVQLRRIENKINRQVTFSKRRGGLVKKAHEISVLCDAEVALIVFSHKGKIFEYSSDSCMEQILERYERYSYTERRLLASNSESSVQENWSLEYAKLKAKIDLLQRNHKHYMGEDLDSLNLKDLQNLEQQLDTSLKLIRSRKNQLMHESISMLQKKEKAIQEENNMLSKKIKEKDNTVGQQVEWHQQNQVPTSTSFLLQPHPCLNIGGNYQEEAEEARRNELDLNLDSLYPCHMGCFAT

SEQ ID NO: 16464 - protein, 245 aa, Nicotiana tabacum
MGRGRVELKRIENKINRQVTFAKRRNGLLKKAYELSVLCDAEVALIIFSSRGKLSEFCSTSSMMQTLEKYQQCSYASLDPMQSASDHTQNNYHEYLRLKARVELLQRSQRNLLGEDLGTLNSGELEHLEHQLDSSLKQIRSRKTQNMLDQLADLQQKEQMLAEANKQLRRKLEESAARVPLRLSWDNGGQTMQHNRQLPPQTEGFFQPLGLNSSPQFGYSPMGGNEVNAAATANNMNGFIPGWML

SEQ ID NO: 16465 - protein, 245 aa, Nicotiana tabacum
MGRGRVQLKRIENKINRQVTFSKRRSGLLKKAHEISVLCDAEVGLIVFSTKGKLFEYSTDSCMERILERYERYSYAERQLTATDHETPGSWTLEHAKLKARFEVLQRNQRHYAGEDLDSLSMKELQNLEHQVDSALKHIRSRKNQLMHESISELQKKDKALQEQNNKLSKQVKEREKELAQQTQWEQQSHDHLNSSTFVLSQPLSSLHLGEAYSTAGDNGEVEGSSRQQQQNTVMPPWMLRHLNN

SEQ ID NO: 16466 - protein, 242 aa, Nicotiana tabacum
MGRGKVQLRRIENKINRQVTFSKRRGGLAKKAHEISVLCDAEVALIVFSHKGKIFEYSSDSCMEQILERYERYSYAERRLLSSNSESSVQENWSLEYAKLKAKIDLLQRNHKHYMGEDLDSLNLKDLQNLEQQLDTSLKLIRSRKNQLMHESISMLQKKEKAIQEENNMLSKKIKEKDKTVGKQAEWHQQNQVPNSASFLLQPHPCLNIGGNYQEEAEEARRNELDLNLDSLYPCHMGCFAT

SEQ ID NO: 16467 - protein, 245 aa, Nicotiana tabacum
MGRGRVQLKRIENKINRQVTFSKRRSGLLKKAHEISVLCDAEVGLIVFSTKGKLFEYSTDSCMERILERYERYSYAERQLTATDHETPGSWTLEHAKLKGRLEVLQRNQGHYAGEDLDSLCMKELQNLEHQLDSALKHIRSRKNQLMHESISELQKKDEALQEQNNNLSKQVKEGEKELAQQTQWEQQSHDHLNSSSFVLTQPLSSLHLGEAYPTAGDNGELEGSSRQQQQNTVMPPWMLRHLNG

SEQ ID NO: 16468 - protein, 209 aa, Nicotiana tabacum
MGRGKIEIKRIENSSNRQVTYSKRRNGILKKAKEISVLCDARVSVIIFASSGKMHEFSSTSLVDILDQYHKLTGRRLWDAKHENLDNEINKVKKDNDNMQIELRHLKGEDITSLNHRELMMLEDALDNGLTSIRNKQNDLLRMMRKKTQSMEEEQDQLNWQLRQLEIASMNRNMGEIGEVFHQRENEYQTQMPFAFRVQPMQPNLQERF

SEQ ID NO: 16469 - protein, 245 aa, Petunia x hybrida
MGRGRIQLKRIENKISRQVTFSKRRSGLLKKAHEISVLCDADVALIVFSTKGKLFEYSTESSMESILERYERYSYAERKLNANDSDPKENWTLEYPKLMSRIELIQRNIRHYMGQDLDPLSLRELQSLEQQIDTALKRIRSRKNQLMHESISELHKKERALQEQNNLMTKKLKENEKTQSGQTQPISSQNDATFMVPQPPSLSHHVANLTIGGAFGAKTVTNTNGVQASNSQMPPWMIRHVNNEG

SEQ ID NO: 16470 - protein, 231 aa, Petunia x hybrida
MARGKIQIKRIENQTNRQVTYSKRRNGLFKKANELTVLCDAKVSIIMISSTGKLHEFISPSITTKQLFDLYQKTVGVDLWNSHYEKMQEQLRKLKEVNRNLRKEIRQRMGESLNDLNYEQLEELMENVDNSLKLIRERKYKVIGNQIETFKKKVRNVEEIHRNLLLEFDARQEDPYGLVEQEGDYNSVLGFPNGGHRILALRLQPNHHQPNHHHHLHSGGGSDITTFALLE

SEQ ID NO: 16471 - protein, 225 aa, Petunia x hybrida
MGRGKIEIKKIENSTNRQVTYSKRRNGLFKKAKELTVLCDAKICLIMLSSTRKFHEYTSPNTTTKKMIDLYQRTLGVDIWNKHYEKMQENLNRLKDINNKLRREIRQRTGEDMSGLNLQELCHLQGNVSDSLAEIRERKYHVIKTQTDTCRKRVRNLEEQHGSLVHDLEAKSEDPTYGVVENEGHFNSAMAFANGVHNLYAFRLQTLHPNLQNGGGFGSRDLRLA

SEQ ID NO: 16472 - protein, 228 aa, Petunia x hybrida
MGRGKIEIKRIENNTNRQVTFCKRRNGLLKKAYELSVLCDAEIALIVFSTRGRVYEYANNNIKGTIERYKKATAETSNACTTQELNAQFYQQESKKLRQQIQLLQNTNRHLVGEGLSALNVRELKQLENRLERGITRIRSKKHEMILAETENLQKREIQLEQENTFLRSKIAENERLQELSMMPATGQEYNAFQQYFARNMLQLNMMEGGVPSYDPLPAHDKKSLQLE

SEQ ID NO: 16473 - protein, 245 aa, Petunia x hybrida
MGRGRVELKRIENKINRQVTFAKRRNGLLKKAYELSVLCDAEVALIIFSSRGKLYEFCSTSSMMKTLEKYQQCSYASLDPMQSANDTQNNYHEYLRLKARVELLQRSQRNLLGEDLGSLNSKELEQLEHQLDSSLKQIRSKKTQHMLDQLADLQQKEQMLAEANKQLRRKLEESAARIPLRLSWDNGGQPMQHNRLPPQTEGFFQPLGLNSSSPQFGYSPMGANEVNNAVSTAQNMNGFIPGWML

SEQ ID NO: 16474 - protein, 242 aa, Petunia x hybrida
MEFQSDLTREISPQRKLGRGKIEIKRIENTTNRQVTFCKRRNGLLKKAYELSVLCDAEVALIVFSSRGRLYEYANNSVKATIERYKKACSDSSNTGSIAEANAQYYQQEASKLRAQIGNLQNQNRNFLGESLAALNLRDLRNLEQKIEKGISKIRAKKNELLFAEIEYMQKREIDLHNNNQYLRAKIAETERSQQMNLMPGSSSYDLVPPQQSFDARNYLQVNGLQTNNHYPRQDQPPLQLV

SEQ ID NO: 16475 - protein, 225 aa, Petunia x hybrida
MGRGKIEIKRIENNTNRQVTFCKRRNGLLKKAYELSVLCEAEIALIVFSTRGRVYEYSNNNIRAIIDRYKKATVETSNAFTTQELNAQFYQQESKKLRQQIQLIQNSNRHLVGEGLSSLNVRELKQLENRLERGIARIRSKKHEMILAESEDLQKREIQLEQENAFLRSKIAENERLQELSMMPAGGQEYNAIQQYLARNMLQLNMMEGVPSYPLPSDKKSLDLE

SEQ ID NO: 16476 - protein, 245 aa, Petunia x hybrida
MGRGRVELKRIENKINRQVTFAKRRNGLLKKAYELSVLCDAEVALIIFSNRGKLYEFCSTSSMTKTIEKYQRCSYATLEANQSATDNQNNYHEYLRLKARVELLQRSQRNLLGEDLGTLSTKDLEQLENQLESSLKQIRSRKTQFMLDQLADLQQREQMLAESNKQLRQKLEESVAGIPHRLCWEDGLQAMQHNSRLPQTEGFFQPLGLNSSNSPQFGYNPAGTDVENAAATTHNMNGFIHGWML

SEQ ID NO: 16477 - protein, 212 aa, Petunia x hybrida
MGRGKIEIKRIENSSNRQVTYSKRRNGIIKKAKEITVLCDAKVSLIIFGNSGKMHEYCSPSTTLPDMLDGYQKTSGRRLWDAKHENLSNEIDRIKKENDSMQVKLRHLKGEDINSLNHKELMVLEEGLTNGLSSISAKQSEILRIVRKNDQILEEEHKQLQYALHQKEMAAMGGNMRMIEEVYHQRDRDYEYQQMPFALRVQPMQPNLHERM

SEQ ID NO: 16478 - protein, 242 aa, Petunia x hybrida
  unsure (1)..(242): unsure at all Xaa locations
MEFQSDLTREISPQRKLGRGKIEIKRIENTTNRQVTFCKRRNGLLKKAYELSVLCDAEVALIVFSSRGRLYEYANNSVKATIERYKKACSDSSNTGSIAEANAQYYQQEASKLRAQIGNXQNQNRNFLGESLAALNLRDLRNLEQKIEKGISKIRAKKNELLFAEIEYMQKREIDLHNNNQYLRAKIAETERSQQMNLMPGSSSYDLVPPQQSFDARNYLQVNGLQTNNHYPRQDQPPLQLV

SEQ ID NO: 16479 - protein, 212 aa, Petunia x hybrida
MGRGKIEIKRIENSSNRQVTYSKRRNGIIKKAKEITVLCDAKVSLIIFGNSGKMHEYCSPSTTLPDMLDGYQKTSGRRLWDAKHENLSNEIDRIKKENDNMQVKLRHLKGEDINSLNHKELMVLEEGLTNGLSSISAKQSEILRMVRKNDQILEEEHKQLQYALHQKEMAAMGGNMRMIEEVYHQRDRDYEYQQMPFALRVQPMQPNLHERM

SEQ ID NO: 16480 - protein, 246 aa, Petunia x hybrida
MGRGRVQMKRIENKINRQVTFSKRRSGLLKKAHEISVLCDAEVGLIVFSTKGKLFEYATDSCMERILERYERYSYAERQLVSTDHSSPGSWNLEHAKLKARIEVVQRNQRHYMGEDLDSLSMKDLQNLEQQLDSSLKHIRSRKNQLMHESISELQKKDKSLQEQNNLLSKKVKEREKELAQQTQWEQQNNHHEINSSSSFVLPQPLDSPHLGEAYQSTVDNGEVEGASQQQPANTMPPWMLRHLNG

SEQ ID NO: 16481 - protein, 218 aa, Petunia x hybrida
MVRGKTQMRRIENATSRQVTFSKRRNGLLKKAFELSVLCDAEVGLVIFSPRGKLYEFASSCMQEIIERYKRHTKDKVQNENQAGEQNLQLQHEAASLMKKIELLEISRRRLMGEGLQSCTLQEIQQLEKQLERSVSTIRARKIQVFKEQIARLKEKEKILAAENAMLKEKFGGFQERQVSSGEQVGEALCAEGNEKSDVETELFIGPPEGRIRRPSQN

SEQ ID NO: 16482 - protein, 268 aa, Petunia x hybrida
MIIMGRGKIEVKRIENKTSRQVTFSKRRAGLLKKTHELSVLCDAQIGLIIFSSKGKLFEYCSQPHSMSQIISRYLQTTGASLPVEDNRVQLYDEVAKMRRDTLNLQLSLQRYKGDDLSLAQYEELNELEKQLEHALNKIRARKLELMQQQMENLKKTEKMLEKENHDMYQWLMNNQMYKQESAAMDHEDHHHHHEHQQAITELNLLGEQPLLSHFTFFGDQEQPSTSTVNHFASISLTSPPANSISPYRLQPSHPNLQDSHVHGPSYD

SEQ ID NO: 16483 - protein, 218 aa, Petunia x hybrida
MQEMVRGKVQMKRIENATSRQVTFSKRRNGLMKKAYELSVLCDAEVAVVIFSQRGRLYEFSSSSMQKTIDRYRECARETLTNNSIQAQQQIQYLKEETENMAKKIEVLEVSRRKLTGQSLGSCSMNELQQIDSQLERSLKNIRARKSQLFEDEIERLKAKKNLLLEENARLSEKCGQMSREPALAPPDPLIQQQEKGNCSLSIKNSEVETDLFIGLRS

SEQ ID NO: 16484 - protein, 245 aa, Petunia x hybrida
MGRGRVQLKRIENKINRQVTFSKRRSGLLRKAHEISVLCDAEVGLIVFSTKGKLFEYSTDSCMERILERYERYSYAERQLSGATDNDTPGSWTLEHAKLKARLEVLQRNQKHYAGEDLDSLSMKELQNLEQQLDSALKQIRSRKNQLMHESISELQKKDKALQEQNNKLSKQVKEREKELAQQSQWEPQSHDLNSSSFVLSQPLNSLHLGEAYPSAGDNGEVEGSSRQQPPNTVMPPWMLRHLNG

SEQ ID NO: 16485 - protein, 253 aa, Petunia x hybrida
MGRGRVELKRIENKINRQVTFSKRRNGLLKKAYELSVLCDAEVALIIFSSRGKLYEFGNAGITKTLERYQRCCLNPQDNCGERETQSWYQEVSKLKGKFEALQRTQRHLLGEDLGPLSVKELQNLEKQLEGALAQARQRKTQIMMEQMEELRRKERHLGDVNKQLKVKVSLELSSLEAEGQAGLNRALPFLWTSNALEAGNSNFPVHHSQSNPMDCGPDPVLQYRDHHYMAADGPSGSRSMAVETNIMQGWGL

SEQ ID NO: 16486 - protein, 215 aa, Petunia x hybrida
MVRGKTQMRRIENATSRQVTFSKRRNGLLKKAFELSVLCDAEVSLIIFSTRGKLYEFSSSSMQEIIERYRRHSEDVQGEKPAVEQNNMQNLKLDAASLMKKIEILETSKRKLLGEDLGSCSLEELQQIEKQLERSISTIRARKMEVFREQIERLKGNVKVLATENAMLWEKCGDLEMQQTSGGEDLSIEGSEKSDVETELFIGLPECRTKRPLQN

SEQ ID NO: 16487 - protein, 216 aa, Petunia x hybrida
MVRGKTQMRRIENATSRQVTFSKRRNGLLKKAFELSVLCDAQVGLVIFSPRGKQYEFSSSSMQEIIERYKGHTKDKVQTENQAGEQNLQHETAGLMKKIEFLETSKRKLLGEGLGSCTLEELQKIEKQLERSVSIIRARKMQVFKEQIEKLNEKEKALAAENAMLREKFGGLQQRQASSGEKEGEVVCTEGSDKSDVETELFIGPPECRIRHRLQN

SEQ ID NO: 16488 - protein, 247 aa, Petunia x hybrida
MVFPNQEFESSSSQRKSGRGKIEIKRIENTTNRQVTFCKRRNGLLKKAYELSVLCDAEVALIVFSSRGRLYEYANNSVRATIDRYKKHHADSTSTGSVSEANTQYYQQEAAKLRRQIRDIQTYNRQIVGEALSSLSPRGLKNLEGKLEKAIGRVRSKKNELLFSEIELMQKREIEMQNANMYLRAKIAEVERATQQMNLMHGGGSEYQQQPMSSTSQPYDARNFLPVNLLEPNPHYSRQDQTALQLV

SEQ ID NO: 16489 - protein, 224 aa, Petunia x hybrida
MGRGRVELKRIENKINRQVTFAKRRNGLLKKAYELSVLCDAEVALIIFSNRGKLYEFCSSSSMLKTLERYQKCNYGAPETNISTREALEISSQQEYLKLKARYEALQRSQRNLLGEDLGPLNSKELESLERQLDMSLKQIRSTRTQLMLDQLQDLQRKEHALNEANRTLKQRLMEGSTLNLQCSKMHKMWATADKQLKLREMASFILWNVNPLYKLGIKMIQLQ

SEQ ID NO: 16490 - protein, 241 aa, Petunia x hybrida
MGRGRVELKRIENKINRQVTFAKRRNGLLKKAYELSVLCDAEVALIIFSNRGKLYEFCSSSSMLKTLERYQKCNYGAPETNISTREALEISSQQEYLKLKARYEALQRSQRNLLGEDLGPLNSKELESLERQLDMSLKQIRSTRTQLMLDQLQDLQRKEHALNEANRTLKQRLMEGSTLNLQWQQNAQDVGYGRQATQTQGDGFFHPLECEPTLQIGYQNDPITVGGAGPSVNNYMAGWLP

SEQ ID NO: 16491 - protein, 240 aa, Petunia x hybrida
MGRGKVELKRIENKINRQVTFAKRRNGLLKKAYELSVLCDAEVALIIFSNRGKLYEFCSSSSMSTTLEKYHRYCYGALEGSQPSTDSQNIYQEYLKLKTRVEALQQSQRHMLGADLGQLGTKDLEQLERQLDSSLRQIRSTRTQNMLDQLSELQEKQEQSLIEMNKSLRMKLEELGVAFQTSMHSGEESVQYRQQPAEPEGLFHPVECNNSLPIRYNTLPREHVVPSAQDSTGVLPGWML

SEQ ID NO: 16492 - protein, 210 aa, Petunia x hybrida
MGRGKIEIKRIENSSNRQVTYSKRRNGILKKAKEISVLCDARVSVIIFASSGKMHEFSSTSLVDILDQYHKLTGRRLLDAKHENLDNEINKVKKDNDNMQIELRHLKGEDITSLNHRELMILEDALENGLTSIRNKQNEVLRMMRKKTQSMEEEQDQLNCQLRQLEIATMNRNMGEIGEVFQQRENHDYQNHMPFAFRVQPMQPNLQERL

SEQ ID NO: 16493 - protein, 246 aa, Petunia x hybrida
MGRGRVELKKIENKINRQVTFAKRRNGLLKKAYELSVLCEAEVALIIFSNRGKLYEFSSTSNMVKTLDRYQKCSYGTLEVNHRSVKDNNEERIYREYLKLKAKYESLQRYQRQLLGDELGPLNIDELEHLELQLDSSLKLIKSTRTQLMLDQLSDLQTKEKLWVEANKVLERKLEQIYAENNIQQSWGGGEQSGAYGQQHAQTQGFFQPLECNSTLQIGYDPATSSQITAVTSGQNVNGIIPGWML

SEQ ID NO: 16494 - protein, 250 aa, Solanum tuberosum
MGRGRVQLKRIENKINRQVTFSKRRSGLLKKAHEISVLCDAEVGLIVFSTKGKLFEYANDSCMERLLERYERYSFAERQLVPTDHTSPGSWTLEHAKLKARLEVLQRNQKHYVGEDLESLNMKELQNLEHQLDSALKHIRSRKNQLMHESISVLQKQDRALQEQNNQLSKKVKEREKEVAQQNQWDQQNHEINSSTFVLPQQLDSPHLGEAYQNTNVVDNGEVEGGNSSQQQGAANNTVMPQWMLRHLNG

SEQ ID NO: 16495 - protein, 228 aa, Solanum tuberosum
MARGKIQIKKIENQTNRQVTYSKRRNGLFKKANELTVLCDAKVSIVMISSTGKLHEFISPSITTKQLFDLYQKTIGVDIWTSHYEKMQEQLRKLKDVNRNLRKEIRQRMGESLNDLNFEQLEELMENVDNSLKLIRERKYKVIGNQIETYRKKVRNVEEIHRNLLLEFDARQEDPYGGLVEQEGDYNSVLGFPTGGHHILALGLQPNNNHHHHLHSGGGSDITTFALG

SEQ ID NO: 16496 - protein, 228 aa, Solanum tuberosum
MARGKIQIKKIENQTNRQVTYSKRRNGLFKKANELTVLCDAKVSIVMISSTGKLHEFISPSITTNNLFDLYQKTIGVDIWTSHYEKMQEQLRKLKDVNRNLRKEIRQRMGESLNDLNFEQLEELMENVDNSLKLIRERKYKVIGNQIETYRKKVRNVEEIHRNLLLEFDARQEDPYGGLVEQEGDYNSVLGFPTGGHHILALGLQPNNNHHHHLHSGGGSDITTFALG

SEQ ID NO: 16497 - protein, 218 aa, Ipomoea batatas
MGRGKVEIRRIEKSTNRRVTFWKRRNGLLKKAMEMGILCDAEVGLMIFSSTGKLHEFATTSIRSVIERYNKTQGDSLQSPLDPTLELKFWQIEVAILRQQLHNMQEDHRKVMGEVYGLSVKDLQNLENQLEMSLSGIRMKKEQILIEQIQELTHKQGSFVHQENFELFNKFQAYGTSDPNAVNGDTISPYDFTISEESQGHIHFQLPQNFSDLARALY

SEQ ID NO: 16498 - protein, 220 aa, Rumex acetosa
MARGKIQIKRIENDTNRQVTYSKRRSGLFKKAKELTILCDAKVSIIMISNTNKLHEFISPNITTKQVYDAYQTTFSPDLWTSHYAKMEQELRNLNEVNRQIRKEIRRRMGCCLEDMSYQELVFLQQDMENAVTNLSERKYKVLSNQIETGKKKLRNVQGIRQNLMQAYDALREDPHCGLVYNGGEYDHVMRSHLVGLHFPREAHIPSAGGSCLTTYTYLE

SEQ ID NO: 16499 - protein, 195 aa, Rumex acetosa
MTRGQIQIRRIENITNRQVTYSKRRNGLFKKAQELVVLCDAKVSIIMISSRNKLHEFTTPGTTTKQIYDMYQQLSGNDVWSSQYAMMLEELRKIKEANGNIRKEIRRRMGFSMEDMSFRELVILQQDMQDSVAKISERKYKAIANQIETTRKKLRNSHGIHRSLVHAFGALNLNEYGADPPTAAGSYLTTYTYLE

SEQ ID NO: 16500 - protein, 252 aa, Antirrhinum majus
MGRGRVQLKRIENKISRQVTFSKRRSGLLKKAHEISVLCDAEVALIVFSTKGKLFEYSTESSMERILERYERYSYAEKKLTSDSHEPEENWCLEYPKLVARIELLERNIRNYVGEDLDHLSMRELQSLEQQLDTALKRTRTRKNQLMHESISQLQKKERSLQDQNNILAKKIKDNEKQQNEKQQDVHEGFAQSSSSINMLLQPPATQLHAVPCLPISGGFQQTVRVEEGGDRTRIADSRSHIPPWLLQHVNQ

SEQ ID NO: 16501 - protein, 247 aa, Antirrhinum majus
MGRGRVELKRIENKINRQVTFAKRRNGLLKKAYELSVLCDAEVALIIFSNRGKLYEFCSSSNMLKTIERYQKSSYGSLEVNHQAKDIEASSYKEYLKLKSKYESLQGYQRHLLGDDLGPLNMNDLEHLEHQLETSLKHIRSTRTQVMLDQLSDLQTKEKMMVDANKALERKLEEIYAANHLQQSWGGGGDHSNAYNDHQHAQSQGFFQPLECNSTLQIGFNDPVASSQMTAPTDAQNMHGLVPGWML

SEQ ID NO: 16502 - protein, 248 aa, Antirrhinum majus
MGRGKVQLKRIENKINRQVTFSKRRGGLLKKAHELSVLCDAEVALIVFSNKGKLFEYSTDSCMDRILEKYERYSFAERQLVSNEPQSPANWTLEYSKLKARIELLQRNHRHYMGEDLDSMSLKEIQSLEQQLDTALKNIRTRKNQLLYDSISELQHKEKAIQEQNTMLAKKIKEKEKEIAQQPQWEHHRHHTNASIMPPPPQYSMAPQFPCINVGNTYEGEGANEDRRNELDLTLDSLYSCHLGCFAA

SEQ ID NO: 16503 - protein, 246 aa, Antirrhinum majus
MASLSDQSTEVSPERKIGRGKIEIKRIENKTNQQVTFCKRRNGLLKKAYELSVLCDAEVALVVFSSRGRLYEYANNSVKATIDRYKKASSDSSLNGSISEANTQYYQQEASKLRAQISNLQNQNRNMLGESLGALSLRELKNLESRVERGISRIRSKKNELLFAEIEYMQKRQEIDLHHNNQYLRAKIAESERVQGQHMNLMPGGSSGYEQLVETQPFDARNYLQVNGLQPNNDYPRQDQLPLQLV

SEQ ID NO: 16504 - protein, 215 aa, Antirrhinum majus
MGRGKIEIKRIENSSNRQVTYSKRRNGIMKKAKEISVLCDAHVSVIIFASSGKMHEFCSPSTTLVDMLDHYHKLSGKRLWDPKHEHLDNEINRVKKENDSMQIELRHLKGEDITTLNYKELMVLEDALENGTSALKNKQMEFVRMMRKHNEMVEEENQSLQFKLRQMHLDPMNDNVMESQAVYDHHHHQNIADYEAQMPFAFRVQPMQPNLQERF

SEQ ID NO: 16505 - protein, 227 aa, Antirrhinum majus
MARGKIQIKRIENQTNRQVTYSKRRNGLFKKAHELSVLCDAKVSIIMISSTQKLHEYISPTTATKQLFDQYQKAVGVDLWSSHYEKMQEHLKKLNEVNRNLRREIRQRMGESLNDLGYEQIVNLIEDMDNSLKLIRERKYKVISNQIDTSKKKVRNVEEIHRNLVLEFDARREDPHFGLVDNEGDYNSVLGFPNGGPRIIALRLPTNHHPTLHSGGGSDLTTFALLE

SEQ ID NO: 16506 - protein, 239 aa, Antirrhinum majus
MEFPNQDSESLRKNGRGKIEIKRIENITNRQVTFCKRRNGLLKKAYELSVLCDAEVALVVFSSRGRLYEYANNSVRATIERYKKASADSSNSVSTSEANTQFYQQEANKLRRQIREIQTSNRQMLGEGVSNMALKDLKSTEAKVEKAISRIRSKKNELLFAEIEHMQKRELELHNANMFLRAKIAEGERAQQQMNLMPGSDYQPMTSQSYDVRNFLPMNLMEPNQQQYSRHDQTALQLV

SEQ ID NO: 16507 - protein, 247 aa, Antirrhinum majus
MGRGKIEVKRIENNTSRQVTFSKRRSGLMKKTHELSVLCDAQIGLIVFSTKGKLTEYCTPPFSMKQIIDRYVKAKGILPEMENRAGPHADNDQVIKELTRMKEETLNLQLNLQRYKGDDLSTVRFEELTELEKLLDQSLNKVRARKLELLHEQMENLKRTEFMLEKENQEMYHWLMSNQIQRQAEVEHHHQQQVMTELKLVEQQQPLMNEFPFFGEDLHLGTLPLLDTHSYRLQPTQPNLQDPAQIN

SEQ ID NO: 16508 - protein, 242 aa, Antirrhinum majus
MGRGRVELKRIENKINRQVTFAKRRNGLLKKAYELSVLCDAEVALIIFSNRGKLYEFCSSTSMLNTLERYQKCNYGPPETNVSTREALELSSQQEYLKLKARYEALQRSQRNLLGEDLGPLNSKELESLERQLDMSLKQIRSTRTQAMLDTLTDLQRKEHALNEANRSLKHRLMDGSQISLQWNPNAEDHVGYGRQPSQPSADGFYHPLECEPTLHIGFQSDQITVAGAGPSVNNYISGWLP

SEQ ID NO: 16509 - protein, 243 aa, Antirrhinum majus
MGRGRVELKRIENKINRQVTFAKRRNGLLKKAYELSVLCDAEVALIIFSNRGKLYEFCSNSGTMLKTLERYQKCNYGAPEANVSTREALELSSQQEYLKLKARYEALQRSQRNLLGEDLGPLNSKELESLERQLDMSLKQIRSTRTQAMLDTLTDLQRKEHALNEANRSLKHRLMEGSQISLQWNPNAHDMGYGRQAAAQPQGDGFFHPLECEPTLQMGFQSEITVGAAGPSVNNYNMTGWLP

SEQ ID NO: 16510 - protein, 92 aa, Mimulus guttatus
ARGKIQIKRIENQTNRQVTYSKRRNGLFKKAHELTVLCDAKVSILMISSTQKLHEHISPSITTKQMFDQYQKAVGVDVWNTHYERMQEHLRK

SEQ ID NO: 16511 - protein, 232 aa, Chrysanthemum x morifolium
MRGKIQIKKIENSTNRQVTYSKRRNGLFKKASELTVLCDAKVSIIMVSCTDKLHEYISPSITMKQFFDQYQKTTGIDLWNSHYQKMQEELRQQKEVNRNLRKQIRQRLGDCLEDLGFEELLALEKDSQEAVYIIRERKLKVIGNKVETSKKKVRSAQDVYKKLMHEFDIRGEDPQYGMIEDGVDYENVYGYPHMGAQHILTLRLQPDHPNNLHAIATGATTSSDLTTYGLFG

SEQ ID NO: 16512 - protein, 196 aa, Chrysanthemum x morifolium
MGTGKIEIKRIENTSNRQVTYSKRKNGIIKKAKEITVLCDANVSLVIYGSSGKMYEYCSPKTNLIDMLDRYQRLSGNKLWDAKHENLQNEIDRIKKENESMQIELRHLKGEDITSLNYEELIAYEDALENGLTNIREKKDDIPKIMRKHEQVLEEENKHLMYLVQQSEMAAMGDYQAHEPFSFRVQPMQPNLHERM

SEQ ID NO: 16513 - protein, 229 aa, Chrysanthemum x morifolium
MARGKIQIKKIENSTNRQVTYSKRRNGLFKKASELTVLCDAKVSIIMVSCTDKLHEYISPSITTKQFFDQYQKASGIDLWNSHYEKMQEVLRQLKDVNKKLRTHIRQRLGDCLDHLGFEELLDLEKESQEAVYVIRERKLKVIGNKLETSKKKVRSAQDVYKKLMHEFDIRGEDPQFGMIEDAGEYETIYGYPPHIATQRILTLRLQPNHPDNLHAATASDLTTYSLLG

SEQ ID NO: 16514 - protein, 265 aa, Chrysanthemum x morifolium
MANSDAFELDFSCIDRSMSFPDESADMSPQRKLGKGKIEIKRIENTTNRQVTFCKRRNGLLKKAYELSVLCDAEVALIVFSSRGRLYEYANNSVRGTIDRYKKACLDPPSSGSVSEANAQYYQEESGKLRSQIANLQNQNRQFYRNIMGESLTDMPMKDLKNLETKLEKAITRIRSKKNELLFAEIEYMQKRELELHNNNQFLRAKIAENERSAQQQHMSLMPGSSDYELVTPHQPFDGRNYLQSNEMQPSNDYSCQDQTPLQLV

SEQ ID NO: 16515 - protein, 91 aa, Mimulus nasutus
  unsure (1)..(91): unsure at all Xaa locations
ARGKIQIKRIENQTXRQXTYSKRRNGLFKKAHELTVLCDAKVSILMISSTQKLHEYISPSITTKQMFDQYQKAVGVDVWNTHYERMQEHLR

SEQ ID NO: 16516 - protein, 199 aa, Dicentra eximia
AGIMKKARELTVLCDAEVSLIMFSSTGKFSEYISPSATTKRMFDRYQQVSGVNLWNSHYERMQDNLNKQKEINNKLRREIRQRMGEDLNDLSIEELRGLEQNMDNSLKIVRDRKYHVITTQTETYRKKLRNLHETHNNLLREFEGRDEDTHYALANEGDYETALEMANGGQNIFAFRLQPSQPNLHDGGGYGSHDLRLA

SEQ ID NO: 16517 - protein, 167 aa, Helianthus annuus
MGRGKIEIKRIENTSNRQVTYSKRKNGIIKKAKEITVLCDANVSLVIYGSSGKMYEYCSPKTNLIDMLDRYQRLSGNKLWDAKHENLQNEIDRIKKENESMQIELRHLKGEDMTSLNYEELIGYEDALENGLTNIREKKDEIPKIMRKREQVLEDVVIYAFMQIMLR

SEQ ID NO: 16518 - protein, 196 aa, Helianthus annuus
MGRGKIEIQRIDNTIHRLVTYSKRKNGIIRKAKEITVLCDANVSLVVYGSSGKMYEYCSPNTNLTDMLDRYPRLSGNKLWDAKHENLQIEIDRIKKENESMQIELRHLKGEDITSLNYEELIAFEDALENGLTHIREKKDEIPQIMRKHEQVLEEENKHLMYMVQQSEMAAMGDYQADGPFSFRVQPMQPNLHERM

SEQ ID NO: 16519 - protein, 210 aa, Helianthus annuus
MGRGRIEIQKIENNTNRQVTYSKRRNGIFKKAHELTVLCDAKVSLIMFSNTGKFHEYISPSTTTKKIYDMYQTTLGFDLWSSHYERMQETLKKLKDSNNKLRREIRQRVLGEDLDGLDMNDLTILEQHMQDSLTVVRERKVKNLEQRNCNLRLDYDTIHQLEKKYGMVENEVGYESTIAYSNLYGFCENPNNNIIHGSGSGYEPHGLRLD

SEQ ID NO: 16520 - protein, 247 aa, Helianthus annuus
MSFPNESGEMSPQRKLGRGKIEIKRIENTTNRQVTFCKRRNGLLKKAYELSVLCDAEVALIVFSSRGRLYEYANNSVKGTIDRYKKACLDPPSSGSVAEANAQFYQQEAAKLRQQIANLQNQNRQFYRNIMGESLGNMPAKDLKNLEGKLEKGISRIRSKKNELLFAEIEYMPKRENELHNNNQFLRAKIAENERSQQQHMSLMPGSSDYDLVPPHQPFDGRNYLQVNDLQPNNSYSCQDQTPLQLV

SEQ ID NO: 16521 - protein, 267 aa, Helianthus annuus
MENSEAIEHEHDFSCIDRSMSFQNEDSGDISPQRRIGKGKIEIKRIENTTNRQVTFCKRRNGLLKKAYELSVLCDAEVALIVFSSRGRLYEYANNSVRGTIDRYKKSCLDPPSTGSVAEANAQFYQQEATKLRQQIANLQNQNRQFYRNIMGESLADMPGKELKNLESKLEKAINRIRAKKNELLFAEIEYMQKRELELHNSNQFLRARISENERAQQQHMSLMPGSSGYNDLGPHQSFDGLNDLQTNELQLNNNYSCQDQTPLQLV

SEQ ID NO: 16522 - protein, 248 aa, Helianthus annuus
MSFQNEDSGDISPQRRIGKGKIEIKRIENTTNRQVTFCKRRNGLLKKAYELSVLCDAEVALIVFSSRGRLYEYANNSVTGTIDRYKKSCLDPPSTGSVAEANAQFYQQEATKLRQQIANLQNQNRQFYRNIMGESLADMPGKELKNLESKLEKAINRIRAKKNELLFAEIEYMQKRELELHNSNQFLRARIAENERAQQQHMSLMPGSSGYNDLGPHQSFDGLNDLQTNELQLNNNYSCQDQTPLQLV

SEQ ID NO: 16523 - protein, 244 aa, Liquidambar styraciflua
LATTEFPNQSSEGSSSQKKMGRGKIEIKRIENTTNRQVTFCKRRNGLLKKAYELSVLCDAEIALIVFSSRGRLYEYANNSVKSTIERYKKASDTSNPGSVSETNAQFYQQESSKLRRQIRDIQNLNRHIMGEALSSLTFRELKNLEGRLEKGISRIRSKKNELLFAEIEYMQKREIELQNANMYLRAKIAENERNQQQTELMPGSVYETMPSSQPYDRSFLVANLLEPPNHHYSRQDQTPLQLV

SEQ ID NO: 16524 - protein, 261 aa, Lolium perenne
MGRGKVQLKRIENKINRQVTFSKRRNGLLKKAHEISVLCDAEVAVVVFSPKGKLYEYATDSSMDKILERYERYSYAEKALISAESESEGNWCHEYRKLKAKIETIQKCHKHLMGEDLECLNLKELQQLEQQLESSLKHIRSRKSHLMMESISELQKKERSLQEENKALQKELVERQKAARQQQQEQWDRQTQTQQAQNQPQAQTSSSSSSFMMRDQQAHAQQNICYPPVTMGGEAVAAAPGQQGQLRIGGLPPWMLSHLNA

SEQ ID NO: 16525 - protein, 245 aa, Lolium perenne
MGRGKVQLKRIENKINRQVTFSKRRSGLLKKAHEISVLCDAEVGLIIFSTKGKLYEFATDSCMDKILERYERYSYAEKVLISTESEIQGNWCHEYRKLKAKVETIQRCQKHLMGEDLESLNLKELQQLEQQLESSLKHIRARKNQLMHESISELQKKERSLQEENKILQKELIEKQKAHTQQAQWEQTQPQTSSSSSSFMMGEATPATNCSNPPAAASDRAEDATGQPSARTVLPPWMVSHINNG

SEQ ID NO: 16526 - protein, 245 aa, Lolium perenne
MGRGKVEMRRIENKISRQVTFAKRRNGLLKKAYELSLLCDAEVALIIFSSRGRLFEFSSSSCIYKTLERYRTCNHNSQEANPPLENEISYQEYLKLKTRVEFLESSQRNILGQDLGPLSIKELDQIENDIDVSLKHIRSRKSQVLVDQLSDLKNKEQELQDQNKDLRKKLQDTILEKNAVHMLWQDGGQNSGHAIEPYQGLLQYPDHGSSMQIGYHQSYTDQLNNKDIASQNNPNGEPGSSAGWI

SEQ ID NO: 16527 - protein, 246 aa, Lolium perenne
MGRGRVELKRIENKINRQVTFAKRRNGLLKKAYELSVLCDAEVALIVFSNRGKLYEFCSTQSMTKTLEKYQKCSYAGPETTVQNRENEQLKNSRNEYLKLKARVDNLQRTQRNLLGEDLDSLGIKELESLEKQLDSSLKHIRTTRTQIMVDQLTELQRREQMFSEANKCLRIKLEESNQVHGQQLWEHNNNLLSYERQPEVQPPMNGGNGFFHPLDPAGEPTLHIGYPQESLNGSCMTTFMSPWLP

SEQ ID NO: 16528 - protein, 260 aa, Lolium perenne
MGRGRVELKRIENKINRQVTFSKRRNGLLKKAYELSVLCDAEVALIIFSSRGKLYEFGSAGTTKTLERYQHCCYNAQDSSSALSETQSWYQEMSKLKAKFEALQRTQRHLLGEDLGPLSVKELQQLEKQLECSLSQARQRKTQLMMEQVEELRRKERQLGEINRQLKHKLDAEGSSSNSFRAMQQITWAAGTVVDEGAGAYHMHHQQQPNHSAAMDCEPTLQIGYPHQFAAAEQAANNIPRSSAPGGENNFMLGWVLGAN

SEQ ID NO: 16529 - protein, 228 aa, Lolium perenne
MGRGKVELKRIDNKISRQVTFAKRRNGLLKKAYELSVLCDAEVALIIFSTRGRLFEFSTSSCMYKTLERYRSCNYNSKATATPETELSNYQEYLKMKTRVEFLQTTQRNLLGEDLGPLSIKELEQLENQIEISLKNIRSTKSQQSLDQLFELKRKEQQLQDVNKDLRRKIQETSAENVLHMSCQDVGPSGSSGQANQANEQELFHSAVCDPTLHIGFHQSYLDQLNNN

SEQ ID NO: 16530 - protein, 279 aa, Lolium perenne
MGRGPVQLRRIENKINRQVTFSKRRSGLLKKAHEISVLCDAEVALIVFSTKGKLYEYSSQDSNMDVILERYQRYSFEERAIVDQNIGGQANWGDEFGSLKIKLDALQKSQRQLLGEQLDPLTTKELQQLEQQLDSSLKHIRSRKNQLLFESISELQKKEKSLKDQNGVLQKHLVETEKEKSNVLSNIHHREQTNGAANIHRREQMNETTHIHNQEQLNGATTSSPSPTPVAVLDSVATLNIGSSQSREAAGEEPESQPSPAQANSGKLPPWMLRTISNR

SEQ ID NO: 16531 - protein, 241 aa, Lolium perenne
MGRGKVVLQRIENKISRQVTFAKRRNGLLKKAYELSILCDAEVALVLFSHAGRLYQFSSSSNMLKTLERYQRHIFASQDAVVPTSDEMQNNYLEYMELKARVEVLQHSQRNLLGDDLAPLNTSELDQLESQVGKTLRQIRSRKTQVLLDELCDLKRKEHMLEDANLTLKRKLDEMEVDAAPPPPPPPQQQQLPWQNDHGVAVPSYAPPQPDHFFQALECSPSLQPAFRCMDVNQPPPAWMA

SEQ ID NO: 16532 - protein, 187 aa, Oryza sativa
  unsure (1)..(187): unsure at all Xaa locations
MGRGRSEIKRIENPTQRQSTFYKRRDGLFKKARELAVLCDADLLLLLFSASGKLYHFLSPTVPSVREFVERYEATTHTKVWADIRQERRAELEKVGSMCDLLEKQLRFMTVDDGEEYTVPSLEALEHNLEAAMRKVRSEKDRKIGGEICYLQNIIRGRQEERYGLCDKIAHAQTLKDVGGSTSLSNX

SEQ ID NO: 16533 - protein, 412 aa, Oryza sativa
MGRGKIEIKRIENATNRQVTFSKRRGGLLKKANELAVLCDARVGVVIFSSTGKMFEYCSPTCSLRELIEHYQTVTNTHFEEINHDQQIFVEMTRMRNEMEKLDGGIRRFTGDDLSNLTLADINDLEQQLEFSVTKVRARKHQLLNQQLDNLRRKINENHHQAAVGGGDVKAMVEMAPVLSMLTAAPAYYGEESSSTALQLTPPLPVDAAAAAGFRLQPTQPNLQDPGCSSSSFHAAAAGHGLQLWHRRIWSPRVDFANLLGAFGGSGEEEERERKKRRDKKESRRSSRDEQAEEEEEEERRRRKKKKHGDRGKDKERDSKEKHSKEKEKSKRKHKDDDFKEISKDDYFAKNNEFATWLKEEKGKFFSDLSSESARDLFEKFVKTWNKGKLPSQYYEGITRGPRSAHKWNIKV

SEQ ID NO: 16534 - protein, 240 aa, Oryza sativa
MICVIFPFVISSNFIAIHLKNLNFIVQIRGHSMGRGKIAIKRIDNTMNRQVTFSKRRGGLMKKARELAILCDADVGLIVFSCTGRLYDFSSSSSMKSIIERYQEAGEEHCRLLNPMSEAKFWQREVTTLRQQVQNLHHNNRQLLGEEISNFTVRDLQLLQNQVEMSLHSIRNKKDQLLAEEILKLNEKGSLVQKENSELRKKFNIAHQRNIELHKKVKFLFDLLETYKNVDKNGGGLLVI

SEQ ID NO: 16535 - protein, 300 aa, Oryza sativa
MGRGKIEIKRIENKTSRQVTFCKRRNGLLKKAYELAILCDAEIALIVFSSRGRLYEFSNVNSTRSTIERYKKASASTSGSAPVIDVNSHQYFQQEAAKMRHQIQTLQNANRHLIGESIGNMTAKELKSLENRLEKGISRIRSKKHELLFSEIEYMQKREADLQNENMFLRAKVAEAERAEHDDQQAAEDDEMAPAPAVGGGSSSGTELEALPATFDTREYYQPAPPVSMLAAAAAAAAAQYSSDHHQTALHLGYFKAASSRSIAMDANIACIRSNYTVFRKSDDDEDDNNYCGIVRIVRW

SEQ ID NO: 16536 - protein, 257 aa, Oryza sativa
MGRGKIEIKRIENATNRQVTFSKRRGGLLKKANELAVLCDARVGVVIFSSTGKMFEYCSPTCRELIEHYQTVTNTHFEEINHDQQIFVEMTRMRNEMEKLDGGIRRFTGDDLSNLTLADINDLEQQLEFSVTKVRARKHQLLNQQLDNLRRKEHILEDQNSFLCRMINENHHQAAVGGGDVKAMVEMAPVLSMLTAAPAYYGEESSSTALQLTPPLPVDAAAAAGFRLQPTQPNLQDPGCSSSSFHAAAAGHGLQLW

SEQ ID NO: 16537 - protein, 224 aa, Oryza sativa; identical to SEQ ID NO: 16430

SEQ ID NO: 16538 - protein, 224 aa, Oryza sativa
  unsure (1)..(224): unsure at all Xaa locations
MARGKVQLRRIENPVHRQVTFCKRRAGLLKKARELSILCEADIGIIIFSAHGKLYDLATTGTMEELIERYKSASGEQANACGDQRMDPKQEAMVLKQEINLLQKGLRYIYGNRANEHMTVEELNALERYLEIWMYNIRSAKMQIMIQEIQALKSKEGMLKAANEILQEKIVEQNGLIDVGMMVADQQNGHFSTVPLLEEITNPLTILSGYSTCRGSEMGYSFXH

SEQ ID NO: 16539 - protein, 223 aa, Oryza sativa
MGRGKIEIKRIKNATNRQVTYSKRRTGIMKKARELTVLCDAQVAIIMFSSTGKYHEFCSPSTDIKGIFDRYQQAIGTSLWIEQYENMQRTLSHLKDINRNLRTEIRQRMGEDLDGLEFDELRGLEQNVDAALKEVRHRKYHVISTQTETYKKKVKHSYEAYKTLQQELGLCEEPAWFVDNTGGGWDGGAGAGAAADMFAFRVVPSQPNLHGMAYGGNHDLRLG

SEQ ID NO: 16540 - protein, 233 aa, Oryza sativa; identical to SEQ ID NO: 16421

SEQ ID NO: 16541 - protein, 233 aa, Oryza sativa; identical to SEQ ID NO: 16421

SEQ ID NO: 16542 - protein, 275 aa, Oryza sativa
MGRGRIEIKRIENTTSRQVTFCKRRNGLLKKAYELSVLCDAEVALIVFSSRGRLYEYSNNNNVKATIDRYKKAHACGSTSGAPLIEVNAQQYYQQESAKLRHQIQMLQNTNKHLVGDNVSNLSLKELKQLESRLEKGIAKIRARKNELLASEINYMAKREIELQNDNMDLRTKVNTYQIAEEEQQLQQVTVARSAAMELQAAAAAQQQQQNPFAVAAAQLDMKCFFPLNLFEAAAQVQAVAAQRQQIIPTELNLGYHHHLAIPGATAADAPPPHF

SEQ ID NO: 16543 - protein, 270 aa, Oryza sativa
MGRGRIEIKRIENTTSRQVTFCKRRNGLLKKAYELSVLCDAEVALIVFSSRGRLYEYSNNNNVKATIDRYKKAHACGSTSGAPLIEVNAQQYYQQESAKLRHQIQMLQNTNKHLVGDNVSNLSLKELKQLESRLEKGIAKIRARKNELLASEINYMAKREIELQNDNMDLRTKIAEEEQQLQQVTVARSAAMELQAAAAAQQQQQNPFAVAAAQLDMKCFFPLNLFEAAAQVQAVAAQRQQIIPTELNLGYHHHLAIPGATAADAPPPHF

SEQ ID NO: 16544 - protein, 209 aa, Oryza sativa
MGRGKIEIKRIENSTNRQVTFSKRRSGILKKAREISVLCDAEVGVVIFSSAGKLYDYCSPKTSLSRILEKYQTNSGKILWDEKHKSLSAEIDRIKKENDNMQIELRHLKGEDLNSLQPKELIMIEEALDNGIVNVNDKLMDHWERHVRTDKMLEDENKLLAFKLHQQDIALSGSMRDLELGYHPDRDFAAQMPITFRVQPSHPNLQENN

SEQ ID NO: 16545 - protein, 209 aa, Oryza sativa; identical to SEQ ID NO: 16544

SEQ ID NO: 16546 - protein, 605 aa, Oryza sativa
  unsure (1)..(605): unsure at all Xaa locations
MGRGRVELKKIENPTNRQVTFSKRRMGLLKKANELAILCDAQIGVIVFSGTGKMYEYSSPPWRIANIFDRYLKAPSTRFEEMDVQQRIIQEMTRMKDENNRLRIIMRQYMGDDLASLTLQDVSNLEQQIEFSLYKVRLRKQQQLLDQQLLEMRREMQIPGDQSNYLWNLIGEQAQAPLXGESEAVPAVGCGWQQPXMYNQDAESSMTALQLSPQLEYKLQPLQPNLQEEANLHGYVLRLWMAEETKVLLSLPRLERLIARGMWGEAIGYACRFLPRRPPSLPAQRTHLTAEAQTLLLFLHMHRCFADVVAGNETGAAWSDKHRRRYCLARVTGISSHAIAIRRIIQTFVLSDKIRESMDWGRVREKVVRVVRRLVHDTPELAGFLDLPGGMVKPHNVLPIGFGVPSSGQPDQGLSLDSSLRAGCESSEHHQWRYPLRSSEKKGAPVAAITQTMFSTIKTDSENSGTASATKKGTYMHSSQEDCHTENYCQGFIPRKHQREELAPEEDIDPKRQHTTLTFGEASLSSPSGTLHVNSDELHAASELFWSAGCFLDEEDKTVDELLANAVGTFGAFFILLLLLPSQLRLFMSPKDIYVIAQLYLSPSA

SEQ ID NO: 16547 - protein, 233 aa, Oryza sativa
MVRGRTELKRIENPTSRQVTFSKRRNGLLKKAFELSVLCDAEVALIVFSPRGRLYEFASAPSLQKTIDRYKAYTKDHVNNKTIQQDIQQVKDDTLGLAKKLEALDESRRKILGENLEGCSIEGLRARGMKLEKSLHNIRLKKTELLERQIAQLKEKERTLLKDNENLRGKHRNLEAAALVANHMTTTTAPAAWPRDVPMTSSTAGAADAMDVETDLYIGLPGTERSSNRSETG

SEQ ID NO: 16548 - protein, 238 aa, Oryza sativa
  unsure (1)..(238): unsure at all Xaa locations
XFVKVDRLINMGRGKIEIKRIENKTSRQVTFCKRRNGLLKKAYELAILCDAEIALIVFSSRGRLYEFSNFSTRSTIERYKKASASTSGSAPVIDVNSQYFQQEAAKMRHQIQTLQNANRHLIGESIGNMTAKELKSLENRLEKGISRIRSKKHELLFSEIEYMQKREADLQNENMFLRAKVSYPYTVNNHDLHTCLVGGAKVGLNFSSSHKNISFIETYIFVRETKFSPSSQTPLIYI

SEQ ID NO: 16549 - protein, 359 aa, Oryza sativa
MVQCHEVGQPRGERRKVQEEEKHQGQYIDGLSPHRPPLHLISSFPNHSLLLEHTPLFLIIISSLIREELANMHIYKEQEAEPSTGLMMPEPAPVASPGSGGSGGSGSVGAEKIGSRGKIEIKRIENTTNRQVTFCKRRSGLLKKAYELSVLCDAEVALVVFSSRGRLYEYSNNSVKETIERYKKANSDTSNASTVAEINAQHYQQEAAKLKQQITNLQNSNRTLVGDNITTMNHRELKQLEGRLDKGLGKIRARKNELLCAEIEYMQRRETELQNDNMYLKSKVAESERGLQTVNMMGSASTSEYVQNMIHYDPRNFLQFNIMHQPQYYPEQEDRKAFMSGKKYSQCNIVRVHSSTNEI

SEQ ID NO: 16550 - protein, 267 aa, Oryza sativa
MGRGKVQLKRIENSMNRQVTFSKRRNGLLKKAHEISVLCDAEVAAIVFSPKGKLYEYATDSRMDKILERYERYSYAEKALISAESESEGNWCHEYRKLKAKIETIQKCHKHLMGEDLESLNLKELQQLEQQLESSLKHIRSRKSHLMLESISELQKKERSLQEENKALQKELVERQKNVRGQQQVGQWDQTQVQAQAQAQPQAQTSFFFFFMLRDQQALLSPQNICYPPVMMGQRNDAAARRRWRPKARCNFRIGGFPPWMLSTFKA

SEQ ID NO: 16551 - protein, 267 aa, Oryza sativa; identical to SEQ ID NO: 16550

SEQ ID NO: 16552 - protein, 249 aa, Oryza sativa
  unsure (1)..(249): unsure at all Xaa locations
MGRGKIEIKRIENTTNRQVTFCKRRNGLLKKAYELSVLCDAEVALIVFSSRGRLYEYANNSVKSTVERYKKANSDTSNSGTVAEVNAQHYQQESSKLRQQISSLQNANSRTIVGDSINTMSLRDLKQVENRLEKGIAKIRARKNELLYAEVEYMQKREVELQNDNMYLRSKVVENERGQQPLNMMGAASTSEYDHMVNNPYDSRNFLQVNIMQQPQHYAHQLQPTTLQLGQXSRPSISFGVDTVRTHVR

SEQ ID NO: 16553 - protein, 236 aa, Oryza sativa
MGRGKIEIKRIENTTNRQVTFCKRRNGLLKKAYELSVLCDAEVALIVFSSRGRLYEYANNSVKSTVERYKKANSDTSNSGTVAEVNAQHYQQESSKLRQQISSLQNANSRTIVGDSINTMSLRDLKQVENRLEKGIAKIRARKNELLYAEVEYMQKREVELQNDNMYLRSKVVENERGQQPLNMMGAASTSEYDHMVNNPYDSRNFLQVNIMQQPQHYAHQLQPTTLQLGQQPAFN

SEQ ID NO: 16554 - protein, 210 aa, Oryza sativa
MGRGKIEIKRIENSTNRQVTFSKRRSGILKKAREIGVLCDREVGVVIFSSAGKLSDYCTPKTTLSRILEKYQTNSGKILWDEKHKSLSAEIDRVKKENDNMQIELRHMKGEDLNSLQPKELIAIEEALNNGQANLRDKMMDHWRMHKRNEKMLEDEHKMLAFRVHQQEVELSGGIRELELGYHHDDRDFAASMPFTFRVQPSHPNLQQEK

SEQ ID NO: 16555 - protein, 246 aa, Oryza sativa; identical to SEQ ID NO: 16434

SEQ ID NO: 16556 - protein, 246 aa, Oryza sativa
MGRGKVQLKRIENKINRQVTFSKRRSGLLKKANEISVLCDAEVALIIFSTKGKLYEYATDSCMDKILERYERYSYAEKVLISAESDTQGNWCHEYRKLKAKVETIQKCQKHLMGEDLESLNLKELQQLEQQLENSLKHIRSRKSQLMLESINELQRKEKSLQEENKVLQKELVEKQKVQKQQLQWDQTQPQTISSSSSFMMREALPTTNISNYPAAAGERIEDVPAGQPQHVRIGLPPWMLSHING

SEQ ID NO: 16557 - protein, 210 aa, Oryza sativa; identical to SEQ ID NO: 16554

SEQ ID NO: 16558 - protein, 190 aa, Oryza sativa
  unsure (1)..(190): unsure at all Xaa locations
MGQGKIEMKRIEDATRRQVTFSKRRAGFLKKANELAVLCDAQVGVVVFSDKGKLFDFCSPPVILMELFHRYEITTRNTRLQETNHDEQMVMEITRLRNEIDQLEASLRRQTGEDLSSVSTVDELSQLQLQLESSLSKVHARKDELMSQQLEDMRREQQELLNQNFFMHQMNHKGNNTTTLSKIELLRTSX

SEQ ID NO: 16559 - protein, 267 aa, Oryza sativa
MGRGKVQLKRIENKINRQVTFSKRRNGLLKKAHEISVLCDAEVAAIVFSPKGKLYEYATDSRMDKILERYERYSYAEKALISAESESEGNWCHEYRKLKAKIETIQKCHKHLMGEDHESLNLKELQQLEQQLESSLKHIISRKSHLMLESISELQKKERSLQEENKALQKELVERQKNVRGQQQVGQWDQTQVQAQAQAQPQAQTSSSSSSMLRDQQALLPPQNICYPPVMMGERNDAAAAAAVAAQGQVQLRIGGLPPWMLSHLNA

SEQ ID NO: 16560 - protein, 267 aa, Oryza sativa; identical to SEQ ID NO: 16435

SEQ ID NO: 16561 - protein, 148 aa, Oryza sativa
MGRGRVELKKIENPTNRQVTFSKRRMGLLKKANELAILCDAQIGVIVFSGTGKMYEYSSPPWRIANIFDRYLKAPSTRFEEMDVQQVQIIQEMTRMKDENNRLRIIMRQYMGDDLASLTLQDVSNLEQQIEFSLYKVRLRKSRLQDLD

SEQ ID NO: 16562 - protein, 186 aa, Oryza sativa
  unsure (1)..(186): unsure at all Xaa locations
MGRGKIEIKRIENKTSRQVTFCKRRNGLLKKAYELAILCDAEIALIVFSSRGRLYEFSNFSTRSTIERYKKASASTSGSAPVIDVNSQYFQQEAAKMRHQIQTLQNANSRHLIGESIGNMTAKELKSLENRLEKGISRIRSKKHELLFSEIEYMQKREADLQNENMFLRAKVIKRDKVDWSLNXIX

SEQ ID NO: 16563 - protein, 169 aa, Oryza sativa
  unsure (1)..(169): unsure at all Xaa locations
MGRGKIAIKRIDNTMNRQVTFSKRRGGLMKKARELAILCDADVGLIVFSCTGRLYDFSSSSMKSIIERYQEAGEEHCRLLNPMSEAKSHSYMTYTDRQLLGEEISNFTVRDLQLLQNQVEMSLHSIRNKKGSLVQKENSELRKKFNIAHQRNIELHKKHHAYYKRKKSX

SEQ ID NO: 16564 - protein, 253 aa, Oryza sativa
MGRGKVQLKRIENKINRQVTFSKRRNGLLKKAHEISVLCDAEVAAIVFSPKGKLYEYATDSRMDKILERYERYSYAEKALISAESESEGNWCHEYRKLKAKIETIQKCHKHLMGEDLESLNLKELQQLEQQLESSLKHIISRKERSLQEENKALQKELVERQKNVRGQQQVGQWDQTQVQAQAQAQPQAQTSSSSSSMLRDQQALLPPQNICYPPVMMGERNDAAAAAAVAAQGQVQLRIGGLPPWMLSHLNA

SEQ ID NO: 16565 - protein, 246 aa, Oryza sativa
MGRGKVQLKRIENKINRQVTFSKRRSKLLKKANEISVLCDAEVALIIFSTKGKLYEYATDSCMDKILERYERYSYAEKVLISAESDTQGNWCHEYRKLKAKVETIQKCQKHLMGEDLESLNLKELQQLEQQLENSLKHIRSRKSQLMLESINELQRKEKSLQEENKVLQKELVEKQKVQKQQVQWDQTQPQTSSSSSSFMMREALPTTNISNYPAAAGERIEDVAAGQPQHERIGLPPWMLSHING

SEQ ID NO: 16566 - protein, 246 aa, Oryza sativa
MGRGKVQLKRIENKINRQVTFSKRRNGLLKKAHEISVLCDAEVAAIVFSPKGKLYEYATDSRMDKILERYERYSYAEKALISAESESEGNWCHEYRKLKAKIETIQKCHKHLMGEDLESLNLKELQQLEQQLESSLKHIISRKSHLMLESISELQKKEKSLQEENKVLQKELVEKQKVQKQQVQWDQTQPQTSSSSSSFMMREALPTTNISNYPAAAGERIEDVAAGQPQHVRIGLPPWMLSHING

SEQ ID NO: 16567 - protein, 225 aa, Oryza sativa
  unsure (1)..(225): unsure at all Xaa locations
MGRGRVELKKIENPTNRQVTFSKRRMGLLKKANELAILCDAQIGVIVFSGTGKMYEYSSPPWRIANIFDRYLKAPSTRFEEMDVQQDENNRLRIIMRQYMGDDLASLTLQDVSNLEQQIEFSLYKVRLRKQQLLDQQLLEMRREMQIPGDQSNYLCHMAQAPLXGESEAVPAVGCGWQQPXMYNQDAESSMTALQLSPQLEYKLQPLQPNLQEEANLHGYVLRLW

SEQ ID NO: 16568 - protein, 249 aa, Oryza sativa; identical to SEQ ID NO: 16436

SEQ ID NO: 16569 - protein, 354 aa, Oryza sativa
  unsure (1)..(354): unsure at all Xaa locations
MVQCHEVGQPRGERRKVQEEEKHQGQYIDGLSPHRPGLHLISSFPNHSLLLEHTPLFLIIISSLIREELANMHIYKEQEAEPSTGLMMPEPAPVASPGSGGSGGSGSVGAEKIGSRGKIEIKRIENTTNRQVTFCKRRSGLLKKAYELSVLCDAEVALVVFSSRGRLYEYSNNSVKETIERYKKANSDTSNASTVAEINAQHYQQEAAKLXKQQITHLQNSNRELKQLEGRLDKGLGKIRARKNQLLCAEIEYMQRRETELQNDNMYLXSTVAESERGLQTVNMMGSASTSEYVQNMIHYDPRNFLQFNIMHQPQYYPEQEDRKAFMSDERXNMDPYHATISIMHVPSSRRLIS

SEQ ID NO: 16570 - protein, 249 aa, Oryza sativa; identical to SEQ ID NO: 16436

SEQ ID NO: 16571 - protein, 230 aa, Oryza sativa; identical to SEQ ID NO: 16437

SEQ ID NO: 16572 - protein, 250 aa, Oryza sativa
MGRGRVELKRIENKINRQVTFSKRRNGLLKKAYELSVLCDAEVALIIFSSRGKLYEFGSAGITKTLERYQHCCYNAQDSNNALSETQSWYHEMSKLKAKFEALQRTQRHLLGEDLGPLSVKELQQLEKQLECALSQARQRKTQLMMEQVEELRRKERQLGEINRQLKHKLEVEGSTSNYRAMQQASWAQGAVVENGAAYVQPPPHSAAMDSEPTLQIGYPHQFVPAEANTIQRSTAPAGAENNFMLGWVL

SEQ ID NO: 16573 - protein, 250 aa, Oryza sativa; identical to SEQ ID NO: 16572

SEQ ID NO: 16574 - protein, 201 aa, Oryza sativa
  unsure (1)..(201): unsure at all Xaa locations
MGRGKIEIKRIENSTNRQVTFSKRRAGILKKAREIGVLCDAEVGVVIFSSAGKLSDYCTPKTTLSRILEKYQTNSGKILWDEKHKSLSAEIDRVKKENDNMQIELRXXPKELIAIEEALNNGQANLRDKMMDHWRMHKRNEKMLEDEHKMLAFRVHQQEVELSGGIRELELGYHHDDRDFAASMPFTFRVQPSHPNLQQEK

SEQ ID NO: 16575 - protein, 125 aa, Oryza sativa
  unsure (1)..(125): unsure at all Xaa locations
MGRGKIEIKRIENATNRQVTFSKRRGGLLKKANELAVLCDARVGVVIFSSTGKMFEYCSPTCSLRELIEHYQTVTNTHFEEINHDQXGDDLSNLTLADINDLEQQLEFSVTKVRARKNIIGQREX

SEQ ID NO: 16576 - protein, 249 aa, Oryza sativa
MGRGPVQLRRIENKINRQVTFSKRRNGLLKKAHEISVLCDADVALIVFSTKGKLYEFSSHSSMEGILERYQRYSFDERAVLEPNTEDQENWGDEYGILKSKLDALQKSQRQLLGEQLDTLTTKELQQLEHQLEYSLKHIRSKKNQLLFESISELQKKEKSLKNQNNVLQKLMETEKEKNNAIINTNREEQNGATPSTSSPTPVTAPDPIPTTNNSQSQPRGSGESEAQPSPAQAGNSKLPPWMLRTSHT

SEQ ID NO: 16577 - protein, 263 aa, Oryza sativa
DLAWLVGCSWRSIGMGRGRVELKRIENKINRQVTFAKRRNGLLKKAYELSVLCDAEVALIIFSNRGKLYEFCSTQSMTKTLEKYQKCSYAGPETAVQNRESEQLKASRNEYLKLKARVENLQRTQRNLLGEDLDSLGIKELESLEKQLDSSLKHVRTTRTKHLVDQLTELQRKEQMVSEANRCLRRKLEESNHVRGQQVWEQGCNLIGYERQPEVQQPLHGGNGFFHPLDAAGEPTLQIGYPAEHHEAMNSACMNTYMPPWLP

SEQ ID NO: 16578 - protein, 249 aa, Oryza sativa
MGRGRVELKRIENKINRQVTFAKRRNGLLKKAYELSVLCDAEVALIIFSNRGKLYEFCSTQSMTKTLEKYQKCSYAGPETAVQNRESEQLKASRNEYLKLKARVENLQRTQRNLLGEDLDSLGIKELESLEKQLDSSLKHVRTTRTKHLVDQLTELQRKEQMVSEANRCLRRKLEESNHVRGQQVWEQGCNLIGYERQPEVQQPLHGGNGFFHPLDAAGEPTLQIGYPAEHHEAMNSACMNTYMPPWLP

SEQ ID NO: 16579 - protein, 121 aa, Oryza sativa
  unsure (1)..(121): unsure at all Xaa locations
MGRGKIEIKRIDNATSRQVTFSKRRSGLFKKARELSILCDAEVGLLVFSSTSRLYDFASSSSMKSIIERYNETKEDPHQTMNASSEAKVWLVQITVLQIEISMISIXEFCLNRPVFENLSX

SEQ ID NO: 16580 - protein, 248 aa, Oryza sativa
MGRGRVELKRIENKINRQVTFAKRRNGLLKKAYELSVLCDAEVALIIFSNRGKLYEFCSGQSMTRTLERYQKFSYGGPDTAIQNKENELVQSSRNEYLKLKARVENLQRTQRNLLGEDLGTLGIKELEQLEKQLDSSLRHIRSTRTQHMLDQLTDLQRREQMLCEANKCLRRKLEESNQLHGQVWEHGATLLGYERQSPHAVQQVPPHGGNGFFHSLEAAAEPTLQIGFTPEQMNNSCVTAFMPTWLP

SEQ ID NO: 16581 - protein, 249 aa, Oryza sativa
MGRGRVELKRIENKINRQVTFSKRRNGLLKKAYELSVLCDAEVALIIFSSRGKLYEFGSAGINKTLEKYNSCCYNAQGSNSALAGGEHQSWYQEMSRLKTKLECLQRSQRHMLGEDLGPLSIKELQQLEKQLEYSLSQARQRKTQIMMEQVDDLRRKERQLGELNKQLKNKLEAEADSSNCRSAIQDSWVHGTVVSGGRVLNAQPPPDIDCEPTLQIGYYQFVRPEAANPRSNGGGGDQNNNFVMGWPL

SEQ ID NO: 16582 - protein, 249 aa, Oryza sativa
MGRGKVELKRIENKINRQVTFAKRRNGLLKKAYELSVLCDAEVALIIFSNRGKLYEFCSTQSMTKTLEKYQKCSYAGPETAVQNRESEQLKASRNEYLKLKARVENLQRTQRNLLGEDLDSLGIKELESLEKQLDSYLKHVRTTRTKHLVDQLTELQRKEQMVSEANRCLRRKLEESNHVRGQQVWEQGCNLIGYERQPEVQQPLHGGNGFFHPLDAAGEPTLQIGYPAEHHEAMNSACMNTYMPPWLP

SEQ ID NO: 16583 - protein, 249 aa, Oryza sativa; identical to SEQ ID NO: 16581

SEQ ID NO: 16584 - protein, 248 aa, Oryza sativa; identical to SEQ ID NO: 16580

SEQ ID NO: 16585 - protein, 157 aa, Oryza sativa
IKSIENSTNRQVTFSKRRSGILKKAREISVLCDAEVGVVIFSSAGKLYDYCSPKTSLSRILEKYQTNSGKILWDEKHKSLSAEIDRIKKENDNMQIELRHLKGEDLNSLQPKELIMIEEALDNGIVNVNDKLMDHWERIRCWKTRTSCWLSNCTSKI

SEQ ID NO: 16586 - protein, 259 aa, Oryza sativa
LVGGSWRSIGMGRGRVELKRIENKINRKVTFAKRRNGLLKKAYELSVLCDAEVALIIFSNRGKLYEFCSTQSMTKTLEKYQKCSYAGPETAVQNRESEQLKASRNEYLKLKARVENLQRTQRNLLGPDLDSLGIKELESLEKQLDSSLKHVRTTRTKHLVDQLTELQRKEQMVSEANRCLRRKLEESNHVRGQQVWEQGCNLIGYERQPEVQQPLHGGNGFFHPLDAAGEPTLQIGYPAEHHEAMNSACMNTYMPPWLP

SEQ ID NO: 16587 - protein, 259 aa, Oryza sativa
MVGGSWRSIGMGRGRVELKRIENKINRKVTFAKRRNGLLKKAYELSVLCDAEVALIIFSNRGKLYEFCSTQSMTKTLEKYQKCSYAGPETAVQNRESEQLKASRNEYLKLKARVENLQRTQRNLLGPDLDSLGIKELESLEKQLDSSLKHVRTTRTKHLVDQLTELQRKEQMVSEANRCLRRKLEESNHVRGQQVWEQGCNLIGYERQPEVQQPLHGGNGFFHPLDAAGEPTLQIGYPAEHHEAMNSACMNTYMPPWLP

SEQ ID NO: 16588 - protein, 157 aa, Oryza sativa; identical to SEQ ID NO: 16585

SEQ ID NO: 16589 - protein, 154 aa, Oryza sativa
  unsure (1)..(154): unsure at all Xaa locations
MGRGKIVIRRIDNSTSRQVTFSKRRNGIFKKAKELAILCDAEVGLVIFSSTGRLYEYASTSMKSVIDRYGRAKEEQQHVANPNSELKVWSFVASSYIXNRELTFLNSNLREINSTEINKKSMQELASFNNRIKPSLYSNKDGSQXLQNKQPHPX

SEQ ID NO: 16590 - protein, 113 aa, Oryza sativa
MGRGKIEIKRIDNATSRQVTFSKRRSGLFKKARELSILCDAEVGLLVFSSTSRLYDFASSSSMKSIIERYNETKEDPHQTMNASSEAKVLQIEISMISIGILPKPTGFRELVN

SEQ ID NO: 16591 - protein, 270 aa, Oryza sativa
  unsure (1)..(270): unsure at all Xaa locations
MGRGKVQLKRIENKINRQVTFSKRRNGLLKKAHEISVLCDAEVAAIVFSPKGKLYEYATDSRMDKILERYERYSYAEKALISAESESEITLPHXQHALHPEVLMVFVXQYCLRHLMGEDLESLNLKELQQLEQQLESSLKHIISRKCSFLAXXVQERSLQEENKALQKELVERQKNVRGQQQVGQWDQTQVQAQAQAQPQAQTSSSSSSMLRDQQALLPPQNICYPPVMMGERNDAAAAAAVAAQGQMIIVVVVGQTAAVCTVNHGSNLE

SEQ ID NO: 16592 - protein, 96 aa, Oryza sativa
  unsure (1)..(96): unsure at all Xaa locations
MGRGKIVIRRIDNSTSRQVTFSKRRNGIFKKAKELAILCDAEVGLVIFSSTGRLYEYASTSSMKSVIDRYGRAKEEQQHVANPNSELKVCLDDCNX

SEQ ID NO: 16593 - protein, 112 aa, Oryza sativa
  unsure (1)..(112): unsure at all Xaa locations
MGRGKIVIRRIDNSTSRQVTFSKRRNGIFKKAKELAILCDAEVGLVIFSSTGRLYEYASTSMKSVIDRYGRAKEEQQHVANPNSXXRVRTHQSFSVKISVVLSELCNKRXLG

SEQ ID NO: 16594 - protein, 225 aa, Oryza sativa
MGRGKVELKRIENKISRQVTFAKRRNGLLKKAYELSVLCDAEVALIIFSTRGRLFEFSTSSCMYKTLERYRSCNYNLNSCEASAALETELSNYQEYLKLKTRVEFLQTTQRNLLGEDLVPLSLKELEQLENQIEISLMNIRSSKNQQLLDQVFELKRKEQQLQDANKDLKRKIQETSGENMLHISCQDVGPSGHASEANQEFLHHAICDPSLHIGYQAYMDHLNQ

SEQ ID NO: 16595 - protein, 225 aa, Oryza sativa; identical to SEQ ID NO: 16594

SEQ ID NO: 16596 - protein, 257 aa, Oryza sativa
MGRGKVELKRIENKISRQVTFAKRRNGLLKKAYELSLLCDAEVALIIFSGRGRLFEFSSSSCMYKTLERYRSCNYNSQDAAAPENEINYQEYLKLKTRVEFLQTTQRNILGEDLGPLSMKELEQLENQIEVSLKQIRSRKNQALLDQLFDLKSKEQQLQDLNKDLRKKLQETSAENVLHMSWQDGGGHSGSSTVLADQPHHHQGLLHPHPDQGDHSLQIGYHHPHAHHHQAYMDHLSNEAADMVAHHPNEHIPSGWI

SEQ ID NO: 16597 - protein, 257 aa, Oryza sativa; identical to SEQ ID NO: 16596

SEQ ID NO: 16598 - protein, 115 aa, Oryza sativa
  unsure (1)..(115): unsure at all Xaa locations
MGRGKIAIKRIDNTMNRQVTFSKRRGGLMKKARELAILCDADVGLIVFSCTGRLYDFSSSSMKSIIERYQEAGEEHCRLLNPMSEAKGFQKENSELRKKLHCSSTQHRITQEDMX

SEQ ID NO: 16599 - protein, 211 aa, Oryza sativa
  unsure (1)..(211): unsure at all Xaa locations
MLVLGKVQLKRIENKINRQVTFSKRMSGLLKKANEISVLCDAEVALIIFSTKGKLYEYATDSCMDKILERYERYSYAEKVLISPEFDTHGNWCHEYRKLKAKVETIQKCQKHLMGEDPESLNLKELQSLEQHLENSLKHITSRKSQLMLESINXLQRKEKSLEEENKVLPKELGGKXQKVHKQQXLLWDPSNPYTSFLLISSFLNEGRPFX

SEQ ID NO: 16600 - protein, 239 aa, Oryza sativa; identical to SEQ ID NO: 16440

SEQ ID NO: 16601 - protein, 274 aa, Oryza sativa
MGWPVRPASARSDRHQFGLTEYGFVGSVSAIPSSTISASRGPSHANQVSSSSSTEPYPYVDRSARTAPGRNTGRTATPQPSCFFESEVKICFLVCVLGVEEEEELDMGRGKIEIKRIENSTNRQVTFSKRRAGILKKAREIGVLCDAEVGVVIFSSAGKLSDYCTPKTTLSRILEKYQTNSGKILWDEKHKPKELIAIEEALNNGQANLRDKMEKMLEDEHKMLAFRVHQQEVELSGGIRELELGYHHDDRDFAASMPFTFRVQPSHPNLQQEK

SEQ ID NO: 16602 - protein, 87 aa, Oryza sativa
  unsure (1)..(87): unsure at all Xaa locations
MGRGKIEIKRIDNATSRQVTFSKRRSGLFKKARELSILCDAEVGLLVFSSTSRLYDFASSSDDVQVAEIPRTNLVHDAFALERSVRX

SEQ ID NO: 16603 - protein, 181 aa, Oryza sativa
MGRGKIEIKRIENKTSRQVTFCKRRNGLLKKAYELAILCDAEIALIVFSSRGRLYEFSNVNRHLIGESIGNMTAKELKSLENRLEKGISRIRSKKEADLQNENMFLRAKVAEAERAEHDDQQAAEDDEMAPAPAVGGGSSSAVSMLAAAAAAAAAQYSSDHHQTALHLGYFKVDSGKGGLL

SEQ ID NO: 16604 - protein, 96 aa, Oryza sativa
  unsure (1)..(96): unsure at all Xaa locations
MGRGRVELKRIENKINRQVTFSKRRNGLLKKAYELSVLCDAEVALIIFSSRGKLYEFGSAGYNXCLHTLSSDAITLFPPPPSLVLSSSSSWLDHFX

SEQ ID NO: 16605 - protein, 205 aa, Oryza sativa
  unsure (1)..(205): unsure at all Xaa locations
MGRGRVELKRIENKINRQVTFAKRRNGLLKKAYELSVLCDAEVALIIFSNRGKLYEFCSGQSLERTMVLXTSWWRFCGDLGLHMVDLRVCSCFXNLLGEDLGTLGIKELEQLEKQLDSSLRHIRSTRXXKLEESNQLHGQVWEHGATLLGYERQSPHAVQQVPPHGGNGFFHSLEAAAEPTLQIGFTPEQMNNSCVTAFMPTWLP

SEQ ID NO: 16606 - protein, 236 aa, Oryza sativa
IKSIENKITRQVTFSKRRNGLLKKAYELSVLCDAEVALIIFSSRGKLYEFGSAGINKTLEKYNSCCYNAQGSNSALAGGEHQSWYQEMSRLKTKLECLQRSQRHMLGEDLGPLSIKELQQLEKQLEYSLSQARQRKTQIMMEQVDDLRRKERQLGELNKQLKNKLEAEADSSNCRSAIQDSWVHGTVVSGGRVLNAQPPPDIDCEPTLQIGYYQFVRPERPIQEAMEEEGIRTTTL

SEQ ID NO: 16607 - protein, 84 aa, Oryza sativa
  unsure (1)..(84): unsure at all Xaa locations
MGRGRVELKKIENPTNRQVTFSKRRMGLLKKANELAILCDAQIGAIVFXSSGEMFXCPTPPWRIANIFDRYLKAPSTRFEEMDX

SEQ ID NO: 16608 - protein, 79 aa, Oryza sativa
  unsure (1)..(79): unsure at all Xaa locations
MGRGKIVIRRIDNSTSRQVTFSKRRNGIFKKAKELAILCDAEVGLVIFSSTGRLLVQAFLSLFIIATRFAKSPLSLSFX

SEQ ID NO: 16609 - protein, 106 aa, Oryza sativa
  unsure (1)..(106): unsure at all Xaa locations
MGRGPVQLRRIENKINRQVTFSKRRNGLLKKAHEISVLCDADVALIVFSTKGKLYEFSSHSSXVRTRLAPPPPSPPLRSTAHARRLSSPRARHGRARGAPRSWAAC

SEQ ID NO: 16610 - protein, 110 aa, Oryza sativa
  unsure (1)..(110): unsure at all Xaa locations
MGRGPVQLRRIENKINRQVTFSKRRNGLLKKAHEISVLCDADVALIVFSTKGKLYEFSSHSSXVRTRLAPPPPPPPLRDLPRSTAHARRLSSPRARHGRARGAPRSWAAC

SEQ ID NO: 16611 - protein, 92 aa, Oryza sativa
  unsure (1)..(92): unsure at all Xaa locations
MGRGKVQVRRIENEVSRQVTFSKRRPGLLKKAHEIAVLCDVDVAAIVFSAKGNLFHYASSHTTYVSVSIFVRSGRKLSAPFSSLDGATFLRX

SEQ ID NO: 16612 - protein, 66 aa, Oryza sativa
MARERREIRRIESAAARQVTFSKRRRGLFKKAEELAVLCDADVALVVFSSTGKLSQFASSNSTIHL

SEQ ID NO: 16613 - protein, 88 aa, Oryza sativa
  unsure (1)..(88): unsure at all Xaa locations
MGRGKVELKRIENKISRQVTFAKRRNGLLKKAYELSLLCDAEVALIIFSGRGRLFEFSSSSCETLVDLRENPVEIEGVGRQIELQASX

SEQ ID NO: 16614 - protein, 94 aa, Oryza sativa
  unsure (1)..(94): unsure at all Xaa locations
MGRGKVQVRRIENEVSRQVTFSKRRPGLLKKAHEIAVLCDVDVAAIVFSAKGNLFHYASSHTTYVTITTPAAYTTAGSSIANPIQAHTSIHNSX

SEQ ID NO: 16615 - protein, 90 aa, Oryza sativa
  unsure (1)..(90): unsure at all Xaa locations
MGRGKVQVRRIENEVSRQVTFSKRRPGLLKKAHEIAVLCDVDVAAIVFSAKGNLFHYASSACLENYLRDIFLLKIIPPKXPSCCLDPRAI

SEQ ID NO: 16616 - protein, 237 aa, Oryza sativa
ENKINRQVTFAKRRNGLLKKAYELSVLCDAEVALIIFSNRGKLYEFCSGQSMTRTLERYQKFSYGGPDTAIQNKENELVQSSRNEYLKLKARVENLQRTQRNLLGEDLGTLGIKELEQLEKQLDSSLRHIRSTRTQHMLDQLTDLQRREQMLCEANKCLRRKLEESNQLHGQVWEHGATLLGYERQSPHAVQQVPPHGGNGFFHSLEAAAEPTLQIGFTPEQMNNSCVTAFMPTWLP

SEQ ID NO: 16617 - protein, 107 aa, Oryza sativa
  unsure (1)..(107): unsure at all Xaa locations
MGGGGGVQHQETTTTVVQVAAEASRKKVEVRSAGRRGRREMRRIEDATSRQVTFSKRRSGLLKKAFELSVLCDAEVALIVFSPRGRLYQFASASSIPLTYPSFNTTX

SEQ ID NO: 16618 - protein, 231 aa, Sorghum bicolor
MGRGRVELKRIENKINRQVTFAKRRNGLLKKAYELSVLCDAEVALIIFSNRGKLYEFCSGQSITKTLERYEKHMRPDTAVQNKENELVQSSRNEYLKLKARVDNLQRTQRNLLGEDLGSLGIKELEQLEKQLDSSLRHIRSTRTQHMLDQLTDLQRREQMLCEANKCLRRKLEETSNQVHSKCGARCQLTRLRAATPPHSRPHHILAMDCSFIPWKLQQSQPCRSGSLLNI

SEQ ID NO: 16619 - protein, 228 aa, Sorghum bicolor
KVQLKRIENKINRQVTFSKRRNGLLKKAHEISVLCDAEVAVIVFSPKGKLYEYATDSRMDKILERYERYSYAEKALISAESESEGNWCHEYRKLKAKIETIQKCHKHLMGEDLESLNPKELQQLEQQLESSLKHIRSRKSHLMAESISELQKKERSLQEENKALQKELAERQKAAASRQQQQGAVGPADTDPGPDKLIIVLLHDEAGSAGSAASTKHMLPAADNRRER

SEQ ID NO: 16620 - protein, 61 aa, Sorghum bicolor
MGRGKVVLQRIENKISRQVTFAKRRNGLLKKAYELSILCDAEVALVLFSHAGRLYQFSSSS

SEQ ID NO: 16621 - protein, 196 aa, Triticum aestivum; identical to SEQ ID NO: 665

SEQ ID NO: 16622 - protein, 196 aa, Triticum aestivum
MGRGRSEIKRIDNPTQRQSTFYKRRDGLFKKARELAVLCDADLLLLLFSASGKLYQYLAPTVPSVKEFVERYEAATHTKVWSDIRQERRAELEKVAKMCDLLEKELRFMTVDDGEQYTVPSLAALEHNLEAAMHKVRSEKDRKIGGEMSYLENMIRGKQAERYGLCDKLAHAQSLKVVEGGSTSLNNGLDLKLGFN

SEQ ID NO: 16623 - protein, 254 aa, Triticum aestivum
MVKESASPGSGSGSPGGAAEKMGRGRIEIKRIENTTNRQVTFCKRRNGLLKKAYELSVLCDAEVALIVFSGRGRLYEYSNNSVKATIERYKKATSDTSSAGTVAEINAQHYQQESAKLKQQITTLQNSNRTLIGDTMATMSHRDLKQLEGRLDKGLGKIRARKNELLCAEIEYMQRREMELQNNNFFLREKVAETERGQQQTLNMMGAASTSNEYEQNMIHCDPRTFLQFNFMQQQPQYYSQQEDRKSLNSVGR

SEQ ID NO: 16624 - protein, 318 aa, Triticum aestivum
  unsure (1)..(318): unsure at all Xaa locations
MATTGWGNSRYARRGGDSARGSGAYSLRKPQRERHHQGEEMDHSLSFPSYLQRRVQEVAAQENPVKESASPGSGSGSPGGAAEKMGRGRIEIKRIENTTNRQVTFCKRRNGLLKKAYELSVLCDAEVALIVFSGRGRLYEYSNNSVKATIERYKKXATSDTSSAGTVAEINAQHYQQESAKLKQQITTLQNSNRTLIGDTMATMSHRDLKQLEGRLDKGLGKIRARKNELLCAEIEYMQRREMELQNNNFFLREKVAETERGQQQTLNMMGAASTSNEYEQNMIHCDPRTFLQFNFMQQQPQYYSQQEDRKSLNSVGR

SEQ ID NO: 16625 - protein, 237 aa, Triticum aestivum
MGRGKIEIKRIENATNRQVTYSKRRSGIMKKARELTVLCDAQVAIIMFSSTGKYHEFCSTGTDIKGIFDRYQQAIGTSLWIEQYENMQRTLNHLKDINRNLRTEIRQRMGEDLDALEFEELRDLEQNVDAALKEVRQRKYHVITTQTETYKKKVKHSQEAYKNLQQELGMREDPAYGFVDNPAAGGWDGVAAGGWDGVAPVAMGGGLAADMYAFRVVPSQPNLHGMAYGGSHDLRLG

SEQ ID NO: 16626 - protein, 229 aa, Triticum aestivum
MGRGKIEIKRIENATNRQVTYSKRRSGIMKKARELTVLCDAQVAIIMFSSTGKYHEFCSTGTDIKGIFDRYQQAIGTSLWIEQYENMQRTLSHLKDINRNLRTEIRQRMGEDLDALEFEELRDLEQNVDAALKEVRQRKYHVITTQTETYKKKVKHSQEAYKNLQQELGMREDPAYGFVDNPVAGGWDGVAAVAMGGGSAADMYAFRVVPSQPNLHGMAYGGSHDLRLG

SEQ ID NO: 16627 - protein, 229 aa, Triticum aestivum
MGRGKIEIKRIENATNRQVTYSKRRSGIMKKARELTVLCDAQVAIIMFSSTGKYHEFCSTGTDIKGIFDRYQQAIGTSLWIEQYENMQRTLSHLKDINRNLRTEIRQRMGEDLDALEFEELRDLEQNVDAALKEVRQRKYHVITTQTETYKKKVKHSQEAYKNLQQELGMREDPAYGFVDNPVAGGWDGVAAVAMGGGLAADMYAFRVVPSQPNLHGMAYGGSHDLRLG

SEQ ID NO: 16628 - protein, 229 aa, Triticum aestivum; identical to SEQ ID NO: 16627

SEQ ID NO: 16629 - protein, 271 aa, Triticum aestivum
MMSMMADLSCGASGVTVNDHQLAAPAPEDSAVAGSEKMGRGRIEIKRIENTTNRQVTFCKRRNGLLKKAYELSVLCDAEVALIVFSSRGRLYEYSNNSVKATIERYKKANSDTSNSGTVAEVNAQYYQQESSKLRQQISSLQNSNSRSLVRDSVSTMTLRDLKQLEGRLEKGIAKIRARKNELMYAEVEYMQKREMELHNDNIYLRSKVSENERGQQPMNMMASGSTSSEYDHMVPPFDSRNFLQANMQQQQHYSQQLQPTALQLGQQYFN

SEQ ID NO: 16630 - protein, 279 aa, Triticum aestivum
  unsure (1)..(279): unsure at all Xaa locations
MGRGRIEIKRIENTTSRQVTFCKRRNGLLKKAYELSVLCDAEVALIVFSSRGRLYEYSNNSVKATIDRYKKAHACGSTSGVPLIEVNAQQYYQQEAARLRHQIQMLQSTNKHLVGDSVGNLSLKELKQLESRLEKGIAKIRARKNELLSSEINYMVKXEIELXRSDNIDLRTKIAEEERGTQQVTIARPSAAXXELNPFTALXXMKCFVPANLFEAAGATRAQARRRGXXHRARPGRSLRYKQPAAALAGPAARQYQWTWGGTCLTTHPARTLEGRRQC

SEQ ID NO: 16631 - protein, 244 aa, Triticum aestivum
MGRGKVQLKRIENKINRQVTFSKRRSGLLKKAHEISVLCDAEVGLIIFSTKGKLYEFSTESCMDKILERYERYSYAEKVLVSSESEIQGNWCHEYRKLKAKVETIQKCQKHLMGEDLESLNLKELQQLEQQLESSLKHIRSRKNQLMHESISELQKKERSLQEENKVLQKELVEKQKAHVAQQDQTQPQTSSSSSSFMLRDAPPAANTSIHPAATGERAEDAAVQPQAPPRTGLPPWMVSHING

SEQ ID NO: 16632 - protein, 244 aa, Triticum aestivum
MGRGKVQLKRIENKINRQVTFSKRRSGLLKKAHEISVLCDAEVGLIIFSTKGKLYEFSTESCMDKILERYERYSYAEKVLVSSESEIQGNWCHEYRKLKAKVETIQKCQKHLMGEDLESLNLKELQQLEQQLESSLKHIRSRKNQLMHESISELQKKERSLQEENKVLQKELVEKQKAQAAQQDQTQPQTSSSSSSFMMRDAPPAAATSIHPAAAGERAGDAAVQPQAPPRTGLPLWMVSHING

SEQ ID NO: 16633 - protein, 244 aa, Triticum aestivum; identical to SEQ ID NO: 16632

SEQ ID NO: 16634 - protein, 257 aa, Triticum aestivum
  unsure (1)..(257): unsure at all Xaa locations
MVRGKTQMKRIENPTSRQVTFSKRRGGLLKKAFELSVLCDAEVALVVFSPRGRLYEFASSSMKNTIERYKTVTKDNMSRQTVQQDLEKILADAEGLSKKLDALEACKSKLLGQNLEECSIEELQSLEVKIEKSLLGIRAMKTRRFEEQLSTLRQKEMTLRQHNEELYSQCQKEQHLAPAAAAPPAPATLAAPPAPATLAEQGLDVETDLFLGLPGTGRSXDSGRLTTLEKNAQNKLAMELQAAAAAGNGCGRRIDKI

SEQ ID NO: 16635 - protein, 275 aa, Triticum aestivum
  unsure (1)..(275): unsure at all Xaa locations
MGRGKVQLKRIENKINRQVTFSKRRNGLLKKAHEISVLCDAEVAVIVFSPKGKLYEYATDSSMDKILERYERYSYAEKALISAESESEGNWCHEYRKLKAKIETIQKCHKHLMGEDLDSLNLKELQQLEQQLESSLKHIRSRKSHLMMESISELQKKERSLQEENKALQKELVERQKAAASRQQQQQQQQMQWEHQAQTQXTHAHTQNQPQAQTSSSSSSFMMRDQQAHAPQQNICSYPPVTMGGEAAAAAAAPGQQAQLRIGGLPLWMLSHLNA

SEQ ID NO: 16636 - protein, 240 aa, Triticum aestivum
MGRGKIVIRRIDNSTSRQVTFSKRRNGIFKKAKELGILCDAEVGLVIFSSTGRLYEYASSSMKSVIDRYGRAKEEQQLVANPNSELKFWQREAASLRQQLHNLQENHRQLTGQDLSGMGVKELQTLENQLEISLRCIRTKKDQILIDEIHELNHKGSLVHQENMELYRKINLIRQENAELQKKLSETEAATEVNRDSRTPYNFAVVEDANVSVDLELNSPQQQNDVEHTAPPKLGLQLHP

SEQ ID NO: 16637 - protein, 262 aa, Triticum aestivum
  unsure (1)..(262): unsure at all Xaa locations
MAFTPAHKDRHHHRPLPLPAVHTPQRQGGEESSGSWVLLGPLSFFSASEELVEMGRGKIEIKRIENSSNRQVTFAKRRAGLVKKAREIGVLCDAEVGVVIFSSAGKLYDFWTPKTTLPRILEKYQTNSGKILWDEKHKSISAEIDRVKKENDNMQIELRHMKGEDVNSLQPKELIAIEEALTNGQTNLRDKMMDHWKMHRRNEKMLEEEHKLLALRMHQQDDLSSGMREMELGYHXXGRDFTSQMPFTFRLQPSHPNLQEDK

SEQ ID NO: 16638 - protein, 209 aa, Triticum aestivum
MGRGKIEIKRIENQSNRQVTFSKRKNGILKKAKEISVLCDAEVGVVVFSSAGKLYDFCSPKTSLSRILEKYQTNSGKILWDEKHKSLSAEIDRIKKENDNMQIELRHLKGEDLNSLQPKELIMIEEALDNGLTSLHEKQMEHYDRLMKHGKMLEDENKLLAFKVHQHDIALSGSMRDLELGYHPDRDFAAQMPITFRVQPSHPNLQEDS

SEQ ID NO: 16639 - protein, 140 aa, Triticum aestivum
  unsure (1)..(140): unsure at all Xaa locations
MGRGKIAIERIDNATNRQVTFSKRRGGLMKKARELAILCDADLALIVFSSTGRLYDFASSSGMEAILERYQEAKQEHCGVLNPTSEAKLWQREVTTLRQQVQNLQHNNRQLLGEELSGSTVRDLQFLVNQVEMSLHSVRX

SEQ ID NO: 16640 - protein, 275 aa, Triticum aestivum
  unsure (1)..(275): unsure at all Xaa locations
MGRGKVQLKRIENKINRQVTFSKRRNGLLKKAHEISVLCDAEVAXLIVFSPKGKLYEFATDSCMDKILERYERYSYAEKALVSAESDSQGNWCHEYRKLKAKIETIQKCHKHLMGEDLDSLNLKELQQLEQQLESSLKHIRSRKSHLMMESISELQKKERSLQEENKALQKELVERQKAAASRQQQQQQQQMQWEHQAQTQTHAHTQNQPQAQTSSSSSSFMMRDQQAHAPQQNICSYPPVTMGGEAAAAAAAPGQQAQLRIGGLPPWMLSHLNA

SEQ ID NO: 16641 - protein, 246 aa, Triticum aestivum
MGRGRVELKRIENKINRQVTFAKRRNGLLKKAYELSVLCDAEVALIVFSNRGKLYEFCSTQSMTKTLDKYQKCSYAGPETTVQNRENEQLKNSRNEYLKLKARVDNLQRTQRNLLGEDLDSLGIKELESLEKQLDSSLKHIRTTRTQHMVDQLTELQRREQMFSEANKCLRIKLEESNQVHGQQLWEHNNNVLGYERQPEVQPPMHGGNGFFHPLDAAGEPTLHIGYPPESMSNSCMTTFMPPWLP

SEQ ID NO: 16642 - protein, 249 aa, Triticum aestivum
MGRGRVELKRIENKINRQVTFAKRRNGLLKKAYELSVLCDAEVALIIFSNRGKLYEFCSGQSMPKTLERYQKCSYGGPDTAIQNKENELVQSSRNEYLKLKARVENLQRTQRNLLGEDLGSLGIKDLEQLEKQLDSSLRHIRSTRTQHMLDQLTDLQRKEQMLCEANKCLRRKLEESSQLQGQMWEQHAANLLGYERQSPHQQQAPHHGGNGFFHPLDPTTEPTLQIGYTQEQINNACVAASFMPTWLP

SEQ ID NO: 16643 - protein, 258 aa, Triticum aestivum
MGRGRVELKRIENKINRQVTFSKRRNGLLKKAYELSVLCDAEVALIIFSSRGKLYEFGSAGTTKTLERYQHCCYNAQDSNGALSETQSWYQEMSKLKAKFEALQRTQRHLLGEDLGPLSVKELQQLEKQLECSLSLARQRKTQLMMEQVEELRRKERQLGDINRQLKHKLDAEGSNSNNYRAMQQISWAAGTVVDEGAAAYHMQQQQQHPNHSAAMDCEPTLQIGYHHQFAAPDQAANNIPRSSAPGGENNFMLGWVL

SEQ ID NO: 16644 - protein, 258 aa, Triticum aestivum; identical to SEQ ID NO: 16643

SEQ ID NO: 16645 - protein, 259 aa, Triticum aestivum
MGRGRVELKRIENKINRQVTFSKRRNGLLKKAYELSVLCDAEVALIIFSSRGKLYEFGSAGTTKTLERYQHCCYNAQDSNGALSETQSWYQEMSKLKAKFEALQRTQRHLLGEDLGPLSVKELQQLEKQLECSLSLARQRKTQLMMEQVEELRRKERQLGDINRQLKHKLDAEGSNSNNYRAMQQITWAAGTVVDEGAAAYHMQQQQQQHPNHSAAMDCEPTLQIGYPHQFAAPDQAANNIPRSSGPGGENNFMLGWVL

SEQ ID NO: 16646 - protein, 201 aa, Triticum aestivum
  unsure (1)..(201): unsure at all Xaa locations
MVRGKTQMKRIENATSRQVTFSKRRNGLLKKAFELSVLCDAEVALVVFSPRGRLYEFASATSLQKSIDRYKAYTKDTVNNKTVQPDIQQVKADALSLAKKLEALEDTKRKILGENLGGCSTEELHFLEGKIEKSLRVIRGKKTQLLEQQIANLKEKERTLLKDNEXLRGKRNLEXAAVSSCPELRCTPAATWRAGARASAG

SEQ ID NO: 16647 - protein, 268 aa, Triticum aestivum
  unsure (1)..(268): unsure at all Xaa locations
MGRGPVQLRRIENKINRQVTFSKRRSGLLKKAHEISVLCDAEVALIVFSTKGKLYEYSSQDSSMDVILERYQRYSFEERAVLDPSIGNQANWGDEYGSLKIKLDALQKSQRQLLGEQLDPLTTKELQQLEQQLDSSLKHIRSRKNQLLFESISELQKKEKSLKDQNGVLQKHLVETEKEKNNVLSNIHHQEXQLNGATNINHQEQLNGATTSSPSPTPATAQDSMATPNIGPYQSRESGGGNPEPQPSPAQANNSNLPPWMLSTISNR

SEQ ID NO: 16648 - protein, 269 aa, Triticum aestivum
  unsure (1)..(269): unsure at all Xaa locations
MAPSSPAAAAVAEGDEQQQQQIVAAAAAAKKGGGKRGRREMRRIEDATSRQVTFSKRRSGLLKKAFELGVLCDAEVALIVFSPRGRLYEYASAPDLQKTIDRYLNHTKGTSANEKTVEQPAAGVQMCRSEATALKHKIDAIEAYQRKLSGEGLGSCSAHELQELELQLEKSLSCIRQKKQQKMLDKILELKEKERKLLTENVVLREEYKALPLLELATAAAAERSPDGAXELKKLRRTSGGCXYMEVETELVIGRPGSSSXSSSRKLID

SEQ ID NO: 16649 - protein, 197 aa, Triticum aestivum
  unsure (1)..(197): unsure at all Xaa locations
MGRGKVVLQRIENKISRQVTFAKRRNGLLKKAYELSLLCDAEVALVLFSHAGRLYQFSSSSNMLKTLERYQRYIFASQDAAVPTRDEKQNNYLEYMELKARVEVLQHSQRNLLGEDLAPLSTTELDQLESQVGKTLRQIRXRKTQVLVXELCXLKKGAKLXXQDXKHGTXEKLXXLTXRXXVDHXRWAXXXHRTXGK

SEQ ID NO: 16650 - protein, 211 aa, Triticum aestivum
  unsure (1)..(211): unsure at all Xaa locations
MGRGKVEMRRIENKISRQVTFAKRRNGLLKKAYELSLLCDAEVALIIFSGRGRLFEFSSSSCMYKTLERYRTCNCNSQEATPLAENEINYQQYLKLKTRLEYLESSQRNILGEDLGPLSMKELEQIENQIDISLKHIRTRKNKVLLDELYDLKSKEQELQDQNKDLRKKLQDTSCAENALHMAWQDRGQSSSSGHAIDTTYPGLVQHPEHX

SEQ ID NO: 16651 - protein, 99 aa, Triticum aestivum
  unsure (1)..(99): unsure at all Xaa locations
MARGKVQLRRIENPVHRQVTFCKRRAGLLKKARELSVLCDADIGIIIFSAHGKLYDLATTGTMDGLIERYKSASGEGMAADGCGDQRVDPKQEAMVLKX

SEQ ID NO: 16652 - protein, 77 aa, Triticum aestivum
MGRGKIEIKRIENATNRQVTYSKRRSGIMKKARELTVLCDAQVAIIMFSSTGKYHEVCSTGTDIKGIFDRYQRPSGP

SEQ ID NO: 16653 - protein, 166 aa, Triticum aestivum
MARRGRVELRRIEDRTSRQVRFSKRRAGLFKKAFELAVLCDAEVALLVFSPAGKLYEYASSSIEGTYDLYQRFAGAGTNLNGGDASSNNDGDPSNIQSTLKEIASWSIQNNADDSDANKLEKLEKLLTDALRNTKSKKMSAQQNSGAGTSGENANGPRGKKKRGRT

SEQ ID NO: 16654 - protein, 166 aa, Triticum aestivum
MARRGRVELRRIEDRTSRQVRFSKRRAGLFKKAFELALLCDAEVALLVFSPAGKLYEYASSSIEATYDRYQRFAGPGTNVNGGDARSNNDGDPSNIQSTLEDIASWSLQNNADVSDATKLEKLEKLLTDALRNTKSKKMSAQLNSGAGTRSAQNANGPRGLEGGRT

SEQ ID NO: 16655 - protein, 73 aa, Triticum aestivum
  unsure (1)..(73): unsure at all Xaa locations
MARRGRVELRRIEDRTSRQVRFSKRRAGLFKKAFELSLLCDAEVALLVFSPAGKLYEYASSSYCETADTFKYX

SEQ ID NO: 16656 - protein, 238 aa, Triticum monococcum
MGRGKVVLQRIENKISRQVTFAKRRNGLLKKAYELSLLCDAEVALVLFSHAGRLYQFSSSSNMLKTLEKYQRYIFASQDAAVPTTDEMQNNYLEYMELKARVEVLQRSQRNLLGEDLAPLSTIELEQLEGQVGKTLRQIRSRKTQVLLDEMCDLKRKEQILQDANMTLKRKLGEIELEATPDPPQQPQQQQMWQGDRGVPPHTPPQPEHFFQALERYPSLQPVFRGMDVNQPPPAWMA

SEQ ID NO: 16657 - protein, 175 aa, Zea mays
MGRGRSEIKRIDNPTQRQSTFYKRRDGLFKKARELAVLCDADLLLLLFSASGKLYQYLAPTVPSVKEFVERYEASTHTKVWSDIRQERRRELEKVAKMCDLLEKELRFMTVDDGERYTVPSLAALEHNLEAAMHKVRSEKDRKIGGEMSYLENMIRGKQAERYGLCDKLAHAQSL

SEQ ID NO: 16658 - protein, 196 aa, Zea mays
MGRGRSEIKRIENPTQRQSTFYKRRDGLFKKARELSVLCDVDLLLLLFSTSGKLYHYLSPTVPSVKDLVERYEATTHTKVWTDIRQERRAELEKAEQMCELMEKELRVMTVDDGEQYTVPSLELLEHSLEAAVRKVRSEKDRKIGGEINYLENIIRGRHEERYGLCNKLAHSQASKREEGGSTPPSSGLELKLGLN

SEQ ID NO: 16659 - protein, 261 aa, Zea mays
MSRYCVNEQSSTRPHPASAGSWHGSTPAGSSPSNLKQATTGKEQLGGGCCSAARLRVRDDDMGRGRSEIKRIENPTQRQSTFYKRRDGLFKKARELAVLCDVDLLLLLFSGSGKLYHYLSPTVPTVKDLVERYEAATHSKVWADVRQERRAELEKAERMCELMEKELRFMTVDDGEQYTVPSLELLEHSLEAAVHRVRSEKDRKIGGEIDCLQNIIRGRHEERYGLCDKLAHSQAWNNGGEGGGSTPPSGGGGLELKLGFN

SEQ ID NO: 16660 - protein, 199 aa, Zea mays
MGRGRSEIKRIENPTQRQSTFYKRRDGLFKKARELAVLCDVDLLLLLFSGSGKLYHYLSPTVPTVKDLVERYEAATHSKVWADVRQERRAELEKAERMCELMEKELRFMTVDDGEQYTVPSLEQLEHSLEAAVHRVRSEKDRKIGGEIDCLQNIIRGRHEERYGLCDKIAHSQAWNNGGEGGGSTPPSGGGLELKLGFN

SEQ ID NO: 16661 - protein, 199 aa, Zea mays
MGRGRSEIKRIENPTQRQSTFYKRRDGLFKKARELSVLCDVDLLLLLFSTSGKLYHYLSPTVPSVKDLVERYEAATHSKVWADVRQERRAELEKAERMCELMEKELRFMTVDDGEQYTVPSLELLEHSLEAAVRRVRSEKDRKIGGEIDCLQNIIRGRHEERYGLCDKLAHSQAWNNGGEGGGSTPPSGGGLELKLGFN

SEQ ID NO: 16662 - protein, 200 aa, Zea mays
  unsure (1)..(200): unsure at all Xaa locations
MGRRRSEIKRIENPAQGQSTFYKRRDGLFKKAREPAVLCDGDSLLTIFSGAGARXSGFRTPRPTVKDLVERYEAATHSKVWADVRQERRAELEKAERMCELMEKELRFMTVDDGEQXYTVPSLEQLEHSLEAAVHRVRSEKDRKIGGEIDCLQNIIRGRHEERYGLCDKIAHSQAGNNGGEGGGSTPPSGGGLELKLGFN

SEQ ID NO: 16663 - protein, 112 aa, Zea mays
MGRGRSEIKRIENPTQRQSTFYKRRDGLFKKARELSVLCDVDLLLLLFSTSGKLYHYLSPTVPSVKDLVERYEATTHTKERRAELEKAEQMCELMEKELRVMTVDDGEQYTV

SEQ ID NO: 16664 - protein, 113 aa, Zea mays
  unsure (1)..(113): unsure at all Xaa locations
MGRGRSEIKRIENPTQRQSTFYKRRDGLFKKARELSVLCDVDLLLLLFSTSGKLYXXATTHTKVWTDIRQERRAXXEKXGQMCELMEKELRVXTXVDDGXXQYTVPSLELLEH

SEQ ID NO: 16665 - protein, 124 aa, Zea mays
  unsure (1)..(124): unsure at all Xaa locations
THREATFYKRRDCLFKKGGELSGLCDVNLLLVLSSTCGKLYHYLSATVPYVEDLVERYEGTTHTKGCTDIRQERRAQLAKAELTCELMEKELRVMTGDDGXQYTVPTVELLEHKLDAAVHKVRX

SEQ ID NO: 16666 - protein, 143 aa, Zea mays
  unsure (1)..(143): unsure at all Xaa locations
MGRARMEIKWIXNPTKWQATFYKSRDGLFMKDSDFSVLWDVDLVLFLFSTSGKIYHYLSTTVPSDLDLINRNHVTTPTKGXTDIRQESSWHLNKGDIKCYMLXKELRFLTVDDXGDRYTVPSLELLQHXLDCAEHMVPSDKDR

SEQ ID NO: 16667 - protein, 122 aa, Zea mays
  unsure (1)..(122): unsure at all Xaa locations
XPTLRRSTYYKRRDRLCHKGRELYGLCDADLVLLLFSSSWKVYHYRLGTVLCVTDLCERDDCTTHTTVWTDMLQERSAELQKAEPMCQLVXNELQDMTVDDRXQYTGPAVXLLEHSLQAVVX

SEQ ID NO: 16668 - protein, 348 aa, Zea mays
  unsure (1)..(348): unsure at all Xaa locations
MGRGKIEIKRIENSTNRQVTFSKRRGGLLKKANELAVLCDARVGVVIFSSTGKMFEYCSPACSLRELIEQYQHATNSHFEEINHDQQILLEMTRMKNEMEKLETGIRRYTGDDLSSLTLDDVSDLEQQLEYSVSKVRARKHQLLNQQLDNLRRKEQILEDQNTFLYRMINENQQAALTGEVKLGEMAPLAMLQPPPAFAHSATAYYGGESSSSGTALQLMSAAPQLHADDLGFRLQPTQPNLQDPXAAPCGGLHGHGLAAVINCDQFGRTVTCSASKRDYWSTHAVSWSQSPSCIISIIWLVCHLDSFIYACNAINSLDNNSTIVMYLIKKKKKSGPLHHQKKKKKNR

SEQ ID NO: 16669 - protein, 260 aa, Zea mays
  unsure (1)..(260): unsure at all Xaa locations
MGRGKIEIKRIENSTNRQVTFSKRRGGLLKKANELAVLCDARVGVVIFSSTGKMFEYCSPACSLRELIEQYQHATNSHFEEINHDQQILLEMTRMKNEMEKLETGIRRYTGDDLSSLTLDDVSDLEQQLEYSVSKVRARKHQLLNQQLDNLRRKEQILEDQNTFLYRMINENQQAALTGEVKLGEMTAPLAMLQPPPAFAHSXTAYYGGESSSGGTALQLMSAAPQLQHADLGFRLQPTQPNLQDPAAACGGLHGHGLQL

SEQ ID NO: 16670 - protein, 240 aa, Zea mays
MGRGKIVIRRIDNSTSRQVTFSKRRNGIFKKAKELAILCDAEVGLVIFSSTGRLYEYSSTSMKSVIDRYGKAKEEQQVVANPNSELKFWQREAASLRQQLHNLQENYRQLTGDDLSGLNVKELQSLENQLETSLRGVRAKKDHLLIDEIHDLNRKASLFHQENTDLYNKINLIRQENDELHKKIYETEGPSGVNRESPTPFNFAVVETRDVPVQLELSTLPQQNNIEPSTAPKLGLQLIP

SEQ ID NO: 16671 - protein, 240 aa, Zea mays; identical to SEQ ID NO: 16670

SEQ ID NO: 16672 - protein, 259 aa, Zea mays
MGRGKIEIKRIENSTNRQVTFSKRRGGLLKKANELAVLCDARVGVVIFSSTGKMFEYCSPACSLRELIEQYQHATNSHFEEINHDQQILLEMTRMKNEMEKLETGIRRYTGDDLSSLTLDDVSDLEQQLEYSVSKVRARKHQLLNQQLDNLRRKEQILEDQNTFLYRMINENQQAALTGEVKLGEMAPLAMLQPPPAFAHSATAYYGGESSSSGTALQLMSAAPQLHADDLGFRLQPTQPNLQDPAAPCGGLHGHGLQL

SEQ ID NO: 16673 - protein, 270 aa, Zea mays
  unsure (1)..(270): unsure at all Xaa locations
MGRGRIEIKRIENNTSRQVTFCKRRNGLLKKAYELSVLCDAEVALIVFSSRGRLYEYANNSVKATVERYKKAHTVGSSSGPPLLEHNAQQFYQQESAKLRNQIQMLQNTNRHLVGDSVGNLSLKELKQLESRLEKGISKIRARKSELLAAEISYMAKRETELQNDHMTLRTKIEEGEQQLQXQVTVARSVAAAAAXATNLELNPFLEMDTKCFFTGGPFATLDMKCFLPGSLQQMLEAQQRQMLATELNLGYQLAPPGSDAANNNPHHQF

SEQ ID NO: 16674 - protein, 268 aa, Zea mays
MGRGRIEIKRIENNTSRQVTFCKRRNGLLKKAYELSVLCDAEVALIVFSSRGRLYEYANNSVKATVERYKKAHTVGSSSGPPLLEHNAQQFYQQESAKLRNQIQMLQNTNRHLVGDSVGNLSLKELKQLESRLEKGISKIRARKSELLAAEISYMAKRETELQNDHMTLRTKIEEGEQQLQQVTVARSVAAAAAATNLELNPFLEMDTKCFFTGGPFATLDMKCFLPGSLQQMLEAQQRQMLATELNLGYQLAPPGSDAANNNPHHQF

SEQ ID NO: 16675 - protein, 268 aa, Zea mays; identical to SEQ ID NO: 16674

SEQ ID NO: 16676 - protein, 268 aa, Zea mays; identical to SEQ ID NO: 16674

SEQ ID NO: 16677 - protein, 288 aa, Zea mays
MSFLLKEKEMIIAAGIVASMGRGRIEIKRIENNTSRQVTFCKRRNGLLKKAYELSVLCDAEVALIVFSSRGRLYEYANNSVKATIERYKKAHTVGSSSGPPLLEHNAQQFYQQESAKLRNQIQMLQNTNRHLVGDSVGNLSLKELKQLESRLEKGISKIRARKSELLAAEISYMAKRETELQNDHMTLRTKIEEGEQQLQQVTVARSVAAAAAATTNLELNPFLEMDTKCFFTGGPFATLDMKCFLPGSLQQMLEAQQRQMLATELNLGYQLAPPGSDAADNNPHHQF

SEQ ID NO: 16678 - protein, 269 aa, Zea mays
MGRGRIEIKRIENNTSRQVTFCKRRNGLLKKAYELSVLCDAEVALIVFSSRGRLYEYANNSVKATIERYKKAHTVGSSSGPPLLEHNAQQFYQQESAKLRNQIQMLQNTNRHLVGDSVGNLSLKELKQLESRLEKGISKIRARKSELLAAEISYMAKRETELQNDHMTLRTKIEEGEQQLQQVTVARSVAAAAAAATNLELNPFLEMDTKCFFTGGPFATLDMKCFLPGSLQQMLEAQQRQMLATELNLGYQLAPPGSDAADNNPHHQF

SEQ ID NO: 16679 - protein, 270 aa, Zea mays
  unsure (1)..(270): unsure at all Xaa locations
MGRGRIEIKRIENNTSRQVTFCKRRNGLLKKAYELSVLCDAEVALIVFSSRGRLYEYANNSVKATIERYKKAHTVGSSSGPPLLEHNAQQFYQQESAKLRNQIQMLQNTNRHLVGDSVGNLSLKELKQLESRLEKGISKIRARKSELLAAEISYMAKRETELQNDHMTLRTKIEEGEQQLQQVTVARSVAAAAAAATNLELNPFLEMDTKCFFTGGPFATXLDMKCFLPGSLQQMLEAQQRQMLATELNLGYQLAPPGSDAADNNPHHQF

SEQ ID NO: 16680 - protein, 304 aa, Zea mays
LTSSFSSLSGSLPEERHYCHTTTPPMLNMMTDLSCGPSSKAAKGGQPAATTGSGGDRQGRGKIEIKRIENTTNRQVTFCKRRNGLLKKAYELSVLCDAEVALVVFSSRGRLYEYANNSVKSTIERYKKANSDTSNSGTVAEVNAQHYQQESSKLRQAIDSLQNANRTIVGDSIHTMGLRELKQMEGKLEKAINKIRARKNELLYAEVEYMQKREMDLQTDNMYLRSKIAENNETGQPPMNMIGLPSTSEYDHMAPFVDSRNFLQVNMQQQPQHYSHLSAATNDPPTRMMKLRIFGQQSMHASTQ

SEQ ID NO: 16681 - protein, 240 aa, Zea mays
MGRGKIVIRRIDNSTSRQVTFSKRRNGIFKKAKELAILCDAEVGLVIFSSTGRLYEYSSTSMKSVIDRYGKAKEEQQDVANPNSELKFWQREAASLRQQLHNLQENYRQLTGDDLSGLNVKELQSLENQLETSLRGVRAKKDHLLIDEIHDLNRKASLFHQENTDLYNKINLIRQENDELHKKIYETEGPSGVNRESPTPFNFAVVETRDVPVQLELSTLPQQNNIEPSTAPKLGLQLIP

SEQ ID NO: 16682 - protein, 265 aa, Zea mays
MGRGRIEIKRIENNTSRQVTFCKRRNGLLKKAYELSVLCDAEVALVVFSSRGRLYEYANNSVKATIERYKKAHAVGSSSGPPLLEHNAQQFYQQESAKLRNQIQMLQNTNRHLVGDSVGNLSLKELKQLESRLEKGISKIRARKSELLAAEINYMAKRETELQNDHMNLRTKIEEGEQQLQQVTVAQSVAAAAATDVELNPFLEMDTKCFFPGGPFATLDMKCFFPGSLQMLEAQQRQMLATELNLGYQLAPPDTDVANNNPQQF

SEQ ID NO: 16683 - protein, 196 aa, Zea mays
  unsure (1)..(196): unsure at all Xaa locations
MGRGRIEIKRIENNTSRQVTFCKRRNGLLKKAYELSVLCDAEVALVVFSSRGRLYEYANNSVKATIERYKKAHAVGSSSGPPLLEHNAQQFYQQESAKLRNQIQMLQNTNRHLVGDSVGNLSLKELKQLESRLEKGISKIRARKSELLAAEINYMAKRETELQNDHMNLRTKIEEGEXQLQQVTVAQSVAAAAAPT

SEQ ID NO: 16684 - protein, 266 aa, Zea mays
  unsure (1)..(266): unsure at all Xaa locations
MGRGRIEIKRIENNTSRQVTFCKRRNGLLKKAYELSVLCDAEVALVVFSSRGRLYEYANNSVKATIERYKKAHAVGSSSGPPLLEHNAQQFYQQESAKLRNQIQMLQNTNRHLVGDSVGNLSLKELKQLESRLEKGISKIRARKSELLAAEINYMAKRETELQNDHMNLRTKIEEGEQQLQQVTVAQSVAAAAATDVELNPFLEMDTKCFFPGXGPFATLDMKCFFPGSLQMLEAQQRQMLATELNLGYQLAPPDTDVANNNPQQF

SEQ ID NO: 16685 - protein, 212 aa, Zea mays
MGRGKIEIKRIENSTNRQVTFSKRRAGLVKKAREIGVLCDAEVGVVIFSSGGKLYDYCSPRTSLSRILEKYQTNSGKILWGEKHKNLSAEIDRVKKENDNMQIQLRHLKGEDLNSLQPRELIAIEEGLQNGQTNMREKQMDYWRMHTTNGKMLEDEHKILTFRMHQQAVDLSGGMRELETGYHQVQHDRDFISQMPFTFRVQPNHPNLQEDE

SEQ ID NO: 16686 - protein, 228 aa, Zea mays
  unsure (1)..(228): unsure at all Xaa locations
MGRGKIEIKRIENATNRQVTYSKRRTGIMKKARELTVLCDAQVAIIMFSSTGKYHEFCSPGTDIKTIFDRYQQAIGTSLWIEQYENMQRTLSHLKDINRGLRTEIRQRMGEDLDSLDFDELRGLEQNVDAALKEVRHRKYHVISTQTDTYKKKVKHSHEAYKNLQQELGMREDPXAFGYVDNTGAGVAWDGAAAALGGAPPDMYAFRVVPSQPNLHGMAYGFHDLRLG

SEQ ID NO: 16687 - protein, 199 aa, Zea mays
MGRGKIEIKRIENSTNRQVTFSKRRNGILKKAREISVLCDAEVGVVVFSSAGKLYDYCSPKTSLSKILEKYQTNSGKILWGEKHKSLSAEIDRIKKENDTMQIELRHLKGEDLNSLQPKDLIMIEEALDNGLTNLNEKLTKMMEDENKLLAFKLHQQDIALSGSMRELELGYHPDRDLAAQMPITFRVQPSHPNLQENN

SEQ ID NO: 16688 - protein, 226 aa, Zea mays
MGRGKIEIKRIENATNRQVTYSKRRTGIMKKARELTVLCDAQVAIIMFSSTGKYHEFCSPGTDIKTIFDRYQQAIGTSLWIEQYENMQRTLSHLKDINRGLRTEIRQRMGEDLDSLDFDELRGLEQNVDAALKEVRHRKYHVISTQTDTYKKKVKHSHEAYKNLQQELGMREDPAFGYVDNTGAGVAWDGAAALGGAPPDMYAFRVVPSQPNLHGMAYGFHDLRLG

SEQ ID NO: 16689 - protein, 227 aa, Zea mays
MGRGKIEIKRIENATNRQVTYSKRRTGIMKKARELTVLCDAQVAIIMFSSTGKYHEFCSPGTDIKTIFDRYQQAIGTSLWIEQYENMQRTLSHLKDINRGLRTEIRQRMGEDLDSLDFDELRGLEQNVDAALKEVRHRKYHVISTQTDTYKKKVKHSHEAYKNLQQELGMREDPAFGYVDNTGAGVAWDGAAAALGGAPPDMYAFRVVPSQPNLHGMAYGFHDLRLG

SEQ ID NO: 16690 - protein, 265 aa, Zea mays
MGRGRIEIKRIENNTSRQVTFCKRRNGLLKKAYELSVLCDAEVALVVFSSRGRLYEYANNSVKATIERYKKAHAVGSSSGPPLLEHNAQQFYQQESVKLRNQIQMLQNTNRHLVGDSVGNLSLKELKQLESRLEKGISKIRARKSELLAAEINYMAKRETELQNDHMNLRTKIEEGEQQLQQVTVAQSVAAAAATDVELNPFLEMDTKCFFPGGPFATLDMKCFFPGSLQMLEAQQRQMLATELNLGYQLAPPDTDVANNNPQQF

SEQ ID NO: 16691 - protein, 265 aa, Zea mays; identical to SEQ ID NO: 16690

SEQ ID NO: 16692 - protein, 212 aa, Zea mays
MGRGKIEIKRIENSTNRQVTFSKRRAGLVKKAREIGVLCDAEVGVVIFSSGGKLYDYCSPRTSLSRILEKYQTNSGKILWGEKHKNLSAEIDRVKKENDNMQIQLRHLKGEDLNSLQPRELIAIEEGLQNGQTNMREKQMDYRRMHKTNGKMLEDEHKILTFRMHQQAVDLSGGMRELETGYHQVQHDRDFISQMPFTFRVQPNHPNLQEDE

SEQ ID NO: 16693 - protein, 227 aa, Zea mays; identical to SEQ ID NO: 16689

SEQ ID NO: 16694 - protein, 212 aa, Zea mays
  unsure (1)..(212): unsure at all Xaa locations
MGRGKIEIKRIENSTNRQVTFSKRRNGILKKAREISVLCDAEVGVVVFSSAGKLYDYCSPKTSLSKILEKYQTNSGKILWGEKHKSLSAEIDRIKKENDTMQIELRHLKGEDLNSLQPKDLIMIEEALDNGLTNLNEKLMEHWERRVTNTKMMEDENKLLAFKLHQQDIAXLSGSMRELELGYHPXDRDLXAAQMPITFRVQPSHPNLQENN

SEQ ID NO: 16695 - protein, 209 aa, Zea mays
MGRGKIEIKRIENSTNRQVTFSKRRNGILKKAREISVLCDAEVGVVVFSSAGKLYDYCSPKTSLSKILEKYQTNSGKILWGEKHKSLSAEIDRIKKENDTMQIELRHLKGEDLNSLQPKDLIMIEEALDNGLTNLNEKLMEHWERRVTNTKMMEDENKLLAFKLHQQDIALSGSMRELELGYHPDRDLAAQMPITFRVQPSHPNLQENN

SEQ ID NO: 16696 - protein, 171 aa, Zea mays
MGRGKIKIKRIENSTNRQVTFSKRRAGLVKKAREIGVLCDAEVGVVIFSSGGKLYDYCSPRTSLSRILEKYQTNSGKILWGEKHKNLSAEIDRVKKENDNMQIQLRHLKGEDLNSLQHRELIAIEEGLQNGQTNMREKQMDYWRMHKTNGKMLEDEHKILTFRMHQQAVDL

SEQ ID NO: 16697 - protein, 245 aa, Zea mays
MGRGKVQLKRIENKINRQVTFSKRRSGLLKKAHEISVLCDAEVALIIFSTKGKLYEYSTDSCMDKILDRYERYSYAEKVLISVESETQGNWCHEYRKLKAKVETIQKCQKHLMGEDLETLNLKELQQLEQQLESSLKHIRTRKSQLMLESISELQRKEKSLQEENKVLQKELAEKQKAQRKQVQWGQTQQQTSSSSSCFMIREAAPTTNISIFPVAAGGRLVEGAAAQPQARVGLPPWMLSHLSS

SEQ ID NO: 16698 - protein, 270 aa, Zea mays
  unsure (1)..(270): unsure at all Xaa locations
MGRGRIEIKRIENNTSRQVTFCKRRNGLLKXXYELSVLCDAEVALIVFSSRGRLYEYANNSVKATIERYKKAHTVGSSSGPPLLEHNAQQFYQQESAKLRNQIQMLQNTNRHLVGDSVGNLSLKELKQLESRLEKGISKIRARKSELLAAEISYMAERETELQNDHMTLRTEIEEGEQQLQQVTXVARSVAAAAAAATNLELNPFLEMDTKCFFTGGPFATLDMKCFLPGSLQQMLEAQQRQMLATELNLGYQLAPPGSDAADNNPHHQF

SEQ ID NO: 16699 - protein, 263 aa, Zea mays
MLNMMTDLSCGPSSKAKGGQPAAAPGSGGDRQGRGKIEIKRIENTTNRQVTFCKRRNGLLKKAYELSVLCDAEVALVVFSSRGRLYEYANNSVKSTIERYKKANSDTSNSGTVAEVNAQHYQQESSKLRQAIDSLQNANSRTIVGDSIHTMGLRELKQMEGKLEKAINKIRARKNELLYAEVEYMQRREMDLQTDNMYLRSKIAENNNETGQPAMNMIGVPSTSEYDHMASFVDSRNFLQVNMQQQQPQHYSHQLQPTTLQLG

SEQ ID NO: 16700 - protein, 209 aa, Zea mays
MGRGKIEIKRIENSTNRQVTFSKRRNGILKKAREISVLCDAEVGVVVFSSAGKLYDYCSPKTSLSKILEQYRPGSGKILWGEKHKSLSAEIDRIKKENDTMQIELRHLKGEDLNSLQPKDLIMIEEALDNGLTNLNEKLMEHWERRVTNTKMMEDENKLLAFKLHQQDIALSGSMRELELGYHPDRDLAAQMPITFRVQPSHPNLQENN

SEQ ID NO: 16701 - protein, 273 aa, Zea mays
MGRGKVQLKRIENKINRQVTFSKRRNGLLKKAHEISVLCDAEVAVIVFSPKGKLYEYATDSRMDKILERYERYSYAEKALISAESESEGNWCHEYRKLKAKIETIQKCHKHLMGEDLESLNPKELQQLEQQLDSSLKHIRSRKSHLMAESISELQKKERSLQEENKALQKELAERQKAVASRQQQQQQQVQWDQQTHAQAQTSSSSSSFMMRQDQQGLPPPHNICFPPLTMGDRGEELAAAAAAQQQQPLPGQAQPQLRIAGLPPWMLSHLNA

SEQ ID NO: 16702 - protein, 273 aa, Zea mays; identical to SEQ ID NO: 16701

SEQ ID NO: 16703 - protein, 268 aa, Zea mays
  unsure (1)..(268): unsure at all Xaa locations
MGRGKIEIKRIENTTSRQVTFCKRRNGLLKKAYELSILCDAEIALIVFSTRGRLYEYSSNSVRSTIERYKKASASTSGTAPVTDVNSLQYFQQEAAKLRQQIQTLQNSNRHLMGESTGNMTAKELKGLESRLERGIGRIRSKKHELXLLAEIEYMQKREADLHNENMFLRAKVAEAERALEQEAAEDQTMMVPAAVRGATTELKALPASFDASGYYQYQQHQHVVAAASAASSSQYAEQPQGQQEYHHQTALHLGYLKIDSAADKGFL

SEQ ID NO: 16704 - protein, 239 aa, Zea mays
MGRGKIVIRRIDNSTSRQVTFSKRRNGIFKKARELAILCDAEVGLVIFSSTGRLYEYASTSIKSVIDRYGRAKEEEHVADPNTELKFWQREAASLRQQLHNLQENHRQLMGQNLSGLGVKGLQNLENQLEMSICCIRTKKDQLLVDEIHELNRKGSLIQQDNMGLHRKVNLIRQENAELYKKLYEKEAEGEVNRDSTTPYNFVVAEGANVPIHLELNIPLQENGVEQPVAPKLGLQLNQ

SEQ ID NO: 16705 - protein, 273 aa, Zea mays
FPADREALPHHHHPMLNMMTDLSCGPSSKVKEQVAAAPTGSGDRQGQGRGKIEIKRIENTTNRQVTFCKRRNGLLKKAYELSVLCDAEVALVVFSSRGRLYEYANNSVKSTIERYKKANSDSSNSGTVAEVNAQYYQQESSKLRQMIHSLQNANTRNIVGDSIHTMGLRDLKQMEGKLEKAISKIRARKNELLYAEVDYMQKREMDLQTDNMYLTSKIAESNETGQPAMHMMGVPPPTSEYDHMAPFDSRNFLQVSMPQHYSHQLQPTTLQLG

SEQ ID NO: 16706 - protein, 212 aa, Zea mays
MGRGKIKIKRIENSTNRQVTFSKRRAGLVKKAREIGVLCDTEVGVVIFSSGGKLYDYCSPRTSLSRILEKYQTNSGKILWGEKHKNLSAEIDRVKKENDNMQIQLRHLKGEDLNSLQHRELIAIEEGLQNGQTNMREKQMDYWRMHKTNGKMLEDEHKILTFRMHQQAVDLSGGMRELEIGYHQVQHDRDFISQMPFTFRVQPNHPNLQEDE

SEQ ID NO: 16707 - protein, 286 aa, Zea mays
  unsure (1)..(286): unsure at all Xaa locations
MGRGKVELKKIENPTNRQVTFSKRRMGLFKKANELAILCDAQIGVIIFSGSGRMYEYSSPGCRIASVFDRYLKAPSTRFEEMDIQQKIVQEMTRMKDERNRLRMIMAQYMAEDLASFSAQDLSNLEQQIEFSLYKVRLRKQELLDQQLLEIHQREMHMPAEQGGYLCLMNPAAAIASGQHQQAGEMVGINPRPFPWXGTWEPVAVAVAARASSSCCTAGTXAESSMTALGLSPQLHGYRLQPRQPNLQQDADIHGWLXFXFGRGCASSTRRDDAERAAPLLATCSF

SEQ ID NO: 16708 - protein, 271 aa, Zea mays
MGRGKVQLKRIENKINRQVTFSKRRNGLLKKAHEISVLCDAEVAVIVFSPKGKLYEYASDSRMDKILERYERYSYAEKALISAESESEGNWCHEYRKLKAKIETIQRCHKHLMGEDLESLNPKELQQLEQQLESSLKHIRSRKSHLMAESISELQKKERSLQEENKALQKELSERQKAVASRQQQQQQVQWDQQTQVQVQTSSSSSSFMMRQDQQGLPPPQNICFPPLSIGERGEEVAAAAQQQLPPPPGQAQPQLRIAGLPPWMLSHLNA

SEQ ID NO: 16709 - protein, 245 aa, Zea mays
MGRGKVQLKRIENKINRQVTFSKRRSGLLKKAHEISVLCDAEVALIIFSTKGKLYEYSTDSCMDKILDRYERYSYAEKVLISAESETQGNWCHEYRKLKAKVETIQKCQKHLMGEDLETLNLKELQQLEQQLESSLKHIRTRKNQLMLESISELQRKEKSLQEENKVLQKELAEKQKAQRKQVQWGQTQQQTSSSSSCFVIREAAPTTNISIFPVAAGGRLVEGAAAQPQARVGLPPWMLSHLSS

SEQ ID NO: 16710 - protein, 230 aa, Zea mays
  unsure (1)..(230): unsure at all Xaa locations
MARGKVQLRRIENPVHRQVTFCKRRAGLLKKARELSVLCDAHVGIIVFSAHGKLYDLATTGTMEELIERYRTASSREAADGCGDNNRMDAKQETMVLQQEINLLQKGLRYIYGNRTNEHMNVEELNALERYLEIWMYNIRSAKMQIMIQEIQALKSKEGMLQAANEVLQEKIVEQSSLLDVGMVVADQQNGHFSTVPLVEEMISNPLTILSGYSNCRGYSFXHCHNTLGG

SEQ ID NO: 16711 - protein, 245 aa, Zea mays; identical to SEQ ID NO: 16709

SEQ ID NO: 16712 - protein, 271 aa, Zea mays; identical to SEQ ID NO: 16708

SEQ ID NO: 16713 - protein, 212 aa, Zea mays
MGRGKIKIKRIENSTNRQVTFSKRRAGLVKKAREIGVLCDTEVGVVIFSSGGKLYDYCSPRTSLSRILEKYQTNSGKILWGEKHKNLSAEIDRVKKENDNMQIQLRHLKGEDLNSLQHRELIAIEEGLQNGQTNMREKQMDYWRMHKTNGKMLEDEHKILTFRMHQQAVDLSGRMRELEIGYHQVQHDRDFISQMPFTFRVQPNHPNLQEDE

SEQ ID NO: 16714 - protein, 245 aa, Zea mays; identical to SEQ ID NO: 16709

SEQ ID NO: 16715 - protein, 212 aa, Zea mays; identical to SEQ ID NO: 16713

SEQ ID NO: 16716 - protein, 225 aa, Zea mays
MARGKVQLRRVENPVHRQVTFCKRRAGLLKKARELSVLCDASVGIIVFSAHGKLYDLATTGTMEELIERYKAASAGEANGCGNNRMDPKHETTVLQQEINLLQKGLRYIYGNRANEHMNVDELNALERYLEIWMYNTRSAKMQIMAQEIQALKSKEGMLKAANEILQEKIVEQSSLLDVGMVVADQQNGRFSTVPLVEEVISSNPLTILSGYSSCRGSEMGYSFC

SEQ ID NO: 16717 - protein, 224 aa, Zea mays
MARGKVQLRRVENPVHRQVTFCKRRAGLLKKARELSVLCDASVGIIVFSAHGKLYDLATTGTMEELIERYKAASAGEANGCGNNRMDPKHETTVLQQEINLLQKGLRYIYGNRANEHMNVDELNALERYLEIWMYNTRSAKMQIMAQEIQALKSKEGMLKAANEILQEKIVEQSSLLDVGMVVADQQNGRFSTVPLVEEVISSNPLTILSGYSSCRGSEMGYSF

SEQ ID NO: 16718 - protein, 224 aa, Zea mays
MARGKVQLRRVENPVHRQVTFCKRRAGLLKKARELSVLCDASVGIIVFSAHGKLYNLATTGTMEELIERYKAASAGEANGCGNNRMDPKHETTVLQQEINLLQKGLRYIYGNRANEHMNVDELNALERYLEIWMYNTRSAKMQIMAQEIQTLKSKEGMLKAANEILQEKIVEQSSLLDVGMVVADQQNGRFSTVPLVEEVISSNPLTILSGYSSCRGSEMGYSF

SEQ ID NO: 16719 - protein, 224 aa, Zea mays
MARGKVQLRRVENPVHRQVTFCKRRAGLLKKARELSVLCDASVGIIVFSAHGKLYDLATTGTMEELIERYKAASAGEANGCGNNRMDPKHETTVLQQEINLLQKGLRYIYGNRANEHMNVDELNALERYLEIWMYNTRSAKMQIMAQEIQALKSKEGMLKAANEILQEKIVEQSSLLDVGMVVADQQNGRFSTVPLVEEVISSNPLTVLSGYSSCRGSEMGYSF

SEQ ID NO: 16720 - protein, 214 aa, Zea mays
  unsure (1)..(214): unsure at all Xaa locations
MGRGKIEIKRIENSTNRQVTFSKRRAGLVKKAREIGVLCDAEVGVVIFSSGGKLYDYCSPRTSLSRILEKYQTNSGKILWGEKHKNLSAEIDRVKKENDNMQIQLRHLKGEDLNSLQPRXELIAIEEGLQNGQTNMREKQMDYWRMHKTNGKMLEDEHKILTFRMHQQAVDLSGGMRELETGYHQVQHDRDFISQMPFTXFRVQPNHPNLQEDE

SEQ ID NO: 16721 - protein, 245 aa, Zea mays; identical to SEQ ID NO: 667

SEQ ID NO: 16722 - protein, 245 aa, Zea mays; identical to SEQ ID NO: 667

SEQ ID NO: 16723 - protein, 245 aa, Zea mays; identical to SEQ ID NO: 667

SEQ ID NO: 16724 - protein, 245 aa, Zea mays; identical to SEQ ID NO: 667

SEQ ID NO: 16725 - protein, 245 aa, Zea mays; identical to SEQ ID NO: 667

SEQ ID NO: 16726 - protein, 259 aa, Zea mays
MLNMMTDLSCGPSSKVKEQVAAAPTGSGDRQGQGRGKIEIKRIENTTNRQVTFCKRRNGLLKKAYELSVLCDAEVALVVFSSRGRLYEYANNSVKSTIERYKKANSDSSNSGTVAEVNAQYYQQESSKLRQMIHSLQNANTRNIVGDSIHTMGLRDLKQMEGKLEKAIIKIRARKNELLYAEVDYMQKREMDLQTDNMYLRSKIAESNETGQPAMHMTMGAPPTSEYDHMAPFDSRNFLQVSMPQHYSHQLQPTTLQLG

SEQ ID NO: 16727 - protein, 259 aa, Zea mays; identical to SEQ ID NO: 16726

SEQ ID NO: 16728 - protein, 262 aa, Zea mays
  unsure (1)..(262): unsure at all Xaa locations
MVRGKTELKRIENATSRQVTFSKRRNGLLKKAFELSVLCDAEVGLVVFSPRGKLYEFASAASLQKTIDRYRTYTRENVNNKTVQQDIQQVKADAVSLASRLEALEKTKRMFLGENLEECSIEELHNLEVKLAKSLHVIRGKKTQLLEQQISKLKEKERTLLQDNKELRDKQRNLQSPPEAPPDLNRCVPPWPRSLPAPSNDMDVETELYIGLPGRERSSNRDSDXTTDFQFDRLKGISSLKLKHRRAHVNGFICNFCMQTCT

SEQ ID NO: 16729 - protein, 77 aa, Zea mays
  unsure (1)..(77): unsure at all Xaa locations
XLVERYEAAXHXXXWADXRQRDLAXERRAELEKAERMCELMEKELRFMTVDDGEQYTXPSLEQLXHSLEAAVHRVRX

SEQ ID NO: 16730 - protein, 262 aa, Zea mays; identical to SEQ ID NO: 16728
  unsure (1)..(262): unsure at all Xaa locations

SEQ ID NO: 16731 - protein, 212 aa, Zea mays
MGRGKIKIKRIENSTNRQVTFSKRRAGLVKKAREIGVLCETEVGVVIFSSGGKLYDYCSPRTSLSRILEKYQTNSGKILWGEKHKNLSAEIDRVKKENDNMQIQLRHLKGEDLNSLQHRELIAIEEGLQNGQTNMREKQMDYWRMHKTNGKMLEDEHKILTFRMHQQAVDLSGRMRELEIGYHQVQHDRDFISQMPFTFRVQPNHPNLQEDE

SEQ ID NO: 16732 - protein, 270 aa, Zea mays
MGRGKVQLKRIENKINRQVTFSKRRNGLLKKAHEISVLCDAEVAVIVFSPKGKLYEYASDSRMDKILERYERYSYAEKALISAESESEGNWCHEYRKLKAKIETIQRCHKHLMGEDLESLNPKELQQLEQQLESSLKHIRSRKSHLMAESISELQKKERSLQEENKILQKELSERQKAVASRQQQQQQVQWDQQTQVQVQTSSSSSSFMMRQDQQGLPPPQNICFPPLSIGERGEEVAAAAQQQLPPPGQAQPQLRIAGLPPWMLSHLNA

SEQ ID NO: 16733 - protein, 270 aa, Zea mays; identical to SEQ ID NO: 16732

SEQ ID NO: 16734 - protein, 224 aa, Zea mays
MARGKVQLRRVENPVHRQVTFCKRRAGLLKKARELSVLCDASVGIIVFSAHGKLYDLATTGTMEELIERYKAASAGEANGCGNNRMDPKHETTVLQQEINLLQKGLRYIYGNRANEHMNVDELNALKRYLEIWMYNTRSAKMQIMAQEIQALKSKEGMLKAANEILQEKIVEQSSLLDVGMVVADQQNGRFSTVPLVEEVISSNPLTVLSGYSSCRGSKMGYSF

SEQ ID NO: 16735 - protein, 231 aa, Zea mays
MGRGKVQLKRIENKINRQVTFSKRRSGLLKKAHEISVLCDAEVALIIFSTKGKLYEYSTDSCMDKILERYERYSYAEKVLISAEYETQGNWCHEYRKLKAKVETIQKCQKHLMGEDLETLNLKELQQLEQQLESSLKHIRTRKSQLMVESISALQRKLAEKQKDQRQQVQRDQTQQQTSSSSMSFMLREAAPTTNVSIFPVAAGGRVVEGAAAQPQARVGLPPWMLSHLSC

SEQ ID NO: 16736 - protein, 218 aa, Zea mays
  unsure (1)..(218): unsure at all Xaa locations
MGRGKIEIKRIDSATSRQVTFSKRRSGLFKKAKELAILCDAEVGLAVFSSTGRLYDFASTSMKCVIERYSEAREEHRQTMSASAEAKXQLLGQQLSGLNVGDLQNLENKLETSLRNIRLKKDQLIFYQIQELNRKGSLMHQESIELYNKVNLLHQHNTELQRKVYGQGVNNEQTSTTVRHSTRDTENLPINLELSVQRDKSETPSVGLXGEIFVQTSG

SEQ ID NO: 16737 - protein, 250 aa, Zea mays
MGRGRGKVEVRRIENSVSRQVTFSKRRRGLAKKARELAVLCDADVALLVFSDKGRLHDFAAHGSMERILGRYERYLLCEDRDDVTQDYPEESQGNMSYDHIKLRSKLEAIKKSQRNLMGEQLESLTFREVQQLEHRIDSALRNVRSRKDHILLNSIQELRNKETFLMEQNGILEKEMIKKKKAAVGASSSLHTTTSTAAASSTAAAAAALPNLNICPDDSDEPGMAAAAGIRLPWWMLQPSAVSQRQEQH

SEQ ID NO: 16738 - protein, 132 aa, Zea mays
  unsure (1)..(132): unsure at all Xaa locations
PGVRSAARLRVRDDYXWXEGPHRDKAGREPDAAGVHLLQAQGRALQEGGEQYTVPSLELLEHSLEAAVHRVRSEKDRKIGGEIDCLQNIIRGRHEERYGLCDKVSYKTTEEMVHSRQKNLPAGLPMALPASR

SEQ ID NO: 16739 - protein, 244 aa, Zea mays
MGRGRVELKRIENKINRQVTFAKRRNGLLKKAYELSVLCDAEVALIVFSNRGKLYEFCSGPSITRTLERYEKNSYAGPDTAVQNKENELVQNSRNEYLKLKAKVDNLQRTQRNLLGEDLGSLGVKELDQLEKQIDSSLSHIRSTRTQHMLDQLTDLQRREQMMCEANKCLRRKLEETSNQVHGQVWEHGANLLLGYERHSSPQQAPSHVGNGLFFHPLEAAAEPTLQIGFAPEHMNNFMPAWLP

SEQ ID NO: 16740 - protein, 244 aa, Zea mays; identical to SEQ ID NO: 16739

SEQ ID NO: 16741 - protein, 246 aa, Zea mays
  unsure (1)..(246): unsure at all Xaa locations
MGRGRVELKRIENKINRQVTFAKRRNGLLKKAYELSVLCDAEVALIVFSNRGKLYEFCSGPSITRTLERYEKNSYAGPDTAVQNKENELVQNSRNEYLKLKAKVDNLQRTQRNLLGEDLGSLGVKELDQLEKQIDSSLSHIRSTRTQHMLDQLTDLQRREQMMCEANKCLRRKLEETSNQVHGQVWEHGXANLLLGYERHSSPQQAPSHVGNGLFFHPLEAAAEPXTLQIGFAPEHMNNFMPAWLP

SEQ ID NO: 16742 - protein, 253 aa, Zea mays
  unsure (1)..(253): unsure at all Xaa locations
MGRGKVQLKRIENKINRQVTFSKRRSGLLKKAHEISVLCDAEVALIIFSTKGKLYEYSTDSCMDKILERYERYSYAEKVLISAEYETQGNWCHEYRKLKAKVETIQKCQKHLMGEDLETLNLKELQQLEQQLESSLKHIRTRKSQLMVESISALQRKEKSLQEENKVLQKEKALLLHAXLAEKQKDQRQQVQRDQTQQQTSSSSTSFMLREAAPTTNVSIFPVAAGGRVVEGAAAQPQARVGLPPWMLSHLSC

SEQ ID NO: 16743 - protein, 254 aa, Zea mays
  unsure (1)..(254): unsure at all Xaa locations
MGRGKVQLKRIENKINRQVTFSKRRSGLLKKAHEISVLCDAEVALIIFSTKGKLYEYSTDSCMDKILDRYERYSYAEKVLISVESETQGNWCHEYRKLKAKVETIQKCQKHLMGXEDLETLNLKELQQLEQQLESSLKHIRTRKNQLMLESISELQRKEKSLQEENKVLQKEKALLLPAXLAEKQKAQRKQVQWGQTQQQTSSSSSCFVIREAAPTTNISIFPVAAGGRLVEGAAAQPQARVGLPPWMLSHLSS

SEQ ID NO: 16744 - protein, 243 aa, Zea mays
MGRGRVELKRIENKINRQVTFAKRRNGLLKKAYELSVLCDAEVALIIFSNRGKLYEFCSGQSITKTLERYEKNSYGGPDTAVQNKENELVQSSRNEYLKLKARVDNLQRTQRNLLGEDLGSLGVKELEQLEKQLDSSLRHIRSTRTQHMLDQLTDLQRREQMLCEANKCLRRKLEETSNQVHGQVWEHGANLLGYERHSPQQQAPSHVGNGLFFHPLEAAAEPTLQIGFAPEHMNNFMPTWLP

SEQ ID NO: 16745 - protein, 243 aa, Zea mays; identical to SEQ ID NO: 16744

SEQ ID NO: 16746 - protein, 243 aa, Zea mays; identical to SEQ ID NO: 16744

SEQ ID NO: 16747 - protein, 246 aa, Zea mays
  unsure (1)..(246): unsure at all Xaa locations
MGRGKVQLKRIENKINRQVTFSKRRSGLLKKAHEISVLCDAEVALIIFSTKGKLYEYSTDSCMDKILERYERYSYAEKVLISAEYETQGNWCHEYRKLKAXKVDTIQECQKHLMGEDLRTLNLKELQQLEQQLESSLKHIRTRKSQLMVESISALQRKEKSLQEENKVLQKELAEKQKDQRQQVQRDQTQQQTSSSSTSFMLREAAPTTNVSIFPVAAGGRVVEGAAAQPQARVGLPPWMLSHLSC

SEQ ID NO: 16748 - protein, 299 aa, Zea mays
MVRGKTQMKRIENPTSRQVTFSKRRNGLLKKAFELSVLCDAEVALVVFSPRGKLYEFASGSAQKTIERYRTYTKDNVSNKTAHQDIEQVKADAEGLAKKLEALEAYKRKLLGERLEECSFEELHSLEVKLEKSLHCIRGRKTQLLEEQLHKLKEKEMNLRKSNEDLREKCKKQPPPPPPMLMAPPPPPAPAAIDHTGPKDVGMDVETELYIGLPGRDYRSNKHDCTVAVRSGQVRPASSAENNLRSVVRRTGDASQAQANQHDKDHECRVVFYKPVHRPSKAHAPERPSENTYPLISLY

SEQ ID NO: 16749 - protein, 261 aa, Zea mays
  unsure (1)..(261): unsure at all Xaa locations
MGRGKVELKKIENPTNRQVTFSKRRMGLFKKANELAILCDAQIRVIIFSGSGRMYEYSSPPXEVREALFIYLFIPSTRFEEMDIQQKIVQEMTRMKDERNRLRMIMAQXMAEDLASFSAQDLSNLEQQIEFSLYKVCLRKXELLDQQLLEIRQRVHNIPTSDPSLGSLYTSLFQKARAGEMVGINPRPFLWWDVGASGSGSQSQQLLHGRDAAESSMTALGLSPQMHXXYRLHPRQPNLRQDTDVHGWLWXAAAACAWTLI

SEQ ID NO: 16750 - protein, 286 aa, Zea mays
MHIREEEATPSTVTGIMSTLTSAGQQKLKEPISPGGGSASVAGSAAERNNGGRGKGKTEIKRIENTTNRQVTFCKRRNGLLKKAYELSVLCDAEVALIVFSSRGRLYEYANNSVKGTIERYKKATSDNSSAAGTIAEVTIQHYKQESARLRQQIVNLQNSNRALIGDSITTMSHKELKHLETRLDKALGKIRAKKNDVLCSEVEYMQRREMELQNDNLYLRSRVDENERAQQTANMMGAPSTSEYQQHGFTPYDPIRSFLQFNIVQQPQFYSQQEDRKDFNDQGGR

SEQ ID NO: 16751 - protein, 286 aa, Zea mays; identical to SEQ ID NO: 16750

SEQ ID NO: 16752 - protein, 286 aa, Zea mays; identical to SEQ ID NO: 16750

SEQ ID NO: 16753 - protein, 286 aa, Zea mays; identical to SEQ ID NO: 16750

SEQ ID NO: 16754 - protein, 272 aa, Zea mays
  unsure (1)..(272): unsure at all Xaa locations
MVRGKTQMKRIENPASRQVTFSKRRNGLLKKAFELSVLCDAEVALVVFSPRGKLYEFASGSAQKTIERYRTYTKDNVSNKTAHQDIEQVKADAEGLAKKLEALEAYKRKLLGERLEECSFEELHSLEVKLEKSLHCIRGRKCKKQPPPPPPMLMAPPPPPAPAAIDXXRGPKDVGMDVETELYIGLPGRDYRSNKHDCTVAVRSGQVRLASSAENNLRSVVRRTGDASQAQANQHDKDHECRVVFYKPVHRPSKAHAPERPSENTYPLISLY

SEQ ID NO: 16755 - protein, 275 aa, Zea mays
  unsure (1)..(275): unsure at all Xaa locations
MGRGPVQLRRIENKINRQVTFSKRRNGLLKKAHEISVLCDAEVALIVFSTKGKLYEYSSHSSMEGILERYQRYSFEERAVLNPSIEDQANWGDEYVRLKSKLDALQKSQRQLLGEQLSSLTIKELQQLEQQLDSSLKHIRSRKNQLMFDSISALQKKEKALTDQNGVLQKFMEAEKEKNKALMNAHREQQNGASTSSPSLSPPIVPDSMPTLNIGPCQPRGGAESESEPSPAPAQANRGNLPPWMLRTVKXQVRSSQCSFAADLDSNTPVTEMLR

SEQ ID NO: 16756 - protein, 251 aa, Zea mays
MGRGPVQLRRIENKINRQVTFSKRRNGLLKKAHEISVLCDAEVALIVFSTKGKLYEYSSHSSMEGILERYQRYSFEERAVLNPSIEDQANWGDEYVRLKSKLDALQKSQRQLLGEQLSSLTIKELQQLEQQLDSSLKHIRSRKNQLMFDSISALQKKEKALTDQNGVLQKFMEAEKEKNKALMNAQLREQQNGASTSSPSLSPPIVPDSMPTLNIGPCQHRGAAESESEPSPAPAQANRGNLPPWMLRTVK

SEQ ID NO: 16757 - protein, 258 aa, Zea mays
  unsure (1)..(258): unsure at all Xaa locations
MVRGKTQMKRIENPTSRQVTFSKRRNGLLKKAFELSVLCDAEVALVVFSPRGKLYEFASGSAQKTIERYRTYTKDNVSNKTVQQDIERVKADADGLSKRLEALEAYKRKLLGERLEDCSIEELHSLEVKLEKSLHCIRGRKTELLEEQVRKLKQKCKKQPPXVPMASAPPRAPAVDXNVEDGHREPKDDGMDVETELYIGLPGRDYRSSKDKAAVAVRSSVRSVLGVAREWVSCPLGDASAFCKEASRDLWWWSPHGA

SEQ ID NO: 16758 - protein, 301 aa, Zea mays
MVRGKTQMKRIENPASRQVTFSKRRNGLLKKAFELSVLCDAEVALVVFSPRGKLYEFASGSAQKTIERYRTYTKDNVSNKTAHQDIEQVKADAEGLAKKLEALEAYKRKLLGERLEECSFEELHSLEVKLEKSLHCIRGRKTQLLEEQLHKLKEKEMNLRKSNEDLREKCKKQPPPPPPMLMAPPPPPAPAAIDHTGPKDVGMDVETELYIGLPGRDYRSNKHDCTVAVRSGQVRPASSAENNLRSVVRRTGDASQAQANQHDKDHECRVVFYKPVHTVRQRHMRQNVRQRTLTPSSPSIS

SEQ ID NO: 16759 - protein, 497 aa, Zea mays
MCIQSPHFCNIMMHAYGINLIHSMRDIQSLLSPPQHRHPPTPPPFPSFPSASNSANKPLRLAAPPPTRADPGERGRRRDWGRRSWDPGPAARPARGWRLGQSPPARGGPLLFFSLPPPPSPCHFWRRHLLPPPQPPEAGGARAARPPPGRFGPRAPPAARRLLPAAGAAAIRSGRGRRGEGGGSVSRFDWSSRPRRSRMVRGKTQMKRIENPASRQVTFSKRRNGLLKKAFELSVLCDAEVALVVFSPRGKLYEFASGSAQKTIERYRTYTKDNVSNKTAHQDIEQVKADAEGLAKKLEALEAYKRKLLGERLEECSFEELHSLEVKLEKSLHCIRGRKTQLLEEQLHKLKEKEMNLRKSNEDLREKCKKQPPPPPPMLMAPPPPPAPAAIDHTGPKDVGMDVETELYIGLPGRDYRSNKHDCTVAVRSGQVRLASSAENNLRSVVRRTGDASQAQANQHDKDHECRVVFYKPVHRPSKAHAPERPSENTYPLISLY

SEQ ID NO: 16760 - protein, 299 aa, Zea mays
MVRGKTQMKRIENPASRQVTFSKRRNGLLKKAFELSVLCDAEVALVVFSPRGKLYEFASGSAQKTIERYRTYTKDNVSNKTAHQDIEQVKADAEGLAKKLEALEAYKRKLLGERLEECSFEELHSLEVKLEKSLHCIRGRKTQLLEEQLHKLKEKEMNLRKSNEDLREKCKKQPPPPPPMLMAPPPPPAPAAIDHTGPKDVGMDVETELYIGLPGRDYRSNKHDCTVAVRSGQVRLASSAENNLRSVVRRTGDASQAQANQHDKDHECRVVFYKPVHRPSKAHAPERPSENTYPLISLY

SEQ ID NO: 16761 - protein, 242 aa, Zea mays
  unsure (1)..(242): unsure at all Xaa locations
MGRGRVELKRIENKINRQVTFAKRRNGLLKKAYELSVLCDAEVALIIFSNRGKLYEFSSTQSMPKTLEKYQKCSFAGPETALQNRENEQLKSSRNEYLKLKARVDNLQRTQRNLLGEDLESLGIKELEHLEKQLDSSLKHIRSTRTQHMVDQLTELQKKEQMFCEANKCLRRRLEESNQVIWQHAWEXXSERHSEVQPQQLNGNNFFHPLDGAGEPTXLQIGYPSEALTSSCMTTFLPPWLP

SEQ ID NO: 16762 - protein, 255 aa, Zea mays
MGRGRVELKRIENKINRQVTFSKRRNGLLKKAYELSVLCDAEVALIIFSGRGKLYEFGSAGVTKTLERYQHCCYNAQDSNNSALSESQSWYQEMSKLRAKFEALQRTQRHLLGEDLGPLSVKELQQLEKQLECALSQARQRKTQVMMEQVEELRRTERHLGEMNRQLKHKLEAEGCSNYTTLQHAACWPAPGGTIVEHDGATYQVHPPAHSVAMDCEPTLQIGYPHHQFPPPEAVNNIPRSAATGENNFMLGWVL

SEQ ID NO: 16763 - protein, 232 aa, Zea mays
MVRGKTQMKRIENPTSRQVTFSKRRNGLLKKAFELSVLCDAEVALVVFSPRGKLYEFASGSAQKTIERYRTYTKDNVSNKTVQQDIERVKADADGLSKRLEALEAYKRKLLGERLEDCSIEELHSLEVKLEKSLHCIRGRKTELLEEQVRKLKQKEMSLRKSNEDLREKCKKQPPVPMASAPPRAPAVDNVEDGHREPKDDGMDVETELYIGLPGRDYRSSKDKAAVAVRSG

SEQ ID NO: 16764 - protein, 232 aa, Zea mays; identical to SEQ ID NO: 16763

SEQ ID NO: 16765 - protein, 255 aa, Zea mays; identical to SEQ ID NO: 16762

SEQ ID NO: 16766 - protein, 240 aa, Zea mays
MGRGRVELKRIENKINRQVTFAKRRNGLLKKAYELSVLCDAEVALIIFSNRGKLYEFSSTQSMPKTLEKYQKCSFAGPETALQNRENEQLKSSRNEYLKLKARVDNLQRTQRNLLGEDLESLGIKELEHLEKQLDSSLKHIRSTRTQHMVDQLTELQKKEQMFCEANKCLRRRLEESNQVIWQHAWEQSERHSEVQPQQLNGNNFFHPLDGAGEPTLQIGYPSEALTSSCMTTFLPPWLP

SEQ ID NO: 16767 - protein, 225 aa, Zea mays
  unsure (1)..(225): unsure at all Xaa locations
MARGKVQMRRIENPVHRQVTFCKRRMGLLKKARELSVLCDAAIGVIVISPHGKIYDLATNGNMQGLIERYRRACSEMHGESSNQTQTIKQEVLALTHEIDLLQKGFRYMHGENDIDHMNLVELQTLENNLEMWANNIRSQKMQIISREIDMLRNKEAILQAVNGVLQERIIEQNGILNFSGTAMTPSQLTMESNYYLXAKLSSYEFIYVWFRKCMVFHFVPSQTS

SEQ ID NO: 16768 - protein, 231 aa, Zea mays
  unsure (1)..(231): unsure at all Xaa locations
MARGKVQLRRVENPVHRQVTFCKRRAGLLKKARELSVLCDASVGIIVFSAHGKLYDLATTGTMEELIERYKAASAGEANGCGNNRMDPKHETTVLQQEINLLQKGLSIVLGRYIHGNRANEHMNVDELNALERYLEXIWMYNTRSAKMQIMAQEIQALKSKEKGMLKAANEILQEKIVEQSSLLDVGMVVADQQNGRFSTVPLVEEVISSNPLTVLSGYSSCRGSKMGYSF

SEQ ID NO: 16769 - protein, 255 aa, Zea mays
MGRGRVELKRIENKINRQVTFSKRRNGLLKKAYELSVLCDAEVALIIFSSRGKLYEFGSAGITKTLERYQHCCYNAQDSNGALSETQSWYQEMSKLRAKFEALQRTQRHLLGEELGPLSVKELQQLEKQLECALSQARQRKTQLMMEQVEELRRKERHLGEMNRQLKHKLEAEGCSNYRTLQHAAWPAPGSTMVEHDGATYHVHPTTAQSVAMDCEPTLQIGYPPHHQFLPSEAANNIPRSPPGGENNFMLGWVL

SEQ ID NO: 16770 - protein, 255 aa, Zea mays; identical to SEQ ID NO: 16769

SEQ ID NO: 16771 - protein, 255 aa, Zea mays; identical to SEQ ID NO: 16769

SEQ ID NO: 16772 - protein, 255 aa, Zea mays; identical to SEQ ID NO: 16769

SEQ ID NO: 16773 - protein, 255 aa, Zea mays; identical to SEQ ID NO: 16769

SEQ ID NO: 16774 - protein, 225 aa, Zea mays
MGRGKEELKRIENKISRQVTFAKRRNGLLKKAYELSVLCDAEVALIIFSSRGRLFEFSTSSCIYKTLERYRSCSFASEASAPLEAELNNYQEYLKLKTRVEFLQTTQRNLLGEDLGPLSVKELEQLENQIEISLKQIRSSKNQQMLDQLFDLKRKEQQLQDANKDLRMKIEETSEENVLRLSSQDIGCSGSSGHGDEANQEHLQLALDPSLHIGYQAYMDHLNND

SEQ ID NO: 16775 - protein, 225 aa, Zea mays
MGRGKVELKRIENKISRQVTFAKRRNGLLKKAYELSVLCDAEVALIIFSSRGRLFEFSTSSCIYKTLERYRSCSFASEASAPLEAELNNYQEYLKLKTRVEFLQTTQRNLLGEDLGPLSVKELEQLENQIEISLKQIRSSKNQQMLDQLFDLKRKEQQLQDANKDLRMKIEETSEENVLRLSSQDIGCSGSSGHGDEANQEHLQLALDPSLHIGYQAYMDHLNND

SEQ ID NO: 16776 - protein, 240 aa, Zea mays
MGRGKVELKRIENKISRQVTFAKRRNGLLKKAYELSLLCDAEVALIIFSGRGRLFEFSSSSCMYKTLERYRSSNYSTQEVKAPLESEINYQDYLKLRTRVDFLQTTQRNILGEDLGPLSMKELEQLENQIEVSLKHIRSRKNQMLLDQLFDLKSKEQELQDLNKDLRKKLQETSPQNVIHDVSWEEGGHSGSSVLGPFQGLLQYHGNDPSLQTRYHQQAYMDQLNEDMADPDEHGRSGWI

SEQ ID NO: 16777 - protein, 258 aa, Zea mays
IENNTSRQVTFCKRRNGLLKKAYELSVLCDAEVALIVFSSRGRLYEYANNSVKATVERYKKAHTVGSSSGPPLLEHNAQQFYQQESAKLRNQIQMLQNTNRHLVGDSVGNLSLKELKQLESRLEKGISKIRARKSELLAAEISYMAKRETELQNDHMTLRTKIEEGEQQLQQVTVARSVAAAAAATNLELNPFLEMDTKCFFTGGPFATLDMKCFLPGSLQQMLEAQQRQMLATELNLGYQLAPPGSDAANNNPHHQF

SEQ ID NO: 16778 - protein, 245 aa, Zea mays
  unsure (1)..(245): unsure at all Xaa locations
MGRGRVELKRIENKINRQVTFAKRRNGLLKKAYELSVLCDAEVALIIFSNRGKLYEFSSTQSMPKTLEKYQKCSFAGPETALQNRENEQLKSSRNEYLKLKARVDNLQRTQRNLLGEDLESLGIKELEHLEKQLXDSSLKHIRSTRTQHMVDQLTELQKKEQMFCEANKCLRRRLEESNQVIWQHAWEQSERAXXEVQPQQLNGNNFFXHPLDGXAGEPTXLQIGYPSEALTSSCMTTFLPPWLP

SEQ ID NO: 16779 - protein, 240 aa, Zea mays
MGRGKVVLQRIENKISRQVTFAKRRNGLLKKAYELSVLCDAEVALVLFSHAGRLYQFSSSSNLLKTLERYQRYIYASADAAVPSSDQMQNNYQEYVKLKARVEVLQHSQRNLLGEDLALLSPSELDQLENQVDKTLKQIRSRKTQVLLDELCDLKRKEQMLQDANRVLKRKLGEFEAEAASPPQLAWQGEGGMLSHDPPQPEHFFQALESNPCLQPTYHTMDMNQQPVPAPGGCYPAWMS

SEQ ID NO: 16780 - protein, 241 aa, Zea mays
MGRGKVVLQRIENKISRQVTFAKRRNGLLKKAYELSILCDAEVALVLFSHAGRLYQFSSSSNLLKTLERYQRYIYASADAAVPSSDQMQNNYQEYVKLKARVEVLQHSQRNLLGEDLALLSPSELDQLENQVDKTLKQIRSRKTQVLLDELCDLKRKEQMLQDANRVLKRKLGEFEAEAASPPQLAWQGEGGMLSHDPPQPEHFFVALESNAPLQPTYHTMDMNQQPEPAPGGCYPPAWMA

SEQ ID NO: 16781 - protein, 232 aa, Zea mays
MGRGKVVLQRIENKISRQVTFAKRRNGLLKKAYELSILCDAEVALVLFSHAGRLYQFSSSSNLLKTLERYQRYIYASADAAVPSSDQMQNNYQEYVKLKARVEVLQHSQRNLLGEDLALLSPSELDQLENQVDKTLKQIRSRKTQVLLDELCDLKRKEQMLQDANRVLKRKLGEFEAEAASPPQLAWQGEGGMLSHDPPQPEHFFQALAYHTMDMNQQPVPAPGGCYPAWMS

SEQ ID NO: 16782 - protein, 98 aa, Zea mays
  unsure (1)..(98): unsure at all Xaa locations
MGRGKIVIRRIDNSTSRQVTFSKRRNGIFKKAKELAILCDAEVGLVIFSSTGRLYEYSSTSMKSVIDRYGKAKEEQQVVANPNSELKVWQKKKKKGRX

SEQ ID NO: 16783 - protein, 233 aa, Zea mays
  unsure (1)..(233): unsure at all Xaa locations
MGRGKVVLQRIENKISRQVTFAKRRNGLLKKAYELSILCDAEVALVLFSHAGRLYQFSSSSNLLKTLERYQRYIYASADAAVPSSDQMQNNYQEYVKLKARVEVLQHSQRNLLGEELAPLSPSELDQLESQVDKTLKQIRSRKTQVLLDELCDLKRKEQMLQDANRVLKRKLHEFETEAASPPQXWRGXGGGGMLSHDPPQPEHFFVALAYHTMDMNQQPEPAPGGYPPAWMA

SEQ ID NO: 16784 - protein, 277 aa, Zea mays
  unsure (1)..(277): unsure at all Xaa locations
MGRGPVQXLRRIENKINRQVTFSKRRNGLLKKAHEISVLCDAEVALIVFSTKGKLYEYSSHSSMEGILERYQRYSFEERAVLNPSIEDQANWGDEYVRLKSKLDALQKSQRQLLGEQLSSLTIKELQQLXEQQLDSSLKHIRSRKNQLMFDSISALQKKEKALTDQNGVLQKFMEAEKEKNKALMNAHREQQNGASTSSPSLSPPIVPDSMPTLNIGPCQHRGAAESESEPSPAPAQANRGNLPPWMLRTVKXQVRSSQCSFAADLDSNTPVTEMLR

SEQ ID NO: 16785 - protein, 241 aa, Zea mays
MGRGKVVLQRIENKISRQVTFAKRRNGLLKKAYELSILCDAEVALVLFSHAGRLYQFSSSSDLLKTLERYQRHIYASADAAVPSSDEMQNNYQEYVKLKARVEVLQHSQRNLLGEELAPLSPSELDQLESQVDKTLKQIRSRKTQVLLDELCDLKRKEQMLQDANRVLKRKLHEFEAEAASPPQLAWQGGGGMLSHDPPQPEHFFVALESNAPLQPTYHTMDMNQQPEPAPGGCYPPAWMA

SEQ ID NO: 16786 - protein, 234 aa, Zea mays
  unsure (1)..(234): unsure at all Xaa locations
MGRGKVVLQRIENKISRQVTFAKRRNGLLKKAYELSILCDAEVALVLFSHAGRLYQFSSSSDLLKTLERYQRHIYASADAAVPSCDEMQNNYQEYVKLKARVEVLQHSQRNLLGEELAPLSPSELDQLESQVDKTLKQIRSRKTQVLLDELCDLKRKEQMLQDANRVLKRKLHEFEAEAASPPQXWRGXGGGGMLSHDPPQPEHFFVALAYHTMDMNQQPEPAPGGCYPPAWMA

SEQ ID NO: 16787 - protein, 252 aa, Zea mays
  unsure (1)..(252): unsure at all Xaa locations
MDLGIDDRPSMARGKVQLRRIENPVHRQVTFCKRRAGLLKKARELSVLCDAHVGIIVFSAHGKLYDLATSGTMEELIERYRTASSIEAADGCGDNNRMDAKQETMVLQQEINLLHEGLRYIYMNRTNEHMNVEALNALCKDADXWLXNTKALKKQGMSKPLYILTLREGMLKAANEILQEKIVEQSSLLDVGMVVADQQNGRFSTVPLVEEVISSNPLTVLSGYSSCRGSEXGLLLLTVITNSLGAPSVDYY

SEQ ID NO: 16788 - protein, 234 aa, Zea mays; identical to SEQ ID NO: 16786
  unsure (1)..(234): unsure at all Xaa locations

SEQ ID NO: 16789 - protein, 234 aa, Zea mays; identical to SEQ ID NO: 16786
  unsure (1)..(234): unsure at all Xaa locations

SEQ ID NO: 16790 - protein, 127 aa, Zea mays
  unsure (1)..(127): unsure at all Xaa locations
MLNMMTDLSCGPSSKVKEQVAAAPTGSGDRQGQGRGKIEIKRIENTTNRQVTFCKRRNGLLKKAYELSVLCDAEVALVVFSSRGRLYEYANNSVKSTIERYKKANSDSSTLGTVAEVNAQYYQQESX

SEQ ID NO: 16791 - protein, 241 aa, Zea mays
MGRGKVELKRIENKISRQVTFAKRRNGLLKKAYELSLLCDAEVALIIFSGRGRLFEFSSSSCMYKTLERYRSSNYSQEVKTPLDTEIKYQDYLKLRTRVEFLQTTQRNILGEDLGPLSMKELEQLEDQIEISLKHISSRKNQMLLDQLFDLKSKEQELLDLNKDLRKQLQETRPENALRVSWEEGGHSGASGNVLDPYQGLLQHLDNDPSLQFGYHHQAYMDQLNNEDLVDPNEHGRSGWI

SEQ ID NO: 16792 - protein, 103 aa, Zea mays
  unsure (1)..(103): unsure at all Xaa locations
MGRGRVELKRIENKINRQVTFAKRRNGLLKKAYELSVLCDAEVALIIFSNRGKLYEFCSGQSITKTLERYEKNSYGGPDTAVQNKENCAAVIAVXLLLIIRGX

SEQ ID NO: 16793 - protein, 259 aa, Zea mays
MLNMMTDRRGGPSANREEQVAAAHIRQAPRRGAREGIRALRAIRSTSSRQVTFCKRRNGLLKKAYELSVLCDAEVALVVFSSRGRLYEYANNSVKSTIERYKKANSDSSNSGTVAEVNAQYYQQESSKLRQMIHSLQNANTRNIVGDSIHTMGLRDLKQMEGKLEKAIIKIRARKNELLYAEVDYMQKREMDLQTDNMYLRSKIAESNETGQPAMHMTMGAPPTSEYDHMAPFDSRNFLQVSMPQHYSHQLQPTTLQLG

SEQ ID NO: 16794 - protein, 110 aa, Zea mays
  unsure (1)..(110): unsure at all Xaa locations
MGRGRVELKRIENKINRQVTFAKRRNGLLKKAYELSVLCDAEVALIIFSNRGKLYEFSSTQSMPKTLEKYQKKEQMFCEANKCLRRRLEESNQKKKKKKKKKYSALLPLX

SEQ ID NO: 16795 - protein, 124 aa, Zea mays
  unsure (1)..(124): unsure at all Xaa locations
MVRGKTELKRIENATSRQVTFSKRRNGLLKKAFELSVLCDAEVGLVVFSPRGKLYEFASAASLQKTIDRYRTYTRENVNNKTVQQDIQQVKADAVSLASRLEALEKTKRSIFGQRSDHICIPIX

SEQ ID NO: 16796 - protein, 60 aa, Zea mays
MGRGRIEIKRIENNTSRQVTFCKRRNGLLKKAYELSVLCDAEVALIVFSSRGRLYEYANN

SEQ ID NO: 16797 - protein, 214 aa, Zea mays
TTSRQVTFCKRRNGLLKKAYELSVLCDAEVALVVFSSRGRLYEYANNSVKSTIERYKKANSDSSNSGTVAEVNAQYYQQESSKLRQMIHSLQNANTRNIVGDSIHTMGLRDLKQMEGKLEKAIIKIRARKNELLYAEVDYMQKREMDLQTDNMYLRSKIAESNETGQPAMHMTMGAPPTSEYDHMAPFDSRNFLQVSMPQHYSHQLQPTTLQLG

SEQ ID NO: 16798 - protein, 76 aa, Zea mays
MGRGKIEIKRIENSTNRQVTFSKRRGGLLKKANELAVLCDARVGVVIFSSTGKMFEYCSPACRLTDLLEKKKKKAA

SEQ ID NO: 16799 - protein, 127 aa, Zea mays
  unsure (1)..(127): unsure at all Xaa locations
MGRGRTEMKKIQNDVSRRATFGKRRRGLLKKAHELAVLCGVDLGLLVFDDDGAGKLFDYCAPNTSWSELIERYESITKHQFQFQGQGIHHDDHQQQPSADITGLRREGDHLEASVTRQTGENLSSTX

SEQ ID NO: 16800 - protein, 94 aa, Zea mays
MGRGKVQLKRIENKINRQVTFSKRRNGLLKKAHEISVLCDAEVAVIVFSPKGKLYEYASDSRMDKILERYERYSYAEKALISAESESDGNWSEV

SEQ ID NO: 16801 - protein, 169 aa, Zea mays
  unsure (1)..(169): unsure at all Xaa locations
GRCLRGKVQLKRRENYXINRQVTFSKRRSGLLKKANEISVLCDAEVALIIFSTKGKLYEYATDSCMDKILERYERYSYAEKVLISAESDTQGNWCHEYRKLKAKAETIQKCQKHLMGEDLEFLNXKELQQLELQLENSLKHFRSRKSHQWLRSINELXREEKSLXEENX

SEQ ID NO: 16802 - protein, 112 aa, Zea mays
  unsure (1)..(112): unsure at all Xaa locations
MAPRGRVELRRIEDKASRQVRFSKRRAGLFKKAFELALLCDAEVALLVFSPGGKLYEYSSSXNRDVAXXSDLQSRLKEIATWSKQNNAEESDANELEKLEELLTNALRNTKX

SEQ ID NO: 16803 - protein, 207 aa, Zea mays
MAARIGADGKAMARRGRVELRRIEDRVSRQVRFSKRRSGLFKKAFELSLLCDAEVALIVFSPAGKLYEYASTSIEDTYNRYQQFSGEGRNINDGNRNDNKDEASSVQLMLSKIATWSPQSNADESDVDELEKLENLLRNALKDTRSTKIQMLAKQNSGASTSGQKSPGKERREHGSVQRPPTWDCSCFPLPMDACTDYDLVGCETLC

SEQ ID NO: 16804 - protein, 179 aa, Zea mays
  unsure (1)..(179): unsure at all Xaa locations
NESHEDHRTSASSPTRSIAPSSPILGNWNSLQSLRWFCSLAFNSFDXLLFLQTDLSCGPSSKAKGGQPAATSSGGDRQGRGKIEIKRIENTTNRQVTFCKRRNGLLKKAYELSVLCDAEVALVVFSSRGRLYEYANVYLVPRSYTLRASAVCVVQIRSKFAPIFLEAKPRGWRVNWGAS

SEQ ID NO: 16805 - protein, 92 aa, Zea mays
MGRGRVELKRIENKINRQVTFAKRRNGLLKKAYELSVLCDAEVALIIFSSRGKQYEFCSSSSMLRTLDRYQKCNYGAPEPNVPSREALAELN

SEQ ID NO: 16806 - protein, 86 aa, Zea mays
MGRGKVQLKRIENKINRQVTFSKRRSGLLKKAHEISVLCDAEVALIIFSTKGKLYEYSTDSWYALGPLRCLRFDTARCVLPHFQAV

SEQ ID NO: 16807 - protein, 60 aa, Zea mays
MGRGKVQLKRIENKINRQVTFSKRRSGLLKKAHEISVLCDAEVALIIFSTKGKLYEYSTD

SEQ ID NO: 16808 - protein, 86 aa, Zea mays
  unsure (1)..(86): unsure at all Xaa locations
MGRGRVELKRIENKINRQVTFAKRRNGLLKKAYELSVLCDAEVALIVFSNRGKLYEFCSGPSGRRPQILSDLTSGEELGGGGSLDX

SEQ ID NO: 16809 - protein, 115 aa, Zea mays
  unsure (1)..(115): unsure at all Xaa locations
MGRGKIVIRRIDNSTSRQVTFSKRRSGLLKKAKELSILCDAEVGLIIFSSTGRLYDFSNTKYDSSTINLLSLVARCMSRLNKYLRGLHFFAKKFGSVPDPLLFLRLKFKKKKKKX

SEQ ID NO: 16810 - protein, 74 aa, Zea mays
MAPRGRVELRRIEDKASRQVRFSKRRAGLFKKAFELALLCDAEVALLVFSPGGKLYEYSSSTVLAAKKKKKKAA

SEQ ID NO: 16811 - protein, 86 aa, Zea mays
  unsure (1)..(86): unsure at all Xaa locations
MGRGKVEMRRVENRVSRQVTFSKRRKGLLKKADELAVLCGVDVGVVVFSERGKLFEYSSPTSALRSLSLPLKCWLGSQHTPISSSX

SEQ ID NO: 16812 - protein, 251 aa, Zea mays
LAARVGSHGEGSGGAQAGGGEINRQVTFAKRRNGLLKKAYELSVLCDAEVALIIFSNRGKLYEFCSGQSITKTLERYEKNSYGGPDTAVQNKENELVQSSRNEYLKLKARVDNLQRTQRNLLGEDLGSLGVKELDQLEKQIDSSLSHIRSTRTQHMLDQLTDLQRREQMMCEANKCLRRKLEETSNQVHGQVWEHGANLLLGYERHSSPQQAPSHVGNGLFFHPLEAAAEPTLQIGFAPEHMNNFMPAWLP

SEQ ID NO: 16813 - protein, 90 aa, Zea mays
  unsure (1)..(90): unsure at all Xaa locations
MVRGKTELKRIENATSRQVTFSKRRNGLLKKAFELSVLCDAEVGLVVFSPRGKLYEFASAARTKSLKKPMTASKISIPSILXRQKSLNVX

SEQ ID NO: 16814 - protein, 231 aa, Zea mays
KINRQVTFAKRRNGLLKKAYELSVLCDAEVALIIFSNRGKLYEFCSGQSITKTLERYEKNSYGGPDTAVQNKENELVQSSRNEYLKLKARVDNLQRTQRNLLGEDLGSLGVKELDQLEKQIDSSLSHIRSTRTQHMLDQLTDLQRREQMMCEANKCLRRKLEETSNQVHGQVWEHGANLLLGYERHSSPQQAPSHVGNGLFFHPLEAAAEPTLQIGFAPEHMNNFMPAWLP

SEQ ID NO: 16815 - protein, 218 aa, Zea mays
  unsure (1)..(218): unsure at all Xaa locations
MGRVKLQIKRIENNTNRQVTFSKRRNGLIKKAYELSVLCDIDIALIMFSPSNRLSHFSGRRRIEDVITRYINLPENERGGGXXGGVVRNREYLMNMLTQLKREGDIAEQLTPPSPANSNIEDLQHEIRKYRHQVEELEKQIRMFEPDPAVLVLTNEAETCEKFLMDTLTRVEERKKYLSCNQLGPFEPSPTDIHVGKPTASQQLEGWIIPSSIKKKKK

SEQ ID NO: 16816 - protein, 78 aa, Zea mays
  unsure (1)..(78): unsure at all Xaa locations
MGRGPMPLRRIENKIHRQVTFFNRRDGLLKKAHEISVLCDAXDALIVLSTKGKLYQYSSHSSMEGISERYQRYLFEEX

SEQ ID NO: 16817 - protein, 168 aa, Zea mays
SASSPTRSIAPSSPIFRNWNFLQSLRWFCSLAFNSFLLFLQTDLSCGPSSKAKGGQPAATSSGGDRQGRGKIEIKHIENTTNRQVTFCKRRNSLLKKAYELSVLCDAEVALVVFSSRGRLYEYANVYLVPRSYTLRASAVCVVQIRSKFAPIFLEAKPRGWRVNWGAS

SEQ ID NO: 16818 - protein, 173 aa, Zea mays
RSYRTSASSPTRSIAPSSPIFRNWNFLQSLRWFCSLAFNSFLLFLQTDLSCGPSSKAKGGQPAATSSGGDRQGRGKIEIKHIENTTNRQVTFCKRRNSLLKKAYELSVLCDAEVALVVFSSRGRLYEYANVYLVPRSYTLRASAVCVVQIRSKFAPIFLEAKPRGWRVNWGAS

SEQ ID NO: 16819 - protein, 160 aa, Zea mays
RSYRTSASSPTRSIAPSSPIFRNWNFLQSLRWFCSLAFNSFLLFLQTDLSCGPSSKAKGGQPAATSSGGDRQGRGKIEIKHIENTTNRQVTFCKRRNSLLKKAYELSVLCDAEVALVVFSSRGRLYEFDMPRAYYHSRFEEESQDSASVVLLLIQLPYWQ

SEQ ID NO: 16820 - protein, 167 aa, Zea mays
ASSPTRSIAPSSPIFRNWNFLQSLRWFCSLAFNSFLLFLQTDLSCGPSSKAKGGQPAATSSGGDRQGRGKIEIKHIENTTNRQVTFCKRRNSLLKKAYELSVLCDAEVALVVFSSRGRLYEYANVYLVPRSYTLRASAVCVVQIRSKFAPIFLEAKPRGWRVNWGAS

SEQ ID NO: 16821 - protein, 159 aa, Zea mays
HERTSASSPTRSIAPSSPIFRNWNFLQSLRWFCSLAFNSFLLFLQTDLSCGPSSKAKGGQPAATSSGGDRQGRGKIEIKHIENTTNRQVTFCKRRNSLLKKAYELSVLCDAEVALVVFSSRGRLYEFDMPRAYYHSRFEEESQDSASVVLLLIQLPYWQ

SEQ ID NO: 16822 - protein, 60 aa, Zea mays
KGRGKIEIKHIENTTNRQVTFCKRRNSLLKKAYELSVLCDAEVALVVFSSRGRLYEYANV

SEQ ID NO: 16823 - protein, 168 aa, Zea mays; identical to SEQ ID NO: 16817

SEQ ID NO: 16824 - protein, 166 aa, Zea mays
MAPRGRVELRRIEDKASRQVRFSKRRAGLFKKAFELALLCDAEVALLVFSPGGKLYEYSSSSIEDTYDRYHQFAGAGRKVNGHNNDNRDVAASDLQSRLKEIATWSKQNNAEESDANELEKLEELLTNALRNTKAKKMLAKENNGGAGASTSSQMLLYSAERATDK

SEQ ID NO: 16825 - protein, 60 aa, Zea mays
QGRGKIEIKRIENTTNRQVTFSKRRNGPLKKAYELSVLCDAEVALVVFSSRGCLYEYANN

SEQ ID NO: 16826 - protein, 105 aa, Zea mays
  unsure (1)..(105): unsure at all Xaa locations
MARERLQTKRIESAADRQVTFYKRRRGLFKKAEELSALCDADVALIVFSSTGKLSQFAHCRINEISAXDRTHMPKMQPWRQPSLDLNLEHSXYAXNLNEQLVEAS

SEQ ID NO: 16827 - protein, 107 aa, Zea mays
  unsure (1)..(107): unsure at all Xaa locations
MGRGLVELKRVENKINRQVTFAKRLNGLLKKAYDLSVLCDAHIXVLIFFSNRGKLYKFCIVPSITRTLERYXKNNYAGPHTAVQNTXNDLTHNTPNEYLKLKAKVDX

SEQ ID NO: 16828 - protein, 244 aa, Zea mays
RNGLLKKAYELSILCDAEIALIVFSTRGRLYEYSSNSVRSTIERYKKASASTSGTAPVTDVNSLQYFQQEAAKLRQQIQTLQNSNRHLMGESTGNMTAKELKGLESRLERGIGRIRSKKHELLLAEIEYMQKREADLHNENMFLRAKVAEAERALEQEAAEDQTMMVPAAVRGATTELKALPASFDASGYYQYQQHQHVVAAASAASSSQYAEQPQGQQEYHHQTALHLGYHVKIDSAADKGFL

SEQ ID NO: 16829 - protein, 66 aa, Zea mays
  unsure (1)..(66): unsure at all Xaa locations
MGRGPVQLRRIENKINRQVTFSKRRNGLLKKAHEISVLCDAEAALIVFSTKGNLYEYSSHASKAGX

SEQ ID NO: 16830 - protein, 124 aa, Zea mays
MDAEAARRKQVAPPQEKRKRGRLELRRIQDRTSRQVRFSKRRSGLFKKAHELSVLCDAEVAMVVFSPAGRLYHYASLGTSIEKTFCRYWDLANTDIDLNIEARDSRDNYNTNIQLQVKSIFFFR

SEQ ID NO: 16831 - protein, 201 aa, Thalictrum thalictroides
AGIVKKAQELTVLCDAEVSLLMVSSTGRIHEYVSPCSTHKNLYDRYQQASGTNLWQPHYERMQETMKKLKEINNKLRKEIRQRNGEDLDELNFQQLCGLEQNMEKSVEGVRNRKFHVITTSTDTYKKKIKNHEETHNSLRREFEEGDADFRFPSVDFEGDYQSTIGFANGNPQIFAVRWQPKLQSNIQDKEAYGSYGLSLV

SEQ ID NO: 16832 - protein, 183 aa, Thalictrum thalictroides
AGIVKKAKELTVPCDTQVSLIMISSSGKIHEYISPSYTHKNLYDKYQQVSGNNIWKPHYERMQDNLQKLKEINNKLRKEIRQRNGEDLDELNFQQLCGLEQNMEKSVDCVRNRKFHVISSQTDIYKKKVKNHQVTYNGLLRGFEERDADCQYASPDFEGEYQSTIEFATENPHIFAFGLQPQL

SEQ ID NO: 16833 - protein, 205 aa, Trollius laxus
AGILKKAKELTVLCDAEVSLLMFSSTGKLHEFVSPSTTTKKVYDRYQQTSGISLWQSHYERMQDNLNKLKEINRKLRREIRQRNGEDLDGLTFQQLCTLEQNMDKSAECVRNRKFHVIGTQTDTYKKKLMLQVKNHEETQNDLLREMQRREAEYHYAFGDQEGDYPSAVNGNAAHIFAFRLQPSQPNLHLQDDASGYGSYGLSLA

SEQ ID NO: 16834 - protein, 196 aa, Trautvetteria carolinensis
AGIMKKAKELTVLCDAEVSLIMFSSSGKCVDFISPTISQKEFYDKYQKITRDDLWKSQYDKMQEELKTLVEINRKLRREIGQRVGEDLDDLSIQELRSLEQDLRNTEKVVRQRKFGLLSSQGETQKKKVRNLAEINSNLWQEYQERSEEEYALANGMSALELGNGVAPHIYSFRLHPSQPNLHEDEEYEIHGLRLA

SEQ ID NO: 16835 - protein, 57 aa, Perilla frutescens
MGRGRVQLKRIENKINRQVTFSKRRAGLLKKAHEISVLCDAEVALIVFSHKGKLFEY

SEQ ID NO: 16836 - protein, 239 aa, Ceratopteris richardii
MVRRKIKIKRIENATTRQVTFSKRRGGLLKKAHDLSVLCDADVGVIIFSSKGKLFQFANPSMKSVLERYYKAQGDAESADNVSSAENIEIDRITLFTEKLKALQRNVIGDDLERLSLRDLIHLEQQIHESLGRIRAKKEEMILDQLEDFKKKVTDARKTTNANSSLLDKLLDFCSSDMTSSHNFVDCEPLLISEAPQADASLAGRAATSEQSTDVRECSPPAKRLRITEDLNHSPVCME

SEQ ID NO: 16837 - protein, 220 aa, Ceratopteris richardii
MGRGKIEMKRIENRTTRQVTFCKRRAGLVKKARELSVLCDADVALIVFSSSGRLFEYAGSRSMREIIQAYVDAHEDSSSLLQLRSEEACVSQDLRAELTELRKEVESLRQEKRRKDGDIHDLKLLSADELDSLEGEVETSLCSIRKRQKQLYREKMNETFRKEEELRKENEKLRKQVEELQCARWEICCAQGFEASATSMCTSHGMTSERSDSFLDLRLN

SEQ ID NO: 16838 - protein, 383 aa, Ceratopteris richardii
MNTFLSSGPHTYLNNLRCGEWGSGTAPGPIADPKSAAYYRDHTKNDKVNDLSNRLHSYGPPEALQYPNQHAIAADTEKMEVENSGKMAASVERSAQDAHASGALQEDVVAAYVDNMPACVAGVTLVPQGGRGTIPIRRIDNPTSRQVTFSKRRNGLLKKAYELSVLCDAEVGVMVFSATGRLSEFASTSMQKVLERYQEHSNGAPSRKVLLQDVEFWKREVLFLRDQLFHLKNYENHILGENQIPLDLAEIQRVETRLENALNKIRIQKVQVLHGEMQQIYKQEARLFEENNILRKKLAEATTINGMRGSMSTMTMSHEDLPGSTNQSYGTKALQGGCPSDTSTTTSNDPNHHSSHPPSHPSASQPLTLHLTSPCSPKLDLRL

SEQ ID NO: 16839 - protein, 238 aa, Ceratopteris richardii
MVRRKIKIKRIENATTRQVTFSKRRGGLLKKAHDLSVLCDAEVAVIIFSSKGKLFQFANPSMETVLGRYVKASRDPEAGDNGSSTDNVEADRLTVFTEKLKMLQSNVIGDDLERLSLRDLIHLEQQVHESLGHIRAKKDELILEQIDEFKQKMADTRRTTNANTSMLDRLVDFCSSGITGSQNIVASEPGYVVGVPRTDTLRAGWIATSDQSNDGPEYVPCAKRFRITEGLNESPASE

SEQ ID NO: 16840 - protein, 238 aa, Ceratopteris richardii
MVRRKIKIKRIENATTRQVTFSKRRGGLLKKAHDLSVLCDAEVAVIIFSSKGKLFQFANPSMETVLGRYVKASRDPEAGDNGSSTDNVEADRLTVFTEKLKMLQSNVIGDDLERLSLRDLIHLEQQVHESLGHIRAKKDELILEQIDEFKQKMADTRRTTNANTSMLDRLVDFCSSGITGSQNIVESEPGYVVGVPRTDTLRAGWIATSDQSNDGPEYVPCAKRFRITEDLNESPASE

SEQ ID NO: 16841 - protein, 240 aa, Ceratopteris richardii
MPRRKVKIKRIENGATRQITFSKRRAGLFKKAHDLSVLCDAKVAVIVFSEKGRLFEFASPSMESILKRYMDSQKYLGISEEENSSARLLNGDKHWVTTLRNRLKMLRSDLVELDLERLSGGNLIRLEQEMNYNLGRIRAKKDQLILREIESYSNKELMHKAHKRKEQVMNEKAARKVDCQGPCVSNSTALENADEEFLQMDRYASYDGDVIDECPSSVKKSMVLQDLNRLPSEYAQTLVE

SEQ ID NO: 16842 - protein, 215 aa, Ceratopteris richardii
MVRTKIKIKRIENATTRQVTFSKRRGGLFKKAHDLSVLCDAEVAVIIFSSKGKLFHFGNPSMETVLKRYMKANGDPKAGDNGSSTDNVEADHLTVFTEKLKLLQSVVIGDDLERLSVRDIIYLEQQFHENLGRIRAKKDELMLERNNDLMQKMADTRRRTNVNTSMLNRLADFCSSDIIGSRTFVENEPADHVVGVPRTDTSRAGRDCSKRPKQQ

SEQ ID NO: 16843 - protein, 142 aa, Brassica rapa subsp. pekinensis
RQVTFCNRRNGLLKKAYELSVLCDAEVTLIVFSSRGRLYEYSNNSVKGTIERYKKAISDNTNTGTVAEINGQYYQQESAKLRQQIISIQNSNRQLMGETIGSMSPKELRNLEGRLDRSINRIRSKKNELLFAEIDYMQKREL

SEQ ID NO: 16844 - protein, 208 aa, Arabidopsis lyrata
MGRGKIEIKRIENANNRVVTFSKRRNGLVKKAKEITVLCDAKVALIIFASNGKMVDYCCPSMDLGAMLDQYQKLSGKKLWDAKHENLSNEIDRIKKENDSLQLELRHLKGEDIQSLNLKNLMAVEHAIEHGLDKVRDHQMELLNSKRRNDKMIMEEHRQLTFQLQQQDMAIASNARGMMMRDHDGQFGYRVQPIQPNLQEKIMSLVID

SEQ ID NO: 16845 - protein, 231 aa, Arabidopsis lyrata
  unsure (1)..(231): unsure at all Xaa locations
MARGKIQIKRIENQTNRQVTYSMRRNGLFKKAHELTVLCDARVSIIMFSSSNKLHEYISPNTTTKEIVDLYQTVSDVDVWATQYERMQETKRKLLETNRNLRTQIKQRLGECLDELDIQELRRLEDEMENTFKLVRERKIKSLGNQIETTKKKNKSQQDIQKXLIHELELRAEDPHYGLVDNGGDYDSVLGYQIEGSRAYAFRFHQNHHHQYPNHALHAPSASDIITFHLL

SEQ ID NO: 16846 - protein, 195 aa, Cimicifuga racemosa
TGIVKKARELAVLCDAEVSLIMFSSTGKLSEYISPSTTTKKIYDTYQQVTGVDLWNSHYEKMQETLKKQKESNMKLRKEIRQRIGEGLDDLSFEELRGLEQDLNGSVKVVRDRKYHTIATQTETYRKKLRNLQETHTHLVREFEARGEDPYYEGGYESLLGMSNGAAHLLPYRLQPSQPNLQDGENYGSYNLRLG

SEQ ID NO: 16847 - protein, 249 aa, Rosa rugosa
MAYENKPNTVLDSDAQRRLGRGKIEIKRIENTTNRQVTFCKRRNGLLKKAYELSVLCDAEVALIVFSNRGRLYEYSNNSSVRETIERYKKACADSSNNGSVSEATTQYYQQEAAKLRAQITTLQNSNRGYMAEGLSNMSIKELKGVETKLEKAISRIRSKKNELLFAEIEYMQKRELDLHNNNQLLRAKIAENERHQQSINAIAGGHGSYDIMQPTQPFHEARNYFQVNALQPNIHQYSRHDQISLQLV

SEQ ID NO: 16848 - protein, 248 aa, Rosa rugosa
MAYENKPNTVLDSDAQRRLGRGKIEIKRIENTTNRQVTFCKRRNGLLKKAYELSVLCDAEVALIVFSNRGRLYEYSNNSVRETIERYKKACADSSNNGSVSEATTQYYQQEAAKLRAQITTLQNSNRGYMAEGLSNMSIKELKGVETKLEKAISRIRSKKNELLFAEIEYMQKRELDLHNNNQLLRAKIAENERHQQSINAIAGGHGSYDIMQPTQPFHEARNYFQVNALQPNIHQYSRHDQISLQLV

SEQ ID NO: 16849 - protein, 250 aa, Rosa rugosa
MAYENKPNTVLDSDAQRRLGRGKIEIKRIENTTNRQVTFCKRRNGLLKKAYELSVLCDAEVALIVFSNRGRLYEYSNNSVRETIERYKKACADSSNNGSVSEATTQYYQQEAAKLRAQITTLQNSNRGYMAEGLSNMSIKELKGVETKLEKAISRIRSKKNELLFAEIEYMQKRELDLHNNNQLLRAKGQIAENERHQQSINAIAGGHGSYDIMQPTQPFHEARNYFQVNALQPNIHQYSRHDQISLQLV

SEQ ID NO: 16850 - protein, 261 aa, Rosa rugosa
MGRGKIEIKLIENQTNRQVTYSKRRNGIFKKAQELTVLCDAQVSLIMQSSTDKIHEYISPTTTTKKMFDLYQKNLQIDLWSSHYEAMKENLWKLKEVNNKLRRDIRQRLGHDLNGLSYAELQDLEETMSQSVQIIRDRKYHVLKTQAETTRKKVKNLEERNSNLMHGYGAPGNEDPQYGYVDNEGDYESAVALANGASNLYFFNRVHNNHNLDHGHGGGSLVSSITHLQNPNNHGNHNLENGHGGGSLISSITHLHDLRLA

SEQ ID NO: 16851 - protein, 203 aa, Rosa rugosa
MGRGKIEIKRIENSSNRQVTYSKRKNGIIKKAKEITVLCDAKVSLIIIASSGKMVEYCSGPQETRMKILDKYHSQSGKRLWDAKHENLCNEVDRVKKDNDGMQIELRHLKGEDITSLNHVDLMALEEAIENGLASIRDRMSKYMDAVRENNRALEDENKRLAYQLHKMMKSEENLRDMNYNNNTQIPFALRVQPNQPNLHDRM

SEQ ID NO: 16852 - protein, 228 aa, Papaver nudicaule
MGRGKIEIKRIENATNRQVTYSKRRSGILKKAKELTVLCDAEVSLIMFSSTGKMTEYLSPSLNGNTKRVYDKYQQLSGISLWNSHYESLQNALNKQKEINRRLRREIRQRMGEDLDELTIEELRSLEQNLEASVKVVRDRKYHVIITQTETTRKKLRNHTEQNHGLLREFEPILDEDPHYVIAHQEEDYESAIELAHGGPNIFAFRLQPSQPNLHNGGGYNCHDLRLA

SEQ ID NO: 16853 - protein, 221 aa, Papaver nudicaule
SGIFKKAKELTILCDAQVCLIMFSNTGKVCEYVSPSTTMKEFFDRFRRITNIDLWASQYETLQEELKTQKEINNKLKKEIRQRTGQDDLSELSLDEMRILEKNLIDSADIVRNRKNHVLNSHTETSKKRNKAQEETYKNLVRALHSQADREEQEFHFYAIPADTEGDHHRDYLSSSSSMRRLSISGGGDCENSQITFQLQPSQPNLHHAAGGGYFYSQHYA

SEQ ID NO: 16854 - protein, 125 aa, Dubautia laxa
TNRQVTYSKRRNGIFKKAHELTVICDAKVSLIMFSNNGKFHVYISPSTTTKKIYDMYQTTLGFDLWTSHYERMTETMKKLKESNNKLRREIRQRVLGEDLDGLDMNDLTILEQQMQDSLTVVRER

SEQ ID NO: 16855 - protein, 125 aa, Dubautia laxa
TNRQVTYSKRRNGIFKKAHELTVPCDAKVSLIMFSNTGKFHEYISPSTTTKKIYDMYQTTLGFDLWSSHYERMTETMKKLKDSNNKLRREIRQRVLGGDLDGLDMNDLTILEQQMQDSLTVVRER

SEQ ID NO: 16856 - protein, 242 aa, Daucus carota subsp. sativus
MGRGKVQLKRIENKINRQVTFSKRRGGLLKKAHEISVLCDAEVALIVFSNKGKLFEYSTDSSMEEILERYERYSYAERQVIANDPESTGNWTLEYTKLKARIDLLQRDHRHYMGEDLDSLTLKEIQNLEQQLDTALKHIRSRKNQLIFESISDLQKKEKAIQEENGKLTKKIKEREKTMVQQAQWEKQNPSPNLSTFLMPQENPFLNIGGTFQGESSQGMTRNDLDLTLEPNHYPCNLRCFA

SEQ ID NO: 16857 - protein, 216 aa, Daucus carota subsp. sativus
MGRGKIEIKRIENSNNRQVTYSKRRNGLIKKAKEITVLCEAAVSVVIFSSPSKLYEYCSPSTSITEMLDRYHQHSGQRLWDPEHEALSNEIKRIKEENEKMQIDLRHLNAEDISSLNIKELMTIENDLENGLMNIGEKRRESYKRMQKDGQRLEEENMQLRYVYQQQMEAMAGKVRDIENEFNHLKVNDQSYEAQMPFAFRLQPNQPNLHNQMLLD

SEQ ID NO: 16858 - protein, 223 aa, Daucus carota subsp. sativus
MARGKIQIKKIENATNRQVTYSKRRNGLFKKAHELSVLCDAKVSIIMVSSTNKLHEFITPNLSQKQLYDQYQKAKPCDLWSNHYQAMQEQLRKLREVNRNLRNEISHRKGESLNGVSHEELYILEQKMQEAVDITRAQKMKTITNQIEKSKKKVRNGEQVQRTLLQDLELFKEEDPHYGLVDNGGDYETVFGCSNAYPGLLALRLQSNHYNFHGGAGSDLTFA

SEQ ID NO: 16859 - protein, 255 aa, Daucus carota subsp. sativus
MSFVDDQSGDLSLHERKSGRGKIEIKRIENTTNRQVTFCKRRNGLLKKAYELSVLCDAEVALIVFSNRGRLYEYANNSVRGTIERYKKANSDTPNTATVSEANTQYYQKEAARLRQQISNLQNSNRHLMGEALGAVPAKELKGLETKLQNGLSRVRSKKNELLFAEIEFMRKREIDLHNNNQYLRAKISENERAQQQMSLMPGASGSSEQYRDVGQPHESFDARNYLQVNGLQPNNANYSSHQDHQTQHVPLQLV

SEQ ID NO: 16860 - protein, 246 aa, Daucus carota subsp. sativus
MGRGKVELKRIENKINRQVTFAKRRNGLLKKAYELSVLCDAEVALIIFSNRGKLYEFCSTSSMNKTLGRYHRCSYGALETGQTDRDTQSSYQEYIKLKAKVEALQQSQRHLLGEELGQLGTKELEELERQLDSTLRQVRSTKTQYMLDQLSDLQQKEQELVEINKALRNKLEENDVRIQSQWEAAERNNVAYRSHPAEHPPDHGVFESLECNNTMHMGYNSAMNDHQMASATPTQNASGVIPGWML

SEQ ID NO: 16861 - protein, 214 aa, Magnolia praecocissima
MGRGKIEIKRIENSTNRQVTYSKRRGGIMKKAKELTVLCDAQVSLIMFSSTGKFSEYCSPSTTTKNIFDRYQQASGISLWNSHYERMQSHLIKLKEENNNLRREIRQRIGEDLEDLEIEELRGLEQNLESSIKVVRDRKYHVITTQTETYKKKLRSLRDEHAKLIRQLEGQAENGAYGLVDNGGPDYESALVLANGGVHSLHDTGFGIHDLRLA

SEQ ID NO: 16862 - protein, 240 aa, Magnolia praecocissima
MGRGRVQLKRIENKINRQVTFSKRRMGLLKKAHEISVLCDAEVAVIVFSTKGKLYEYSTDSRMSRILERYERYSYAERELVLSGPESEGSWCLEYGKLKAKVESLQRNLRHFTGEDLDTLSLKELQQLEHQLDAALKHIRSRRPIMLIHCGASKKEKSLREQNNMLEKEIQEKEKAMAQQAQWEQQNQSQSSHPSWLASPLPTLNIGTYHQGNEVEEEGARPPARTNSLMPPWMLRHVNE

SEQ ID NO: 16863 - protein, 204 aa, Magnolia praecocissima
  unsure (1)..(204): unsure at all Xaa locations
MARGKIQMKRIENSVHRQVTFCKRRAGLLKKARXXSVLCDVDIGLMIFSTHGKLYELATKGTMEGLIERYLGTSRGAQIEGGPAXXPPESDQEVFMLKQEIELLQKGLRNSIGGGMGNMTMDELHALERHLELWIYHIRSTKMRIMIQEIQSLKDNEGILKSANEFLQGKIEEQNVIFDMPPMIGGIPYPLTIPNEIFLEELNY

SEQ ID NO: 16864 - protein, 231 aa, Magnolia praecocissima
ENKINRQVTFSKRRNGLLKKAYELSVLCDAEVALIVFSSRGKLYEFGSAGINKTLERYQRCCYTFHDANITDRDTQGWYQEVSKLNAKCDSLQRSQRHLLGEDLGPLSVKELQKLERQLESALTQTRQRKTQIMLEHMEALREKERQLGDINKELKNKLEAKGQGAFRAMQASWESGPLVGNNGFPMHPSQSAAIECEPTLQIGYHSFAAPEANIPRTVVAESNFMHGWIL

SEQ ID NO: 16865 - protein, 208 aa, Magnolia praecocissima
NRQVTFCKRRNGLLKKAYELSVLCDAEVALIVFSSRGRLYEYANNSVRNTIDRYKKACADSSSLGCVSEANSQYYQQESSKLRQQIALLQNANRHLMGEALSSMTVKELKQLENRLEKGISRIRSKKNELLFAEIEYMQKREVDLQNDNMYLRAKITENERAQQQMGMLPAPEYDVMPGFDSRNFLQVNLMDSSHHYSHQEQTALQLG

SEQ ID NO: 16866 - protein, 212 aa, Magnolia praecocissima
  unsure (1)..(212): unsure at all Xaa locations
ENKINRQVTFAKRRNGLLKXAHELSVLCDAEVALIIFSTRGKLYEFCSSPSMLQTLERYQKCSYSTLEVSAPTNETQSSYQEYLKLKARVEILQRTQRNLLGEDLGPLSTKELEQLENQLEMSLKQIRSTKTQFMLDQLLDLKEGQCWRKQQGLKRKLEEMVEKSSSAVVGHRCTKHVFXKIANLLILRDSSSLWIANQHXRWXTIPCMKIR

SEQ ID NO: 16867 - protein, 231 aa, Magnolia praecocissima
ENKINRQVTFAKRRNGLLKKAYELSVLCDAEVALIIFSNRGKLYEFCSSSSMLKTLERYQKCNYGAPELPVSTRETQSYHQEYLKLKARVEALQRSQRNLLGEDLGPLSGKELETLERQLDISLRQIRSTRTQCMLDQLGDLQRREHMLSEANKTLTRRLEEGAQANQNQVWEPNAHAVDSYNRQQPQQQGDGFFHPLECEPTLHIGYQPDQITIAAPGPSVNNYMPGWLV

SEQ ID NO: 16868 - protein, 228 aa, Hyacinthus orientalis
MGRGKIEIKRIENTTSRQVTFCKRRNGLLKKAYELSVLCDAEVALIVFSTRGRLYEYSNSNSVKTTIERYKKACTDTTNTGTVSEANSQYYQQEATKLRQQITNLQNTNRTLMGESLSTMSLRELKQLEGRLERGINKIRTKKNELLSAEIEYMQKREAEMHNDNMYLRNKIAENERAQQQMNMLPSTATEYEGIPQFDSRNFLQVSLMEPNNHHYSRQQQQTALQLG

SEQ ID NO: 16869 - protein, 202 aa, Hyacinthus orientalis
MGRGKIEIKRIENSTNRQVTFSKRRNGIIKKAKEISVLCESEIAIVVFSSLSKMSEFCSPNTTFPKMLEKYQQHSGKKLWDAKHENLSAEIDRIKRENDNMQIELRHLKGEDLSSLNPRELIPIEEALQNGVTGARAKQMEFLKMMKLNGKLLEDENKKLAYLLHHQELAMDGSRHQRGTEYASEIPMALRVQPVQPNLQEA

SEQ ID NO: 16870 - protein, 202 aa, Hyacinthus orientalis
MGRGKIEIKRIENSTNRQVTFSKRLNGIIKKAKEISVLCESEIAIVIFSSLNKISDFCSPNTSLPKMLEKYQQHSGKKLWDAKHENLSAEIDRIKRENDNMQIELRRLKGDDLTSLNPRELIPIEEALQNGVTGACAKQMEFLKMMKLNGKLLEDENKKLAYFLHHQELAMDGNRHQRGTEYASEIPMALRVQPVQPNLQEA

SEQ ID NO: 16871 - protein, 210 aa, Lilium regale
MGRGKIEIKRIENSTNRQVTFSKRRNGIIKKAREISVLCEAQVSVVIFSSSGKMSEYCSPSTSLPKILERYQVNCGKKIWDPKHEHLSAEIDRIKKENDNMQIQLRHLKGEDLNSLQPKELIPIEEALENGIRGVREKQNDFLRMLKKNERILEEDNKRLTYILHHQQLAMDENMRNLEFAYHHKDGDFSSQMPMAFRVQPIQPNLHEDK

SEQ ID NO: 16872 - protein, 228 aa, Lilium regale
MGRGKIEIKKIENSTNRQVTYSKRRTGIIKKATELTVLCDAEVSLLMFSSTGKLSEFCSPSTDTKKIFDRYQQLSGINLWSAQYEKMQNTLNHLSEINRNLRKEISQRMGEELDGLDIKDLRGLEQNLDEALKLVRHRKYHVINTQTETYKKKVKNSEEAHKNLLRDLVNREMKDENPVYGYVDEDPSNYDGGLALANGASHLYEFRVQPSQPNLHGMGYGSHDLRLA

SEQ ID NO: 16873 - protein, 676 aa, Saccharomyces cerevisiae
MGRRKIEIQRISDDRNRAVTFIKRKAGLFKKAHELSVLCQVDIAVIILGSNNTFYEFSSVDTNDLIYHYQNDKNLLHEVKDPSDYGDFHKSASVNINQDLLRSSMSNKPSKSNVKGMNQSENDDDENNDEDDDDHGNFERNSNMHSNKKASDKNIPSAHMKLLSPTALISKMDGSEQNKRHPENALPPLQHLKRLKPDPLQISRTPQQQQQQNISRPYHSSMYNLNQPSSSSSSPSTMDFPKLPSFQNSSFNGRPPPISISPNKFSKPFTNASSRTPKQEHKINNSGSNNNDNSNYTQSPSNSLEDSIQQTVKARRKLSARPVLRVRIPNNNFSSNSAIPSEPSSASSTSANGNSMGSSQIMKENKTSRSSKISPLSASASGPLTLQKGNNGRMVIKLPNANAPNGSNNGNGSNNNNHPYPFGSGSSPLFSATQPYIATPLQPSNIPGGPFQQNTSFLAQRQTQQYQQMSFKKQSQTVPLTTTLTGRPPSTFSGPETSNGPPTGSLPSKFVHDLMSNSPNVSSISMFPDWSMGPNSAKPGNTNNPGTFPPVQTAVNNGNSSNISSTNNTNNNNNNNNNNSSNNNSNNGNDNNSNNSNNSYYSNNEDAPVNGAAISEHTTDGDSNNQSNSSTYDAAATAYNGNTGLTPYINTAQTPLGTKFFNFSTDISGEKNSSKI

SEQ ID NO: 16874 - protein, 67 aa, Secale strictum subsp. kuprijanovii
GNWCHEYRKLKAKVETIQKCQKHLMGEDLESLNLKELQQLEQQLESSLKHIRSRKNQLMPESISELQ

SEQ ID NO: 16875 - protein, 130 aa, Harmonia nutans
QRNHRHYMGEEIESLSLKEIQNLEQQLDTGLKHIRTRKNQLLHESISELQKKGKAIQEQNTTLTKRIKEKEKDKTIPQSSHWEQPSYVDHDTTFLMLPPHPALNIGGDYNQVGGGGADGRSNELDLSLQP

SEQ ID NO: 16876 - protein, 130 aa, Brassica incana
AQTNWSMEYSRLKAKIELLERNQRHYLGEDLESISIKELQNLEQQLDTSLKHIRSRKNQLMHESLNHLQRKEKEILEENSMLAKQIKERESILRTHQNQSEQQNRSHHVAPQPQPQLNPYMASSPFLNMG

SEQ ID NO: 16877 - protein, 130 aa, Madia sativa
QRNHRHYMGEEIESLSLKEIQNLEQQLDTGLKHIRTRKNQLLHESISELQKKGKAIQEQNTTLTKRIKEKEKDKTIPQSSHWEQYVDHDTTFLMPPPHPPINIGGDYNQVGGGGGDGSGSSNELDLSLQP

SEQ ID NO: 16878 - protein, 133 aa, Centromadia pungens
QRNHRHYMGEDIESLSLKEIQNLEQQLDTGLKNIRTRKNQLLHESISELQKKGKAIQEQNTTLTKKIKEKEKDKTIPQNTQWEMHNYVDPDTTFLMPPPPPALNMGGDYNHGGASSSEGGDGRTNELDLSLQP

SEQ ID NO: 16879 - protein, 133 aa, Deinandra lobbii
QRNHRHYMGEDIESLSLKEIQNLEQQLDTGLKNIRTRKNQLLHESISELQKKGKAIQEQNTTLTKKIKEKEKDKTIPQNTQWEMHNYVDPDTTFLMPPPPPALNMGGDYNHSGAGSSEGGDGRSNELDLSLQP

SEQ ID NO: 16880 - protein, 135 aa, Calycadenia multiglandulosa
QRNHRHYMGEEIESLSLKEIQNLEQQLDTGLKHIRTRKNQLLHESISELQKKGKAIQEQNTSLTKRIKEKEKDKRTLPQNSQWEQHSYVDHDTTFLMPPPHPTLNIGGDYKQVGGGGGGAHDDGRSNELNLSLQP

SEQ ID NO: 16881 - protein, 136 aa, Osmadenia tenella
QRNHRHYMGEEIESLSLKEIQNLEQQLDTGLKHIRTRKNQLLHESISGLQKKGKAIQEQNTSLTKRIKEKENDKRMPQNSQWEHHSYVDHDTTFLMPPPHPTLNINGGDYDQVGGGGCGGADHDGRSNELDLSLQP

SEQ ID NO: 16882 - protein, 156 aa, Brassica oleracea var. italica
AQTNWSVEYSRLKAKIELLERNQRHYLGEDLESISIKELQNLEQQLDTSLKHIRSRKNQLMHESLNHLQRKEKEILEENSMLAKQIRERESILRTHQNQSEQQNRSHHVAPQPQPQLNPYMASSPFLNMGGMYQGEYPTAVRRNRLDLTLEPIYNC

SEQ ID NO: 16883 - protein, 156 aa, Brassica oleracea var. acephala
AQTNWSVEYSRLKAKIELLERNQRHYLGEDLESISIKELQNLEQQLDTSLKHIRSRKNQLMHESLNHLQRKEKEILEENSMLAKQIKERESILRTHQNQSEQQNRSHHVAPQPQPQLNPYMASSPFLNMGGMYQGEYPTAVRRNRLDLTLEPIYNC

SEQ ID NO: 16884 - protein, 156 aa, Brassica oleracea var. acephala
AQTNWSMEYSRLKAKIELLERNQRHYLGKDLESISIKELQNLEQQLDTSLKHIRSRKNQLMHESLNHLQRKEKEILEENSMLAKQIKERESILRTHQNQSEQQNRSHHVAPQPQPQLNPYMASSPFLNMGGMYQGEYPTAVRRNRLDLTLEPIYNC

SEQ ID NO: 16885 - protein, 156 aa, Brassica oleracea var. acephala
AQTNWSMEYSRLKAKIELWERNQRHYLGEDLESISIKELQNLEQQLDTSLKHIRSRKNQLMHESLNHLQRKEKEILEENSMLAKQIKERESILRTHQNQSEQQNRSHHVAPQPQPQLNPYMASSPFLNMGGMYQGEYPTAVRRNRLDLTLEPIYNC

SEQ ID NO: 16886 - protein, 154 aa, Glycine max
  unsure (1)..(154): unsure at all Xaa locations
XEKVLVSSESEIQGNWCHEYRKLKAKVETIQKCQKHLMGEDFESLNLKELQQLEQQLESSLKHIRSRKNQLMHESISELQKKERSLQEENKVLQKELVEKQKAHVAQQDQTQPQTSSSSSSFMLRDAPPAANTSIHPAATGERAEDAAVQPQAX

SEQ ID NO: 16887 - protein, 128 aa, Argyroxiphium caliginis
QRNHRHYMGEEIESLSLKEIQNLEQQLDTGLKHIRTKKNQLLHESIPELQKKGKAIQEQNTTLTKRIKEKEKDKTIPQSSHWEQYVDHDTTFLMPPPHPPLNIGGDYNQVGGGRGDGRSNELDLSLQP

SEQ ID NO: 16888 - protein, 135 aa, Kyhosia bolanderi
QRNHRHYMGEDIESLSLKEIQNLEQQLDTGLKNIRTRKNQLLHESISELQKKGKAIQEQNTTLTKKIKEKEKVKTTMPQNTQWEMHNYVDPDTTFLMPPPPPALNMGGDYNQGGAGSSEAGGDGRTNELDLSLQP

SEQ ID NO: 16889 - protein, 128 aa, Carlquistia muirii
QRNHRHYMGEEIESLSLKEIQNLEQQLDTGLKHIRTRKNQLLHESISELQKKGKAIQEQNTTLTKRIKEKEKDNTIPQSSHWEQYVDHDTTFLMPPPHPPINIGGDYNQVGGGGADGRSNELDLSLQP

SEQ ID NO: 16890 - protein, 128 aa, Anisocarpus scabridus
QRNHRHYMGEEIESLSLKEIQNLEQQLDTGLKHIRTRKNQLLHESISELQKKGKAIQEQNTTLTKRIKEKEKDKTIPQSSHWEQYVDHDTTFLLPPPHPPLNIGGDYNQVGGGGGDGRSNELDLSLQP

SEQ ID NO: 16891 - protein, 128 aa, Wilkesia gymnoxiphium
QRNHRHYMGEEIESLSLKEIQNLEQQLDTGLKHIRTRKNQLLHESISELQKKGKAIQEQNTTLTKRIKEKEKDKTIPQSSHWEQYVDHDTTFLMQPPHPPLNIGGDYNQVGGGRGDGRSNELDLSLQP

SEQ ID NO: 16892 - protein, 67 aa, Secale cereale
GNWCHEYRKLKAKVETIQKCQKHLMGEDLESLNLKELQQLEQQLESSLKHIRSRKNQLMAESISELQ

SEQ ID NO: 16893 - protein, 66 aa, Triticum aestivum subsp. spelta
DWCHEYRKLKAKVETIQKCQKHLMGEDLESLNLKELQQLEQQLESSLKHIRSRKNQLMPESISELQ

SEQ ID NO: 16894 - protein, 117 aa, Brassica insularis
RNQRHYLGEDLQAVSSKELQNLEQQLDTALKHIRSRKNQLMYDSINELQRKEKAIQEQNGMLSKEIKEREKILRAQQEQWDQQNHGHNMPPPSPPQQHQIQHPYMLSHQPSPFLDMG

SEQ ID NO: 16895 - protein, 128 aa, Argyroxiphium sandwicense
QRNHRHYMGEEIESLSLKEIQNLEQQLDTGLKHIRTKKNQLLHESISELQKKGKAIQEQNTTLTKRIKEKEKDKTIPQSSHWEQYVDHDTTFLMPPPHPPLNIGGDYNQVGGGRGDGRSNELDLSLQP

SEQ ID NO: 16896 - protein, 128 aa, Dubautia latifolia
QRNHRHYMGEEIESLSLKEIQNLEQQLDTGLKHIRTRKNQLLHESISKLQKKGKAIQEQNTTLTKRIKEKEKDKTIPQSSHWEQYVDHDTTFLMPPPHPPLIIGRDYNQVGGGGGDGRSNELDLSLQP

SEQ ID NO: 16897 - protein, 128 aa, Dubautia laxa
QRNHRHYMGEEIESLSLKEIQNLEQQLDTGLKHIRTRKNQLLHESISELQKKGKAIQEQNTTLTKRIKEKDKDKTIPQSSHCEQYVDHDTTFLMPPPHPPLNIGGDYNQVGGGRGDGRSNELDLSLQP

SEQ ID NO: 16898 - protein, 128 aa, Dubautia plantaginea
QRNHRHYMGEEIESLSLKEIQNLEQQLDTGLKHIRTRKNQLLHESISELQKKGKVIQEQNTTLTKRIKEKEKDKTIPQSSHWEQYVDHDTTFLMPPPHPPLNIGGDYNQVGGGRGDGRSNELDLSLQP

SEQ ID NO: 16899 - protein, 128 aa, Dubautia raillardioides
QRNHRHYMGEEIESLSLKEIQNLEQQLDTGLKHIRTRKNQLLHESISELQKKGKAIQEQNTTLTKRIKEKEKDKTIPQSSHWEHYVDHDTTFLMPPPHPPLNIGGDYNQVGGGRGDGRSNELDLSLQP

SEQ ID NO: 16900 - protein, 128 aa, Dubautia scabra
QRNHRHYMGEEIESLSLKETQNLEQQLDTGLKHIRTRKNQLLHESISELQKKGKAIQEQNTTLTKRIKEKEKDKTIPQSSHWEQYVDHDTTFLTPPPHPPLNIGGDYNQVGGGRGDGRSNELDLSLQP

SEQ ID NO: 16901 - protein, 128 aa, Dubautia sherffiana
QRNHRHYMGEEIESLRLKEIQNLEQQLDTGLKHIRTRKNQLLHESISKLQKKGKAIQEQNTTLTKRIKEKEKDKTIPQSSHWEQYVDHDTTFLMPPPHPPLIIGRDYNQVGGGGGDGRSNELDLSLQP

SEQ ID NO: 16902 - protein, 67 aa, Triticum aestivum subsp. sphaerococcum
GNWCHEYRKLKAKVETIQKCQKHLVGEDLESLNLKELQQLEQQLESSLKHIRSRKNQLMPESISELQ

SEQ ID NO: 16903 - protein, 235 aa, Mus musculus
MEGAKRADANLLTDTGTESSPRSPVCSLRHFACEQNLLSRPDGSASFLQGDTSVLAGVYGPAEVKVSKEIFNKATLEVILRPKIGLPGVAEKSRERLVRNTCEAVVLGALHPRTSITVVLQVVSDAGSLLACCLNAACMALVDAGVPMRALFCGVTCALDSDGNLVLDPTTKQEKEARAILTFALDSAEQKLLMSTTKGLYSDAELQQCLAAAQAASQHIFRFYRESLQRRYSKS

SEQ ID NO: 16904 - protein, 235 aa, Mus musculus
MEGAKRADANVLTDTGTESSPRSPVCSLRHFACEQNLLSRPDGSASFLQGDTSVLAGVYGPAEVKVSKEIFNKATLEVILRPKIGLPGVAEKSRERLVRNTCEAVVLGALHPRTSITVVLQVVSDAGSLLACCLNAACMALVDAGVPMRALFCGVTCALDSDGNLVLDPTTKQEKEARAILTFALDSAEQKLLMSTTKGLYSDAELQQCLAAAQAASQHIFRFYRESLQRRYSKS

SEQ ID NO: 16905 - protein, 229 aa, Rattus norvegicus
MEGAKRADAKVLTDTGTESSPRSPVCSLRHFACEQNLLSRPDGSASFLQGDTSVLAGVYGPAEVKVSKEIFNKATLEVILRPKIGLPGVAEKSRERLIRNTCEAVVLGALHPRTSITVVLQVLLACCLNAACMALVDAGVPMRALFCGVTCALDPDGNLVLDPTTKQEKEARAILTFALDSAEQKLLMSATKGLYSDAELQQCLAAAQAASQHIFRFYRESLQRRYSKS

SEQ ID NO: 16906 - protein, 246 aa, Pyrobaculum aerophilum str. IM2
MKRPPVPLLQNGVRADGRTPDQMREVKIAVGVVSNADGSAMVSYGATTAVAAVYGPREMHPRHLSLPDRGVMRVRYHMAPFSTKDERKSPTPSRREIEISKILREALEPAIVLEQYPRSRIDVFVEILQADGSTRVASLTAASLALADAGIYMRDLVVGVSVGLVDGTVVLDLNGLEDQYGEGDLPLGYMPNLKRFTLLQLDGAWTRDMFLQALNLAVRGAEYVYQIARDALKNKYMSIAEEIYGR

SEQ ID NO: 16907 - protein, 212 aa, Anopheles gambiae str. PEST
MVTDSTKTVANSLNLRRMVCETNVLSRSDCSAALSQGATQVMVAANGPAEVKFKNAESENCHLEVQYRSNAGQEDIQHRLMESLIKRSFVRVVATPAFCRSAVYIYVQEMTDRGGLLACSINASCLALITSGVELNFTVAAVHCIMTEDGAMILDPDHKQLKLARSSFTFVFDSIGKNTVTSYVHGSFTFEEYEQVVSVCRKAVEKIFDFYR

SEQ ID NO: 16908 - protein, 250 aa, Pyrococcus furiosus DSM 3638
MMLKPEGLKLIDENGRRLDGRKKYELRPIKMKVGVLKNANGSAYIEWGKNKIIAAVYGPREIHPKHLQRPDRAILRVRYNMAPFSVEERKKPGPDRRSIEISKVIRGALEPALILEMFPRTAIDVFIEVLQADAGTRVAGITAASLALADAGIPMRDLVAACSAGKIEGEIVLDLNKEEDNYGEADVPVAIMPIKNDITLLQMDGYLTKEEFIEAVKLAIKGAKAVYQKQREALKEKYLKIAQEVEGSEQ

SEQ ID NO: 16909 - protein, 240 aa, Methanothermobacter thermautotrophicus str. Delta H
MITIITQDQLKTSPSVREDGRAFDELRPLKIEAGILERADGSSYLEFGGNKILVAVYGPREAQIRKLQRPDRAVIRCRYNMAPFSVEERKRPGPDRRSVEISKITAEALRPALILEKFPRSVIDVFIEVLEAEGGTRCAGITAASVALADAGIPMRDMVVACAAGKVGDQVVLDLSEEEDKEGQADVPVAILPRTREITLLQSDGNLTPEEFERALDLAVEGCLRIHEVQKEALRKRYGE

SEQ ID NO: 16910 - protein, 239 aa, Methanopyrus kandleri AV19
MEERPERLISEDGLRLDGRKPDEMRPLKIQAGVLKRADGSAYLELGANKIVAAVYGPRELHPRHKQKPDRAVVRFRYNMAPFSVDERKRPGPDRRSIEISKLSKEALEPAIFTEYYPRTAIDIFVEVLQADAGTRCAGISAASVALADAGIEMRDLVAACAAGKVEGKVVLDPMYYEDGYGEADVPLAMMPKEGKITLLQMDGDMTPGEFKQAVKLAKKGCKIVYKEQRRALKEKYGGD

SEQ ID NO: 16911 - protein, 493 aa, Methanosarcina mazei Goe1
MSNKPENLTLITDDGLRLDGRRADEIRPMKIEVGVLSRADGSCYLEWGRNKILVGVFGPREAHPRRSQRADSAVIRYRYNMASFSVEDRARPGPSRRSIEISKVSREAFEPVIMAELFPKTAIDIFVEVLQADAGTRTAAINASSIALADAGIPMKGLITSCAFGKVDGKIVLDLNKEEDNYGEADFPVAMTQDGEITLIQMDGNLTPDEIKQGLELVKKGCKEILEIQQAVLRKKFETPVEEVSEETAPEKGAEKEVLEPSPVAAIVEETPEEAEEPEVEISEEVEAEILASEVIPDFEDELEEEIEEELEESEEDLETEEEEFEEEALEEEAEPEEDLEEDLEEDLGEELEEEEEELEEEEFEEEALEEETELEASLECAPELKEFDEIEARLEKEDASIEAEEEIEPEAEEATEEGLEEEAEIEETAASEEENIEAEAEAEEEAEPEVEAEEISTEAEEAEEEPEEEKSEGPWKVVKDPSEAGTRGEKDE

SEQ ID NO: 16912 - protein, 501 aa, Methanosarcina barkeri
MSDKPEKLITDDGLRLDGRHADEIRPMKIEIGVLSRADGSCYLEWGRNKVLVGVFGPREAHPRRSQRADTAVIRYKYNMASFSTEDRARPGPSRRSIEISKVSREAFEPVIMAELFPKTAIDIFVEILQADAGTRTAAINASSIALADAGIPMKGLVTSCAFGKVDGQIVLDLNKEEDNYGEADFPVAMTQDGEITLLQMDGNLTTDEIRKGFELVKKGCKEILEIQQAVLRTKFETPVEEPEAKAAEEVEETELEVVETESSLEYAPEAAVVEEIIEEAEEPEEGISEETVEACAVNKEAPECEELEKVIKDAEAEVVEGEVTEKVVEAEVEEEAEEEAFEDKADFESSFEASFEEVSEAEELEEPESEEVVSGEEAEVESEIEESADEEAQPEVETQLEVETQLEEKAEVEEETQLEEKVQPEEEAGIEEVQPEEEAGIEEVASEETFESEPEIESEAESKKEAPAEQTIEESEEEKCKGPWKVVKDPSESGSRGENDE

SEQ ID NO: 16913 - protein, 258 aa, Archaeoglobus fulgidus DSM 4304
MSEFNEKPEKLIVDGLRLDGRKFDELRPIKIEASVLKRADGSCYLEMGKNKVIAAVFGPREVHPRHLQDPSKAIIRYRYNMAPFSVEERKRPGPDRRSIEISKVSKEAFEAVIMKELFPRSAIDIFVEVLQADAGSRTACLNAASVALVDAGVPMKGMITSVAVGKADGQLVLDPMKEEDNFGEADMPFAFLIRNGKIESIALLQMDGRMTRDEVKQAIELAKKGALQIYEMQREAILRRYIEVGEEMDEITEGGEDA

SEQ ID NO: 16914 - protein, 248 aa, Sulfolobus solfataricus
MREMLQVERPKLILDDGKRTDGRKPDELRSIKIELGVLKNADGSAIFEMGNTKAIAAVYGPKEMHPRHLSLPDRAVLRVRYHMTPFSTDERKNPAPSRREIELSKVIREALESAVLVELFPRTAIDVFTEILQADAGSRLVSLMAASLALADAGIPMRDLIAGVAVGKADGVIILDLNETEDMWGEADMPIAMMPSLNQVTLFQLNGSMTPDEFRQAFDLAVKGINIIYNLEREALKSKYVEFKEEGV

SEQ ID NO: 16915 - protein, 248 aa, Thermoplasma acidophilum
MKRMEANKIKLINEDNLRLDGRSFNELRPIKIQAGVLNRADGSAYIEWGGNKIMVGVYGPKEAYPKHSQDIDHAIVKARYNMAAFSVDERKRPGPDRRTMEISKVISEALSSSIMIEQFPRAEIDVYIEVLQADAGTRIAGLTAATVALADAGVPMRDMVVGCTAGKVDGHMVLDLSKEEDNYGEADIPIAIMPKTGDIVLMQMDGDVTEDELYQAMDMIFEATKRISQIQREALLNKYKIQDIGEGE

SEQ ID NO: 16916 - protein, 249 aa, Pyrococcus abyssi
MMEKPEGLKLIDENGRRIDGRKKYELRPIKMEVGVLKNANGSAYIEWGKNKIIAAVYGPRELHPKHLQRPDRAILRVRYNMAPFSVEERKKPGPDRRSIEISKVIKGALEPALILEMFPRTAIDVFIEVLQADAGTRVAGITAASLALADAGIPMRDLVAACAAGKIEGEIVLDLNKEEDNYGEADVPVAIMPLKNDITLLQMDGYLTKDEFIEAVKLAIKGAKAVYQKQREALKEKYLKIAQEVEGSE

SEQ ID NO: 16917 - protein, 239 aa, Arabidopsis thaliana
MEIDREDGRTPNQLRPLACSRNILHRPHGSASWSQGDTKVLAAVYGPKAGTKKNENAEKACFEVIWKPKSGQIGKVEKEYEMILKRTIQSICVLTVNPNTTTSVIIQVVHDDGSLLPCAINAACAALVDAGIPMKHLAVAICCCLAENGYLVLDPNKLEEKKMTAFAYLVFPNTTLSVLPEGSSVAEGEPVEHGIITSITHGVMSVDDYFLCVENGRAATASLSAFFRKNFQQSSSKAG

SEQ ID NO: 16918 - protein, 243 aa, Glycine max
METDRPDGRTPNQLRPLACSCSILHRAHGSASWAQGETKVLAAVYGPKAGTKKNENPEKASIEVIWKPKTGQIGKLEKEYEMILKRTLESICIRTIYPNTTTSVIVQVVHDDGALLPCAINAACTALVDAGIPLKHLAVAICCSVTDSGCIILDPTKEEEEKMKAYINLVFPNTIVSVLPERSSQVGSEPMAHGIMTSVTQGAMSVDDYLHCLDRGRAASARLSEFVRKNIGPKSTCEASKAG

SEQ ID NO: 16919 - protein, 248 aa, Glycine max
  unsure (1)..(248): unsure at all Xaa locations
METDRPDGRTPNQLRPLAYSCSILHRAHGSASWAQGETKVLAAVYGPKAGTKKNENPEKASIEVIWKPKTGQIGKMEKEYEMILKRTLESICIRTIYPNTTTSVIVQVVHDDGAVSYLKIQFXYDXSACAALVDAGIPLKHLAVAICCSVTDSGCIILDPTKDEEEKMKAFANLVFPNTIVSVLPERDHCKWGEPMENGIMTSVTQGAMSVNDYLHCLERGRAACASLSEFVRKNIGTKSTSEPSKAG

SEQ ID NO: 16920 - protein, 105 aa, Glycine max
  unsure (1)..(105): unsure at all Xaa locations
MGAKEVERVDGRTPNQLRPLACSRNLLNRAHGSAQWSQGNTIVLAAVYGPKAGTRKGENPEKASIEVIWKPKSGQIGKPEKEYEMILKRTLQSICLLTIHPNTTX

SEQ ID NO: 16921 - protein, 89 aa, Glycine max
  unsure (1)..(89): unsure at all Xaa locations
METDRPDGRTPNQLRPLVCSCSILHRSHGSASWAQGETKVLAAVYGPKAGTKKSENPEKASIEVIWKPKTGPIGKVEKEYEMIXLKRTX

SEQ ID NO: 16922 - protein, 280 aa, Oryza sativa (japonica cultivar-group)
MEESRADGRNPNQLRPFSCTRNPLDRAHGSARWAQGDTIVLAAVYGPKPGTRKGENPEKASIEVVWKPMTGQIGKQEKEYEMTLKRTLQSICLLTVHPNTTTSVILQVVGNDGSLLPCAINACCAALVFAGIPLKHLAVAIGCGVLEDGEVILDTNKAEEQQLKSFAHLVFPNSRKSASSKEPNQKEEDSERGLITSITHGVMSGRLFQLHREGPCCIVTDLGFYEDNIAEAGTWRCLRGGNHAIENASTLQKHKVVAAHVLNMKRVGTLGALLMFEIGS

SEQ ID NO: 16923 - protein, 238 aa, Oryza sativa
MEESRADGRNPNQLRPFSCTRNPLDRAHGSARWAQGDTIVLAAVYGPKPGTRKGENPEKASIEVVWKPMTGQIGKQEKEYEMTLKRTLQSICLLTVHPNTTTSVILQVVGNDGSLLPCAINACCAALVFAGIPLKHLAVAIGCGVLEDGEVILDTNKAEEQQLKSFAHLVFPNSRKSASSKEPNQKEEDSERGLITSITHGVMSEEDYFSCIERGLAASSRISDFMRTTLQKQAPGDV

SEQ ID NO: 16924 - protein, 233 aa, Oryza sativa
  unsure (1)..(233): unsure at all Xaa locations
MEESRADGRNPNQLRPFSCTRNPLDRAHGSARWAQGDTIVLAAVYGPKPGTRKGENPEKASIEVVWKPMTGQIGKQEKEYEMTLKRTLQSICLLTVHPNTTTSVILQVVGNDGSVXXFCRNVLLSIVSGFCDAVAIGCGVLEDGEVILDTNKAEEQQLKSFAHLVFPNSRKSASSKEPNQKEEDSERGLITSITHGVMSEEDYFSCIERGLAASSRISDFMRTTLQKQAPGDV

SEQ ID NO: 16925 - protein, 212 aa, Oryza sativa
MEESRADGRNPNQLRPFSCTRNPLDRAHGSARWAQGDTIVLAAVYGPKPGTRKGENPEKASIEVVWKPMTGQIGKQEKEYEMTLKRTLQSICLLTVHPNTTTSVILQVVGNDVAIGCGVLEDGEVILDTNKAEEQQLKSFAHLVFPNSRKSASSKEPNQKEEDSERGLITSITHGVMSEEDYFSCIERGLAASSRISDFMRTTLQKQAPGDV

SEQ ID NO: 16926 - protein, 73 aa, Oryza sativa
  unsure (1)..(73): unsure at all Xaa locations
ARGESRADGRXPNQLRPFFCTRNVSTAAHCSARWAQWDTIVLAAVYGPKPGTRKGENPEKASIEVVWKPMTGX

SEQ ID NO: 16927 - protein, 248 aa, Triticum aestivum
GRKRRRRRGEGGMERAGGRKANQLRAYSCTRNPLERAHGSARWAQGDTVVLAAVYGPRPGTRKGENPEKASVEVVWKPKTGQIGRQEKEYEMTLKRTLQSICLLTVHPNTTTSVILQVMGDDGSLLPCAINASCAALVFAGVPMKHLAVAIGCGVLADGAVILDTSKAEEQQLKSFAHLVFPNSSKSVDVKESQQKDGQPERGLITSITHGVMSEDDYFNCIERGLAASARISDFMRTTLQKHTPDYL

SEQ ID NO: 16928 - protein, 242 aa, Schizosaccharomyces pombe
MSHLEILSLEGLRNDGRRWDEMRNFQCRFGIEPSENGSAFIELGNTKVLCIVDGPSEPVIKSKARADRTFVNVEINIASFSTIDVKKRFKSDRRIQLQCLALQNTFEEIIQTELYPRSQISVYLHVLQDDGAVMASCINATTLALIDAGIPVKDFVCCSTAGIVESDMLLDLNSLEESALSWLTVAVLGNIKKVVYMQLETSMHLDYLESVMNMAIAGSEHIYNTMQSAVRQSAKPALASLS

SEQ ID NO: 16929 - protein, 242 aa, Schizosaccharomyces pombe
MSHFEILSLEGLRNDGRRWDEMRNFQCRIGIEPSENGSAFIELGNTKVLCIVDGPSEPVIKSKARADRTFVNVEINIASFSTIDVKKRFKSDRRIQLQCLALQNTFEEIIQTELYPRSQISVYLHVLQDDGAVMASCINATTLALIDAGIPVKDFVCCSTAGIVESDMLLDLNSLEESALSWLTVAVLGNIKKVVYMQLETSMHLDYLESVMNMAIAGSEHIYNTMQSAVRQSAKPALASLS

SEQ ID NO: 16930 - protein, 226 aa, Schizosaccharomyces pombe
MNRIGILSRSDGSSEWKQGSARVICGVNGPIDVKIRDERLNKATVEVLVQPVSGVAETLEKMISSRIVGILEDAIFLNTYPRTLIQVSIQIIEEDGTDTLAAVINGAVLALLDAGISLKYIPCAINCHWKNKITQDEPDVDGTINKLESIITICYSISSEPAKLIFLETAGPIPEEDFFRVLETAPLHAEEVSKKMKELLFETYNESDGHENEKNPKEDVEMDVVA

SEQ ID NO: 16931 - protein, 246 aa, Saccharomyces cerevisiae; identical to SEQ ID NO: 498

SEQ ID NO: 16932 - protein, 248 aa, Thermoplasma volcanium
MIKTETSKIKLINEDNLRLDGRSFNELRPIKIEAGVLNRADGSAYIEWGGNKIIVGVYGPKEAYPKHSQDIDHAVVKARYNMAAFSVDERKRPGPDRRTMEISKVISEALSSSIMIEQFPRAEIDVYIEVLQADAGTRIAGLTAATVALADAGIPMRDMVVGCTAGKVDGHIVLDLSKEEDNFGEADIPMAIMPKTGEIVLLQMDGDVTEDEFYEATSMIIEATKKISQIQRNALLNKYKIEGIEGGE

SEQ ID NO: 16933 - protein, 251 aa, Neurospora crassa
MATVTPEASLNALPRADGSARYSYAGYTVTASVNGPIEAQRRDEHAYEAHVDVIVRPSAGVGGTRERHLEFILQSSLSQIILVKNFPRSVIQIVLQVESTPENAYVNTKLVQASLNLPIIPALFQTAVLALLSAAVPMKATATSTVVAVVSDDGSKKIVADPSPQDIREATSLHVLAFTSHDELLLSESEGDFTVKEWDGVYENAQKICCQTASKQDGIDMVLDDDASSPDMRHFLRSTLETKVASDLHWK

SEQ ID NO: 16934 - protein, 273 aa, Neurospora crassa
MPLDTSAYSLALLRVDGRRWNELRRIHAQIRTQAAADGSSYLEMGHTKVMCVVNGPSEPGPRRGATSGGGGGGGQSKNAEVAVNIVIAGFSSVDRKRRGRGDKHILELQSTISQALAASLHTHLFPHSTINISLHVLSQDGSLLAALINAATLACVDAGIPMTDYVAACTAGSTSTYAANDEGADPLLDMNHQEEQELPGLTVATLGDSDRVAVLVCESRVQVSRLEGMLAVGVDGCKQVREILDRVVREKGIKMIQEGTVERGVGLNDMELD

SEQ ID NO: 16935 - protein, 249 aa, Pyrococcus horikoshii
MMEKPEGLKLIDENGRRIDGRKKYELRPIKMKVGVLKNANGSAYIEWGRNKIIAAVYGPRELHSKHLQRPDRAILRVRYNMAPFSVEERKKPGPDRRSIEISKVIKGALEPALILEMFPRTSIDVFIEVLQADAGTRVAGITAASLALADAGIPMRDLVAACAAGKIEGEIVLDLNKEEDNYGEADVPVAIMPLKNDITLLQMDGYLTKEEFIEAVRLAIKGAKAVYQKQREALKEKYLKIAQEVEESE

SEQ ID NO: 16936 - protein, 188 aa, Encephalitozoon cuniculi
MDGIKSMVSVISHCTGSSRFSYNNTTVFCVVHGPSDAISRQEDPDRAILDVRWRDMVLINGRVYDKYFSRVIEKILSKNIILELDACKVIQISFNVVGETRNTLFCAVNAALLALADGGIPLRSMFYASSSFMHEEEVVVFDKDENILSTHSFEGISETNIEKARDFLKYVKEAQAYTLRSKFPFCAD

SEQ ID NO: 16937 - protein, 233 aa, Drosophila melanogaster
MNLPAKMDVEKDKLRQMHCEFNPLSRCDGSVMYSQGATGLIGAVLGPIEVKTQNLSIDGSYLECNYRPKAGLPQVTDRIREAAIRDVLELALLSEAHPRSKMSVQIQELEDRGSIDACAVNCACLAMLIGGLPLKYSFAAVHAIINEQGEYVLDPDQSETLHQRASFTFAFDSVEGNLLLIQTKGSFKIAQFNDIECLCRAASAEIFQFYRNQVAKYHGRSEATAKKEDVNET

SEQ ID NO: 16938 - protein, 233 aa, Drosophila melanogaster
MNLPAKMDVEKDKLRQMHCEFNPLSRCDGSVMYSQGATGLIGAVLGPIEVKTQNLSIDGSYLECNYRPKAGLPQVTDRIREAAIRDVLELALLSEAHPRSKMSVQIQELEDRGSIDACAVNCACLAMLIGGLPLKYSFAAVHAIINEQGEYVLDPDQSETLHQRASFTFAFDSVEGNLLLIQTKGSFKIAQFNDIECLCLAASAEIFQFYRNQVAKYHGRSEATAKKEDVNET

SEQ ID NO: 16939 - protein, 235 aa, Homo sapiens [sequence omitted]

SEQ ID NO: 16940 - protein, 235 aa, Homo sapiens
MEEETHTDAKIRAENGTGSSPRGPGCSLRHFACEQNLLSRPDGSASFLQGDTSVLAGVYGPAEVKVSKEIFNKATLEVILRPKIGLPGVAEKSRERLIRNTCEAVVLGTLHPRTSITVVLQVVSDAGSLLACCLNAACMALVDAGVPMRALFCGVACALDSDGTLVLDPTSKQEKEARAVLTFALDSVERKLLMSSTKGLYSDTELQQCLAAAQAASQHVFRFYRESLQRRYSKS

SEQ ID NO: 16941 - protein, 268 aa, Homo sapiens
MAQPGACALVTQPVCGARCQAEVTTAAARGLGAMEEETHTDAKIRAENGTGSSPRGPGCSLRHFACEQNLLSRPDGSASFLQGDTSVLAGVYGPAEVKVSKEIFNKATLEVILRPKIGLPGVAEKSRERLIRNTCEAVVLGTLHPRTSITVVLQVVSDAGSLLACCLNAACMALVDAGVPMRALFCGVACALDSDGTLVLDPTSKQEKEARAVLTFALDSVERKLLMSSTKGLYSDTELQQCLAAAQAASQHVFRFYRESLQRRYSKS

SEQ ID NO: 16942 - protein, 240 aa, Ferroplasma acidarmanus
MEGNIKLMREDGLRLDGRSLNEMRPIKIQTGVVERADGSAFIEWGANKIIVAVYVREAYPKHAQNIDRAIVKARYNMSGYSVEERKRPGPDRRTMEISKVVSEALSSAIVLEKLPRAEIDVFIQVLEADAGTRIASLTASSVAVADAGVPMRDLVVGCTAGKADGKIVLDLSKDEDNFGQADIPMAILPRTGKVVLLQLDGDVTEEEFNEATSMMMDAMPRISELQRNALMSKYSIEDGE

SEQ ID NO: 16943 - protein, 950 aa, Streptomyces coelicolor A3(2)
MIVRLSVRAGTLESTMTEDLSPAERYAAARQRAVEQATALASFREMYDFGLDPFQIEACQALEAGKGVLVAAPTGSGKTIVGEFAVHLALQQGRKCFYTTPIKALSNQKYADLCRRYGTDKVGLLTGDNSVNSEAPVVVMTTEVLRNMLYAGSQTLLGLGHVVMDEVHYLSDRFRGAVWEEVIIHLPESVTLVSLSATVSNAEEFGDWLDTVRGDTQVIVSEHRPVPLFQHVLAGRRMYDLFEEAEGHKKAVNPDLTRMARLEASRPSYQDRRRGRAMKEADRERERRQRSRVWTPSRPEVIERLDSEGLLPAITFIFSRAGCEAAVQQCLYAGLRLNDEGARERVRALVEERTSSIPREDLHVLGYYEWLEGLERGIAAHHAGMLPTFKEVVEELFVRGLVKAVFATETLALGINMPARSVVLEKLVKWNGEQHADITPGEFTQLTGRAGRRGIDVEGHAVVLWQRAMNPEHLAGLAGTRTYPLRSSFKPSYNMAVNLVDQFGRHRSRELLETSFAQFQADKSVVGISRQVQRNEEGLEGYKASMTCHLGDFDEYARLRRELKDREQELARQGANQRRAEAAVALEKLKPGDVIHVPTGKYAGLALVLDPGLPAGRSNGHRGFDHHDGPRPLVLTAERQVKRLASIDFPVPVEALDRMRIPKSFNARSPQSRRDLASALRSKAGHITPERARKKRSQAADDREINRLRKAIRAHPCHGCDDREDHARWAERYHRLLRDTSQLERRIEGRTNTIARTFDRIVALLTELDYLRGDEVTEHGKRLARLYGELDLLASECLREGVWEGLSPAELAACVSALVFESRAADDATAPKVPSGRAKAALGETVRIWGRLDALEEDFRISQTEGVGQREPDLGFAWAAYMWASGKGLDEVLREVEMPAGDFVRWCKQVIDVLGQISAAAPGAGSTVPKNARKAVDELLRGVVAYSSVG

SEQ ID NO: 16944 - protein, 854 aa, Streptomyces coelicolor A3(2)
MRTADSPITTRDRQDGGVTLIDQLPRTADPDALYEAFEAWAQERGLTLYPHQEEALIEVVSGANVIVSTPTGSGKSMIAAGAHFAALARDEVTFYTAPIKALVSEKFFELCKIFGTENVGMLTGDASVNSDAPVICCTAEVLASIALRDGKHADIGQVVMDEFHFYAEPDRGWAWQIPLLELPQAQFVLMSATLGDVSFFEKDLARRTDRPTAVVRSATRPVPLSYEFRYTPLTETLTDLLAARQAPVYIVHFTQAQAVERAQALMSINMCTREEKQRIAELIGNFRFTTKFGRNLSRYVRHGIGVHHAGMLPKYRRLVEKLAQAGLLKVICGTDTLGVGVNVPIRTVLFTALTKYDGTRVRTLRAREFHQIAGRAGRAGFDTEGFVVAQAPEHVVENEKALAKAGDDPKKRRKVVRKKAPEGFVAWSESTFDKLIGSQPEPLTSRFRVTHTMLLSVIARPGDAFSAMRHLLEDNHEPRRQQLRHIRRAIAIYRSLLDGGIVEKLDQPDAEGRIVRLTVDLQQDFALNQPLSTFALAAFELLDPESPSYALDMVSVVESTLDDPRQILAAQQNKARGEAVAAMKADGVEYEERMERLQDITYPKPLEELLFHAYDTYRRSHPWVGDHPLSPKSVIRDMYERALTFTELVSHYELARTEGIVLRYLASAYKALDHTVPDDLKSEDLQDLIEWLGEMVRQVDSSLLDEWEQLANPAEMTAEEAQEKADQVRPVTANARAFRVLVRNAMFRRVELAALDQVGELGEMDADAGWDADAWGEAMDKYWDEYDDLGTGPNARGPKLLVIEEEPQNALWRVRQIFDDPNDDHDWGISAEVDLTASDAEGRAVVRVTDVGQL

SEQ ID NO: 16945 - protein, 1244 aa, Mus musculus
MMETERLVLPPLDPLNLPLRALEVGCTGRWELLNVPGPPESTLPHGLPPCAPDLCQEAEQLFLSSPAWLPLHGVEHSARKWQRKTDPWSLLAAVETPVPSDLQAQRHPTTGHILGYKEVLLENTNLSATTSLSLRRPPGPASQSLWGNPTQYPFWPGGMDEPSITDLHTREEAEEEIDFEKDLLTVPPGFKKGVDFAPKDHPAPVPGLLSLSRLLEPLDLSGGDEDEGEAAGGPRGDNASPSPSGTPLVRASSLEDLVLKEAATVVSTPEPPKPPPQEQWAVPVDVTSPVGDFYRLIPQPAFQWAFEPDVFQKQAILHLEQHDSVFVAAHTSAGKTVVAEYAIALAQKHMTRTIYTSPIKALSNQKFRDFRNTFGDVGLLTGDVQLHPEASCLIMTTEILRSMLYSGSDVIRDLEWVIFDEVHYINDAERGVVWEEVLIMLPEHVSIILLSATVPNALEFADWIGRLKRRQIYVISTVARPVPLEHYLFTGNSPKTQGELFLLLDSRGAFHTQGYYAAVEAKKERMSKHAQTFGAKQPTHQGGPAQDRGVYLSLLASLRTRAQLPVVVFTFSRGRCDEQASGLTSLDLTTSSEKSEIHLFLQRCLARLRGSDRQLPQVLHMSELLRRGLGVHHSGILPILKEIVEMLFSRGLVKVLFATETFAMGVNMPARTVVFDSMRKHDGSTFRDLLPGEYVQMAGRAGRRGLDPTGTVILLCKGRVPEMADLHRMMMGKPSQLQSQFRLTYTMILNLLRVDALRVEDMMKRSFSEFPSRKDSKAHEQALADLTKRLGALEEPDVTGQLADLPEYYSWAEELTETQNMIQRRIMESVNGLKSLSVGRVVVVKNEEHHNAMGVILQVSSNSTSRVFTTLVLCDKPVVSDNPRDKGPATPDVPHPDDLIGFKLFLPEGPCEHTVAKLQPGDVAAISTKVLRVNGEKISEDFSKRQQPKFRKDPPLAAVTTAVQELLRLAQSYPAGPPTLDPINDLQLKDVAVVEGGLRARKLEELIRGAQCVHSPRFPAQYVKLRERMQIQKEMERLRFLLSDQSLLLLPEYHQRVEVLRTLGYVDEAGTVKLAGRVACAMSSHELLLTELMFDNALSALRPEEIAALLSGLVCQSPGDPGDQLPSTLKQGVERVKAVAKRIGEVQVACGLNQTVEEFVGELNLGLVEVVYEWARGMPFSELAGLSGTPEGLVVRCIQRLAEMCRSLRGAARLVGEPVLGAKMETAATLLRRDIVFAASLYTQ

SEQ ID NO: 16946 - protein, 1236 aa, Mus musculus
MMETERLDPLNLPLRALEVGCTGRWELLNVPGPPESTLPHGLPPCAPDLCQEAEQLFLSSPAWLPLHGVEHSARKWQRKTDPWSLLAAVETPVPSDLQAQRHPTTGHILGYKEVLLENTNLSATTSLSLRRPPGPASQSLWGNPTQYPFWPGGMDEPSITDLHTREEAEEEIDFEKDLLTVPPGFKKGVDFAPKAPVPGLLSLSRLLEPLDLSGGDEDEGEAAGGPRGDNASPSPSGTPLVRASSLEDLVLKEAATVVSTPEPPKPPPQEQWAVPVDVTSPVGDFYRLIPQPAFQWAFEPDVFQKQAILHLEQHDSVFVAAHTSAGKTVVAEYAIALAQKHMTRTIYTSPIKALSNQKFRDFRNTFGDVGLLTGDVQLHPEASCLIMTTEILRSMLYSGSDVIRDLEWVIFDEVHYINDAERGVVWEEVLIMLPEHVSIILLSATVPNALEFADWIGRLKRRQIYVISTVARPVPLEHYLFTGNSPKTQGELFLLLDSRGAFHTQGYYAAVEAKKERMSKHAQTFGAKQPTHQGGPAQDRGVYLSLLASLRTRAQLPVVVFTFSRGRCDEQASGLTSLDLTTSSEKSEIHLFLQRCLARLRGSDRQLPQVLHMSELLRRGLGVHHSGILPILKEIVEMLFSRGLVKVLFATETFAMGVNMPARTVVFDSMRKHDGSTFRDLLPGEYVQMAGRAGRRGLDPTGTVILLCKGRVPEMADLHRMMMGKPSQLQSQFRLTYTMILNLLRVDALRVEDMMKRSFSEFPSRKDSKAHEQALADLTKRLGALEEPDVTGQLADLPEYYSWAEELTETQNMIQRRIMESVNGLKSLSVGRVVVVKNEEHHNALGVILQVSSNSTSRVFTTLVLCDKPVVSDNPRDKGPATPDVPHPDDLIGFKLFLPEGPCEHTVAKLQPGDVAAISTKVLRVNGEKISEDFSKRQQPKFRKDPPLAAVTTAVQELLRLAQSYPAGPPTLDPINDLQLKDVAVVEGGLRARKLEELIRGAQCVHSPRFPAQYVKLRERMQIQKEMERLRFLLSDQSLLLLPEYHQRVEVLRTLGYVDEAGTVKLAGRVACAMSSHELLLTELMFDNALSALRPEEIAALLSGLVCQSPGDPGDQLPSTLKQGVERVKAVAKRIGEVQVACGLNQTVEEFVGELNFGLVEVVYEWARGMPFSELAGLSGTPEGLVVRCIQRLAEMCRSLRGAARLVGEPVLGAKMETAATLLRRDIVFAASLYTQ

SEQ ID NO: 16947 - protein, 163 aa, Rattus norvegicus
MSSHELLLTELMFDNALSALRPEEIAALLSGLVCQSPGDPGDQLPSTLKQGVERVKAVAKRIGEVQVACGLNQTVEEFVGELNFGLVEVVYEWARGMPFSELAGLSGTPEGLVVRCIQRLAEMCRSLRGAARLVGEPVLGAKMETAATLLRRDIVFAASLYTQ

SEQ ID NO: 16948 - protein, 122 aa, Rattus norvegicus
MPKLTEQLAGPLRQMQECAKRIAKVSAEAKLEIDEETYLSSFKPHLMDVVYTWATGATFAHICKMTDVFEGSIIRCMRRLEELLRQMCQAAKAIGNTELENKFAEGITKIKRDIVFAASLYL

SEQ ID NO: 16949 - protein, 271 aa, Rattus norvegicus
MSHRADDGHTCDKDRQHCDYQAIGAAGKDRLLRDERDEKGQKSSRRLDQSIMYEAEHNYLLKSLEKNLEIPKDCTYADQKAIDEETLQIVFGRVKCGKKGDTLKKLARRGIGYHHRSMTAKEKQLVEILFRKGFIRVVTATGTLALGINMPCKSVVFAQNSVYLDALNYRQMSGRAGRRGQDLLGDVYFFDIPLPKIGKLIKSKVPELRGQFPLSITLILRLMLLATKADDLEDGKAKVLCPLLRPLSSLLAWLKSARLCFYLAFHAFSVL

SEQ ID NO: 16950 - protein, 1088 aa, Rattus norvegicus
MKSDDPIVTSLVKHKEFDELVHWHSHRPLSDDYDRTKATFDDKKDPYYLSRLQKYHRFQRLYGSSLESVTSKMITTEGPKPKKDCIKSKRTKAHKTKAEIIVRENKKRLIAEEEQKEGQKWSALSFSIEEEMRRNLNSGIKKLEEFLKSCKSSSVKTQAERVGLQACLKAWKEHCRAEGKTTKDFNIAVNMMKRIHSLLEKQSEFLQEADQKLIARCLTYLGFYELADSLCPTQDTADDVKMTKKKYSVGIGPARFQLQYMGHYLIREERKDPDPRVQDFIPDTWQKYSVGIGPARFQLQYMGHYLIREERKDPDPRVQDFIPDTWQRELLDVVDNYESAVIVAPTSSGKTYASYYCMEKVLKESNEGVVVYVAPTKALVNQVAATVQNRYTKNMPGGEALCGVFTRDYRHEALNSQVLITVPACFEILLLAPHRQNWVKRIRYVIFDEVHCLGGEIGAEIWEHLLVMIRCPFLALSATISNPQHLTEWLQSVKRYWKQVDSTMEQGSVSQRNAATRGSYHKDRVQARQSYKVRLVLYGERYNDLEKYLCSVRQGDVCFDHFHPCAALTTDHNLCPENFTQFKNKIVIKKLDARKYEESLKEEFTNWVKNGNEKEAQLVLKKLSPDYHDYSGQMLDFFPCLVEKLRKMEKLPALFFLFSLDTVEECAENVCEFLEEKQEEKRPPKADKEAYIMANKLRKVKKSLEKQKIDEKGQKSSRRLDQSIMYEAEHDYLLKSLEKNLEIPKDCTYADQKAIDEEALQMVFKRVKYERKGDTLKKLARRGIGYHHSSMTNKEKQLVEILFRKGFIRVVTATRTLSLGINMPCKSVVFAQNSVYLDALNYRQMSGRAGRRGQDLLGDVYFFDIPLPKIGKLIKSKVPDLRGQFPLSITLILRLMLLATKADDLEDGKAKGHIDQEGNPTGFAGLVTHLHYHEPSNLVFVSFLVKGLFHKLCQPTSKDSKCFSEDVMEKLVLVLANLFGRRYIPAKFHEAHPKFYQSKVFLDDLPQDFSDALLEYNMQVTRDFASFLLIVSRLADMKQEYQLPLSKIGKYILVLLVSLRELCENEEDNVVLAFEQLSKSFHEKFELV

SEQ ID NO: 16951 - protein, 893 aa, Nostoc sp. PCC 7120
MNYPAPSPELDLGLIFPFDLDQFQKDAIASLNAGRSVVVCAPTGSGKTLVGEYAIYRALTRGKRVFYTTPLKALSNQKLRDFREKFGFEQVGLLTGDASINRDAPILVMTTEIFRNMLYGTPIGQVGISLVDVEAVVLDECHYMNDRQRGTVWEESIIYCPRGVQLVALSATVANSDQLTDWLSRVHGPTDLIYSDFRPVPLEFHYCNPKGLFPLLNDSKTKINPRLANRGKKRQGDRGKNGRPEAPSLIYTLNHLQQRDMLPAIYFIFSRRGCDKAVAEVGDLWLVNNEESQILRRQIDDFLARNPEAGRSGQIAPLYRGVAAHHAGILPAWKVLVEELFQQGLIKVVFATETLAAGINMPARTTVISTLSKRTDTGHRLLNASEFLQMAGRAGRRGMDKQGHVVTVQTPFEGSKEAAYLATSKPDPLVSQFTPSYGMVLNLLQTHTIDEAKELIERSFGQYMATLHLRPDYEEIAALEGELAKLQEQINAVDENDILIYEKLRQRLKVERQLLKTLQEQAQEERQEQIKMLLDFAVLGTLLSLKGQNFKVSTPITAVLVGKTSGSTQSACLVCLGQDNRWYVAATADVVDLYAELPRVDVPPDILPPPELMLKPGQSSRGAKETMAIAQSIPDPQQSLHLSPEVAEQLSRTAAIQAQLEANPLHQSGNVSMVFKARARYVELEAELEEIQAQVEQQSQRYWEEFLNLITILQQFDCLDNLVPTALGQIAAAIRGENELWLGLALASGELNNLDPHHLAATIAALVTETPRPDSRVNFNLSPEIDDAWSRLQKTRRAVLKVQYRHGVALPVGLENRYIGLIALVEQWALGIEWVELCQNTTLDEGDVVRILRRSLDLLSQIPHVPNLPDVLQRNAYRAMQLIDRFPVNEVVE

SEQ ID NO: 16952 - protein, 725 aa, Paramecium bursaria Chlorella virus 1
MSFESTLKHPLDVFQKDAIKSMDNDHSVFVAAHTSSGKTIIAEYAYHISDGTNVIYTAPLKAISNQKYKDFSSKFGADNVGIITGDVVKNETAKLLIMTTEIFRIMVIKRDQRIQNVKWVIFDEVHYINDKSRGSVWEESIILMPDTMRAVFLSATVPNAVEFSNWFSKLKNHPVDVVSTKKRPIPLKYNVIHNSEIKDIETFDKILADSPEEITKDTIKMLYNSKLTPCIIFSCNKKKIDRLAQKLYKSVNIMTTYESKNIRRHFNDLLKKCQVPEDSVYHQKYLEYACEGIGVHHAGVVPYVKEIIEILYCKGIIPVLISTETVAVGVNGPAHSVLFESLFKFDGLNNRLLREHEFIQMAGRAGRRGFDEEGRVFVLHDPAVERGMISKLINGKPETLHSSLKMSANLVLNCIQRNMNIEDIVNDSFDSFCPFVPTEEDRSQVYNYNKRLNKWMDVLSRPDIWRHTKKGYTCTMDSGIAGTFTEISHNGRYKISGEDGNEYYSGVVEILDPERKPLDFKKMKIKDFVSACAITELKKIPFTPKHPDYDKVMEYEQLKETNDHLLREYNEYTQWLANENMMKDGLLTPIGEIGCSITSICPVLGTKLLDDTLKDTDIVMMIAAFFAELDNSSIGNEIGMPYKFYIPKFVNWDLIKAAGMWYEGKDIPEICEELGLFEGNLISVLIQVNNTLNELIAAKPDGTEKLENIQKQHFRGILKTSSLYI

SEQ ID NO: 16953 - protein, 1006 aa, Synechocystis sp. PCC 6803
MKTLAYANPADLFAFPLDDFQQEAIAALDQDQSVVVCAPTGSGKTVVGEYAIYRAIARGKRVFYTTPLKALSNQKIRDFQEKLEKLGLENAAQLVGLITGDTVINADAPVVVMTTEIFRNMLYETPIGEVGTSLEDVETVVFDEVHYISDRGRGTVWEESIIYCPSTIQLVGLSATIGNPEQLTEWINQVRTGVSLKVLRQGEQRNDSPPCVLVNSDFRPVPLTFHYSTRKGLFPLLNEKKTGVNTRLLPKAGNKNTRSGKNRRMRREDCPYPLLVMQQLQERNLLPVIYVIFSRRGCEQAAQSLEDLSLVEPAEQESIQLQLLDFFFGKNPLLRQKLERDLANGLPDLVQAVVAYLDHPQDSEAAQRLLTALAIDPEGMFKLWGWIAQSSPMTRFEQIEPLLRGIAVHHAGILPDMKTLVEKLFEQGLIKVVFATATLSAGINMPARTTVISALSKRTNEGHAMLSPSEFLQIAGRAGRRGMDTEGHVITVQTPFEGANEASYLALAEAEPLKSWFTPSYGMVLNLLQKHDLEEVKSLLERSFAEYLAQFALEPTKVAIAETVKKLSQLDIKLAGIGEKDLRSYEKFRGRLREEQRLLKILEEQAEKERKQQLKDQLKTLAPGQLLYLKGRHVKIHQPRLAVIVAPLAPAHNLPQWCCLGSDNRWYHVTVGDIYAVPIGNLSPAQWQHLTPPPAELLAPGKSVKGDEETLAIAAGLDPQTYPLEPSPELVEQQARVDHVEKLLAVHPLASQKHPGKLLEQFHQRQELRKTLSKRQQEYDRLQSRQSYYWQEFLDLIDILQEMEALEEYTPTLLGEVAATLRGENELWLGLALISGKFNDLEPEQLAAAASALITETPRSDAWTDFKPSPVVLAALRPSNDLFGLLFCLKHPQPPLALWQAMTVADHLQRLNLWDLRRKLIKAQNQRAIAIPLWLEVDFMGLVEQWALGMEWENLCRQTSLDEGDLVRLFRRTVDLLWQIPQVPHLSPRLKRNARIAVQQMKRFPL

SEQ ID NO: 16954 - protein, 601 aa, Sulfolobus islandicus filamentous virus
MVKMSIQLNEFQKKALQSFLMSDKNLLITAPTGTGKSFLAMLMAMETKSRVVYTVPLRALALQLNDDFHNKVAPLVNGYADSVALTSEVYEEDPENLEERVIFTTYEKADAIFRRHYPWTDRIETLIIDEIHNIGDKERGKAIENLIAYAMNEGIRIVAMSATIPDVNKIAEIIDAEIIKTDERPIPLYKAVKIGNKLYFEDGDVIELKEDFIKKMVRKNKVVMIFTSTRKKAEELYMIYDRKFQNKVAFFHAGLDAETKLRLLEETRQGKYNIIVSTTALSQGVNFPFYAVVFDDLKLPIIEYGRFTGWKQITPIEFDQICGRAGRPGYDEEGLCIIEATDIRQAEKLKRTYFNTSYGTITGHHVLEDFLLALISKYIYAKPDRIMEATKHTISFRNISEELVKEKLEELKNAKLIGEDGTGYFVTLYGRAVAESYFDVKDAITYHDVLTKNNVKEEEIINAILENENVLNASKGENVNIIFNSWIKGVDEKTIVKATKNMTLNDLNKLVQTLSWQTYGVYRITKALGKKELADKLRLLFLEIRYGVPASALALVQLPGIGRKRAIELMRNGIHNKTELCSQKEISKKIIGEKMVKVLCK

SEQ ID NO: 16955 - protein, 920 aa, Mycobacterium leprae
MTDLAELARFTAELPFSLDDFQQRACAALERGHGVLVCAPTGAGKTVVGEFAVHLALAAGGKCFYTTPLKALSNQKYTDLTARYGRNRIGLLTGDQSVNGDSPVVVMTTEVLRNMLYADSFALQGLSHVVMDEVHFIADRMRGPVWEEVILHLPDDVRMVSLSATVSNAEEFGGWVQTVRGDTTVVVDEHRPVPLWQHVLVGKRLFDLFDYDSNVDQSPVNPNLLRHIAHCREADRMSDWRNPRRRAGRGSGVRPRFYRSLARPEVIAILDAEGLLPAITFVFSRFGCDAAVQQCLRSPLRLTSEEERAQIAEVIDHRCGDLADADLAVLGYYEWREGLLRGLAAHHAGMLPAFRHAVEELFTAGLVKAVFATETLALGINMPARTVVLERLVKFNGKQHVPLTPGEYTQLTGRAGRRGIDVEGHAVVIWHPSEDTSGPSAVAGLASARTFPLRSSFVPSYNMTINLVHWMSPERAHALLEQSFAQYQADRSVVGLVRGIERCTQVLGDISSELGGPDAPILEYARLRARIAEMERAQSFVFRLQRKQAANDVLAALRRGDIITITHGRHGGLAVVLESARDSSNPRPLVLTEHRWAGRISSADYMGAAAPVGSMTLPKRVEHRQQRVRRDLASALRSAATRLSVPDIGDGVDGDKIGFNDGVLHDPELASLRAQLRRHRSNNAPGLDTQLQQAERYLRIERYNAQLQRKVAAATNSLARTFDRIVGLLIERDFIRGPADDPQVTDDGRLLARIYSESDLLVAECLRTGAWAGLRPAELAAVVSAVLYETRGDDGPGGPVDAEAPTPRLRQALQHTSRLSATLRADEQRHRIALSREPDDGFVGVIYCWARTGDLAAVLAAADASGNGAPLSAGDFVRWCRQVLDLLDQLRNAAPEPDLRATAKRAINDVRRGVVAVDAG

SEQ ID NO: 16956 - protein, 1173 aa, Anopheles gambiae str. PEST
PTWLKEPPPIVEDTEDLLRAFILEPKIPIHEPKPYFEPRHPSFDQLYDIPHAPISTRIVPDRCPETGKVLDFIETQVQNAGSTAKNSMSLQREPTESIDSARGSASYFPFWPGGFDEPESVLAGLVPSPLFETDLKSCPPGFATGVEFEAPPTGTDGARATEDSGKSGMVDLLSAIASEEAFVELLPEGLQTQLSTNDQSTQGTQQEPLPAGIDEEEGLLAVAGELGAGEQVLKISTVTNNALQSAEWAEMLDISKPVDDFYVKIPTMAHRFPFELDIFQKQAILKLEEHSHVFVAAHTSAGKTVVAEYAIALSKKHMTKTIYTSPIKALSNQKYRDFKTTFQDVGLITGDIQIDPTASCLIMTTEILRSMLYCGSDITRDLEYVIFDEVHYITDSDRGHVWEEVLILLPDHVCIVMLSATVPNTIEFANWVGKTKKKRVWVVSTAKRPVPLEHYLYTGFGGKSKDDSFLIVNAQSQFVQDGYRRAKESYEAKQAKSTGRRTNGPYSQRQEQTLWVGLIDHLQKKEKLPVVAFTLSRNRCDNNAEALMSCDLTTAREKYAITSFFQQCLQRLVPADRVLPQVQQIQSCLERGIGIHHSGILPILKEIVEMLFARGLVKILFATETFAMGVNMPARTNLPLDGELKTMILGKPVRLESQFRLTYAMMLYLLRVELVSVENMMLHSFREFDKRQQMPQSKLELNQVQEKMSALSKLSDHLQPLCEFYEAASEYLNLRNELLPKQLCQPKAINELKVGRVVVVTDEHHYNKLGILLSVSVQSHKELKLVVLVLDHCASGKTQPASPETLNRGPLWHQMLSLALPYQTFLPEGVGGHAVLTLAPVNLIELTKHTIKCDANGIIRSWEYRLIPRFRDAPPSQSTIEAVAALAELNATVVQAGSVTGTLELVRFPRDLTNLELTQQLQTAQGRLNRWLPYTGMADFEHEFAVVYDRKQLERKLDELKYQASYESLSLYPDYCRKLQVLQELKYIDDMQQVAMKGRVACEMGQNELMITELVMRNILTDLQPAEIAALLSSLVFQAKSDVTPKLTETLQKAEAQFREVENDIRLVERQYGVTDVCKKEELNFGLTEVVYEWARNKPFAEIMLLTDIKEGIIVRCIQQLNETLCNVKDAARIIGDPVLHSKMEEASNAIKRDIVFAASLYTSSTPIVIGEV

SEQ ID NO: 16957 - protein, 1361 aa, Giardia lamblia ATCC 50803
MIALLGRDENSSPEGGSREATNVDNIREQLQAVLMDQGLLEQTKKLPIVVDVSESATEDPLKKIHHSVVFPHGYEIPRDPANKIYTCEPPAELPVKFPYELDPFQRRAIGALHIGHSVLVAAHTSAGKTTVAEYIIATALAQNQRVVYTTPIKALSNQKYQDLKLAAYTKGSVGIMTGDTTLNRTAGVLVMTTEILRNMLHQGAELLREIGYVIFDEVHYMRNSERGLVWEDCIAMLSSNIQFCFLSATVPNASEFAGWVASLHSIPVHVVYTQYRPVPLMHFLCPVGGDGLYPICSSIDKNKIRHDQVIKAKANLPHDNAQAVARGEEEGTSGHSNKKQQQKAVRDTLHKVMKNLIARDCFPLIVFAFGKKKCETYAMDFISDYFNNGQRATSRPPLQRTYGEEPQALIPQDNQQATQAQPPVIQSLVTPEQTRVIDNIFDAALKCLPEEDRNLRPIVVLRGMLRRGIAVHHSGLLPWAKEIIEILFVEGLVKILYATETFAMGLNLPARAIIFSEFKKFDGLTSRLVTAGEYVQMAGRAGRRGIDKQGMSICMFSTADECDNIVKVIQGTTEPLNSAYRLSFNSVLKLMQIEDTSPEQVIKRSFLQFQQLFRLPRCIDKILALENANAVDKTQLGRLLLSILNVLHRAFGEYEQLAQFFGPDMLQSLANLASWDAQRLYGLLTEYVNLFALKTSYYVDWSRLLSQDSMKQLLVRGRIVHVHADGLDLGWVPVLKVTRLGSDSFVDCLVPCSLGSVPAKYTNASETHLIAFSDTVPSSLSSRGVDKELAHAALINKPYYQEYMSTLQKQDSPADAQDASADESQPPVKRRPLRKVGSKPVEKQKVSHADINDLIYANDSSESITPQNLYEYSFIDPLQPFVRENKASYQMLAPRDVLLSVLTAIDKCGASSKKKQMKGKLHEHLWSEIEATACVIVRVPVRAIRRASGKILKTIPESLSRYDDKSEAMFFYYQMIASLIPSDESHSFPSTLADLMEPHVNLSELAYADVTSEVNDLDCNIKLVEHAITCDNEYGILTRILSSPAHSAPTLHRVLNAVCSPAIYAKISTRMEDTNEQALKEEQLIVYQMVKEYIDNSPHDEDASGQLEVSGMIFSLMLNCMRRDAKKQIFKQYIQEADDLILSSELVKLKNFLRREHFIEEIPGATDSEAAYLLTDKGRVACHVSSANEVILVECLFEAQFTDLTPRVLAGVLASLLGEGTGASGSSKSNQLQMDPKLSQALTKLKQIVSMLLKDCATEDTTLELRCTTVDHIVDDTTAVIAFSWAAGQTFQEILDIDRSQFEGNIVRMFRRLINLVDQLIIAVEVIGDERLKARLTAVHDAIFRDIIKVNSLYVVAEDDV

SEQ ID NO: 16958 - protein, 837 aa, Methanothermobacter thermautotrophicus str. Delta H
MRDIMIVLNRRKRSVDFIPAGNPKKILNTRRKPAYWGRLKIRSTEAGPRISRFTVEKGERETLRKPSEALKILKKQAVILTGRDPEIEDLLSSYGISYRYARVCQHCLHEGYLTVVSSRSSTVHAGQIICSRCVDELIKRELKFAGMDGSTFRNFRRLIRRGVSLDKILEMMSPRFDPLENHELTRYDTVTSESERTPRVPLDKLAVPEKFKRMLKREGNTVLRPVQVLAVDAGLLEGEDLMVVSATASGKTLIAELAGIPRALGGEKFIYLTPLVALANQKYRDFRRRYSPLKLKTAIKVGMSRIRARDELRIPETDVSKADIVVGTYEGMDYILRAGRSGILGDVGVVVIDEIHTLEDEERGSRLKGMIKRIRRLFPDAQIIALSATVKNNLEVASEFGLRLVEYDRRPVPLERHLVFSRGEEDKKNLILRLAEREFSTESEKGFRGQTIVFTNSRRKTRLIADYLTRRGVRAAAYHAGLSYRERQRIERAFASQELAAIVTTAALAAGVDFPASQVVFETLLMGNRWLMPNEFAQMLGRAGRPSYHDRGVVYVLAEVGMEFDGESEEAMALKLLESGPDPVDVNYTEEDVLENILADITSGAIKSESEISPDPSWPLDPEGALDILESHGMIVRDGGLRATGYGVAVSKSFIGVTDAEYIRGHLKGASRRPLDIALELEPFEGAYLSGRLHRALSRAAGARFSMNLMADSTLDILSDGDNLVKLDSKLQEAVLNLQMDFLSCECRDRPFCGCIQRRLSEHIIAERISGRDPVEISRGLLSRYQIQAYPGDIFSWLDTTVRALESIGRIASAFKRRRYLKECSGIVRAIEKGRGA

SEQ ID NO: 16959 - protein, 690 aa, Methanothermobacter thermautotrophicus str. Delta H
MKSLPPEMRQILGDCYPHIRELNPAQRSAIEAGYLESEDNYIIAIPTASGKTLLGIIAALKTVMEGGRVIYTVPLLSIQNEKIKEFRKLEEHGIRVGKDPRTSDIAVMVFESFDSLTRFSWNILREVDLLIVDEFHMIGEYTRGPVIESAITRARTLNPSVRIVALSATLSNMDEIAGWLDARVVEHDYRPVPLHREVLDTEMFGVREKNDVVLKVLERSLEDGSQTLAFVSTRRFTESLASHLADKISGKIPDDMVESFREVAGKVLEVPKSRGSPPTSTCLKLAECLEAGIAFHHAGLFNRQREIIEDEFRDGNILMITATPSLMYGVNLPSRTVVIRDYTRWTSQGPRRIPVFDYEQMSGRAGRPQYDDAGYSYLIARSHDEAMDLEEYYIRGEVERTTSRIIENRDALYRQIIAQVASGLSGTTEELADFFRNTFYGYQMVEGPFSDSFGMDSIQYEVENATEYLMRNRILYPGPEGFSATEFGLLIAKSNYSVETAIKLHQFASEMDEMDIYRLIYEITRTPDMPLISFKGRKSRDPVRDKLMEHGLFLMDVGNEEATAAALIEWINERTEYEIENAFHVYAASTRRSAYEASKIVKFFGKICEIMGVYRHSSQLEILSARLYYGVKEDAIPLVVGVRGLGRVRARKIIKTFGEDLRHVREDELKRIDGIGPKMAGAIRRYCERF

SEQ ID NO: 16960 - protein, 151 aa, Magnetospirillum magnetotacticum
  unsure (1)..(151): unsure at all Xaa locations
GPCSXGDTTINGEAPVVVMTTEVLRNMLYAGSRTLDGLAYVVMDEVHYLADRFRGPVWEEVIIHLPDDVQLVSLSATVSNAEEFGDWLEMVRGDTTVVVSERRPVPLWQHVLVASANPAAGVAHVGAGRAPGAGDPLEGSEPPKQRGQGAQ

SEQ ID NO: 16961 - protein, 730 aa, Methanosarcina acetivorans C2A
MKIESLDLPDEVKRFYENSGIPELYPPQAEAVEKGLLEGKNLLAAIPTASGKTLLAELAMLKSVLAGGKALYIVPLRALASEKFRRFQDFSELGIRVGISTGDYDRRDEGLGINDIIVATSEKTDSLLRNETAWMQEISVVVVDEVHLIDSADRGPTLEVTLAKLRKMNPFCQILALSATVGNADELAAWLDAELVLSEWRPTDLMEGVFFDGTFFCKDKEKLIEQPTKDEAINLVLDTLREGGQCLVFESSRKNCMGFAKKATSAVKKTLSAEDKEKLAGIADEILENSETDTASVLASCVRAGTAFHHAGLTSPLRELVETGFREGYVKLISSTPTLAAGLNLPARRVIIRSYRRYSSDSGMQPIPVLEYKQMAGRAGRPRLDPYGEAVLLAKSYEELLFLFEKYIEAGAEDIWSKLGTENALRTHVLSTISNGFARTKEELMDFLEATFFAYQYSNFGLSVVVDECLNFLRQEGMLEQDSDALISTMFGKLVSRLYIDPLSAALIAKGLREAGTLTELTLLHLVCSTPDMRLMYMRSQDYQDINDFVMAHAEEFSKVPSPFNIVEYEWFLSEVKTSLLLMDWIHEKPENEICLKFGTGEGDIHTTADIAEWIMHVATQLARLLDLKGAKEAAELEKRIHYGAGPELMDLLDIRGIGRVRARKLYGAGFKSTADLAGATPEKVAALVGPKIAERIFRQIGRREAVSEISDSERLEKSSQDGQSTISDF

SEQ ID NO: 16962 - protein, 940 aa, Corynebacterium efficiens YS-314
MSFTPEPGTHLSEFVADLGFDLDDFQIQGCRAVEGDHGVLVCAPTGAGKTIVGEFAVSLALSRGTKCFYTTPIKALSNQKYHDLVAKHGADAVGLLTGDVSINHDAEIVVMTTEVLRNMIYGQSFALERLSHVVMDEIHFLADASRGAVWEEVILNLDESVKIIGLSATVSNSEEFGEWLTTVRGDTQVIVTDHRPVPLDQYMMVQRKVLPLFEPGTDGRLNKQLEATIDRLNSQASEPGRSEYRSGEGFRTRAKGGRDRGRDDGRQNRDTRRSGQVREQDRHRPLGRPEVLRILQGMNMLPAITFIFSRAGCDGALYQCLRSKLILTDQDEAQEIARIIDAGVVGIPEEDLQVLNFKQWRSALMRGFAAHHAGMLPAFRHIVEELFVKGLVRAVFATETLALGINMPARTVVLEKLVKFDGEGHVDLTPGQYTQLTGRAGRRGIDTLGNAVVQWSPAMDPRFVAGLASTRTYPLISTFQPGYNMSVNLLKTIGYEQSLRLLEKSFAQFQADGSVVGDVREIERAERKVEELRAQLDREITATNPAVSPDKTAVESFLEYMELRRELNEEEKTHRRDSMEQRHAEVTTVLSKLQVGEVIAMPGRKRPVLAVVMTPANQARDPRPWVTTESGWSGRIDAESFNNAPIVVGHMRLPRGAAQSPRRFARQVAELFRRGNFKRPNKMRDTARVRPNARINELRTLIRDHEAHHWPDREQLARTAERMLRKQRDLNKLTGTVDRARETLGRTFERILSLLSEMDYVDYADPDNPVITEEGERLAKIHNESDLLVAQCLKRGIWEGLDPAELAGVVSMCTFENRRETGGSPEAVTEAMAEAMNHTERIWSELVDDERRHRLPLTRQPEAGFAMAIHQWAAGAPLGYCMAAAAENGAELTPGDFVRWCRQVIDLLEQVAKTSYSDEMARTARQGIDAIRRGVVAIGS

SEQ ID NO: 16963 - protein, 875 aa, Corynebacterium efficiens YS-314
MVCTGCGGSFRRQACGVPRGDRRWLRWLTVNLSQMLPDLTDVPASLLDESIFDSFLAWTRERGISLYPAQEEASLGILTGDNVILATPTGSGKSMVAIAAHFIALARGQRSFYTAPIKALVSEKFFALCEVFGPENVGMMTGDATVNGRAPIICATAEIVANIALRDGAGAPIDQVVMDEFHYYSEPDRGWAWQVPLLELPRAQFLLMSATLGDTEWLEKDLTSRTGRTTTFVGNTERPVPLEFSYVYTPVHETIENLLKEKKAPVYVVHFTQRDAIERAQAMTSLTVVTKEEKDRIAEEIGDFRFTTTFGRTLSKLVRRGIGVHHAGMLPKYRRLVEKLSQTGLLKVICGTDTLGVGINVPIRTVLMTGLVKFDGSRERVLKSREFHQIAGRAGRAGYDTVGHVVIQAPEHEIENARLRQKAGSDPKKLKKLGLKATRPGEVTWTKSTYERLTTAEPEQLTSQFKVTNSMILNVVARPGDGYEHLRHLLRTNHDTRAKQNRDILTTLELFRGLVNAKIIDKVVDGPDETGRIYALTEDLQRDFALNQPLAPFALAALTLLDKESETYTLDVISVFESILDDPRQILIAQQKARRGEEIEALKAEGVDYSERMAIIEDVTWPKPLEEELEQAFDTFREGHPWAKEFELSPKSVVRDMIEHGMTFSDLVATYGVARSEGVALRYLTDAWRTLRQTLPKEHSTEELEDVIEWLGELVRQVDSSLVDEWAQMADPDAPISRETLERELAFGVEDPTALTANRRAFTIMIRNAMFRLVELFAYEKEEQLTEMTSYLDEQPDFPAAMDAYFDEYADLDTGPAARGPEYFSVEQTGRAWAVRQIIKDPEGDNSFAFVGVVDLDASDEAGEVRFSSLDIQHN

SEQ ID NO: 16964 - protein, 929 aa, Corynebacterium glutamicum ATCC 13032
MSFSAEKGTHLSEFIADLGFDLDEFQIKGCHAVEEDHGVLVCAPTGAGKTIVGEFAVSLALSRGTKCFYTTPIKALSNQKYHDLVAKHGSDAVGLLTGDVSINHDADIVVMTTEVLRNMIYAGSFALERLSHVVMDEIHFLADASRGAVWEEVILNLDDSVNIIGLSATVSNSEEFGEWLTTVRGDTRVIVTDHRPVPLDQYMMVQRKVMPLFEPGTDGRVNKELEATIDRLNSKQSEQGRAAYRSGEGFRARSKGDKQDSRTGKPREQDRHRPLGRPEVLSILKGINMLPAITFIFSRAGCDGALYQCLRSKLVLTDQAESEEIARIVDAGVVGIPEEDLQVLNFKQWRAALMRGFAAHHAGMLPAFRHIVEELFVKGLVRAVFATETLALGINMPARTVVLEKMVKFDGEGHVDLTPGQYTQLTGRAGRRGIDVLGNAVVQWSPALDPRWVAGLASTRTYPLISTFQPGYNMSVNLLKTIGYEPSLRLLEKSFAQFQADGSVVGDVREIERAEAKVAELRAQLNKEIAATNPAVREDQDAVEVFIDYMELRRELNEEEKLNRKQSIEDRNVETVRVLSKLQIGDVIAMPGRKRPVLAVVMTPANQSRDPRPWVTTESGWSGRVDAESFTNPPITIGHMRLPRQAIEEPRRNARRVQELFRREHFKRPNKMREFARVRPNEAVTKLRNAIRDHEAHHWPDREHLARTAERMIRKERDLAKLTGNVDKARETLGRTFERILSLLSEMDYVDYSNPDNPVITDEGERLAKIHSEADLLVAQCLKRGIWDNLDPAELAGVVSMCTFENRRETGGEAQAVTEAMADSMNSVERIWGELVEDERRHRLPITRQPEAGFATAIHQWASGAPLGYCMAAAAENGAELTPGDFVRWCRQVIDLLEQVAKTAYFDETTRNARQAIDAIRRGVVAIGS

SEQ ID NO: 16965 - protein, 889 aa, Thermosynechococcus elongatus BP-1
MSERSPALADFLAQLPFELDAFQAAAIAALDAGRSVVVCAPTGSGKTLIGEYAIHRALTRQQRVFYTTPLKALSNQKWRDFQQQFGAAQVGLLTGDISINRDAPILVMTTEIFRNMLYGTPIGEVGTSLAGVEVVVLDECHYMNDRQRGTVWEESIIYCPKEIQLVALSATIANGEQLTDWIQSVHGDAELIYSDWRPIPLHFYFCNGKGLFPLLDGQRKRLNPKLHGQPELRRRGSKRDFLSIRYVVSQLQQRDMLPAIYFIFSRRGCDQAVQEVLGMNLLTKAEQQALAERVEAFLAQHQDIVAPEMIAPLYQGIAAHHAGVLPVVKTLVETLFQEGLIKLVFATETLAAGINMPARTTVISTLSKRTDSGHRLLTASEFLQMAGRAGRRGMDTVGHVVTLQTPFEGAHEAAFLATAAPDPLMSQFTPSYGMVLNLLQRHTLEEARELVERSFGQYLATLQLTPQRQAIAQLEMELQTVQQRLAGIDRQQLAQYQKLRERLRQDQRLLKILEQQAEQERTQALLPLMMAVPPGTWLHIKSPLREHPPLAAVLCQPVAGSGQLPHWLCLAADGRLRVVGIDDILGVYPDRPPCDPLPPLPEAMKLRRGESYPCHGADHYLGCLPNLPPVLAAPEVAAQAAKIADLEAKLSQLQGSLPQNVHSLLRLVRREERLQTELRDRQQKLHQQSQRHWEQFLALIAALQDFGGLNDLTPTPLGEMAAALRGENELWLALALASGELNDLPPHLLAAAVAALVTETPRSDSWCNYPIPSEVEERLAALSPIRRRLFQVQRRYQIIFPLWYEWDLIGLVEQWALGTPWHELCAQTNLDAGDIVRLLRRTLDFLSQIPHAPHTSPQLRQSAQQARYLLDRFPVNDLLEGVELEVATL

SEQ ID NO: 16966 - protein, 947 aa, Thermobifida fusca
MSTYAARYAEFRRRQKESSPTIEEFQNLYGFDFDDFQIRACKALETGHGVLVAAPTGSGKTVVGEFAVHLALRDGRKCFYTTPIKALSNQKYTDLVRRYGSDKVGLLTGDNSINGEAPVVVMTTEVLRNMLYAGSATLSGLAYVVMDEVHYLADRFRGAVWEEVIIHLPESVQIAALSATVSNAEEFGQWLQQVRGDTSVIVDEKRPVPLWQHMMVGTRIHDLFVEPEGTDTGQEEEKNGRGSRKRRRSRHARQRTVEIEVGGERLHVNPKLIRFAEEDARLTQLAYQRRHPQARARGGAPRPRSRFAPPTRAQIVEQLDREGLLPAITFIFSRAGCDEAVRQCVASGLVLTTPEEAAEIREYAERQCAEIPPADLNVLGYSEWLQALECGIAAHHAGMLPTFKEVVEVLFSRGLIRAVFATETLALGINMPARTVVIEKLDKWNGETHVALTPGEYTQLTGRAGRRGIDVEGHAVVVWQPGTDPEMVAGLAGTRTYPLNSSFQPSYNMAVNLVAQVGRERGRAMLESSFAQFQADRSVVGLVRKLRAQQEALEGYAKAAYDPRGDFMEYAAMRRRLSDLESAAQRNRRTARRKEAERSLRALRTGDIIRIPSGRHAGYAVVLDPGLDKGPLPVPLVLTVNRQVKRVSANDFPIPVEPTGRLRIPKSFSARSAQARRDLASALRSKLETLPTAPIRHRVRDGAPEDPEIAELRARIREHPCHHSEGREDRARWAERYFRLKKETEELERRIESRSHVIARTFDRVCGVLQELDYLEGDTVTEDGRLLSRIYSELDLLAAESLRRGVWDALGPEELAACVSALVYESRRPDEVFARVPSGPVEEALNAMMRLWGELSDIEHRHRVSFLREPDLGFVWPTYRWARGDQLDHILNEAGMPAGDFVRSTKQLIDLLGQIAQAVPEASGVRTTARQAADKLMRGVVAYTSVG

SEQ ID NO: 16967 - protein, 963 aa, Thermobifida fusca
MTDRPGCPRFYQGVPCAAGRKKPTCRPGRVRRSAQAPVLDGPSPPVRRVSPRSPLRGTAPALAPRRTHPDSPDSPGTTLLPACPFPWMAHPLVAPAKALGGIPASFPDSPADTERSGAESRQYGSVSLIDHLPDGTADPDTLFDAFASWAEERGLTLYPHQEEALIEVVSGSNVILNTPTGSGKSLVATGAIFAALARDECSFYTAPIKALVSEKFFDLCEIFGTENVGMMTGDASVNSDAPIVCCTAEVLANIALRDGADADIGTVIMDEFHFYADPDRGWAWQVPLLELPQAQFLLMSATLGDVSRFEEDLTRRTGRDTTVVASAERPVPLYYSYRTTPLHETLEELLESQQAPVYIVHFTQAAAVERAQSLTSINMCSKAEKAAIAKEIGNFRFTTRFGRNLSRYVRHGIGVHHAGMLPKYRRLVERLAQRGLLKVICGTDTLGVGVNVPIRTVLFTALSKYDGSRVRRLTAREFHQIAGRAGRAGFDTVGNVVVQAPEHVVENERALAKAGNDPKKRRKVVRKKPPEGFVGWDEAVFEKLINAQPEPLVSQFKVSHAMLLSVIARPGDCFAAMRRLLTDNHDDPKKQRRHIREAIAIYRSLLDAGIVERLEEPDEEGRTARLTVDLQPDFALNQPLSPFALAAFELLDRDSPHYALDVVSVVESTLDDPRQILAAQLNKARSEELQRLKAEGLDYEERMARLEEVTYPKPLEDLLEHAYETYRRGHPWVGDHPLQVKSVVRDMYERAMTFTDYIGYYELARSEGLVLRYLASAYKALTQTVPEDIKTEELRDLIEWLGEMVRQVDSSLLDEWEQLTNPSQEQDTDAPVETKPKPVTANQRAFRVLVRNEMFRRVELAALRRYAELGELDGEDGWDAEAWEEAMEAYYAEHETLGTGPDARGPHLLLITEHEDHWEVRQIFDDPEGHHDWGITAHVDLTASDEEGRAVVHVVAVDRKDSF

SEQ ID NO: 16968 - protein, 905 aa, Trichodesmium erythraeum IMS101
MSYSTQNSQELALKTLFPFQLDEFQKQAIAALNAGKSVVVCAPTGSGKTLIGEYAIYRALSRGQRVFYTTPLKALSNQKLRDFRKLFGPEKVGLVTGDTSVNREASVLVMTTEIFRNMLYGTHIGEVGASLEKVEAVVLDECHYMNDRQRGTVWEESIIYCPPEIQLLALSATVANSDQLTDWILRVHGPTELIYSDFRPVPLKFNFSNSKGLFSLLNSNQKRINPQLKPKSRQPKTDKKDKKEEPALSTVLSQLQERDMLPAIYFIFSRRGCARAVAEIAQLSNLTLVNPEEAAKLQKLVQKFLQRNPDLGKSQQLEPLTRGIAAHHAGMLPVWKGLVEELFQQGLIKVVFATETLAAGINMPARTTVISSLSKRTDDGHRLLKPSEFLQMAGRAGRRGMDIQGYVVTVQTRFEGVKEAAYLATSGADPLVSQFTPSYGMVLNLLQTHTLQEAKDLVERSFGQYLSTLSLLPERKEIELKEKELKALENKLGIYEDNDWINLEQLLASYEKLRGKVKEEKRLLRILQRQAEETRIREMSLSLSFAILGTVLSLKGKHVPTAKKSTAEPIPAVLVAKVPGSGQSSYSLCLGKDNRWYIVGAMDVMTLQADFPRLAAVDYMEVPEEMGSRLGQCRKGDEISLVLAQQIPAVPLPVDPPEVLAQMQKLAICEAEAEAHPLKEWGNPRTLIKGWRRVEMLRAEIEDRQRELEDKLARHWQEFLHLIEILQYFGCLHGVEPTEVGQACAAIRGDNELWLGLVLMSGSFDELDPHHLATACAGLVTEITRPDSWTRYELSVEVKEAMASLRNLRHQLFQVQHRHQVALPVWLERDLIALVEQWALGVEWEELVNNASLDEGDVVRMLRRTLDFLSQIPHVPCLSDALRRNAHRAMQLIDRFPVNEVVEPE

SEQ ID NO: 16969 - protein, 863 aa, Bifidobacterium longum DJO10A
MARHQHHKGNADSQTLSPSQRYASFQKVQRHRASAAARFAESLPFELDDFQTEANDALEAGSNVLVAAPTGAGKTVVADFAIYLAQERNVKAFYTTPIKALSNQKYHDLVDVYGPDKVGLLTGDTSINSEADIVVMTTEVLRNMLYERSTTLNALRYVILDEVHYLADRFRGPVWEEVIIHLPKTVKIVGLSATVSNVEDFSNWIASVRGDTKLVISEHRPVPLEQHVIVQADEHTEPEVLDLYRRDGNGEQTTKLNAELINRLDQLDRKAARRRGEERPDKRKGFGRGRGGKGAKGHAPKAERHTPRRWAVVDELNFLGMLPGIYFIFSRNGCDQAVEQCINAGLELTTDEEVTKIRRIVDEMVEGQLTQEDLKALQFSKFRFALEEGFASHHAGMIALFRQIVERLFEEGLVKMVFATETLALGINMPARCVVVEKLEKFDGTGHVGLTPGEFTQLTGRAGRRGIDTIGHAIVVDHHGFVPATAAALSSKRVYPLHSSFRPTFNMAVNLLNSSDYETAHVTLDQSFAQWEANESAWQLESQINTLKNALAGYEQAFACEHGDFKQFMTLRMELSDIEKEGRRKLKHEVFLTDQERSRAFQNLDQRIRDLRKAEHEHPCRNCPDLQQHLKWGHRWARETRELQRVTDRYDSRTGSVARQFDRICDILTGLGYLERHVNAAGHIDMTLTEKGSLLRRIYSEHDLELCEALLAGTFDKLDANGLAAVLSSLVYEARRGGDGEPRHYPGGISGSIAIASSKLKGICEDIDILCEDHGLDEMQRPDFGILDIMYEWADGGSLGSCLYGTDMTGGDFVRTAKRLADVLQQIAVAQPLPFDGGERLAGLAHEAADRVNRGVVAYSGVD

SEQ ID NO: 16970 - protein, 884 aa, Bifidobacterium longum DJO10A
MAPPAGGRRRIATEGGSCRRNRPLGRLSIMTGEKEYGSLGRLAPEWDGNERERNLMADDIYERFFGWVEDVKGIEPWPHQEEAIMDLLAGDHVILNTPTGSGKSLVALGMHFAALCTGRRSYYTAPIKALVSEKFFDLVEVFGRDNVGMITGDSHINADAPIICCTAEILANQALREGTHADVGLVAMDEFHYYGDPERGWAWQVPLLTLPQTQFLLMSATLGNVDAIADKLSDLNDTPDVDVIADAPRPVPLSYEYTLDPMEKTVELAFRNGETPIYVVHFSQDAALETAQALASTGVSSKEQRQAIAEAIKGVKFTTAFGKILQRLLRTGVGIHHAGMLPRYRRLVEQLAQQGLLPVICGTDTLGVGINVPIHSVVLTALTKFDGTKMRRLRAREFHQIAGRAGRMGFDTEGLVIAEAPEYEIENQKAIAKAGGDPKKLKKVKRKKAPEGFVTWNQSTFDKLIDAEPETLVPHLKITHSMVLNEVAQGGDARARIDDLIDDSAQTPDQKEHLHQRADEIFQTLFDTEVIETEGRKDGGKDYYMTLDMPDDFALDQPLSPFLLAALELLDPESDTYALDVISMAEATLEDPKQVLRAQERQARDKAMADMKADGLDYDERMDKLQEITYPKPLEDMFEAAFDQYRHDVPWANDYWLSPKSVVRDMVETASDFTGYITRYNIARSEGTLLRYLSDAYRTLARTVPPEKRDEQLEDIISWLRVLVRSIDSSLVDEWENAGDSADQSEAAASLAAPGAKSAVVEDRRGLTVLVRNALFRRVRLMDLDQPDKLGALDKDWGYGVHEWEDVLDDYYDEHEYVGIGAEARSPELFMLDDKHENDEHTWKVRQIIDDSDGDHDWAIEGIVDLDATQDTGEVVFHDYKVSN

SEQ ID NO: 16971 - protein, 863 aa, Bifidobacterium longum NCC2705
MARHQHHKGNADSQTLSPSQRYASFQKVQRHRASAAARFAESLPFELDDFQTEANDALEAGSNVLVAAPTGAGKTVVADFAIYLAQERNVKAFYTTPIKALSNQKYHDLVDVYGPDKVGLLTGDTSINSEADIVVMTTEVLRNMLYERSTTLNALRYVILDEVHYLADRFRGPVWEEVIIHLPKTVKIVGLSATVSNVEDFSNWIASVRGDTKLVISEHRPVPLEQHVIVQADEHTEPEVLDLYRRDGNGEQATKLNAELINRLDQLDRKAARRRGEERPDKRKGFGRDRGGKGAKGHAPKAERHTPRRWAVVDELNFLGMLPGIYFIFSRNGCDQAVEQCINAGLELTTDEEVTKIRRIVDEMVEGQLTQEDLKALQFSKFRFALEEGFASHHAGMIALFRQIVERLFEEGLVKMVFATETLALGINMPARCVVVEKLEKFDGTGHVGLTPGEFTQLTGRAGRRGIDTIGHAIVVDHHGFVPATAAALSSKRVYPLHSSFRPTFNMAVNLLNSSDYETARVTLDQSFAQWEANESAWQLESQINTLKNALAGYEQAFACEHGDFKQFMTLRMELSDIEKEGRRKLKHEVFLTDQERSRAFQNLDQRIRDLRKAEHEHPCRNCPDLQQHLKWGHRWARETRELQRVTDRYDSRTGSVARQFDCICDILTGLGYLERHVNAAGHIDMTLTEKGLLLRRIYSEHDLELCEALLAGTFDKLDANGLAAVLSSLVYEARRGGDSEPRHYPGGISGPIAIASSKLKGICEDIDILCEDHGLDEMQRPDFGILDVMYEWADGGSLGSCLYGTDMTGGDFVRTAKRLADVLQQIAVAQPLPFDGGERLAGLAHEAADRVNRGVVAYSGVD

SEQ ID NO: 16972 - protein, 855 aa, Bifidobacterium longum NCC2705
MTDEKEYGSLGRLAPEWDGDGRERNLTADDIYERFFGWVEDVKGIEPWPHQEEAIMDLLAGDHVILNTPTGSGKSLVALGMHFAALCTGRRSYYTAPIKALVSEKFFDLVEVFGRDNVGMITGDSHINADAPIICCTAEILANQALREGTHADVGLVAMDEFHYYGDPERGWAWQVPLLTLPQTQFLLMSATLGNVDAIADKLSDLNDTPDVDVIADAPRPVPLSYEYTLDPMEKTVELAFRNGETPIYVVHFSQDAALETAQALASTGVSSKEQRQAIAEAIKGVKFTTAFGKILQRLLRTGVGIHHAGMLPRYRRLVEQLAQQGLLPVICGTDTLGVGINVPIHSVVLTALTKFDGTKMRRLRAREFHQIAGRAGRMGFDTEGLVIAEAPEYEIENQKAIAKAGGDPKKLKKVKRKKAPEGFVTWNQSTFDKLIDAEPETLVPHLKITHSMVLNEVAQGGDARARIDDLIDDSAQTPDQKEHLHQRADEIFQTLFDTEVIETEDRKDGGKDYYMTLDMPDDFALDQPLSPFLLAALELLDPESDTYALDVISMAEATLEDPKQVLRAQERQARDKAMADMKADGLDYDERMDKLQEITYPKPLEDMLESAFDQYRHDVPWANDYWLSPKSVVRDMVETASDFTGYITRYNIARSEGTLLRYLSDAYRTLARTVPPEKRDEQLEDIISWLRVLVRSIDSSLVDEWENAGDSADQSEAAASLAAPGAKSAVVEDRRGLTVLVRNALFRRVRLMDLDQPDKLGALDKDWGYGVHEWEDVLDDYYDEHEYVGIGAEARSPELFMLDDKHENDEHTWKVRQIIDDSDGDHDWAIEGIVDLDATQDTGEVVFHDYKVSN

SEQ ID NO: 16973 - protein, 937 aa, Streptomyces avermitilis MA-4680
MTEDLSPAERYAAARQRAAEQATALAPFREMYDFGLDPFQIEACQALEAGKGVLVAAPTGSGKTIVGEFAVHLALQQGKKCFYTTPIKALSNQKYADLARRYGADKVGLLTGDNSVNSDAPVVVMTTEVLRNMLYAGSQTLLGLGYVVMDEVHYLSDRFRGAVWEEVIIHLPESVTLVSLSATVSNAEEFGDWLDTVRGDTQVIVSEHRPVPLFQHVLAGRRMYDLFEEGEGHKKAVNPDLTRLARMEASRPSYQDRKRGRAMREADRERERRQRSRVWTPGRPEVIERLDAEGLLPAITFIFSRAACEAAVQQCLYAGLRLNDEAARDKVRALVEERTASIPTEDLHVLGYYEWLEGLERGIAAHHAGMLPTFKEVVEELFVRGLVKAVFATETLALGINMPARSVVLEKLVKWNGEQHADITPGEYTQLTGRAGRRGIDVEGHAVVLWQRGFSPEHLAGLAGTRTYPLRSSFKPSYNMAVNLVDQFGRHRSRELLETSFAQFQADKSVVGISRQVQRNEEGLEGYKESMTCHLGDFEEYARLRRELKDRETELAKQGAAQRRAEAAVALEKLKPGDVIHVPTGKYAGLALVLDPGLPAGRSNGHRGFEQHDGPRPLVLTAERQVKRLASMDFPVPVEALERMRIPKSFNPRSPQSRRDLASALRTKAGHIVPDRHRKGRSAAADDREIARLRAELRAHPCHGCNDREDHARWAERYYRLMRDTSQLERRIEGRTNTIARTFDRIVALLTELDYLRGDEVTAHGKRLARLYGELDLLASECLRAGVWEGLDPAELAACVSALVYESRVGDDAMAPKLPSGKAKAALGEMVRIWGRLDALEEDFRITQTEGVGQREPDLGFAWAAYMWASGKGLDEVLREAEMPAGDFVRWCKQVIDVLGQISAAAPVRGEGSTVAKNARKAVDELLRGVVAYSSVG

SEQ ID NO: 16974 - protein, 886 aa, Streptomyces avermitilis MA-4680
MALSRPILLLPLPSCPCALTLCRRHSVAFAIFVRASDSPLGCDDRQDGGVTLIDQLPQTADPDALYEAFESWAGERGLTLYPHQEEALIEVVSGANVIVSTPTGSGKSMIAAGAHFAALARDEVTFYTAPIKALVSEKFFELCKLFGTENVGMLTGDASVNADAPVICCTAEVLASIALRDGRQADVGQVVMDEFHFYAEADRGWAWQIPILELPQAQFILMSATHGDVSMFEKDLTRRTGRPTAVVRSATRPVPLSYEYVVTPLTETITELLATKQAPVYIVHFTQAQAVERAQALMSINMCTREEKDKIAELIGNFRFTTKFGRNLSRYVRHGIGVHHAGMLPKYRRLVEKLAQAGLLKVICGTDTLGVGVNVPIRTVLFTALTKYDGTRVRTLRAREFHQIAGRAGRAGFDTAGFVVAQAPEHVVENEKALAKAGDDPKKRRKVVRKKAPEGFVGWTENTFEKLISSDPEPLTSRFRVTHTMLLAVIARPGNAFDAMRHLLEDNHEPRKQQLRHIRRAIAIYRSLLDGGIVEKLDEPDASGRIVRLTVDLQQDFALNQPLSTFALAAFELLDPESPSYALDMVSVVESTLDDPRQILAAQQNKARGEAVAAMKADGVEYEERMERLQDVSYPKPLEELLFHAYDTYRKSHPWVGDHPLSPKSVIRDMYERAMSFTEFVSFYELARTEGIVLRYLASAFKALDHTVPDDLKSEDLEDLIAWLGEMVRQVDSSLLDEWEQLANPEEMTAEEAQEKADQVKPVTANARAFRVLVRNAMFRRVELAALDHVEELGEMDSDSGWDADAWGEAMDKYWDEYEELGTGPDARGPRLLMIEEEPQNGLWRVRQTFADPNGDHDWGISAEVDLAASDAEGRAVVKVTAVGQL

SEQ ID NO: 16975 - protein, 612 aa, Streptomyces avermitilis
MTEDLSPAERYGSSSARCRAGHRARPLPRDVRLRPRPLPDRGLSGTRGGQGGAGGRATGSGKTIVGEFAVHLALQQGKKCFYTTPIKALSNQKYADLARRYGADKVGLLTGDNSVNSDAPVVVMTTEVLRNMLYAGSQTLLGLGYVVMDEVHYLSDRFRGAVWEEVIIHLPESVTLVSLSATVSNAEEFGDWLDTVRGDTQVIVSEHRPVPLFQHVLAGRRMYDLFEEGEGHKKAVNPTSRGWPAWRPAAVVPGPQTRPRHARPTASVTRAAVAGVDAGPARGDRAAGRRRAAARHHVHLQPRRLRGRRPAVPVRGPQAERRGRARQGARLVEERTASIPTEDLHVLGYYEWLEGLERGIAAHHAGMLPTFKEVVEELFVRGLVKAVFATETLALGINMPARSVVLEKLVKWNGEQHADITPGEYTQLTGRAGRRGIGCRGPRGRVVAARFSPEHLAGLAGTRTYLRSSFKPSYNMAVNLVDQFGRHLTRAARDVLRAVPGDKSVVGISRQVQRNEEGLEGYKESMTCHLGDFEEYAAPRTQGPRDRAGQAGRGAAAGQAAVALEKLKPGDVIHVPTASTPDWRSCSTRACPRAAPTAIVASSSTTRRGRWC

SEQ ID NO: 16976 - protein, 1373 aa, Plasmodium falciparum 3D7
MAYNIYSNLSDFWTSDDDEGDEGSNEEEEEKSVSNDKEENNNLKNETYGYDIEDSFNEYNIYKREDMNMMYNDDNSFNKTIDERLHFNINDIMNECSNEISENFTINNLLEKYDINNFIYNDNLLKYCETGVAINDEKPNNEKLILNEDFEFNVKCSFNYVNPPSYGLKINRDVKNEVPQENIKNNNLEMKQVIYNKEEMLVEKKVLDDNENVDMEKIDHPNGKNIDNNKKYDDDDNNNKKYDDDNNNNNNDNNLNEAQILNNNIENTKIKYIRKKWVIEDNESDISNFNKNDLLLNYDFELDDFQKRSIKHLNNFKHVFVAAHTSAGKTLIAEHAIALSIKLQKKAIYTSPIKALSNQKYYEFKNIFKDVGIITGDVKMNVNANCIIMTTEILRNLLYLNDNIINNIHCVIFDEVHYVNDEDRGVIWEESIIMLPHHVQILLLSATVPNYLEFADWVGFTKQKEVISISTKKRPVPLLHYIYVYDSVYLVMDEKNKFYSSAFKEIYVKIREKQEANNKNTKQITSGSNNTSSNLKKNNNYYDSKNKYLTTTNNKENDNTQNNINNNNNNNNNVIGYYEYCKQKRKQKLFANEASMKTEIQKLQTLIKKLDQDNKLPVVLFCFSRIKCETYAKCMPHLNFLDTNKKSKVHLFIKESISKLPKQDRELNQIQSLSKLLEKGIGVHHSGLLPILKEIVEILFSKGLIKVLFATETFAMGINMPTKSVVFTSIYKHDHLRKRILTSSEYTQMSGRAGRRSSDKYGYVYICCCDNIPDQVQLTEMMMQKAVSLKSKFKVTYNMILKLLINKQINIEKMLFSSFLESCRALQIPLFKKDLKRKRKLLQNIKEVQCIYEQENKNAYPPIEQYVQINYRLKYIGLNLHKKLLNTKSSNCFVIGRVMLLNNIHILHSSVYAIYLGCDKSNNKKKNDKVDFAQNSIFFQNNYEDDRSNERFFFLFILPDFMAFEDLPDYIINEADQNMLTSKKKKTTSNNNNNDNNNNNNKSNNNILSNSVSENINLYENYKNVFSKKNNKSDIKIIYHSSFDTDMNKKHFVVCSNVCIENISIITNTVIKLPNVNNAGILNNPKNLLLYTFELDRLIEKNNFEPFVLTKMLKSLKCEFYSVLVNQADYLENLKKSKCYNCNLKEKHYQLICKKNDCLDDIENIERNINAKSLNLYEDLEGKLNVLKHFGFIDDQNNLTVKGKIASYITLTDEITLTQVIFENVLNKLNPAEIAAVLSCFVAPEKKVEESPDLTVNLQEVKAALTNIHSSFEEFYKVIRLRISSEDHWKLCNFKIMFIAYKWTLGVSFAELLEQCELEEGLIVRSILRLDDLCRKVKIAFLYLGNIDLAQKVEKTSHLLRRDIIFTTSLYLQ

SEQ ID NO: 16977 - protein, 1347 aa, Arabidopsis thaliana
MNKVEAGNELGFRVGFSGHGGHLRVEPFYTAERDDALNSLPDFVSPPAFAKETKESIKKHIEEKYLIPRLEPDQFSAEKAENQWDFDWFSRVKMPLQPSLPRSVVVPTWELPFRRQKEDTENGAWEPKSVEVDLSEQMYGDQDSGFFPRMVGPPKDFLRGSVNNRPFRPGGLEDSQSSERVLPEGVSSGQWVQELLNGGPAQTVPPSFKQSLDLGDLMPYPQTWSVYEDHSSHGNASDENSVCRSMSLVYINYFTFNCDHTAGSESPKAEAEPDAKASISNEVSKGLETDVTVLDEILSSAKTAIMSEEAVTGSSDKQLRKEGWATKGDSQDIADRFYELVPDMAIEFPFELDNFQKEAICCLEKGESVFVAAHTSAGKTVVAEYAFALATKHCTRAVYTAPIKTISNQKYRDFCGKFDVGLLTGDVSIRPEASCLIMTTEILRSMLYRGADIIRDIEWVIFDEVHYVNDVERGVVWEEVIIMLPRHINFVLLSATVPNTFEFADWIGRTKQKEIRVTGTTKRPVPLEHCLFYSGELYKVCENEVFLSKGIKDAKDSQKKKNSNAVSVAPKQQMGSSAHQDGSKSQKHEAHSRGKQNKHSSVKDVGKSSYSGNSQNNGAFRRSAASNWLLLINKLSKMSLLPVVVFCFSKNYCDRCADALTGTDLTSSSEKSEIRVFCDKAFSRLKGSDRNLPQVLRLQSLLHRGIGVHHAGLLPIVKEVVEMLFCRGVIKVLFSTETFAMGVNAPARTVVFDALRKFDGKEFRQLLPGEYTQMAGRAGRRGLDKTGTVVVMCRDEVPDESDLRRVIVGSATRLESQFRLTYIMILHLLRVEELKVEDMLKRSFAEFHAQKKLPEKQQLLMIKRSLPTKHIEIDLLIYSSRCIKGEPAIEDYYDMYMEANEYNNKMSEAVMQSPYAQSFLVQGRVVVMKSGMGIDNLLGIVLKGPSNTNRQYVVLVIKSEIPPPEKNMVSIGKKSSDPSQGYFIAPKSKRGFEEEFYTKPSSRKGPVVIKIELPYHGVAAGVGYEVKGFDNKEFLCICDSKIKIDQVRLLEDGNKAAFSQTVQQLLDLKSDGNKFPPALDPVKDLKLKDAELVETYYKWTNLLQKMSMNKCHGCVKLEEHMKLAREIKKHKTDLKDLEFQMSDEALLQMPAFQGRIDVLKNIGCIDDDLVVQIKGRVACEMNSGEELICTVCLFENQFEELEPEEAVAIMSAFVFQQKNTSAPTLTPKLAKAKQRLYDTAIRLGELQAQYNLQIDPEEYAQENLKFGLVEVVYEWAKGTPFAEICELTDVPEGLIVRTIVRLDETCREFKNAAAIMGNSALHKKMDAASNAIKRDIVFAASLYVTGV

SEQ ID NO: 16978 - protein, 476 aa, Glycine max
  unsure (1)..(476): unsure at all Xaa locations
MEMEKEKESLTLGKRREPDLPVTVTETTSMPKKARSSERTCVHEVAVPSGYVSSKDEDLHGTLSNPLHNGPMAKSYPFTLDPFQQVSIACLERNESVLVSAHTSAGKTAVAEYAIAMSFRDKQRVIYTSPLKALSNQKYRELSQEFTDVGLIASDVTPAPNATCLVMTTEILRGMLYRGSEVLKEVAWVIFDEIHYMKDRERGVVWEESIIFLPPAIKMVFLSATMSNATEFAEWICNIHKQPCHVVYTDFRPTPLQHYVFPMGGSGLYLVVDENEQFREDNFLKLQDTFTKQNLGDGKRGGKGAGRGGKGGNASGGSDIYKIVKMIMERKFQPVIIFSFSRRECEQHAMSMSKLDFNSQEEKDTVEHVFQNAVLCLNEEDRNLPAFELMLPLLQRGIAVHHSGLLPVXIKELCRAFFSKEGLGKAPLPPLPXXTFAMGXLNMPAKTVIFTXAVKKWXDGXDSHXRYIXGSGXEYI

SEQ ID NO: 16979 - protein, 325 aa, Glycine max
SEQIVDSFHELVPDMALEFPFELDAFQKEAIYYLEKGESVFVAAHTSAGKTVVAEYAFALASKHCTRAVYTAPIKTISNQKYRDLCGKCPVGLLTGDVSLRPEASCLIMTTEILRSMLYRGADIIRDIEWVIFDEVHYVNDVERGVVWEEVIIMLPRHINIVLLSATVPNTIEFADWIGRTNQKEIRVPGPTKRPVPLEPCLFYSGELSKICESEKFLPQGLKAAKKEASRKKNLTAGGGSGPKPGISPGHDKARVQKRENTSHTKHHGANFYGTGRGYQNNGNGQSNWELRRADASMLLMLINKLSKKSLLPDLIVCELKIFFP

SEQ ID NO: 16980 - protein, 365 aa, Glycine max
  unsure (1)..(365): unsure at all Xaa locations
IFRDNAEGKSKSRPLPPLWPATLNSSSNVTLXXSSSFRFXFPXQQPPLSHSLSFALDPFLFPSNSMLSFKSPTSTLRAFSDAEEDEEDDEEDDEEEDQDHDQDNVSADEYDDVLGEASDDEXPTCSLRTMXXFKWQRVDKLCNEVREFGADLIDVDELASVYDFRIDKFQRQAILAFLRGFSVVVSAPTSSGKTLIAEAAAVATVARGRRIFYTTPLKALSNQKFREFRETFGGSNVGLLTGDSAVNKDAQVLIMTTEILRNMLYQSVGNVSSGSGLVNVDVIVLDEVHYLSDISHGTVWEEIVIYCPKEVKLICLSATVANPDELAGWIGHILIKTYITIVLVMSIKVVECTVLAFCSCKMNQH

SEQ ID NO: 16981 - protein, 163 aa, Glycine max
  unsure (1)..(163): unsure at all Xaa locations
XELISTECLFEKARDELEPEEAVAIMSAFVFQQKNTSEPSLTPKLSEAKHRLYQTAIRLGELQAHFNLPINPAEYAQENLKFGLVEVVYEWAKGTPFADICELTDVPEGLIVRTIVRLDETCREFKNAAAIMGNSALCKKMEIASNAIKRDIVFAASLYITGV

SEQ ID NO: 16982 - protein, 264 aa, Glycine max
  unsure (1)..(264): unsure at all Xaa locations
XKDMDVRDSEIXELVNQVEELEKKLVAHPMHKHXDMDQIKCFERKAEVNHEVQQLXSEMRDSQLQKFREELKNRSRVLKKLGHIDADGVVQLKGRAACLIDTGDELLVTELMFNGTFNDLDHHQVAALASCFIPGDKSTEQIQLRTELARPLQQLQDSARRIAEIQHECKLDINVNEYVDSTVRPFLMDVIYSWSKGANFADVIQMTDIFEGXSIIRSARRLDEFLNQLRAAANAVGEADLEKKFAAASESLRRGIMFANSLYL

SEQ ID NO: 16983 - protein, 156 aa, Glycine max
WIVFDEVHYMRDRERGVVWEESIVLSPKNSRFVFLSATVPNAKEFADWVAKVHQQPCHVVYTDYRPTPLQHYLFPSGGDGLYLVVDEKGKFREDSFQKSLNALIPATEGDKKKENGKWQKGLVLGRSGEESDIFKMVKMIIQRQYDPVILFILAER

SEQ ID NO: 16984 - protein, 370 aa, Glycine max
  unsure (1)..(370): unsure at all Xaa locations
VRFFGSQRVEDMLKRSFAEFHAQKKLPEMQQLLKRKLNQPTKAIECLKGEPTIEEYYDLYLEAETYSNQISEAILQSPSAQQFLNTGRVVIVKSESAQDHLLGVVVETPSPTNKMYIVFVIKPDMPSSVDNASSSGNMQNKSGAFDQGYFVMPKSRRVVVDEYSTSVSARKGKGVITIRLPYSGSACGMGYEVREVDSKEFLCICSSKIKIDRVGLLEDISSSVYSKTVQLLMDLKSDGNKYPPALDPVKDLKLRDVKLVATYHKWTKIIXRRMSQNQCXHGCIKLEEHLKLAKEIKKHKEEVYALQFQMSDEALKQMPDFQGRIDVLKQIGCIDEDLVVQMKGRVACEMNSGEELICTECLFENQMDEL

SEQ ID NO: 16985 - protein, 124 aa, Glycine max
  unsure (1)..(124): unsure at all Xaa locations
XRMPYVSSEFGSRLRQMQECAKRIAKVSAEAKLEIDEETYLSSFKPHLMDVVYTWATGATFAHICKMTDVFEGSIIRCMRRLEELLRQMCQAAKAIGNTELENKFAEGITKIKRDIVFAASLYL

SEQ ID NO: 16986 - protein, 1378 aa, Dictyostelium discoideum
MIELNIDSFLEELNNLENITSTNTTPVNKSNSSIKNNSNNTNVESFDLPNWYVNPTGLSAQPEITPIAPQSSIISPTIPNNCIQLFNFSDKEEILSDIRREYLDFSIESHKLNDDDEQKRQSYLIWPRNIDTDSWDFKLLAERTLSIPCSTVELVIDKIQYSISITNYHEVFLNTEKTSSNSTSLDRPWSNSISKDNFHRGNTSNLPFLPGGIKSPNNNSTNSTNNNNQTPIDWVQFWHSKSLLVKPPGLDNGILDFNENINKQDNKQQQQQQQQQQQQQQQQQQQQEKEKEEEEEVNLRYTLKDLEREIEEERKREEAEEAEVYEDDDQEDDLDIEEEELDELDDIEKTKEEIDDIIKSPPQPTSSSLSTSSSSSSTTLKDKNKIEIEIEEETKRKEEESKKEKQWAFLEQKEITSPLSDLITNPAIEYPFDLDSFQKQAIVHMEQGESVFITAHTSAGKTVIAEYAIAMAAKNMTRAIYTSPIKALSNQKFRDFKNTFNDVGLITGDVSISPSSSCLVLTTEILRSMLYKGADLIRDIEWVIFDEVHYLNDLERGVVWEEVIIMLPPYVKMVFLSATVSNPLEFAQWIGRTKQLPIYVIGTTKRPIPLEHYIHTPSNELFKIVDSNRNFLPSGYNSAYNSLYKTDNNKGGGGGGRGGHNQQQQQRGGSGNNISGWSKLINTLKDKQQLPVIIFSFSKNKCQEYAGSLGQSVNLTQGNEKSQIRVFIEQSLGRLCEDDKSLPQILQMKELLERGIGVHHGGLLPIVKELVEILFSKSLVKVLFATETFAMGVNMPAKTVVYSSTRKHDGITFRDLIPGEYTQMSGRAGRRGLDKVGTVIITYWKDIPEQATIESMILGTPSRLNSQFRLTYNMILNLLRVPDFKVEDMIKRSFSEFSSQKELPGIEKQIEKLQQQQKQLAQVDCILGEPDIDHYYKLFSQAKKYNQQIQNIILNLPNDNHLSIGRVVVLSTSSNIEKEVNDDDDDDDDNNDDDEIFENEKYTIGLILECKSTLIKQYTNTKVDRVFKIFSLKLKIENDIVLCVGNEIITSSGGKEIMKVCNEKLQLKQSDLKSILAGAESGGESEILINSLEQQLLRLIEEYPLPLGPKSIDPIKQLKLKDVDFVSTYDHLQSIEKLIPESKCHKCPRLHDHYEQTEKRYQLQYAIRDAKYTASDENLKLMPQFNIRLDILHELGYIDDENTVTLKGRVSREINTCEDLVITELIFENAFINLEPSEVVSVLSCLIFQEKDAVQPSLTPRLEEAKQNLIKTAEKTYKVESDKGLDVVPDDKLETTLKFGLMQVVYEWARGTPFNDICTLTNVLEGSIVRAITRIGETCQEVRNAARVIGDTKLLQKMEEAMRLIKRDIVFTSSLYVN

SEQ ID NO: 16987 - protein, 319 aa, Oryza sativa
  unsure (1)..(319): unsure at all Xaa locations
SSRNLSRSCIHEVAVPKGYAAAKDEAVHGTLSSPAFHGEMAKAYPFQLDPFQSVSIACLERNESVLVSAHTSAGKTAIAEYAIAMSFRDKQRVIYTSPLKALSNQKYRELSQEFSDVGLMTGDVTLQPNATCLVMTTEILRAMLYRGSEVIKEVAWVIFDEIHYMKDRERGVVWEESIIFLPPAIKMVFLSATMSNATEFAEWICNLHKQPCHVVYTDFRPTPLQHYVFPIGGSGLYLVVDEDGQFREDNFXKLQDTFTKQSNQVDGRKGGGPKASGRIAKGESASGNSDIYRIVKMIMERKFQPVXXXSXSRXSXEGQ

SEQ ID NO: 16988 - protein, 259 aa, Oryza sativa
  unsure (1)..(259): unsure at all Xaa locations
XKPVXNFSFSRRECEHHAMSMSKLDFNTDEEKDNIEQVFSSAILCLSEEDRGLPAIELMLPLLKRGIAVHHSGLLPLIKELVELLFQEGLVKALFATETFAMGLNMPAKTVVFTSVKKWDGDTNRYIASGEYIQMSGRAGRRGKDIRGICVIMIDEKMEMSVIKDMVLGKPAPLVSTFRLSYYTILNLMSRVEGQFTAEHVIRNSFHQFQYEKALPEVVQRLHSLENEATLLDSSGETDLAEYHKLGLDISELEKKKKX

SEQ ID NO: 16989 - protein, 180 aa, Oryza sativa
  unsure (1)..(180): unsure at all Xaa locations
XVPLIRDTLSQLWEDDMLPAIWFIFSRRGCDAAVEYLEDCRLLHDCEASEVELELKRFRMQYPDAIRESAVKGLLRGVAAHHAGCLPLWKSFIEELFQRGLVKVVFATETLAAGINMPARTSVISSLSKRIDAGRQLLTPNELFQMAGRAGRRGIDTVGHSVLVQTTYEGPEECCDVIFX

SEQ ID NO: 16990 - protein, 440 aa, Oryza sativa
  unsure (1)..(440): unsure at all Xaa locations
XNMENEATLLDSSGETDLAEYHKLGLDISELEKKIMSEMIRPERALLYLVPGRLVKVRDGSTDWGWGVVVNVVKNGTLPLALSASRGNNYIVDTLLHCSSSSNENGSRSKPLPPRPGEKGEMHVVPVPLPLLSGLSSVRINIPPDLRPPEARQNILFAVQELGKRYPQGLPKLDPIKDMGLQEPELVELVHKLDDLEQKLCSHPLHKSDQSEQQLSWYQRKAELNHEIQMLKSKMRDSQLQKFRDELRNRSRVLKMLGHIDADGVLQLKGRAACLIDTGDELLITELMFNGTFNDLDHHQVASLASCFIPCEKSSEQIRLRSELSTPMMQLQEAARKIAEVQKECKLEVNVEEYVESTCRPYLMXDVIYCWSKGATFGEVIEMTDIFEGSIIRLARRLDEFLNQLKAAAQAVGEVNLENKFGAASDSLRRGIMFANSLYL

SEQ ID NO: 16991 - protein, 285 aa, Triticum aestivum
  unsure (1)..(285): unsure at all Xaa locations
GPIEEMEEVENSSKRKAPELGSEDSSAAAVLDGQQSLPGSAAKRPNLARSCIHEVAAPNGYDLSKDEAVHGTLSNPVFNGDMAKTYPFQLDPFQTVSIACLERNESVLVSAHTSAGKTAIAEYAIAMSFRDKQRVIYTSPLKALSNQKYRELTHEFSDVGLMTGXDVTLQPNATCLVMTTEILRAMLYRGSEVIKEVGWVIFDEIHYMKDRERGVVWEESIVFLPPAIKMVFLSATMSNATEFAEWICNLHKQPCHEEYTDFRPTPLQHYVFPIGGSSLYLVVDX

SEQ ID NO: 16992 - protein, 351 aa, Triticum aestivum
PRVRVFPAGGDGLYLVVDENGKFREDSFQKSLNVLAPATGSDKKRENGKRQKGLVSAGKTNEESDIFKMVKMIIQRQYDPVILFSFSKRECEFLAMQMAKMDLNGDDEKVNIETIFWSAMDLLSDDDKKLPQVSNMLPLLKRGIGVHHSGLLPILKEVIEILFQEGLIKCLFATETFSIGLNMPAKTVVFTNVRKFDGDRFRWLSSGEYIQMSGRAGRRGIDQRGICILMVDEKMEPSTAKMMLKGGADSLNSAFHLSYNMLLNQLRSEDGDPEKLLRHSFYQFQADRALPDLEKQVRELEIERSSMVIEDEESVKDYYDLLQQYRTLKKDVRDIVLSPKYILPFLQSEGL

SEQ ID NO: 16993 - protein, 482 aa, Triticum aestivum
  unsure (1)..(482): unsure at all Xaa locations
XVRGRVGGRVGDNRXCIKGEPSIEEYYDMFIEAEEHREFVPPAIMQLHTTQQFLAPGRLVVVKSKSDDDHLLGVIVKNPSATLKQYVVLVLTGDCTSSALAPNLSSQNEKGPGDSQGYFITPKGKRGMDDDFFSSSRTRKSSGVINIKLPYTGDASGMGFEVRAVENKEIISICTSKIKIDQVGLLEDISKTAYAKTVQMLIKEQTDGKYPPALDAIKDLKMKDMDQVKRYHAHNNLLEQMSKNKCHGCIKLKERKSMMKDQKVHKDELDQLKYQMSDEALQQMPQFQGRIDVLKEIHYIDSDLVVQLKGRVACEMNSGEELISTECLFENQLDELEPEEAVAIMSAFVFQQRNASEPSLTPKLADAKKRLYDTAINLGQLQKRHEVPVDPEEYARDNLKFGLVEVVYEWAKGTPFADICELTDVSEGLIVRTIVRLDETCREFRNAASIMGNSALYKKMEIASNAIKRDIVFAASLYVTGI

SEQ ID NO: 16994 - protein, 155 aa, Triticum aestivum
  unsure (1)..(155): unsure at all Xaa locations
XVKMIMERKFQPVIIFSFSRRECEHHAMSMSKLDFNTEEEKDSIEQVFRSAIFCLSEEDRGLPAIELMLPLLKRGIAVHHSGLLPIIKELVELLFQEGLVKALFATETFAMGLNMPAKTVVFTSVKKWDGDSNRFIGSGEYIQMSGRAGRRGXDX

SEQ ID NO: 16995 - protein, 103 aa, Triticum aestivum
  unsure (1)..(103): unsure at all Xaa locations
XSLRNQQRVIYTSPIKALSNQKYREFKEEFSDVGLMTGDVTIEPNASCLVMTTEIWRSMQYKGSEVMREVAWVIFDEVHYMRDRERGVVWEESIVMAPKNSRF

SEQ ID NO: 16996 - protein, 320 aa, Triticum aestivum
  unsure (1)..(320): unsure at all Xaa locations
MHVVPVPLPLLSGLSSVRISIPTDLRPPEARQNILFAVQELGKRYPQGLPKLHPITDMGIEEPELXVDLVHKLEDLEQKLCSHPLHKSESEQQLSWYQRKAELNHEIQQLKSKMRDSQLQKFRDELKNRSRVLKMLGHIDADGVLQLKGRAACLIDTGDELLVTELMFNGAFNDLGHHQVAAVGSCFVPVXEKSSEQIRLRNELCKPRPXQLSEAARKIAEVQQECKLDVNVEEYVESTCKPYLMDVIYCWSKGATFGEVIEMTDIFEGSIIRLVRRLDEFLNQLKAAAEAVGEVNLEKKFGLASESLRRGIMFANSLYL

SEQ ID NO: 16997 - protein, 100 aa, Triticum aestivum
  unsure (1)..(100): unsure at all Xaa locations
RXLQIECKIQIDVESFVNSFRPDVMEAVYSWARGSKFHQIMEMTQVFEGSLIRAIRRLEEVLQQLILASQSIGETQLEAKLEEAVSKIKRDIVFAASLYL

SEQ ID NO: 16998 - protein, 1213 aa, Schizosaccharomyces pombe
MSSKLVDAINEVAVSNKDKIELDGIKDDSFDGHLSITEATYDVDTFLKPSPALSKDWIRKLQKKWDREITYKGLYEYPETLARTQIRFQRHGLEGKIMGYKEVPELIEDLNSKNSSSFLRKPSSKNEFVRGSTSNIPFLADDSDVDAIAGEPSVKMALYGEDGLLQVPPGFSRGLSMTATSTTDNLNDEFDPEKWDTKKVKSSNRNFVTIHELNEHLKNVNSKHSEIDDLLPDKRSIVSLPPSTLNLHKQPDYAHVVDSSAPIENFQQLVPEMALDFPFELDNFQKEAIYHLEMGDSVFVAAHTSAGKTVVAEYAIALAQKHMTKAIYTSPIKALSNQKFRDFKHKFEDVGILTGDVQVNPEGSCLLMTTEILRSMLYRGADLIRDVEFVIFDEVHYVNDLERGVVWEEVIIMLPPHVTLILLSATVPNTKEFASWVGRTKKKNIYVISTLKRPVPLEHYLWVKQNMFKIVDQHGRFLMDGYKSANDALKKPDKPVIAKDNKNSARGRGAARGRGVQTNMMRGRGSAKSVERRDANTWVHLIGHLHKQNLLPVIVFVFSKKRCEEYVDTLTNRDLNNHQEKSEVHVVIEKAVARLKKEDRLLPQIGRMREMLSRGLAVHHGGLLPIIKEIVEILFQRGLVKVLFATETFAMGVNMPAKSVVFSGTQKHDGRNFRDLLPGEYTQCSGRAGRRGLDVTGTVIILSRSELPDTASLRHMIMGPSSKLISQFRLTYNMILNLLRVETLRIEDMIKRSFSENVNQTLVPQHEEKIKSFEEKLSALKKEMSDVDLKEIKSCLLSSESFKEYTKKMHFRAITTANGKRIFKDGRVIVFQQLDFTRTVGVLLGTSIRTNASDCTLEVAYLNPQNNLKRPSDLLAFADAFNDVYDNAIFDESNQFKYGLINLSGIERVCNTILRIDSGGIRDRRGGAFRKLSEQFASIKKFSDLLFEEVNWSKVRDFEFCEAFEKRNFLQNKLSGNPIISTPNFLTHFALAYQEYELESNIDNLSSYISDQNLELLPDYEQRIKVLQELGYIDAERTVLLKGRVACEINSTSELVLTELILENSLADFSCEETIALLSAFVFDEKTEVEPTISPHLQKGKEMILSVAEKVNQIQEHYQVLYFNEGNDFESQPRFGLMEVCYEWARGMSFNRITDLTDVLEGSIVRTIIRLDEVLRECRGAARVVGDSSMYTKMEECQNLIRRNIVFCPSLYM

SEQ ID NO: 16999 - protein, 688 aa, Desulfitobacterium hafniense
KALSNQKFKDYKQLFGVDQVGILTGDVVLNSEAPLLIMTTEIFRNQVITNDPSLESVSYIIFDEIHWLNDEERGTVWEESIILAPPHMKLLGLSATIANAQQLVDWIGTIRQEDVALIQENRRIVPLEYYYFSRDTGLVNYEKLWKYYRQQIQSAPPTEGSLFAPTNHLDLIKVIQKQYLPALYFVFSRKQCADKASELAYLTNYLNPQEKRQVEDAFLEHFGPESDWSPSTRLLRRLAVKGIAFHHAGLMPSQKVLVEELFLKRLVHVLYCTETFSVGINYPVRSVCFDTLNKFDGRNFRPLANHEFFQMSGRAGRRGLDERGYSFALVDLNYMEKSPPPRFNINRLEPLTSQFKLSYNTVLNLQATLSYEQIQIYFQKSFAAHSNLHTHGQLIAELAQLEEQFNGKGEHVCRHTDSYACPVKYLPKKKELDRLKRAYQALGPRRQNRVYGREMARKIKNWEKLLATTPQKCPNAKLALCEEESKQRRKLQQRMIEIRKDLKTLPDQNFFFNEFQFKKNQLIQMGYIREDELLPRGECACHIYVQELLVTELIFSGIMETLDDDQLNALLSAIDFEARKNDYFQRLPVLDWTPLQDLVRYIQSVCGPESVRYDPRVAVIVYSWSQGVSFAEVQRLSNLDEGDIISVIRRTIDLLRQMRDAVKEPALLQRLKLCMDKLDRDEAAVLAL

SEQ ID NO: 17000 - protein, 1294 aa, Neurospora crassa
MAYDLNEAMAKLHFDDDAENGDGTTSFDPIDDILFERIPPSELRHGEATDPEAHRVELEKKYLTPSTTFSTEWLNRLQQRWDTPVDHSLLFRIAPTQTRTVTRFQRHGLEGRVTGYRNVTVPASHATAKTSTSMMRKPASKSEFVRGGAGFFPFAPGGLDGIESAAALEDQLRKDAASDEGESKKKLERVITLAEGGLLEVAPGMSRGIDMSKRKKTADAESEKQAKEVEDVLGQEPEDAPDGEGERDEVNGVKREESEDNQDDLEDIDAILPVEFPALEPRGTLAASSARKAGREWAHMVDIRREIPNFRELVPDMAREWPFELDTFQKEAVYHLENGDSVFVAAHTSAGKTVVAEYAIALAAKHMTKAIYTSPIKALSNQKFRDFRQTFDEVGILTGDVQINPEASCLIMTTEILRSMLYRGADLIRDVEFVIFDEVHYVNDYERGVVWEEVIIMLPEHVSLILLSATVPNTYEFASWVGRTKQKDIYVISTPKRPVPLEHYLWAGKKIHKIVDSEKKFIETGWKEANLAIQGKDKPPKAIEASTGPARGGGNQRGRGGAQRGANQPRGGARGGGQQRGRGGPPRASHTPGHMGRTGRPGGFTSAAQDKNLWVHLVQFLKKDNLLPACIFVFSKKRCEENADALSNQDFCTAQEKSHIHMIIERSIARLKPEDRVLPQIIRLRELLSRGIAVHHGGLLPIVKEMVEILFAETLVKVLFATETFAMGLNLPTRTVVFSGYRKHDGHQFRNLLPGEYTQMAGRAGRRGLDTVGSVIIVPPGGDEAPPVTDLRQMILGEPSKLRSQFRLTYNMILNLLRVEALKIEEMIKRSFSEHATQQLLPEHEKAVKLSEADLAKIKRDSCPICDVHMDECHQAGEDFKVATEELYRALLAIPVGRKLFTPGRLIVYMKEGVRTPGILLAEGPSKAGTAANPTLHVLEIKTGRDLRNDTDLLPFTPTLAKWFTPLPAHKKNIYTKTVHIPLSDVVCLTKHITKSIVPELFDGGDGYTKAKEALHQICKSWSAPIWDEMDLSRIKSLSIHEIITRRRDAEIKCTKSSAVDCDLFLKHYAMCHDQWLIKTKIDELRQSLSNQNLQLLPDYEQRIQVLKDLSFIDDASRIQLKGKVACEIHSGDELVLTELILENVLADYEPAEIAALLSAFVFQEKTDMVPNLTSNLERGQKTIIELSEKVNAVQTLHQVILSSDEGSDFASKPRFGLMEVVYEWARGMSFKNITNLTDVLEGTIVRTISRLDETCREVKNAARIIGDPELYQKMATTQELIKRDITAVASLYM

SEQ ID NO: 17001 - protein, 719 aa, Guillardia theta
MDIRCSENVFITFQIIIFNLNNLFIYCTCYNKSILFRKLKNFFKKLLSNLKYNFKLDNFQLICLNLMYFNVDIFVAAHTSSGKTLVGEQVIFSTLKLNKRVIYLSPIKALSNQKFEDFKNIFYNVGIITGDQIINPDANCVIMTTEIFRLYILNNSNWLKNINYIIIDEAHFIFDETRGFVWEEIIIITPGYINIIYLSATISNLMEMSEWIFITRKKILFTIKTDRRIIPLVNYIYLSKIDKIAKLDFFLKNKNLIFNYKKGIKINFRKNSIQDFNQLIRLLKNKNLLPLIYFIFNKKKCILLSKNFMKFSFLSIFEKNILNRLLEMIGKKKKFSIISHELDSYKNFWILLLNGIAVHNSDISIVSKKLIEILFQVNLIKILFATETFSIGLNMPAKTVVFHTLKKFDGNKIRKLRKSEFIQMSGRAGRRGIDHKGFIFTIYRNNNDFDLLNSIINKTDPNPNSIYKLSVYISLKLSCLDNKEKINYFSHLISSYKKDKNSKIFYRNSYVIIKRKNQNLNLFSGNNFSYLFFLFTDLFRYFNNYSKISLQYAFEVTSFCKRKIYRPIYLNEKFFLKIHKFLIFNKTLVMNLIIKLISSSIIYNHSKLTQKNKFFFFKMLNLEYYLNNIFDLKNKNSFLLQFEKISKSLKNMGLIGSNQRLNKKAEVCIKSRLDENLILLELIYNGFFLKKPIEVIVSILSNFELHLGKKKTSILCFPS

SEQ ID NO: 17002 - protein, 1770 aa, Leishmania major
MSSHYRELNQLFVDANGQPDFDATVEISASLPIKQLFQERSLLCPSSSNSEATAASNASPSTVKPVHETTALLRTCNAVLRWAAAEKAGQDQGGAAVAARAAAVGQIDSLQSPDECRMAWKFLATFAGQPAALVCIDKALTEVAVDFHYAMARPRQFDMFVHLSAMEKFFIDGDSLLMAALSSPHVDWDLMQPLHVLHNAQVLLRGLQSRGGHFHIVFFRHTAWFWEPTPQKLFIREALRETLTAVAATNPDSRLVVDTFDSFHSEEFAAYVSKYEPEFLLMSDGEQLGHETELMHLFHNHTEEELLRFEKEGGIGEEGTPASAASATPLTDDEKLELKQRITEDQTMELKRPYRSLVDDESHGDTVAFYYHCFLTWATARRIKVAYSSRIITRENAVVVFAVTVSSGNFARSLVLEPNSTKLAAALERAVPLPTLSDASLALTKDGQLSRREQVVSAAVHAYLHAGDSTPPRTEQQRQLCQVMVTTAYCTALVSAELRAQRSVTSPVVAAFLNEMAPYLLQAFQHCDCATGRGTEFDVYDGHLITIMAHLLRTTPAEQLLDEDGITDVNLSWQDVVGDESAIITGGALSALPDVILAEPKKAMKYPHLTHDLIDQLARAFRVEGHVSNRPYPATLGNANELGGWIVSQPFDELNDVVDAYVERESQRNVTERERRKQLAMEAAFVTDAAQQAESMGIRGFTAGTLAVVCSDSDEDEAAAATDGAAGTSTGKVAKKVKQQHSGQKNKKARSREDIIREEANLRDANKTVQDWTQQVAELCKKTDQASRLTDVADSIGLLTAAITRMTGTSFGRNFDPGEVLKDGSAVPLQLTMWRLLVDASGMREAELAFTITDDDADRSPAADKKRKKSAKDKRATNLYAFGLIADLVEENITNAKSGSHGSDDWGKLERLRKVKKDFTVYDATSYLNWVYLTYVQLHFQCKLMTRVVRLQLMQWKNERERARQAQEAPNINVGVPLFLYCHHKVLACIRDNGVAISTDDLDAVRSALAHFDFPASYYEKVDGAIAKWQNSAVSVLPPSHRPRQKACFETPEMMQLMTMGHLLERPVIPTKDYRVVFNPDGWQRELLDIVDNRGSAVVCAPTSAGKTFISYYCMYSALKTSNTKVVVYVAPNRALINQAVADVCARYGSKKYSFPGRNVYGVHGGADYHRYVDSCQVLVTLPEVLETLLLSPKYKEWAKRLDYVILDEIHTMESSGNGDVWERVLALLPCPFVALSATLGETQQLCGWLNRVQQRLEAQQPEAAKRDFTVHDIPSSGSIQRWNDIKKYMYLPPPGYHPQLKKLTAKYPNRYIHDLHPLSILTLEQLQSGFPPDITLVPSEVVQLYQKMCTLFTEHVFAKWSKVAIVQAMKAQLSMLLPETYFQQEIYITQQRARQYEADVKNAFAYWVYLNKGCDADGLETLSEGEVVAFNTDMRELCETILQSFSQRLREDEAQLDKYATDAALKPEGRPVDTSAAEAEATASDTATAATTAIAQPRKAFFPESKEFIADNIISVLRELNSRDMGPTIVFTFEGEDCDDLTKAIIARLEDAEAAYRQTEEFAQYKATMERKAAAAEAARRQRESTLKQKKLTTDDGGEVDRADRDVDNNMNDDEDYVVPDVLPEFTFIGQYCTVDPIVVKEAVEECIKRGDTLCARAIQRGVGIHHAGVKGKLRRMMEILFRGRHCGVICATETLALGVHSPCRSVVLAGDHVLLNTTQFRQMMGRAGRRGLDYLGHLIFLSVSMKKITRLMTSSMTVIKGNVQVDPI

SEQ ID NO: 17003 - protein, 2211 aa, Leishmania major
MSSHYRELNQLFVDANGQPDFDATVEISASLPIKQLFQERSLLCPSSSNSEATAASNASPSTVKPVHETTALLRTCNAVLRWAAAEKAGQDQGGAAVAARAAAVGQIDSLQSPDECRMAWKFLATFAGQPAALVCIDKALTEVAVDFHYAMARPRQFDMFVHLSAMEKFFIDGDSLLMAALSSPHVDWDLMQPLHVLHNAQVLLRGLQSRGGHFHIVFFRHTAWFWEPTPQKLFIREALRETLTAVAATNPDSRLVVDTFDSFHSEEFAAYVSKYEPEFLLMSDGEQLGHETELMHLFHNHTEEELLRFEKEGGIGEEGTPASAASATPLTDDEKLELKQRITEDQTMELKRPYRSLVDDESHGDTVAFYYHCFLTWATARRIKVAYSSRIITRENAVVVFAVTVSSGNFARSLVLEPNSTKLAAALERAVPLPTLSDASLALTKDGQLSRREQVVSAAVHAYLHAGDSTPPRTEQQRQLCQVMVTTAYCTALVSAELRAQRSVTSPVVAAFLNEMAPYLLQAFQHCDCATGRGTEFDVYDGHLITIMAHLLRTTPAEQLLDEDGITDVNLSWQDVVGDESAIITGGALSALPDVILAEPKKAMKYPHLTHDLIDQLARAFRVEGHVSNRPYPATLGNANELGGWIVSQPFDELNDVVDAYVERESQRNVTERERRKQLAMEAAFVTDAAQQAESMGIRGFTAGTLAVVCSDSDEDEAAAATDGAAGTSAGKVAKKVKQQHSGQKNKKARSREDIIREEANLRDANKTVQDWTQQVAELCKKTDQASRLTDVADSIGLLTAAITRMTGTSFGRNFDPGEVLKDGSAVPLQLTMWRLLVDASGMREAELAFTITDDDADRSPAADKKRKKSAKDKRATNLYAFGLIADLVEENITNAKSGSHGSDDWGKLERLRKVKKDFTVYDATSYLNWVYLTYVQLHFQCKLMTRVVRLQLMQWKNERERARQAQEAPNINVGVPLFLYCHHKVLACIRDNGVAISTDDLDAVRSALAHFDFPASYYEKVDGAIAKWQNSAVSVLPPSHRPRQKACFETPEMMQLMTMGHLLERPVIPTKDYRVVFNPDGWQRELLDIVDNRGSAVVCAPTSAGKTFISYYCMYSALKTSNTKVVVYVAPNRALINQAVADVCARYGSKKYSFPGRNVYGVHGGADYHRYVDSCQVLVTLPEVLETLLLSPKYKEWAKRLDYVILDEIHTMESSGNGDVWERVLALLPCPFVALSATLGETQQLCGWLNRVQQRLEAQQPEAAKRDFTVHDIPSSGSIQRWNDIKKYMYLPPPGYHPQLKKLTAKYPNRYIHDLHPLSILTLEQLQSGFPPDITLVPSEVVQLYQKMCTLFTEHVFAKWSKVAIVQAMKAQLSMLLPETYFQQEIYITQQRARQYEADVKNAFAYWVYLNKGCDADGLETLSEGEVVAFNTDMRELCETILQSFSQRLREDEAQLDKYATDAALKPEGRPVDTSAAEAEATASDTATAATTAIAQPRKAFFPESKEFIADNIISVLRELNSRDMGPTIVFTFEGEDCDDLTKAIIARLEDAEAAYRQTEEFAQYKATMERKAAAAEAARRQRESTLKQKKLTTDDGGEVDRADRDVDNNMNDDEDYVVPDVLPEFTFIGQYCTVDPIVVKEAVEECIKRGDTLCARAIQRGVGIHHAGVKGKLRRMMEILFRGRHCGVICATETLALGVHSPCRSVVLAGDHVLLNTTQFRQMMGRAGRRGLDYLGHLIFLSVSMKKITRLMTSSMTVIKGNVQVDPITQLRLLQLYDYARHRDLKGAEEWSRRALGMAERLYVNPLFFAGRAAMENGNMESFTVEFAQMLLGFLHREGLHFKDRPSSLGSLLVDAMYVFRNAQVGVEGFAFISMITRKVFAKARLARRFRYLAPSDDAVVQEAKAELLAYLFSVNKVCGVPLELHRSALSDPAVIELWSGRRVAKQHRVVLAPLDVCSPATKPFSYVSVFRMISAFYTYLASTLKEPADTRLPYMCAKTKKKHCIFGGTSDMPLMAKLKETAEPYAARDPFVAISGCGDHFVHSEDLVTTLRRGLFCDRRMLPVLDLTDGCRHDGAQVLINACITDFVRCKAQIDSVRSNFRFTLLEELNGLSQSESYAVLNQTERLLSNISGLTRDDKYTPLQVLSALYPERERGENVAEEDLKFYAGTLGVMDFASQLHELRPHIDKELAMVQWMARIAEMRRARK

SEQ ID NO: 17004 - protein, 1350 aa, Plasmodium falciparum
MSNNIDDLFDVFEENEIPEIISIKDEEQQQEKKNHIIQNDNEIITSTNNSKNEDEEEKEETEKNINKQNNNINNIDKDDVNKDNVGNHKKENLYKDINIENYKINVEYLIKNKKAEENIKKQIQEEIYSDIQNFDKTNKNVNKIRKLSLQENNNINNNHINGKNINNNINEDNLTGETYPNDDSIPQENNKITNKLIVEETIIENSKTINNDDVLVLEEFGGDVNCIHKCVRPQSYVHNEIKEPLIPARTYKFELDTFQKKSIECLERNESVLVSAHTSAGKTVIAEYAIALGLRDKQRVIYTSPIKALSNQKYRDLGEEFKDVGLITGDISINPEASIIVMTTEILRSMLYRGSSLTKEVKWVIFDEIHYMRDRDRGVIWEETIILLPLMVRFIFLSATIPNGIQFAEWVSSIKSQACHIVYTDYRPTPLQHYIYPTSSESVFLICDENKDFKKDNFIKAVNVIKEKMNTSEENHHQQHINKYTKKMRKTTYDIEKIVQMCHSRNYTPLIIFAFSKKECEVNATAMHKIDLTSDTEKEVIKELYENAIRILADDDRSLPQVQFILPLLLRGIGIHHGGLLPIIKEIIEIMFQESLLKVLFSTETFSMGINMPAKTVVFTSLTKFDGLEKRLITSGEYIQMAGRAGRRGLDDRGIVIIMLDTPLHWREAHKLFVGEANRLVSQFHLGYNMILNLLRIEGITPEFMIERSFIQYQMKKNLSQKILAKKKVEEHIKQIFNHLTNIHLDENNNEITKDELLTKIMYNNYEQIKNNQNLGTSSELKIKDTSSNDEVILNADKHKEIKEEFKEEYTNYSSYSTQHYNENVINKELLNYSTIFSCISNFYTMKQKLIDVGETYRYILTMKKHITPYLSLGRLLYIIQEDLRWGWCICIEGQLIEHKKANDNQKNKHNNSNNNNNNNHSGDHNNLKQAKSEQETLFVECLVPCNHNMKRKLTINDDDDDNINHNNNNYGEEYQPASDRSKARWKVISFNIKCVYQLSAVVLSIDKPFDKKNEEQIENIKTKYNTMVTCLKGEKNIPVINPNQMGIKNETFISIVKNLKFHENIINKNKLLNNKNLNKYYQMYSKYVALQCEKNILESNIEKCRFIVLKKELKNMLVLLESLNYIEVSYNLENLKNEKDIKTIENSITEHIKNERIMNIKNETYKNNHEEKNYVVTMKGQIASAILSVDELVISELFFSNFFSKYNYDYICAFLSCFVYDESTSKEITINDPILVEGYQQIIKTANHVATKMNECGMNINLKDYIDKFKSAIMPIALLWARGHSFVEILSDSQIYEGSIIRTLRRLDELIRQMICAFRGINNDSMCETLTLATNKLRRGIPFSPSLYL

SEQ ID NO: 17005 - protein, 808 aa, Prochlorococcus marinus subsp. pastoris str. CCMP1378
MTTEIFRNMLYGEFEEFDDPLVNLESVILDECHYMNDPQRGTVWEETIIHCPSRAQIIALSATISNADQLQNWIEKVHGPTVLVNSNKRPVPLDFIFCSAKGLHPLLNNKGNGIHPNCKIWRAPKGQKKKGKVGRIMQPKAPPIAFVVSKLAERNMLPAIYFIFSRRGCDKAVEYIKDLSLVSYSEANLISQRLDVYLKNNEEGIKDKFHCEALKRGIASHHAGLLPAWKELVEELFQQGLIKVVFATETLAAGINMPARTTVISTLSKRTDEGHRLLFSSEFLQMSGRAGRRGKDLQGYVVTLQTRFEGAKEASSLAISEPNPLVSQFTPSYGMVLNLLQNYSLDKSRELIKRSFGSFLYLGESSEETAILYNLGRDLKELKKITSNISWQDFDSYEKLKSRLKEERRLLRILEKQAAEKLSEEITSALTFIKDGSLISIKAPQINRKVVPALICKKIYESKKIKSLLCLTIDNLFILIKPSYIVNIFPDLEEIEILRLEEPKMNFSGEVVRGDNESQTFVDRIFDISEKYDLRTPQYDLSTEVLAQKKLITNLEETITNQPAHKFGDSKKLKRYRKRIIEIEQEIVMKNNLMEEKENHNWIKFTDLIKILNHFGCLNDLELTEVGQSVGAIRSENELWVGLVLLSGYLDDLAPPDLAAIIQAICVDVRRPNLWCNFKPSIKVIDVFNELESLRKLVASKQNKFNINTPIFLETELTGIISEWARGKKWKELIFNTSLDEGDVVRILRRSMDVLSQIQYCVGVSNKLKNKAKLALKAINRFPVSESNDLLKVSDNINPATKRIDNNS

SEQ ID NO: 17006 - protein, 881 aa, Encephalitozoon cuniculi
MSSRNTLGNDEPMNQEKEGVESKDTPRTETKGVEKKHSVLVKQDWLPSDYAQYVDEKILNIGFEPDTFQRQAFYLLSRASSVFVSAHTSSGKTLVAEYAISLSQIHGTRTIYTSPIKALSNQKYHDFKQKYDDVGIITGDVQVNPAAKCLVMTTEILRNLVYRNGDLLRDTEFVVFDEVHYINDSERGVVWEECIIMIPRHINFIMLSATIPNSLEFSEWVGRTKDKTIYVISTSKRAVPLEHVIYCDWCVYSIDDGGGKRNASNFKGDLVPFSKKTRPTGKFKILDVANFVVKKKLTPAIFFCFSKRKCEDYAEILRTLNLNDTKSREEVKLFLSEATRCLSPEDRNLPQVLSMSSMVLNGVAVHHGSLLPFVKECVELLFSMNLVKLLIATETFAMGVNMPAKCCVFLSLSKIDGGVFRYISSGEYIQMSGRAGRRGMDAVGTVMIADPKMPSLSTIQGIIHGTPFSLSSQFRLSFGLILISLRSNIRVEDLMRRSYGEHRSQRNYERDMKKLSELESVEEDVCNVCGDLSKYIGAVEEICARNWKLIAKHHVLKEGSRVLLKNNAVGTVERVSGATVFLKQKDEALDNGTPIPTKFLAYPLGTRKPLDRSKVTFENIFCVLDGEKALWNYETANVMDVLEIRKIKSLYDYLLSEQQVCREFDQHYSNALRVHCKRKEMNDIKIRYNVCSLGMIDEYNRRMEFLKKKGFVEEMITIKGRAAAEIHTVNEVLVVEMIFSNEFRQMDGRKIVSLMSSMIHEEADGQELGKALYDECKRMDECFRELSRDLDELMIPPFTPLNFSLVDAVYDWCNGSSLGKIVSRYNVLEGTFVRLVLRLEECCRELISVSTMIGDKSLEEKIGDASASMKRDIIFLPSLYL

SEQ ID NO: 17007 - protein, 933 aa, Encephalitozoon cuniculi
MIDDKYFDVFNDKSTLQAIAVPERLERRTTVTDRIDRNGTRHEAVVPVGAAYTLLPKQFCKPAAKNYLFELDDFQKISVCSLERDESVLVSAHTSSGKTVVAEYAIAMSLRSNQRVVYTSPIKALSNQKYRELLSEFSDVGLMTGDVTINPTASCLVMTTEILRNMLYRGGEVVREIHWIIFDEIHYMRDKERGVVWEETIILLPKHVRMVFLSATIPNALEFAEWISHIQSQVVHVVYTEKRVTPLVHYFRSNKLYKIKDAKFHKSNFLSAMRSIRKRNVGPREVGEAIGDASLPVVVFSFKRKDCERFAMKLDGRYLTDEEARTVQTIFTNAIMSLRKEDREIPIIQNILPLLMRGIGIHHSGLLPIIKEVVEILFQEGLLKVLFATETFSIGLNMPAKSVVFTALKKFDGEAMRLVSSGEYIQMSGRAGRRGIDSMGIVISIISEPITYKEASRLFSASSDNLVSAFRLTYNMLLNLMRVEGLDPLYLISRSFHHFQSYKKALAEEETLHLMYRRLEDIEPNETACLYRKREEKKVERGKRLVEAFGKYLKKGRVVDLFIPRNGPSITIRNAIVSKAREKVQCMVGTEEGVYMCSFPLHYIDCVYDIRVKLDVRVFTKSFEKIAVRDELDEEIEEIEGKILSMDPEWSFDFCVLCGKSSVGCLVSCSRELIDSEAVIVQMPENTKRYGESLEAARYPSTEMKSNMDGARAFFVNETLRQRYLEKLLELNSLKEIYHMRECKKMIEVLKKLEYCDDTTVLIKGRMACEISSGDELVLTEMIFNGDFAGIPVEHFVPLLSCIVFEEWDSDSFVLSDENKLYYRLLSDSVEKVCKVLKSCGIEIDPAAYLKRFSYELMDVVRMWVCGCTFISICSKTSIFEGSIIRTFKRLEELLRQLSSAARVIGNTELENMFALGIVKIKRDIVFANSLYI

SEQ ID NO: 17008 - protein, 1337 aa, Encephalitozoon cuniculi
MDHEEYFKTSHPVYTNISAQFTGIGHLVVDGGALITNISKRYGVKYESLPLHTYMHGVKFVLSNLRKAGFDNIMMFFRAESGHRKVIREYLMRRFECMDVSGVYEYIENERVALVLGGTEEIELMFLYECLGISLYCSVLDHMEFRVPSVYGFVYRPLEHRVERKAATATILEEESDEGSLGDIDDEIKRINPEMSIGIISDLFESRIKPFGPCEYSVPAGLCKKLIRMFRSETPRSEMNFDGRFLFPEGLVEHGKELTDYSDVVGDKHRDIESRNVGMELDLLVSGKEISPTSAAVHMKNIRKSAQSLFDGKLLYAPIVRAKGGKAPKISQKQRAIIAENERRMKEEKKAKESSWLKNFFGKYKGLDNQGKRNMLEGVKADGSGIYRRILLLKIEFYADMWNLEKRSEDCDEGVIVPCYLSCIEYIREFGRFGLEDQAPDAELGFVLQNLIGCGFEATAKELIEKHGLKGLDLEFFTDDTSAPSEFDICFQLKHTGDKLQRSVNSKKDPRVLFKPDEWQVRLLDLVDQNKSAVISAPTSAGKTFICFYAIEKVLRESDTDVVIFCLPTKALVNQVSADIYARFTPKVNSKTFLQGSLMKEFSIAPWNCQVLIVIPSLLESVLNTPPKGFIERIRYIIVDEVHKIGSEEMGIPIERIVHLSPCPMLVLSATLGNIEGFYGWMKKIEREKGRDCELVSYGERYCELKPYVYSHSFSPKMVPINNLFAYSYSHIKRFGFGNDISFLPEELLHLYDSICAVLRKDQEHLISKITPENFFRSNIVTKKEVGEYGRHLLETFQGMIEGDLLTQKQVKYVYKLQTKETRKAFESVVDYSSEYLLENILDLLMELKERNMFPCIVFNTDRDFASKLALKVHRQLESMDMEKKKDKLIEKMKKEAKRARDLEKTKESWIEESIAAEKSFQMRNDKKNIKYTFLDPLTKLTDYELEEETKFIKNTDFEFIDMLYRGMGVHHAHMNRKYRSLVEILFRQKHLQVLFATETLALGINMPCRTVVFAGDSLQLDPMNYKQMAGRAGRRGFDTLGNVVFMGIPRQRVQNLMVSLLPDIKGAYTYTNTSFVGFDLKDSLIKNPLLESTLYSGQEGLSRSIEKLSISGDDSSLYDLSSVYGSEERRAELVNHQLSLLKPYFLPKSYLCDLVIGNRDSDPEILCFALLLESKILPLDPDSLMTTLAHFFETRPLLFDMGCTLPPLDPAVYAFCGKINSISRSSVSRFYPPILRSLQKESSTPLHIVDSFLSVVNLDKIKNSYLLDFFRHGSWSRIAAENRVGTGELFKSLSVVNSVVLSLIKLHDTYGLCSEDRSKIVRFHSLFEPKFKAMFA

SEQ ID NO: 17009 - protein, 1260 aa, Caenorhabditis elegans
MCSYTISYYKVRVIIFLCNSAKIIFRQNPSAEFYNVADNLDSLLQPIDAPANIIAQVDSNGKIIGFVENERIIVGSANTSMSINRAPYKQRSLHTTAGNSIKGSPGNVPFLPGFLEELDDLLAGETTAKSTSGEESKFLSFKDDATLLNTIPTIGQIVLPNHSSVKKPAETPKSINIEEMDMFDLLDMVTSNEYIIHTVAAPVKKSESIESEETPEDDKKVSENEIDEIEIPIIPGNTEKVIEIFGAATEPTKEKFEFAQRLVLSADEEDEYKRLVPTMARKYPFSLDPFQQSSVLCMERGESLFVAAHTSAGKTVVAEYAIALCQAHKTRAVYTSPIKALSNQKFRDFKQIFGDVGLVTGDIQLHPEAACLIMTTEILRSMLYNGSEVIRDLEWVVFDEVHYINNEERGHVWEEVLIMLPAHVKIVMLSATVPNCVEFADWVGRIKNRKINVISTDRRPVPLEHFLYTGQDGKTQKDLFKIIDRSGQFILKGYNDAKDSKAKIYEKEKAGGAGGRGTQRGGGRGGGGNGGGRNWPGKNDKNIYLNLINYMKCSDQLPMVVFVFSRKRCDENAQMLASMNLTTEVEKQHVRLFFSQCVQRLKGSDKELPQVLTMRDLCLRGFAVHHSGILPILKEVVELLFQKGYVKILFATETFAMGVNMPARCVVFDSIMKHDGTERRMLNPGEYTQMAGRAGRRGLDLTGTVIIICKDSTVPQPDVLKNLISGQALRLESKFRVTYSMILNLLRVEQLKIEDMLQRSYVESDSLRESKEKRKSLVDTKNAIQTMSTIECSTCSPNSQLRDYHDALAVFLRKSEHIWPKLNDENVINKLLCSGRFLIVNSAQQQLQNECVLLIKELNNKTLQILVASADADETTNKNAAAIGFSKLPKSELSWLTEENSLLSTSKFGTRGAAHCSTNIRSFRLCEIPLSGIVAVMKKCAKGVQSGEILQEYNMTQIPRFRDRELSENVKKLLQQITTAVPGLKSGEIETYTWKELGSFCQNLDTSFDTDLLEKLEYNLNLPQSFPARHCTRFDEHFSVLRDRIRIERKIESLEYELSSDALLLSEEYHNRLKVLEALNFVEQKMVSLKGRIGCEIHHQELLITELILDYKFHQRSPAELAALLSTLTCQYNSGREMQFGGDTVFGEISESVKSVLTRLESVASKHKSQISDLGCEIRFDLMEVVYEWANGTPFYQIMEMTDCQEGLIVKCIQRLDEVCKDVRNAGRIVGDPALVEKMEEVSASIRRDIVFAASLYTTV

SEQ ID NO: 17010 - protein, 891 aa, Nostoc punctiforme
MNYPAPSPELDLGAIFPFDLDQFQKDAIASLNAGRSVVVCAPTGSGKTLVGEYAIYRALSRGKRVFYTTPLKALSNQKLRDFREKFGFDQVGLLTGDASIHRDAPILVMTTEIFRNMLYGTPIGQVGISLVDVEAVILDECHYMNDRQRGTVWEESIIYCPREVQLAALSATVANSDQLTDWLNRVHGPTDLIYSDFRPVPLEFHFCNPKGLFPLLNDSKTKINPRLLQKKKRGGERDRGRSGRPEAPGIIYTLSQLEQRDMLPAIYFIFSRRGCDKAVAEVGDLWLVNNEESQILRQQIDDFLARNPEAGRSGQIAPLYRGIAAHHAGILPAWKALVEELFQQGLIKVVFATETLAAGINMPARTTVISTLSKRTDTGHRLLNASEFLQMAGRAGRRGMDKQGHVVTVQTPFEGAKEAAYLGTSKPDPLVSQFTPSYGMVLNLLQTHTLEQTRELIERSFGQYMATLHLRPEYDEIAELEKQLAQLHEQIAAVDENELAIYEKLRQRLKVERQILKTLQEQAQEDRQEELGMMLDFAVSGTLLSLKGKNITVSSPVTAVLVGKSPGSGQAPYLVCLGHDNRWYVATTGDVVDLYAELPRIEVSPDVLPPPEMPLKPGQSRRGNEETFAIATRIPNPIESLHLAPEVAEQLSRTAAVQEQLEAHPLHQSGNAATLFKRRAKYVELEAELEQLQGQVEQQSQRHWEEFLNLILILQHFGALDNLVPTQLGRIAAAIRGENELWLGLVFASGELDNLDPHHLAAAAAGLVMETPRPDSKVNFELSNEVAEALAKLRGIRRQMFQLQRRYNVALPIWLEFELIAIVEQWALGMEWTELCENTTLDEGDVVRILRRTLDLLSQIPHVPHLPDSFQRNAYRAMQLIDRFPVNEVVE

SEQ ID NO: 17011 - protein, 1197 aa, Drosophila melanogaster
MNEIRGEDNLERLRNYILRPELSLHNPLPDVLPRKFDPMRLLHAPRCPGSTKLAPRRDQSGHILEFVELDLEAVGANANNSMSMQREPGLLEDATRGSHSNFPFWPGGFDEQRQQIAALDVSNFQFGDKLLTVPPGFSSGYDFFQSQSVTLPPVVADPSNVDLLENLEQDLDVQEWMKLTRSEETSSTGTPKSPKQSNVQLPSEEFRDVDDHIMKADLKPVLNISTTTKNFKSDWAEMVDISQPINNFKEQIPCPAMDFPFELDVFQKQAILKLEQRQYVFVAAHTSAGKTVVAEYAIALSKRDLTRTIYTSPIKALSNQKYRDFRKTFKDVGLITGDLQIEPTASCLIMTTEILRSMLYCGSDVTRDLEWVIFDEVHYINNPERGHVWEEVIILLPEHVNIIMLSATVPNTLELADWVGSTKKRKVYVISTLKRPVPLTHFLYTGAGGKSRDDIFLLVDAQGKYLQGNYEKAVERKKEMQGKAKGGGGGPRNHLNAKQEQYTWIGLIDFLRRSNMMPVVAFTLSRNRCDSNLAALQSVDLNTEKEKGAVQKFFLQCLAKLKPPDRTIPQVLVLKDALERGIGVHHSGILPILKEIVEMLFQNGLVKLLFATETFAMGVNMPARTVVFDSCKKFDGLEMRNLKPGEYIQMAGRAGRRGHDETGTAIIMCKGSVPPSMELRPMILGLPEKLQSQFILRYAVILTCLRIESIKVEDIMKFSFKEFNLKLQLPTQQKQLRLAEDKFAMLPTLGEHLQPLVNFYDKAVEYWKEKHRIMKFVVTQPKIQKELKAGRVIVITQGKHYNKLAILLNTKSVPGKDTIYKVLVLDHQFKAKDSNSLQQGELYYKILSLTPRNMTFQPVGIGGHTVLDIKAIDIISITKSTLKVDADAIIRNWEQRQLERFKDSPPSGSVVKAVTELNQLNESYIDNPDNIKYVNLSKEIIVNADSEVAMLNYVDHLLRKVGEFLPHTNIAGFEQEFAKVYERRMLEIHIEELRFKNSARNLTLYPDYCNKLKVLRALKYIDELDEVTLKGKVACEMGQNELLITELILCNMFNDLEPAEIAALLSGLVFQAKMQDKPVIPEALKECVAAFEQINDTILAEEQRFQAAIETDNRLNFGLLEVVYEWARNKPFAEIMKLTTVQEGIIVRCIQQLNETLRDVKTAAIRIGNPGLQSKMEEASAAIKRDIVFTASLYTEL

SEQ ID NO: 17012 - protein, 1197 aa, Drosophila melanogaster
MNEIRGEDNLERLRNYILRPELSLHNPLPDVLPRKFDPMRLLHAPRCPGSTKLAPRRDQSGHILEFVELDLEAVGANANNSMSMQREPGLLEDATRGSHSNFPFWPGGFDEQRQQIAALDVSNFQFGDKLLTVPPGFSSGYDFFQSQSVTLPPVVADPSNVDLLENLEQDLDVQEWMKLTRSEETSSTGTPKSPKQSNVQLPSEEFRDVDDHIMKADLKPVLNISTTTKNFKSDWAEMVDISQPINNFKEQIPCPAMDFPFELDVFQKQAILKLEQRQYVFVAAHTSAGKTVVAEYAIALSKRDLTRTIYTSPIKALSNQKYRDFRKTFKDVGLITGDLQIEPTASCLIMTTEILRSMLYCGSDVTRDLEWVIFDEVHYINNPERGHVWEEVIILLPEHVNIIMLSATVPNTLELADWVGSTKKRKVYVISTLKRPVPLTHFLYTGAGGKSRDDIFLLVDAQGKYLQGNYEKAVERKKEMQGKAKGGGGGPRNHLNAKQEQYTWIGLIDFLRRSNMMPVVAFTLSRNRCDSNLAALQSVDLNTEKEKGAVQKFFLQCLAKLKPPDRTIPQVLVLKDALERGIGVHHSGILPILKEIVEMLFQNGLVKLLFATETFAMGVNMPARTVVFDSCKKFDGLEMRNLKPGEYIQMAGRAGRRGHDETGTAIIMCKGSVPPSMELRPMILGLPEKLQSQFILRYAVILTCLRIESIKVEDIMKFSFKEFNLKLQLPTQQKQLRLAEDKFAMLPTLGEHLQPLVNFYDKAVEYWKEKHRIMKFVVTQPKIQKELKAGRVIVITQGKHYNKLAILLNTKSVPGKDTIYKVLVLDHQFKAKDSNSLQQGELYYKILSLTPRNMTFQPVGIGGHTVLDIKAIDIISITKSTLKVDADAIIRNWEQRQLERFKDSPPSGSVVKAVTELNQLNESYIDNPDNIKYVNLSKEIIVNADSEVAMLNYVDHLLRKVGEFLPHTNIAGFEQEFAKVYERRMLEIHIEELRFKNSARNLTLYPDYCNKLKVLRALKYIDELDEVTLKGKVACEMGQNELLITELILCNMFNDLEPAEIAALLSGLVFQAKMQDKPVIPEALKECVAAFEQINDTILAEEQRFQAAIETDNRLNFGLLEVVYEWARNKPFAEIMKLTTVQEGIIVRCIQQLNETVRDVKTAAIRIGNPGLQSKMEEASAAIKRDIVFTASLYTEL

SEQ ID NO: 17013 - protein, 1358 aa, Plasmodium yoelii yoelii
MAYLYSNLSDFWTSDDEEDGERTDEDFDEDSENNYKDDTNKNYINEERKKNNNENNENNKNNEFEKREDEEELQNTWNIHNTNDCSPTSATSNMNTNAVTGGETALDLADLLNDSRNELFDNIPISSILQNYDINNFIYNDNLLKYCEAGVTINNESSCNEPLTLNEEFNFNCYSHFDYINPPNIKSSYTSTKDKESNAMDLISIENGENNFIDMCIQNKDELNHKIKDISVKEISNEMAKEECMQEDEKKISNEIINETMKKLEVIPEKQNVKYIRKKWVIEDNESDVSNFSKNDLLLSYNFELDDFQKRSVKHINNFKHVFVAAHTSAGKTLIAEHAIALSIKLNKKAIYTSPIKALSNQKYYEFKNIFKNVGIITGDVKMNVNANCLIMTTEILRNLLYLNDNIINNIHCVIFDEVHYVNDEFRGVIWEESIIMLPPHVQIVLLSATVPNYLQFADWVGFTKQKEVIAISTKKRPVPLLHYIYAHDSLFLIMDEKNKFYSSAFKEIYIKIREKEEAGKKGKELMGSSHGGKKKMYYSDPKNNKDNQMEKQNKTGTTNNLGDKQNDTVKGYYQYCKQKQKQRMFQNEANMKTEIQKLQALIKKLDEDNKLPVVLFCFSRIKCETYAKSMPHLNFLDNKKKSKVHLFIKESASKLCDQDRELNQIKILSKLLENGIGVHHSGLLPILKEIVEILFSKGLIKVLFATETFAMGINMPAKSVIFTSIYKHDHLKKRILTSSEYTQMSGRAGRRSSDSYGYVYIYCSDNIPDQVQLTEMMMQKAVSLKSKFKVTYNMILKLLINKQINIEKMLFSSFLESCRALQIPLFKKDLKRKKKMLQNIKQVECVYTSDLNQIAPIENYVYIDHKLKNIGLNLHKKLFDMKNSNAFVVGRIMLLNTIDLFRSSVYAVYLGCDKSSNKKKNNKVNFAQNSIFFFQNDKEENEIMERFFFLFILPDFIGYGDLTNNTDSTNVNKNGTNNSTAVSNENTNTEKTQLTSENINMYENYKNVFACTNNKKDINIIYHSTFDSNDMNKKHFVVCSNVGIENISLITNTIIKIPNVSTNALLNNPKNLLLYTLELDRLIKKETFEPFTLTKMLKSLKCEFYSVLINQSDYLDSLKKSLCYNCSLKDEHYELVCKKNDCINDIENIERNINAKSLNLYEDLEGKLNVLKHFSFIDDDNNLTIKGKIASYITLTDEITLTQIIFENVLNNLNPPEIAAVLSCFVSPEKKVEESPDLTLNLQDVKLALTNIHSKFEEFYKVIRLKISTEEHWKLCNFKLMFIAYKWALGVSFSELLEQSEFEEGLIVRSIQRLDNLCRKVRIAFLYLGNVDLAEKTEKASLLLRRDIVFTTSLYLQ

SEQ ID NO: 17014 - protein, 1309 aa, Plasmodium yoelii yoelii
MSENIDDLFNVFEEDETKKNLPNNSKAPDHLNAIVEEQNGQDNIAYPNEGYIMKNEQTINNKTTKAEIKENEIEMEINYESPEYNAPIDYKININNIISNHKSNNKIKEQIKEEIYNEAGSINRSNNLFNNKIRKTNGENSQTKTEIRTNTYKEPVREMLIENSKTINNDDVLVLEEFGSDVNCIHKCVRPQSYVHNKLSESITPARTYKFELDTFQKKSIECLERNESVLVSAHTSAGKTVIAEYAIALGLRDKQRVIYTSPIKALSNQKYRDLSEEFKDVGLITGDISINPEASIIVMTTEILRSMLYRGSSLTKEVKWVIFDEIHYMRDRDRGVIWEETIILLPLMVRFIFLSATIPNGIQFAEWVSSIKNQACHIVYTDYRPTPLQHYIYPTSSESVFLICDENKNFKKDNFIKAVNALKDRSMLDENNQSGGNNKFNKRMRKNTYDIEKIVQMCHSRNYTPLIIFAFSKKECEVNATTLHKVNLTDDSEKEVIKELYENAIQILADDDRALPQVQFILPLLLRGIGIHHGGLLPIIKEIIEIMFQESLLKVLFSTETFSMGINMPAKTVVFTSLKKFDGLEKRLITSGEYIQMAGRAGRRGLDDRGIVIIMLDSPLHWKDAEKLFVGEANRLVSQFHLGYNMILNLLRIEGITPEFMIERSFIQYQMKKNLFEQIFASKKVEQKSQEILNILTNIYLGQNGEEFTKAYLLNQVKTNDVETILKNKNVKNEGTHILLENNDPNDPKTIDDYNNSETSNTVLKNYITTFSEISNYYITRNKLVELGETYRSLLTSKKNITQYLTMGRLLYAVEDDLKWGWCICIEGRIAEEKYNNNHKNNSTGNNRNTGNDNNIIGYDTNHTNSSNDTKFNKKNSVENNRNNTNILVVECLVPYVQNKKRKFPQNNDDDDDNKNSQKRDLEFLPAHDRLKAQWKVMTFYIKCIYQISAVVLNIEKPFDKSSEEEIEKVKNKYNTMVSCLKGEQNIPVIGSNQMNIKDDEFFKIVKNIYYYENILNKNKLLNNKNLNKYYQLYSKYVALQCEKNILDCNIEQCKFIVLKKELNNMLILLESLNYIEITYKTHEKNQTNNDQTNRSDGENDQKQIDTINEKLLTQSDTHNDITNKNNNDEKNYVVTMKGQIASAILSVDELVISELFFSNFFSKYTYDYICAFLSCFVYDESTNKEITINDPILIEGYQQITKTATIIANKMNQCGMNINVKDYLEKFKSAIMPIVLLWARGHSFMEILADSQIYEGSIIRTLRRLDELLRQMICAFRGINNDNMCEILTTATKKLRRGIPFSPSLYL

SEQ ID NO: 17015 - protein, 2237 aa, Plasmodium yoelii yoelii
  unsure (1)..(2237): unsure at all Xaa locations
MILANNVYKVPKLKDLKNLRIAENDSISRYSFVNKFEENELEDIENIINNKDISIDNKIELFYSKLNSSIHDIFRIIADYTSLYIINGEGLLIHVCMLLSKFYLFQNEEDQNILSFNNSLNISSIIYYIEKVLRDFALCNSNFHIIFFNVFNLFFEKETKLFENYNILRNAFIIHCKKNLIPYYIFDNWYNDNNYNIYIIKYKPLFMFVEDSSSFLYLFNKFYVSEVDEKNELDDNITLSKEREVDEKTNNNNDKILDGEKNRKEYLKKKKIYDYYNEEIREISLCFYFLLINNILRDIKSVLFFNVEIEKNTVNAFSINYKMINFKIVEKLNEESTLLFERNVYQNVDIKESIAYENSNYTQINISQSIKDYDLLYNDEKNYSKEELELLELFSVNVKSDNINLKNVVLNVFYSKIKETIIKGDEKKDFTFLAVKLIFMHNYLIEKLNMKNLNCIPDIDKMGKDYCSYNFIKSQIEGYVLSYLNIYNLILKSLQGYMYCDILQNIRNTDILHFFNSSIIHNLISFISYKIRENIYVINYEDFSFEDTDFFEKSFKNVVGNDDMPFFPINFEFLLNCTNLLPKNETNVVEGNDIENSKIENDNKIDENPIKNPNQCKNEISNDNKIFNVNLINIKNEFIENFFHIDNKSNEIERNTNDIINENNKGQEIKYKVNYVDKCIEYDNEFFELCGLLHITQREEVYDIYRRYVKMSKNSRISKVRKEDERNVLRGQQKEERRNAIIAKYFYISSLHHPIIISENHPWLKYYIYNIDKLYNYLKNEENKKVINMRMKRIFEETFLKENTPSICDKKNKKIKNQQNYIKMFEVLDDISGDDSNLDNDGENNKGKKGQKEKEEKKNIKGGNSNQLTRKDEILKRKELSNEKKIYEVDLERYNVLEAKINKLSSNNNYSEMNTWSLDIISGFNRLVDVYNFNNVSNLIKNATLQLKVSMKVLSNMFDIIMHTKLKNVKTNKQKSDAIRSVMLIYKLVNEIFNKFKEHLTEKDIVQLQTVLLSLGFRNSSYNLFEEYIKIRVKQLEEENNNDVEEDKTGKNKKNVKGKEKTKLKGGAKGGKSKDEEKLGLDKIKKKGREESNSEVGVKISDRKELKELYKYKIESVKTYSELKIDEDKEHEFQLYYMYYLLDRTTGNIKDKRVLFTLDTWQYNILNLVDRRKSILVSCPTSSGKTFICYYVMDKVLRLNNDSVVVYVAPNDTLALQVFHEVNGRFNTKSYSKYGENKLCSYLTDKYAQDKALEAQIVIILPSVLENILLSYYSMGENTGLETKVSKFISRIEYIIFDEIHCIGDKEFYGPQIENIIHLTTCPFLALSATIGNIKYFYDWLKNVMIKKGKNEKDLHLIKFYERFSDLVLYVYTNRNLHHLNPLACYNYRDILYKGINKDFYCNPREIYEIIMLLFELARKKQFYDLVEFLEPSFYFKYTRCINKKQFIYYMHSVKEMIIYLIQNKYITSSDYDMFIHMLLSNYLKNTDVSRGEKKEEETQNKKKEVEKREVAKEDDSSSDSDEENKQITSMQSTTKHLYKRKVQDDAPKEKLFQELYKNVVLDEKYYLNKSNDLVKYTETVNVEQEYLDSGNLIELLKHLEDVNFLPCIVFNFERKELEDMTINLINELMRRQHDKYYGTDERAFNTKMENKLRQERYENLLKQREMLLKIKTVSRNQRLEQNLDKDYLDMLNEDEIPEPPIDISEEYDGDFYFCNRKVYHNYVFEIEDLIKDAERAIEGRKNKDILIEGLKRGIGLHYEVLPYKFTIIVESLFRLGYIKIIFSNKNLSLGINIPCKSIIFTGHTYELNSLLFKQTSGRAGRRGFDLYGNIIIWNINFKNLKRLITCPLQTLSGTYCVNFTNICRSMLLYNCLKKYREMEEIAHRNKAIVNKPSXKKKKEETMSECDNNFLLTHLLRKRIIHNLIGDDVFLSYSNSEVSLQKIIDCITFEKNYSRNAIVDDTSRGKFILLFILSHFINKIKENKIALTNILINYNNKSRNRLELFSHKYFPLLHTLPKSVQNHVNNLEKLILNNLINYSIIIISKLKLWSRKKTYLLPYTQLYIFEEHPSSNLVDIFNNTNSEFINYYKEKVDDYNIRSPFLAPLYKNDKFDNLCELLYTSLIDLDMKKNMIPDIMEDYVYFYKFENGLIKEEKACLKNSYMIDYFLHGKYYVLRNKNKLGQYTWYIIDRFIDSLKNIENYLYEIKREKDFSNDVFYTCLSSMKDILQKHFKSINSE

SEQ ID NO: 17016 - protein, 946 aa, Prochlorococcus marinus str. MIT 9313
MLAGANANDGQKWIAGLFRIETMSSVAHVTTAPDVAKLEPDPFAIFSFPLDEFQLEAIAALNHGHSVVVSAPTGSGKTLVGEYAIHRAIAHGQKVFYTTPLKALSNQKLRDFREQFGSQNVGLMTGDLSVNREASIVVMTTEIFRNMLYAEADQADDPLADVEAVVLDECHYMNDSQRGTVWEESIIHCPASVQLVALSATVANAGQLTDWIERVHGPTQLVFSDYRPVPLQFSFCSAKGLHPLLNDAGKGLHPNSKVWRAPKGHKRKGRSPKPPQPEPPPIKFVIAQMAEREMLPAIYFIFSRRGCDKSVKDLGSQCLVSPTQQEQIRQRLRTYSETNPEAVRDGIHADALLRGIAAHHAGVLPAWKELIEELFQQGLVKVVFATETLAAGINMPARSTVISALSKRTERGHRPLMGSEFLQMAGRAGRRGLDSQGYVVTVQSRFEGVREAGQLATSPADPLVSQFTPSYGMVLNLLQRHDLKKARELVERSFGRYLASLDLVYEEESLEQLRLQLGQLQGVAGDVPWQDFEDYEKRRSRLREERRLLRILQQQAEETLANELTLALQFASVGTLVSLKAPQLRGRVTPAVIVDKLEGPGQFPLLLCLTDENVWLLLPCPAVVSLHAELSCLQVTEMNEPDLQRSGELRHGDQHSGSLALAVAHMAKRHDMTTPQYDLAGEVLAQAQRVRGLEEELEQQPAHRWGDRKQLKKHRRRMEELELEICERQQLLHQRANRHWETFLSLIEILQHFGCLDDLEPTEIGRTVAAMRGDNELWLGLSLMSGHLDDLHPANLAAVFEAISTEVNRPDLWSGYPPPASAEEALHDLAGIRRELLRAQERCQVVVPAWWEPELMGLVDAWARGTAWSDLIANTSLDEGDVVRILRRTVDLLAQVPYCEAISEQLRRNARLALKAINRFPVCEAEDLLNAAAVDEELNPATERVA

SEQ ID NO: 17017 - protein, 906 aa, Mycobacterium tuberculosis H37Rv
MTELAELDRFTAELPFSLDDFQQRACSALERGHGVLVCAPTGAGKTVVGEFAVHLALAAGSKCFYTTPLKALSNQKHTDLTARYGRDQIGLLTGDLSVNGNAPVVVMTTEVLRNMLYADSPALQGLSYVVMDEVHFLADRMRGPVWEEVILQLPDDVRVVSLSATVSNAEEFGGWIQTVRGDTTVVVDEHRPVPLWQHVLVGKRMFDLFDYRIGEAEGQPQVNRELLRHIAHRREADRMADWQPRRRGSGRPGFYRPPGRPEVIAKLDAEGLLPAITFVFSRAGCDAAVTQCLRSPLRLTSEEERARIAEVIDHRCGDLADSDLAVLGYYEWREGLLRGLAAHHAGMLPAFRHTVEELFTAGLVKAVFATETLALGINMPARTVVLERLVKFNGEQHMPLTPGEYTQLTGRAGRRGIDVEGHAVVIWHPEIEPSEVAGLASTRTFPLRSSFAPSYNMTINLVHRMGPQQAHRLLEQSFAQYQADRSVVGLVRGIERGNRILGEIAAELGGSDAPILEYARLRARVSELERAQARASRLQRRQAATDALAALRRGDIITITHGRRGGLAVVLESARDRDDPRPLVLTEHRWAGRISSADYSGTTPVGSMTLPKRVEHRQPRVRRDLASALRSAAAGLVIPAARRVSEAGGFHDPELESSREQLRRHPVHTSPGLEDQIRQAERYLRIERDNAQLERKVAAATNSLARTFDRFVGLLTEREFIDGPATDPVVTDDGRLLARIYSESDLLVAECLRTGAWEGLKPAELAGVVSAVVYETRGGDGQGAPFGADVPTPRLRQALTQTSRLSTTLRADEQAHRITPSREPDDGFVRVIYRWSRTGDLAAALAAADVNGSGSPLLAGDFVRWCRQVLDLLDQVRNAAPNPELRATAKRAIGDIRRGVVAVDAG

SEQ ID NO: 17018 - protein, 910 aa, SYNECHOCOCCUS SP. WH 8102
MMAASGLDPSKIFPFPLDDFQLEAIDALNQGHSVVVSAPTGSGKTLVGEYAIHRALAHGQKVFYTTPLKALSNQKLRDFREAYGDDNVGLMTGDLSVNREASIVVMTTEIFRNMLYAEASEQDDPLADVEAVVLDECHYMNDSQRGTVWEESIIHCPPSVQLVALSATVANAGQLTDWIQKVHGPTTLVLSDYRPVPLQFSFCSAKGLHPLLNDAGTGLHPNCKVWRAPKGHKRKGRSAKPPQPEPPPISFVVAQMAERDMLPAIYFIFSRRGCDKAVRDLGIQCLVNKEEQARIRARLKAYSSENPEAVRDGIHADALLRGIAAHHAGVLPAWKELIEELFQQGLVKVVFATETLAAGINMPARTTVIAALSKRTERGHRPLMGSEFLQMAGRAGRRGLDSRGYVVTVQSRFEGVREAGQLATSPADPLVSQFTPSYGMVLNLLQRHDLNKARELVERSFGRYLASLDLVEEEDVLSQLRLQLGQLEGVAGDIPWEDFEEYEKLRGRLREERRLLRILQQQAEETLANELTLALQFASTGTLVSLKSPQLRGRVTPAVIVDKIEGPGQFPLLLCLSDENLWLLLPCQSVVSIHAELSCLQVDGVTAPDLHKAGELRHGDQASGGLALAVAHVARRHDMTMPQYDLAGEVLTQARTVQALEQEQEAHPAHRWGDRKQLKKHRRRMEELEQEIEERQRLLHHRSNRHWETFLALLEILQQFGCLDELTPTEIGRTVAALRGDNELWLGLALMSGHLDDLSAPDLAAVFEAISTEVNRPDLWSGFPPPPAAEEALHDLSGLRRELLRAQERLGVVLPAWWEPELMGLVESWARGTDWSDLIANTSLDEGDVVRIMRRTVDLLAQVPYCEAISEQLRSHARQALRAINRFPVAEAEDLLKQAGDQNPATERAA

SEQ ID NO: 17019 - protein, 1245 aa, Homo sapiens
METERLVLPPPDPLDLPLRAVELGCTGHWELLNLPGAPESSLPHGLPPCAPDLQQEAEQLFLSSPAWLPLHGVEHSARKWQRKTDPWSLLAVLGAPVPSDLQAQRHPTTGQILGYKEVLLENTNLSATTSLSLRRPPGPASQSLWGNPTQYPFWPGGMDEPTITDLNTREEAEEEIDFEKDLLTIPPGFKKGMDFAPKDCPTPAPGLLSLSCMLEPLDLGGGDEDENEAVGQPGGPRGDTVSASPCSAPLARASSLEDLVLKEASTAVSTPEAPEPPSQEQWAIPVDATSPVGDFYRLIPQPAFQWAFEPDVFQKQAILHLERHDSVFVAAHTSAGKTVVAEYAIALAQKHMTRTIYTSPIKALSNQKFRDFRNTFGDVGLLTGDVQLHPEASCLIMTTEILRSMLYSGSDVIRDLEWVIFDEVHYINDVERGVVWEEVLIMLPDHVSIILLSATVPNALEFADWIGRLKRRQIYVISTVTRPVPLEHYLFTGNSSKTQGELFLLLDSRGAFHTKGYYAAVEAKKERMSKHAQTFGAKQPTHQGGPAQDRGVYLSLLASLRTRAQLPVVVFTFSRGRCDEQASGLTSLDLTTSSEKSEIHLFLQRCLARLRGSDRQLPQVLHMSELLNRGLGVHHSGILPILKEIVEMLFSRGLVKVLFATETFAMGVNMPARTVVFDSMRKHDGSTFRDLLPGEYVQMAGRAGRRGLDPTGTVILLCKGRVPEMADLHRMMMGKPSQLQSQFRLTYTMILNLLRVDALRVEDMMKRSFSEFPSRKDSKAHEQALAELTKRLGALEEPDMTGQLVDLPEYYSWGEELTETQHMIQRRIMESVNGLKSLSAGRVVVVKNQEHHNALGVILQVSSNSTSRVFTTLVLCDKPLSQDPQDRGPATAEVPYPDDLVGFKLFLPEGPCDHTVVKLQPGDMAAITTKVLRVNGEKILEDFSKRQQPKFKKDPPLAAVTTAVQELLRLAQAHPAGPPTLDPVNDLQLKDMSVVEGGLRARKLEELIQGAQCVHSPRFPAQYLKLRERMQIQKEMERLRFLLSDQSLLLLPEYHQRVEVLRTLGYVDEAGTVKLAGRVACAMSSHELLLTELMFDNALSTLRPEEIAALLSGLVCQSPGDAGDQLPNTLKQGIERVRAVAKRIGEVQVACGLNQTVEEFVGELNFGLVEVVYEWARGMPFSELAGLSGTPEGLVVRCIQRLAEMCRSLRGAARLVGEPVLGAKMETAATLLRRDIVFAASLYTQ

SEQ ID NO: 17020 - protein, 1246 aa, Homo sapiens
MMETERLVLPPPDPLDLPLRAVELGCTGHWELLNLPGAPESSLPHGLPPCAPDLQQEAEQLFLSSPAWLPLHGVEHSARKWQRKTDPWSLLAVLGAPVPSDLQAQRHPTTGQILGYKEVLLENTNLSATTSLSLRRPPGPASQSLWGNPTQYPFWPGGMDEPTITDLNTREEAEEEIDFEKDLLTIPPGFKKGMDFAPKDCPTPAPGLLSLSCLLEPLDLGGGDEDENEAVGQPGGPRGDTVSASPCSAPLARASSLEDLVLKEASTAVSTPEAPEPPSQEQWAIPVDATSPVGDFYRLIPQPAFQWAFEPDVFQKQAILHLERHDSVFVAAHTSAGKTVVAEYAIALAQKHMTRTIYTSPIKALSNQKFRDFRNTFGDVGLLTGDVQLHPEASCLIMTTEILRSMLYSGSDVIRDLEWVIFDEVHYINDVERGVVWEEVLIMLPDHVSIILLSATVPNALEFADWIGRLKRRQIYVISTVTRPVPLEHYLFTGNSSKTQGELFLLLDSRGAFHTKGYYAAVEAKKERMSKHAQTFGAKQPTHQGGPAQDRGVYLSLLASLRTRAQLPVVVFTFSRGRCDEQASGLTSLDLTTSSEKSEIHLFLQRCLARLRGSDRQLPQVLHMSELLNRGLGVHHSGILPILKEIVEMLFSRGLVKVLFATETFAMGVNMPARTVVFDSMRKHDGSTFRDLLPGEYVQMAGRAGRRGLDPTGTVILLCKGRVPEMADLHRMMMGKPSQLQSQFRLTYTMILNLLRVDALRVEDMMKRSFSEFPSRKDSKAHEQALAELTKRLGALEEPDMTGQLVDLPEYYSWGEELTETQHMIQRRIMESVNGLKSLSAGRVVVVKNQEHHNALGVILQVSSNSTSRVFTTLVLCDKPLSQDPQDRGPATAEVPYPDDLVGFKLFLPEGPCDHTVVKLQPGDMAAITTKVLRVNGEKILEDFSKRQQPKFKKDPPLAAVTTAVQELLRLAQAHPAGPPTLDPVNDLQLKDMSVVEGGLRARKLEELIQGAQCVHSPRFPAQYLKLRERMQIQKEMERLRFLLSDQSLLLLPEYHQRVEVLRTLGYVDEAGTVKLAGRVACAMSSHELLLTELMFDNALSTLRPEEIAALLSGLVCQSPGDAGDQLPNTLKQGIERVRAVAKRIGEVQVACGLNQTVEEFVGELNFGLVEVVYEWARGMPFSELAGLSGTPEGLVVRCIQRLAEMCRSLRGAARLVGEPVLGAKMETAATLLRRDIVFAASLYTQ

SEQ ID NO: 17021 - protein, 1245 aa, Homo sapiens [sequence omitted]

SEQ ID NO: 17022 - protein, 1246 aa, Homo sapiens
MMETERLVLPPPDPLDLPLRAVELGCTGHWELLNLPGAPESSLPHGLPPCAPDLQQEAEQLFLSSPAWLPLHGVEHSARKWQRKTDPWSLLAVLGAPVPSDLQAQRHPTTGQILGYKEVLLENTNLSATTSLSLRRPPGPASQSLWGNPTRYPFWPGGMDEPTITDLNTREEAEEEIDFEKDLLTIPPGFKKGMDFAPKDCPTPAPGLLSLSCLLEPLDLGGGDEDENEAVGQPGGPRGDTVSASPCSAPLARASSLEDLVLKEASTAVSTPEAPEPPSQEQWAIPVDATSPVGDFYRLIPQPAFQWAFEPDVFQKQAILHLERHDSVFVAAHTSAGKTVVAEYAIALAQKHMTRTIYTSPIKALSNQKFRDFRNTFGDVGLLTGDVQLHPEASCLIMTTEILRSMLYSGSDVIRDLEWVIFDEVHYINDVERGVVWEEVLIMLPDHVSIILLSATVPNALEFADWIGRLKRRQIYVISTVTRPVPLEHYLFTGNSSKTQGELFLLLDSRGAFHTKGYYAAVEAKKERMSKHAQTFGAKQPTHQGGPAQDRGVYLSLLASLRTRAQLPVVVFTFSRGRCDEQASGLTSLDLTTSSEKSEIHLFLQRCLARLRGSDRQLPQVLHMSELLNRGLGVHHSGILPILKEIVEMLFSRGLVKVLFATETFAMGVNMPARTVVFDSMRKHDGSTFRDLLPGEYVQMAGRAGRRGLDPTGTVILLCKGRVPEMADLHRMMMGKPSQLQSQFRLTYTMILNLLRVDALRVEDMMKRSFSEFPSRKDSKAHEQALAELTKRLGALEEPDMTGQLVDLPEYYSWGEELTETQHMIQRRIMESVNGLKSLSAGRVVVVKNQEHHNALGVILQVSSNSTSRVFTTLVLCDKPLSQDPQDRGPATAEVPYPDDLVGFKLFLPEGPCDHTVVKLQPGDMAAITTKVLRVNGEKILEDFSKRQQPKFKKDPPLAAVTTAVQELLRLAQAHPAGPPTLDPVNDLQLKDMSVVEGGLRARKLEELIQGAQCVHSPRFPAQYLKLRERMQIQKEMERLRFLLSDQSLLLLPEYHQRVEVLRTLGYVDEVGTVKLAGRVACAMSSHELLLTELMFDNALSTLRPEEIAALLSGLVCQSPGDAGDQLPNTLKQGIERVRAVAKRIGEVQVACGLNQTVEEFVGELNFGLVEVVYEWARGMPFSELAGLSGTPEGLVVRCIQRLAEMCRSLRGAARLVGEPVLGAKMETAATLLRRDIVFAASLYTQ

SEQ ID NO: 17023 - protein, 1246 aa, Homo sapiens [sequence omitted]

SEQ ID NO: 17024 - protein, 1246 aa, Homo sapiens [sequence omitted]

SEQ ID NO: 17025 - protein, 1246 aa, Homo sapiens [sequence omitted]

SEQ ID NO: 17026 - protein, 1246 aa, Homo sapiens
MMETERLVLPPPDPLDLPLRAVELGCTGHWELLNLPGAPESSLPHGLPPCAPDLQQEAEQLFLSSPAWLPLHGVEHSARKWQRKTDPWSLLAVLGAPVPSDLQAQRHPTTGQILGYKEVLLENTNLSATTSLSLRRPPGPASQSLWGNPTRYPFWPGGMDEPTITDLNTREEAEEEIDFEKDLLTIPPGFKKGMDFAPKDCPTPAPGLLSLSCLLEPLDLGGGDEDENEAVGQPGGPRGDTVSASPCSAPLARASSLEDLVLKEASTAVSTPEAPEPPSQEQWAIPVDATSPVGDFYRLIPQPAFQWAFEPDVFQKQAILHLERHDSVFVAAHTSAGKTVVAEYAIALAQKHMTRTIYTSPIKALSNQKFRDFRNTFGDVGLLTGDVQLHPEASCLIMTTEILRSMLYSGSDVIRDLEWVIFDEVHYINDVERGVVWEEVLIMLPDHVSIILLSATVPNALEFADWIGRLKRRQIYVISTVTRPVPLEHYLFTGNSSKTQGELFLLLDSRGAFHTKGYYAAVEAKKERMSKHAQTFGAKQPTHQGGPAQDRGVYLSLLASLRTRAQLPVVVFTFSRGRCDEQASGLTSLDLTTSSEKSEIHLFLQRCLARLRGSDRQLPQVLHMSELLNRGLGVHHSGILPILKEIVEMLFSRGLVKVLFATETFAMGVNMPARTVVFDSMRKHDGSTFRDLLPGEYVQMAGRAGRRGLDPTGTVILLCKGRVPEMADLHRMMMGKPSQLQSQFRLTYTMILNLLRVDALRVEDMMKRSFSEFPSRKDSKAHEQALAELTKRLGALEEPDMTGQLVDLPEYYSWGEELTETQHMIQRRIMESVNGLKSLSAGRVVVVKNQEHHNALGVILQVSSNSTSRVFTTLVLCDKPLSQDPQDRGPATAEVPYPDDLVGFKLFLPEGPCDHTVVKLQPGDMAAITTKVLRVNGEKILEDFSKRQQPKFKKDPPLAAVTTAVQELLRLAQAHPAGPPTLDPVNDLQLKDMSVVEGGLRARKLEELIQGAQCVHSPRFPAQYLKLRERMQIQKEMERLRFLLSDQSLLLFPEYHQRVEVLRTLGYVDEAGTVKLAGRVACAMSSHELLLTELMFDNALSTLRPEEIAALLSGLVCQSPGDAGDQLPNTLKQGIERVRAVAKRIGEVQVACGLNQTVEEFVGELNFGLVEVVYEWARGMPFSELAGLSGTPEGLVVRCIQRLAEMCRSLRGAARLVGEPVLGAKMETAATLLRRDIVFAASLYTQ

SEQ ID NO: 17027 - protein, 1389 aa, Schizosaccharomyces pombe
MAKPALKAAKEALVVKNYELAIEQSKKALSFDANNYNANVFLGVAYFSTKQLSESKEAYLDAIKIDEKAVLAWQGLWNLYESTHDISELHKITPILASKFLELEEQNKCLNTVNKYMEVVKKYGNKADEFKALKLLTPEEGEIYEYLEGRVLPLQTVYMQMVDIQESMDRCYFESEVNKRKTRLGARLEQVMRDVELEIYKDSPLETLYNQIINYAETDEIRRLTESKLLHMYNKLLILSEIKEKSHWRERIWDLIQGMVTLHIPEQAAWTIYFEWQDHSDISFFQSAELQEYIELFPGSPLAQALFAFRNSDLWHKEHPIQLEDSNNSAELAKETKEEDDSENSVDKKENEEDIISSTMMPQDEVLANLTEAYENAPQSTIISECLAKYYIHLKEYEYAIGLSKAALEVLKRLQQDTGVKLDKLTRIFQLCLAIGYSHYEVPRYLFQAMHYYDILLAADPRNYHALLGKGLVQIENEQYSDAVKTLGLLLDDHENDPSLSELSWCYFKTGNLPKAISTVEKCLDVLLSMDVERFKIAEAYYRYGIYILNRKSENYLEDSFSAFVSSLRKDPNYAPAYTSLGLYYRDIHDMVRATKCFQKAFELDASQVEAAEALAKTFAEANEWELVEVISRRVLNTSENDLKRKKKFNWHHTSLGVLELNAKNFHKAIVHFQSALRISPKDTNAWSGLGEAYARSGRYVSALKAFNRASILDPDDWYVKYFIATLEKDMGEYEVAVSTLSEILAVRSKELCVQVSLAETYVRLAKLYHARGFYSRAADSLEKSIQICCNVLKEDITSIFSWEILGDACLSFCQLKNYHNRFPNSLISDILFTTEAMKCANNGRQFENMIYLPDLETSSGAIFIAAVAITCFTIHLSLVADDKLLLPVSWYNLGSSYYRFYECDTTKDATLQVAINCIKQAIKLEAKNYVFWNMLGVLFSQTKAVRSAQHCYIQSLLLNERSSGVWANYGALCIQNHDVECANAAFTRSISIDPDNSQAWLGKAYCSIAVGSIRKAVQIIHHAFEISSGKMPDVNYWYADTMLHAVNTEDFVTTDGDIWSATYAIKRYLGENPTDTFAYYIKASLLEHLGETTDSVPSAIRLCELLEQEYDVSESPVILKRFIDAKALLGRLYLAKKSFENSVEQAGIALDLLEGEEDEDIKRTTLGLNLTCGTASFFLNKLEKSLDCFEKALLVSDSNADVVVLVSKVLWALGSENGKQAAREQLFEALEQSPSHIGSLLCLGAIAIYDEDDAVCSAIEDSIAHLKKDEVLRSGALKQVQIMEVLLTKKIDESMIKSLLQRFLHVYPFAASSWTLLTNRYASKSLANAFATTLYTHPSRPDDLAQSYRLQNSIDRAQVAIHLVPWDSANWKALHGVTHEALVSSDAS

SEQ ID NO: 17028 - protein, 1444 aa, Neurospora crassa
MSTKQLVKAAAEAIKKQQWDDAIEGAKNIIDKDSKSYQGHILLAFALDKKGRLEEAENTYLAATRLKPEEKEAWQGLVKLYPNLDTSKKFKQHQHAVLKLAEIFRDANDLQKCYETVDSFITYARNKAESYQYVDALDLILPGSPIYDAIEGRFGHVWRTYETQAKLVEQNEKKRINTLIGERRTRIGARINEVTLEVKREVYRQSRLSYTYAQLINWTNDDEVRRMYEEKLIQYCHDRLMAWPPGEEKEQELANVLKLANDMVIIKHPYKLAWDIAINWQDHKEIKEWDVTVLRQYCTFFPDSDLNRVVMGFLTSSVSPFPQEKQEQTTEDAAAKSEGSTEESEDDEDGGAATIYAPITEEDRLLMMTEGISGAESLLAFRLMGEYYQHLEEWESNVELMRKALTFLKEERAKTGLDFRFTEDAFSLYLGTALVFYQTPRNHQEAKALFDAVLTHDPTSTPAMIGVGLIYEEEEEYDEAIDFLERALKRDPNNIRVRTEAAWVKALKGDFDMARAELEACIPILSKKGQSKELLSQTQYRLGYCIWNIDTSKAARKDRSGAYALFLESLKNNLNYAPAYTILGIYYADYAKDKKRARRCFQKAVELSPSEVESAERLARSFADDGDWDRVELVAQRVVDSGKVKPPPGSKRKGISWPFAALGVAELNKQEFHKAIVSFQSALRISPNDYHSWVGLGEAYHSSGRYIAATKAILNAQKLEESSEANLTGETWFTKFILADIKRELGDFDESIELYQRVIQERPDEEGVATALMQTLVDNAFDSLNKGFFGKAAGLATETLTFATKAPDAIKDTFNYWKAIGDACSLFSNIQGRISEFPAETVSSLLGTDEDFPAYQILKDIDNVGTGIVSTDGVFPENETVGVDLTKALQATLLAHKRSIHIASNDIHAQSVAYYNLGWAEYRAHACLPPDIRKNSHKKPTNYIKAAMACFKRAIELEAGNSEFWNALGVVTSEVNPAVAQHAFCRSLFLNERGAHVWANLATLALAQGDLALANEAFTRSQSTDPDYSLAWLGQGVVALLTGNEKDARGLFTHAMEISGDTSRVISQRYAVSMFDHILSFSSSESLPTTSLIQPIFALTQLQSLHSSASSSTDLAYNHLLALFLERTGETPRAISILDSLSTTLEQEYETTESPLALKHFAIVKSDLARLQLSARLFNEAIDSADLALQLSSDESADELTAEERRKLRLSAHVTLGLAHYYSHDITAAVTAFDQALSESNTNPDVACLLAQILWATGQEDARERGRDLLFGVIADSEERKEQHVQSVLLLGVIALLDNDAESMDAVVSELQSLRSSDEGISPEQQAQLGEVLRAILTAMGSGEAQPMTDVMLHPFLPHGWSRVAQLAAQHGGEEEAEGASEMALRVARKGVPPRGELSPEDLARAYAGTGRPADAQVGCVVAPWERRGWESLGDAVTAVAAKQ

SEQ ID NO: 17029 - protein, 1233 aa, Drosophila melanogaster
MSAVKESKALIKDIRETIKLGKHAEAIPKCQRLLKSEPENAMGYLLLGAAYQNIDKAEAAKNLRQCIKCTDGPAPAALLGLANCAPSNELPEIYDQLADLQPEQSLNYWEKLFNLASDSNVAPFCFTVLKKRVQDTENGNFTKIQEYLGRIWVSNDFEIAPEDTQLYKTTMEALLQNSEPSARSVVYKRYLKWLYKKQDYETCVRHACNMTESHPKDVYGFEWICKTYCEHHEQSEIVSWQQELRHPIQVYAEQLLELNPNSNLALLVKALDLFAEGQVVASRQLALQAQKSQPAYKVTLELLARIHMELGAYKLALQLWQEIGQENDAYALCLSHEKGVSKLREAVTILQTLENSEGNIKSLARCYFKLGELHLLKDLPLDDLTKAEFVLSPSEALQEIADCKTFEAYLLCGKLHMALKNYSDALNYVLKATRLRPHFAECFDYLGKLYPLATGDFSRARKCYEKCISLNPLAEEAVDALSFIYQEQGEEELNETLLLNTLSHLGSNESIRLQYKLGLHFSHVKKWDSAIQCFRIAIKNDSRCISYWESLGDAYAGRGSYNSAIRVFQKILELSPENNYALLQIASVKTTIRMYTESIEDYDTLLQRNPTYLPGLRGAAEAHIGIANSLKSQNLYGRSKAHFQLALEHLQSAFLQREAQGMVWLWRLSANIFVQTAQLPHSLANLDVAGNLAKREEPIAYLSRKDLLQLAQRFYLCALKLKQNTYLWYELSLASYYSAILIPEDANGHLETATKACKMAIKECSNRWQNWNLLGVINMNSENENLPLAQHCFIQAVVLEKKCYTAWTNLGVLYIKLNEVRLANEAFTRAQQSSPVYANAWIGQAMVAELIGDREEAFDLFRHCQQFDYHPEAALGFAHWVCEMLSTPGSFDKPRIKHAIEHMYADVLALDAINWYVQNEETDATPASLSFQGFLYARKNLYRQAIEAFTRACKLCEPGADRDKLYTNLGYLYLKIDQPEQAAHALNTVAHATFKPIIGLAQAYYLAGQLQESYSIYNSVLGNVVDHGDDKAATILVAMASMIYDFQGEADTKTLLYQCVLLKEVPIQALFSALALGILHRDNALIHTILTELNAYAFKKEYCADISYLTAHYILINEGARRALCYLQTRIRMFPNSRSLRSVVLKFLLDYFSDDQSYRLATSNMGRITLTLGHTKQQNSILASEEALTTIYASQAVSAVDKTCSMKLLQRAILLSPTDQRARQLLSAIIANS

SEQ ID NO: 17030 - protein, 640 aa, Drosophila melanogaster
MYTESIEDYDTLLQRNPTYLPGLRGAAEAHIGIANSLKSQNLYGRSKAHFQLALEHLQSAFLQREAQGMVWLWRLSANIFVQTAQLPHSLANLDVAGNLAKREEPIAYLSRKDLLQLAQRFYLCALKLKQNTYLWYELSLASYYSAILIPEDANGHLETATKACKMAIKECSNRWLNWNLLGVINMNSENENLPLAQHCFIQAVVLEKKCYTAWTNLGVLYIKLNEVRLANEAFTRAQQSSPVYANAWIGQAMVAELIGDREEAFDLFRHCQQFDYHPEAALGFAHWVCEMLSTPGSFDKPRIKHAIEHMYADVLALDAINWYVQNEETDATPASLSFQGFLYARKNLYRQAIEAFTRACKLCEPGADRDKLYTNLGYLYLKIDQPEQAAHALNTVAHATFKPIIGLAQAYYLAGQLQESYSIYNSVLGNVVDHGDDKAATILVAMASMIYDFQGEADTKTLLYQCVLLKEVPIQALFSALALGILHRDNALIHTILTELNAYAFKKEYCADISYLTAHYILINEGARRALCYLQTRIRMFPNSRSLRSVVLKFLLDYFSDDQSYRLATSNMGRITLTLGHTKQQNSILASEEALTTIYASQAVSAVDKTCSMKLLQRAILLSPTDQRARQLLSAIIANS

SEQ ID NO: 17031 - protein, 1564 aa, Homo sapiens
MSSKEVKTALKSARDAIRNKEYKEALKHCKTVLKQEKNNYNAWVFIGVAAAELEQPDQAQSAYKKAAELEPDQLLAWQGLANLYEKYNHINAKDDLPGVYQKLLDLYESVDKQKWCDVCKKLVDLYYQEKKHLEVARTWHKLIKTRQEQGAENEELHQLWRKLTQFLAESTEDQNNETQQLLFTAFENALGLSDKIPSEDHQVLYRHFIQSLSKFPHESARLKKACEGMINIYPTVQYPLEVLCLHLIESGNLTDEGQQYCCRLVEMDSKSGPGLIGLGIKALQDKKYEDAVRNLTEGLKESPVCTSGWYHLAEAQVKMHRPKEAVLSCSQALKIVDNLGASGNSLYQRNLCLHLKAEALIKLSDYDSSEEAIRTLDQISDADNIPGLLVLKSLAYRNKGSFDEAAKIMEDLLSSYPDLAEVHALEALIHFTKKDYLQAEKCFQRALEKDTEVAEYHYQLGLTYWFMGEETRKDKTKALTHFLKAARLDTYMGKVFCYLGHYYRDVVGDKNRARGCYRKAFELDDTDAESGAAAVDLSVELEDMEMALAILTTVTQKASAGTAKWAWLRRGLYYLKAGQHSQAVADLQAALRADPKDFNCWESLGEAYLSRGGYTTALKSFTKASELNPESIYSVFKVAAIQQILGKYKEAVAQYQMIIKKKEDYVPALKGLGECHLMMAKAALVDYLDGKAVDYIEKALEYFTCALQHRADVSCLWKLAGDACTCLYAVAPSKVNVHVLGVLLGQKEGKQVLKKNELLHLGGRCYGRALKLMSTSNTWCDLGINYYRQAQHLAETGSNMNDLKELLEKSLHCLKKAVRLDSNNHLYWNALGVVACYSGIGNYALAQHCFIKSIQSEQINAVAWTNLGVLYLTNENIEQAHEAFKMAQSLDPSYLMCWIGQALIAEAVGSYDTMDLFRHTTELNMHTEGALGYAYWVCTTLQDKSNRETELYQYNILQMNAIPAAQVILNKYVERIQNYAPAFTMLGYLNEHLQLKKEAANAYQRAILLLQTAEDQDTYNVAIRNYGRLLCSTGEYDKAIQAFKSTPLEVLEDIIGFALALFMKGLYKESSKAYERALSIVESEQDKAHILTALAITEYKQGKTDVAKTLLFKCSILKEPTTESLQALCALGLAMQDATLSKAALNELLKHIKHKDSNYQRCLLTSAIYALQGRSVAVQKQISKAVHSNPGDPALWSLLSRVVAQYAQRNAKGGVVAGNVAHILDSNHGKKALLYTAVNQLAMGSSSAEDEKNTALKTIQKAALLSPGDPAIWAGLMAACHADDKLALVNNTQPKRIDLYLALLSAVSASIKDEKFFENYNQSLEKWSLSQAVTGLIDTGRISEAETLCTKNLKSNPDQPAVILLLRQVQCKPLLESQKPLPDAVLEELQKTVMSNSTSVPAWQWLAHVYQSQGMMRAAEMCYRKSLQLASQRGSWSGKLSSLLRLALLALKVCMANISNDHWPSLVQEATTEALKLCFCPLAVLLQALLQFKRKMGARETRRLLERVVYQPGYPKSIASTARWYLLRHLYAKDDYELIDVLVNNAKTHGDTRALELNQRLSSQ

SEQ ID NO: 17032 - protein, 195 aa, Mus musculus
MAPPVRYCIPGERLCNLEEGSPGSGTYTRHGYIFSSLAGCLMKTSENGAVPVVSVMRETESQLLPDVGAVVTCKVSSINSRFAKVHILYVGSTPLKNAFRGTIRKEDIRATEKDKVEIYKSFRPGDIVLAKVISLGDAQSNYLLTTAENELGVVVAHSESGVQMVPISWCEMQCPKTHTKEFRKVARVQPEFLQT

SEQ ID NO: 17033 - protein, 154 aa, Mus musculus
MAPPVRYCIPGERLCNLEEGSPGSGTYTRHGYIFSSLAGCLMKTSENGAVPVVSVMRETESQLLPDVGAVVTCKVEIYKSFRPGDIVLAKVISLGDAQSNYLLTTAENELGVVVAHSESGVQMVPISWCEMQCPKTHTKEFRKVARVQPEFLQT

SEQ ID NO: 17034 - protein, 199 aa, Anopheles gambiae str. PEST
ESEDQTLICVPGQILCAASEFTVAGQGTYEKLGYIHATLAGIVQMKKREKNTFISVVSFGGGATVPVIGDIVTARITAVQNRMARCRILCIGKTALNRTLRGIIRKEDVRATEVDRVEMHKCFRPGDIILARVLHQIELNVFHLSTADNELGVVVAISPSSRATWGADPIPMVPICWTEVQCPVTLVKEPRKVAKVVPE

SEQ ID NO: 17035 - protein, 190 aa, Arabidopsis thaliana
MTTGLVTPGDVIGKATEFKAGKGAYVNDATIYASLTGTCRIVSPLPESIDQRAIVEVTGHKAHGPIPETGSVVIARVTKVMTKMAAVDILCVGSKAVRENFAGVIRQQDVRATEIDKVDMHQSFHAGDIVRAMLSLGDARAYYLSTAKNELGVVSAESAAGETMVPISWTEMQCPLSGQTEQRKVAKVGN

SEQ ID NO: 17036 - protein, 195 aa, Glycine max
MEEEKEAVMVTPGEVLGRTSDVKAGRGAYVHNNTVYASLTGFRHTVPPAPDSSDLRPTVEVTGHKAHGPVPQPGSVVIARVTKVMARSASADIMCVGPKSVREKFTGIIRQQDVRATEIDKVDMHLSFHPGDIVRALVLSLGDARAYFLSTAKNELGVVSAESIAGATMVPVSWTEMQCPLTGQIEQRKVAKAAS

SEQ ID NO: 17037 - protein, 201 aa, Oryza sativa
  unsure (1)..(201): unsure at all Xaa locations
MAATAMDHDGGEVVTPGELLGXXSSLLAGLGAYADGRCVRASITGHRRLVPPPPGSTDQRSTVEVVGHKAHGAVPQPGSVVIARVTKVMARMASADIMCVDSKAVKEKFTGMIRQQDVRATEIDKVDMFQSYRPGDIVRALVLSLGDARAYYLSTAQNELGVVSAQSITGGTLVPISWTEMQCELTGQIEQRKVAKVEXIW

SEQ ID NO: 17038 - protein, 220 aa, Triticum aestivum
  unsure (1)..(220): unsure at all Xaa locations
MAATAMEHDGGAEVVVTPGELLGPSSSLEAGRGAYADGRSVRASVTGRRRFVAPAPGSSDQRSTVEVVGHKAHGAVPQPGSVVIARVTKVMARMASADIMCVDSKAVKEKFTGMIRQQDVRATEIDKVDMYQXSYRPGDIVRALVLSLGDARAYYLSTAKNELGXVVSAQSIPGGTLVPTSWTEMQCELTGQIEQRKVAKVEXILFTLPDRKVFGGVRYV

SEQ ID NO: 17039 - protein, 209 aa, Zea mays
  unsure (1)..(209): unsure at all Xaa locations
MAATAMDHDGGDDVVTPGELLGNSLTLAAGRGAYADGRSVRASVTGRRRIVPPAPASDDQRSTVEVVGHKAHGAVPQPGSVVIARVTKVMARMASADIMCVDSKAIREKFTGMIRQQDVRATEIDKVDMYQSYRPGDIVKAMVLSLGDARAYYLSTAKNELGVVSAQSIAGGTLVPISWTEMQCDLTGQIEQRKVAKVEXMCCGPPDKW

SEQ ID NO: 17040 - protein, 239 aa, Zea mays
  unsure (1)..(239): unsure at all Xaa locations
MAATAMDHDGGDDVVTPGELLGNSLTLAAGRGAYADGRSVRASVTGRRRIVPPAPASDDQRSTVEVVGHKAHGAVPQPGSVVIARVTKVMARMASADIMCVDSKAIREKFTGMIRQQDVRATEIDKVDMYQSYRPGDIVKAMVLSLGDARAYYLSTAKNELGVVSAQSIAGGTLVPISWTEMQCDLTGQIEQRKVAKVEXMCCGPPDKWWWRYTNCGPVTPGPWADYPILRRPTSLQLH

SEQ ID NO: 17041 - protein, 207 aa, Zea mays
  unsure (1)..(207): unsure at all Xaa locations
MAATAMDHDGGDDVVTPGELLGNSLTLAAGRGAYADGRSVRASVTGRRRIVPPAPGSDDQRSTVEVVGHKAHGAVPQPGSVVIARVTKVMARMASADIMCVDSKAIREKFTGMIRQQDVRATEIDKVDMYQSYRPGDIVKAMVVSLIERAYYLSTAKNELGVVSAQSIAGSTLVPISWTEMQCDLTGQIEQRKVAKVEXMCCGPPDK

SEQ ID NO: 17042 - protein, 180 aa, Schizosaccharomyces pombe
NLVLPGQVVARGAPNGEGTVKRGDYIISTRTGIFDPEKNSVTYPRKVEETAVLPNVGSIVLARVSRINARQATVNISVVDDVCTKDEFQGVIHVQDIRATEKNKVKVQNSFRPGDIVRALVISLGDGSSYFLTTARNDLGVIFAQSSETGEQMFPVDYQHMQTKSGYTEMRKCAKPILDE

SEQ ID NO: 17043 - protein, 181 aa, Schizosaccharomyces pombe
MNLVLPGQVVARGAPNGEGTVKRGDYIISTRTGIFDPEKNSVTYPRKVEETAVLPNVGSIVLARVSRINARQATVNISVVDDVCTKDEFQGVIHVQDIRATEKNKVKVQNSFRPGDIVRALVISLGDGSSYFLTTARNDLGVIFAQSSETGEQMFPVDYQHMQTKSGYTEMRKCAKPILDE

SEQ ID NO: 17044 - protein, 214 aa, Neurospora crassa
MASTSSSPSMAIPGQFLGPVSKFQPGPGTHIHESNLYSSLLGVVNITQPAKAPGPAKRLNKIINTQTTPAELPTISVLRSAGSSDKREVLPEVGNIVLCRVIRIMPRQAVVAILICGDTVLEAEWQGLIRVQDVRATEKDRVKIYDSFRPGDIVRAEVISLGDQASYYLSTARNELGVIMATSEAGNTMYPVNWKEYKDPETGLSEPRKVAKPY

SEQ ID NO: 17045 - protein, 204 aa, Drosophila melanogaster
MSEQQDETVVCLPGERLCRTEDSIVLGIGTYEQNGYIYASKSGIVNIEDSGDKCQVVSVHKPGFHLTIPATGDVVTARVLVTTPKFAKCAIFCVRNVLLESSYRGLLRKEDVRETEKDRVDIYKSFRPGDVILARVINQLEQSFLLTTAENELGVVIAYASDYRKTRVPMVPVGWSEMQCPQTTIKEPRKVAKVLPESSINAVK

SEQ ID NO: 17046 - protein, 195 aa, Homo sapiens
MAPPVRYCIPGERLCNLEEGSPGSGTYTRHGYIFSSLAGCLMKSSENGALPVVSVVRETESQLLPDVGAIVTCKVSSINSRFAKVHILYVGSMPLKNSFRGTIRKEDVRATEKDKVEIYKSFRPGDIVLAKVISLGDAQSNYLLTTAENELGVVVAHSESGIQMVPISWCEMQCPKTHTKEFRKVARVQPEFLQT

SEQ ID NO: 17047 - protein, 245 aa, Mus musculus
MAGLELLSDQGYRIDGRRAGELRKIQARMGVFAQADGSAYIEQGNTKALAVVYGPHEIRGSRSRALPDRALVNCQYSSATFSTGERKRRPHGDRKSCEMGLQLRQTFEAAILTQLHPRSQIDIYVQVLQADGGTYAACVNAATLAVMDAGIPMRDFVCACSAGFVDGTALADLSHVEEAAGGPQLALALLPASGQIALLEMDSRLHEDHLEQVLEAAAQAARGVHTLLDLVVRQHVQEASVSLGD

SEQ ID NO: 17048 - protein, 147 aa, Rattus norvegicus
MGLQLRQTFEAAILTQLHPRSQIDIYVQVLQADGGTYAACVNAATLAVMDAGIPMRDFVCACSAGFVDGTALADLSHVEEAAGGPQLALALLPASGQIALLEMDSRLHEDHLEQVLEAAAQAARDVHTLLDRVVRQHVQEASILLGD

SEQ ID NO: 17049 - protein, 247 aa, Sulfolobus tokodaii
MRQKMIQLQKPRLILDNGLRLDGRKPDEMRPIKIELGVLKNADGSAIFEMGNTKVIAAVYGPKEMHPRHLALPDRAVLRVRYHMTPFSTDERKNPAPSRREIELSKVIREALESTILVELFPRTVIDVFMEVLQADAGTRLVSLMAASMALADAGIPMRDLIAGVAVGKADGVLVLDLNEPEDMWGEADMPVAMMPSLKQVALLQLNGNMTPQEFRQALEMAQKGIETIYNLEKEAIRSKYAELKEE

SEQ ID NO: 17050 - protein, 232 aa, Anopheles gambiae str. PEST
MELLSDQGLRLDGRRANELRQIHCKMGVFSQPDGSAYVEQGNTKVLAAVYGPHQASSKRSNFDEAIVNCQYSMATFSTGERKKRPRGDRKSQEMTIHLKQALSASIKMELYPRSQIDVYIEVLQADGGNYCASVNAATLALIDAGICLKEYVCACTASLANGNVPLMDVSHLEETSGGPTLTVASLPSSGKIAFMEMSQRFHLDHLPKVLETALKGCREVQNVIDQTVREHV

SEQ ID NO: 17051 - protein, 245 aa, Anopheles gambiae str. PEST
ELLSDQGLRLDGRRANELRQIHCKMGVFSQPDGSAYVEQGNTKVLAAVYGPHQASSKRSNFDEAIVNCQYSMATFSTGERKKRPRGDRKSQEMTIHLKQALSASIKMELYPRSQIDVYIEVLQADGGNYCASVNAATLALIDAGICLKEYVCACTASLANGNVPLMDVSHLEETSGGPTLTVASLPSSGKIAFMEMSQRFHLDHLPKVLETALKGCREVQNVIDQTVREHVTYLGQAGGWGNVHK

SEQ ID NO: 17052 - protein, 265 aa, Clostridium thermocellum ATCC 27405
MNMLRIDGRGQSDLRPVKITRNYIKHAEGSVLIEMGDTKVICTATVDDKVPPFKKNTGEGWVTAEYSMLPRATAARNPRDISKLKLSGRSQEIQRLIGRALRSVVNLNLLGEREIIIDCDVIQADGGTRTASITGGFVALVDACKKLVDDGIIEKIPVTDFLAAVSVGIVDGEEMLDLCYMEDSNAATDMNVVMTSKGEFIEIQATGEQLPFKKEQFDKLLSFAEKGISQLIEIQKDALGQVASEVGRVTKDEKICNCNEEQGQA

SEQ ID NO: 17053 - protein, 246 aa, Plasmodium falciparum 3D7
MSIVQYINDEGYRIDGRKNDECRLIKISLGNGNELIDVDGFSFFEIGNTKLFAYIQGPNEYRRPDEKCLVKCNVFLSPFNILEKKRKKSKDNVTREISSYIRNICNHIILLDLYKNSEINIFLYIIERDGGLKAAAVNTCILALIDAGIAIKYFISASSVLYLQNNIIVDGNQFEVNSGSPELTLAIDMSSNNIVLLEFDAEVPIDIFQSMLKTCAQACIHVGNIMKLSIKENAIKLLSLNSILNT

SEQ ID NO: 17054 - protein, 241 aa, Arabidopsis thaliana
MEYVNPEGLRLDGRRFNEMRQIVAEVGVVSKADGSAVFEMGNTKVIAAVYGPREIQNKSQQKKNDHAVVLCEYSMAQFSTGDRRRQKFDRRSTELSLVIRQTMEACILTELMPHSQIDIFLQVLQADGGTRSACINAATLALADAGIPMRDLAVSCSAGYLNSTPLLDLNYVEDSAGGADVTVGILPKLDKVSLLQMDAKLPMETFETVFALASEGCKAIAERIREVLQENTKQLEYRRAA

SEQ ID NO: 17055 - protein, 242 aa, Glycine max
  unsure (1)..(242): unsure at all Xaa locations
MEYVSPEGLRLDGRRPMEMRQIRAEIGAVSKADGSAIFEMGNTKVIAAVYGPREVQNRNQQXXSSHALVRCEYSMANFSTGDRMRKPKGDRRSTEISLVIRQTMEACILTHLLPRSQIDIYVQVLQADGGTRSACINAATLALADAGIPMRDLVTSCSAGYLNSTPLLDLNYVEDSAGGPDVTLGILPKLDKVTLLQMDSKLPIDILENVMQLAIEGCKAIANYIREVLLENTKQLEYRRGV

SEQ ID NO: 17056 - protein, 140 aa, Glycine max
  unsure (1)..(140): unsure at all Xaa locations
IALTLRFAFQSHLHTYLYPHSTISIHVSVLSSNGSVLAAAVNACTLALVDAGIPMPGLLCGCTAGMSGSDPLLDVSLPEEQELPFLTVATTSDDMKVSMLTMDSKVHYSYIETKLPVGVDGCKQVHHILDSVIKGSNRRX

SEQ ID NO: 17057 - protein, 117 aa, Glycine max
MEYVNPLTGFRVDGRRPNEMRQLKGEVGVVSRADGSALFEMGNTRVIAAVYGPREIQNRSQQQNSKEALVRCEYRMAEFSTGDRRRKPKGDRRSTEISLVIRQTMEASILTHLMPHS

SEQ ID NO: 17058 - protein, 96 aa, Glycine max
  unsure (1)..(96): unsure at all Xaa locations
MEYVSPEGLRLDGRRPMEMRQIRAEIGAVSKADGSAIFEMGNTKVIAAVYGPREVQNRSQQXXSSHALVRCEYCMANFSTGDRMRKSYDWRSTENX

SEQ ID NO: 17059 - protein, 256 aa, Oryza sativa
  unsure (1)..(256): unsure at all Xaa locations
MEYVNPLTGFRVDGRRPNEMRQLKGEVGVVPRVRGSALFEMGNTRVIAAVYGPREVQNKGQQVNSKDALVRCEYRMADFSTGDRRRKPKGDRRSTEISLVIRQTMEASILTHLMPRSQIDIFVQVLQADGGTRAACINAATLALADAGIPMRDIVTSCSAGYLCSTPLLDLNYIEDSAGGPDVTVGFLTKMDKVTLLQMDAKLPMDTFETVMDLAIEGCKAIANYIREVLLENTRRLECQRGXLTLVGDALQLSHL

SEQ ID NO: 17060 - protein, 252 aa, Triticum aestivum
  unsure (1)..(252): unsure at all Xaa locations
MEYVNPLTGFRVDGRRPNEMRQLKGEVGVVSRADGSALFEMGNTRVIAAVYGPREIQNRSQQQNSKEALVRCEYRMAEFSTGDRRRKPKGDRRSTEISLVIRQTMEASILTHLMPHSQIDIFVQVLQADGGTRSACINAXATLALADAGIPMRDIVTSCSAGYLCSTPLLDLNYIEDSAGGADVTVGILAKMDKVTLLQMDAKLPMDTFETVMDLASEGCKAIATYIREVLLENTKQLECQRGXSNLAGGGH

SEQ ID NO: 17061 - protein, 188 aa, Triticum aestivum
  unsure (1)..(188): unsure at all Xaa locations
TNNASHTSTYSLALLRVDGRRWNELRRLHAQIRTQDAADGSSYLEMGHTKVMCVVTGPSEQQQKRGGQQAPRDMAAINVNVVVAGFSSVDRKKRGRNDKRIQEIETTIENALASNLHTHLFPHSSISISLHVLSQDGSLLAALLNATTLALIDAGFPMTDYIAACTAGSTSTYAAGDDSADPLLDLNX

SEQ ID NO: 17062 - protein, 244 aa, Zea mays
  unsure (1)..(244): unsure at all Xaa locations
MEYVNPLTGFRVDGRRPNEMRQLKGEVGVVARADGSALFEMGNTRVIAAVYGPREVQNKGQQVNSKEALVRCEYRMAEFSTGDRRRKPKGDRRSTEISLVIRQTMEASILTHLMPHSQIDIYVQVLQADGGTRSACINAATLALADAGIPMRDIATSCSAGYLCSTPLLDLNYLEDSAGGSDVTVGILAKMDKVTLLQMDAKLPIDTFENVMGLAIEGCKAIATYIREVLLENTKKLECQRGXP

SEQ ID NO: 17063 - protein, 244 aa, Zea mays; identical to SEQ ID NO: 17062
  unsure (1)..(244): unsure at all Xaa locations

SEQ ID NO: 17064 - protein, 244 aa, Zea mays; identical to SEQ ID NO: 17062
  unsure (1)..(244): unsure at all Xaa locations

SEQ ID NO: 17065 - protein, 244 aa, Zea mays
  unsure (1)..(244): unsure at all Xaa locations
MEYVNPLTGFRVDGRRPNEMRQLKGEVGVVARADGSALFEMGNTRVIAAVYGPREVQSKGQQVNSKEALVRCEYRMAEFSTGDRRRKPKGDRRSTEISLVIRQTMEASILTHLMPHSQIDIYVQVLQADGGTRSACINAATLALADAGIPTRDIATSCSAGYLCSTPLLDLNYLEDSAGGSDVTVGILAKMDKVTLLQMDAKLPIDTFENVMGLAIEGCKAIATYIREVLLENTKKLECQRGXP

SEQ ID NO: 17066 - protein, 240 aa, Zea mays
MMEGGSRADGRNPNQLRPFTCTGNPLHRAHGSARWAQGDTVVLAAVYGPKPGTRKGENPEKASIEVVWKPKTGQIGRQEREYEMTLKRTLQSICLLTVHPNTTTSVVLQVVGDDGSLMSCAINASCAALAFAGIPMKHLAVAISCGVMDNGVVILDTSRAEEQQARSFAHLVFPNSRKSVESKDPTQRDEESERGLITCITHGAMSEDDYFNCIERGVMASSRISDFMRKTLQKEASRDA

SEQ ID NO: 17067 - protein, 240 aa, Zea mays
MMEGGSRADGRNPNQLRPFTCTGNPLHRAHGSARWAQGDTVVLAAVYGPKPGTRKGENPEKASIEVVWKPKTGQIGRQEREYEMTLKRTLQSICLLTVHPNTTTSVVLQVVGDDGSLMPCAINASCAALAFAGIPMKHLAVAISCGVMDNGVVILDTSRAEEQQARSFAHLVFPNSRKSVESKDPTQRDEESERGLITCITHGAMSEDDYFNCIERGVMASSRISDFMRKTLQKEASRDA

SEQ ID NO: 17068 - protein, 240 aa, Zea mays
MMEGGSRADGRNPNQLRPFTCTGNPLHRAHGSARWAQGDTVVLAAVYGPKPGTRKGENPEKASIEVVWKPKTGQIGRQEREYEMTLKRTLQSICLLTVHPNTTTSVVLQVVGDDGSLMSCAINASCAALAFAGIPMKHLAVAISCGVMDNGVVILDTSRAEEQQARSFAHLVFPNSRKSVESKDPTQRDEESERGLITCITHGAMSEDDYFNCIERGVMASSRISDFMRKTLQKEVSRDA

SEQ ID NO: 17069 - protein, 240 aa, Zea mays
MMEGGSRADGRNPNQLRPFTCTGNPLHRAHGSARWAQGDTVVLAAVYGPKPGTRKGENPEKASIEVVWKPKTGQIGRQEREYEMTLKRTLQSICLLTVHPNTTTSVVLQVVGDDGSLMSCAINASCAALAFAGIPMKHLAVAISCGVMDNGVVILDTSRAEEQQARSFAHLVFPNSRKSVESKDTTQRDEESERGLITCITHGAMSEDDYFNCIERGVMASSRISDFMRKTLQKEASRDA

SEQ ID NO: 17070 - protein, 239 aa, Zea mays
MMEGGSRADGRNPNQLRPFTCTGNPLHRAHGSARWAQGDTVVLAAVYGPKSGTRKGENPEKASIEVVWKPKTGQIGRQEREYEMTLKRTLQSICLLTVHPNTTSVVLQVVGDDGSLMSCAINASCAALAFAGIPMKHLAVAISCGVMDNGVVILDTSRAEEQQARSFAHLVFPNSRKSVESKDTTQRDEESERGLITCITHGAMSEDDYFNCIERGVMASSRISDFMRKTLQKEASRDA

SEQ ID NO: 17071 - protein, 239 aa, Zea mays
  unsure (1)..(239): unsure at all Xaa locations
MGRGSRADGRNPNQLRPFTCTGNPLHRAHGSARWAQGDTVVLAAVYGPKSGTRKGENPDNASIEVVWKPKTGQIGRQEREYEMTLKRTLQSICLLTVHPNTTTSVVLQVFFDSAXLSSCAINASCAALAFAGIPMKHLAVAISCGVMDNGVVILDTSRAEEQQARSFAHLVFPNSRKSVESKDTTQRDEESERGLITCITHGAMSEDDYFNCIERGVMASSRISDFMRKTLQKEASRDA

SEQ ID NO: 17072 - protein, 246 aa, Aeropyrum pernix
MAGPAQAGVELIRDGRRHDGRLPEDLRPVRMQVGILHNADGSALVEFGRTRVLAAVYGPREPHQRFYVLPDRAALRVRYHMAPFSTDERKSPAPSRREIELSKVVREALEPVVLAEEFPRTVIDVFLEVLQADGGTRTAAVTAASLALADAGIPMRALVGGVAVGKIQGVLVVDVDELEDMYGEADMPVAAAPDIGEITLLQLNGVLTGEEFRTALAMALRAIDRVVEMEKEAIRKSYLEVGGGQE

SEQ ID NO: 17073 - protein, 252 aa, Trypanosoma brucei
MPVIKEYINPAGLRLDGRRQNEPRRLALEFGKISGCDGCCTVVSGLSHVCATVYGPREVSNRLDGKYNEVTITCDVVVAAFAGERRREQQRYSRLSEDISASVLDVARSVVLLSQYPNSQIHICIEVLKQDGSDKAACINAACLALIDASIAMRDVVYTQTVGLIEGFDVVDLTTEEIHSQCPSICITVQGHDPTNIVWMESNSRLAPEVITRLVKVAQKASTDVFETALRGPLEEHAATVLRLQANLGNIE

SEQ ID NO: 17074 - protein, 209 aa, Encephalitozoon cuniculi
MLVSEEGFREDGRRPNELRRIEATKRRIGEKGRVDMRQGNTQVSVICSGPREIGKLSVGVEFYAVSRQEPVSEKRASEYEGLLLDIFGDVLLPEASVDIQVIVREDGGSLLSTMINCTTLCLSYFGMPLVDMCYSSAVAEGCVDLASTEESQRVPVVTVAYLMNRKSILYLSLSGRVACSRLQASVLDAIGACNAIGECLGNFFSPSLE

SEQ ID NO: 17075 - protein, 240 aa, Caenorhabditis elegans
MNIISEHGFRIDGRRPAQIRNINTRLGLNRNAEGSCYLEHGNTKVLCAVYGPYEGKSSKRIEDKCAIVCQYSATKFSGLERKNRTRGDRKSTEISRLLEKAFESVILTEAFPRSQLDIFCEVIQGDGSNLAACVNATSLALADAGIPMKGIASAATCGVVDGKPIVDLTSREETDLLPRVTLATICGRDEVILVELQNRLHIDHLSTVMDAAKATCADVYECLAVVAQQHLKACAPILGN

SEQ ID NO: 17076 - protein, 241 aa, Caenorhabditis elegans
MPTTRSNLSIPLTHLARIDDDRMETDSEEHKRANTAFRPLCVKCGVFGAQDGSGYAEFGNTRVLAQITGPDGDGKWEEDRAKITIELKGIEDSVKVAEYRAQLASAVSAVIFASKYPGKVIEIEITVLSDDGGVLSTALSAVTLAISHSGIENMGLMASVHVAMNSDGECLTDPSTSESEGAIGGVTFAFVPNLGQTTCVDIYGRIPLKSTSSLLEFAKQRACALVPTIHKAIVNSVRERK

SEQ ID NO: 17077 - protein, 246 aa, Drosophila melanogaster
MSGKYDLLSEQGLRLDGRRPHELRRIKCKLGVFEQPDGSAYMEQGNTKVLAAVYGPHQAKGNQTESVINCQYSQATFSTAERKNRPRGDRKSLEFKLYLQQALSAAIKSELYPRSQIDIYVEVLQDDGANYAVALNAATLALIDAGICLNEFIVACTASLSKSNIPLTDISQFEEVSGGPKLTVAALPTAEKIAFLEMSERFHIDHLETVIETAMAGCREIRDILEAAVKEHLLHMGSASDFAKVG

SEQ ID NO: 17078 - protein, 246 aa, Drosophila melanogaster
MSGKYDLLSEQGLRLDGRRPHELRRIKCKLGVFEQPDGSAYMEQGNTKVLAAVYGPHQAKGNQTESVINCQYSQATFSTAERKNRPRGDRKSLEFKLYLQQALSAAIKSELYPRSQIDIYVEVLQDDGANYAVALNAATLALIDAGICLNEFIVACTASLSKSNIPLTDISQFEEVSGGPKLTVAALPTAEKIAFLEMSERFHIDHLGTVIETAMAGCREIRDILEAAVKEHLLHMGSASDFAKVG

SEQ ID NO: 17079 - protein, 326 aa, Drosophila melanogaster
MLAVNQTKNTLLDGASIEEEPYTTPQESEDFFESLDKPSREPTQLAPRNTFIRAGVLTTVRGSAYMEYGNTKVLAIVAPPKELIRASARRMNMGVLNCYVNFAAFSTGDLDSVPERERHLSSMLTKAMEPVVCRTEFLNFQLDIRVLILDDDGCLLSTAINCCGVALVECGISTYDLITASTACIYRDHVFLNPSAKVEELLWKHRNSSTDSTTSPSSAQEHGLIITASMDTFEQIAQCQQCGYLSPATYVKLLDYTLAINKSLRELVKGVLTKRVKEQHELDLREKAETALEDQRLEEIIEKLKKQGPEEFIQSNIREDPYVKRQ

SEQ ID NO: 17080 - protein, 218 aa, Plasmodium yoelii yoelii
MGYQNISNDADGFAFYEIGNTKILSYIQGPTELKKTDDKCSIKCDVFLSPFNVYDKRKKKTKDNITNEISAYIRNICENIILLDLYKNSEINIFLYIIERDGGIKHAAINTCILALIDAGIAIKYFISACSVLYLQNKIIVDGNQLEINSGSPELTMVIELNTHKIILLEFDAEIPIDIFESMVQTCIDSCINIGRVMKLTVKENAIGLLCLNNLLTN

SEQ ID NO: 17081 - protein, 245 aa, Homo sapiens
MAGLELLSDQGYRVDGRRAGELRKIQARMGVFAQADGSAYIEQGNTKALAVVYGPHEIRGSRARALPDRALVNCQYSSATFSTGERKRRPHGDRKSCEMGLQLRQTFEAAILTQLHPRSQIDIYVQVLQADGGTYAACVNAATLAVLDAGIPMRDFVCACSAGFVDGTALADLSHVEEAAGGPQLALALLPASGQIALLEMDARLHEDHLERVLEAAAQAARDVHTLLDRVVRQHVREASILLGD

SEQ ID NO: 17082 - protein, 426 aa, Mortierella chlamydospora
VVVIGHVDSGKSTTTGHLIYKCGGIDKRTIEKFEKEAAELGKGSFKYAWVLDKLKAERERGITIDIALWKFETPKYYVTVIDAPGHRDFIKNMITGTSQADCAILIIAGGTGEFEAGISKDGQTREHALLAFTLGVKQLIVAVNKMDTTKWSQDRFEEIVKEVSTFVKKVGYNPKAVAFVPISGWHGDNMLEESTNMPWFKGWTKETKAGSQKGKTLLEAIDAIEPPSRPTEKPLRLPLQDVYKIGGIGTVPVGRVETGIIKAGMVVTFAPSNVTTEVKSVEMHHEVLTEGIPGDNVGFNVKNVSVKDIRRGNVCSDSKNDPAKEAASFNAQVIVLNHPGQISNGYAPVLDCHTAHIACKFAEILEKIDRRTGKAMEEFPKFIKSGDAAIVKFIPSKPLCVESFQEYPPLGRFAVRDMRQTVAVGV

SEQ ID NO: 17083 - protein, 426 aa, Mortierella multidivaricata
VVVIGHVDSGKSTTTGHLIYKCGGIDKRTIEKFEKEAAELGKGSFKYAWVLDKLKAERERGITIDIALWKFETPKYYVTVIDAPGHRDFIKNMITGTSQADCAVLIIAGGTGEFEAGISKDGQTREHALLAFTLGVKQLIVAVNKMDTTKWSQDRFEEIVKEVSTFVKKVGYNPKTVAFVPISGWHGDNMLEESTNMPWFKGWTKEIKSGTQKGKTLLEAIDAIEPPSRPTEKPLRLPLQDVYKIGGIGTVPVGRVETGIIKAGMVVTFAPSNVTTEVKSVEMHHEVLTEGIPGDNVGFNVKNVSVKDIRRGNVCSDSKNDPAKEAASFNAQVIVLNHPGQISNGYAPVLDCHTAHIACKFAEILEKIDRRTGKAMEEFPKFIKSGDAAIVKMVPSKPLCVESFQEYPPLGRFAVRDMRQTVAVGV

SEQ ID NO: 17084 - protein, 424 aa, Dissophora decumbens
VVVIGHVDSGKSTTTGHMIYKCGGIDKRTIEKFEKEAAELGKGSFKYAWVLDKLKAERERGITIDIALWKFETPKFYVTVIDAPGHRDFIKNMITGTSQADCAILIIAGGTGEFEAGISKDGQTREHALLAFTLGVKQLIVAVNKMDTTKWSQDRFEEIIKEVSTFVKKVGYNPKSVPFVPISGWHGDNMLEESVNMPWFKGWTKETKTGSFKGKTLLEAIDAIEPPSRPTDKPLRLPLQDVYKIGGIGTVPVGRVETGVIKAGMVVTFAPSNVTTEVKSVEMHHEVLTEGIPGDNVGFNVKNVSVKDIRRGNVCSDSKNDPAKEAASFNAQVIVLNHPGQISNGYAPVLDCHTAHIACKFGEILEKIDRRTGKAMEEFPKFIKSGDAAIVKMIPSKPLCVESFQEYPPLGRFAVRDMRQTVAV

SEQ ID NO: 17085 - protein, 426 aa, Gongronella butleri
VVVIGHVDSGKSTTTGHLIYKCGGIDKRTIEKFEKEAAELGKGSFKYAWVLDKLKAERERGITIDIALWKFETPKYHVTVIDAPGHRDFIKNMITGTSQADCGILIIAAGTGEFEAGISKDGQTREHALLAFTLGVRQLIVAINKMDTTKWSEARFNEIVKEVSSFIKKIGFNPKSVPFVPISGWHGDNMLEESVNMPWYKGWNKETKAGAKSGKTLLDAIDAIDPPTRPSDKPLRLPLQDVYKIGGIGTVPVGRVETGVIKAGMVVTFAPANVTTEVKSVEMHHEQLVEGLPGDNVGFNVKNVSVKDIRRGNVCSDSKNDPAKEAGSFTAQVIVLNHPGQIGAGYAPVLDCHTAHIACKFAELLEKIDRRSGKKLEDAPKFVKSGDSAIVKMVPSRPMCVEAYTDYPPLGRFAVRDMRQTVAVDV

SEQ ID NO: 17086 - protein, 435 aa, Blastocystis hominis
MGKEKPHINLVVIGHVDSGKSTTTGHLIYACGGIDKRTIERFEEGGQRIGKGSFKYAWVLDKMKAERERGITIDISLWKFQTEKYFFTIIDAPGHRDFIKNMITGTSQADVAILIIAAGTGEFEAGYGKNGQTREHALLANTLGVKQMICCVNKMDDKSVNYSEARYKEIKAEMTSFLTKVGYQKVEERIPFIPISGFNGDNMLERSANMPWYKGPTLIEALDNIHPPKRPVDKPLRLPLQDVYKIGGIGTVPVGRVETGILKPGMTVTFAPVGVTTEVKSVEMHHESIPQALPGDNVGFNVKNVSVKDIHRGNVCGDAKNDPPCRVESFTAQVIVMNHPSGIRPGYCPVMDCHTAHIACKFEKIMSEMDKRTGKVLRENPDIVKNGKSMMAELVPSKPLCVESFQDYPPLGRFAVRDMRQTVAVGIIKSTVRAK

SEQ ID NO: 17087 - protein, 447 aa, Saccharum hybrid cultivar CP65-357
MGKEKTHINIVVIGHVDSGKSTTTGHLIYKLGGIDKRVIERFEKEAAEMNKRSFKYAWVLDKLKAERERGITIDIALWKFETTKYYCTVIDAPGHRDFIKNMITGTSQADCAVLIIDFTTGGFEAGIFKDGQTREHALLAFTLGVKQMICCCNKMDATTPKYSKARYDEIVKEVSSYLKKVGYNPDKIHFVPISGFEGDNMIERSTNLDWYKGPTLLEALDLINEPKRPSDKPLRLPLQDVYKIGGIGTVPVGRVETGVIKPGMVVTFGPSGLTTEVKSVEMHHEALQEALPGDNVGFNVKNVAVKDLKRGYVASNSKDDPAKEAASFTSQVIIMNHPGQIGNGYAPVLDCHTSHIAVKFAELVTKIDRRSGKELEKEPKFLKNGDAGMVKMVPTKPMVVETFSEYPPLGRFAVRDMRQTVAVGVIKSVEKKDPTGAKVTKAAAKKK

SEQ ID NO: 17088 - protein, 441 aa, Saccharum hybrid cultivar CP72-2086
HINIVVIGHVDSGKSTTTGHLIYKLGGIDKRVIERFEKEAAEMNKRSFKYAWVLDKLKAERERGITIDIALWKFETTKYYCTVIDAPGHRDFIKNMITGTSQADCAVLIIDSTTGGFEAGISKDGQTREHALLAFTLGVKQMICCCNKMDATTPKYSKARYDEIVKEVSSYLKKVGYNPDKIHFVPISGFEGDNMIERSTNLDWYKGPTLLEALDLINEPKRPSDKPLRLPLQDVYKIGGIGTVPVGRVETGVIKPGMVVTFGPSGLTTEVKSVEMHHEALQEALPGDNVGFNVKNVAVKDLKRGYVASNSKDDPAKEAASFTSQVIIMNHPGQIGNGYAPVLDCHTSHIAVKFAELVTKIDRRSGKELEKEPKFLKNGDAGMVKMVPTKPMVVETFSEYPPLGRFAVRDMRQTVAVGVIKSVEKKDPTGAKVTKAAAKKK

SEQ ID NO: 17089 - protein, 447 aa, Salsola komarovii
MGKEKIHISLVVIGHVDSGKSTTTGHLIYKLGGIDKRVIERFEKEAAEMNKRSFKYAWVLDKLKAERERGITIDIALWKFETNKYYCTVIDAPGHRDFIKNMITGTSQADCAILIIDSTTGGFEAGISKDGQTREHALLAFTLGVKQMICCCNKMDATTPKYSKSRFDEIVKEVSSYLKKVGYNPDKIAFVPISGFEGDNMIERSTNLDWYKGPTLLEALDMINEPKRPSDKPLRLPLQDVYKIGGIGTVPVGRVETGVLKPGMVVTFGPTGLTTEVKSVEMHHESLPEALPGDNVGFNVKNVAVKDIKRGFVASDSKNDPAKEAANFTAQVIIMNHPGQIGNGYAPVLDCHTSHIAVKFAELVTKIDRRSGKELEKEPKFLKNGDAGMIKMVPTKPMVVETFSEYPPLGRFAVRDMRQTVAVGVIKNVEKKDPTGAKVTKAALKKK

SEQ ID NO: 17090 - protein, 304 aa, Campylobacter jejuni
MQTNIEKYLQEHENKELCRFITCGSVDDGKSTLIGRLLYDTKALFSDQLSTLEKDSKKMGNAGDKLDFALLVDGLASEREQGITIDVAYRFFTSNKRKFIIADTPGHEQYTRNMATGASTADIAIILIDARKGVLKQTKRHSYIVSLLGIKNFIIAINKMDLVSYEEKIFNNICKDYEKIIPYLQEDIQTHFIPICALNGENITQKSRNLSWYKGETLLALLDEIKINKIIQNDFIMPVQYVNRPHLNFRSFCGNIASGYVKLQDEIIVLPSMQKSKIKSIITNDIKDLRTLDENEIIPSQNEA

SEQ ID NO: 17091 - protein, 423 aa, Archaeoglobus fulgidus DSM 4304
MAKEKEHINVAFIGHVDHGKSTLIGRLLYETGEIPEHIIEKMRKEAQEKGKATFEFAWVMDRLKEERERGVTIDVAHRKFQTDKYYITIVDCPGHRDFIKNMITGASQADAAVLVMDVVEKVQPQTREHIFLARTLGINQIIVAINKMDRVNYDQKEYEAAKEAVSKLLKMVGYKVDEIPFIPVSAYYGDNVAKKSDKTPWYNGPTLLEAFDLLKPPEKLVDKPLRIPIQDVYSISGVGTVPVGRVESGVLRVGDKVVFEPAGVSGEVKSIEMHHEPIQEAYPGDNIGFNVRGVSKKDIRRGDVAGHPDNPPTVVKDFTAQLVVLQHPTAITVGYTPVVHAHTAQIACRFVELQKKIDPRTGQVKEENPQFLKTGDAAIVKLEPTRPMVIERVKDIPPMGRFAIRDMGMTIGAGMVLDLTPRK

SEQ ID NO: 17092 - protein, 451 aa, Cyanophora paradoxa
MGKQKTHINIVVIGHVDSGKSTTTGHLIYKCGGIDKRTIEKFEKEAAEIGKGSFKYAWVLDKLKAERERGITIDIALWKFETPKYYVTIIDAPGHRDFIKNMITGTSQADCAVLVIPAATGEFEAGISKDGQTREHALLAYTLGVKQMIVAVNKMDEKSVNYGQPRFEEIKKEVSAYLKKIGYNPDKIPFVPISGFNGDNMLEPSSNLGWYKGPTLVEALDQVEEPKRPSEKPLRLPLQDVYKIGGIGTVPVGRVETGVIKPGMTVVFAPSAVTTEVKSVEMHHESMPEALPGDNVGFNVKNVSVKDIRRGYVASDVKNDPAKESESFVAQVIILNHPGQIGAGYSPVVDCHTAHIACKFSELITKIDRRSGKELEASPKFVKSGDACMARLIPNKPMCVEAFTNYPPLGRFAVRDMRQTVAVGVIKEVVKKEPSAKGAAGAAKGGKAGKK

SEQ ID NO: 17093 - protein, 449 aa, Porphyra purpurea
MGKEKQHVSIVVIGHVDSGKSTTTGHLIYKCGGIDKRAIEKFEKEAAEMGKGSFKYAWVLDKLKAERERGITIDIALWKFETDKYNFTIIDAPGHRDFIKNMITGTSQADLAILVIASPPGEFEAGISQNGQTREHALLAYTLGVKQMIVACNKMDDKNVNWSKERYEEVSKEMDLYLKKVGYNPPKVPKVPTSGWTGENLFERTGGDHALGKWYKGPCLLEALDACDPPKRPVDKPLRLPLQDVYKIGGIGTVPVGRVETGVIKPGMVVTFAPSGLSTEVKSVEMHHEALTQAGPGDNVGFNVKNVSVKDLKRGYVCGDSKNDPPKGCASFNAQVIILNHPGEIHAGYAPVLDCHTAHIACKFSELILKMDRRSGKKLEDSPKMIKSGDAAMVKMVASKPMCVEAFTSYPPLGRFAVRDMRQTVAVGVIKSVEKKEVEGKMTKSAAKK

SEQ ID NO: 17094 - protein, 399 aa, Hexamita sp.
NGKSTLTGHLIYKCGGIDQRTLDEYEKRANEMGKGSFKYAWVLDQLKDERERGITINIALWKFETKKFTVTIIDAPGHRDFIKNMITGTSQADVAILVIASGQGEFEAGISKEGQTREHATLAHTLGIKTLIVCVNKMDDPQVNYSEARYKEIKEEMQKNLKQIGYKKWDEFDFIPTSGWTGDSIMEKSPNMPWYSGPCLIDAIDGLKAPKRPTDKPLRLPIQDVYKINGVGTVPAGRVESGLLIPNMTVVFAPSTTTAEVKSVEMHHEELPQAGPGDNVGFNVRGIAAKDIKKGYVVGDTKNDPPVGCKSFTAQVIIMNHPKKIQPGYSPVIDCHTAHIACKFDAFLQKLNARTLKPEMENPTEASRGECIVVRMVPSKPLSCESFNDYAALGRFAVR

SEQ ID NO: 17095 - protein, 447 aa, Vicia faba
MGKEKVHINIVVIGHVDSGKSTTTGHLIYKLGGIDKRVIERFEKEAAEMNKRSFKYAWVLDKLKAERERGITIDIALWKFETSKYYCTVIDAPGHRDFIKNMITGTSQADCAVLIIDSTTGGFEAGISKDGQTREHALLAFTLGVKQMICCCNKMDATTPKYSKGRYEEIVKEVSSYLKKVGYNPDKIPFVPISGFEGDNMIERSTNLDWYKGPTLLDALDNINEPKRPSDKPLRLPLQDVYKIGGIGIVPVGRVETGVVKPGMLVTFAPTGLTTEVKSVEMHHEALTEALPGDNVGFNVKNVAVKDLKRGFVASNSKDDPAKEAANFTSQVIIMNHPGQIGNGYAPVLDCHTSHIAVKFAELITKIDRRSGKEIEKEPKFLKNGDAGMVKMIPTKPMVVETFAEYPPLGRFAVRDMRQTVAVGVIKSVEKKDPTGAKVTKAAAKKK

SEQ ID NO: 17096 - protein, 447 aa, Daucus carota
MGKEKIHISIVVIGHVDSGKSTTTGHLIYKLGGIDKRVIERFEKEAAEMNKRSFKYAWVLDKLKAERERGITIDIALWKFETTKYYCTVIDAPGHRDFIKNMITGTSQADCAVLIIDSTTGGFEAGISKDGQTREHALLAFTLGVKQMICCCNKMDATTPKYSKSRFEEIVKEVSSYLKKVGYNPDKIAFIPISGFEGDNMIDRSTNLDWYKGPTLLEALDQISEPKRPSDKPLRLPLQDVYKIGGIGTVPVGRVETGVIKPGMVVTFGPSGLTTEVKSVEMHHEALQEALPGDNVGFNVKNVAVKDLKRGYVASNSKDDPAKEAANFTAQVIIMNHPGQIGNGYAPVLDCHTSHIAVKFAEIQTKIDRRSGKELEKEPKFLKNGDAGFVKMIPTKPMVVETFMSYPPLGRFAVRDMRQTVAVGVIKSVEKKDPTGAKVTKAAIKKK

SEQ ID NO: 17097 - protein, 515 aa, Nicotiana tabacum
MVNVEDGKPEEAIKPEKTNGEDSAMAEEGEAGDDEKPDIPEDELKDEAHPDLEPKNVEPKGIAGKEASPPEDIQDEVEVNKKRHLNVVFIGHVDAGKSTIGGQILLLSGQVDDRTIQKYEREAKDKNRESWYMAYIMDTNEEERVKGITVEVGRAHFETDTTRFTILDAPGHKSYVPNMISGRSQADIGLLVISARKGEFETGYERGGQTREHVQLAKTLGVTKFLVVVNKMDDPTVNWSKERYDEIESKMVPFLRSSGYNVKKDVQFLPISGLLGSNLKTRMEKSVCPWWNGPCLFETLDAVEVPPRDPNGPLRMPIIDKFKDMGTVVMGKIESGSIHEGDNLLIIPNKAAVKVLAIFCDEDKVRHVGPGENVRVRLSGVEEDDILSGFVLCSVAKPIHAVTEFVAQLQILELLDNAIFTAGYKAVLHIHSVVEECEIVELMQQIDLKTKKPMKKKPLFVKNGAIVLCRVQVNNLICVEKFSDFAQLGRFTLRTEGKTVAVGKITALPTVADNA

SEQ ID NO: 17098 - protein, 426 aa, Mortierella polycephala
VVVIGHVDSGKSTTTGHLIYKCGGIDKRTIEKFEKEAAELGKGSFKYAWVLDKLKAERERGITIDIALWKFETPKYHVTVIDAPGHRDFIKNMITGTSQADCAILIIAGGTGEFEAGISKDGQTREHALLAFTLGVKQLIVAVNKMDTTKWSQDRFEEIIKEVSTFVKKVGYNPKSVAFVPISGWHGDNMLLESTNMPWFKGWTKEGKNGSYKGKTLLEAIDAIEPPSRPTEKPLRLPLQDVYKIGGIGTVPVGRVETGIIKAGMVVTFAPSNVTTEVKSVEMHHEVLVQGIPGDNVGFNVKNVSVKDIRRGNVCSDSKNDPAKEAASFNAQVIVLNHPGQISNGYAPVLDCHTAHIACKFSEILEKIDRRTGKAIEEFPKFIKSGDAAIVKMIPSKPLCVESFQEYPPLGRFAVRDMRQTVAVGV

SEQ ID NO: 17099 - protein, 447 aa, Lilium longiflorum
MGKEKVHINIVVIGHVDSGKSTTTGHLIYKLGGIDKRVIERFEKEAAEMNKRSFKYAWVLDKLKAERERGITIDIALWKFETTRYYCTVIDAPGHRDFIKNMITGTSQADCAVLIIDSTTGGFEAGISKDGQTREHALLAFTLGVKQMICCCNKMDATTPKYSKARYDEIIKEVSSYLKKVGYNPDKIPFVPISGFEGDNMIERSNNLDWYKGPTLLEALDLINEPKRPTDKPLRLPLQDVYKIGGIGTVPVGRVETGIVKPGMVVTFGPTGLTTEVKSVEMHHEALLEALPGDNVGFNVKNVAVKDLKRGFVASNSKDDPAKEAANFTSQVIIMNHPGQIGNGYAPVLDCHTSHIAVKFAEILTKIDRRSGKEIEKEPKFLKNGDAGFVKMIPTKPMVVETFSEYPPLGRFAVRDMRQTVAVGVIKSVEKKDPTGAKVTKAAIKKK

SEQ ID NO: 17100 - protein, 447 aa, Lilium longiflorum
MGKEKVHINIVVIGHVDSGKSTTTGHLIYKLGGIDKRVIERFEKEAAEMNKRSFKYAWVLDKLKAERERGITIDIALWKFETTKYYCTVIDAPGHRDFIKNMITGTSQADCAILIIDSTTGGFEAGISKDGQTREHALLAFTLGVKQMICCCNKMDATTPKYSKARYDEIVKEVSSYLKKVGYNPDKIPFVPISGFEGDNMIERSINLDWYKGPTLLEALDMINEPKRPSDKPLRLPLQDVYKIGGIGTVPVGRVETGVLKPAMVVTFGPTGLTTEVKSVEMHHEALVEALPGDNVGFNVKNVAVKDLKRGFVASNSKDDPAKEAANFTSQVIIMNHPGQIGNGYAPVLDCHTSHIAVKFNEILTKIDRRSGKELEKEPKFLKNGDAGMIKMIPTKPMVVETFSEYPPLGRFAVRDMRQTVAVGVIKNVEKKEPTGAKVTKSAVKKK

SEQ ID NO: 17101 - protein, 629 aa, Pneumocystis carinii
MNSEANNSDKEGTWEDKIDLEEIPRKIGQLRMSAEAEEFRPRNMYYGPQDCTMNCDANNMPYGHFMGYNQRYDDRKYEPCNRDYSRQGMNIRGIEKGMTTPESKGSATSGQRTSAKVIRVDDAPKVSGLDGSVVGRNGNRVNKVDKRVPSMDMENLSLAASKQEKNHVSVTGDEERKDLDIASQFQEEIDEEVLQDIYGKEHVNVVFIGHVDAGKSTLGGNILYMTGMVDKRTMEKYEKDAKEAGRESWYLSWALDSTKEERSKGKTVELGRAYFETEKRRYTILDAPGHKSYVPNMIEGTAQAEVAVLVISARKGEYETGFEKGGQTREHAMLSKTQGVSKLIVAINKMDDPTVEWSKERYDECTNGITTFLRKEVGYNPKTDFVFMPISAFTGINIKERIDKKICPWYNGPSLLEYLDEMDTFERKLNTPLIIPIQAKYKDMGLVIEGKIESGYVKKGSNVILMPNKTVVEVVGLYNELEEIRVGRCGEQIKLRIKGVEEEDVMTGHILSSLESPVSTAKIFEAQIAILEVKSLLTAGYSCIIHIHSAVQEVTFLKLLYKLDKLTNRRSKKPPAFATKGMKIVALLEVASPLCLETFDKYKQLGRFILRNEGLTVAIGKVTKLISEE

SEQ ID NO: 17102 - protein, 461 aa, Podospora curvicolla
MGKEDKTHINVVVIGHVDSGKSTTTGHLIYKCGGIDKRTIEKFEKEAAELGKGSFKYAWVLDKLKAERERGITIDIALWKFETPKYYVTVIDAPGHRDFIKNMITGTSQADCAILIIAAGTGEFEAGISKDGQTREHALLAYTLGVKQLIVAINKMDTTKWSEARFNEIIKETSNFIKKVGYNPKTVAFVPISGFNGDNMLEASTNCPWYKGWEKEVKGGKATGKTLLEAIDSIEPPKRPTDKPLRLPLQDVYKIGGIGTVPVGRIETGILKPGMVVTFAPSNVTTEVKSVEMHHEQLSEGVPGDNVGFNVKNVSVKEIRRGNVAGDSKNDPPLGAASFDAQVIVLNHPGQVGAGYAPVLDCHTAHIACKFAELLQKIDRRTGKAVEESPKFIKSGDAAIVKMIPSKPMCVEAFTEYPPLGRFAVRDMRQTVAVGVIKKVEKAAAGSGKVTKSAAKAGGKK

SEQ ID NO: 17103 - protein, 458 aa, Mucor racemosus
MGKEKTHVNVVVIGHVDSGKSTTTGHLIYKCGGIDKRTIEEFEKEAAELGKGSFKYAWVLDKLKAERERGITIDIALWKFETPKYNVTVIDAPGHRDFIKNMITGTSQADCAILIIAGGTGEFEAGISKDGQTREHALLAFTLGFRQLIVAINKMDTTKWSQDRYNEIVKEVSGFIKKIGFNPKSVPFVPISGWHGDNMLDESTNMPWFKGWNKETKAGSKTGKTLLEAIDAIEPPVRPSDKPLRLPLQDVYKIGGIGTVPVGRVETGTIKAGMVVNFAPAAVTTEVKSVEMHHETLTEGLPGDNVGFNVKNVSVKDIRRGNVCSDSKNDPAKESASFTAQVIILNHPGQISAGYAPVLDCHTAHIACKFSELIEKIDRRSGKKMEDSPKFVKSGDSAIVKMVPSKPMCVEAYTDYPPLGRFAVRDMRQTVAVGVIKAVEKVDKAGKVTKAAAKASKK

SEQ ID NO: 17104 - protein, 458 aa, Mucor racemosus
MGKEKTHVNVVVIGHVDSGKSTTTGHLIYKCGGIDKRTIEKFEKEAAELGKGSFKYAWVLDKLKAERERGITIDIALWKFETPKYNVTVIDAPGHRDFIKNMITGTSQADCAILIIAGGTGEFEAGISKDGQTREHALLAFTLGFRQLIVAINKMDTTKWSQDRYNEIVKEVSGFIKKIGFNPKSVPFVPISGWHGDNMLDESTNMPWFKGWNKETKAGSKTGKTLLEAIDAIEPPVRPSDKPLRLPLQDVYKIGGIGTVPVGRVETGTIKAGMVVNFAPAAVTTEVKSVEMHHETLTEGLPGDNVGFNVKNVSVKDIRRGNVCSDSKNDPAKESASFTAQVIILNHPGQISAGYAPVLDCHTAHIACKFSELIEKIDRRSGKKMEDSPKFVKSGDSAIVKMVPSKPMCVEAYTDYPPLGRFAVRDMRQTVAVGVIKAVEKVDKAGKVTKAAAKASKK

SEQ ID NO: 17105 - protein, 592 aa, Schizosaccharomyces pombe
MSRHRDVKNLDLDDYELDEEPGEEELTEEQEEEFRSAVATVRETLLGVPISEKEIADTVWYYYFDVEKSVNYLLQKASSKAGAKEKQNTDSQKEKKQNKSKEALADAKDPLDESSNGIKNLSLNKNDEPAFQTNGEVKMKNSSESDNQPEKKKIKKQNPTDLVSVPEIFEQSNPKPVVHLVVTGHVDSGKSTMLGRIMFELGEINSRSMQKLHNEAANSGKGSFSYAWLLDTTEEERARGVTMDVASTTFESDKKIYEIGDAPGHRDFISGMIAGASSADFAVLVVDSSQNNFERGFLENGQTREHAYLLRALGISEIVVSVNKLDLMSWSEDRFQEIKNIVSDFLIKMVGFKTSNVHFVPISAISGTNLIQKDSSDLYKWYKGPTLLSALDQLVPPEKPYRKPLRLSIDDVYRSPRSVTVTGRVEAGNVQVNQVLYDVSSQEDAYVKNVIRNSDPSSTWAVAGDTVTLQLADIEVNQLRPGDILSNYENPVRRVRSFVAEIQTFDIHGPILSGSTLVLHLGRTVTSVSLKIVTVNNKRSRHIASRKRALVRISFLDGLFPLCLAEECPALGRFILRRSGDTVAAGIVKELC

SEQ ID NO: 17106 - protein, 695 aa, Schizosaccharomyces pombe
MSRLSQLLNSKKAKQKPPSEHPIGLSSILKQDSSSSSDSPNFFPSSSTNDHQERDTINDTNFVVPEKQKTSKLALLAAERKKLHSSFPSTQQQPPKTEKEKEKEPIQAKHKKNVENDFLLQRFRKVRIAEKKDSEQPSSHEIHLTDDDDKTTLQKQMVESDQLKKNPQEVKLAPPSSFAKCLTGAKKRVFEDQIEIHLSKSSLLGFNAPSPDDIVLMAQSKSKSFQKHKRLDEQLLNSVKSMKKVSQQLKPQKNTNDSNNDHTLLSQDQLIELSKLVKPRTKLLLLGPPKSGKKTLLSRLFFQIGSFDPKTMQKCTVLNAKKESLSSVLKSTKTKWYDFETFSNSYSSTIIDFPLGIFTTNASSRDNFLKHSSLFQVMNTAIFTIDCLNPLEGLDGISSILQLMNGLSISSYMFAITKMDEIEWDENKFINLVNSIQSFLKESCGIIEKSKFIPISGLKGTNLTSISQEKLSQWYKSDTLLGKIDKEADTNHGTWNFLLNLPLSLTISHITPLPENQSHIYCSIHSGMLQDSQKLYVGTGRLETQITGLSSDENPKGFNVAGDMIQAKIPTLPNLCPGILIADSIDAFTSSKTAYVNATWFHGSLEKGKSMHVIALFGCHAVLTKLYCFTDSQEKAPNAIGNDLERNRTSLVKIELENAFPLVKESYINTLSRVLFVSEKWNSLIAFGTVLSLHD

SEQ ID NO: 17107 - protein, 741 aa, Pichia pinus
MSQDQQQQQQFNANNLAGNVQNINLNAPAYDPAVQSYIPNTAQAFVPSAQPYIPGQQEQQFGQYGQQQQNYNQGGYNNYNNRGGYSNNRGGYNNSNRGGYSNYNSYNTNSNQGGYSNYNNNYANNSYNNNNNYNNNYNQGYNNYNSQPQGQDQQQETGSGQMSLEDYQKQQKESLNKLNTKPKKVLKLNLNSSTVKAPIVTKKKEEEPVNQESKTEEPAKEEIKNQEPAEAENKVEEESKVEAPTAAKPVSESEFPASTPKTEAKASKEVAAAAAALKKEVSQAKKESNVTNADALVKEQEEQIDASIVNDMFGGKDHMSIIFMGHVDAGKSTMGGNLLFLTGAVDKRTVEKYEREAKDAGRQGWYLSWIMDTNKEERNDGKTIEVGKSYFETDKRRYTILDAPGHKLYISEMIGGASQADVGVLVISSRKGEYEAGFERGGQSREHAILAKTQGVNKLVVVINKMDDPTVNWSKERYEECTTKLAMYLKGVGYQKGDVLFMPVSGYTGAGLKERVSQKDAPWYNGPSLLEYLDSMPLAVRKINDPFMLPISSKMKDLGTVIEGKIESGHVKKGQNLLVMPNKTQVEVTTIYNETEAEADSAFCGEQVRLRLRGIEEEDLSAGYVLSSINHPVKTVTRFEAQIAIVELKSILSTGFSCVMHVHTAIEEVTFTQLLHNLQKGTNRRSKKAPAFAKQGMKIIAVLETTEPVCIESYDDYPQLGRFTLRDQGQTIAIGKVTKLL

SEQ ID NO: 17108 - protein, 460 aa, Yarrowia lipolytica
MGKEKTHVNLVVIGHVDAGKSTTTGHLIYKCGGIDKRTIEKFEKEADELGKGSFKYAWVLDKLKAERERGITIDIALWKFQTPKYYVTVIDAPGHRDFIKNMITGTSQADCAILIIAGGVGEFEAGISKDGQTREHALLAFTLGVKQLIVAINKMDSVKWSQDRYNEICKETANFVKKVGYNPKSVPFVPISGWNGDNMIEASTNCDWYKGWTKETKAGEVKGKTLLEAIDAIEPPVRPSDKPLRLPLQDVYKIGGIGTVPVGRVETGVIKAGMVVTFAPANVTTEVKSVEMHHEILPDGGFPGDNVGFNVKNVSVKDIRRGNVAGDSKNDPPNGCDSFNAQVIVLNHPGQIGAGYAPVLDCHTAHIACKFDTLIEKIDRRTGKKMEDSPKFIKSGDAAIVKMVPSKPMCVEAFTEYPPLGRFAVRDMRQTVAVGVIKSVEKSDKAGGKVTKAAQKAAKK

SEQ ID NO: 17109 - protein, 460 aa, Ajellomyces capsulatus
MGKEDKTHINLVVIGHVDSGKSTTTGHLIYKCGGIDSRTIEKFEKEAEELGKKSFKYAWVLDKLKSERERGITIDIALWKFETPKYSVTVIDAPGHRDFIKNMITGTSQADCAILIIAAGTGEFEAGISKDGQTREHALLAFTLGVRQLIVAINKMDTTKWSESRFNEIIKEVSNFIKKVGYNPKAVPFVPISGFEGDNMIEPSPNCTWYKGWNKETASGKSSGKTLLDAIDAIEPPTRPTDKPLRLPLQDVYKISGIGTVPVGRVETGVIKPGMVVTFAPSNVTTEVKSVEMHHQQLQAGYPGDNVGFNVKNVSVKEVRRGNVAGDSKNDPPKGCESFNAQVIVLNHPGQVGAGYAPVLDCHTAHIACKFSELIEKIDRRTGKSVENNPKFIKSGDAAIVKMVPSKPMCVEPFTDYPPLGRFAVRDMRQTVAVGVIKSVIKSDKTAGKVTKAAQKATKK

SEQ ID NO: 17110 - protein, 779 aa, Neurospora crassa
MARHQNIRNLDYEAELEEYGAFSDEEEEELSPEDQVRMREGTAQVLEALGVEAHKVPKTQIEESLWHYYWDVDKTITYLISKYIDPPKKPAKTAPPKTAPKQDAAIASASRQSFAHLFRDLPWGNIPPERQAVLIPPPQLPAGLLGGSGAPPKMSKLQQLAAARKKKAEEKSASGEVEQTQVKMTELTVNDNQASKENRPLAGVFGKRVKISETTAQGRIPLTMAEPTRPEIPQAQAPEATPSQHQEEDPIDPEPAVAPPKAQPSAFASTLFGPSSDSPKRRPREVFALPYMAISSYSPDAFGKPSPDDVVLAAQAKAGKKSANVHNKKGSSSADGVTNQVSQLKIDDTPLPKSRNLNVLSEFEKQKGKKTASFVVVGHVDAGKSTMMGRLLLDLNVVDQRTVDKLRKEAEKIGKTSFALAWVLDQRHEERSRGVTIDIATNRFETETTSFTILDAPGHRDFIPNMIAGASQADFAILVIDASTGAFESGLKGQTREHSLLIRSMGVSRIIVAVNKLDTVNWSQERFDEITHQVSGFLTATGFQPKNIAFVPVSGLHGDNLVRKSTDPAASWYTGKTLVEELEASEPSARALAKPLRMTISEVMRTPQSSISITGRIDAGSLQMGDALLVQPSGEKAYVKSLQVDDGEPADWAVAGQNVVLHLSNIDPIHVRVGDIVCDPAKPIQCVDTFTLKALAFDILMPMQVDVHRGRLHAAGKIEAIDAILDKVTGKVTKKKPMIVKPGTVSRVRVTLHSKVPLEAGQRVVLRSGGQTVAAGLLE

SEQ ID NO: 17111 - protein, 460 aa, Podospora anserina
MGKEDKTHINVVVIGHVDSGKSTTTGHLIYKCGGIDKRTIEKFEKEAAELGKGSFKYAWVLDKLKAERERGITIDIALWKFETPKYYVTVIDAPGHRDFIKNMITGTSQADCAILIIAAGTGEFEAGISKDGQTREHALLAYTLGVKQLIVAINKMDTTKWSEARFNEIIKETSNFIKKVGYNPKTVAFVPISGFNGDNMLEASTNCPWYKGWEKEVKGGKATGKTLLEAIDSIEPPKRPTDKPLRLPLQDVYKIGGIGTVPVGRIETGILKPGMVVTFAPSNVTTEVKSVEMHHEQLAEGVPGDNVGFNVKNVSVKEIRRGNVAGDSKNDPPMGAASFDAQVIVLNHPGQVGAGYAPVLDCHTAHIACKFSELLQKIDRRTGKAVEESPKFIKSGDAAIVKMVPSKPMCVEAFTEYPPLGRFAVRDMRQTVAVGVIKKVEKAAAGSGKVTKSAAKAGKK

SEQ ID NO: 17112 - protein, 460 aa, Coccidioides immitis
MGKEEKTHINLVVIGHVDSGKSTTTGHLIYKCGGIDNRTIEKFEKEAEELGKKSFKYAWVLDKLKAERERGITIDIALWKFETPKYHVTVIDAPGHRDFIKNMITGTSQADCAILIIAAGTGEFEAGISKDGQTREHALLAFTLGVKQLIVAINKMDSTNWSEPRFNEIVKEVSNFIKKVGYNPKAVPFVPISGFEGDNMIQPSTNAPWYKGWNKETASGKHTGKTLLDAIDAIDPPTRPTEKPLRLPLQDVYKISGIGTVPVGRVETGVIKPGMVVTFAPSNVTTEVKSVEMHHQQLTQGNPGDNVGFNVKNVSVKEVRRGNVAGDSKNDPPKGCDSFNAQVIVLNHPGQVGAGYAPVLDCHTAHIACKFSELLEKIDRRTGKSVENNPKFIKSGDAAIVKMVPSKPMCVEAFTDYPPLGRFAVRDMRQTVAVGVIKSVEKSEKTGGKVTKAAQKAAKK

SEQ ID NO: 17113 - protein, 449 aa, Stevia rebaudiana
MGKEKIHISIVVIGHVDSGKSTTTGHLIYKLGGIDKRVIERFEKEAAEMNKRSFKYAWVLDKLKAERERGITIDIALWKFETTKYYCTVIDAPGHRDFIKNMITGTSQADCAVLIIDSTTGGFEAGISKDGQTREHALLAFTLGVKQMICCCNKMDATTPKYSKARYEEIVKEVSSYLKKVGYNPDKIPFVPISGFEGDNMIERSTNLDWYKGPTLLEALDQINEPKRPSDKPLRLPLQDVYKIGGIGTVPVGRVETGVIKPGMVVTFGPSGLTTEVKSVEMHHEALTEALPGDNVGFNVKNVAVKDLKRGYVASNSKDDPAKGAASFTSQVIIMNHPGQIGNGYAPVLDCHTSHIAVKFSEILTKIDRRSGKELEKEPKFLKNGDAGMVKMLPTKPMVVETFAEYPPLGRFAVRDMRQTVAVGVIKSVDKKDPTGAKVTKAAVKKGAK

SEQ ID NO: 17114 - protein, 459 aa, Aureobasidium pullulans
MGKEKSHINVVVIGHVDSGKSTTTGHLIYKCGGIDKRTIEKFEKEAAELGKGSFKYAWVLDKLKSERERGITIDIALWKFETPKYMVTVIDAPGHRDFIKNMITGTSQADCAILIIAAGTGEFEAGISKDGQTREHALLAYTLGVKQLIVAINKMDTTKWSEARYQEIIKETSGFIKKVGYNPKHVPFVPISGFNGDNMIEVSSNCPWYKGWEKETKAKATGKTLLEAIDAIDPPSRPTDKPLRLPLQDVYKIGGIGTVPVGRVETGTIKGGMVVTFAPAGVTTEVKSVEMHHEQLSEGLPGDNVGFNVKNVSVKEIRRGNVAGDSKNDPPKGCDSFNAQVIVLNHPGQVGAGYAPVLDCHTAHIACKFSELVEKIDRRTGKSVEAAPKFIKSGDAAIVKMVPSKPMCVEAFTDYPPLGRFAVRDMRQTVAVGVIKSVAKSDKQGAGKVTKAAVKAGKK

SEQ ID NO: 17115 - protein, 276 aa, Naegleria andersoni
AGKSTTTGHLIYKCGGIDKRVIEKFEKEAAEMGKSSFKYAWVLDKLKAERERGITIDIALWKFESKKYVFTIIDAPGHRDFIKNMITGTSQADVAILVVDSTNGGFEAGFSKDGQTREHALLAYTLGIKQMIVCMNKFDDTSVSYKEDRYNEIKSEVGRYLKGLGFNVDAADKPNLVQFVPISGWTGDNMIEKTDKMPWYKGPCLLDALDNLVEPVRPTDKPLRLPFQDVYKIGGIGTVPVGRVETGKLKPGMMIHFAPGQAADTEVKSVEMHHTS

SEQ ID NO: 17116 - protein, 405 aa, Naegleria andersoni
AGKSTTTGHLIYKCGGIDKRVIEKFEKEAAEMGKSSFKYAWVLDKLKAERERGITIDIALWKFESKKYVFTIIDAPGHRDFIKNMITGTSQADVAILVVDSTNGGFEAGFSKDGQTREHALLAYTLGIKQMIVCMNKFDDTSVSYKEDRYNEIKSEVGRYLKGLGFNVDAADKPNLVQFVPISGWTGDNMIEKTDKMPWYKGPCLLDALDNLVEPVRPTDKPLRLPLQDVYKIGGIGTVPVGRVETGKLKPGMMIHFAPGQAADTEVKSVEMHHTSVPEAGPGDNVGFNVKGLSTTDIKRGYVASDAKSDPSREAVSFNAQVIIMNHPGEIRAGYTPVLDCHTSHIACKFDKLIDKIDRRTGKSQEANPEKIKKGDSAIVQVIPTKPMCVEGFTEYPPLGRFAVR

SEQ ID NO: 17117 - protein, 435 aa, Cryptosporidium parvum
MGKEKTHINLVVIGHVDSGKSTTTGHLIYKLGGIDKRTIEKFEKESSEMGKGSFKYAWVLDKLKAERERGITIDIALWQFETPKYHYTVIDAPGHRDFIKNMITGTSQADVALLVVPADRFEGAFSKEGQTREHALLAFTLGVRQMIVGINKMDTCEYKQSRFDEIFNEVDGYLKKVGYNTEKIPFVAISGFVGDNMVERSDKMPWYKGKTLVEALDTMEPPKRPTDKPLRLPLQDVYKIGGVGTVPVGRVETGIIRPGMNVTFAPAGVTTEVKSVEMHHEQMPEAVPGDNVGFNVKNVSIKDIKRGFVASDAKNDPAKGCEDFTAQVIVLNHPGEIKNGYSPVVDCHTAHISCKFQTITAKMDKRSGKVLEENPKLIKSGDAALVVMQPLKPLCVEAFTDYPPLGRFAVRDMKQTVAVGVIKSVTKKEATSKKK

SEQ ID NO: 17118 - protein, 404 aa, Cryptosporidium parvum
MGKEKTHINLVVIGHVDSGKSTTTGHLIYKLGGIDKRTIEKFEKESSEMGKGSFKYAWVLDKLKAERERGITIDIALWQFETPKYHYTVIDAPGHRDFIKNMITGTSQADVALLVVPADRFEGAFSKEGQTREHALLAFTLGVRQMIVGINKMDTCEYKQSRFDEIFNEVDGYLKKVGYNTEKIPFVAISGFVGDNMVERSDKMPWYKGKTLVEALDTMEPPKRPTDKPLRLPLQDVYKIGGVGTVPVGRVETGIIRPGMNVTFAPAGVTTEVKSVEMHHEQMPEAVPGDNVGFNVKNVSIKDIKRGFVASDAKNDPAKGCEDFTAQVIVLNHPGEIKNGYSPVVDCHTAHISCKFQTITAKMDKRSGKVLEENPKLIKSGDAALVVMQPLKPLCVEASLTTHF

SEQ ID NO: 17119 - protein, 435 aa, Tetrahymena pyriformis
MARGDKVHINLVVIGHVDSGKSTTTGHLIYKCGGIDKRVIEKFEKESAEQGKGSFKYAWVLDKLKAERERGITIDISLWKFETAKYHFTIIDAPGHRDFIKNMITGTSQADVAILMIASPQGEFEAGISKDGQTREHALLAFTLGVKQMIVCLNKMDEKTVNFSEERYQEIKKELSDYLKKVGYKPDTIPFIPISGFNGDNMLERSTNAPWYKGPILVEALDALEPPKRPVDKPLRLPLQDVYKIGGIGTVPVGRVETGVIKPGMSIQFAPNKVIAECKSVEMHHEQLPEAVPGDNVGFNIKGVSVKDIRRGNVASDAKNDPAKEAATFYSQVIIMNHPGQIQAGYTPVLDCHTAHIACKFETIHDKIDRRTGKSQEENPKFIKNGDAALVTLIPTKALCVEVFQEYPPLGRYAVRDMKQTVAVGVIKKVEKKDK

SEQ ID NO: 17120 - protein, 409 aa, Colpoda inflata
VDSGKSTSTGHLIYKCGGIHKRTIEKFEKEANELGKGSFKYAWVLDKLKAERERGITIDISLWKFETAKFHFTIIDAPGHRDFIKNMITGTSQADVALLMIASPPGEFEAGISKEGQTREHALLAFTLGVKQMIVCVNKMDEKTVAWSQSRFEEIQKEVQEYLKKVGYNPDKIPFVPISGWHGDNMLEKSPNLTWFKGPTLLEALDAIVPPKRPLDKPLRLPLQDVYKIGGVGTVPVGRVETGVLKPGMTVYFAPSNVSTEVKSVEMHHEAVQEAIPGDNVGFNVKNVAVKDIRRGNVCSDAKNDPAKESASFYAQVIVLNHPGQIGNGYCPVLDCHTAHIACKFQEIKEKIDRRTGTVLEREPKSVKSGDCAMVTLTPNKPMCVEAFSDYPPLGRFAVRDMKQTVAVG

SEQ ID NO: 17121 - protein, 426 aa, Umbelopsis nana
VVVIGHVDSGKSTTTGHLIYKCGGIDKRTIEKFEKEAAELGKGSFKYAWVLDKLKAERERGITIDIALWKFETPKYHVTVIDAPGHRDFIKNMITGTSQADCGILIIAAGTGEFEAGISKDGQTREHALLAFTLGVRQLIVAINKMDTTKWSGDRYEEIVKEVSSFIKKIGFNPKSVPFVPISGWHGDNMLEESTNMPWFKGWTKETKAGSKAGKTLLEAIDAIDPPTRPTDKPLRLPLQDVYKIGGIGTVPVGRVETGIIKAGMVVTFAPTMVSTEVKSVEMHHEQLVEGVPGDNVGFNVKNVSVKDIRRGNVCSDSKNDPAKEAASFTAQVIVLNHPGQIGAGYAPVLDCHTAHIACKFAELVEKIDRRSGKKLEDNPKFVKSGDSAIVKMVPSKPMCVEAYTDYPPLGRFAVRDMRQTVAVGV

SEQ ID NO: 17122 - protein, 426 aa, Mortierella verticillata
VVVIGHVDSGKSTTTGHLIYKCGGIDKRTIEKFEKEAAELGKGSFKYAWVLDKLKAERERGITIDIALWKFETPKYYVTVIDAPGHRDFIKNMITGTSQADCAILIIAGGTGEFEAGISKDGQTREHALLAFTLGVKQLIVAVNKMDTTKWSQDRFEEIIKEGLHFVKKVGYNPKSVAFVPISGWHGDNMLEESTNMPWFKGWTKETKGGSFKGKTLLEAIDAIEPPSRPTEKPLRLPLQDVYKIGGIGTVPVGRVETGIIKAGMVVTFAPSNVTTEVKSVEMHHEVLTEGIPGDNVGFNVKNVSVKDIRRGNVCSDSKNDPAKEAASFNAQVIVLNHPGQISNGYAPVLDCHTAHIACKFGEILEKIDRRTGKAMEEFPKFIKSGDAAIVKMIPSKPLCVESFQEYPPLGRFAVRDMRQTVAVGV

SEQ ID NO: 17123 - protein, 426 aa, Cunninghamella bertholletiae
VVVIGHVDSGKSTTTGHLIYKCGGIDKRTIEKFEKEAAELGKGSFKYAGVLDKLKAERERGITMDIALWKFETPKYHVTVIDAPGHRDFIKNMITGTSQADCGILIIASGTGEFEAGISKDGQTREHALLAFTLGVRQLIVALNKMDTCKWSQDRYNEIVKEVSSFIKKIGYNPKSVPFVPISGWHGDNMLEASTDMPWYKGWTKETKAGSSTGKTLLEAIDSIEPPTRPSDKPLRLPLQDVYKIGGIGTVPVGRVETGVIKAGMVVTFAPANVTTEVKSVEMHHEQLEQGVPGDNVGFNVKNVSVKDIRRGNVCSDSKNDPAKESASFNAQVIVLNHPGQIGAGYAPVLDCHTAHIACKFAELLEKIDRRSGKKLEDAPKFVKSGDSAIVKMVPSKPMCVEAYTEYPPLGRFAVRDMRQTVAVGV

SEQ ID NO: 17124 - protein, 425 aa, Umbelopsis isabellina
VVIGHVDSGKSTTTGHLIYKCGGIDKRTIEKFEKEAAELGKGSFKYAWVLDKLKAERERGITIDIALWKFETPKYHVTVIDAPGHRDFIKNMITGTSQADCGILIIAAGTGEFEAGISKDGQTREHALLAFTLGVRQLIVAINKMDTTKWSGDRYEEIVKEVSSFIKKIGFNPKSVPFVPISGWHGDNMLEESTNMPWFKGWTKETKAGAKSGKTLLEAIDAIDPPTRPTDKPLRLPLQDVYKIGGIGTVPVGRVETGIIKAGMVVTFAPANVTTEVKSVEMHHEQLVEGVPGDNVGFNVKNVSVKDIRRGNVCSDSKNDPAKEAGSFTAQVIVLNHPGQIGAGYAPVLDCHTAHIACKFAELIEKIDRRSGKKLEDNPKFVKSGDSAIVKMVPSKPMCVEAYTDYPPLGRFAVRDMRQTVAVGV

SEQ ID NO: 17125 - protein, 449 aa, Bruguiera sexangula
MGKEKIHINIVVIGHVDSGKSTTTGHLIYKLGGIDKRVIERFEKEAAEMNKRSFKYAWVLDKLKAERERGITIDIALWKFETTKYYCTVIDAPGHRDFIKNMITGTSQADCAVLIIDSTTGGFEAGISKDGQTREHALLAFTLGVKQMICCCNKMDATTSKYSKARYDEIVKEVSSYLKKVGYNPEKIPFVPISGFEGDNMIERSTNLDWYKGPTLLEALDMIQEPKRPSDKPLRLPLQDVYKIGGIGTVPVGRVETGVLKPGMVVTFGPSGLTTEVKSVEMHHEALQEALPGDNVGFNVKNVSVKDLKRGYVASNSKDDPAKEASSFTSQVIIMNHPGQIGNGYAPVLDCHTSHIAVKFSEILTKIDRRSGKELEKEPKFLKNGDAGFVKMIPTKPMVVETFSEYPPLGRFAVRDMRQTVAVGVIKSVEKKEPSGAKVTKSAAKKGGK

SEQ ID NO: 17126 - protein, 600 aa, Mus musculus
MREVLGDAVPDDILTEAILKHKFDVQKALSVVLEQDGVQPWKEKSERAVCAGQPSKGKSVISRSSQSESEIVPKVAKMTVSGKKQTMGFEVPGLTSEENGLSVRAPHKGPPGDDVSVRSPNIPETGTPKSALPPPSLQTSEELGSTPTPVRKSGKLRQQIDVKAELENAVQGGKQLLNLVVIGHVDAGKSTLMGHMLYLLGNVNKRTMHKYEQESKKAGKASFAYAWVLDETGEERERGVTMDVGMTKFETTTKVITLMDAPGHKDFIPNMITGAAQADVAVLVVDASRGEFEAGFETGGQTREHGLLVRSLGVTQLAVAVNKMDQVNWQQERFQEITGKLGHFLKQAGFKESDVAFIPTSGLSGENLTARSQSSDLTTWYKGMCLLEQIDSFKPPQRSIDKPFRLCVSDVFKDQGSGFCVTGKIEAGYIQTGDRLLAMPPNETCTAKGITLHDEPVDWAAAGDHVNLTLVGMDIIKINVGCIFCGPKEPIKACTRFRARILVFNIEVPITKGFPVLLHYQTVSEPAVIKRLISVLNKSTGEVTKKKPKLLTKGQNALVELQTQRPVALELYKDFKELGRFMLRYGGSTVAAGVVTEIKE

SEQ ID NO: 17127 - protein, 682 aa, Mus musculus
MARHRNVRGYNYDEDFEDDDLYGQSVEDDYCISPSTAAQFIYSRRDNPEEEYGYEDLRESSNSLLNHQLSEIDQARLYSCLDHMREVLGDAVPDDILTEAILKHKFDVQKALSVVLEQDGVQPWKEKSERAVCAGQPSKGKSVISRSSQSESEIVPKVAKMTVSGKKQTMGFEVPGLTSEENGLSVRAPHKGPPGDDVSVASPNIPETGTPKSALPPPSLQTSEELGSTPTPVRKSGKLRQQIDVKAELEKRQGGKQLLNLVVIGHVDAGKSTLMGHMLYLLGNVNKRTMHKYEQESKKAGKASFAYAWVLDETGEERERGVTMDVGMTKFETTTKVITLMDAPGHKDFIPNMITGAAQADVAVLVVDASRGEFEAGFETGGQTREHGLLVRSLGVTQLAVAVNKMDQVNWQQERFQEITGKLGHFLKQAGFKESDVAFIPTSGLSGENLTARSQSSDLTTWYKGMCLLEQIDSFKPPQRSIDKPFRLCVSDVFKDQGSGFCVTGKIEAGYIQTGDRLLAMPPNETCTAKGITLHDEPVDWAAAGDHVNLTLVGMDIIKINVGCIFCAPKEPIKACTRFRARILVFNIEVPITKGFPVLLHYQTVSEPAVIKRLISVLNKSTGEVTKKKPKLLTKGQNALVELQTQRPVALELYKDFKELGRFMLRYGGSTVAAGVVTEIKE

SEQ ID NO: 17128 - protein, 412 aa, Chaetocladium brefeldii
VVVIGHVDSGKSTTTGHLIYKCGGIDKRTIEKFEKEAAELGKSSFKYAWVLDKLKAERERGITIDIALWKFETPKYMVTVIDAPGHRDFIKNMITGTSQADCAILIIAGGTGEFEAGISKDGQTREHALLAFTLGVRQLIVAINKMDTTKYSEARYTEIVKEVSNFIKKIGFNPKSVPFVPISGWHGDNMIDESKNMPWFKGWNKETKAGVKTGKTLLEAIDAIEPPTRPTDKPLRLPLQDVYKIGGIGTVPVGRVETGVIKAGMVVNFAPAAVTTEVKSVEMHHETLAEGLPGDNVGFNVKNVSVKDIRRGNVCSDSKNDPAQEAGSFQAQVIILNHPGQISSGYSPVLDCHTAHIACKFAEIIEKIDRRSGKKMEDAPKFIKSGDSAIVKMVPSKPMSVEAYTDYPPLGR

SEQ ID NO: 17129 - protein, 374 aa, Chaetocladium jonesii
VVVIGHVDSGKSTTTGHLIYKCGGIDKRTIEKFEKEAAELGKGSFKYAWVLDKLKAERERGITIDIALWKFETPKFNVTVIDAPGHRDFIKNMITGTSQADCAILIIAAGTGEFEAGISKDGQTREHALLAFTLGVRQLIVAINKMDTTKWSEARYNEIVKEVSGFIKKIGFNPKSVPFVPISGWHGDNMLEESANMGWFKQWTKETKAGNKAGKTLLEAIDAIDPPSRPSDKPLRLPLQDVYKIGGIGTVPVGRVETGVIKAGMVVNFAPAAVTTEVKSVEMHHETLVEGLPGDNVGFNIKNVSVKDIRRGNVCSDSKNDPAKEAGSFVAQVIILNHPGQISNGYSPVLDCHTAHIACKFAELVEKIDRRSGK

SEQ ID NO: 17130 - protein, 408 aa, Choanephora cucurbitarum
GKSTTTGHLIYKCGGIDKRTIEKFEKEAAELGKGSFKYAWVLDKLKAERERGITIDIALWKFETPKYHVTVIDAPGHRDFIKNMITGTSQADCAILIIAGGTGEFEAGISKDGQTREHALLAFTLGVRQLIVAINKMDTTKWSEARYTEIVKEVSSFIKKIGFNPKAVPFVPISGWHGDNMLDESTNMPWFKGWKKETKAGEKTGKTLLEAIDAIEPPVRPSDKPLRLPLQDVYKIGGIGTVPVGRVETGVIKAGMVVTFAPAAVTTEVKSVEMHHETLTEGLPGDNVGFNVKNVSVKDIRRGNVCSDSKNDPAKEAGSFTAQVIILNHPGQIGAGYAPVLDCHTAHIACKFSELIEKIDRRSGKKLEDAPKFVKSGDSAIVKMVPSKPMCVEAYTDYPPLGRFAVRD

SEQ ID NO: 17131 - protein, 403 aa, Poitrasia circinans
GKSTTTGHLIYKCGGIDKRTIEKFEKEAAELGKGSFKYAWVLDKLKAERERGITIDIALWKFETPKYHVTVIDAPGHRDFIKNMITGTSQADCAILIIAGGTGEFEAGISKDGQTREHALLAFTLGVRQLIVAINKMDTTKWSEARYTEIVKEVSSFIKKIGFNPKAVPFVPISGWHGDNMLEESTNMPWFKGWKKETKAGEKSGKTLLEAIDAIEPPVRPSDKPLRLPLQDVYKIGGIGTVPVGRVETGVIKAGMVVTFAPAAVTTEVKSVEMHHETLTEGLPGDNVGFNVKNVSVKDIRRGNVCPDSKNDPAKEAGSFTAQVIILNHPGQIGAGYAPVLDCHTAHIACKFSELIEKIDRRSGKKLEDAPKFVKCGDSAIVKMIPSKPMCVEAYTDYPPLGR

SEQ ID NO: 17132 - protein, 403 aa, Gilbertella persicaria
GKSTTTGHLIYKCGGIDKRTIEKFEKEAAELGKGSFKYAWVLDKLKAERERGITIDIALWKFETPKYHVTVIDAPGHRDFIKNMITGTSQADCAILIIAGGTGEFEAGISKDGQTREHALLAFTLGVRQLIVAINKMDTTKWSEARYNEIVKEVSSFIKKIGFNPKAVPFVPISGWHGDNMLDESTNMPWFKGWNKETKAGAKTGKTLLEAIDAIEPPVRPSDKPLRLPLQDVYKIGGIGTVPVGRVETGVIKAGMVVTFAPAAVTTEVKSVEMHHETLTEGLPGDNVGFNVKNVSVKDIRRGNVCSDSKNDPAKEAGSFTAQVIILNHPGQIGAGYAPVLDCHTAHIACKFAELIEKIDRRSGKKMEDAPKFIKSGDSAIVKMIPSKPMCVEAYTDYPPLGR

SEQ ID NO: 17133 - protein, 396 aa, Circinella umbellata
GKSTTTGHLIYKCGGIDKRTIEKFEKEAAELGKGSFKYAWVLDKLKAERERGITIDIALWKFETPKYHVTIIDAPGHRDFIKNMITGTSQADCGILIIAAGTGEFEAGISKDGQTREHALLAFTLGVRQLIVALNKMDATKYSEARYNEIVKEVSTFIKKIGFNPKTVPFVPISGWNGDNMLEESPNMPWFKGWTKENKAGSKTGKTLLEAIDNIDPPVRPSDKPLRLPLQDVYKIGGIGTVPVGRVETGVIKAGMIVTFAPANVTTEVKSVEMHHEQLAEGTPGDNVGFNVKNVSVKDIRRGNVCSDSKNDPAKESGSFTAQVIVLNHPGQISAGYSPVLDCHTAHIACKFAELLEKIDRRSGKKLEDAPKFVKSGDSAIVKLVPSKPMCVEAYT

SEQ ID NO: 17134 - protein, 426 aa, Halteromyces radiatus
VVVIGHVDSGKSTTTGHLIYKCGGIDKRTIEKFEKEAAELGKGSFKYAWVLDKLKAERERGIAIDIALWKFETPKYHVTVIDAPGHRDFIKNMITGTSQADCGILIIAAGTGEFEAGISKDGQTREHALLAFTLGVRQLIVAINKMDSTKWSEARFNEIIKEVSGFIKKIGFNPKSVPFVPISGWHGDNMLDESTNMPWYKGWKKETKAGEKSGKTLLDAIDAIDPPTRPSDKPLRLPLQDVYKIGGIGTVPVGRVETGIIKAGMVVTFAPANVTTEVKSVEMHHEQLTEGLPGDNVGFNVKNVSVKDIRRGNVCSDSKNDPAKESASFTAQVIVLNHPGQIGAGYAPVLDCHTAHIACKFAELLEKIDRRSGKKLEDAPKFVKSGDSAIVKMIPSKPMCVEAYTDYPPLGRFAVRDMRQTVAVGV

SEQ ID NO: 17135 - protein, 365 aa, Hyphomucor assamensis
GKSTTTGHLIYKCGGIDKRTIEKFEKEAAELGKGSFKYAWVLDKLKAERERGITIDIALWKFETPKYNVTVIDAPGHRDFIKNMITGTSQADCAILIIAGGTGEFEAGISKDGQTREHALLAFTLGVRQLIVAINKMDTTKWSEARYNEIVKEVSSFIKKIGFNPKAVPFVPISGWHGDNMLDESTNMPWFKGWNKETKAGAKTGKTLLEAIDAIEPPTRPSDKPLRLPLQDVYKIGGIGTVPVGRVETGTIKAGMVVNFAPAGVTTEVKSVEMHHETLSEGLPGDNVGFNVKNVSVKDIRRGNVCSDSKNDPAKESASFTAQVIILNHPGQISAGYAPVLDCHTAHIACKFAELIEKIDRRSGK

SEQ ID NO: 17136 - protein, 365 aa, Mucor recurvus var. indicus
GKSTTTGHLIYKCGGIDKRTIEKFEKEAAELGKGSFKYAWVLDKLKAERERGITIDIALWKFETPKYNVTVIDAPGHRDFIKNMITGTSQADCAILIIAGGTGEFEAGISKDGQTREHALLAFTLGVRQLIVAINKMDTTKWSEARYNEIVKEVSSFIKKIGFNPKSVPFVPISGWHGDNMLEESQNMPWFKGWTKETKAGSKTGKTLLEAIDNIDPPTRPVDKPLRLPLQDVYKIGGIGTVPVGRVETGVIKAGMVVTFAPANVTTEVKSVEMHHETLPEGLPGDNVGFNVKNVSVKDIRRGNVTSDSKNDPAKEAASFTAQVIILNHPGQIGAGYAPVLDCHTAHIACKFSELIEKIDRRSGK

SEQ ID NO: 17137 - protein, 417 aa, Protomycocladus faisalabadensis
GKSTTTGHLIYKCGGIDKRTIEKFEKEAAELGKGSFKYAWVLDKLKAERERGITIDIALWKFETPKYQVTVIDAPGHRDFIKNMITGTSQADCGILIIAAGTGEFEAGISKDGQTREHALLAFTLGVRQLIVAINKMDSTKYSEARYNEIVKEVSGFIKKIGFNPKAVPFVPISGWNGDNMLEESPNMPWFKGWNKETKAGAKTGKTLLEAIDAIEPPVRPSDKPLRLPLQDVYKIGGIGTVPVGRVETGTIKAGMVVTFAPANVTTEVKSVEMHHEQLAEGVPGDNVGFNVKNVSVKDIRRGNVCSDSKNDPAKEAASFTAQVIVLNHPGQIGAGYSPVLDCHTAHIACKFAELLEKIDRRSGKKLEDSPKFVKSGDSAIVKMVPSKPMCVEAYTEYPPLGRFAVRDMRQTVAVGV

SEQ ID NO: 17138 - protein, 416 aa, Spinellus fusiger
GKSTTTGHLIYKCGGIDKRTIEKFEKEAAELGKGSFKYAWVLDKLKAERERGITIDIALWKFETPKFMVTVIDAPGHRDFIKNMITGTSQADCGVLIIAAGTGEFEAGISKDGQTREHALLAFTLGVRQLIVAINKMDTTKWSEARYNEIVKEVSSFIKKIGFNPKSVPFVPISGWHGDNMLEESVNMGWFKGWTKETKAGSKTGKTLLEAIDNIEPPVRPSDKPLRLPLQDVYKIGGIGTVPVGRVETGVIKAGMIVNFAPSNVTTEVKSVEMHHEQLVEGLPGDNVGFNVKNVSVKDIRRGNVCSDSKNDPAKESGSFTAQVIVLNHPGQIGAGYSPVLDCHTAHIACKFAELLEKIDRRSGKKLEDAPKFIKSGDSAIVKMVPSKPMCVEAYTDYPPLGRLAVRDMRQTVAVG

SEQ ID NO: 17139 - protein, 417 aa, Sporodiniella umbellata
GKSTTTGHLIYKCGGIDKRTIEKFEKEAAELGKGSFKYAWVLDKLKAERERGITIDIALWKFETPKYQITVIDAPGHRDFIKNMITGTSQADCAILIIAGGTGEFEAGISKDGQTREHALLAFTLGVRQLIVAVNKMDTTKWSEARFNEIVKEVSSFIKKIGYNPKSVPFVPISGWHGDNMLEESQNMSWYKGWNKETKAGAKSGKTLLEAIDNIDPPTRPSDKPLRLPLQDVYKIGGIGTVPVGRVETGVIKAGMVVTFAPAAVTTEVKSVEMHHETLSEGAPGDNVGFNVKNVSVKDIRRGNVCSDSKNDPAKEAGSFTAQVIILNHPGQIGAGYAPVLDCHTAHIACKFSELIEKIDRRSGKSLEAEPKFVKSGDSAIVKMTPSKPMCVEAYTDYPPLGRFAVRDMRQTVAVGV

SEQ ID NO: 17140 - protein, 417 aa, Syzygites megalocarpus
GKSTTTGHLIYKCGGIDKRTIEKFEKEAAELGKGSFKYAWVLDKLKAERERGITIDIALWKFETPKYQITVIDAPGHRDFIKNMITGTSQADCAILIIAGGTGEFEAGISKDGQTREHALLAFTLGVRQLIVAVNKMDTTKWSEARFNEIIKEVSSFIKKIGYNPKSVPFVPISGWHGDNMLEESTNMPWYKGWAKETKAGAKSGKTLLEAIDNIDPPTRPSDKPLRLPLQDVYKIGGIGTVPVGRVETGVIKAGMVVTFAPAAVTTEVKSVEMHHETLSEGAPGDNVGFNVKNVSVKDIRRGNVCSDSKNDPAKEAGSFTAQVIILNHPGQIGAGYAPVLDCHTAHIACKFSELIEKIDRRSGKSLEAEPKFVKSGDSAIVKMVPSKPMCVEAYTDYPPLGRFAVRDMRQTVAVGV

SEQ ID NO: 17141 - protein, 426 aa, Thermomucor indicae-seudaticae
VVVIGHVDSGKSTTTGHLIYKCGGIDKRTIEKFEKEAAELGKGSFKYAWVLDKLKAERERGITIDIALWKFETPKYYVTVIDAPGHRDFIKNMITGTSQADCGILIIAAGTGEFEAGISKDGQTREHALLAFTLGVRQLIVAINKMDSTKYSEARYNEIVKEVSIFIKKIGYNPKAVPFVPISGWNGDNMLEESPNMPWFKGWTKETKAGEKTGKTLLEAIDSIEPPVRPVDKPLRLPLQDVYKIGGIGTVPVGRVETGTIKAGMVVTFAPANVTTEVKSVEMHHEQLAEGVPGDNVGFNVKNVSVKDIRRGNVCSDSKNDPAKEAASFTAQVIVLNHPGQISAGYSPVLDCHTAHIACKFAELLEKIDRRSGKKLEDNPKSIKSGDSAIVKMVPTKPMCVESYTEYPPLGRFAVRDMRQTVAVGV

SEQ ID NO: 17142 - protein, 417 aa, Zygorhynchus heterogamus
GKSTTTGHLIYKCGGIDKRTIEKFEKEAAELGKGSFKYAWVLDKLKAERERGITIDIALWKFETPKYNVTVIDAPGHRDFIKNMITGTSQADCAILIIAGGTGEFEAGISKDGQTREHALLAFTLGVRQLIVAINKMDTTKWSEARYNEIVKEVSSFIKKIGFNPKSVPFVPISGWHGDNMLEESKNMPWFKGWNKETKAGAKTGKTLLEAIDAIDPPTRPSDKPLRLPLQDVYKIGGIGTVPVGRVETGIIKAGMVVNFAPAAVTTEVKSVEMHHETLVEGLPGDNVGFNVKNVSVKDIRRGNVCSDSKNDPAKESASFLAQVIILNHPGQISAGYAPVLDCHTAHIACKFAELVEKIDRRSGKKMEDAPKFVKSGDSAIVKMIPSKPMCVEAYTDYPPLGRFAVRDMRQTVAVGV

SEQ ID NO: 17143 - protein, 370 aa, Pilobolus umbonatus
GHVDSGKSTTTGHLIYKCGGIDKRTIEKFEKEASELGKGSIKYAWVLDKLKAERERGITIDIALWKFETPKYNVTVIDAPGHRDFIKNMITGTSQADCAILIIAGGTGEFEAGISKDGQTREHCLLAFTLGVRQLIVAINKMDTTKWSEARYNEIVKEVSSFIKKIGFNPKAVPFVPISGWHGDNMLEESKNMPWFKGWTKESKAGNKAGKTLLEAIDAIEPPSRPSDKPLRLPLQDVYKIGGIGTVPVGRVETGVIKAGMVVTFAPAAVTTEVKSVEMHHETLTEGLPGDNVGFNVKNVSVKDIRRGNVCSDSKNDPAKEAGSFTAQVIILNHPGQIGAGYAPVLDCHTAHIACKFAELLEKIDRRSGK

SEQ ID NO: 17144 - protein, 416 aa, Utharomyces epallocaulus
GKSTTTGHLIYKCGGIDKRTIEKFEKEAAELGKGSFKYAWVLDKLKAERERGITIDIALWKFETPKYHVTVIDAPGHRDFIKNMITGTSQADCAILIIAGGTGEFEAGISKDGQTREHALLAFTLGVRQLIVAINKMDTTKWSEARYNEIVKEVSSFIKKIGFNPKSVPFVPISGWHGDNMLEESKNMPWFKGWNKETKAGAKTGKTLLEAIDAIDPPTRPSDKPLRLPLQDVYKIGGIGTVPVGRVETGTIKAGMVVTFAPANVTTEVKSVEMHHETLTEGLPGDNVGFNVKNVSVKDIRRGNVCSDSKNDPAKEAGSFTAQVIILNHPGQIGAGYAPVLDCHTAHIACKFAELIEKIDRRSGKKLEDNPKFVKSGDSAIVKMVPSKPMCVEAYTEYPPLGRLAVRDMRQTVAVG

SEQ ID NO: 17145 - protein, 417 aa, Hesseltinella vesiculosa
GKSTTTGHLIYKCGGIDKRTIEKFEKEAAELGKGSFKYAWVLDKLKAERERGITIDIALWKFETPKYHVTVIDAPGHRDFIKNMITGTSQADCGILIIAAGTGEFEAGISKDGQTREHALLAFTLGVRQLIVAINKMDSTKWSEARFNEIVKEVSAFIKKIGFNPKSVPFVPISGWHGDNMLEESGNMPWYKGWNKETKAGAKSGKTLLDAIDAIDPPTRPSDKPLRLPLQDVYKIGGIGTVPVGRVETGVIKAGMVVNFAPANVTTEVKSVEMHHEQLVEGVPGDNVGFNVKNVSVKDIRRGNVCSDSKNDPAKEAGSFTAQVIVLNHPGQIGAGYAPVLDCHTAHIACKFAELLEKIDRRSGKKLEDAPKFVKSGDSAIVKMIPSKPMCVEAYTDYPPLGRFAVRDMRQTVAVGV

SEQ ID NO: 17146 - protein, 417 aa, Syncephalastrum monosporum var. pluriproliferum
GKSTTTGHLIYKCGGIDKRTIEKFEKEAAELGKGSFKYAWVLDKLKAERERGITIDIALWKFETPKYHVTVIDAPGHRDFIKNMITGTSQADCGILIIAAGTGEFEAGISKDGQTREHALLAFTLGVRQLIVAINKMDSTKYSEARYNEIVKEVSTFIKKIGFNPKSVPFVPISGWNGDNMLEESSNMPWFKGWKKETKAGEKSGKTLLEAIDNIDPPVRPSDKPLRLPLQDVYKIGGIGTVPVGRVETGVIKAGMVVTFAPANVTTEVKSVEMHHEQLVEGVPGDNVGFNVKNVSVKDIRRGNVCSDSKNDPAKESASFTAQVIVLNHPGQIGAGYAPVLDCHTAHIACKFAELLEKIDRRSGKKLEESPKFVKSGDSAIVKMVPSKPMCVEAYTEYPPLGRFAVRDMRQTVAVGV

SEQ ID NO: 17147 - protein, 417 aa, Dichotomocladium elegans
GKSTTTGHLIYKCGGIDKRTIEKFEKEAAELGKGSFKYAWVLDKLKAERERGITIDIALWKFETPKYFVTVIDAPGHRDFIKNMITGTSQADCGILIIAAGTGEFEAGISKDGQTREHALLAFTLGVRQLIVAINKMDSTKYSEARYNEIVKEVSGFIKKIGFNPKSVPFVPISGWNGDNMLEESPNMPWFKGWTKETKAGSKAGKTLLEAIDAIDPPVRPSDKPLRLPLQDVYKIGGIGTVPVGRVETGVIKAGMIVNFAPANVTTEVKSVEMHHEQLVEGVPGDNVGFNVKNVSVKDIRRGNVCSDSKNDPAKEAGSFTAQVIVLNHPGQIGAGYSPVLDCHTAHIACKFAELLEKIDRRSGKKLEDAPKFIKSGDSAIVKMIPSKPMCVEAYTEYPPLGRFAVRDMRQTVAVGV

SEQ ID NO: 17148 - protein, 365 aa, Dicranophora fulva
GKSTTTGHLIYKCGGIDKRTIEKFEKEAAELGKGSFKYAWVLDKLKAERERGITIDIALWKFETPKFNVTVIDAPGHRDFIKNMITGTSQADCAILIIAGGTGEFEAGISKDGQTREHALLAFTLGVRQLIVAINKMDTTKWSEARYNEIVKEVSSFIKKIGFNPKSVPFVPISGWHGDNMLEESVNMPWFKGWNKETKAGAKSGKTLLEAIDSIEPPTRPSDKPLRLPLQDVYKIGGIGTVPVGRVETGVIKAGMIVNFAPAAVTTEVKSVEMHHETLTEGLPGDNVGFNVKNVSVKDIRRGNVCSDSKNDPAKESASFLAQVIILNHPGQISSGYSPVLDCHTAHIACKFAELVEKIDRRSGK

SEQ ID NO: 17149 - protein, 365 aa, Ellisomyces anomalus
GKSTTTGHLIYKCGGIDKRTIEKFEKEAAELGKGSFKYAWVLDKLKAERERGITIDIALWKFETPKYNVTVIDAPGHRDFIKNMITGTSQADCAILIIAGGTGEFEAGISKDGQTREHALLAFTLGVRQLIVAINKMDTTKWSQDRYNEIVKEVSGFIKKIGFNPKSVPFVPISGWHGDNMLEESNNMPWFKGWNKETKAGSKTGKTLLEAIDAIDPPVRPSDKPLRLPLQDVYKIGGIGTVPVGRVETGTIKAGMVVNFAPAAVTTEVKSVEMHHETLTEGLPGDNVGFNVKNVSVKDIRRGNVCPDSKNDPAKESASFTAQVIILNHPGQISAGYAPVLDCHTAHIACKFSELIEKIDRRSGK

SEQ ID NO: 17150 - protein, 364 aa, Fennellomyces linderi
GKSTTTGHLIYKCGGIDKRTIEKFEKEAAELGKGSFKYAWVLDKLKAERERGITIDIALWKFETPKYHVTVIDAPGHRDFIKNMITGTSQADCGILIIAAGTGEFEAGISKDGQTREHALLAFTLGVRQLIVAINKMDSTKYSEARYNEIVKEVSTFIKKIGYNPKSVPFVPISGWNGDNMLEESPNMPWFKGWTKETKAGAKSGKTLLEAIDNIDPPVRPSDKPLRLPLQDVYKIGGIGTVPVGRVETGVIKAGMVVTFAPANVTTEVKSVEMHHEQLAEGVPGDNVGFNVKNVSVKDIRRGNVCSDSKNDPAKEAGSFTAQVIVLNHPGQIGAGYSPVLDCHTAHIACKFAELLEKIDRRSG

SEQ ID NO: 17151 - protein, 365 aa, Helicostylum elegans
GKSTTTGHLIYKCGGIDKRTIEKFEKEAAELGKGSFKYAWVLDKLKAERERGITIDIALWKFETPKYMVTVIDAPGHRDFIKNMITGTSQADCAILIIAGGTGEFEAGISKDGQTREHALLAFTLGVRQLIVAINKMDTTKWSEARYTEIVKEVSSFIKKIGFNPKSVPFVPISGWHGDNMLEESKNMGWFKGWTKETKAGSKTGKTLLEAIDAIEPPVRPSDKPLRLPLQDVYKIGGIGTVPVGRVETGIIKAGMVVNFAPAAVTTEVKSVEMHHETLTEGLPGDNVGFNVKNVSVKDIRRGNVCPDSKNDPAKEAGSFTAQVIILNHPGQISNGYSPVLDCHTAHIACKFAELIEKIDRRSGK

SEQ ID NO: 17152 - protein, 365 aa, Kirkomyces cordense
GKSTTTGHLIYKCGGIDKRTIEKFEKEAAELGKGSFKYAWVLDKLKAERERGITIDIALWKFETPKYNVTVIDAPGHRDFIKNMITGTSQADCAILIIAGGTGEFEAGISKDGQTREHALLAFTLGVRQLIVAINKMDTTKWSEARYNEIVKEVSSFIKKIGFNPKSVPFVPISGWHGDNMLDESTNMPWFKGWTKETKAGSKTGKTLLEAIDAIDPPSRPIDKPLRLPLQDVYKIGGIGTVPVGRVETGVIKAGMVVTFAPAAVTTEVKSVEMHHETLSEGLPGDNVGFNVKNVSVKDIRRGNVCSDSKNDPAKESASFTAQVIILNHPGQISAGYAPVLDCHTAHIACKFSELIEKIDRRSGK

SEQ ID NO: 17153 - protein, 365 aa, Thamnidium elegans
GKSTTTGHLIYKCGGIDKRTIEKFEKEAAELGKGSFKYAWVLDKLKAERERGITIDIALWKFETPKYMVTVIDAPGHRDFIKNMITGTSQADCAILIIAGGTGEFEAGISKDGQTREHALLAFTLGVRQLIVAINKMDTTKWSEARYTEIVKEVSSFIKKIGFNPKSVPFVPISGWHGDNMLDESKNMGWFKGWTKETKAGSKTGKTLLEAIDAIEPPVRPSDKPLRLPLQDVYKIGGIGTVPVGRVETGTIKAGMVVNFAPAAVTTEVKSVEMHHETLTEGLPGDNVGFNVKNVSVKDIRRGNVCSDSKNDPAKEAGSFTAQVIILNHPGQISNGYSPVLDCHTAHIACKFAELVEKIDRRSGK

SEQ ID NO: 17154 - protein, 417 aa, Thamnostylum piriforme
GKSTTTGHLIYKCGGIDKRTIEKFEKEAAELGKGSFKYAWVLDKLKAERERGITIDIALWKFETPKYHVTVIDAPGHRDFIKNMITGTSQADCGILIIAAGTGEFEAGISKDGQTREHALLAFTLGVRQLIVAINKMDSTKYSEARYTEIVKEVSTFIKKIGFNPKSVPFVPISGWNGDNMLEESPNMPWFKGWTKETKAGSKTGKTLLEAIDAIDPPVRPSDKPLRLPLQDVYKIGGIGTVPVGRVETGVIKAGMIVTFAPANVTTEVKSVEMHHEQLVEGVPGDNVGFNVKNVSVKDIRRGNVCSDSKNDPAKEAGSFTAQVIVLNHPGQIGAGYSPVLDCHTAHIACKFAELLEKIDRRSGKKLEDAPKFVKSGDSAIVKMVPSKPMCVEAYTEYPLLGRFAVRDMRQTVAVGV

SEQ ID NO: 17155 - protein, 365 aa, Backusella ctenidia
GKSTTTGHLIYKCGGIDKRTIEKFEKEAAELGKGSFKYAWVLDKLKAERERGITIDIALWKFETPKYNVTVIDAPGHRDFIKNMITGTSQADCAILIIAGGTGEFEAGISKDGQTREHALLAFTLGVRQLIVAINKMDTTKWSQDRYNEIVKEVSGFIKKIGFNPKSVPFVPISGWHGDNMLDESTNMPWFKGWNKETKAGSKTGKTLLEAIDAIEPPVRPSDKPLRLPLQDVYKIGGIGTVPVGRVETGTIKAGMVVNFAPAAVTTEVKSVEMHHETLSEGLPGDNVGFNVKNVSVKDIRRGNVCSDSKNDPAKESASFTAQVIILNHPGQISAGYAPVLDCHTAHIACKFSELIEKIDRRSGK

SEQ ID NO: 17156 - protein, 401 aa, Circinomucor circinelloides
GKSTTTGHLIYKCGGIDKRTIEKFEKEAAELGKGSFKYAWVLDKLKAERERGITIDIALWKFETPKYNVTVIDAPGHRDFIKNMITGTSQADCAILIIAGGTGEFEAGISKDGQTREHALLAFTLGVRQLIVAINKMDTTKWSQDRYNEIVKEVSGFIKKIGFNPKSVPFVPISGWHGDNMLDESTNMPWFKGWNKETKAGSKTGKTLLEAIDAIEPPVRPSDKPLRLPLQDVYKIGGIGTVPVGRVETGTIKAGMVVNFAPAAVTTEVKSVEMHHETLSEGLPGDNVGFNVKNVSVKDIRRGNVCSDSKNDPAKESASFTAQVIILNHPGQISAGYAPVLDCHTAHIACKFSELIEKIDRRSGKKMEDAPKFVKSGDSAIVKMVPSKPMCVEAYTDYPPL

SEQ ID NO: 17157 - protein, 405 aa, Absidia blakesleeana
GKSTSTGHLIYKCGGIDKRTIEKFEKEAAELGKGSFKYAWVLDKLKAERERGITIDIALWKFETPKYHVTVIDAPGHRDFIKNMITGTSQADCGILIIAAGTGEFEAGISKDGQTREHALLAFTLGVRQLIVAINKMDSTKYSEARYNEIVKEVSTFIKKIGFNPKSVPFVPISGWNGDNMLEESTNMPWFKGWNKETKAGAKTGKTLLEAIDNIDPPVRPSDKPLRLPLQDVYKIGGIGTVPVGRVETGVIKPGMVVTFAPANVTTEVKSVEMHHEQLAEGVPGDNVGFNVKNVSVKDIRRGNVCSDSKNDPAKESASFTAQVIVLNHPGQIGAGYSPVLDCHTAHIACKFSELLEKIDRRSGKKLEDSPKFVKCGDSAIVKMVPSKPMCVEAYTEYPPLGRFA

SEQ ID NO: 17158 - protein, 413 aa, Hyles lineata
HVDSGKSTTTGHLIYKCGGIDKRTIEKFEKEAQEMGKGSFKYAWVLDKLKAERERGITIDIALWKFETAKYYVTIIDAPGHRDFIKNMITGTSQADCAVLIVAAGTGEFEAGISKNGQTREHALLAFTLGVKQLIVGVNKMDSTEPPYSESRFEEIKKEVSSYIKKIGYNPAAVAFVPISGWHGDNMLEPSTKMPWFKGWQVERKEGKADGKCLIEALDAILPPARPTDKALRLPLQDVYKIGGIGTVPVGRVETGILKPGTIVVFAPANITTEVKSVEMHHEALQEAVPGDNVGFNVKNVSVKELRRGYVAGDSKNNPPKGAADFTAQVIVLNHPGQISNGYTPVLDCHTAHIACKFAEIKEKVDRRTGKSTEDNPKSIKSGDAAIVNLVPSKPLCVESFQEFPPLGRFAVR

SEQ ID NO: 17159 - protein, 411 aa, Oikopleura longicauda
DSGKSTTTGHLIYKCGGIDKRTIEKFEKEAQEMGKGSFKYAWVLDKLKAERERGITIDIALWKFETNKYYVTIIDAPGHRDFIKNMITGTSQADCAVLIVAAGVGEFEAGISKNGQTREHALLAFTLGVKQLIIGVNKMDSNEPPYSEKRFSEISSEVSNYVKKVGYNPKAVAFVPISGWHGDNMIEPSTNMSWYKGWSKEVKEGKFSGKTMFEALDSIIPPTRPSDKPLRLPLQDVYKIGGIGTVPVGRVETGLIKPGMVVTFAPVNVTTEVKSVEMHHESLPEAGPGDNVGFNVKNVSVKDIRRGNVASDSKNDPAKEAKTFNAQVIVLNHPGEIGNGYSPVLDCHTAHIACKFTELLEKIDRRSGKKMEDFPKKVKSGDAAIVKMTPSKPMCVEAFSAYPPLGRFAVR

SEQ ID NO: 17160 - protein, 377 aa, Eumesocampa frigilis
QEMGKGSFKYAWVLDKLKAERERGITIDIALWKFETAKYYITIIDAPGHRDFIKNMITGTSQADCAVLIVAAGTGEFEAGISKNGQTREHALLAYTLGVKQLIVGVNKMDSTEPPYNEARYEEIKKEVSSYIKKIGYNPATVAFVPISGWNGDNMLEPSDKMGWFKGWKVERKEGNAEGKCLIEALDAILPPSRPTDKALRLPLQDVYKIGGIGTVPVGRVETGILKPGMVVVFAPANITTEVKSVEMHHEALTEAVPGDNVGFNVKNVSVKELRRGYVCGDSKNNPPKAAQDFTAQVIVLNHPGQICNGYTPVLDCHTAHIACKFAEIKEKCDRRTGKTTEENPKAIKSGDAAIVTLVPSKPMCVEAFTEFPPLGR

SEQ ID NO: 17161 - protein, 377 aa, Metajapyx subterraneus
QEMGKGSFKYAWVLDKLKAERERGITIDIALWKFETGKYYITIIDAPGHRDFIKNMITGTSQADCAVLIVAAGTGEFEAGISKNGQTREHALLAYTLGVKQLIVGVNKMDSTEPPYSDSRYEEIKKEVSNYIKKIGYNPAAVAFVPISGWNGDNMLEPSEKMPWFKGWKVERKEGNAEGKCLIEALDAILPPSRPTDKALRLPLQDVYKIGGIGTVPVGRVETGILKPGMVVTFAPNNLTTEVKSVEMHHEALTEAMPGDNVGFNVKNVSVKELRRGYVCGDSKGNPPKAASDFTAQVIVLNHPGQISNGYTPVLDCHTAHIACKFAEIKEKCDRRTGKTTEENPKSIKSGDAAIITLVPTKPMCVEAFTEFPPLGR

SEQ ID NO: 17162 - protein, 377 aa, Machiloides banksi
QEMGKGSFKYAWVLDKLKAERERGITIDIALWKFETSKYYVTIIDAPGHRDFIKNMITGTSQADCAVLIVAAGTGEFEAGISKNGQTREHALLAFTLGVKQLIVGVNKMDSTEPPYSESRYEEIKKEVSNYIKKIGYNPVAVPFVPISGWHGDNMLEQSEKMSWFKGWKIERKEGNADGKCLIDALDAILPPARPTDKPLRLPLQDVYKIGGIGTVPVGRVETGLLKPGMVVTFAPANITTEVKSVEMHHEALTEAVPGDNVGFNVKNVSVKELRRGYVCGDSKNNPPKGAQDFIAQVIVLNHPGQISNGYTPVLDCHTAHIACKFAEIKEKCDRRTGKTVEENPKAIKSGDAAIINLVPSKPMCVESFQEFPPLGR

SEQ ID NO: 17163 - protein, 377 aa, Scutigerella sp. 'Scu2'
QEMGKGSFKYAWVLDKLKAERERGITIDISLWKFETPKYYITIIDAPGHRDFIKNMITGTSQADCAVLVVAAGTGEFEAGISKNGQTREHALLAYTLGVKQLIVAVNKMDSTEPPYNQGRFEEIQKEVCSYIKKIGYNPVAVAFVPISGWNGDNMLEASPNMTWHKGWEIDRKEGKASGKTLLEALDAIIPPARPTDKPLRLPLQDVYKIGGIGTVPVGRVETGVIKPGMVVTFAPANITTEVKSVEMHHEALQEAVPGDNVGFNVKNVSVKELRRGFVAGDSKTNPPKAVADFTAQVIVLNHPGQISNGYTPVLDCHTAHIACKFAEIKEKCDRRTGKTTEENPKAIKSGDAAIITLIPSKPMCVESFSDFPPLGR

SEQ ID NO: 17164 - protein, 377 aa, Peripatus sp. 'Per2'
QEMGKGSFKYAWVLDKLKAERERGITIDIALWKFETPKFYITIIDAPGHRDFIKNMITGTSQADCAVLIVAAGTGEFEAGISKNGQTREHALLAYTLGVKQLIVGVNKMDSTEPPFSQVRFDEIVKEVSNYIKKIGYNPKTVPFVPISGWHGDNMLEGSANMAWHKGWEVEKGDKKFSGKTLLEALDSIQPPSRPTEKPLRLPLQDVYKIGGIGTVPVGRVETGILKPGMVVTFAPVGLTTEVKSVEMHHEALTEACPGDNVGFNVKNVSVKELRRGFVAGDSKNEPPKEAADFLAQVIVLNHPGQISNGYTPVLDCHTAHIACKFAEIKEKCDRRTGKTLEENPKSIKSGDAAIVSLVPTKPLCVEAFSDFPPLGR

SEQ ID NO: 17165 - protein, 359 aa, Harpochytrium sp. JEL94
KYAWVLDKLKAERERGITIDIALWKFETPKLYVTVIDAPGHRDFIKNMITGTSQADCAVLIVPAGTGEFEAGISKDGQTREHALLAYTLGVKQMIVAVNKMDSAKWSEERYNEIVKEVSSYIKKVGYNPAAVPFVPISGWHGDNMIEASDNMPWFKSWQKETKGGKFTGKTLLEAIDSIEPPSRPTDKPLRLPLQDVYKIGGIGTVPVGRVETGIIKPGMVVTFAPTGVTTEVKSVEMHHEALPEALPGDNVGFNVKNVSVKDIRRGNVAGDSKNDPPRETASFNAQVIILNHPGQIGAGYAPVLDCHTAHIACKFAELVEKIDRRSGKKMEDAPKFVKSGDACIAKMVPSKPMCGESF

SEQ ID NO: 17166 - protein, 390 aa, Monoblepharis insignis
IEKFEKEAAELGKGSFKYAWVLDKLKAERERGITIDIALWRFETPKYNVTVIDAPGHRDFIKNMITGTSQADCAILIIAGGTGEFEAGISKDGQTREHALLSFTLGVRQLIVAVNKMDSTGYSEERFNEIVREVSNFVKKVGYNPKTVAFVPISGWNGDNMIEATTNMPWYKGWEKETKSGKATGKTLVDAIDAIEPPTRPTDKPLRLPLQDVYKIGGIGTVPVGRVETGVIKPGMVVTFAPSNVTTEVKSVEMHHESLAEGLPGDNVGFNVKNVSVKDIRRGNVASDSKNDPAQESASFNAQVIVMNHPGQISNGYSPVLDCHTAHIACRFNNILQKIDRRSGKVLEENPKFIKSGDAAMVEMIPTKPMCVESFNEYPPLGRFAVRDMR

SEQ ID NO: 17167 - protein, 390 aa, Rhizophlyctis harderi
IEKFEKEAAEMGKGSFKYAWVLDKLKAERERGITIDIALWKFETPKYYVTVIDAPGHRDFIKNMITGTSQADCAILVIASGVGEFEAGISKDGQTREHALLANTLGVKQMIIAVNKMDTNKWSEARFNEIVKELSSFIKKVGFNPKAVPFIPISGWHGDNMLEPSENTPWFKGWTKETKAGALKGTTLLQAIDAIDLPTRPTDKPLRLPLQDVYKIGGIGTVPVGRVETGTIKAGMIVNFSPANVTTEVKSVEMHHETLEAGLPGDNVGFNIKNVSVKEIRRGMVCSDTKNDPAKEAASFNAQIIVLNHPGQISAGYSPVLDCHTAHIACKFAELLEKLDRRTSKKLEDNPKFIKSGDSAIVKMVPSKPMCVESFTEYPPLGRFAVRDMR

SEQ ID NO: 17168 - protein, 331 aa, Iphiclides podalirius
KSTTTGHLIYKCGGIDKRTIEKFEKEAQEMGKGSFKYAWVLDKLKAERERGITIDIALWKFETSKYYVTIIDAPGHRDFIKNMITGTSQADCAVLIVAAGTGEFEAGISKNGQTREHALLAFTLGVKQLIVGVNKMDSTEPPYSEPRFEEIKKEVSSYIKKIGYNPAAVAFVPISGWHGDNMLEPSTKMPWFKGWQVERKEGKAEGKCLIEALDAILPPARPTDKALRLPLQDVYKIGGIGTVPVGRVETGVLKPGTIVVFAPANITTEVKSVEMHHEALQEAVPGDNVGFNVKNVSVKELRRGYVAGDSKNNPPKGASDFTAQVIVLNHP

SEQ ID NO: 17169 - protein, 373 aa, Pachymerium ferrugineum
  unsure (1)..(373): unsure at all Xaa locations
KXSFKYAWXLDKLKAERERGITIDISLWKFETAKYYITIIDAPGHRDFIKNMITGTSQADCAVLIVAAGTGEFEAGISKNGQTREHALLAYTLGVKQLIVAVNKMDSTEPPYSQPRFEEIQKEVRGYIKKIGYNPAGVPFVPISGWNGDNMLDASPNMPWHKGWDIERKEGKASGKTLLEALDAIIPPTRPTDKPLRLPLQDVYKIGGIGTVPVGRVETGTLKPGMVVTFAPANLTTEVKSVEMHHEALQEALPGDNVGFNIKNVSVKELRRGYVAGDTKNNPPKAVSDFTAQVIVLNHPGQISNGYTPVLDCHTAHIACKFAEIMEKCDRRSGKTVEASPKSIKSGDAAIINLVPSKPMCVESFADFPPLGR

SEQ ID NO: 17170 - protein, 363 aa, Panorpa acuta
ERERGITIDIALWKFETAKYYVTIIDAPGHRDFIKNMITGTSQADCAVLIVAAGTGEFEAGISKNGQTREHALLAFTLGVKQLIVGVNKMDSTEPPYSESRFEEIKKEVSSYIKKIGYNPAAVAFVPISGWHGDNMLEVSSKMGWFKGWNVERKEGKADGKCLIEALDAILPPARPTDKPLRLPLQDVYKIGGIGTVPVGRVETGVLKPGTVVVFAPANLTTEVKSVEMHHEALQEAVPGDNVGFNVKNVSVKELRRGYVAGDSKANPPKGAADFTAQVIVLNHPGQISNGYTPVLDCHTAHIACKFAEIKEKVDRRTGKSTEDNPKAIKSGDAAIVVLVPSKPMCVESFQEFPPLGRFAVRD

SEQ ID NO: 17171 - protein, 363 aa, Panorpa cognata
ERERGITIDIALWKFETAKYYVTIIDAPGHRDFIKNMITGTSQADCAVLIVAAGTGEFEAGISKNGQTREHALLAFTLGVKQLIVGVNKMDSTEPPYSESRFEEIKKEVSSYIKKIGYNPAAVAFVPISGWHGDNMLEVSSKMGWFKGWAVERKEGKADGKCLIEALDAILPPARPTDKPLRLPLQDVYKIGGIGTVPVGRVETGVLKPGTVVVFAPANLTTEVKSVEMHHEALQEAVPGDNVGFNVKNVSVKELRRGYVAGDSKANPPKGAADFTAQVIVLNHPGQISNGYTPVLDCHTAHIACKFAEIKEKVDRRTGKSTEDNPKAIKSGDAAIVVLVPSKPMCVESFQEFPPLGRFAVRD

SEQ ID NO: 17172 - protein, 377 aa, Abacion magnum
AELGKGSFKYAWVLDKLKAERERGITIDISLWKFETPKFYITIIDAPGHRDFIKNMITGTSQADCAVLIVAAGTGEFEAGISKNGQTREHALLAYTLGVKQLIVGVNKMDTTEPPYSSPRFEEIQKEVSSYIKKIGYNPAAVAFVPISGWNGDNMLEPSSNMPWHKGWSIERKEGNASGKTLLEALDAIIPPQRPTDKALRLPLQDVYKIGGIGTVPVGRVETGVLKPGMVVTFAPTALTTEVKSVEMHHEALQEAVPGDNVGFNVKNVSVKELRRGFVAGDSKANPPKAVSEFTAQVIVLNHPGQISNGYTPVLDCHTAHIACKFAEIKEKCDRRTGKTVEENPKAIKSGDAAIITLIPTKPMCVESFSDFPPLGR

SEQ ID NO: 17173 - protein, 377 aa, Cryptops hyalinus
QEMGKGSFKYAWVLDKLKAERERGITIDISLWKFETAKYYITIIDAPGHRDFIKNMITGTSQADCAVLIVAAGTGEFEAGISKNGQTREHALLAYTLGVKQLIVGVNKMDSTEPPYSQSRFEEIQKEVSSYIKKIGYNPASVAFVPISGWNGDNMLEPSTNMTWHKGWDIERKEGKASGKTLLEALDAIIPPTRPTDKPLRLPLQDVYKIGGIGTVPVGRVETGVLKPGMVVTFAPANITTEVKSVEMHHEALQEAVPGDNVGFNVKNVSVKELRRGYVAGDSKNNPPRAVADFTAQVIVLNHPGQISNGYTPVLDCHTAHIACKFAEIKEKCDRRTGKTVEENPKSIKSGDAAIVNLVPSKPMCVESFSDFPPLGR

SEQ ID NO: 17174 - protein, 377 aa, sphaerotheriid 'Glo2'
AELGKGSFKYAWVLDKLKAERERGITIDISLWKFETPKFYITIIDAPGHRDFIKNMITGTSQADCAVLIVAAGTGEFEAGISKNGQTREHALLAYTLGVKQLIVGVNKMDTTEPPYSESRFDEIKKEVSNYIKKIGYNPAAVAFVPISGWNGDNMLEPSPSMTWHKGWTIERKEGNANGKTLLEALDAIVPPARPTDKALRLPLQDVYKIGGIGTVPVGRVETGVLKPGMVVTFAPTALTTEVKSVEMHHEALVEAVPGDNVGFNVKNVSVKELRRGFVCGDSKSNPPKAVSEFTAQVIVLNHPGQIQNGYTPVLDCHTAHIACKFADIKEKCDRRTGKTVEDNPKFIKSGDAAIIALVPTKPMCVESFSDFPPLGR

SEQ ID NO: 17175 - protein, 377 aa, Geophilus vittatus
QEMGKGSFKYAWVLDKLKAERERGITIDISLWKFETPKYYITIIDAPGHRDFIKNMITGTSQADCAVLIVAAGTGEFEAGISKNGQTREHALLAYTLGVKQLIVGVNKMDSTEPPYSQGRFEEIQKEVSSYIKKIGYNPAAVPFVPISGWNGDNMLDASPNMPWHKGWDIERKEGKASGKTLLEALDSIIPPTRPTDKPLRLPLQDVYKIGGIGTVPVGRVETGTLKPGMVVTFAPVNLTTEVKSVEMHHEALQEALPGDNVGFNVKNVSVKELRRGYVAGDSKNNPPKAVSDFTAQVIVLNHPGQISNGYTPVLDCHTAHIACKFAEIKEKCDRRSGKTVEENPKSIKSGDAAIVNLVPSKPMCVESFSDFPPLGR

SEQ ID NO: 17176 - protein, 377 aa, Hiltonius sp. 'Hil'
AELGKGSFKYAWVLDKLKAERERGITIDISLWKFETAKFYITIIDAPGHRDFIKNMITGTSQADCAVLIVAAGTGEFEAGISKNGQTREHALLAYTLGVKQLIVGVNKMDTTEPPYSEARFDEIKKEVSSYIKKIGYNPVAVAFVPISGWNGDNMLEPSPNMTWHKGWNIERKEGNASGKTLLEALDAIVAPSRPTDKALRLPLQDVYKIGGIGTVPVGRVETGVLKPGMVVTFAPANLTTEVKSVEMHHEALTEAVPGDNVGFNVKNVSVKELRRGFVAGDSKANPPKAVSEFTAQVIVLNHPGQISNGYTPVLDCHTAHIACKFAEIKEKCDRRTGKTVEQNPKAIKSGDAAIVNLIPTKPMCVESFADFPPLGR

SEQ ID NO: 17177 - protein, 377 aa, Ophyiulus pilosus
AELGKGSFKYAWVLDKLKAERERGITIDISLWKFETAKFYITIIDAPGHRDFIKNMITGTSQADCAVLIVAAGTGEFEAGISKNGQTREHALLAYTLGVKQLIVGVNKMDTTEPPYNEGRFDEIKKEVSSYIKKIGYNPATVAFVPISGWNGDNMLEPSPSMTWHKGWAIERKEGNANGKTLLEALDAIIPPARPTDKALRLPLQDVYKIGGIGTVPVGRVETGVLKPGMVVTFAPAALTTEVKSVEMHHEALLEAVPGDNVGFNVKNVSVKELRRGFVAGDSKANPPKAVSEFTAQVIVLNHPGQISNGYTPVLDCHTAHIACKFAEIKEKCDRRTGKTVEDNPKAIKSGDAAIVNLVPTKPMCVESFSDFPPLGR

SEQ ID NO: 17178 - protein, 377 aa, Nemasoma varicorne
AELGKGSFKYAWVLDKLKAERERGITIDISLWKFETAKFYITIIDAPGHRDFIKNMITGTSQADCAVLIVAAGTGEFEAGISKNGQTREHALLAYTLGVKQLIVGVNKMDTTEPPYNEGRFDEIKKEVSSYIKKIGYNPATVAFVPISGWNGDNMLEPSPNMTWHKGWAIERKDGNASGKTLLEALDAIIPPARPTDKALRLPLQDVYKIGGIGTVPVGRVETGVLKPGMVVTFAPAALTTEVKSVEMHHEALTEAVPGDNVGFNVKNVSVKELRRGFVAGDSKANPPKAVSEFTAQVIVLNHPGQISNGYTPVLDCHTAHIACKFAEIKEKCDRRTGKTVEENPKAIKSGDAAIVNLVPTKPMCVESFSDFPPLGR

SEQ ID NO: 17179 - protein, 377 aa, Oxidus gracilus
AELGKGSFKYAWVLDKLKAERERGITIDISLWKFETPKYYITIIDAPGHRDFIKNMITGTSQADCAVLIVAAGTGEFEAGISKNGQTREHALLAYTLGVKQLIVGVNKMDTTEPPYNEARFDEIKKEVSSYIKKIGYNPAAVAFVPISGWNGDNMLEPSPNMTWHKGWAVERKEGNASGKTLLEALDAVVPPQRPTDKALRLPLQDVYKIGGIGTVPVGRVETGVIKPGMVVTFAPVNLTTEVKSVEMHHEALLEAVPGDNVGFNVKNVSVKELRRGFVAGDSKNNPPKAVSEFTAQVIVLNHPGQISNGYTPVLDCHTAHIACKFAEIKEKCDRRTGKTVEDAPKAIKSGDAAIVNLVPTKPMCVESFSDFPPLGR

SEQ ID NO: 17180 - protein, 377 aa, Orthoporus ornata
AELGKGSFKYAWVLDKLKAERERGITIDISLWKFETPKFYITIIDAPGHRDFIKNMITGTSQADCAVLIVAAGTGEFEAGISKNGQTREHALLAYTLGVKQLIVGVNKMDTTEPPYSEGRFDEIKKEVSSYIKKIGYNPAAVAFVPISGWNGDNMLEPSPNMSWHKGWSVERKEGNASGKTLLEALDAIIPPTRPTDKPLRLPLQDVYKIGGIGTVPVGRVETGVLKPGMVVTFAPSALTTEVKSVEMHHEALTEALPGDNVGFNVKNVAVKELRRGFVAGDSKANPPKAVSEFTAQVIVLNHPGQISNGYTPVLDCHTAHIACKFAEIKEKCDRRTGKTVEQNPKAIKSGDAAIINLVPTKPMCVESFSDFPPLGR

SEQ ID NO: 17181 - protein, 377 aa, Uroblaniulus canadensis
AELGKGSFKYAWVLDKLKAERERGITIDISLWKFETQKFYITIIDAPGHRDFIKNMITGTSQADCAVLIVAAGTGEFEAGISKNGQTREHALLAYTLGVKQLIVGVNKMDTTEPPYNEGRFDEIRKEVSNYIKKIGYNPATVAFVPISGWNGDNMLEPSPNMTWHKGWAIERKDGNANGKTLLEALDAIIPPARPTDKALRLPLQDVYKIGGIGTVPVGRVETGVLKPGMVVTFAPAALTTEVKSVEMHHEALQEAVPGDNVGFNVKNVSVKELRRGFVAGDSKANPPKAVSEFTAQVIVLNHPGQISNGYTPVLDCHTAHIACKFAEIKEKCDRRTGKTVEENPKAIKSGDAAIVNLVPTKPMCVESFSDFPPLGR

SEQ ID NO: 17182 - protein, 377 aa, Pokabius bilabiatus
QEMGKGSFKYAWVLDKLKAERERGITIDISLWKFETAKYYITIIDAPGHRDFIKNMITGTSQADCAVLIVAAGTGEFEAGISKNGQTREHALLAYTLGVKQLIVGVNKMDSTEPPYSQARFEEIQKEVSSYIKKIGYNPVAVAFVPISGWNGDNMLESSPNMPWHKGWDIERKEGKASGKTLLEALDAIVPPTRPTDKALRLPLQDVYKIGGIGTVPVGRVETGVLKPGMVVTFAPANLTTEVKSVEMHHEALQEAVPGDNVGFNVKNVSVKELRRGYVAGDSKSNPPKAVADFTAQVIVLNHPGQISNGYTPVLDCHTAHIACKFSEIKEKCDRRTGKTVEENPKSIKSGDAAIVNLIPSKPMCVESFADFPPLGR

SEQ ID NO: 17183 - protein, 365 aa, Polyzonium germanicum
AELGKGSFKYAWVLDKLKAERERGITIDISLWKFETAKFYITIIDAPGHRDFIKNMITGTSQADCAVLIVAAGTGEFEAGISKNGQTREHALLAYTLGVKQLIVGVNKMDTTEPPFHEARFDEIKKEVISYIKKVGYNAATVNFVPISGWNGDNMLEPSPNMTWHKGKTLLEALDSVVPPTRPTDKALRLPLQDVYKIGGIGTVPVGRVETGVLKPGMVVTFAPSALTTEVKSVEMHHEALTEALPGDNVGFNVKNVSVKELRRGFVAGDSKVNPPKAVSEFTAQVIVLNHPGQISNGYTPVLDCHTAHIACKFAEIKEKCDRRTGKALEENPKSIKSGDAAIINLVPTKPMCVESFSDFPPLGR

SEQ ID NO: 17184 - protein, 377 aa, Platydesmus sp. 'Pla'
AELGKGSFKYAWVLDKLKAERERGITIDISLWKFETPKYYITIIDAPGHRDFIKNMITGTSQADCAVLIVAAGTGEFEAGISKNGQTREHALLAYTLGVKQLIVGVNKMDTTEPPYNEGRFDEIKKEVSSYIKKIGYNPAAVAFVPISGWNGDNMLEPSANMTWHKGWAVERKEGNANGKTLLEALDAVIPPARPTDKALRLPLQDVYKIGGIGTVPVGRVETGVLKPGMVVTFAPSNLTTEVKSVEMHHEALQEAVPGDNVGFNVKNVSVKELRRGFVAGDSKANPPKAVSEFTAQVIVLNHPGQISNGYTPVLDCHTAHIACKFAEIKEKCDRRTGKTVEENPKAIKSGDAAIINLVPTKPMCVESFSDFPPLGR

SEQ ID NO: 17185 - protein, 377 aa, Sphaerotherium punctulatum
AELGKGSFKYAWVLDKLKAERERGITIDISLWKFETAKFYITIIDAPGHRDFIKNMITGTSQADCAVLIVAAGTGEFEAGISKNGQTREHALLAYTLGVKQLIVGVNKMDTTEPPYSESRFDEIRKEVSNYIKKIGYNPAAVAFVPISGWNGDNMLEPSPSMSWHKGWSIERKEGNANGKTLLEALDAIVPPARPTDKALRLPLQDVYKIGGIGTVPVGRVETGVLKPGMVVTFAPTALTTEVKSVEMHHEALVEAVPGDNVGFNVKNVSVKELRRGFVCGDSKSNPPKAVSEFTAQVIVLNHPGQIQNGYTPVLDCHTAHIACKFADIKEKCDRRTGKTVEENPKFIKSGDAAIIALVPTKPMCVESFSDFPPLGR

SEQ ID NO: 17186 - protein, 377 aa, Orthocricus sp. 'Spi1'
AELGKGSFKYAWVLDKLKAERERGITIDISLWKFETAKFYITIIDAPGHRDFIKNMITGTSQADCAVLIVAAGTGEFEAGISKNGQTREHALLAYTLGVKQLIVGVNKMDTTEPPYSESRFDEIKKEVSSYIKKIGYNPAAVAFVPISGWNGDNMLEPSPNMTWHKGWSIERKEGNASGKTLLEALDAIVPPTRPTDKALRLPLQDVYKIGGIGTVPVGRVETGVLKPGMVVTFAPANLTTEVKSVEMHHEALTEAVPGDNVGFNVKNVSVKELRRGFVAGDSKANPPKAVSEFTAQVIVLNHPGQISNGYTPVLDCHTAHIACKFAEIKEKCDRRTGKTVEENPKAIKSGDAAIVNLVPTKPMCVESFSDFPPLGR

SEQ ID NO: 17187 - protein, 377 aa, Scolopocryptops sexspinosus
QEMGKGSFKYAWVLDKLKAERERGITIDISLWKFETSKYYITIIDAPGHRDFIKNMITGTSQADCAVLIVAAGTGEFEAGISKNGQTREHALLAYTLGVKQLIVGVNKMDSTEPAYSQSRFEEIQKEVSSYIKKIGYNPASVPFVPISGWHGDNMLEASPNMTWHKGWEIERKEGKASGKTLLEALDSIIAPTRPTDKPLRLPLQDVYKIGGIGTVPVGRVETGLLKPGMVVTFAPANLTTEVKSVEMHHEALQEAVPGDNVGFNVKNVSVKELRRGFVAGDSKNNPPRAVADFTAQVIVLNHPGQIANGYTPVLDCHTAHIACKFAEIKEKCDRRTGKTVEENPKSIKSGDAAIVNLVPSKPMCVESFSDFPPLGR

SEQ ID NO: 17188 - protein, 377 aa, Striaria sp. 'Str2'
AELGKGSFKYAWVLDKLKAERERGITIDISLWKFETPRYYITIIDAPGHRDFIKNMITGTSQADCAVLIVAAGTGEFEAGISKNGQTREHALLAYTLGVKQLIVGVNKMDTTEPPYNEGRFDEIKKEVSSYIKKIGYNPVSVPFVPISGWNGDNMLEPSPSMTWHKGWSVERKEGNANGKTLLEALDAIVPPTRPTDKALRLPLQDVYKIGGIGTVPVGRVETGLLKPGMVVTFAPCNLTTEVKSVEMHHEALTEAVPGDNVGFNVKNVSVKELRRGYVAGDSKANPPKAVSEFTAQVIVLNHPGQISNGYTPVLDCHTAHIACKFAEIKEKCDRRTGKTTEENPKAIKSGDAAIVNLIPTKPMCVESFADFPPLGR

SEQ ID NO: 17189 - protein, 377 aa, Scolopendra viridis
QEMGKGSFKYAWVLDKLKAERERGITIDISLWKFETPKYYITIIDAPGHRDFIKNMITGTSQADCAVLIVAAGTGEFEAGISKNGQTREHALLAYTLGVKQLIVGVNKMDSTEPPYSQARFEEIQKEVSSYIKKIGYNPASVPFVPISGWNGDNMLDASANMTWHKGWEIERKEGKASGKTLLEALDSIIPPTRPTDKPLRLPLQDVYKIGGIGTVPVGRVETGVLKPGMVVTFAPVNLTTEVKSVEMHHEALQEAVPGDNVGFNVKNVSVKELRRGYVAGDSKNNPPKAVSDFTAQVIVLNHPGQISNGYTPVLDCHTAHIACKFAEIKEKCDRRTGKTVEENPKSIKSGDAAIVNLIPSKPMCVESFSDFPPLGR

SEQ ID NO: 17190 - protein, 377 aa, Symphylella sp. 'Sym'
  unsure (1)..(377): unsure at all Xaa locations
QEMGKGSFKYAWVLDKLKAERERGITIDIALWKFETPXYYVTIIDAPGHRDFIKNMITGTSQADCAVLVVAAGTGEFEAGISKNGQTREHALLAYTLGVKQLIVAVNKMDSTEPPYSQXRFEEIKKEVSGYIKKIGYNPATVAFVPISGWNGDNMLEGSTNMPWHKSWEIERKEGKASGKTLLEALDAILPPARPTDKPLRLPLQDVYKIGGIGTVPVGRVETGTIKPGVVVCFAPVNITTEVKSVEMHHEALLEAVPGDNVGFNVKNVSVKELRRGYVAGDTKNNPPKGVADFTAQVIVLNHPGQITNGYTPVLDCHTAHIACKFAEIKEKCDRRTGKTTEENPKBIKSGDAAIVTLVPSKPMCVESFSDFPPLGR

SEQ ID NO: 17191 - protein, 377 aa, Pseudopolydesmus serratus
AELGKGSFKYAWVLDKLKAERERGITIDISLWKFETPKYYITIIDAPGHRDFIKNMITGTSQADCAVLIVAAGTGEFEAGISKNGQTREHALLAYTLGVKQLIVGVNKMDTTEPPYSEARFDEIKKEVSSYIKKIGYNPAAVAFVPISGWNGDNMLEPSPNMSWHKGWAVERKDGNANGKTLLEALDAVIPPSRPTDKALRLPLQDVYKIGGIGTVPVGRVETGVLKPGMVVTFAPVNLTTEVKSVEMHHEALQEAVPGDNVGFNVKNVSVKELRRGYVAGDSKANPPKAVSEFTAQVIVLNHPGQISNGYTPVLDCHTAHIACKFAEIKEKCDRRTGKTVEDAPKAIKSGDAAIVNLVPTKPMCVESFSDFPPLGR

SEQ ID NO: 17192 - protein, 377 aa, Calyptophthiracarus olivaceus
QEMGKGSFKYAWVLDKLKAERERGITIDITLWKFETPKYYVTVIDAPGHRDFIKNMITGTSQADVAVLIVAAGTGEFEAGISKNGQTREHALLAYTLGVKQLIVGVNKMDTTEPPYSQPRFEEILKEVSAYVKKIGYNPAAVPFVPISGWNGDNMLEPSANMPWFKGWTLERKGAKLEGKTLLQALDAMEPPSRPLEKPLRLPLQDVYKIGGIGTVPVGRVETGILKPGTVVTFAPVNLTTEVKSVEMHHEALVEAVPGDNVGFNVKNVSVKELRRGYVAGDSKDNPPKATEEFTAQVIVLNHPGQISNGYTPVLDCHTAHIACKFKEIKEKCDRRSGKKIEDNPKSIKSGDAAIIDLVPSKPMCVETFTDFPPLGR

SEQ ID NO: 17193 - protein, 377 aa, Chthonius tetrachelatus
  unsure (1)..(377): unsure at all Xaa locations
QEMGKGSFKYAWVLDKLKAERERGITIDISLWKFETSKYYVTVIDAPGHRDFIKNMITGTSQADCAILVVAXGTGEFEAGISKNGQTREHALLAYTLGVKQMIVGVNKMDTTEPPYSQNRFEEIKKEVSTYIKKIGXNPATVPFVPISGFNGDNMLEQSTNMAWWKGWBIERKGVKAXGTTLLNALDXMEPPXRPTNKPLRVPLQDVYKIGGIGTVPVGRVETGILKPGCVVTFAPANITTEVKSVEMHHEALTEAVPGDNVGFNVKNVSVKEIRRGNVAGDSKDCPPKATESFTAQVIVLNHPGQISQGYTPVLDCHTAHIACRFXQIKEKCDRRSGKKLEDXPKFIKSGDAAIIXLTPSKPMCVEXFTEFPPLGR

SEQ ID NO: 17194 - protein, 377 aa, Heterometrus spinifer
  unsure (1)..(377): unsure at all Xaa locations
QEMGKGSFKYAWVLDKLKAERERGITIDITLWKFETQKYYITVIDAPGHRDFIKNMITGTSQADCAXLIVAAGTGEFEAGISKNGQTREHALLAYTLGVKQMIVGVNKMDTTEPPFSEXRFEEIKKEVSAYIKKIGYNPAXVPFVPISGWNGDNMLEPSXNXPWYKGWXXZRKXXKXEGKTLLQALDAMEPPTRPXDKPLRLPLQDVYKIGGIGTVPVGRVETGXLKPGXVVTFAPVNXTTEVKSVEMHHEAXTEAVPGDNVGFNVKNVSVKELRRGYVCGDSKDTPPKCTEEFTAQVIVLNHPGQISNGYTPVLDCHTAHIACKFREIKEKCDRRSGKKLEDNPKFIKSGDAAIIXLAPTKPMCVETFTEFPPLGR

SEQ ID NO: 17195 - protein, 377 aa, Heterophrynus sp. 'Het'
QEMGKGSFKYAWVLDKLKAERERGITIDITLWKFETQKYYITVIDAPGHRDFIKNMITGTSQADCAVLIVAAGTGEFEAGISKNGQTREHALLAYTLGVKQMIVGVNKMDTTEPPFSEARFEEIKKEVSAYIKKIGYNPATVPFVPISGWNGDNMLEPSSNMPWYKGWTIERKSGKSDGKTLLQALDAMEPPTRPVDKPLRLPLQDVYKIGGIGTVPVGRVETGVLKPGMVVTFAPVSITTEVKSVEMHHEALSEALPGDNVGFNVKNVSVKELRRGYVCGDSKDTPPKCTEEFTAQVIVLNHPGQIANGYTPVLDCHTAHIACKFREIKEKCDRRSGKKLENNPKFIKSGDAAIIDLVPSKPMCVETFTEFPPLGR

SEQ ID NO: 17196 - protein, 374 aa, Idiogaryops paludis
QEMGKGSFKYAWVLDKLKAERERGITIDITLWKFETSKYYATVIDAPGHRDFIKNMITGTSQADCAVLIVAAGTGEFEAGISKNGQTREHALLAYTLGVKQMIVGVNKMDSTEPPFSESRFEEIKKEVSAYIKKIGYNPATVPFVPISGFHGDNMIEPSSNMTWYKGWTIERKSGKVEGKTLLNALDAMEPPSRPVDKPLRLPLQDVYKIGGIGTVPVGRVETGVLKPGMVVTFAPANITTEVKSVEMHHEALTEAVPGDNVGFNVKNVSVKELRRGYVAGDSKDNPPKATEEFTAQVIVLNHPGQIANGYTPVLDCHTAHIACKFREIKEKCDRRSGKKLEDNPKFIKTGDAAIVDLVPSKPMCVESFTTFPP

SEQ ID NO: 17197 - protein, 377 aa, Neacarus texanus
QEMGKGSFKYAWVLDKLKAERERGITIDITLWKFETPKYYVTVIDAPGHRDFIKNMITGTSQADCAVLIVAAGTGEFEAGISKNGQTREHALLAYTLGVKQMIVGVNKMDTTEPPFSQARFEEIQKEVSAYIKKIGYNPATVPFVPISGWNGDNMLDASSNMPWFKGWSIERKSGKSEGKTLLQALDAMEPPTRPTDKPLRLPLQDVYKIGGIGTVPVGRVETGVLKPGMVVTFAPCNLTTEVKSVEMHHEALQEAVPGDNVGFNVKNVSVKELRRGYVCGDSKDSPPRCTEEFTAQVIVLNHPGQISNGYTPVLDCHTAHIACKFKEIKEKCDRRSGKKLEDNPKNIKSGDAAIIDLVPSKPMCVETFTDFPPLGR

SEQ ID NO: 17198 - protein, 377 aa, Phrynus marginemaculatus
  unsure (1)..(377): unsure at all Xaa locations
QEMGKGSFKYAWVLDKLKAERERGITIDITLWKFETQKYYITVIDAPGHRDFIKNMITGTSQADCAVLIVAAGTGEFEAGISKNGQTREHALLAYTLGVKQMIVGVNKMDTTEPPFSEARFEEIKKEVSAYIKKIGYNPATVPFVPISGWNGDNMLEPSSNMPWYKGWTIERKSGKSDGKTLLQALDAMEPPTRPVDKPLRLPLQDVYKIGGIGTVPVGRVETGVLKPGTVVTFAPVNITTEVKSVEMHHEALSEALPGDNVGFNVKNVSVKELRRGYVCGDSKDTPPKCTEEFTAQVIVLNHPGQIANGYTPVLDCHTAHIACKFREIKEKCDRXSGKKLENNPKFIKSGDAAIIDLXPSKPMCVETFTEFPPLGR

SEQ ID NO: 17199 - protein, 377 aa, Sejus sp. 'Sej'
QEMGKGSFKYAWVLDKLKAERERGITIDITLWKFETPKYYVTVIDAPGHRDFIKNMITGTSQADCAVLIVAAGVGEFEAGISKNGQTREHALLAYTLGVKQMIVGVNKMDTSEPPFSEKRFDEIKKEVTNYIKKIGYNPATVPFVPISGWNGDNMLEPSSNMPWYKGWSIERKGQKFEGKTLLQALDAMEPPTRPTDKPLRLPLQDVYKIGGIGTVPVGRVETGVLKPGMVVTFAPANLTTEVKSVEMHHEALPEAVPGDNVGFNVKNVSVKDLKRGFVCGDSKDNPPKATEEFTAQVIVLNHPGQISNGYSPVLDCHTAHISCRFKELKEKIDRRSGKTMEENPKSIKSGDAAIVDLVPQKPMCVETFTEFPPLGR

SEQ ID NO: 17200 - protein, 377 aa, Siro acaroides
QEMGKGSFKYAWVLDKLKAERERGITIDITLWKFETPRYYVTVIDAPGHRDFIKNMITGTSQADCAVLIVAAGTGEFEAGISKNGQTREHALLAYTLGVKQMIVGVNKMDTTEPPYSQSRFEEIQKEVSAYIKKIGYNPATVPFVPISGWNGDNMLEPSSNMPWFKGWNLERKGSKADGKTLLQALDAMEPPSRPLDKPLRLPLQDVYKIGGIGTVPVGRVETGILKPGVVVTFAPVMITTEVKSVEMHHEALVEAVPGDNVGFNVKNVSVKELRRGYVCGDSKDNPPKATEEFTAQVIVLNHPGQITNGYTPVLDCHTAHIACKFREIKEKCDRRTGKKIEDNPKAIKSGDAAIIELVPSKPMCVETFTDFPPLGR

SEQ ID NO: 17201 - protein, 377 aa, Zercon sp. 'Zer'
  unsure (1)..(377): unsure at all Xaa locations
QEMGKGSFKYAWVLDKLKAERERGITIDITLWKFETPKYYVTVIDAPGHRDFIKNMITGTSQADCAILVCPAGTGEFEAGISKNGQTREHALLAYTLGVKQMIVGVNKMDNSEPPFSEXRFEEIKKEVAAYIKKIGYNPAAVPFVPISGWAGDNMLEPSDNMPWYKGWHIERKGQKFDGKTLLQALDVMEPPTRPTDKALRLPLQDVYKIGGIGTVPVGRVETGIIKPGMVVTFAPVNLTTEVKSVEMHHESLAEAVPGDNVGFNVKNVSVKEIKRGYVAGDSKDNPPKXTEEFAAQVIVLNHPGQIQNGYXPVLDCHTAHIACXFKEIKEKIDRRSGKKLEDNPKFXKSGDAAIVDLVPXKPMCVESFXDFPPLGR

SEQ ID NO: 17202 - protein, 377 aa, parasitid 'Pas'
QEMGKGSFKYAWVLDKLKAERERGITIDITLWKFETPKYYVTVIDAPGHRDFIKNMITGTSQADCAILVCPAGTGEFEAGISKNGQTREHALLAYTLGVKQMIVGVNKMDTSEPPYSESRFEEIKKEVSSYIKKIGYNPLTVPFVPISGWAGDNMLEPSPNMTWYKGWQIERKGTKFDGKTLLQALDVMEPPTRPTDKALRLPLQDVYKIGGIGTVPVGRVETGIIKPGMVVTFAPSNLTTEVKSVEMHHEALPEAVPGDNVGFNVKNVSVKELKRGFVCGDSKDNPPKETGEFAAQVIVLNHPGQIQNGYSPVLDCHTAHIACRFKEIKEKCDRRSGKKLEDNPKFIKSGDAAIVDLVPQKPMCVESFTDFPPLGR

SEQ ID NO: 17203 - protein, 377 aa, solifugid 'Sol'
QEMGKGSFKYAWVLDKLKAERERGITIDITLWKFETPKYYVTVIDAPGHRDFIKNMITGTSQADVAVLIVAAGTGEFEAGISKNGQTREHALLAYTLGVKQMIVGVNKMDTTEPPYSQARFEEIQKEVSAYIKKIGYNPATVPFVPISGWNGDNMLEPSTNMPWFKGWTIERKSGKNEGKTLLQALDAMEPPSRPVDKSLRLPLQDVYKIGGIGTVPVGRVETGVLRPGMVVTFAPANITTEVKSVEMHHEALQEALPGDNVGFNVKNVSVKELRRGYVCGDSKDTPPKATEEFTAQVIVLNHPGQISNGYTPVLDCHTAHIACKFKEIKEKNDRRSGKKLEDNPKSIKSGDAAIIDLVPSKPMCVETFTDFPPLGR

SEQ ID NO: 17204 - protein, 376 aa, Dicranolasma scabrum
EMGKGSFKYAWVLDKLKAERERGITIDITLWKFETPKYYVTVIDAPGHRDFIKNMITGTSQADCAVLIVAAGTGEFEAGISKNGQTREHALLAYTLGVKQMIVGVNKMDTTEPPFSQGRFEEIQKEVSTYIKKIGYNPATVPFVPISGWNGDNMLEASTNMPWFKGWAIEKKGSKTDGKTLLQALDAMDPPSRPLDKPLRLPLQDVYKIGGIGTVPVGRVETGILKPGVVVTFAPVAITTEVKSVEMHHEALTEAVPGDNVGFNVKNVSVKELRRGYVCGDSKDNPPKATEEFTAQVIVLNHPGQIANGYTPVLDCHTAHIACKFREIKEKCDRRSGKKLEDNPKFLKSGDAAIIDLAPSKPMCVEVFTEFPPLGR

SEQ ID NO: 17205 - protein, 377 aa, Hesperonemastoma modestum
QEMGKGSFKYAWVLDKLKAERERGITIDITLWKFETPKYYVTVIDAPGHRDFIKNMITGTSQADCAILVVAGGTGEFEAGISKNGQTREHALLAWTLGVRQMIVGVNKMDTTEPPFAQSRFEEIQKEVSTYIKKIGYNPATVPFVPISGWNGDNMLEASANTPWFKGWTLERKTSKLEGKTLLQALDAMEPPSRPTDKPLRLPLQDVYKIGGIGTVPVGRVETGILKPGVVVTFAPVAITTEVKSVEMHHEALVEAVPGDNVGFNVKNVSVKELRRGFVCGDSKDNPPKSIEEFTAQVIVLNHPGQISNGYTPVLDCHTAHIACKFREIKEKCDRRSGKKLEDNPKFLKSGDAAIVDLAPSKPMCVEVFTEFPPLGR

SEQ ID NO: 17206 - protein, 413 aa, Aellopos tantalus
  unsure (1)..(413): unsure at all Xaa locations
HVDSGKSTTTGHLIYKCGGIDKRTIEKFEKEAQEMGKGSFKYAWVLDKLKAERERGITIDIALWKFETSKYYVTIIDAPGHRDFIKNMITGTSQADCAVLIVAAGTGEFEAGISKNGQTREHALLAFTLGVKQLIVGVNKMDSTEPPYSESRFEEIKKEVSSYIKKIGYNPAAVAFVPISGWHGDNMLEPSTKMPWFKGWLXERKEGKAEGKCLIEALDAILPPARPTDKPLRLPLQDVYKIGGIGTVPVGRVETGILKPGTIVVFAPANITTEVKSVEMHHEALQEAVPGDNVGFNVKNVSVKELRRGYVAGDSKNNPPKGAADFTAQVIVLNHPGQISNGYTPVLDCHTAHIACKFAEIKEKVDRRTGKSTEDNPKSIKSGDAAIVNLVPSKPLCVESFQEFPPLGRFAVR

SEQ ID NO: 17207 - protein, 413 aa, Ceratomia catalpae
HVDSGKSTTTGHLIYKCGGIDKRTIEKFEKEAQEMGKDSFKYAWVLDKLKAERERGITIDIALWKFETSKYYVTIIDAPGHRDFIKNMITGTSQADCAVLIVAAGTGEFEAGISKNGQTREHALLAFTLGVKQLIVGVNKMDSTEPPYSESRFEEIKKEVSSYIKKIGYNPAAVAFVPISGWHGDNMLEASTKMPWFKGWLVERKEGKAEGKCLIEALDAILPPARPTDKALRLPLQDVYKIGGIGTVPVGRVETGILKPGTIVVFAPANITTEVKSVEMHHEALQEAVPGDNVGFNVKNVSVKELRRGYVAGDSKNNPPKGAADFTAQVIVLNHPGQISNGYTPVLDCHTAHIACKFAEIKEKVDRRTGKSTEDNPKSIKSGDAAIVNLVPSKPMCVESFQEFPPLGRFAVR

SEQ ID NO: 17208 - protein, 413 aa, Ceratomia sp. 'Cundu'
HVDSGKSTTTGHLIYKCGGIDKRTIEKFEKEAQEMGKGSFKYAWVLDKLKAERERGITIDIALWKFETSKYYVTIIDAPGHRDFIKNMITGTSQADCAVLIVAAGTGEFEAGISKNGQTREHALLAFTLGVKQLIVGVNKMDSTEPPYSESRFEEIKKEVSSYIKKIGYNPAAVAFVPISGWHGDNMLEPSTKMPWFKGWLVERKEGKAEGKCLIEALDAILPPARPTDKALRLPLQDVYKIGGIGTVPVGRVETGILKPGTIVVFAPANITTEVKSVEMHHEALQEAVPGDNVGFNVKNVSVKELRRGYVAGDSKNNPPKGAADFTAQVIVLNHPGQISNGYTPVLDCHTAHIACKFAEIKEKVDRRTGKSTEDNPKSIKSGDAAIVNLVPSKPMCVESFQEFPPLGRFAVR

SEQ ID NO: 17209 - protein, 413 aa, Darapsa sp. 'Dmyr'
HVDSGKSTTTGHLIYKCGGIDKRTIEKFEKEAQEMGKGSFKYAWVLDKLKAERERGITIDIALWKFETAKYYVTIIDAPGHRDFIKNMITGTSQADCAVLIVAAGTGEFEAGISKNGQTREHALLAFTLGVKQLIVGVNKMDSTEPPYSESRFEEIKKEVSSYIKKIGYNPAAVAFVPISGWHGDNMLEPSTKMPWFKGWLVERKEGKAEGKCLIEALDAILPPARPTDKALRLPLQDVYKIGGIGTVPVGRVETGILKPGTIVVFAPANITTEVKSVEMHHEALQEAVPGDNVGFNVKNVSVKELRRGYVAGDSKNNPPKGAADFTAQVIVLNHPGQISNGYTPVLDCHTAHIACKFAEIKEKVDRRTGKSTEDNPKSIKSGDAAIVNLVPSKPLCVESFQEFPPLGRFAVR

SEQ ID NO: 17210 - protein, 413 aa, Dolba hyloeus
HVDSGKSTTTGHLIYKCGGIDKRTIEKFEKEAQEMGKGSFKYAWVLDKLKAERERGITIDIALWKFETAKYYVTIIDAPGHRDFIKNMITGTSQADCAVLIVAAGTGEFEAGISKNGQTREHALLAFTLGVKQLIVGVNKMDSTEPPYSESRFEEIKKEVSSYIKKIGYNPAAVAFVPISGWHGDNMLEPSTKMPWFKGWLVERKEGKAEGKCLIEALDAILPPARPTDKPLRLPLQDVYKIGGIGTVPVGRVETGILKPGTIVVFAPANITTEVKSVEMHHEALQEAVPGDNVGFNVKNVSVKELRRGYVAGDSKNNPPKGAADFTAQVIVLNHPGQISNGYTPVLDCHTAHIACKFAEIKEKVDRRTGKSTEDNPKSIKSGDAAIVNLVPSKPMCVESFQEFPPLGRFAVR

SEQ ID NO: 17211 - protein, 413 aa, Dryocampa rubicunda
  unsure (1)..(413): unsure at all Xaa locations
HVDSGKSTTTGHLIYKCGGIDKRTIEKFEKEAQEMGKGSFKYAWVLDKLKAERERGITIDIALWKFETSKYYVTIIDAPGHRDFIKNMITGTSQADCXVLIVAAGTGEFEAGISKNGQTREHALLAFTLGVKQLIVGVNKMDSTEPPYSESRFEEIKKEVSSYIKKIGYNPXAVAFVPISGWHGDNMLEPSTKMPWFKGWLVERKEGKAEGKCLIEALDAILPPARPTDKALRLPLQDVYKIGGIGTVPVGRVETGILKPGTVVVFAPANITTEVKSVEMHHEALQEAVPGDNVGFNVKNVSVKELRRGYVAGDSKNNPPKGAADFTAQVIVLNHPGQISNGYTPVLDCHTAHIACKFAEIKEKVDRRTGKSTEDNPKSIKSGDAAIVNLVPSKPLCVESFQEFPPLXRFAVR

SEQ ID NO: 17212 - protein, 413 aa, Eumorpha pandorus
HVDSGKSTTTGHLIYKCGGIDKRTIEKFEKEAQEMGKGSFKYAWVLDKLKAERERGITIDIALWKFETSKYYVTIIDAPGHRDFIKNMITGTSQADCAVLIVAAGTGEFEAGISKNGQTREHALLAFTLGVKQLIVGVNKMDSTEPPYSEPRFEEIKKEVSSYIKKIGYNPAAVAFVPISGWHGDNMLEPSTKMPWFKGWLVERKEGKAEGKCLIEALDAILPPARPTDKPLRLPLQDVYKIGGIGTVPVGRVETGILKPGTIVVFAPANITTEVKSVEMHHEALQEAVPGDNVGFNVKNVSVKELRRGYVAGDSKNNPPKGAADFTAQVIVLNHPGQISNGYTPVLDCHTAHIACKFAEIKEKVDRRTGKSTEDNPKSIKSGDAAIVNLVPSKPLCVESFQEFPPLGRFAVR

SEQ ID NO: 17213 - protein, 413 aa, Endromis versicolora
HVDSGKSTTTGHLIYKCGGIDKRTIEKFEKEAQEMGKGSFKYAWVLDKLKAERERGITIDIALWKFETAKYYVTIIDAPGHRDFIKNMITGTSQADCAVLIVAAGTGEFEAGISKNGQTREHALLAFTLGVKQLIVGVNKMDSTEPPYSEPRFEEIKKEVSSYIKKIGYNPAAVAFVPISGWHGDNMLEPSTKMPWFKGWQVERKEGKAEGKCLIEALDAILPPARPTDKALRLPLQDVYKIGGIGTVPVGRVETGILKPGTIVVFAPANITTEVKSVEMHHEALQEAVPGDNVGFNVKNVSVKELRRGYVAGDSKNNPPKGAADFTAQVIVLNHPGQISNGYTPVLDCHTAHIACKFAEIKEKVDRRTGKSTEDNPKSIKSGDAAIVNLVPSKPLCVESFQEFPPLGRFAVR

SEQ ID NO: 17214 - protein, 409 aa, Lemonia dumi
HVDSGKSTTTGHLIYKCGGIDKRTIEKFEKEAQEMGKGSFKYAWVLDKLKAERERGITIDIALWKFETSKYYVTIIDAPGHRDFIKNMITGTSQADCAVLIVAAGTGEFEAGISKNGQTREHALLAFTLGVKQLIVGVNKMDSTEPPYSESRFEEIKKEVSSYIKKIGYNPAAVAFVPISGWHGDNMLEPSTKMPWFKGWQVERKEGKADGKCLIEALDAILPPARPTDKALRLPLQDVYKIGGIGTVPVGRVETGILKPGTIVVFAPANITTEVKSVEMHHEALQEAVPGDNVGFNVKNVSVKELRRGYVAGDSKNNPPKGAADFTAQVIVLNHPGQISNGYTPVLDCHTAHIACKFAEIKEKVDRRTGKSTEDNPKSIKSGDAAIVNLVPSKPLCVESFQEFPPLGR

SEQ ID NO: 17215 - protein, 413 aa, Paonias excaecatus
HVDSGKSTTTGHLIYKCGGIDKRTIEKFEKEAQEMGKGSFKYAWVLDKLKAERERGITIDIALWKFETGKYYVTIIDAPGHRDFIKNMITGTSQADCAVLIVAAGTGEFEAGISKNGQTREHALLAFTLGVKQLIVGVNKMDSTEPPYSESRFEEIKKEVSSYIKKIGYNPAAVAFVPISGWHGDNMLEASTKMPWFKGWLVERKEGKAEGKCLIEALDAILPPARPTDKALRLPLQDVYKIGGIGTVPVGRVETGVLKPGTVVVFAPANITTEVKSVEMHHEALQEAVPGDNVGFNVKNVSVKELRRGYVAGDSKNNPPRGAADFTAQVIVLNHPGQISNGYTPVLDCHTAHIACKFAEIKEKVDRRTGKSTEDNPKSIKSGDAAIVNLVPSKPMCVESFQEFPPLGRFAVR

SEQ ID NO: 17216 - protein, 413 aa, Pachysphinx modesta
HVDSGKSTTTGHLIYKCGGIDKRTIEKFEKEAQEMGKGSFKYAWVLDKLKAERERGITIDIALWKFETSKYYVTIIDAPGHRDFIKNMITGTSQADCAVLIVAAGTGEFEAGISKNGQTREHALLAFTLGVKQLIVGVNKMDSTEPPYSESRFEEIKKEVSSYIKKIGYNPAAVAFVPISGWHGDNMLEVSTKMPWFKGWLVERKEGKAEGKCLIEALDAILPPARPTDKALRLPLQDVYKIGGIGTVPVGRVETGVLKPGTVVVFAPANITTEVKSVEMHHEALQEAVPGDNVGFNVKNVSVKELRRGYVAGDSKNNPPRGAADFTAQVIVLNHPGQISNGYTPVLDCHTAHIACKFAEIKEKVDRRTGKSTEDNPKSIKSGDAAIVNLVPSKPMCVESFQEFPPLGRFAVR

SEQ ID NO: 17217 - protein, 413 aa, Smerinthus cerisyi
  unsure (1)..(413): unsure at all Xaa locations
HVDSGKSTTTGHLIYKCGGIDKRTIEKFEKEAQEMGKGSFKYAWVLDKLKAERERGITIDIALWKFETGKYYVTIIDAPGHRDFIKNMITGTSQADCAVLIVAAGTGEFEAGISKNGQTREHALLAFTLGVKQLIVGVNKMDSTEPPYSESRFEEIKKEVSSYIKKIGYNPAAVAFVPISGWHGDNMLEVSTKMPWFKGWLVERKEGXAEGKCLIEALXAILPPXRPTDKALRLPLQDVYKIGGIGTVPVGRVETGVLKPGTVVVFAPANITTEVKSVEMHHEALQEAVPGDNVGFNVKNVSVKELRRGYVAGDSKNNPPRGAADFTAQVIVLNHPGQISNGYTPVLDCHTAHIACKFAEIKEKVDRRTGKSTEDNPKSIKSGDAAIVNLVPSKPMCVESFQEFPPLGRFAVR

SEQ ID NO: 17218 - protein, 413 aa, Sphinx chersis
HVDSGKSTTTGHLIYKCGGIDKRTIEKFEKEAQEMGKGSFKYAWVLDKLKAERERGITIDIALWKFETSKYYVTIIDAPGHRDFIKNMITGTSQADCAVLIVAAGTGEFEAGISKNGQTREHALLAFTLGVKQLIVGVNKMDSTEPPYSESRFEEIKKEVSSYIKKIGYNPAAVAFVPISGWHGDNMLEASTKMPWFKGWLVERKEGKAEGKCLIEALDAILPPARPTDKALRLPLQDVYKIGGIGTVPVGRVETGILKPGTIVVFAPANITTEVKSVEMHHEALQEAVPGDNVGFNVKNVSVKELRRGYVAGDSKNNPPKGAADFTAQVIVLNHPGQISNGYTPVLDCHTAHIACKFAEIKEKVDRRTGKSTEDNPKSIKSGDAAIVNLVPSKPMCVESFQEFPPLGRFAVR

SEQ ID NO: 17219 - protein, 366 aa, Arctopsyche grandis
  unsure (1)..(366): unsure at all Xaa locations
QEMGKGSFKYAWVLDKLKAERERGITIDIALWKFETTRYYVTIIDAPGHRDFIKNMITGTSQADCAVLIVAAGTGEFEAGISKNGQTREHALLAFTLGVKQLIVGVNKMDSTEPHYSESRFEEIKKEVSSYIKKIGYNPAAVAFVPISGWHGDNMLEPSAKMPWFKGWNVEXKEGKAEGKCLIEALDAIVPPSRPTDKALRLPLQDVYKIGGIGTVPVGRVETGILKPGTVVVFAPANLTTEVKSVEMHHEALQEAVPGDNVGFNVKNVSVKELRRGFVAGDTKVNPPKGAADFTAQVIVLNHPGQIANGYTPVLDCHTAHIACKFAEIQQKVDRRTGKSTEDNPKSIKSGDAAIVNLVPSKPMCV

SEQ ID NO: 17220 - protein, 383 aa, Ichthyophonus irregularis
GGIDKRTIEKFEKEAQEMGKGSFKYAWVLDKLKAERERGITIDIALWKFETAKYSVTIIDAPGHRDFIKNMITGTSQADCAVLIIAGGIGEFEAGISKDGQTREHALLAFTLGVKQLIVCVNKMDSVKYSEDRFKEIIGEVANFIKKVGYNPKAVPFVPISGWHGDNMVAPTENMPWYKGWTCERKEGNTSGFTLLEALDNIQAPKRPTDKPLRLPLQDVYKIGGIGTVPVGRVETGIIRPGMVVSFAPGSVSTEVKSVEMHHESIPEAAPGDNVGFNIKNVSVKDIRRGNVAGDSKNDPPKEAKSFLAQVIILNHPGQISNGYSPVLDCHTAHIACKFSEIMEKIDRRSGKKLEDFPKFVKSGDAAMVTMVPQKPMCVESFM

SEQ ID NO: 17221 - protein, 379 aa, Myzostoma alatum
KEAQEMGKGSFKYAWVLDKLKAERERGITIDIALWKFETVKYYVTIIDAPGHRDFIKNMITGTSQADCAVLVVAAGTGEFEAGISKDGQTREHGLLAYTLGVKQMIVAVNKMDTTEPPFSEARFNEIKKEVQGYLKKIGYNPKSVAFVPISGFHGDNMIDAETTRLPWYKGYEIERKEGNASGKTLLSALDNILPPTRPTDKPLRLPLQDVYKIGGIGTVPVGRVETGIIKPGMVVSFAPAGLSTEVKSVEMHHESLTEALPGDNVGFNVKNISVKDIKRGNVAGDSKNDPPKEAKNFTAQVIILNHPGQIRAGYAPVLDCHTAHISCKFVELKEKCDRRTGKKLEDAPQTVKSGDSAVVIMEPSKPMCVESFSTYPPL

SEQ ID NO: 17222 - protein, 371 aa, Pulvinomyzostomum pulvinar
ASFKYAWVLDKLKAERERGITIDIALWKFETTKYYVTIIDAPGHRDFIKNMITGTSQADCAVLIVAAGTGEFEAGISKEGQTREHALLAFTLGVKQMIVAINKMDSTDPPFSESRYNEITKEVGGYLKKIGYNPKTVPFIPISGFHGDNMLDVSEKMPWYKGFAIERKEGNANGKTLFEGLDSILAPKRPTDRPLRLPLQDVYKIGGIGTVPVGRVETGSIKPGMLVTFAPSGLTTEVKSVEMHHESLTEANPGDNVGFNVKNISVKEIKRGNVAGDAKNDPPKEAKQFKAQVIVLNHPGEIRAGYAPVVDCHTAHIACKFSEILEKIDRRTNKTLEENPKFVKSGDSAIVNMCPSKPMCVETFSEYSPLG

SEQ ID NO: 17223 - protein, 340 aa, Aporia crataegi
FEKEAQEMGKGSFKYAWVLDKLKAERERGITIDIALWKFETAKYYVTIIDAPGHRDFIKNMITGTSQADCAVLIVAAGTGEFEAGISKNGQTREHALLAFTLGVKQLIVGVNKMDSTEPPYSESRFEEIKKEVSSYIKKIGYNPAAVAFVPISGWHGDNMLEPSTKMPWFKGWNVERKEGKAEGKCLIEALDAILPPARPTDKPLRLPLQDVYKIGGIGTVPVGRVETGVLKPGTIVVFAPANITTEVKSVEMHHEALQEAVPGDNVGFNVKNVSVKELRRGYVAGDSKSNPPKGAADFTAQVIVLNHPGQISNGYTPVLDCHTAHIACKFAEIKEKVDR

SEQ ID NO: 17224 - protein, 340 aa, Cepora iudith
FEKEAQEMGKGSFKYAWVLDKLKAERERGITIDIALWKFETSKYYVTIIDAPGHRDFIKNMITGTSQADCAVLIVAAGTGEFEAGISKNGQTREHALLAFTLGVKQLIVGVNKMDSTEPPYSESRFEEIKKEVSSYIKKIGYNPAAVAFVPISGWHGDNMLEPSTKMPWFKGWLVERKEGKAEGKCLIEALDAILPPARPTDKPLRLPLQDVYKIGGIGTVPVGRVETGVLKPGTIVVFAPANITTEVKSVEMHHEALQEAVPGDNVGFNVKNVSVKELRRGYVAGDSKSNPPKGAADFTAQVIVLNHPGQISNGYTPVLDCHTAHIACKFAEIKEKVDR

SEQ ID NO: 17225 - protein, 340 aa, Delias belladonna
  unsure (1)..(340): unsure at all Xaa locations
FEKEAQEMGKGSFKYAWVLDKLKAERERGITIDIALWKFETGKYYVTIIDAPGHRDFIKNMITGTSQADCAVLIVAAGTGEFEAGISKNGQTREHALLAFTLGVKQLIVGVNKMDSTEPPYNESRFEEIKKEVSSYIKKIGYNPAAVAFVPISGWHGDNMLEPSTKMPWFKGWLVERKEGKAEGKCLIEALDAILPPARPTDKALRLPLQDVYKIGGIGTVPVGRVETGVLKPGTIVVFAPANITTEVKSVEMHHEALQEAVPGDNVGFNVKNVSVKELRRGYVAGDSKSNPPKGAADFTAXVIVLNHPGQISNGYTPVLDCHTAHIACKFAEIKEKVDR

SEQ ID NO: 17226 - protein, 340 aa, Delias eichhorni
FEKEAQEMGKGSFKYAWVLDKLKAERERGITIDIALWKFETGRYYVTIIDAPGHRDFIKNMITGTSQADCAVLIVAAGTGEFEAGISKNGQTREHALLAFTLGVKQLIVGVNKMDSTEPPFSEPRFEEIKKEVSSYIKKIGYNPAAVAFVPISGWHGDNMLEPSTKMPWFKGWLVERKEGKSEGKCLIEALDAILPPARPTDKALRLPLQDVYKIGGIGTVPVGRVETGVLKPGTIVVFAPANITTEVKSVEMHHEALQEAVPGDNVGFNVKNVSVKELRRGYVAGDSKSNPPKGAADFTAQVIVLNHPGQISNGYTPVLDCHTAHIACKFAEIKEKVDR

SEQ ID NO: 17227 - protein, 340 aa, Delias flavissima
FEKEAQEMGKGSFKYAWVLDKLKAERERGITIDIALWKFETGRYYVTIIDAPGHRDFIKNMITGTSQADCAVLIVAAGTGEFEAGISKNGQTREHALLAFTLGVKQLIVGVNKMDSTEPPYNESRFEEIKKEVSSYIKKIGYNPAAVAFVPISGWHGDNMLEPSTKMPWFKGWMVERKEGKAEGKCLIEALDAILPPARPTDKALRLPLQDVYKIGGIGTVPVGRVETGVLKPGTIVVFAPANITTEVKSVEMHHEALQEAVPGDNVGFNVKNVSVKELRRGYVAGDSKSNPPKGAADFTAQVIVLNHPGQISNGYTPVLDCHTAHIACKFAEIKEKVDR

SEQ ID NO: 17228 - protein, 434 aa, Blastocystis hominis
MGKEKPHINLVVIGHVVAGKSTTTGHLIYACGGIDKRTIERFEEGGQRIGKGSFKYAWVLAKMKAERERGITIDISLWKFETRKDFFTIIDAPGHRDFIKNMITGTSQADVAILVIASGAGEFEAGYSKNGQTREHALLANTLGVKQMIVCCNKMDDKSVNYSEARYKEIKNEMTSFLTKVGYAKVEERIPFIPISGFNGDNMIEHSANMPWYKGPTLLEALDNVHPPKRPVDKPLRLPLQDVYKIGGIGTVPVGRVETGVLKPGMTVTFAPVNVSTEVKSVEMHHESIPQALPGDNVGFNVNNVSVEDIHRGNVCGDAKNDPPCKTESDAQVIVMNHPSGIRPGYCPVVDCHTAHIACKFEKIMSEMDKRTGKVLRENPDIVKNGKSMMAQLVPSKPMCVETFSDYPPLGRFAVRDMRQTVAVGIIKSTVRAK

SEQ ID NO: 17229 - protein, 385 aa, Bombus consobrinus
KFEKEAQEMGKGSFKYAWVLDKLKAERERGITIDIALWKFETAKYYVTIIDAPGHRDFIKNMITGTSQADCAVLIVAAGIGEFEAGISKNGQTREHALLAFTLGVKQLIVGVNKMDMTDPPYSEARFEEIKKEVSSYIKKIGYNTASVAFVPISGWHGDNMLEPSPNTSWYKGWKVERKDGNADGKTLIEALDAILPPSRPTDKALRLPLQDVYKIGGIGTVPVGRVETGILKPGMLVTFAPAALTTEVKSVEMHHEAWTEALPGDNVGFNVKNISVKELRRGYVAGDSKNQPPRGAADFTAQVIVLNHPGQISNGYTPVLDCHTAHIACKFAEIKEKCDRRTGKTTEENPKSIKSGDAAIVMLQPTKPMCVEAFQEFPPLGRFA

SEQ ID NO: 17230 - protein, 413 aa, Lymantria dispar
HVDSGKSTTTGHLIYKCGGIDKRTIEKFEKEAQEMGKGSFKYAWVLDKLKAERERGITIDIALWKFETSKYYVTIIDAPGHRDFIKNMITGTSQADCAVLIVAAGTGEFEAGISKNGQTREHALLAFTLGVKQLIVGVNKMDSTEPPYSESRFEEIKKEVASYIKKIGYNPAAVAFVPISGWHGDNMLEPSTKMPWFKGWNVERKEGKAEGKCLIEALDAILPPARPTDKPLRLPLQDVYKIGGIGTVPVGRVETGILKPGTIVVFAPANITTEVKSVEMHHEALQEAVPGDNVGFNVKNVSVKELRRGYVAGDSKNNPPKGAADFTAQVIVLNHPGQISNGYTPVLDCHTAHIACKFAEIKEKVDRRTGKSTEENPKSIKSGDAAIVILVPSKPLCVESFQEFPPLGRFAVR

SEQ ID NO: 17231 - protein, 331 aa, Allancastria cerisyi
KSTTTGHLIYKCGGIDKRTIEKFEKEAQEMGKGSFKYAWVLDKLKAERERGITIDIALWKFETGKYYVTIIDAPGHRDFIKNMITGTSQADCAVLIVAAGTGEFEAGISKNGQTREHALLAFTLGVKQLIVGVNKMDSTEPPYSESRFEEIKKEVSSYIKKIGYNPAAVAFVPISGWHGDNMLEPSTKMPWFKGWQVERKEGKAEGKCLIEALDAILPPARPTDKALRLPLQDVYKIGGIGTVPVGRVETGVLKPGTIVVFAPANITTEVKSVEMHHEALQEAVPGDNVGFNVKNVSVKELRRGYVAGDSKNNPPKGAADFTAQVIVLNHP

SEQ ID NO: 17232 - protein, 331 aa, Baronia brevicornis
KSTTTGHLIYKCGGIDKRTIEKFEKEAQEMGKGSFKYAWVLDKLKAERERGITIDIALWKFETSKYYVTIIDAPGHRDFIKNMITGTSQADCAVLIVAAGTGEFEAGISKNGQTREHALLAFTLGVKQLIVGVNKMDSTEPPYSESRFEEIKKEVSSYIKKIGYNPAAVAFVPISGWHGDNMLEPSTKMPWFKGWQVERKEGKAEGKCLIEALDAILPPARPTDKALRLPLQDVYKIGGIGTVPVGRVETGILKPGTIVVFAPANITTEVKSVEMHHEALQEAVPGDNVGFNVKNVSVKELRRGYVAGDSKNNPPKGAADFTAQVIVLNHP

SEQ ID NO: 17233 - protein, 331 aa, Baronia brevicornis
KSTTTGHLIYKCGGIDKRTIEKFEKEAQEMGKGSFKYAWVLDKLKAERERGITIDIALWKFETSKYYVTIIDAPGHRDFIKNMITGTSQADCAVLIVAAGTGEFEAGISKNGQTREHALLAFTLGVKQLIVGVNKMDSTEPPYSESRFEEIKKEVSSYIKKIGYNPAAVAFVPISGWHGDNMLEPSTKMPWFKGWQVERKEGKAEGKCLIEALDAILPPARPTDKALRLPLQDVYKIGGIGTVPVGRVETGILKPGTIVVFAPANITTEVKSVEMHHEALQEAVPGDNVGFNVKNVSVKELRRGYVTGDSKNNPPKGAADFTAQVIVLNHP

SEQ ID NO: 17234 - protein, 331 aa, Boloria epithore
KSTTTGHLIYKCGGIDKRTIEKFEKEAQEMGKGSFKYAWVLDKLKAERERGITIDIALWKFETSKYYVTIIDAPGHRDFIKNMITGTSQADCAVLIVAAGTGEFEAGISKNGQTREHALLAFTLGVKQLIVGVNKMDSTEPPYSEPRFEEIKKEVSSYIKKIGYNPAAVAFVPISGWHGDNMLEPSTKMPWFKGWQVERKEGKADGKCLIEALDAILPPARPTDKPLRLPLQDVYKIGGIGTVPVGRVETGVLKPGTIVVFAPANITTEVKSVEMHHEALQEAVPGDNVGFNVKNVSVKELRRGYVAGDSKNNPPRGAADFTAQVIVLNHP

SEQ ID NO: 17235 - protein, 331 aa, Coenonympha tullia
KSTTTGHLIYKCGGIDKRTIEKFEKEAQEMGKGSFKYAWVLDKLKAERERGITIDIALWKFETAKYYVTIIDAPGHRDFIKNMITGTSQADCAVLIVAAGTGEFEAGISKNGQTREHALLAFTLGVKQLIVGVNKMDSTEPPYSEPRFEEIKKEVSSYIKKIGYNPAAVAFVPISGWHGDNMLEPSTKMPWFKGWQVERKEGKAEGKCLIEALDAILPPARPTDKPLRLPLQDVYKIGGIGTVPVGRVETGVLKPGTIVVFAPANITTEVKSVEMHHEALSEAVPGDNVGFNVKNVSVKELRRGYVAGDSKNNPPKGAADFTAQVIVLNHP

SEQ ID NO: 17236 - protein, 331 aa, Erynnis tristis
KSTTTGHLIYKCGGIDKRTIEKFEKEAQEMGKGSFKYAWVLDKLKAERERGITIDIALWKFETAKYYVTIIDAPGHRDFIKNMITGTSQADCAVLIVAAGTGEFEAGISKNGQTREHALLAFTLGVKQLIVGVNKMDSTEPPYSESRFEEIKKEVSSYIKKIGYNPAAVAFVPISGWHGDNMLEPSTKMPWFKGWNVERKEGKAEGKCLIEALDAILPPARPTDKPLRLPLQDVYKIGGIGTVPVGRVETGILKPGTIVVFAPANITTEVKSVEMHHEALQEAVPGDNVGFNVKNVSVKELRRGYVAGDSKNNPPKGAADFTAQVIVLNHP

SEQ ID NO: 17237 - protein, 331 aa, Euphilotes bernardino
KSTTTGHLIYKCGGIDKRTIEKFEKEAQEMGKGSFKYAWVLDKLKAERERGITIDIALWKFETAKYYVTIIDAPGHRDFIKNMITGTSQADCAVLIVAAGTGEFEAGISKNGQTREHALLAFTLGVKQLIVGVNKMDSTEPPYSESRFEEIKKEVSSYIKKIGYNPAAVAFVPISGWHGDNMLEPSTKMPWFKGWQVERKEGKAEGKCLIEALDAIFPPARPTDKALRLPLQDVYKIGGIGTVPVGRVETGVLKPGTIVVFAPASITTEVKSVEMHHEALQEAVPGDNVGFNVKNVSVKELRRGYVAGDSKNNPPKGAADFTAQVIVLNHP

SEQ ID NO: 17238 - protein, 331 aa, Graphium agamemnon
KSTTTGHLIYKCGGIDKRTIEKFEKEAQEMGKGSFKYAWVLDKLKAERERGITIDIALWKFETAKYYVTIIDAPGHRDFIKNMITGTSQADCAVLIVAAGTGEFEAGISKNGQTREHALLAFTLGVKQLIVGVNKMDSTEPPYSEPRFEEIKKEVSSYIKKIGYNPAAVAFVPISGWHGDNMLEASTKMPWFKGWQVERKEGKAEGKCLIEALDAILPPARPTDKALRLPLQDVYKIGGIGTVPVGRVETGVLKPGTIVVFAPANITTEVKSVEMHHEALQEAVPGDNVGFNVKNVSVKELRRGYVAGDSKNNPPKGASDFTAQVIVLNHP

SEQ ID NO: 17239 - protein, 331 aa, Hemileuca electra
  unsure (1)..(331): unsure at all Xaa locations
KSTTNGHLIYKCGGIDKRTIEKFEKEAHEMGKGSFKYAWVLDKLKAERERGITIDIALWKFETSKYYVTIIDAPGHRDFIKNMITGTSQADCAVLIVAAGTGEFEAGISKNGQTREHALLAFTLGVEQLIVGVNXMDSTEPPYSESRFEEIKKEVSSYIKKIGYNPAAVAFVPISGWHGDNMLEPSTKMPWFKGWAVERKEGKAEGKCLIEALDAILPPARPTDKALRLPLQDVYKIGGIGTVPVGRVETGILKPGTVVVFAPANITTEVKSVEMHHEALQEAVPGDNVGFNVKNVSVKELRRGYVAGDSKNNLPKGAADFTAQVIVLNHP

SEQ ID NO: 17240 - protein, 331 aa, Macrosoma sp. MC-2000
KFTTTGHLIYKCGGIDKRTIEKFEKEAQEMGKGSFKYAWVLDKLKAERERGITIDIALWKFETSKYYVTIIDAPGHRDFIKNMITGTSQADCAVLIVAAGTGEFEAGISKNGQTREHALLAFTLGVKQLIVGVNKMDSTEPPYSEPRFEEIKKEVSSYIKKIGYNPAAVAFVPISGWHGDNMLEPSTKMPWFKGWLVERKEGKAEGKCLIEALDAILPPARPTDKALRLPLQDVYKIGGIGTVPVGRVETGILKPGTIVVFAPANITTEVKSVEMHHEALQEAVPGDNVGFNVKNVSVKELRRGYVAGDSKNNPPKGASDFTAQVIVLNHP

SEQ ID NO: 17241 - protein, 331 aa, Parides photinus
KSTTTGHLIYKCGGIDKRTIEKFEKEAQEMGKGSFKYAWVLDKLKAERERGITIDIALWKFETAKYYVTIIDAPGHRDFIKNMITGTSQADCAVLIVAAGTGEFEAGISKNGQTREHALLAFTLGVKQLIVGVNKMDSTEPPYSEPRFEEIKKEVSSYIKKIGYNPAAVAFVPISGWHGDNMLEPSTKMPWFKGWNVERKEGKAEGKCLIEALDAILPPARPTDKALRLPLQDVYKIGGIGTVPVGRVETGVLKPGTIVVFAPANITTEVKSVEMHHEALPEAVPGDNVGFNVKNVSVKELRRGYVAGDSKNNPPKGASDFTAQVIVLNHP

SEQ ID NO: 17242 - protein, 331 aa, Parnassius phoebus
KSTTTGHLIYKCGGIDKRTIEKFEKEAQEMGKGSFKYAWVLDKLKAERERGITIDIALWKFETSKYYVTIIDAPGHRDFIKNMITGTSQADCAVLIVAAGTGEFEAGISKNGQTREHALLAFTLGVKQLIVGVNKMDSTEPPYSESRFEEIKKEVSSYIKKIGYNPAAVAFVPISGWHGDNMLEPSTKMPWFKGWQVERKEGKAEGKCLIEALDAILPPARPTDKPLRLPLQDVYKIGGIGTVPVGRVETGVLKPGTIVVFAPANITTEVKSVEMHHEALQEAVPGDNVGFNVKNVSVKELRRGYVAGDSKNNPPKGAADFTAQVIVLNHP

SEQ ID NO: 17243 - protein, 331 aa, Proserpinus clarkiae
KSTTTGHLIYKCGGIDKRTIEKFEKEAQEMGKGSFKYAWVLDKLKAERERGITIDIALWKFETSKYYVTIIDAPGHRDFIKNMITGTSQADCAVLIVAAGTGEFEAGISKNGQTREHALLAFTLGVKQLIVGVNKMDSTEPPYSESRFEEIKKEVSSYIKKIGYNPAAVAFVPISGWHGDNMLEPSTKMPWFKGWLVERKEGKAEGKCLIEALDAILPPARPTDKALRLPLQDVYKIGGIGTVPVGRVETGILKPGTIVVFAPANITTEVKSVEMHHEALQEAVPGDNVGFNVKNVSVKELRRGYVAGDSKNNPPKGAADFTAQVIVLNHP

SEQ ID NO: 17244 - protein, 413 aa, Stegopterna mutata
HVDSGKSTTTGHLIYKCGGIDKRTIEKFEKEAQEMGKGSFKYAWVLDKLKAERERGITIDIALWKFETAKYYVTIIDAPGHRDFIKNMITGTSQADCAVLIVAAGTGEFEAGISKNGQTREHALLAFTLGVKQLIVGVNKMDSTEPPFSESRFEEIKKEVSSYIKKIGYNPVCVPFVPISGWHGDNMLEVSAKMPWYKGWKVERKDGNADGKCLIESLDAILPPSRPTDKALRLPLQDVYKIGGIGTVPVGRVETGVIKPGMVVVFAPVNLTTEVKSVEMHHEALQEAGPGDNVGFNVKNVSVKELRRGYVAGDSKSNPPKGAENFTAQVIVLNHPGQISNGYTPVLDCHTAHIACKFSEIKEKVDRRTGKSTEDNPKAIKSGDAAIVILVPSKPLCVESFSEYPPLGRFAVR

SEQ ID NO: 17245 - protein, 365 aa, Syncephalastrum racemosum
GKSTTTGHLIYKCGGIDKRTIEKFEKEAAELGKGSFKYAWVLDKLKAERERGITIDIALWKFETPKYHVTVIDAPGHRDFIKNMITGTSQADCGILIIAAGTGEFEAGISKDGQTREHALLAFTLGVRQLIVAINKMDSTKYSEARYNEIVKEVSTFIKKIGFNPKSVPFVPISGWNGDNMLEESPNMPWFKGWKKETKAGEKSGKTLLEAIDNIDPPVRPSDKPLRLPLQDVYKIGGIGTVPVGRVETGVIKAGMVVTFAPANVTTEVKSVEMHHEQLVEGVPGDNVGFNVKNVSVKDIRRGNVCSDSKNDPAKESASFTAQVIVLNHPGQIGAGYAPVLDCHTAHIACKFAELLEKIDRRSGK

SEQ ID NO: 17246 - protein, 390 aa, Rhizophydium sp. JEL136
IEKFEKEAAEMGKGSFKYAWVLDKLKAERERGITIDIALWKFETPKYYVTVIDAPGHRDFIKNMITGTSQADCAILIIGGGIGEFEAGISKDGQTREHALLANTLGVKQMIIAVNKMDTNKWSEDRFNEIVKELSSFIKKVGFNPKAVPFIPISGWHGDNMLEPSANMSWFKGWTKETKGGVLTGKTLLNAIDAIDLPSRPTDKPLRLPLQDVYKIGGIGTVPVGRVETGVIKAGMVVTFAPANVTTEVKSVEMHHETLEQGIPGDNVGFNIKNVSVKDIRRGMVCSDSKNDPAKEAASFQAQIIVLNHPGQISAGYSPVLDCHTAHIACKFSELQEKLDRRTSKKTEDNPKSIKSGDSAIVKMVPTKPMCVESFTEYPPLGRFAVRDMR

SEQ ID NO: 17247 - protein, 413 aa, Artace cribraria
HVDSGKSTTTGHLIYKCGGIDKRTIEKFEKEAQEMGKGSFKYAWVLDKLKAERERGITIDIALWKFETGKYYVTIIDAPGHRDFIKNMITGTSQADCAVLIVAAGTGEFEAGISKNGQTREHALLAFTLGVKQLIVGVNKMDSTEPPYSEPRFEEIKKEVSSYIKKIGYNPAAVAFVPISGWHGDNMLEPSTKMPWFKGWNVERKEGKAEGKCLIEALDAILPPARPTDKALRLPLQDVYKIGGIGTVPVGRVETGILKPGTIVVFAPANITTEVKSVEMHHEALQEAVPGDNVGFNVKNVSVKELRRGYVAGDSKNNPPKGAADFTAQVIVLNHPGQISNGYTPVLDCHTAHIACKFAEIKEKVDRRTGKSTEDNPKSIKSGDAAIVNLVPSKPLCVESFQEFPPLGRFAVR

SEQ ID NO: 17248 - protein, 413 aa, Tolype notialis
HVDSGKSTTTGHLIYKCGGIDKRTIEKFEKEAQEMGKGSFKYAWVLDKLKAERERGITIDIALWKFETSKYYVTIIDAPGHRDFIKNMITGTSQADCAVLIVAAGTGEFEAGISKNGQTREHALLAFTLGVKQLIVGVNKMDSTEPPYSEPRFEEIKKEVSSYIKKIGYNPAAVAFVPISGWHGDNMLEPSTKMPWFKGWNVERKEGKAEGKCLIEALDAILPPARPTDKALRLPLQDVYKIGGIGTVPVGRVETGILKPGTIVVFAPANITTEVKSVEMHHEALQEAVPGDNVGFNVKNVSVKELRRGYVAGDSKNNPPKGAADFTAQVIVLNHPGQISNGYTPVLDCHTAHIACKFAEIKEKVDRRTGKSTEDNPKSIKSGDAAIVNLVPSKPLCVESFQEFPPLGRFAVR

SEQ ID NO: 17249 - protein, 413 aa, Dendrolimus pini
HVDSGKSTTTGHLIYKCGGIDKRTIEKFEKEAQEMGKGSFKYAWVLDKLKAERDQGITIDIALWKFETAKYYVTIIDAPGHRDFIKNMITGTSQADCAVLIVAAGTGEFEAGISKNGQTREHALLAFTLGVKQLIVGVNKMDSTEPPYSEPRFEEIKKEVSSYIKKIGYNPAAVAFVPISGWHGDNMLEPSTKMPWFKGWQVERKEGKAEGKCLIEALDAILPPARPTDKPLRLPLQDVYKIGGIGTVPVGRVETGILKPGTIVVFAPANITTEVKSVEMHHEALQEAVPGDNVGFNVKNVSVKELRRGYVAGDSKNNPPKGAADFTAQVIVLNHPGQISNGYTPVLDCHTAHIACKFAEIKEKVDRRTGKSTEENPKSIKSGDAAIVILVPSKPLCVESFQEFPPLGRFAVR

SEQ ID NO: 17250 - protein, 413 aa, Eutachyptera psidii
HVDSGKSTTTGHLIYKCGGIDKRTIEKFEKEAQEMGKGSFKYAWVLDKLKAERERGITIDIALWKFETAKYYVTIIDAPGHRDFIKNMITGTSQADCAVLIVAAGTGEFEAGISKNGQTREHALLAFTLGVKQLIVGVNKMDSTEPPYSEPRFEEIKKEVSSYIKKIGYNPAAVAFVPISGWHGDNMLEPSTKMPWFKGWQVDRKEGKAEGKCLIEALDAILPPARPTDKPLRLPLQDVYKIGGIGTVPVGRVETGILKPGTIVVFAPANITTEVKSVEMHHEALQEAVPGDNVGFNVKNVSVKELRRGYVAGDSKNNPPKGAADFTAQVIVLNHPGQISNGYTPVLDCHTAHIACKFAEIKEKVDRRTGKSTEENPKSIKSGDAAIVNLVPSKPLCVESFQEFPPLGRFAVR

SEQ ID NO: 17251 - protein, 377 aa, Gloveria arizonensis
QEMGKGSFKYAWVLDKLKAERERGITIDIALWKFETAKYYVTIIDAPGHRDFIKNMITGTSQADCAVLIVAAGTGEFEAGISKNGQTREHALLAFTLGVKQLIVGVNKMDSTEPPYSEPRFEEIKKEVSSYIKKIGYNPAAVAFVPISGWHGDNMLEPSTKMPWFKGWQVDRKEGKAEGKCLIEALDAILPPARPTDKALRLPLQDVYKIGGIGTVPVGRVETGILKPGTIVVFAPANITTEVKSVEMHHEALQEAVPGDNVGFNVKNVSVKELRRGYVAGDSKNNPPKGAADFTAQVIVLNHPGQISNGYTPVLDCHTAHIACKFAEIKEKVDRRTGKSTEENPKSIKSGDAAIVNLVPSKPLCVESFQEFPPLGR

SEQ ID NO: 17252 - protein, 413 aa, Gonometa rufobrunnea
HVDSGKSTTTGHLIYKCGGIDKRTIEKFEKEAQEMGKGSFKYAWVLDKLKAERERGITIDIALWKFETAKYYVTIIDAPGHRDFIKNMITGTSQADCAVLIVAAGTGEFEAGISKNGQTREHALLAFTLGVKQLIVGVNKMDSTEPPYSEPRFEEIKKEVSSYIKKIGYNPAAVAFVPISGWHGDNMLEPSTKMPWFKGWQVERKEGKAEGKCLIEALDAILPPARPTDKPLRLPLQDVYKIGGIGTVPVGRVETGILKPGTIVVFAPANITTEVKSVEMHHEALQEAVPGDNVGFNVKNVSVKELRRGYVAGDSKNNPPKGAADFTAQVIVLNHPGQISNGYTPVLDCHTAHIACKFAEIKEKVDRRTGKSTEENPKSIKSGDAAIVNLVPSKPLCVESFQEFPPLGRFAVR

SEQ ID NO: 17253 - protein, 413 aa, Macrothylacia rubi
HVDSGKSTTTGHLIYKCGGIDKRTIEKFEKEAQEMGKGSFKYAWVLDKLKAERERGITIDIALWKFETAKYYVTIIDAPGHRDFIKNMITGTSQADCAVLIVAAGTGEFEAGISKNGQTREHALLAFTLGVKQLIVGVNKMDSTEPPYSEPRFEEIKKEVSSYIKKIGYNPAAVAFVPISGWHGDNMLEPSTKMPWFKGWQVERKEGKAEGKCLIEALDAILPPARPTDKALRLPLQDVYKIGGIGTVPVGRVETGILKPGTIVVFAPANITTEVKSVEMHHEALQEAVPGDNVGFNVKNVSVKELRRGYVAGDSKNNPPKGAADFTAQVIVLNHPGQISNGYTPVLDCHTAHIACKFAEIKEKVDRRTGKSTEENPKSIKSGDAAIVNLVPSKPLCVESFQEFPPLGRFAVR

SEQ ID NO: 17254 - protein, 413 aa, Phyllodesma americana
HVDSGKSTTTGHLIYKCGGIDKRTIEKFEKEAQEMGKGSFKYAWVLDKLKAERERGITIDIALWKFETGKYYVTIIDAPGHRDFIKNMITGTSQADCAVLIVAAGTGEFEAGISKNGQTREHALLAFTLGVKQLIVGVNKMDSTEPPYSEPRFEEIKKEVSSYIKKIGYNPAAVAFVPISGWHGDNMLEPSTKMPWFKGWLVERKEGKAEGKCLIEALDAILPPARPTDKPLRLPLQDVYKIGGIGTVPVGRVETGILKPGTIVVFAPANITTEVKSVEMHHEALQEAVPGDNVGFNVKNVSVKELRRGYVAGDSKNNPPKGAADFTAQVIVLNHPGQISNGYTPVLDCHTAHIACKFAEIKEKVDRRTGKSTEENPKSIKSGDAAIVNLVPSKPLCVESFQEFPPLGRFAVR

SEQ ID NO: 17255 - protein, 413 aa, Quadrina diazoma
HVDSGKSTTTGHLIYKCGGIDKRTIEKFEKEAQEMGKGSFKYAWVLDKLKAERERGITIDIALWKFETAKYYVTIIDAPGHRDFIKNMITGTSQADCAVLIVAAGTGEFEAGISKNGQTREHALLAFTLGVKQLIVGVNKMDSTEPPYSEPRFEEIKKEVSSYIKKIGYNPAAVAFVPISGWHGDNMLEPSTKMPWFKGWQVDRKEGKAEGKCLIEALDAILPPARPTDKPLRLPLQDVYKIGGIGTVPVGRVETGILKPGTIVVFAPANITTEVKSVEMHHEALQEAVPGDNVGFNVKNVSVKELRRGYVAGDSKNNPPKGAADFTAQVIVLNHPGQISNGYTPVLDCHTAHIACKFAEIKEKVDRRTGKSTEENPKSIKSGDAAIVILVPSKPLCVESFQEFPPLGRFAVR

SEQ ID NO: 17256 - protein, 413 aa, Lasiocampa quercus
HVDSGKSTTTGHLIYKCGGIDKRTIEKFEKEAQEMGKGSFKYAWVLDKLKAERERGITIDIALWKFETGKYYVTIIDAPGHRDFIKNMITGTSQADCAVLIVAAGTGEFEAGISKNGQTREHALLAFTLGVKQLIVGVNKMDSTEPPYSEPRFEEIKKEVSSYIKKIGYNPAAVAFVPISGWHGDNMLEPSTKMPWFKGWQVERKEGKAEGKCLIEALDAILPPARPTDKPLRLPLQDVYKIGGIGTVPVGRVETGILKPGTIVVFAPANITTEVKSVEMHHEALQEAVPGDNVGFNVKNVSVKELRRGYVAGDSKNNPPKGAADFTAQVIVLNHPGQISNGYTPVLDCHTAHIACKFAEIKEKVDRRTGKSTEENPKSIKSGDAAIVILVPSKPLCVESFQEFPPLGRFAVR

SEQ ID NO: 17257 - protein, 340 aa, Prioneris autothisbe
FEKEAQEMGKGSFKYAWVLDKLKAERERGITIDIALWKFETSRYYVTIIDAPGHRDFIKNMITGTSQADCAVLIVAAGTGEFEAGISKNGQTREHALLAFTLGVKQLIVGVNKMDSTEPPYSESRFEEIKKEVSSYIKKIGYNPAAVAFVPISGWHGDNMLEPSTKMPWFKGWLVERKEGKAEGKCLIEALDAILPPARPTDKALRLPLQDVYKIGGIGTVPVGRVETGVLKPGTIVVFAPANITTEVKSVEMHHEALQEAVPGDNVGFNVKNVSVKELRRGYVAGDSKSNPPKGAADFTAQVIVLNHPGQISNGYTPVLDCHTAHIACKFAEIKEKVDR

SEQ ID NO: 17258 - protein, 340 aa, Belenois java
FEKEAQEMGKGSFKYAWVLDKLKAERERGITIDIALWKFETSKYYVTIIDAPGHRDFIKNMITGTSQADCAVLIVAAGTGEFEAGISKNGQTREHALLAFTLGVKQLIVGVNKMDSTEPPYSESRFEEIKKEVSSYIKKIGYNPAAVAFVPISGWHGDNMLEPSTKMPWFKGWLVERKEGKAEGKCLIEALDAILPPARPTDKALRLPLQDVYKIGGIGTVPVGRVETGVLKPGTIVVFAPANITTEVKSVEMHHEALQEAVPGDNVGFNVKNVSVKELRRGYVAGDSKSNPPKGAADFTAQVIVLNHPGQISNGYTPVLDCHTAHIACKFAEIKEKVDR

SEQ ID NO: 17259 - protein, 340 aa, Delias gilliardi
FEKEAQEMGKGSFKYAWVLDKLKAERERGITIDIALWKFETGRYYVTIIDAPGHRDFIKNMITGTSQADCAVLIVAAGTGEFEAGISKNGQTREHALLAFTLGVKQLIVGVNKMDSTEPPFSEPRFEEIKKEVSSYIKKIGYNPAAVAFVPISGWHGDNMLEPSTKMPWFKGWLVERKEGKSEGKCLIEALDAIMPPARPTDKALRLPLQDVYKIGGIGTVPVGRVETGVLKPGTIVVFAPANITTEVKSVEMHHEALQEAVPGDNVGFNVKNVSVKELRRGYVAGDSKSNPPKGAADFTAQVIVLNHPGQISNGYTPVLDCHTAHIACKFAEIKEKVDR

SEQ ID NO: 17260 - protein, 340 aa, Delias iltis
  unsure (1)..(340): unsure at all Xaa locations
FEKEAQEMGKGSFKYAWVLDKLKAERERGITIDIALWKFETGRYYVTIIDAPGHRDFIKNMITGTSQADCAVLIVAAGTGEFEAGISKNGQTREHALLAFTLGVKQLIVGVNKMDSTEPPYSEPRFEEIKKEVSSYIKKIGYNPAAVAFVPISGWHGDNMLEPSTKMPWFKGWYVERKEGKAEGKCLIEALDAILPPARPTDKALRLPLQDVYKIGGIGTVPVGRVETGVLKPGTIVVFAPANITTEVKSVEMHHEALQEAVPGDNVGFNVKNVSVKELRRGYVAGDSKNNPPKGAADFTAQVIVLNHPGQISXGYTPVLDCHTAHIACKFAEIKEKVDR

SEQ ID NO: 17261 - protein, 375 aa, Dieunomia nevadensis
  unsure (1)..(375): unsure at all Xaa locations
MGKGSFKYAWVLDKLKAERERGITIDIALWKFETXKYYVTIIDAPGHRDFIKNMITGTSQADCAVLIVAAGTGEFEAGISKNGQTREHALLAFTLGVKQLIVGVNKMDSTEPPYSEARFEEIKKEVSSYIKKIGYNPAAIAFVPISGWHGDNMLEVSSKMPWFKGWSVERKEGKAEGKCLIEALDAILPPTRPTDKALRLPLQDVYKIGGIGTVPVGRVETGVLKPGMVVTFAPAGLTTEVKSVEMHHEALQEAVPGDNVGFNVKNVSVKELRRGYVAGDSKNNPPKGAADFTAQVIVLNHPGQICNGYTPVLDCHTAHIACKFLQIKEKCDRRSGKTTEDNPKAIKSGDAAIVTLVPSKPMCVEAFQEFPPLGR

SEQ ID NO: 17262 - protein, 361 aa, Lasioglossum figueresi
ERERGITIDIALWKFETAKYYVTIIDAPGHRDFIKNMITGTSQADCAVLIVAAGTGEFEAGISKNGQTREHALLAFTLGVKQLIVGVNKMDSTEPPYSEARFEEIKKEVSSYIKKIGYNPAAVAFVPISGWHGDNMLEASSKMPWFKGWAVERKEGKAEGKCLIEALDAILPPSRPTDKALRLPLQDVYKIGGIGTVPVGRVETGLLKPGMVVTFAPAGLTTEVKSVEMHHEALTEAVPGDNVGFNVKNVSVKELRRGYVAGDSKNNPPKGAADFTAQVIVLNHPGQISNGYTPVLDCHTAHIACKFHKIIEKCDRRTGKTTEVDPKAIKSGDAAIVNLVPSKPMCVEAFQEFPPLGRFAV

SEQ ID NO: 17263 - protein, 361 aa, Lasioglossum mediterraneum
  unsure (1)..(361): unsure at all Xaa locations
ERERGITIDIALWKFETSKYXVTIIDAPGHRDFIKNMITGTSQADCAVLIVAAGTGEFEAGISKNGQTREHALLAFTLGVKQLIVGVNKMDSTEPPYSESRFEEIKKEVSSYIKKIGYNPAAVAFVPISGWHGDNMLEASSKMPWFKGWAVERKEGKAEGKCLIEALDAILPPSRPTDKALRLPLQDVYKIGGIGTVPVGRVETGLLKPGMVVTFAPAGLTTEVKSVEMHHEALTEAVPGDNVGFNVKNVSVKELRRGYVAGDSKNNPPKGAADFTAQVIVLNHPGQISNGYTPVLDCHTAHIACKFHKIIEKCDRRTGKTTEMEPKAIKSGDAAIVTLVPSKPMCVEAFQEFPPLGRFAV

SEQ ID NO: 17264 - protein, 359 aa, Lasioglossum megastigmus
ERERGITIDIALWKFETAKYYVTIIDAPGHRDFIKNMITGTSQADCAVLIVAAGTGEFEAGISKNGQTREHALLAFTLGVKQLIVGVNKMDSTEPPYSEPRFEEIKKEVSSYIKKIGYNPAAVAFVPISGWHGDNMLEVSSKMPWFKGWAVERKEGKAEGKCLIEALDAILPPSRPTDKALRLPLQDVYKIGGIGTVPVGRVETGLLKPGMVVTFAPAGITTEVKSVEMHHEALTEAVPGDNVGFNVKNVSVKELRRGYVAGDSKNNPPKGAADFTAQVIVLNHPGQISNGYTPVLDCHTAHIACKFHKIIEKCDRRTGKTTEMEPKAIKSGDAAIVTLVPSKPMCVEAFQEFPPLGRF

SEQ ID NO: 17265 - protein, 360 aa, Lasioglossum olgae
ERERGITIDIALWKFETSKYYVTIIDAPGHRDFIKNMITGTSQADCAVLIVAAGTGEFEAGISKNGQTREHALLAFTLGVKQLIVGVNKMDSTEPPYSEARFEEIKKEVSSYIKKIGYNPAAVAFVPISGWHGDNMLEASSKMPWFKGWAVERKEGKADGKCLIEALDAILPPSRPTDKALRLPLQDVYKIGGIGTVPVGRVETGLLKPGMVVTFAPAGITTEVKSVEMHHEALTEAVPGDNVGFNVKNVSVKELRRGYVAGDSKNNPPKGAADFTAQVIVLNHPGQISNGYTPVLDCHTAHIACKFHKIIEKCDRRTGKTTEMEPKAIKSGDAAIVTLIPSKPMCVEAFQEFPPLGRFA

SEQ ID NO: 17266 - protein, 358 aa, Lasioglossum supralucens
ERERGITIDIALWKFETSKYYVTIIDAPGHRDFIKNMITGTSQADCAVLIVAAGTGEFEAGISKNGQTREHALLAFTLGVKQLIVGVNKMDSTEPPYSEPRFEEIKKEVSSYIKKIGYNPAAVAFVPISGWHGDNMLEVSSKMPWFKGWNVERKEGKAEGKCLIEALDAILPPSRPTDKALRLPLQDVYKIGGIGTVPVGRVETGLLKPGMVVTFAPAGITTEVKSVEMHHEALLEAVPGDNVGFNVKNVSVKELRRGYVAGDSKNNPPKGAADFTAQVIVLNHPGQISNGYTPVLDCHTAHIACKFHKIIEKCDRRTGKTTEMEPKAIKSGDAAIVTLVPTKPMCVEAFQEFPPLGR

SEQ ID NO: 17267 - protein, 360 aa, Lasioglossum sp. 'Cobboboonee'
ERERGITIDIALWKFETSKYYVTIIDAPGHRDFIKNMITGTSQADCAVLIVAAGTGEFEAGISKNGQTREHALLAFTLGVKQLIVGVNKMDSTEPPYSEARFEEIKKEVSSYIKKIGYNPAAVAFVPISGWHGDNMLEASSKMPWFKGWAVERKEGKADGKCLIEALDAILPPSRPTDKALRLPLQDVYKIGGIGTVPVGRVETGLLKPGMVVTFAPAGITTEVKSVEMHHEALTEAVPGDNVGFNVKNVSVKELRRGYVAGDSKNNPPKGAADFTAQVIVLNHPGQISNGYTPVLDCHTAHIACKFHKIIEKCDRRTGKTTEMEPKAIKSGDAAIVTLVPSKPMCVEAFQEFPPLGRFA

SEQ ID NO: 17268 - protein, 363 aa, Lasioglossum albocinctum
DKLKAERERGITIDIALWKFETSKYYVTIIDAPGHRDFIKNMITGTSQADCAVLIVAAGTGEFEAGISKNGQTREHALLAFTLGVKQLIVGVNKMDSTEPPYSEARFEEIKKEVSSYIKKIGYNPAAVAFVPISGWHGDNMLEVSSKMPWFKGWAVERKEGKAEGKCLIEALDAILPPSRPTDKALRLPLQDVYKIGGIGTVPVGRVETGVLKPGMVVTFAPAGITTEVKSVEMHHEALTEAVPGDNVGFNVKNVAVKELRRGYVAGDSKNNPPKGAADFTAQVIVLNHPGQISNGYTPVLDCHTAHIACKFHKIIEKCDRRTGKTTEMEPKAIKSGDAAIVTLVPSKPMCVEAFQEFPPLGR

SEQ ID NO: 17269 - protein, 385 aa, Bombus subterraneus
KFEKEAQEMGKGSFKYAWVLDKLKAERERGITIDIALWKFETAKYYVTIIDAPGHRDFIKNMITGTSQADCAVLIVAAGIGEFEAGISKNGQTREHALLAFTLGVKQLIVGVNKMDMTDPPYSEARFEEIKKEVSSYIKKIGYNTASVAFVPISGWHGDNMLEPSPNTPWYKGWKVERKDGNADGKTLIEALDAILPPSRPTDKALRLPLQDVYKIGGIGTVPVGRVETGILKPGMLVTFAPAALTTEVKSVEMYHEALTEALPGDNVGFNVKNISVKELRRGYVAGDSKNQPPRGAADFTAQVIVLNHPGQISNGYTPVLDCHTAHIACKFAEIKEKCDRRTGKTTEENPKSIKSGDAAIVMLQPTKPMCVEAFQEFPPLGRFA

SEQ ID NO: 17270 - protein, 432 aa, uncultured crenarchaeote 74A4
MADKPHLNMIVTGHIDNGKSTTMGHFLMDLGVVDERTIAAHGAESEKTGKGDTFKYAWVMDNIKDERERGITIDLAFQKFESAKYFFTLIDAPGHRDFIKNMITGASEADAAILVLSAKEGETDTATAAGGQAREHAFLLKTLGVKQIIVAINKMDAVDYKEDAFKAAKEKGEKLVRSVGYKLEDVPVIPVSGWKGDNLVKKTENMPWYSGKTLLEAFDDFTVEEKPIGKPLRVPIQDVYTITGVGTVPVGRVDTGIMKAAHPIIVMPSGALGEIKSIETHHTQMPTAEAGHNIGFNLRGIENKDIKRGDVLGTPDAPPNVAKEFKAQIIVIHHPTAIAPGYTPVMHAHTTQVAATVTEFLQKINPATGAVEEENPKFLKVAMQQAEFCRPVRPTCIETFEAFPEMGRFALRDMGATIAAGIVKEITEEHKP

SEQ ID NO: 17271 - protein, 310 aa, Hemileuca stonei
  unsure (1)..(310): unsure at all Xaa locations
TIEKLEKEAQEMGKGSFKYAWVLDKLKAERERGITIDIALWKFETSKYYVTIIDAPGHRDFIKNMITGTSQADCAVLIVAAGTGEFEAGISKNGQTREHALLAFTLGVKQLIVGVNKMDSTEPPYSESRFEEIKKEVSSYIKKIGYNPAAVAFVPISGWHGDNMLEPSTKMPWFKGWAVERKEGKAEGKCLIEALDAILPPARPTDKALRLPLQDVYKIGGIGTVPVGRVETGILKPGTVVVFAPANITTEVKSVEMHHEALQEAVPGDNVGFNVKNVSVKELRRGYVAGDSKNNPPKGAADFTAQXIVL

SEQ ID NO: 17272 - protein, 310 aa, Hemileuca hualapai
TIEKFEKEAQEMGKGSFKYAWVLDKLKAERERGITIDIALWKFETSKYYVTIIDAPGHRDFIKNMITGTSQADCAVLIVAAGTGEFEAGISKNGQTREHALLAFTLGVKQLIVGVNKMDSTEPPYSESRFEEIKKEVSSYIKKIGYNPAAVAFVPISGWHGDNMLEPSTKMPWFKGWAVERKEGKAEGKCLIEALDAILPPARPTDKALRLPLQDVYKIGGIGTVPVGRVETGILKPGTVVVFAPANITTEVKSVEMHHEALQEAVPGDNVGFNVKNVSVKELRRGYVAGDSKNNPPRGAADFTAQVIVL

SEQ ID NO: 17273 - protein, 310 aa, Hemileuca nuttali
TIEKFEKEAQEMGKGSFKYAWVLDKLKAERERGITIDIALWKFETSKYYVTIIDAPGHRDFIKNMITGTSQADCAVLIVAAGTGEFEAGISKNGQTREHALLAFTLGVKQLIVGVNKMDSTEPPYSESRFEEIKKEVSSYIKKIGYNPAAVAFVPISGWHGDNMLEPSTKMPWFKGWAVERKEGKAEGKCLIEALDAILPPARPTDKALRLPLQDVYKIGGIGTVPVGRVETGILKPGTVVVFAPANITTEVKSVEMHHEALQEAVPGDNVGFNVKNVSVKELRRGYVAGDSKNNPPKGAADFTAQVIVL

SEQ ID NO: 17274 - protein, 310 aa, Hemileuca hera
TIEKFEKEAQEMGKGSFKYAWVLDKLKAERERGITIDIALWKFETSKYYVTIIDAPGHRDFIKNMITGTSQADCAVLIVAAGTGEFEAGISKNGQTREHALLAFTLGVKQLIVGVNKMDSTEPPYSESRFEEIKKEVSSYIKKIGYNPAAVAFVPISGWHGDNMLEPSTKMPWFKGWTVERKEGKAEGKCLIEALDAILPPARPTDKALRLPLQDVYKIGGIGTVPVGRVETGILKPGTVVVFAPANITTEVKSVEMHHEALQEAVPGDNVGFNVKNVSVKELRRGYVAGDSKNNPPKGAADFTAQVIVL

SEQ ID NO: 17275 - protein, 313 aa, Hylurdrectonus araucariae
  unsure (1)..(313): unsure at all Xaa locations
EKXAXEMGKGSFKYAWVLDKLKAERERGITIDIALWKFETSKYYVTIIDAPGHRDFIKNMITGTSQADCAVLIVAAGTGEFEAGISKNGQTREHALLAFTLGVRQLIVGVNKMDSTEPPYSESRFEEIKKEVSSYIKKIGYNPAAVAFVPISGWHGDNMLEASTKMPWFKGWAIERKEGKAEGKTLIDALDAILPPSRPTDKPLRLPLQDVYKIGGIGTVPVGRIETGILKPGMVVVFAPANITTEVKSVEMHHEALQEAVPGDNVGFNVKNVSVKELRRGYVAGDTKNNPPRAAADFLAQVIVLXXPGQISM

SEQ ID NO: 17276 - protein, 359 aa, Boreus californicus
ERERGITIDIALWKFETARYYVTIIDAPGHRDFIKNMITGTSQADCAVLIVAAGTGEFEAGISKNGQTREHALLAFTLGVKQLIVGVNKMDSTEPPYSESRFEEIKKEVSSYIKKIGYNPMTVPFVPISGWHGDNMLEPSAKMSWFKGWAVERKEGKADGKCLIEALDAIVPPSRPTDKALRLPLQDVYKIGGIGTVPVGRVETGIIKPGTVVVFAPANIVTEVKSVEMHHEALQEAVPGDNVGFNVKNVSVKELKRGYVAGDTKINPPKGAADFTAQVIVLNHPGQISNGYTPVLDCHTAHIACKFAEIKEKVDRRTGKSTEDNPKAIKSGDAAIVVLVPSKPMCVESFSEFPPLGRF

SEQ ID NO: 17277 - protein, 363 aa, Nannochorista dipteroides
ERERGITIDIALWKFETAKYYVTIIDAPGHRDFIKNMITGTSQADCAVLIVAAGTGEFEAGISKNGQTREHALLAFTLGVKQLIVGVNKMDSTEPPFSESRFEEIKKEVSSYIKKIGYNPLAVPFVPISGWHGDNMLEVSTKMPWFKGWAVERKEGKANGICLIEALDAILAPSRPTDKPLRLPLQDVYKIGGIGTVPVGRVETGVLKPGTVVVFAPANLTTEVKSVEMHHEALQEAVPGDNVGFNVKNVSVKDLRRGYVAGDSKASPPKGAADFTAQVIVLNHPGQISNGYTPVLDCHTAHIACKFSEIKEKVDRRTGKSTEDNPKAIKSGDAAIVILVPSKPMCVESFSEFPPLGRFAVRD

SEQ ID NO: 17278 - protein, 363 aa, Hylobittacus apicalis
ERERGITIDIALWKFETAKYYVTIIDAPGHRDFIKNMITGTSQADCAVLIVAAGTGEFEAGISKNGQTREHALLAFTLGVKQLIVGVNKMDSTEPPYSESRFEEIKKEVSSYIKKIGYNPAAVAFVPISGWHGDNMLEVSSKMSWFKGWAVERKEGKADGKCLIEALDAILPPARPTDKALRLPLQDVYKIGGIGTVPVGRVETGVLKPGTVVVFAPANITTEVKSVEMHHEALQEAVPGDNVGFNVKNVSVKELRRGYVAGDTKVNPPKGAADFTAQVIVLNHPGQISNGYTPVLDCHTAHIACKFAEIKEKVDRRTGKSTEDNPKAIKSGDAAIVNLVPSKPMCVESFQEFPPLGRFAVRD

SEQ ID NO: 17279 - protein, 366 aa, Anchitrichia spangleri
QEMGKGSFKYAWVLDKLKAERERGITIDIALWKFETAKYYVTIIDAPGHRDFIKNMITGTSQADCAVLIVAAGTGEFEAGISKNGQTREHALLAFTLGVKQLIVGVNKMDSTEPPYNENRFEEIKKEVSSYIKKIGYNPAAVAFVPISGWHGDNMLEPSDKMPWFKGWEVERKEGKANGKCLIEALDAILPPARPTDKPLRLPLQDVYKIGGIGTVPVGRVETGVLKPGTIVVFAPANLTTEVKSVEMHHEALQEAVPGDNVGFNVKNVSVKELRRGYVAGDSKANPPKGAADFTAQVIVLNHPGQISNGYTPVLDCHTAHIACKFAEIKEKVDRRTGKSTEAEPKAIKSGDAAIVCLVPTKPMCV

SEQ ID NO: 17280 - protein, 366 aa, Byrsopteryx gomezi
QEMGKGSFKYAWVLDKLKAERERGITIDIALWKFETAKYYVTIIDAPGHRDFIKNMITGTSQADCAVLIVAAGTGEFEAGISKNGQTREHALLAFTLGVKQLIVGVNKMDSTEPPYNENRFEEIKKEVSSYIKKIGYNPAAVAFVPISGWHGDNMLEPSDKMPWFKGWAVERKEGKADGKCLIEALDAILPPARPTDKPLRLPLQDVYKIGGIGTVPVGRVETGVLKPGTIVVFAPANLTTEVKSVEMHHEALQEAVPGDNVGFNVKNVSVKELRRGYVAGDSKANPPKGAADFTAQVIVLNHPGQISNGYTPVLDCHTAHIACKFAEIKEKVDRRTGKSTENEPKAIKSGDAAIVTLVPTKPMCV

SEQ ID NO: 17281 - protein, 366 aa, Rhyacophila fuscula
  unsure (1)..(366): unsure at all Xaa locations
QEMGKGSFKYAWVLDKLKAERERGITIDIALWKFETAKYYVTIIDAPGHRDFIKNMITGTSQADCAVLIVAAGTGEFEAGISKNGQTREHALLAFTLGVKQLIVGVNKMDSTEPPFSEARFEEIKKXVSSYIKKIGYNPATVAFVPISGWHGDNMLEPSAKMAWFKGWNVVNKDAKQEGKCLIEALDAILPPSRPTDKALRLPLQDVYKIGGIGTVPVGRVETGILKPGTIVVFAPANITTEVKSVEMHHEALQEAVPGDNVGFNVKNVSVKELRRGFVAGDTKQNPPKGAADFTAQVIVLNHPGQISNGYTPVLDCHTAHIACKFSEIKEKVDRRTGKSTEDNPKAIKSGDAAIVILVPSKPMCV

SEQ ID NO: 17282 - protein, 366 aa, Rhyacophila brunnea
QEMGKGSFKYAWVLDKLKAERERGITIDIALWKFETAKYYVTIIDAPGHRDFIKNMITGTSQADCAVLIVAAGTGEFEAGISKNGQTREHALLAFTLGVKQLIVGVNKMDSTEPPFSESRFEEIKKEVSSYIKKIGYNPATVAFVPISGWHGDNMLEPSAKMPWFKGWNVVNKEVKQEGKCLIEALDAILPPSRPTDKALRLPLQDVYKIGGIGTVPVGRVETGILKPGTIVVFAPANLTTEVKSVEMHHEALQEAVPGDNVGFNVKNVSVKELRRGFVAGDSKINPPKGAADFTAQVIVLNHPGQISNGYTPVLDCHTAHIACKFAEIKEKVDRRTGKSTEDNPKAIKSGDAAIVILVPSKPMCV

SEQ ID NO: 17283 - protein, 366 aa, Atopsyche sp. UMSP000029352-Venezuela
QEMGKGSFKYAWVLDKLKAERERGITIDIALWKFETARYYVTIIDAPGHRDFIKNMITGTSQADCAVLIVAAGTGEFEAGISKNGQTREHALLAFTLGVKQLIVGVNKMDSTEPPFSESRFEEIKKEVSSYIKKIGYNPVAVPFVPISGWHGDNMLEPSSKMPWFKGWNVERKEGKAEGKCLIEALDAILPPARPTDKALRLPLQDVYKIGGIGTVPVGRVETGILKPGTIVVFAPANITTEVKSVEMHHEALQEAVPGDNVGFNVKNVSVKELRRGFVAGDSKANPPKGAADFTAQVIVLNHPGEISNGYTPVLDCHTAHIACKFSEIKEKVDRRTGKSTEDNPKAIKSGDAAIVILTPSKPMCV

SEQ ID NO: 17284 - protein, 366 aa, Taschorema evansi
  unsure (1)..(366): unsure at all Xaa locations
QEMGXGSFKYAWVLDKLKAERERGITIDIALWKFETARYYVTIIDAPGHRDFIKNMITGTSQADCAVLIVAAGTGEFEAGISKNGQTREHALLAFTLGVKQLIVGVNKMDSTEPPFSESRFEEIKKEVSSYIKKIGYNPVAVPFVPISGWHGDNMLEPSSKMPWFKGWNVERKEGKAEGKCLIEALDAILPPARPTDKALRLPLQDVYKIGGIGTVPVGRVETGVLKPGTIVVFAPANITTEVKSVEMHHEALQEAVPGDNVGFNVKNVSVKELRRGFVAGDSKVNPPKGAADFTAQVIVLNHPGEISNGYTPVLDCHTAHIACKFSEIKEKVDRRTGKSTEDNPKAIKSGDAAIVILTPSKPMCV

SEQ ID NO: 17285 - protein, 366 aa, Oeconesus maori
  unsure (1)..(366): unsure at all Xaa locations
QEMGKGSFKYAWVLDKLKAERERGITIDIALWKFETARYYVTIIDAPGHRDFIKNMITGTSQADCAVLIVAAGTGEFEAGISKNGQTREHALLAFTLGVRQLIVGVNKMDSTEPPFSETRFEEIKKEVSSYIKKIGYNPAGVPFVPISGWXXXXXXXXSPKMPWFKGWAVERKEGKAEGKCLLEALDAILPPARPTDKALRLPLQDVYKIGGIGTVPVGRVETGVLKPGTIVVFAPANITTEVKSVEMHHEALQEALPGDNVGFNIKNVSVKELRRGYVAGDSKLNPPKGAADFTAQVIVLNHPGQISNGYTPVLDCHTAHIACKFSEIKEKVDRRTGKSTEDNPKAIKSGDAAIVILVPTKPMCV

SEQ ID NO: 17286 - protein, 365 aa, Beraea pullata
EMGKGSFKYAWVLDKLKAERERGITIDIALWKFETAKFYVTIIDAPGHRDFIKNMITGTSQADCAVLIVAAGTGEFEAGISKNGQTREHALLAFTLGVKQLVVGVNKMDSTEPPYSEPRFEEIKKEVSSYIKKIGYNPAAVAFVPISGWHGDNMLEPSSKMPWFKGWAVERKEGKAEGKCLIEALDAILPPARPTDKPLRLPLQDVYKIGGIGTVPVGRVETGILKPGTVVVFAPANITTEVKSVEMHHEALQEAVPGDNVGFNVKNVSVKELRRGFVAGDSKASPPRGAADFTAQVIVLNHPGQISNGYTPVLDCHTAHIACKFAEIKEKVDRRTGKSTEDNPKAIKSGDAAIVILVPTKPMCV

SEQ ID NO: 17287 - protein, 366 aa, Helicopsyche borealis
QEMGKGSFKYAWVLDKLKAERERGITIDIALWKFETAKYYVTIIDAPGHRDFIKNMITGTSQADCAVLIVAAGTGEFEAGISKNGQTREHALLAFTLGVKQLIVGVNKMDSTEPPYSEARFEEIKKEVASYIKKIGYNPAAVAFVPISGWHGDNMLEPSSKMPWFKGWQVERKEGKAEGKCLIESLDAILPPARPTDKPLRLPLQDVYKIGGIGTVPVGRVETGVLKPGTVVVFAPANITTEVKSVEMHHEALQEAVPGDNVGFNVKNVSVKELRRGFVAGDSKASPPRGAADFTAQVIVLNHPGQISNGYTPVLDCHTAHIACKFSEIKEKVDRRTGKSTEDNPKAIKSGDAAIVILVPTKPMCV

SEQ ID NO: 17288 - protein, 362 aa, Pycnocentrodes sp. UMSP-New Zealand
KGSFRYAWVLDKLKAERERGITIDIALWKFETAKYYVTIIDAPGHRDFIKNMITGTSQADCAVLIVAAGTGEFEAGISKNGQTREHALLAFTLGVKQLIVGVNKMDSTEPPYNEGRFEEIKKEVSSYIKKIGYNPAAVAFVPISGWHGDNMLEPSSKMPWFKGWQVERKEGKADGKCLIEALDAILPPARPTDKPLRLPLQDVYKIGGIGTVPVGRVETGVLKPGTVVVFAPANITTEVKSVEMHHEALQEAVPGDNVGFNVKNVSVKELRRGFVAGDSKASPPKGAADFTAQVIVLNHPGQISNGYTPVLDCHTAHIACKFSEIREKVDRRTGKSTEDNPKAIKSGDAAIVILVPTKPMCV

SEQ ID NO: 17289 - protein, 366 aa, Olinga feredayi
QEMGKGSFKYAWVLDKLKAERERGITIDIALWKFETAKYYVTIIDAPGHRDFIKNMITGTSQADCAVLIVAAGTGEFEAGISKNGQTREHALLAFTLGVKQLIVGVNKMDSTEPPYSESRFEEIKKEVASYIKKIGYNPAAVAFVPISGWHGDNMLEPSSKMPWFKGWMVERKEGKAEGKCLIESLDAILPPARPTDKPLRLPLQDVYKIGGIGTVPVGRVETGVLKPGTVVVFAPANITTEVKSVEMHHEALQEAVPGDNVGFNVKNVSVKELRRGFVAGDSKASPPRGAADFTAQVIVLNHPGQISNGYTPVLDCHTAHIACKFSEIKEKVDRRTGKSTEDNPKAIKSGDAAIVILVPTKPMCV

SEQ ID NO: 17290 - protein, 366 aa, Ceraclea resurgens
QEMGKGSFKYAWVLDKLKAERERGITIDIALWKFETAKYYVTIIDAPGHRDFIKNMITGTSQADCAVLIVAAGTGEFEAGISKNGQTREHALLAFTLGVKQLIVGVNKMDSTEPPYSESRFEEIKKEVSSYIKKIGYNPAAVAFVPISGWHGDNMLEPSSKMPWFKGWQVERKEGKAEGKCLIEALDAILPPSRPTDKALRLPLQDVYKIGGIGTVPVGRVETGVIKPGTVVVFAPANITTEVKSVEMHHEALQEAVPGDNVGFNVKNVSVKELRRGYVAGDTKNNPPKGAADFTAQVIVLNHPGQISNGYTPVLDCHTAHIACKFSEIKEKVDRRTGKSTEDNPKAIKSGDAAIVILVPSKPMCV

SEQ ID NO: 17291 - protein, 366 aa, Diplectrona modesta
QEMGKGSFKYAWVLDKLKAERERGITIDIALWKFETAKYYVTIIDAPGHRDFIKNMITGTSQADCAVLIVAAGTGEFEAGISKNGQTREHALLAFTLGVKQLIVGVNKMDNTEPPYSEPRFEEIKKEVSSYIKKIGYNPAAVAFVPISGWHGDNMLEPSSKMPWFKGWAVERKEGKADGKCLIEALDAILPPARPTDKALRLPLQDVYKIGGIGTVPVGRVETGVLKPGTIVVFAPANITTEVKSVEMHHEALQEAVPGDNVGFNVKNVSVKELRRGFVAGDSKANPPKGAADFTAQVIVLNHPGQIANGYTPVLDCHTAHIACKFADIQQKVDRRTGKSTEDNPKSIKSGDAAIVNLVPSKPMCV

SEQ ID NO: 17292 - protein, 366 aa, Homoplectra doringa
QEMGKGSFKYAWVLDKLKAERERGITIDIALWKFETARYYVTIIDAPGHRDFIKNMITGTSQADCAVLIVAAGTGEFEAGISKNGQTREHALLAFTLGVKQLIVGVNKMDSTEPPYSEPRFEEIKKEVSSYIKKIGYNPAAVAFVPISGWHGDNMLEPSTKMGWFKGWAVERKEGKADGKCLIEALDAIVPPSRPTDKALRLPLQDVYKIGGIGTVPVGRVETGILKPGTIVVFAPANLTTEVKSVEMHHEALQEAVPGDNVGFNVKNVSVKELRRGYVAGDTKANPPKGAADFNAQVIVLNHPGQIANGYTPVLDCHTAHIACKFAEIQQKVDRRTGKSTEDNPKSIKSGDAAIVNLVPSKPMCV

SEQ ID NO: 17293 - protein, 365 aa, Hydropsyche occidentalis
  unsure (1)..(365): unsure at all Xaa locations
XMGKGSFKYAWVLDKLKAERERGITIDIALWKFETSXYYVTIIDAPGHRDFIKNMITGTSQADCAVLIVAAGTGEFEAGISKNGQTREHALLAFTLGVKQLIVGVNKMDSTEPAYSEPRFEEIKKEVSSYIKKIGYNPAAVAFVPISGWHGDNMLEPSSKMPWFKGWNVERKEGKAEGKCLIEALDAILPPARPTDKALRLPLQDVYKIGGIGTVPVGRVETGILKPGTIVVFAPANLTTEVKSVEMHHEALSEAVPGDNVGFNVKNVSVKELRRGYVAGDTKANPPKGASDFNAQVIVLNHPGQISNGYTPVLDCHTAHIACKFAEIQQKVDRRTGKSTEDNPKSIKSGDAAIVNLVPSKPMCV

SEQ ID NO: 17294 - protein, 366 aa, Cheumatopsyche oxa
QEMGKGSFKYAWVLDKLKAERERGITIDIALWKFETAKYYVTIIDAPGHRDFIKNMITGTSQADCAVLIVAAGTGEFEAGISKNGQTREHALLAFTLGVKQLIVGVNKMDNTEPPYSEPRFEEIKKEVSSYIKKIGYNPAAVAFVPISGWHGDNMLEPSSKMPWFKGWAVDRKEGKAEGKCLIEALDAILPPARPTDKPLRLPLQDVYKIGGIGTVPVGRVETGILKPGTIVVFAPANLTTEVKSVEMHHEALPEAVPGDNVGFNVKNVSVKELRRGFVAGDSKASPPKGASDFTAQVIVLNHPGQISNGYTPVLDCHTAHIACKFAEIQQKVDRRTGKSTEDNPKSIKSGDAAIVNLVPSKPMCV

SEQ ID NO: 17295 - protein, 366 aa, Leptonema salvini
  unsure (1)..(366): unsure at all Xaa locations
QEMGKGSFKYAWVLDKLKAERERGITIDIALWKFETAKYYVTIIDAPGHRDFIKNMITGTSQADCAVLIVAAGTGEFEAGISKNGQTREHALLAFTLGVKQLIVGVNKMDSTEPPYSESRXXXXXXXXSSYIXKIGYNPAAVAFVPISGWHGDNMLEPSSKMPWFKGWNVERKEGKADGKCLIEALDAILQPARPTDKPLRLPLQDVYKIGGIGTVPVGRVETGVLKPGTIVVFAPANLTTEVKSVEMHHEALQEAVPGDNVGFNVKNVSVKELRRGYVAGDSKANPPKGASDFNAQVIVLNHPGQISNGYTPVLDCHTAHIACKFAEIQQKVDRRTGKSTEDNPKSIKSGDAAIVNLVPSKPMCV

SEQ ID NO: 17296 - protein, 366 aa, Smicridea talamanca
  unsure (1)..(366): unsure at all Xaa locations
QEMGKGSFKYAWXLDKLKAERERGITIDIALWKFETAKYYVTIIDAPGHRDFIKNMITGTSQADCAVLIVAAGTGEFEAGISKNGQTREHALLAFTLGVKQXIVGVNKMDSTEPAYSEPRFEEIKKEVSSYIKKIGYNPAAVAFVPISGWHGDNMLEPSSKMPWFKGWNVERKEGKAEGKCLIEALDAILPPARPTDKALRLPLQDVYKIGGIGTVPVGRVETGVLKPGTIVVFAPANLTTEVKSVEMHHEALQEAVPGDNVGFNVKNVSVKELRRGYVAGDSKANPPKGAADFTAQVIVLNHPGQISNGYTPVLDCHTAHIACKFAEIQQKVDRRTGKSTEDNPKSIKSGDAAIVNLVPSKPMCV

SEQ ID NO: 17297 - protein, 363 aa, Smicridea turrialbana
  unsure (1)..(363): unsure at all Xaa locations
GXXSFKYAWVLDKLKAERERGITIDIALWKFETAKFYVTIIDAPGHRDFIKNMITGTSQADCAVLIVAAGTGEFEAGISKNGQTREHALLAFTLGVKQLIVGVNKMDSTEPPYSESRFEEIKKEVSSYIKKIGYNPAAVAFVPISGWHGDNMLEPSSKMPWFKGWNVERKEGKAEGKCLIEALDAILPPARPTDKPLRLPLQDVYKIGGIGTVPVGRVETGVLKPGTIVVFAPANLTTEVKSVEMHHEALQEAVPGDNVGFNVKNVSVKELRRGYVAGDSKANPPKGAADFTAQVIVLNHPGQIANGYTPVLDCHTAHIACKFAEIQQKVDRRTGKSTEDNPKSIKSGDAAIVNLVPSKPMCV

SEQ ID NO: 17298 - protein, 366 aa, Parapsyche elsis
  unsure (1)..(366): unsure at all Xaa locations
QEMGKGSFKYAWVLDKLKAERERGITIDIALWKFETGRYYVTIIDAPGHRDFIKNMITGTSQADCAVLIVAAGTGEFEAGISKNGQTREHALLAFTLGVKQLIVGVNKMDSTEPHFSEARFXXXXXXXXSYIKKIGYNPAAVAFVPISGWHGDNMLEPSAKMPWFKGWMVERKEGKAEGKCLIEALDAILPPARPTDKALRLPLQDVYKIGGIGTVPVGRVETGILKPGTVVVFAPANLTTEVKSVEMHHEALQEAVPGDNVGFNVKNVSVKELRRGYVAGDTKINPPKGAADFNAQVIVLNHPGQIANGYTPVLDCHTAHIACKFAEILQKVDRRTGKSTEDNPKSIKSXDAAXVSLISSKPMCL

SEQ ID NO: 17299 - protein, 366 aa, Philopotamus montanus
  unsure (1)..(366): unsure at all Xaa locations
QEMGKGSFKYAWVLDKLKAERERGITIDIALWKFETARYYVTIIDAPGHRDFIKNMITGTSQADCAVLIVAAGTGEFEAGISKNGQTREHALLAFTLGVKQLIVGVNKMDSTEPAFSESRFEEIKKEVSSYIKKIGYNPSAVPFVPISGWHGDNMLEPSSKMPWFKGWNVERKEGKAEGKCLIEALDAILPPARPTDKALRLPLQDVYKIGGIGTVPVGRVETGILKPGTIVVFAPANLTTEVKSVEMHHEALQEAVPGDNVGFNVKNVSVKELRRGYVAGDSKVNPPKGXADFTAQVIVLNHPGQISNGYTPVLDCHTAHIACKFAEIQQKVDRRTGKSTEDXPKAIKSGDAAIVNLVPXKPMCV

SEQ ID NO: 17300 - protein, 366 aa, Chimarra feria
QEMGKGSFKYAWVLDKLKAERERGITIDIALWKFETAKYYVTIIDAPGHRDFIKNMITGTSQADCAVLIVAAGTGEFEAGISKNGQTREHALLAFTLGVKQLIVGVNKMDSTEPPYSEPRFEEIKKEVSSYIKKIGYNPVAVAFVPISGWHGDNMLEPSSKMPWFKGWNVERKEGKAEGKCLIEALDAILPPARPTDKPLRLPLQDVYKIGGIGTVPVGRVETGVLKPGTIVVFAPANLTTEVKSVEMHHEALQEAVPGDNVGFNVKNVSVKELRRGYVAGDSKNNPPKATSDFTAQVIVLNHPGQISNGYTPVLDCHTAHIACKFAEIQQKVDRRTGQATEELPKAIKSGDAAIVNLVPSKPLCV

SEQ ID NO: 17301 - protein, 366 aa, Tinodes waeneri
QEMGKGSFKYAWVLDKLKAERERGITIDIALWKFETAKYYVTIIDAPGHRDFIKNMITGTSQADCAVLIVAAGTGEFEAGISKNGQTREHALLAFTLGVKQLIVGVNKMDSTEPNYSEARFEEIKKEVSSYIKKIGYNPAAVAFVPISGWHGDNMLEPSEKMPWFKGWKVERKDGNADGKCLIEALDAILPPARPTDKTLRLPLQDVYKIGGIGTVPVGRVETGVLKPGTIVVFAPANITTEVKSVEMHHEALPEAVPGDNVGFNVKNVSVKELRRGYVAGDSKVNPPKGAADFTAQVIVLNHPGQISNGYTPVLDCHTAHIACKFAEIQQKVDRRTGKSTEDNPKAIKSGDAAIVNLVPSKPMCV

SEQ ID NO: 17302 - protein, 366 aa, Stenopsyche marmorata
QEMGKGSFKYAWVLDKLKAERERGITIDIALWKFETARYYVTIIDAPGHRDFIKNMITGTSQADCAVLIVAAGTGEFEAGISKNGQTREHALLAFTLGVKQLIVGVNKMDSTEPAYNEARFEEIKKEVSSYIKKIGYNPAGVPFVPISGWHGDNMLEPSSKMPWFKGWAVDRKEGKAEGKCLIEALDAILPPARPTDKALRLPLQDVYKIGGIGTVPVGRVETGILKPGTIVVFAPANLTTEVKSVEMHTEALSEAVPGDNVGFNVKNVSVKELRRGYVAGDTKVNPPKGAADFTAQVIVLNHPGQISNGYTPVLDCHTAHIACKFAEIQQKVDRRTGKSTEDNPKAIKSGDAAIVNLVPTKPMCV

SEQ ID NO: 17303 - protein, 366 aa, Polycentropus interruptus
QEMGKGSFKYAWVLDKLKAERERGITIDIALWKFETAKYYVTIIDAPGHRDFIKNMITGTSQADCAVLIVAAGTGEFEAGISKNGQTREHALLAFTLGVKQLIVGVNKMDSTEPPYSEARFEEIKKEVSSYIKKIGYNPAAVAFVPISGWHGDNMLEPSSKMPWFKGWAVDRKEGKADGKCLIEALDAILPPARPTDKALRLPLQDVYKIGGIGTVPVGRVETGVLKPGTIVVFAPANITTEVKSVEMHHEALQEAVPGDNVGFNVKNVSVKELRRGYVAGDSKNNPPKGAADFTAQVIVLNHPGQISNGYTPVLDCHTAHIACKFAEIQQKVDRRTGKSTEDNPKAIKSGDAAIVNLVPSKPMCV

SEQ ID NO: 17304 - protein, 366 aa, Cyrnus trimaculatus
  unsure (1)..(366): unsure at all Xaa locations
QEMGXGSFKYAWVLDKLKAERERGITIDIALWKFETAKYYVTIIDAPGHRDFIKNMITGTSQADCAVLIVAAGTGEFEAGISKNGQTREHALLAFTLGVKQLIVGVNKMDSTEPPYSEPRFEEIKKEVSSYIKKIGYNPAAVAFVPISGWHGDNMLEPSAKMPWFKGWAVEXKEGKADGKCLIEALDAILPPARPTDKALRLPLQDVYKIGGIGTVPVGRVETGVLKPGTIVVFAPANITTEVKSVEMHHEALQEAVPGDNVGFNVKNVSVKELRRGYVAGDSKNSPPKGAADFTAQVIVLNHPGQISNGYTPVLDCHTAHIACKFAEIQQKVDRRTGKSTEDNPKAIKSGDAAIVNLVPSKPMCV

SEQ ID NO: 17305 - protein, 366 aa, Cyrnellus fraternus
  unsure (1)..(366): unsure at all Xaa locations
QEMGKGSFKYAWVLDKLKAERERGITIDIALWKFETAKYYVTIIDAPGHRDFIKNMITGTSQADCAVLIVAAGTGEFEAGISKNGQTREHALLAFTLGVKQLIVGVNKMDSTEPPYSEPRFEEIKKEVSSYIKKIGYNPAAVAFVXISGWHGDNMLEPSSKMPWFKGWNVERKEGKVDGKCLIEALDAILPPARPTDKPLRLPLQDVYKIGGIGTVPVGRVETGVLKPGTIVVFAPANITTEVKSVEMHHEALPEAVPGDNVGFNVKNVSVKELRRGYVAGDSKNNPPKGAADFTAQVIVLNHPGQISNGYTPVLDCHTAHIACKFAEIQQKVDRRTGKSTEDNPKAIKSGDAAIVNLVPSKPMCV

SEQ ID NO: 17306 - protein, 366 aa, Phylocentropus placidus
  unsure (1)..(366): unsure at all Xaa locations
QEMGXGSFKYAWVLDKLKAERERGITIDIALWKFETAKYYVTIIDAPGHRDFIKNMITGTSQADCAVLIVAAGTGEFEAGISKNGQTREHALLAFTLGVKQLIVGVNKMDSTEPPYNEGRFEEIKKEVSSYIKKIGYNPAAVPFVPISGWHGDNMLEPSAKMPWFKGWAVDXKEGKAEGKCLIEALDAILPPARPTDKALRLPLQDVYKIGGIGTVPVGRVXTGVLKPGTIVVFAPANITTEVKSVEMHHEALSEAVPGDNVGFNVKNVSVKELRRGYVAGDSKASPPRGAADFLAQVIVLNHPGQISNGYTPVLDCHTAHIACKFAEIQQKVDRRSGKSTEDNPKAIKSGDAAIVNLVPTKPMCV

SEQ ID NO: 17307 - protein, 366 aa, Austrotinodes sp. UMSP000029359-Costa Rica
  unsure (1)..(366): unsure at all Xaa locations
QEXGKGSFKYAWVLDKLKAERERGITIDIALWKFETAKYYVTIIDAPGHRDFIKNMITGTSQADCAVLIVAAGTGEFEAGISKNGQTREHALLAFTLGVKQLIVGVNKMDSTEPPYSEARFEEIKKEVSSYIKKIGYNPAAVAFVPISGWHGDNMLEPSAKMPWFKGWAVERKEGKAEGKCLIEALDAILPPARPTDKALRLPLQDVYKIGGIGTVPVGRVETGVLKPGTIVVFAPANITTEVKSVEMHHEALPEAVPGDNVGFNVKNVSVKELRRGYVAGDSKNNPPKGAADFTAQVIVLNHPGQISNGYTPVLDCHTAHIACKFAEIQQKVDRRTGKSTEDNPKAIKTGDAAIVTLVPSKPMCV

SEQ ID NO: 17308 - protein, 366 aa, Ecnomus tenellus
QEMGKGSFKYAWVLDKLKAERERGITIDIALWKFETAKYYVTIIDAPGHRDFIKNMITGTSQADCAVLIVAAGTGEFEAGISKNGQTREHALLAFTLGVKQLIVGVNKMDSTEPPYSESRFEEIKKEVSSYIKKIGYNPAAVAFVPISGWHGDNMLEPSSKMPWFKGWKVERKEGNADGKCLIEALDAILPPARPTDKALRLPLQDVYKIGGIGTVPVGRVETGVLKPGTIVVFAPANITTEVKSVEMHHEALQEAVPGDNVGFNVKNVSVKELRRGYVAGDSKNNPPKGAADFTAQVIVLNHPGQISNGYTPVLDCHTAHIACKFAEIQQKVDRRTGKSTEDNPKAIKSGDAAIVNLVPSKPMCV

SEQ ID NO: 17309 - protein, 365 aa, Anagapetus debilis
EMGKGSFKYAWVLDKLKAERERGITIDIALWKFETAKYYVTIIDAPGHRDFIKNMITGTSQADCAVLIVAAGTGEFEAGISKNGQTREHALLAFTLGVKQLIVGVNKMDSTEPPFNEGRFEEIKKEVSSYIKKIGYNPAAVPFVPISGWHGDNMLEPSAKMNWFKGWAVERKEGKAEGKCLIEALDAIVPPSRPTDKALRLPLQDVYKIGGIGTVPVGRVETGVIKPGTIVVFAPANITTEVKSVEMHHEALQEAVPGDNVGFNVKNVSVKELRRGFVAGDSKLNPPKGAADFTAQVIVLNHPGQISNGYTPVLDCHTAHIACKFAEIKEKVDRRTGKSTEDNPKAIKSGDAAIVILVPSKPMCV

SEQ ID NO: 17310 - protein, 362 aa, Lasioglossum brevicorne
ERERGITIDIALWKFETSKYYVTIIDAPGHRDFIKNMITGTSQADCAVLIVAAGTGEFEAGISKNGQTREHALLAFTLGVKQLIVGVNKMDSTEPPYSEARFEEIKKEVSSYIKKIGYNPAAVAFVPISGWHGDNMLEASSKMPWFKGWAVERKEGKAEGKCLIEALDAILPPSRPTDKALRLPLQDVYKIGGIGTVPVGRVETGLLKPGMVVTFAPAGLTTEVKSVEMHHEALTEAVPGDNVGFNVKNVSVKELRRGYVAGDSKNNPPKGAADFTAQVIVLNHPGQISNGYTPVLDCHTAHIACKFHKIIEKCDRRTGKTTEMEPKAIKSGDAAIVTLVPSKPMCVEAFQEFPPLGRFAVR

SEQ ID NO: 17311 - protein, 362 aa, Lasioglossum inconditum
ERERGITIDIALWKFETSKYYVTIIDAPGHRDFIKNMITGTSQADCAVLIVAAGTGEFEAGISKNGQTREHALLAFTLGVKQLIVGVNKMDSTEPPYSEARFEEIKKEVSSYIKKIGYNPAAVAFVPISGWHGDNMLEASSKMPWFKGWAVERKEGKAEGKCLIEALDAILPPSRPTDKALRLPLQDVYKIGGIGTVPVGRVETGLLKPGMVVTFAPAGLTTEVKSVEMHHEALTEAVPGDNVGFNVKNVSVKELRRGYVAGDSKNNPPKGAADFTAQVIVLNHPGQISNGYTPVLDCHTAHIACKFHKIIEKCDRRTGKTTEVDPKAIKSGDAAIVTLVPSKPMCVEAFQEFPPLGRFAVR

SEQ ID NO: 17312 - protein, 362 aa, Lasioglossum interruptum
ERERGLTIDIALWKFETSKYYVTIIDAPGHRDFIKNMITGTSQADCAVLIVAAGTGEFEAGISKNGQTREHALLAFTLGVKQLIVGVNKMDSTEPPYSEARFEEIKKEVSSYIKKIGYNPAAVAFVPISGWHGDNMLEASSKMPWFKGWAVERKEGKAEGKCLIEALDAILPPSRPTDKALRLPLQDVYKIGGIGTVPVGRVETGLLKPGMVVTFAPAGLTTEVKSVEMHHEALTEAVPGDNVGFNVKNVSVKELRRGYVAGDSKNNPPKGAADFTAQVIVLNHPGQISNGYTPVLDCHTAHIACKFHKIIEKCDRRTGKTTEMEPKAIKSGDAAIVTLVPSKPMCVEAFQEFPPLGRFAVR

SEQ ID NO: 17313 - protein, 375 aa, Lipotriches australica
  unsure (1)..(375): unsure at all Xaa locations
MGKGSFKYAWVLDKLKAERERGITIDIALWKFETSKYYVTIIDAPGHRDFIKNMITGTSQADCAVLIVAAGTGEFEAGISKNGQTREHALLAFTLGVKQLIVGVNKMDSTEPPYSEARFEEIKKEVSSYIKKIGYNPAAIAFVPISGWHGDNMLEVSSKMPWFKGWAVERKEGKAEGKCLIEALDAILPPTRPTDKALRLPLQDVXKIGGIGTVPVGRVETGVLKPGMVVTFAPAGLTTEVKSVEMHHEALQEAVPGDNVGFNVKNVSVKELRRGYVAGDSKNNPPKGAADFTAQVIVLNHPGQICNGYTPVLDCHTAHIACKFLQIKEKCDRRSGKTTEENPKAIKSGDAAIVTLIPSKPMCVEAFQEFPPLGR

SEQ ID NO: 17314 - protein, 375 aa, Agapostemon leunculus
MGKGSFKYAWVLDKLKAERERGITIDIALWKFETAKYYVTIIDAPGHRDFIKNMITGTSQADCAVLIVAAGTGEFEAGISKNGQTREHALLAFTLGVKQLIVGVNKMDSTEPPYSESRFEEIKKEVSSYIKKIGYNPAAVAFVPISGWHGDNMLEISSKMPWFKGWAVERKEGKAEGKCLIEALDAILPPTRPTDKALRLPLQDVYKIGGIGTVPVGRVETGVLKPGMVVTFAPAGLTTEVKSVEMHHEALTEAVPGDNVGFNVKNLAVKELRRGFVAGDSKNNPPKGAADFTAQVIVLNHPGQISNGYTPVLDCHTAHIACKFYKIIEKCDRRTGKTTEVDPKAIKSGDAAIVTLVPSKAMCVEAFQEFPPLGR

SEQ ID NO: 17315 - protein, 375 aa, Augochlorella pomoniella
MGKGSFKYAWVLDKLKAERERGITIDIALWKFETSKYYVTIIDAPGHRDFIKNMITGTSQADCAVLIVAAGTGEFEAGISKNGQTREHALLAFTLGVKQLIVGVNKMDSTEPPYSEARFEEIKKEVSSYIKKIGYTPAAVAFVPISGWHGDNMLEVSSKMPWFKGWAVERKEGKAEGKCLIEALDAILPPTRPTDKALRLPLQDVYKIGGIGTVPVGRVETGVLKPGMVVTFAPAGLTTEVKSVEMHHEALVEAVPGDNVGFNVKNVSVKELRRGYVAGDSKNNPPKGAADFTAQVIVLNHPGQICNGYTPVLDCHTAHIACKFHKIIEKCDRRTGKTTEMEPKAIKSGDAAIVTLVPSKPMCVEAFQEFPPLGR

SEQ ID NO: 17316 - protein, 375 aa, Caenohalictus sp. BND-1
MGKGSFKYAWVLDKLKAERERGITIDIALWKFETSKYYVTIIDAPGHRDFIKNMITGTSQADCAVLIVAAGTGEFEAGISKNGQTREHALLAFTLGVKQLIVGVNKMDSTEPPYSDARFEEIKKEVSSYIKKIGYNPAAVAFVPISGWHGDNMLEVSSKMPWFKGWAVERKEGKAEGKCLIEALDAILPPSRPTDKALRLPLQDVYKIGGIGTVPVGRVETGVLKPGTVVTFAPAGLTTEVKSVEMHHEALTEAVPGDNVGFNVKNVSVKELRRGYVAGDSKNNPPKGAADFTAQVIVLNHPGQISNGYTPVLDCHTAHIACKFFKIIEKCDRRTGKTTEMVPKAIKSGDAAIVILVPTKPMCVEAFQEFPPLGR

SEQ ID NO: 17317 - protein, 375 aa, Caenohalictus sp. BND-2
MGKGSFKYAWVLDKLKAERERGITIDIALWKFETSKYYVTIIDAPGHRDFIKNMITGTSQADCAVLIVAAGTGEFEAGISKNGQTREHALLAFTLGVKQLIVGVNKMDSTEPPYSDARFEEIKKEVSSYIKKIGYNPAAVAFVPISGWHGDNMLEVSSKMPWFKGWAVERKEGKAEGKCLIEALDAILPPSRPTDKALRLPLQDVYKIGGIGTVPVGRVETGVLKPGTVVTFAPAGLTTEVKSVEMHHEALTEAVPGDNVGFNVKNVSVKELRRGYVAGDSKNNPPKGAADFTAQVIVLNHPGQIGNGYTPVLDCHTAHIACKFFKIIEKCDRRTGKTTEMVPKAIKSGDAAIVILVPTKPMCVEAFQEFPPLGR

SEQ ID NO: 17318 - protein, 375 aa, Caenohalictus sp. BND-3
MGKGSFKYAWVLDKLKAERERGITIDIALWKFETSKYYVTIIDAPGHRDFIKNMITGTSQADCAVLIVAAGTGEFEAGISKNGQTREHALLAFTLGVKQLIVGVNKMDSTEPPYSDARFEEIKKEVSSYIKKIGYNPAAVAFVPISGWHGDNMLEVSSKMPWFKGWAVERKEGKAEGKCLIEALDAILPPSRPTDKALRLPLQDVYKIGGIGTVPVGRVETGVLKPGTVVTFAPAGLTTEVKSVEMHHEALTEAVPGDNVGFNVKNVSVKELRRGYVAGDSKNNPPKGAADFTAQVIVLNHPGQISNGYTPVLDCHTAHIACKFFKIIEKCDRRTGKTTEMEPKAIKSGDAAIVTLVPTKPMCVEAFQEFPPLGR

SEQ ID NO: 17319 - protein, 375 aa, Chaetalictus sp. BND-2001
MGKGSFKYAWVLDKLKAERERGITIDIALWKFETAKYYVTIIDAPGHRDFIKNMITGTSQADCAVLIVAAGTGEFEAGISKNGQTREHALLAFTLGVKQLIVGVNKMDSTEPPYSEARFEEIKKEVSSYIKKIGYNPAAVAFVPISGWHGDNMLEVSSKMPWFKGWAVERKDGKGEGKCLIEALDAILPPSRPTDKALRLPLQDVYKIGGIGTVPVGRVETGLLKPGMVVTFAPAGLTTEVKSVEMHHEALTEAVPGDNVGFNVKNVSVKELRRGYVAGDSKNNPPRGAADFTAQVIVLNHPGQINNGYTPVLDCHTAHIACKFHKIIEKCDRRTGKTTELDPKAIKSGDAAIVTLVPSKPMCVEAFQEFPPLGR

SEQ ID NO: 17320 - protein, 375 aa, Conanthalictus wilmattae
MGKGSFKYAWVLDKLKAERERGITIDIALWKFETSRYYVTIIDAPGHRDFIKNMITGTSQADCAVLIVAAGTGEFEAGISKNGQTREHALLAFTLGVKQLIVGVNKMDSTEPPYSESRFEEIKKEVSSYIKKIGYNPAAVAFVPISGWHGDNMLEASSKMPWFKGWAVERKEGKAEGKCLIEALDAILPPTRPTDKALRLPLQDVYKIGGIGTVPVGRVETGLLKPGMVVTFAPAGLTTEVKSVEMHHEALQEAVPGDNVGFNVKNVSVKELRRGYVAGDSKNNPPKGAADFTAQVIVLNHPGQISNGYTPVLDCHTAHIACKFLLIKEKCDRRTGKTTEENPKAIKSGDAAIVTLVPSKPMCVEAFQEFPPLGR

SEQ ID NO: 17321 - protein, 375 aa, Dieunomia triangulifera
MGKGSFKYAWVLDKLKAERERGITIDIALWKFETSKYYVTIIDAPGHRDFIKNMITGTSQADCAVLIVAAGTGEFEAGISKNGQTREHALLAFTLGVKQLIVGVNKMDSTEPPYSEARFEEIKKEVSSYIKKIGYNPAAIAFVPISGWHGDNMLEVSSKMPWFKGWSVERKEGKAEGKCLIEALDAILPPTRPTDKALRLPLQDVYKIGGIGTVPVGRVETGVLKPGMVVTFAPAGLTTEVKSVEMHHEALQEAVPGDNVGFNVKNVSVKELRRGYVAGDSKNNPPKGAADFTAQVIVLNHPGQICNGYTPVLDCHTAHIACKFLQIKEKCDRRSGKTTEDNPKAIKSGDAAIVTLVPSKPMCVEAFQEFPPLGR

SEQ ID NO: 17322 - protein, 375 aa, Dinagapostemon sp. BND-1
MGKGSFKYAWVLDKLKAERERGITIDIALWKFETSKYYVTIIDAPGHRDFIKNMITGTSQADCAVLIVAAGTGEFEAGISKNGQTREHALLAFTLGVKQLIVGVNKMDSTEPPYSEARFEEIKKEVSSYIKKIGYNPAAVAFVPISGWHGDNMLEISSKMPWFKGWAVERKEGKAEGKCLIEALDAILPPTRPTDKALRLPLQDVYKIGGIGTVPVGRVETGVLKPGMLVTFAPAGLTTEVKSVEMHHEALTEAVPGDNVGFNVKNVAVKELRRGYVAGDSKNNPPKGAADFTAQVIVLNHPGQISNGYTPVLDCHTAHIACKFYKIIEKCDRRTGKTTEVDPKAIKSGDAAIVTLVPSKAMCVEAFQEFPPLGR

SEQ ID NO: 17323 - protein, 375 aa, Dufourea malacothricis
MGKGSFKYAWVLDKLKAERERGITIDIALWKFETSKYYVTIIDAPGHRDFIKNMITGTSQADCAVLIVAAGTGEFEAGISKNGQTREHALLAFTLGVKQLIVGVNKMDSTEPPYSEARFEEIKKEVSSYIKKIGYNPAAVAFVPISGWHGDNMLESSSKMPWFKGWAVERKEGKAEGKCLIEALDAILPPSRPTDKALRLPLQDVYKIGGIGTVPVGRVETGLLKPGMVVTFAPAGLTTEVKSVEMHHEALQEAVPGDNVGFNVKNVSVKELRRGYVAGDSKNNPPKGAADFTAQVIVLNHPGQISNGYTPVLDCHTAHIACKFLQIKEKCDRRTGKTTEENPKAIKSGDAAIVTLVPSKPVCVEAFQEFPPLGR

SEQ ID NO: 17324 - protein, 375 aa, Dufourea mulleri
MGKGSFKYAWVLDKLKAERERGITIDIALWKFETSKYYVTIIDAPGHRDFIKNMITGTSQADCAVLIVAAGTGEFEAGISKNGQTREHALLAFTLGVKQLIVGVNKMDSTEPPYSEARFEEIKKEVSSYIKKIGYNPAAVAFVPISGWHGDNMLESSSKMPWFKGWAVERKEGKAEGKCLIEALDAILPPSRPTDKALRLPLQDVYKIGGIGTVPVGRVETGLLKPGMVVTFAPAGLTTEVKSVEMHHEALQEAVPGDNVGFNVKNVSVKELRRGYVAGDSKNNPPKGAADFTAQVIVLNHPGQISNGYTPVLDCHTAHIACKFLQIKEKCDRRTGKTTEENPKAIKSGDAAIVTLVPSKPMCVEAFQEFPPLGR

SEQ ID NO: 17325 - protein, 375 aa, Dufourea novaeangliae
MGKGSFKYAWVLDKLKAERERGITIDIALWKFETSRYYVTIIDAPGHRDFIKNMITGTSQADCAVLIVAAGTGEFEAGISKNGQTREHALLAFTLGVKQLIVGVNKMDSTEPPYSEARFEEIKKEVSSYIKKIGYNPAAVAFVPISGWHGDNMLESSSKMPWFKGWAVERKEGKGEGKCLIEALDAILPPSRPTDKALRLPLQDVYKIGGIGTVPVGRVETGLLKPGMVVTFAPAGLTTEVKSVEMHHEALQEAVPGDNVGFNVKNVSVKELRRGYVAGDSKNNPPKGAADFTAQVIVLNHPGQISNGYTPVLDCHTAHIACKFLQIKEKCDRRTGKTTEENPKAIKSGDAAIVTLVPSKPMCVEAFQEFPPLGR

SEQ ID NO: 17326 - protein, 375 aa, Goeletapis peruensis
MGKGSFKYAWVLDKLKAERERGITIDIALWKFETSKYYVTIIDAPGHRDFIKNMITGTSQADCAVLIVAAGTGEFEAGISKNGQTREHALLAFTLGVKQLIVGVNKMDSTEPPYSEARFEEIKKEVSSYIKKIGYNPAAVAFVPISGWHGDNMLEVSSKMPWFKGWAVERKEGKAEGKCLIDALDAILPPARPTDKALRLPLQDVYKIGGIGTVPVGRVETGVLKPGMVVTFAPAGLTTEVKSVEMHHEALQEAVPGDNVGFNVKNVSVKELRRGYVAGDSKNNPPKGAADFTAQVIVLNHPGQISNGYTPVLDCHTAHIACKFHVIKEKCDRRTGKTTEENPKAIKSGDAAIVTLVPSKPMCVEAFQEFPPLGR

SEQ ID NO: 17327 - protein, 375 aa, Habralictus sp. BND-2001
MGKGSFKYAWVLDKLKAERERGITIDIALWKFETSKYYVTIIDAPGHRDFIKNMITGTSQADCAVLIVAAGTGEFEAGISKNGQTREHALLAFTLGVKQLIVGVNKMDSTEPPYSEARFEEIKKEVSSYIKKIGYNPAAVAFVPISGWHGDNMLEISSKMPWFKGWAVERKEGKAEGKCLIEALDAILPPSRPTDKALRLPLQDVYKIGGIGTVPVGRVETGVLKPGTVVTFAPAGLTTEVKSVEMHHEALTEAVPGDNVGFNVKDVAVKELRRGYVAGDSKNNPPKGAADFTAQVIVLNHPGQISNGYTPVLDCHTAHIACKFFKIIEKCDRRTGKTTEMEPKAIKSGDAAIVTLVPTKPMCVEAFQEFPPLGR

SEQ ID NO: 17328 - protein, 375 aa, Lasioglossum athabascense
MGKGSFKYAWVLDKLKAERERGITIDIALWKFETSKYYVTIIDAPGHRDFIKNMITGTSQADCAVLIVAAGTGEFEAGISKNGQTREHALLAFTLGVKQLIVGVNKMDSTEPPYSEARFEEIKKEVSSYIKKIGYNPAAVAFVPISGWHGDNMLEASSKMPWFKGWAVERKEGKAEGKCLIEALDAILPPSRPTDKALRLPLQDVYKIGGIGTVPVGRVETGLLKPGMVVTFAPAGITTEVKSVEMHHEALTEAVPGDNVGFNVKNVSVKELRRGYVAGDSKNNPPKSAADFTAQVIVLNHPGQISNGYTPVLDCHTAHIACKFHKIIEKCDRRTGKTTEMDPKAIKSGDAAIVTLVPSKPMCVEAFQEFPPLGR

SEQ ID NO: 17329 - protein, 375 aa, Lasioglossum lithuscum
MGKGSFKYAWVLDKLKAERERGITIDIALWKFETAKYYVTIIDAPGHRDFIKNMITGTSQADCAVLIVAAGTGEFEAGISKNGQTREHALLAFTLGVKQLIVGVNKMDSTEPPYSEARFEEIKKEVSSYIKKIGYNPAAVAFVPISGWHGDNMLEVSSKMPWFKGWAVERKEGKAEGKCLIEALDAILPPSRPTDKALRLPLQDVYKIGGIGTVPVGRVETGLLKPGMVVTFAPAGITTEVKSVEMHHEALTEAVPGDNVGFNVKNVSVKELRRGYVAGDSKNNPPKGAADFTAQVIVLNHPGQISNGYTPVLDCHTAHIACKFHKIIEKCDRRTGKTTEMEPKAIKSGDAAIVTLVPSKPMCVEAFQEFPPLGR

SEQ ID NO: 17330 - protein, 375 aa, Lasioglossum punctatum
MGKGSFKYAWVLDKLKAERERGITIDIALWKFETAKYYVTIIDAPGHRDFIKNMITGTSQADCAVLIVAAGTGEFEAGISKNGQTREHALLAFTLGVKQLIVGVNKMDSTEPPYSESRFEEIKKEVSSYIKKIGYNPAAVAFVPISGWHGDNMLEVSSKMPWFKGWAVERKEGKAEGKCLIEALDAILPPSRPTDKALRLPLQDVYKIGGIGTVPVGRVETGLLKPGMVVTFAPAGITTEVKSVEMHHEALTEAVPGDNVGFNVKNVSVKELRRGYVAGDSKNNPPKGAADFTAQVIVLNHPGQISNGYTPVLDCHTAHIACKFHKIIEKCDRRTGKTTEMEPKAIKSGDAAIVTLVPSKPMCVEAFQEFPPLGR

SEQ ID NO: 17331 - protein, 360 aa, Lasioglossum punctatum
ERERGITIDIALWKFETAKYYVTIIDAPGHRDFIKNMITGTSQADCAVLIVAAGTGEFEAGISKNGQTREHALLAFTLGVKQLIVGVNKMDSTEPPYSESRFEEIKKEVSSYIKKIGYNPAAVAFVPISGWHGDNMLEVSSKMPWFKGWAVERKEGKAEGKCLIEALDAILPPSRPTDKALRLPLQDVYKIGGIGTVPVGRVETGLLKPGMVVTFAPAGITTEVKSVEMHHEALTEAVPGDNVGFNVKNVSVKELRRGYVAGDSKNNPPKGAADFTAQVIVLNHPGQISNGYTPVLDCHTAHIACKFHKIIEKCDRRTGKTTEMEPKAIKSGDAAIVTLVPSKPMCVEAFQEFPPLGRFA

SEQ ID NO: 17332 - protein, 375 aa, Lasioglossum scitulum
MGKGSFKYAWVLDKLKAERERGITIDIALWKFETSKYYVTIIDAPGHRDFIKNMITGTSQADCAVLIVAAGTGEFEAGISKNGQTREHALLAFTLGVKQLIVGVNKMDSTEPPYSEARFEEIKKEVSSYIKKIGYNPAAVAFVPISGWHGDNMLEVSSKMPWFKGWAVERKEGKAEGKCLIEALDAILPPSRPTDKALRLPLQDVYKIGGIGTVPVGRVETGVLKPGMVVTFAPAGITTEVKSVEMHHEALTEAVPGDNVGFNVKNVAVKELRRGYVAGDSKNNPPKGAADFTAQVIVLNHPGQISNGYTPVLDCHTAHIACKFHKIIEKCDRRTGKTTEMEPKAIKSGDAAIVTLVPSKPMCVEAFQEFPPLGR

SEQ ID NO: 17333 - protein, 375 aa, Leioproctus sp. BND-2001
MGKGSFKYAWVLDKLKAERERGITIDIALWKFETSKYYVTIIDAPGHRDFIKNMITGTSQADCAVLIVAAGTGEFEAGISKNGQTREHALLAFTLGVKQLIVGVNKMDSTEPPYSESRFEEIKKEVSSYIKKIGYNPAAVAFVPISGWHGDNMLEVSSKMPWFKGWNVERKEGKAEGKCLIEALDAILPPTRPTDKALRLPLQDVYKIGGIGTVPVGRVETGLLKPGMIVTFAPTALTTEVKSVEMHHEALQEAVPGDNVGFNVKNVSVKDLRRGYVAGDSKNNPPKGAADFTAQVIVLNHPGQISNGYTPVLDCHTAHIACKFAEIKEKCDRRTGKTTEENPKAIKSGDAAIVVLVPSKPMCVEAFQEFPPLGR

SEQ ID NO: 17334 - protein, 375 aa, Lomatalictus sp. BND-2001
MGKGSFKYAWVLDKLKAERERGITIDIALWKFETAKYYVTIIDAPGHRDFIKNMITGTSQADCAVLIVAAGTGEFEAGISKNGQTREHALLAFTLGVKQLIVGVNKMDSTEPPYSEARFEEIKKEVSSYIKKIGYNPAAVAFVPISGWHGDNMLEVSSKMPWFKGWAVERKEGKAEGKCLIEALDAILPPSRPTDKALRLPLQDVYKIGGIGTVPVGRVETGLLKPGMVVTFAPAGLTTEVKSVEMHHEALTEAVPGDNVGFNVKNVSVKELRRGYVAGDSKNNPPKGAADFTAQVIVLNHPGQISNGYTPVLDCHTAHIACKFHKIIEKCDRRTGKTTEVDPKAIKSGDAAIVMLVPSKPMCVEAFQEFPPLGR

SEQ ID NO: 17335 - protein, 375 aa, Nomia tetrazonata
MGKGSFKYAWVLDKLKAERERGITIDIALWKFETSKYYVTIIDAPGHRDFIKNMITGTSQADCAVLIVAAGTGEFEAGISRNGQTREHALLAFTLGVKQLIVGVNKMDSTEPPYSEARFEEIKKEVSSYIKKIGYNPAAIAFVPISGWHGDNMLEVSSKMPWFKGWAVERKEGKAEGKCLIEALDAILPPTRPTDKALRLPLQDVYKIGGIGTVPVGRVETGVLKPGMVVTFAPAGLTTEVKSVEMHHEALQEAVPGDNVGFNVKNVSVKELRRGYVAGDSKNNPPKGAADFTAQVIVLNHPGQICNGYTPVLDCHTAHIACKFLQIKEKCDRRSGKTTEENPKAIKSGDAAIVTLVPSKPMCVEAFQEFPPLGR

SEQ ID NO: 17336 - protein, 375 aa, Nomioides facilis
MGKGSFKYAWVLDKLKAERERGITIDIAMWKFETSKYYVTIIDAPGHRDFIKNMITGTSQADCAVLIVAAGTGEFEAGISKNGQTREHALLAFTLGVKQLIVGVNKMDSTEPPYSETRFEEIKKEVSSYIKKIGYNPAAIAFVPISGWHGDNMLEVSAKMPWFKGWSVERKEGKAEGKCLIEALDAILPPTRPTDKALRLPLQDVYKIGGIGTVPVGRVETGVLKPGMVVTFAPVGLTTEVKSVEMHHEALQEAVPGDNVGFNVKNVSVKELRRGYVAGDSKNNPPKGAADFTAQVIVLNHPGQISNGYTPVLDCHTAHIACKFQQIKEKCDRRSGKTTETDPKSIKSGDAAIVTLVPSKPMCVEAFQEFPPLGR

SEQ ID NO: 17337 - protein, 375 aa, Pachyhalictus sp. BND-2001
MGKGSFKYAWVLDKLKAERERGITIDIALWKFETAKYYVTIIDAPGHRDFIKNMITGTSQADCAVLIVAAGTGEFEAGISKNGQTREHALLAFTLGVKQLIVGVNKMDSTEPPYSEARFEEIKKEVSSYIKKIGYNPAAVAFVPISGWHGDDMLEVSSKMPWFKGWAVERKEGKAEGKCLIEALDAILPPSRPTDKALRLPLQDVYKIGGIGTVPVGRVETGLLKPGMLVTFAPAGLTTEVKSVEMHHEALTEAVPGDNVGFYVKNVSVKELRRGYVAGDSKNNPPKGAADFTAQVIVLNHPGQISNGYTPVLDCHTAHIACKFHKIIEKCDRRTGKTTEMDPKAIKSGDAAIVTLVPSKPMCVEAFQEFPPLGR

SEQ ID NO: 17338 - protein, 375 aa, Penapis penai
MGKGSFKYAWVLDKLKAERERGITIDIALWKFETSKYYVTIIDAPGHRDFIKNMITGTSQADCAVLIVAAGTGEFEAGISKNGQTREHALLAFTLGVKQLIVGVNKMDSTEPPYSESRFEEIKKEVSSYIKKIGYNPAAVAFVPISGWHGDNMLEVSSKMPWFKGWAVERKEGKAEGKCLIDALDAILPPTRPTDKALRLPLQDVYKIGGIGTVPVGRVETGVLKPGMVVTFAPAGLTTEVKSVEMHHEALQEAVPGDNVGFNVKNVSVKELRRGYVAGDSKNNPPKGAADFTAQVIVLNHPGQITNGYTPVLDCHTAHIACKFQLIKEKCDRRTGKTTEENPKTIKSGDAAIVTLVPSKPMCVEAFQEFPPLGR

SEQ ID NO: 17339 - protein, 375 aa, Protodufourea parca
MGKGSFKYAWVLDKLKAERERGITIDIALWKFETSKYYVTIIDAPGHRDFIKNMITGTSQADCAVLIVAAGTGEFEAGISKNGQTREHALLAFTLGVKQLIVGVNKMDSTEPPYSEARFEEIKKEVSSYIKKIGYNPAAVAFVPISGWHGDNMLEVSSKMPWFKGWNVERKEGKAEGKCLIEALDAILPPSRPTDKALRLPLQDVYKIGGIGTVPVGRVETGLLKPGMVVTFAPAGLTTEVKSVEMHHEALQEAVPGDNVGFNVKNVSVKELRRGYVAGDSKNNPPRGAADFTAQVIVLNHPGQISNGYTPVLDCHTAHIACKFLQIKEKCDRRTGKTTEENPKAIKSGDAAIVTLVPSKPMCVEAFQEFPPLGR

SEQ ID NO: 17340 - protein, 375 aa, Pseudagapostemon pissisi
MGKGSFKYAWVLDKLKAERERGITIDIALWKFETAKYYVTIIDAPGHRDFIKNMITGTSQADCAVLIVAAGTGEFEAGISKNGQTREHALLAFTLGVKQLIVGVNKMDSTEPPYSEARFEEIKKEVSSYIKKIGYNPAAVAFVPISGWHGDNMLEISAKMPWFKGWAVERKEGKAEGKCLIEALDAILPPTRPTDKALRLPLQDVYKIGGIGTVPVGRVETGVLKPGMVVTFAPAGLTTEVKSVEMHHEALTEAVPGDNVGFNVKNVSVKELRRGYVAGDSKNNPPKGAADFTAQVIVLNHPGQISNGYTPVLDCHTAHIACKFYKIIEKCDRRTGKTTEMEPKAIKSGDAAIVTLVPTKPMCVEAFQEFPPLGR

SEQ ID NO: 17341 - protein, 375 aa, Pseudapis unidentata
MGKGSFKYAWVLDKLKAERERGITIDIALWKFETSKYYVTIIDAPGHRDFIKNMITGTSQADCAVLIVAAGTGEFEAGISKNGQTREHALLAFTLGVKQLIVGVNKMDSTEPPYSEARFEEIKKEVSSYIKKIGYNPAAIAFVPISGWHGDNMLEVSSKMPWFKGWAVERKEGKAEGKCLIEALDAILPPTRPTDKALRLPLQDVYKIGGIGTVPVGRVETGVLKPGMVVTFAPAGLTTEVKSVEMHHEALQEAVPGDNVGFNVKNVSVKELRRGYVAGDSKNNPPKGAADFTAQVIVLNHPGQICNGYTPVLDCHTAHIACKFLQIKEKCDRRSGKTTEENPKAIKSGDAAIVTLVPSKPMCVEAFQEFPPLGR

SEQ ID NO: 17342 - protein, 375 aa, Rhinetula denticrus
MGKGSFKYAWVLDKLKAERERGITIDIALWKFETSKYYVTIIDAPGHRDFIKNMITGTSQADCAVLIVAAGTGEFEAGISKNGQTREHALLAFTLGVKQLIVGVNKMDSTEPPYSEARFEEIKKEVSSYIKKIGYNPAAVAFVPISGWHGDNMLEISSKMPWFKGWAVERKEGKAEGKCLIEALDAILPPTRPTDKALRLPLQDVYKIGGIGTVPVGRVETGVLKPGMLVTFAPAGLTTEVKSVEMHHEALTEAVPGDNVGFNVKNVAVKELRRGYVAGDSKNNPPKGAADFTAQVIVLNHPGQISNGYTPVLDCHTAHIACKFYKIIEKCDRRTGKTTEMDPKAIKSGDAAIVTLVPSKAMCVEAFQEFPPLGR

SEQ ID NO: 17343 - protein, 375 aa, Ruizantheda mutabilis
MGKGSFKYAWVLDKLKAERERGITIDIALWKFETAKYYVTIIDAPGHRDFIKNMITGTSQADCAVLIVAAGTGEFEAGISKNGQTREHALLAFTLGVKQLIVGVNKMDSTEPPYSEARFEEIKKEVSSYIKKIGYNPLAVAFVPISGWHGDNMLEISAKMPWFKGWAVERKEGKGEGKCLIEALDAILPPTRPTDKALRLPLQDVYKIGGIGTVPVGRVETGVLKPGMVVTFAPAGLTTEVKSVEMHHEALTEAVPGDNVGFNVKNVSVKELRRGYVAGDSKNNPPKSAADFTAQVIVLNHPGQISNGYTPVLDCHTAHIACKFYKIIEKCDRRTGKTTENEPKAIKSGDAAIVTLVPSKPMCVEAFQEFPPLGR

SEQ ID NO: 17344 - protein, 375 aa, Ruizantheda proxima
MGKGSFKYAWVLDKLKAERERGITIDIALWKFETAKYYVTIIDAPGHRDFIKNMITGTSQADCAVLIVAAGTGEFEAGISKNGQTREHALLAFTLGVKQLIVGVNKMDSTEPPYSEARFEEIKKEVSSYIKKIGYNPAAVAFVPISGWHGDNMLEISSKMPWFKGWAVERKEGKGEGKCLIEALDAILPPTRPTDKALRLPLQDVYKIGGIGTVPVGRVETGVLKPGMVVTFAPAGLTTEVKSVEMHHEALTEAVPGDNVGFNVKNVSVKELRRGYVAGDSKNNPPKGAADFTAQVIVLNHPGQISNGYTPVLDCHTAHIACKFFKIIEKCDRRTGKTTEMDPKAIKSGDAAIVTLVPTKPMCVEAFQEFPPLGR

SEQ ID NO: 17345 - protein, 375 aa, Sphecodes cressonii
MGKGSFKYAWVLDKLKAERERGITIDIALWKFETSKYYVTIIDAPGHRDFIKNMITGTSQADCAVLIVAAGTGEFEAGISKNGQTREHALLAFTLGVKQLIVGVNKMDSTEPPYSEARFEEIKKEVSSYIKKIGYNPAAVAFVPISGWHGDNMLESSSKMPWFKGWAVERKEGKAEGKCLIEALDAILPPSRPTDKALRLPLQDVYKIGGIGTVPVGRVETGLLKPGMVVTFAPAGLTTEVKSVEMHHEALTEAVPGDNVGFNVKNVSVKELRRGYVAGDSKNNPPKGAADFTAQVIVLNHPGQISNGYTPVLDCHTAHIACKFHKIIEKCDRRTGKTTEMEPKAIKSGDAAIVNLVPSKPMCVEAFQEFPPLGR

SEQ ID NO: 17346 - protein, 375 aa, Sphecodosoma pratti
MGKGSFKYAWVLDKLKAERERGITIDIALWKFETSKYYVTIIDAPGHRDFIKNMITGTSQADCAVLIVAAGTGEFEAGISKNGQTREHALLAFTLGVKQLIVGVNKMDSTEPPYSEARFEEIKKEVSSYIKKIGYNPAAVAFVPISGWHGDNMLEISSKMPWFKGWAVERKEGKAEGKCLIEALDAILPPSRPTDKALRLPLQDVYKIGGIGTVPVGRVETGLLKPGMVVTFAPAGLTTEVKSVEMHHEALQEAVPGDNVGFNVKNVSVKELRRGYVAGDSKNNPPKGAADFTAQVIVLNHPGQISNGYTPVLDCHTAHIACKFLQIKEKCDRRTGKTTEENPKAIKSGDAAIVTLVPSKPMCVESFQEFPPLGR

SEQ ID NO: 17347 - protein, 375 aa, Systropha curvicornis
MGKGSFKYAWVLDKLKAERERGITIDIALWKFETAKYYVTIIDAPGHRDFIKNMITGTSQADCAVLIVAAGTGEFEAGISKNGQTREHALLAFTLGVKQLIVGVNKMDSTEPPYSEARFEEIKKEVSSYIKKIGYNPAAVAFVPISGWHGDNMLEASSKMPWFKGWAVERKEGKAEGKCLIEALDAILPPTRPTDKALRLPLQDVYKIGGIGTVPVGRVETGVLKPGMVVTFAPAGLTTEVKSVEMHHEALQEAVPGDNVGFNVKNVSVKELRRGYVAGDSKNNPPKGAADFTAQVIVLNHPGQISNGYTPVLDCHTAHIACKFLQIKEKCDRRTGKTTEENPKAIKSGDAAIVTLVPSKPMCVEAFQEFPPLGR

SEQ ID NO: 17348 - protein, 375 aa, Systropha planidens
MGKGSFKYAWVLDKLKAERERGITIDIALWKFETSKYYVTIIDAPGHRDFIKNMITGTSQADCAVLIVAAGTGEFEAGISKNGQTREHALLAFTLGVKQLIVGVNKMDSTEPPYSEARFEEIKKEVSSYIKKIGYNPAAVAFVPISGWHGDNMLEASSKMPWFKGWAVERKEGKAEGKCLIEALDAILPPTRPTDKALRLPLQDVYKIGGIGTVPVGRVETGVLKPGMVVTFAPAGLTTEVKSVEMHHEALQEAVPGDNVGFNVKNVSVKELRRGYVAGDSKNNPPKGAADFTAQVIVLNHPGQISNGYTPVLDCHTAHIACKFLQIKEKCDRRTGKTTEENPKAIKSGDAAIVTLVPSKPMCVEAFQEFPPLGR

SEQ ID NO: 17349 - protein, 375 aa, Xeralictus bicuspidariae
MGKGSFKYAWVLDKLKAERERGITIDIALWKFETAKYYVTIIDAPGHRDFIKNMITGTSQADCAVLIVAAGTGEFEAGISKNGQTREHALLAFTLGVKQLIVGVNKMDSTEPPYSEARFEEIKKEVSSYIKKIGYNPAAVAFVPISGWHGDNMLEVSSKMPWFKGWNVERKEGKAEGKCLIEALDAILPPTRPTDKALRLPLQDVYKIGGIGTVPVGRVETGLLKPGMVVTFAPAGLTTEVKSVEMHHEALQEAVPGDNVGFNVKNVSVKELRRGYVAGDSKNNPPKGAADFTAQVIVLNHPGQISNGYTPVLDCHTAHIACKFLQIKEKCDRRTGKTTEENPKAIKSGDAAIVTLVPSKPMCVEAFQEFPPLGR

SEQ ID NO: 17350 - protein, 366 aa, Chimarra obscura
  unsure (1)..(366): unsure at all Xaa locations
QEMGKGSFKYAWVLDKLKAERERGITIDIALWKFETAKYYVTIIDAPGHRDFIKNMITGTSQADCAVLIVAAGTGEFEAGISKNGQTREHALLAFTLGVKQLIVGVNKMDSTEPPYSEARFXXXXXXXSPYIKKIGYNPVAVAFVPISGWHGDNMLEPSSKMPWFKGWAVERKEGKADGKCLIEALDAILPPARPTDKPLRLPLQDVYKIGGIGTVPVGRVETGVLKPGTIVVFAPANLTTEVKSVEMHHEALQEAVPGDNVGFNVKNVSVKELRRGYVAGDSKNNPPKATADFTAQVIVLNHPGQISNGYTPVLDCHTAHIACKFAEIQQKVDRRTGQATEELPKAIKSGDAAIVNLVPSKPLCV

SEQ ID NO: 17351 - protein, 413 aa, Saturnia albofasciata
HVDSGKSTTTGHLIYKCGGIDKRTIEKFEKEAQEMGKGSFKYAWVLDKLKAERERGITIDIALWKFETSRYYVTIIDAPGHRDFIKNMITGTSQADCAVLIVAAGTGEFEAGISKNGQTREHALLAFTLGVKQLIVGVNKMDSTEPPYSESRFEEIKKEVSSYIKKIGYNPAAVAFVPISGWHGDNMLEPSTKMPWFKGWMVERKEGKAEGKCLIEALDAILPPARPTDKALRLPLQDVYKIGGIGTVPVGRVETGILKPGTIVVFAPANITTEVKSVEMHHEALQEAVPGDNVGFNVKNVSVKELRRGYVAGDSKNNPPKGAADFTAQVIVLNHPGQISNGYTPVLDCHTAHIACKFAEIKEKVDRRTGKSTEDNPKSIKSGDAAIVNLVPSKPLCVESFQEFPPLGRFAVR

SEQ ID NO: 17352 - protein, 413 aa, Saturnia caecigena
HVDSGKSTTTGHLIYKCGGIDKRTIEKFEKEAQEMGKGSFKYAWVLDKLKAERERGITIDIALWKFETGRYYVTIIDAPGHRDFIKNMITGTSQADCAVLIVAAGTGEFEAGISKNGQTREHALLAFTLGVKQLIVGVNKMDSTEPPYSEPRFEEIKKEVSSYIKKIGYNPAAVAFVPISGWHGDNMLEPSTKMPWFKGWMVERKEGKAEGKCLIEALDAILPPARPTDKALRLPLQDVYKIGGIGTVPVGRVETGILKPGTIVVFAPANITTEVKSVEMHHEALQEAVPGDNVGFNVKNVSVKELRRGYVAGDSKNNPPKGAADFTAQVIVLNHPGQISNGYTPVLDCHTAHIACKFAEIKEKVDRRTGKSTEDNPKSIKSGDAAIVNLVPSKPLCVESFQEFPPLGRFAVR

SEQ ID NO: 17353 - protein, 413 aa, Attacus caesar
HVDSGKSTTTGHLIYKCGGIDKRTIEKFEKEAQEMGKGSFKYAWVLDKLKAERERGITIDIALWKFETGKYYVTIIDAPGHRDFIKNMITGTSQADCAVLIVAAGTGEFEAGISKNGQTREHALLAFTLGVKQLIVGVNKMDSTEPPYSEPRFEEIKKEVSSYIKKIGYNPAAVAFVPISGWHGDNMLEPSTKMPWFKGWLVERKEGKAEGKCLIEALDAILPPARPTDKPLRLPLQDVYKIGGIGTVPVGRVETGILKPGTIVVFAPANITTEVKSVEMHHEALQEAVPGDNVGFNVKNVSVKELRRGYVAGDSKNNPPKGAADFTAQVIVLNHPGQISNGYTPVLDCHTAHIACKFAEIKEKVDRRTGKSTEDNPKSIKSGDAAIVNLVPSKPLCVESFQEFPPLGRFAVR

SEQ ID NO: 17354 - protein, 413 aa, Actias isis
HVDSGKSTTTGHLIYKCGGIDKRTIEKFEKEAQEMGKGSFKYAWVLDKLKAERERGITIDIALWKFETSKYYVTIIDAPGHRDFIKNMITGTSQADCAVLIVAAGTGEFEAGISKNGQTREHALLAFTLGVKQLIVGVNKMDSTEPPYSEPRFEEIKKEVSSYIKKIGYNPAAVAFVPISGWHGDNMLEPSTKMPWFKGWLVERKEGKAEGKCLIEALDAILPPARPTDKALRLPLQDVYKIGGIGTVPVGRVETGILKPGTIVVFAPANITTEVKSVEMHHEALQEAVPGDNVGFNVKNVSVKELRRGYVAGDSKNNPPKGAADFTAQVIVLNHPGQISNGYTPVLDCHTAHIACKFAEIKEKVDRRTGKSTEDNPKSIKSGDAAIVNLVPSKPLCVESFQEFPPLGRFAVR

SEQ ID NO: 17355 - protein, 413 aa, Argema mimosae
HVDSGKSTTTGHLIYKCGGIDKRTIEKFEKEAQEMGKGSFKYAWVLDKLKAERERGITIDIALWKFETSKYYVTIIDAPGHRDFIKNMITGTSQADCAVLIVAAGTGEFEAGISKNGQTREHALLAFTLGVKQLIVGVNKMDSTEPPYSESRFEEIKKEVSSYIKKIGYNPAAVAFVPISGWHGDNMLEPSTKMPWFKGWMVERKEGKAEGKCLIEALDAILPPARPTDKALRLPLQDVYKIGGIGTVPVGRVETGILKPGTIVVFAPANITTEVKSVEMHHEALQEAVPGDNVGFNVKNVSVKELRRGYVAGDSKNNPPKGAADFTAQVIVLNHPGQISNGYTPVLDCHTAHIACKFAEIKEKVDRRTGKSTEDNPKSIKSGDAAIVNLVPSKPLCVESFQEFPPLGRFAVR

SEQ ID NO: 17356 - protein, 413 aa, Ceranchia apollina
HVDSGKSTTTGHLIYKCGGIDKRTIEKFEKEAQEMGKGSFKYAWVLDKLKAERERGITIDIALWKFETSKYYVTIIDAPGHRDFIKNMITGTSQADCAVLIVAAGTGEFEAGISKNGQTREHALLAFTLGVKQLIVGVNKMDSTEPPYSESRFEEIKKEVSSYIKKIGYNPAAVAFVPISGWHGDNMLEQSTKMPWFKGWLVERKEGKAEGKCLIEALDAILPPARPTDKALRLPLQDVYKIGGIGTVPVGRVETGILKPGTIVVFAPANITTEVKSVEMHHEALQEAVPGDNVGFNVKNVSVKELRRGYVAGDSKNNPPKGAADFTAQVIVLNHPGQISNGYTPVLDCHTAHIACKFAEIKEKVDRRTGKSTEDNPKSIKSGDAAIVNLVPSKPLCVESFQEFPPLGRFAVR

SEQ ID NO: 17357 - protein, 413 aa, Copaxa multifenestrata
HVDSGKSTTTGHLIYKCGGIDKRTIEKFEKEAQEMGKGSFKYAWVLDKLKAERERGITIDIALWKFETGKYYVTIIDAPGHRDFIKNMITGTSQADCAVLIVAAGTGEFEAGISKNGQTREHALLAFTLGVKQLIVGVNKMDSTEPPYSESRFEEIKKEVSSYIKKIGYNPAAVAFVPISGWHGDNMLEPSTKMPWFKGWQVERKEGKADGKCLIEALDAILPPARPTDKALRLPLQDVYKIGGIGTVPVGRVETGILKPGTIVVFAPANITTEVKSVEMHHEALQEAVPGDNVGFNVKNVSVKELRRGYVAGDSKNNPPKGAADFTAQVIVLNHPGQISNGYTPVLDCHTAHIACKFAEIKEKVDRRTGKSTEDNPKSIKSGDAAIVNLVPSKPLCVESFQEFPPLGRFAVR

SEQ ID NO: 17358 - protein, 413 aa, Eacles imperialis
  unsure (1)..(413): unsure at all Xaa locations
HVDSGKSTTTGHLIYKCGGIDKRTIEKFEKEAQEMGKGSFKYAWVLDKLKAERERGITIDIALWKFETAKYYVTIIDAPGHRDFIKNMITGTSQADCAVLIVAAGTGEFEAGISKNGQTREHALLAFTLGVKQLIVGVNKMDSTEPPYSEPRFEEIKKEVSSYIKKIGYNPAAVAFVPISGWHGDNMLEPSTKMPWFKGWMVERKEGKAEGKXLIEALDAILPPARPTDKALRLPLQDVYKIGGIGTVPVGRVETGILKPGTVVVFAPANITTEVKSVEMHHEALQEAVPGDNVGFNVKNVSVKELRRGYVAGDSKNNPPKGAADFTAQVIVLNHPGQISNGYTPVLDCHTAHIACKFAEIKEKVDRRTGKSTEDNPKSIKSGDAAIVNLVPSKPLCVESFQEFPPLGRFAVR

SEQ ID NO: 17359 - protein, 413 aa, Holocerina smilax
HVDSGKSTTTGHLIYKCGGIDKRTIEKFEKEAQEMGKGSFKYAWVLDKLKAERDRGITIDIALWKFETAKYYVTIIDAPGHRDFIKNMITGTSQADCAVLIVAAGTGEFEAGISKNGQTREHALLAFTLGVKQLIVGVNKMDSTEPPYSEPRFEEIKKEVSSYIKKIGYNPAAVAFVPISGWHGDNMLEPSTKMPWFKGWMVERKEGKAEGKCLIEALDAILPPARPTDKALRLPLQDVYKIGGIGTVPVGRVETGILKPGTIVVFAPANITTEVKSVEMHHEALQEAVPGDNVGFNVKNVSVKELRRGYVAGDSKNNPPKGAADFTAQVIVLNHPGQIANGYTPVLDCHTAHIACKFAEIKEKVDRRTGKSTEDNPKFIKSGDAAIVNLVPSKPLCVESFQEFPPLGRFAVR

SEQ ID NO: 17360 - protein, 413 aa, Imbrasia petiveri
HVDSGKSTTTGHLIYKCGGIDKRTIEKFEKEAQEMGKGSFKYAWVLDKLKAERERGITIDIALWKFETAKYYVTIIDAPGHRDFIKNMITGTSQADCAVLIVAAGTGEFEAGISKNGQTREHALLAFTLGVKQLIVGVNKMDSTEPPYSEPRFEEIKKEVSSYIKKIGYNPAAVAFVPISGWHGDNMLEPSTKMPWFKGWLVERKEGKAEGKCLIEALDAILPPARPTDKALRLPLQDVYKIGGIGTVPVGRVETGILKPGTIVVFAPANITTEVKSVEMHHEALQEAVPGDNVGFNVKNVSVKELRRGYVAGDSKNNPPKGAADFTAQVIVLNHPGQISNGYTPVLDCHTAHIACKFAEIKEKVDRRTGKSTEDNPKSIKSGDAAIVNLVPSKPLCVESFQEFPPLGRFAVR

SEQ ID NO: 17361 - protein, 413 aa, Opodiphthera eucalypti
HVDSGKSTTTGHLIYKCGGIDKRTIEKFEKEAQEMGKGSFKYAWVLDKLKAERERGITIDIALWKFETSKYYVTIIDAPGHRDFIKNMITGTSQADCAVLIVAAGTGEFEAGISKNGQTREHALLAFTLGVKQLIVGVNKMDSTEPPYSEPRFEEIKKEVSSYIKKIGYNPAAVAFVPISGWHGDNMLEPSTKMPWFKGWLVERKEGKAEGKCLIEALDAILPPARPTDKALRLPLQDVYKIGGIGTVPVGRVETGILKPGTIVVFAPANITTEVKSVEMHHEALQEAVPGDNVGFNVKNVSVKELRRGYVAGDSKNNPPKGAADFTAQVIVLNHPGQISNGYTPVLDCHTAHIACKFAEIKEKVDRRTGKSTEDNPKSIKSGDAAIVILVPSKPLCVESFQEFPPLGRFAVR

SEQ ID NO: 17362 - protein, 413 aa, Polythysana apollina
  unsure (1)..(413): unsure at all Xaa locations
HVDSGKSTTTGHLIYKCGGIDKRTIEKFEKEAQEMGKGSFKYAWVLDKLKAERERGITIDIALWKFETGRYYVTIIDAPGHRDFIKNMITGTSQADCAVLIVAAGTGEFEAGISKNGQTREHALLAXTLGVKQLIVGVNKMDSTEPPFSEPRFEEIKKEVSSYIKKIGYNPAAVAFVPISGWHGDNMLEPSTKMPWFKGWMVERKEGKADGKCLIEALDAILPPARPTDKALRLPLQDVYKIGGIGTVPVGRVETGILKPGTVVVFAPANITTEVKSVEMHHEALQEAVPGDNVGFNVKNVSVKELRRGYVAGDSKNNPPKGAADFTAQVIVLNHPGQISNGYTPVLDCHTAHIACKFAEIKEKVDRRTGKSTEDNPKSIKSGDAAIVILVPSKPLCVESFQEFPPLGRFAVR

SEQ ID NO: 17363 - protein, 652 aa, Anopheles gambiae str. PEST
DYDDDDYQYGQSVEDDCISPTDASQWIYDRAKGQQSMSEFLANNRDIEEEDDDELAAETGREGPAHKRRDSECFQMPELNDEDRARLMSCMDEIRDIVGETCSDRQMVEAIMKHDYECSKALDEILNSNKTPPAALGAKSGSKLTAGAAMEKASTVIITPSASVAKKTLAFEVTSSPRMQSPSVSGRNTPEITEEAARQQQQQSFKSTPKEPSRNAKELFGKERGDRKDHIHMVVIGHVDAGKSTLMGHLLYDTGNVSQRIMHKHEQESKKLGKSSFMYAWVLDETGEERERGITMDVGSTRFETAKKEITLLDAPGHKDFIPNMISGANQADVALLVVDATRGEFETGFEQGGQTREHALLVRSLGVSQLGVVVNKLDTVGWSKERFDEIVNKLKVFLKQAGFRDADVTYVPCSGLTGENLVKDPTDPALTAWYSGPTLLKVIDSFKTPDRAIDKPFRLSVADIFKGTGSGFCLCGRIESGMVCVNDKVLVCPSKEQAVVKNITIDELPQQTAFAGDQVSLTLANIDINNISVGYILSDIFHPVPLATRILARIVVFNIKVPITRGYPVLLHHQSLIEPATIRKLKAQLHKGTGEVIKKNPRCLGNNSCALVEIEFQRPIGMERYADFKDLGRIMLRVEGVTIAAGLVTEI

SEQ ID NO: 17364 - protein, 395 aa, Piptocephalis freseniana
KRTIEKFEKEAAELGKGSFKYAWVLDKLKAERERGITIDIALWKFETPKYQVTVIDAPGHRDFIKNMITGTSQADCAILIIAGGTGEFEAGISKDGQTREHVLLAFTLGVRQLIVAVNKMDTTKWSEDRFNEIVKEVSNYVKKIGYNPKSVPFVPISGWHGDNMLEASVNMPWFKGWTKEGKTGAKTGKTLLEAIDAIDPPSRPTDKPLRLPLQDVYKIGGIGTVPVGRVETGVIKAGMVVTFAPAAVTTEVKSVEMHHEQLVEGVPGDNVGFNVKNVSVKDIRRGNVCSDSKNDPAKEAGSFLAQVIVLNHPGQISAGYAPVLDCHTAHIACKFTELIEKIDRRSGKSIEDSPKFVKSGDAAIVKMTPSKPMCVEAFTEYPPLGRFAVRDMRQT

SEQ ID NO: 17365 - protein, 395 aa, Rhizophlyctis sp. C-10
KRTIEKFEKEAADIGKGSFKYAWVLDKLKAERERGITIDIALWKFETPKYYVTVIDAPGHRDFIKNMITGTSQADCAILIIAGGVGEFEAGISKDGQTREHALLAFTLGVRQLIVAVNKMDTNKWSEDRFNEIVKELSGFIKKVGYNPKSVPFVPISGWHGDNMLEVSENMPWFKGWTKETKAGNSTGKTLLQAIDAIEPPTRPTDKPLRLPLQDVYKIGGIGTVPVGRVETGVIKPGMVVTFAPANVTTEVKSVEMHHESLTEGLPGDNVGFNVKNVSVKEIRRGMVASDSKNDPAKEAASFNAQVIVLAHPGQIAAGYSPVLDCHTAHIACKFAELVEKIDRRSGKKLEDAPKFIKSGDAAIVKMIPSKAMCVEAYTDYPPLGRFAVRDMRQT

SEQ ID NO: 17366 - protein, 442 aa, Giardia lamblia ATCC 50803
MGKEKKHINLVVIGHVDNGKSTLTGHLIYKCGGIDQRTIDEYEKRATEMGKGSFKYAWVLDQLKDERERGITINIALWKFETKKYIVTIIDAPGHRDFIKNMITGTSQADVAILVVAAGQGEFEAGISKDGQTREHATLANTLGIKTMIICVNKMDDGQVKYSKERYDEIKGEMMKQLKNIGWKKAEEFDYIPTSGWTGDNIMEKSDKMPWYEGPCLIDAIDGLKAPKRPTDKPLRLPIQDVYKISGVGTVPAGRVETGELAPGMKVVFAPTSQVSEVKSVEMHHEELKKAGPGDNVGFNVRGLAVKDLKKGYVVGDVTNDPPVGCKSFTAQVIVMNHPKKIQPGYTPVIDCHTAHIACQFQLFLQKLDKRTLKPEMENPPDAGRGDCIIVKMVPQKPLCCETFNDYAPLGRFAVRDMKRTVAVGIIQEIDKEEFKPPKGGK

SEQ ID NO: 17367 - protein, 465 aa, Giardia lamblia ATCC 50803
MSSQEVVQVEEEKRKNLNIVFIGHVDAGKSTISGHLVSDLGKLDKRQLEKLEQQAKALNRESWKYAFAMDTSEEEREKGKTVECARESFLTPNGRRITIIDAPGHKGFVHNMISGAAQADTAILVISARKGEFESGFERGGQTSEHALLAYVNGIKQIVCLINKMDDITVEYCKKRYDSIVSQLKLYLENVGYASKNIFFLPISGFTGENLISTKELNPKLSEWYSGPSFLDLLDELKVPKRDTKSPLCACVSGHYKENSAFIVVKVEQGKMSIGDTVLCLPENKAFDILDIEGEQEEGSKLVQAKAGDNVRIKVKDDIWEFLTEGSVICAQPSPGQSPSVSVTNRFQANLLIVSTAENLVITSGYSCVAHINLQQVGCQIRAILADLDLKTGKVKPEYIVSTEPLKVRRPTHVLSKARIICEIITQKPVCVQSYAGHEALGRIILRHESDTVAIGYIVSVKPAK

SEQ ID NO: 17368 - protein, 363 aa, Bittacus punctiger
GRERGITIDIALWKFETAKYYVTIIDAPGHRDFIKNMITGTSQADCAVLIVAAGTGEFEAGISKNGQTREHALLAFTLGVKQLIVGVNKMDSTEPPYSESRFEEIKKEVSSYIKKIGYNPAAVAFVPISGWHGDNMLEVSTKMSWFKGWNVERKEGKADGKCLIEALDAILPPARPTDKPLRLPLQDVYKIGGIGTVPVGRVETGILKPGTVVVFAPANLTTEVKSVEMHHEALQEAVPGDNVGFNVKNVSVKELRRGYVAGDSKASPPKGAADFTAQVIVLNHPGQISNGYTPVLDCHTAHIACKFAEIKEKVDRRTGKSTEDNPKAIKSGDAAIVNLVPSKPMCVESFQEFPPLGRFAVRD

SEQ ID NO: 17369 - protein, 363 aa, Bittacus selysi
ERERGITIDIALWKFETAKYYVTIIDAPGHRDFIKNMITGTSQADCAVLIVAAGTGEFEAGISKNGQTREHALLAFTLGVKQLIVGVNKMDSTEPPYSESRFEEIKKEVSSYIKKIGYNPAAVAFVPISGWHGDNMLEVSSKMSWFKGWNVERKEGKADGKCLIEALDAILPPARPTDKPLRLPLQDVYKIGGIGTVPVGRVETGVLKPGTVVVFAPANLTTEVKSVEMHHEALQEAVPGDNVGFNVKNVSVKELRRGYVAGDSKASPPKGAADFTAQVIVLNHPGQISNGYTPVLDCHTAHIACKFAEIKEKVDRRTGKSTEDNPKAIKSGDAAIVNLVPSKPMCVESFQEFPPLGRFAVRD

SEQ ID NO: 17370 - protein, 363 aa, Neopanorpa harmandi
ERERGITIDIALWKFETAKYYVTIIDAPGHRDFIKNMITGTSQADCAVLIVAAGTGEFEAGISKNGQTREHALLAFTLGVKQLIVGVNKMDSTEPPYSEARFEEIKKEVSSYIKKIGYNPAAVAFVPISGWHGDNMLEVSTKMTWFKGWNVERKEGKADGKCLIEALDAILPPARPTDKPLRLPLQDVYKIGGIGTVPVGRVETGVLKPGTVVVFAPANLTTEVKSVEMHHEALQEAVPGDNVGFNVKNVSVKELRRGYVAGDSKANPPKGAADFTAQVIVLNHPGQISNGYTPVLDCHTAHIACKFAEIKEKVDRRTGKSTEDNPKAIKSGDAAIVNLVPSKPMCVESFQEFPPLGRFAVRD

SEQ ID NO: 17371 - protein, 361 aa, Panorpa arakavae
ERGITIDIALWKFETAKYYVTIIDAPGHRDFIKNMITGTSQADCAVLIVAAGTGEFEAGISKNGQTREHALLAFTLGVKQLIVGVNKMDSTEPPYSEPRFEEIKKEVSSYIKKIGYNPAAVAFVPISGWHGDNMLEVSSKMGWFKGWAVERKEGKADGKCLIEALDAILPPARPTDKPLRLPLQDVYKIGGIGTVPVGRVETGVLKPGTVVVFAPANLTTEVKSVEMHHEALQEAVPGDNVGFNVKNVSVKELRRGYVAGDSKANPPKGAADFTAQVIVLNHPGQISNGYTPVLDCHTAHIACKFAEIKEKVDRRTGKSTEDNPKAIKSGDAAIVVLVPSKPMCVESFQEFPPLGRFAVRD

SEQ ID NO: 17372 - protein, 362 aa, Panorpa carolinensis
RERGITIDIALWKFETAKYYVTIIDAPGHRDFIKNMITGTSQADCAVLIVAAGTGEFEAGISKNGQTREHALLAFTLGVKQLIVGVNKMDSTEPPYSESRFEEIKKEVSSYIKKIGYNPAAVAFVPISGWHGDNMLEVSSKMGWFKGWAVERKEGKADGKCLIEALDAILPPARPTDKPLRLPLQDVYKIGGIGTVPVGRVETGVLKPGTVVVFAPANLTTEVKSVEMHHEALQEAVPGDNVGFNVKNVSVKELRRGYVAGDSKANPPKGAADFTAQVIVLNHPGQISNGYTPVLDCHTAHIACKFAEIKEKVDRRTGKSTEDNPKAIKSGDAAIVVLVPSKPMCVESFQEFPPLGRFAVRD

SEQ ID NO: 17373 - protein, 363 aa, Panorpa striata
ERERGITIDIALWKFETAKYYVTIIDAPGHRDFIKNMITGTSQADCAVLIVAAGTGEFEAGISKNGQTREHALLAFTLGVKQLIVGVNKMDSTEPPYSESRFEEIKKEVSSYIKKIGYNPAAVAFVPISGWHGDNMLEVSTKMGWFKGWAVERKEGKADGKCLIEALDAILPPARPTDKALRLPLQDVYKIGGIGTVPVGRVETGILKPGTVVVFAPANLTTEVKSVEMHHEALQEAVPGDNVGFNVKNVSVKELRRGYVAGDSKSNPPKGAADFTAQVIVLNHPGQISNGYTPVLDCHTAHIACKFAEIKEKVDRRTGKSTEDNPKAIKSGDAAIVNLVPSKPMCVESFQEFPPLGRFAVRD

SEQ ID NO: 17374 - protein, 363 aa, Harpobittacus australis
ERERGITIDIALWKFETAKYYVTIIDAPGHRDFIKNMITGTSQADCAVLIVAAGTGEFEAGISKNGQTREHALLAFTLGVKQLIVGVNKMDSTEPPYSESRFEEIKKEVSSYIKKIGYNPAAVAFVPISGWHGDNMLEVSSKMGWFKGWNVERKEGKADGKCLIEALDAILAPSRPTDKPLRLPLQDVYKIGGIGTVPVGRVETGVLKPGTVVVFAPANLTTEVKSVEMHHEALQEAVPGDNVGFNVKNVSVKELRRGYVAGDSKASPPKGAADFTAQVIVLNHPGQISNGYTPVLDCHTAHIACKFAEIKEKVDRRTGKSTEDNPKAIKSGDAAIVNLVPSKPMCVESFQEFPPLGRFAVRD

SEQ ID NO: 17375 - protein, 363 aa, Opthalmopsylla volgensis palestinica
ERERGITIDIALWKFETAKYYVTIIDAPGHRDFIKNMITGTSQADCAVLIVAAGVGEFEAGISKNGQTREHALLAFTLGVKQLIVGVNKMDSTEPPYSEARFEEIKKEVSSYIKKIGYNPAAVAFVPISGWHGDNMLEVSSKMGWFKGWNVERKEGKADGKCLIEALDAILPPARPTDKPLRLPLQDVYKIGGIGTVPVGRVETGVLKPGTVVVFAPANLTTEVKSVEMHHEALQEAVPGDNVGFNVKNVSVKELRRGYVAGDSKASPPRGAADFTAQVIVLNHPGQISNGYTPVLDCHTAHIACKFAEIKEKVDRRTGKSTEDNPKAIKSGDAAIVNLVPSKPMCVESFSEFPPLGRFAVRD

SEQ ID NO: 17376 - protein, 428 aa, Pyrococcus furiosus DSM 3638
MPKDKPHVNIVFIGHVDHGKSTTIGRLLYDTGNIPEQIIKKFEEMGEKGKSFKFAWVMDRLKEERERGITIDVAHTKFETPHRYITIIDAPGHRDFVKNMITGASQADAAVLVVAATDGVMPQTKEHAFLARTLGIKHIIVAINKMDMVNYNQKRFEEVKAQVEKLLKMLGYKDFPVIPISAWEGENVVKKSDKMPWYNGPTLIEALDQIPEPEKPVDKPLRIPIQDVYSIKGVGTVPVGRVETGKLRVGEVVIFEPASTIFHKPIQGEVKSIEMHHEPLEEALPGDNIGFNVRGVSKNDIKRGDVAGHTTNPPTVVRTKDTFKAQIIVLNHPTAITVGYSPVLHAHTAQVPVRFEQLLAKLDPKTGNIVEENPQFIKTGDAAIVILRPMKPVVLEPVKEIPQLGRFAIRDMGMTIAAGMVISIQRGE

SEQ ID NO: 17377 - protein, 413 aa, Methanothermobacter thermautotrophicus str. Delta H
MAKEKEHMNLAFIGHVDHGKSTLVGHLLLQAGAIAEQQLAEGEDKFRFVMDRLSEERERGVTIDLAHAKFETDKYEFTIVDCPGHRDFVKNMITGASQADAAVLVVAVDDGVMPQTKEHVFLSRTLGINQLIVAINKMDLVNYDEEKFNALKDEVAALIKTVGYKPSDVEFIPLSAFEGDNITSKSENTPWYKGKTLVEALDDLEAPEKPVDLPLRIPIQDVYSITGVGTVPVGRVETGVLKKGENVIFEPAGVSGEVKSIEMHHEMIEQAEPGDNIGFNVRGVGKNDIRRGDVAGHLDNPPKVAKEFTAQIVVLQHPGVITVGYTPVFHCHTAQVACTFLELVQKMNPATGQVEEENPDFLKTGNAAVVKVKPTKPLVIEKIKDIPHMGRFAIRDMGQTVAAGMCIDLVPAK

SEQ ID NO: 17378 - protein, 422 aa, Methanosarcina acetivorans C2A
MAADKPHMNLAVIGHIDHGKSTLVGRLMYEAGAVPAHIIEKYKEEAKQKGKESFAFAWVMDSLKEERERGITIDIAHKRFDTPKYYFTVVDCPGHRDFVKNMITGASQADAAILVVAAPDGVMAQTKEHIFLSRTLGINQLIIAINKMDAVEYSEAKYKEVVEQVSGLLKMIGFKPANIPFIPTSAFMGDNITKLSEKTPWYKGPVIMQALDELKEPEKPSTLPLRIPVEDAYTISGIGTVPVGRVETGVMKKGDKVIFMPGGAGGEVKSIEMHHEEIPQAYPGDNIGWNVRGIGKNDVRRGDVCGHTDNPPKVADEFVGQIVVLQHPSAITAGYTPVFHAHTSQIACQLISLDKKLDPKTGQVKEEHPTFIKAGDAAIVTIKPTKPMVIEPVKEIPQLGRFAIRDMGMTIAAGMCMSVKQK

SEQ ID NO: 17379 - protein, 423 aa, Methanopyrus kandleri AV19
MAKEKEHINLAFIGHVDHGKSTLVGRLLYDTGVIEDKDLGEGEDKFRVIMDTLEEERERGVTIDLAHTKFETDNYEFTIVDCPGHRDFVKNMITGASQADAAILVVAADDGVMPQTKEHAFLAKTLGIDQLIVAINKMDLVDYDENRYEEVKQEVAELLKTIGYNVDEIPFIPISAFEGDNVVEKSDNTPWYDGPTLLEALDNLEPPEKPTDKPLRIPIQDVYSITGVGTVPVGRVETGVLEVGDTVRFEPAYTATGGRKGEGEVRSIEMHHEEIERAEPGDNIGFNVKGVGKNDISRGDVACHPDEPATVVTPDDTFIAQIVVLQHPSAITAGYTPVFHCHTAQVACKFEELIEKIDPATGEVIEENPDFLKTGEAAKVRIRPTKPMVIEEVSFIPQLGRFAIRDMGQTVAAGMCVKIEKEE

SEQ ID NO: 17380 - protein, 422 aa, Methanosarcina mazei Goe1
MAADKPHMNLAVIGHIDHGKSTFVGRLMYDAGAVPAHIIEKYKEEAKQKGKESFAFAWVMDSLKEERERGITIDIAHKRFDTDKFYFTVVDCPGHRDFVKNMITGASQADAAVLVVAAPDGVMAQTKEHIFLSRTLGINQLIVAINKMDAVDYSEARYKEVVEQVSGILKMIGFKPSEIPFIPTSAFHGDNIMKLSDKTPWYKGPAIMEALNSLKEPEKPSTLPLRIPVEDAYTISGIGTVPVGRVETGVMKKGDKVVFMPGGAGGEVKSIEMHHEEIPQATPGDNIGWNVRGIGKNDVRRGDVCGHADNPPKVADEFVGQIVVLQHPSAITAGYTPVFHAHTSQIACQLIALNKKLDPKTGQVKEENPTFLKAGDAAIVTIKPTKPMVIEPVKEIPQLGRFAIRDMGMTIAAGMCMSVKQK

SEQ ID NO: 17381 - protein, 385 aa, Bombus mendax
KFEKEAQEMGKGSFKYAWVLDKLKAERERGITIDIALWKFETAKYYVTIIDAPGHRDFIKNMITGTSQADCAVLIVAAGIGEFEAGISKNGQTREHALLAFTLGVKQLIVGVNKMDMTDPPYSEARFEEIKKEVSSYIRKIGYNTLSVAFVPISGWHGDNMLEPSPKTPWYKGWKVERKDGNADGKTLIEALDAILPPSRPTDKALRLPLQDVYKIGGIGTVPVGRVETGILKPGMLVTFAPAALTTEVKSVELHHEALTEALPGDNVGFNVKNISVKELRRGYVAGDSKNQPPRGAADFTAQVIVLNHPGQISNGYTPVLDCHTAHIACKFAEIKEKCDRRTGKTTEENPKSIKSGDAAIVVLQPTKPMCVEAFQEFPPLGRFA

SEQ ID NO: 17382 - protein, 385 aa, Bombus confusus
KFEKEAQEMGKGSFKYAWVLDKLKAERERGITIDIALWKFETAKYYVTIIDAPGHRDFIKNMITGTSQADCAVLIVAAGIGEFEAGISKNGQTREHALLAFTLGVKQLIVGVNKMDMTEPPYSEARFEEIKKEVSSYIKKIGYNTASVAFVPISGWHGDNMLEPSPKTPWYKGWKVERKDGNADGKTLIEALDAILPPSRPTDKALRLPLQDVYKIGGIGTVPVGRVETGILKPGMLVTFAPAALNTEVKSVEMHHEALSEALPGDNVGFNVKNISVKELRRGYVAGDSKNQPPRGAADFTAQVIVLNHPGQISNGYTPVLDCHTAHIACKFAEIKEKCDRRTGKTTEENPKSIKSGDAAIVMLQPTKPMCVEAFQEFPPLGRFA

SEQ ID NO: 17383 - protein, 428 aa, Methanococcus vannielii
MAKTKPILNVAFIGHVDAGKSTTVGRLLLDGGAIDPQLIVRLRKEAEEKGKAGFEFAYVMDGLKEERERGVTIDVAHKKFPTAKYEVTIVDCPGHRDFIKNMITGASQADAAVLVVNVDDAKSGIQPQTREHVFLIRTLGVRQLAVAVNKMDTVNFSEADYNELKKMIGDQLLKMIGFNPEQINFVPVASLHGDNVFKKSERNPWYKGPTIAEVIDGFQPPEKPTNLPLRLPIQDVYTITGVGTVPVGRVETGIIKPGDKVVFEPAGAIGEIKTVEMHHEQLPSAEPGDNIGFNVRGVGKKDIKRGDVLGHTTNPPTVATDFTAQIVVLQHPSVLTDGYTPVFHTHTAQIACTFAEIQKKLNPATGEVLEENPDFLKAGDAAIVKLIPTKPMVIESVKEIPQLGRFAIRDMGMTVAAGMAIQVTAKNK

SEQ ID NO: 17384 - protein, 428 aa, Methanocaldococcus jannaschii
MAKQKPVLNVAFIGHVDAGKSTTVGRLLYDSGAIDPQLLEKLKREAQERGKAGFEFAYVMDNLKEERERGVTIDVAHKKFETQKYEVTIVDCPGHRDFIKNMITGASQADAAVLVVDVNDAKTGIQPQTREHMFLARTLGIKQIAVAINKMDTVNYSQEEYEKMKKMLSEQLLKVLGYNPDQIDFIPTASLKGDNVVKRSENMPWYKGPTLVEALDKFQPPEKPTNLPLRIPIQDVYSITGVGTVPVGRVETGILRPGDKVVFEPAGVSGEVKSIEMHHEQIPQAEPGDNIGFNVRGVSKKDIKRGDVCGHPDNPPTVAEEFTAQIVVLQHPTAITVGYTPVFHAHTAQVACTFIELLKKLDPRTGQVIEENPQFLKTGDAAIVKIKPTKPMVIENVREIPQLGRFAIRDMGMTIAAGMAIDVKAKNK

SEQ ID NO: 17385 - protein, 422 aa, Methanosarcina barkeri
MAADKPHMNLAVIGHIDHGKSTFVGRLMYDAGAVPAHVIEKYKEEAKQKGKESFAFAWVMDSLKEERERGITIDIAHKRFDTDKYYFTVVDCPGHRDFVKNMITGASQADAAVLVVAAPDGVMAQTKEHIFLSRTLGINQLIVAINKMDAVEYSEKRYKEVVEQVSGILKMIGFKPGDIPFVPTSAFYGDNVVNHSEKTPWYKGVTMMEALNNLKVPEKPSTLPLRIPVEDAYTISGIGTVPVGRVETGTMKKGDKVVFMPGGAAGEVKSIEMHHEEIPQALPGDNIGWNVRGIGKADVRRGDVCGHTDNPPKVADTFVGQIVVLQHPSAITAGYTPVFHAHTSQIACQLIELNKKLDPKSGQVKEENPTFLKAGDAAIVTIKPTKPMVIEPVKEIPQLGRFAIRDMGMTIAAGMCMSVKQK

SEQ ID NO: 17386 - protein, 398 aa, Streblomastix strix
VGKSTTTGHLIYKCGGIDKRTIEKFEQEAEQIGKASFKYAWVLDKLKAERERGITIDIALWKFETNKYYFTIIDAPGHRDFIKNMITGTSQADAALLVVAANQGEFEAGISKDGQTREHALLAYTLGVKQMIVLVNKMDDKSVSFSEARYNEIVGEMRNYLKKIGYNPDKIQMIPISGFCGDNMLEHSPNMPWYKGNTLFDSLDTLEVPKRPVDKPLRLPIQDVFKIGGIGTVPVGRVETGVLTPGQVVTIAPAMITTECKSVEMHHEALTQAVPGDNVGFNLKGVSVKDIKRGYVCGDSKQDPPQETESSQAQVIVMQHPGQIQNGYTPVLDCHTSHIACKFKEITSKIDRRTNKEQEANPKSIKTGDSAIVTMVPSKPMVVEKFVEYPPLGRFAVR

SEQ ID NO: 17387 - protein, 398 aa, Streblomastix strix
VGKSTTTGHLIYKCGGIDKRTIEKFEQEAEQIGKSSFKYAWVLDKLKAERERGITIDISLWKFETNKYYFTIIDAPGHRDFIKNMITGTSQADVALLVVAANQGEFEAGISKDGQTREHALLAYTLGVKQLIVLVNKMDDKSVNFAEARYTEIVTEMRNYLKKIGYNPEKIQMIPISGFQGDNMIEHSENMPWYKGNTLFEALDTLEVPKRPTDKPLRLPIQDVFKIGGIGTVPVGRVETGIMTPGQVVTIAPAMITTECKSVEMHHVALTEAVPGDNVGFNLKGVSVKDIKRGYVCGDSKQDPPQETESFQAQVIVMQHPGQIQNGYTPVLDCHTSHIACKFKEITSKIDRRTNKEQESNPKSIKTGDSAIVTMVPSKPMVVEKFVEYPPLGRFAVR

SEQ ID NO: 17388 - protein, 398 aa, Streblomastix strix
VGKSTTTGHLIYKCGGIDKRTIEKFEQEAEQIGKASFKYAWVLDKLKAERERGITIDIALWKFETNKYYFTIIDAPGHRDFIKNMITGTSQADAALLVVAANQGEFEAGISKDGQTREHALLAYTLGVRQTIVLVNKMDDKSVNFSEARYNEIVGEMRNYLKKIGYNPDKIQMIPISGFCGDNMLEHSENMPWYKGNTLFDSLDTLEVPKRPLDKPLRLPIQDVFKIGGIGTVPVGRVETGSLTPGQIVTIAPAMITTECKSVEMHHVSLTEAVPGDNVGFNLRGVSVKDIKRGYVCGDSKQDPPQETESFLAQVIVMQHPGQIQNGYTPVLDCHTSHIACKFKEITSKIDRRTNKELEANPKSIKTGDSAMVLMVPTKPLVVEKFVEYPPLGRFAVR

SEQ ID NO: 17389 - protein, 421 aa, Haloarcula marismortui
MSDEQHQNLAIIGHVDHGKSTLVGRLLYETGSVPEHVIEQHKEEAEEKGKGGFEFAYVMDNLAEERERGVTIDIAHQEFSTDTYDFTIVDCPGHRDFVKNMITGASQADNAVLVVAADDGVQPQTQEHVFLARTLGIGELIVAVNKMDLVDYGESEYKQVVEEVKDLLTQVRFDSENAKFIPVSAFEGDNIAEESEHTGWYDGEILLEALNELPAPEPPTDAPLRLPIQDVYTISGIGTVPVGRVETGILNTGDNVSFQPSDVSGEVKTVEMHHEEVPKAEPGDNVGFNVRGVGKDDIRRGDVCGPADDPPSVAETFQAQIVVMQHPSVITEGYTPVFHAHTAQVACTVESIDKKIDPSSGEVAEENPDFIQNGDAAVVTVRPQKPLSIEPSSEIPELGSFAIRDMGQTIAAGKVLGVNER

SEQ ID NO: 17390 - protein, 421 aa, Halobacterium salinarum
MSDNRHQNLAVIGHVDHGKSTMVGRLLYETGSVPEHVIEQHKEEAEEEGKGGFEFAYVMDNLAEERERGVTIDIAHQEFTTDEYEFTIVDCPGHRDFVKNMITGASQADNAVLVVAADDGVAPQTREHVFLSRTLGIDELIVAVNKMDVVDYDESKYNEVVSGVKDLFGQVGFNPDDAKFIATSAFEGDNVSDHSDNTPWYDGPTLLEALNGLPVPQPPTDADLRLPIQDVYTISGIGTVPVGRIETGVMNTGDNVSFQPSDVGGEVKTIEMHHEEVPNAEPGDNVGFNVRGIGKDDIRRGDVCGPADDPPSVADTFQAQVVVMQHPSVITAGYTPVFHAHTAQVACTIESIDKKMDPASGETQEENPDFIQSGDAAVVTVRPQKPLSLEPSSEIPELGSFAVRDMGQTIAAGKVLDVDEA

SEQ ID NO: 17391 - protein, 430 aa, Pyrococcus woesei
MKMPKDKPHVNIVFIGHVDHGKSTTIGRLLYDTGNIPEQIIKKFEEMGEKGKSFKFAWVMDRLREERERGITIDVAHTKFETPHRYITIIDAPGHRDFVKNMITGASQADAAVLVVAATDGVMPQTKEHAFLARTLGIKHIIVAINKMDMVNYNQKRFEEVKAQVEKLLKMLGYKDFPVIPISAWEGENVVKKSDKMPWYNGPTLIEALDQIPEPEKPVDKPLRIPIQDVYSIKGVGTVPVGRVETGKLRVGEVVIFEPASTIFHKPIQGEVKSIEMHHEPLEEALPGDNIGFNVRGVSKNDIKRGDVAGHTTNPPTVVRTKDTFKAQIIVLNHPTAITVGYSPVLHAHTAQVPVRFEQLLAKLDPKTGNIVEENPQFIKTGDAAIVILRPMKPVVLEPVKEIPQLGRFAIRDMGMTIAAGMVISIQRGE

SEQ ID NO: 17392 - protein, 428 aa, Thermococcus celer
MAKEKPHINIVFIGHVDHGKSTTIGRLLFDTANIPENIIKKFEEMGEKGKSFKFAWVMDRLKEERERGITIDVAHTKFETPHRYITIIDAPGHRDFVKNMITGASQADAAVLVVAVTDGVMPQTKEHAFLARTLGINNILVAVNKMDMVNYDEKKFKAVAEQVKKLLMMLGYKNFPIIPISAWEGDNVVKKSDKMPWYNGPTLIEALDQMPEPPKPTDKPLRIPIQDVYSIKGVGTVPVGRVETGVLRVGDVVIFEPASTIFHKPIQGEVKSIEMHHEPMQEALPGDNIGFNVRGVGKNDIKRGDVAGHTNNPPTVVRPKDTFKAQIIVLNHPTAITVGYTPVLHAHTLQVAVRFEQLLAKLDPRTGNIVEENPQFIKTGDSAIVVLRPTKPMVIEPVKEIPQMGRFAIRDMGQTVAAGMVISIQKAE

SEQ ID NO: 17393 - protein, 275 aa, Staphylothermus marinus
HGKSTLVGHILYRLGLVDQKTIQMLEEEAKKRGKESFKFAWLLDKLKEERERGVTIALTYMKFETRRYIFTIIDAPGHRDFVKNMITGASQADAALLVVSARKGEFEAGMSPEGQTREHAILAKTMGINQLIVAVNKMDATEPPWSQKRYEQIKTILGKFLKSLGYDISKVPFIPVSAWTGDNLIERSPNMPWYNGPTLVEALDSLEPPPKPIDKPLRIPIQDVYAISGVGTVPVGRVETGVLRVGDKVVFMPPAKVGEVRSIETHHVRIEKAEP

SEQ ID NO: 17394 - protein, 413 aa, Austrosimulium bancrofti
HVNSGKSTTTGHLIYKCGGIDKRTIEKFEKEAREMGRGSFKYAWVLDKLKAERERGITIDIALWKFETSKYYVTIIDAPGHRDFIKNMITGTSQADCAVLIVAAGTGEFEAGISKNGQTREHALLAFTLGVKQLIVGVNKMDSTEPPFSEARFEEIKKEVSSYIKKIGYNPVCVPFVPISGWHGDNMLEVSSKMPWYKGWKVERKEGNADGKCLIEALDAILPPSRPTDKPLRLPLQDVYKIGGIGTVPVGRVETGVIKPGMVVVFAPVNLTTEVKSVEMHHEALQEASPGDNVGFNVKNVSVKELRRGYVAGDSKSNPPKGAENFTAQVIVLNHPGQISNGYTPVLDCHTAHIACKFSEIKEKVDRRTGKSTEDNPKAIKSGDAAIVILVPSKPLCVESFSEFPPLGRFAVR

SEQ ID NO: 17395 - protein, 377 aa, Ctenolepisma lineata
QEMGKGSFKYAWVLDKLKAERERGITIDIALWKFETNKYYITIIDAPGHRDFIKNMITGTSQADCAVLIVAAGTGEFEAGISKNGQTREHALLAFTLGVKQLIVGVNKMDSTEPPYSEARFEEIKKEVGNYIKKIGYNPAAVAFVPISGWHGDNMLEQSDKMPWFKGWKVERKEGNADGKCLIDALDAILPPSRPTDKPLRLPLQDVYKIGGIGTVPVGRVETGVLKPGMVVTFAPVNLTTEVKSVEMHHEALTEAVPGDNVGFNVKNVSVKELRRGYVCGDSKSNPPKSAADFTAQVIVLNHPGQISNGYTPVLDCHTAHIACKFAEIKEKCDRRTGKTVEEAPKSIKSGDAAIITLVPSKPMCVESFQEFPPLGR

SEQ ID NO: 17396 - protein, 399 aa, Hexamita inflata
NGKSTLTGHLIYKCGGIDQRTLEDYEKKANEIGKGSFKYAWVLDQLKDERERGITINIALWKFETKKFIVTIIDAPGHRDFIKNMITGTSQADVAILVVAAGQGEFEAGISSEGQTREHATLANTLGIKTMIVAVNKMDDPQVNYSEARYTEIKTEMQKTFKQIGFKHWEEFDFVPLSGWTGDNIMEASPKTPWYKGKCLIECIDGLKAPKRPNDKPLRLPIQDVYKINGVGTVPAGRVESGELIPGMMVVFAPAGEKTEVKSVEMHHEQLAKAGPGDNVGFNIKGLSAKDIKKGYVVGDVNNDAPKGCEYFKANVIIMNHPKKINPGYTPVLDCHTSHLAWKFDKFLAKLNSRTFKVEIENPTEAVRGECVLMQIVPTKPLCVESFEQYPALGRFAVR

SEQ ID NO: 17397 - protein, 331 aa, Ostrinia nubilalis
  unsure (1)..(331): unsure at all Xaa locations
KFNNNGHLIYKCGGIDKRTIEKFEKEAQEMGKGSFKYAWVLDKLKAERERGITIDIALWKFETSKFYVTIIDAPGHRDFIKNMITGTSQADCAVLIVAAGTGEFEAGISKNGQTREHALLAFTLGVKQLIVGVNKMDSTEPPYSESRFEEIKKEVSSYIKKIGYNPAAVAFVPISGWHGDNMLEASTKMPWFKGWQIERKEGKAEGKCLIEALDAILPPARPTDKPLRLPLQDVYKIGGIGTVPVXRVETGVLKPGTIVVFAPANLTTEVKSVEMHHEALQEAVPGDNVGFNVKNVSVKELRRGFVAGDSKNNPPKGAADFTAQVIVLNHP

SEQ ID NO: 17398 - protein, 413 aa, Helicoverpa armigera
HVDSGKSTTTGHLIYKCGGIDKRTIEKFEKEAQEMGKGSFKYAWVLDKLKAERERGITIDIALWKFETAKYYVTIIDAPGHRDFIKNMITGTSQADCAVLIVAAGTGEFEAGISKNGQTREHALLAFTLGVKQLIVGVNKMDSTEPPYSESRFEEIKKEVSSYIKKIGYNPAAVAFVPISGWHGDNMLEASTKMPWFKGWNVERKEGKAEGKCLIEALDAILPPARPTDKALRLPLQDVYKIGGIGTVPVGRVETGILKPGTIVVFAPANITTEVKSVDMHHEALQEAVPGDNVGFNVKNVSVKELRRGYVAGDSKNNPPKGAADFTAQVIVLNHPGQISNGYTPVLDCHTAHIACKFSEIKEKVDRRTGKSTEDNPKSIKSGDAAIVNLVPSKPLCVESFQEFPPLGRFAVR

SEQ ID NO: 17399 - protein, 428 aa, Pyrococcus abyssi
MPKEKPHVNIVFIGHVDHGKSTTIGRLLYDTGNIPETIIKKFEEMGEKGKSFKFAWVMDRLKEERERGITIDVAHTKFETPHRYITIIDAPGHRDFVKNMITGASQADAAVLVVAATDGVMPQTKEHAFLARTLGIKHIIVTINKMDMVNYDQKVFEKVKAQVEKLLRTLGYKDFPVIPTSAWNGDNIVKKSDKMPWYNGPTLIEALDQIPEPEKPVDKPLRIPIQDVYSIKGVGTVPVGRVETGKLKVGDVVIFEPASTIFHKPIQGEVKSIEMHHEPLQEALPGDNIGFNVRGVSKNDIKRGDVAGHPDKPPTVVRTKDTFKAQIIVLNHPTAITVGYSPVLHAHTAQVPVRFEQLLAKIDPRTGNITEENPQFIKTGDSAIVVLRPMKPVVLEPVKELPQLGRFAIRDMGMTIAAGMVISIQKGE

SEQ ID NO: 17400 - protein, 403 aa, Mucor mucedo
GKSTTTGHLIYKCGGIDKRTIEKFEKEAAELGKGSFKYAWVLDKLKAERERGITIDIALWKFETPKYNVTVIDAPGHRDFIKNMITGTSQADCAILIIAGGTGEFEAGISKDGQTREHALLAFTLGVRQLIVAINKMDTTKWSEARYNEIVKEVSSFIKKIGFNPKSVPFVPISGWHGDNMLEESVNMGWFKGWNKETKAGSKTGKTLLEAIDAIDPPSRPSDKPLRLPLQDVYKIGGIGTVPVGRVETGTIKAGMVVNFAPAAVTTEVKSVEMHHETLTEGLPGDNVGFNVKNVSVKDIRRGNVCSDSKNDPAKEAGSFLAQVIILNHPGQISNGYSPVLDCHTAHIACKFSELVEKIDRRSGKKMEDAPKFVKSGDSAIVKMIPSKPMCVEAYTDYPPLGR

SEQ ID NO: 17401 - protein, 414 aa, Amylomyces rouxii
GKSTTTGHLIYKCGGIDKRTIEKFEKEAAELGKGSFKYAWVHDKLKAERERGITIDIALWKFETPKYQITVIDAPGHRDFIKNMITGTSQADCAILIIAGGTGEFEAGISKDGQTREHALLAFTLGVRQLIVAVNKMDTTKWSEARFNEIVKEVSSFIKKIGYNPKSVPFVPISGWHGDNMLDESTNMPWYKGWNKETKAGAKSGKTLLDAIDNIDPPTRPVDKPLRLPLQDVYKIGGIGTVPVGRVETGVIKAGMVVTFAPAAVTTEVKSVEMHHETLSEGLPGDNVGFNVKNVSVKDIRRGNVCSDSKNDPAKEAGSFTAQVIILNHPGQIGAGYAPVLDCHTAHIACKFAELIEKIDRRSGKSLEATPKFVKSGDSAIVKMIPSKPMCVEAYTDYPPLGRLAVRDMRQTVA

SEQ ID NO: 17402 - protein, 416 aa, Mucor circinelloides f. lusitanicus
DSGKSTTTGHLIYKCGGIDKRTIEKFEKEAAELGKGSFKYAWVLDKLKAERERGITIDIALWKFETPKYNVTVIDAPGHRDFIKNMITGTSQADCAILIIAGGTGEFEAGISKDGQTREHALLAFTLGVRQLIVAINKMDTTKWSQDRYNEIVKEVSGFIKKIGFNPKSVPFVPISGWHGDNMLDESTNMPWFKGWNKETKAGSKTGKTLLEAIDAIEPPVRPSDKPLRLPLQDVYKIGGIGTVPVGRVETGTIKAGMVVNFAPAAVTTEVKSVEMHHETLTEGLPGDNVGFNVKNVSVKDIRRGNVCSDSKNDPAKESASFTAQVIILNHPGQISAGYAPVLDCHTAHIACKFSELIEKIDRRSGKKMEDSPKFVKSGDSAIVKMVPSKPMCVEAYTDYPPLGRFAVRDMRQTVA

SEQ ID NO: 17403 - protein, 385 aa, Bombus hypnorum
KFEKEAQEMGKGSFKYAWVLDKLKAERERGITIDIALWKFETAKYYVTIIDAPGHRDFIKNMITGTSQADCAVLIVAAGIGEFEAGISKNGQTREHALLAFTLGVKQLIVGVNKMDMTDPPYSEARFEEIKKEVSSYIKKIGYNTASVAFVPISGWHGDNMLEPSPNTPWYKGWKVERKDGNADGKTLIEALDAILPPSRPTDKALRLPLQDVYKIGGIGTVPVGRVETGILKPGMLVTFAPAALTTEVKSVEMHHEALTEALPGDNVGFNVKNISVKELRRGYVAGDSKNQPPRGAADFTAQVIVLNHPGQISNGYTPVLDCHTAHIACKFAEIKEKCDRRTGKTTEENPKSIKSGDAAIVMLQPTKPMCVEAFQEFPPLGRFA

SEQ ID NO: 17404 - protein, 385 aa, Bombus lapidarius
KFEKEAQEMGKGSFKYAWVLDKLKAERERGITIDIALWKFETAKYYETIIDAPGHRDFIKNMITGTSQADCAVLIVAAGIGEFEAGISKNGQTREHALLAFTLGVKQLIVGVNKMDMTDPPYSEARFEEIKKEVSSYIKKIGYNTASVAFVPISGWHGDNMLEPSPNTPWYKGWKVERKDGNADGKTLIEALDAILPPSRPTDKALRLPLQDVYKIGGIGTVPVGRVETGILKPGMLVTFAPAALTTEVKSVEMHHEALTEALPGDNVGFNVKNISVKELRRGYVAGDSKNQPPRGAADFTAQVIVLNHPGQISNGYTPVLDCHTAHIACKFAEIKEKCDRRTGKTTEENPKSIKSGDAAIVMLQPTKPMCVEAFQEFPPLGRFA

SEQ ID NO: 17405 - protein, 385 aa, Bombus lucorum
KFEKEAQEMGKGSFKYAWVLDKLKAERERGITIDIALWKFETAKYYVTIIDAPGHRDFIKNMITGTSQADCAVLIVAAGIGEFEAGISKNGQTREHALLAFTLGVKQLIVGVNKMDMTDPPYSEARFEEIKKEVSSYIKKIGYNTASVAFVPISGWHGDNMLEPSPNTPWYKGWKVERKDSNADGKTLIEALDAILPPSRPTDKALRLPLQDVYKIGGIGTVPVGRVETGILKPGMLVTFAPAALTTEVKSVEMHHEALTEALPGDNVGFNVKNISVKELRRGYVAGDSKNQPPRGAADFTAQVIVLNHPGQISNGYTPVLDCHTAHIACKFAEIKEKCDRRTGKTTEENPKSIKSGDAAIVMLQPTKPMCVEAFQEFPPLGRFA

SEQ ID NO: 17406 - protein, 385 aa, Bombus bohemicus
KFEKEAQEMGKGSFKYAWVLDKLKAERERGITIDIALWKFETAKYYVTIIDAPGHRDFIKNMITGTSQADCAVLIVAAGIGEFEAGISKNGQTREHALLAFTLGVKQLIVGVNKMDMTDPPYSEARFEEIKKEVSSYIKKIGYNTASVAFVPISGWHGDNMLEPSPNTPWYKGWKVERKDGNADGKTLIEALDAILPPSRPTDKALRLPLQDVYKIGGIGTVPVGRVETGILKPGMLVTFAPAALTTEVKSVEMHHEALTEALPGDNVGFNVKNISVKELRRGYVAGDSKNQPPRGAADFTAQVIVLNHPGQISNGYTPVLDCHTAHIACKFAEIKEKCDRRTGKTTEENPKSIKSGDAAIVMLQPTKAMCVEAFQEFPPLGRFA

SEQ ID NO: 17407 - protein, 445 aa, Euglena gracilis
MGKEKVHISLVVIGHVDSGKSTTTGHLIYKCGGIDKRTIEKFEKEASEMGKGSFKYAWVLDKLKAERERCITIDIALWKFETAKSVFTIIDAPGHRDFIKNMITGTSQADAAVLVIDSTTGGFEAGISKDGQTREHALLAYTLGVKQMIVATNKFDDKTVKYSQARYEEIKKEVSGYLKKVGYNPEKVPFIPISGWNGDNMIEASENMGWYKGLTLIGALDNLEPPKRPSDKPLRLPLQDVYKIGGIGTVPVGRVETGVLKPGDVVTFAPNNLTTEVKSVEMHHEALTEAVPGDNVGFNVKNVSVKDIRRGYVASNAKNDPAKEAADFTAQVIILNHPGQIGNGYAPVLDCHTCHIACKFATIQTKIDRRSGKELEAEPKFIKSGDAAIVLMKPQKPMCVESFTDYPPLGVSCGDMRQTVAVGVIKSVNKKENTGKVTKAAQKKK

SEQ ID NO: 17408 - protein, 415 aa, Beroe cucumis
HLIYKCGGVDERTIEKFKKEAQEMGKGSFCYAWVLDKLKSERERGITIDIALMKFETDKYDVTIIDAPGHRDFIKNMITGTSQADAAVMIVAAGTGEFEAGYAKNGQTREHLLLAFTLGVKEVIIAINKMDTTTPPYSEDRYKEIKGEVSNYLKKIGYKVAKIPFMPISGFHGDNMVHWDPNSGEPQPPNNMKWFTGEVVGDDKKKSKALKTLTDCLDNVAEPTRPTDKPLRLPLQDVYKGIGTVPVGRVETGIIKPAMVVTFGPIGLTTEVKSVEMHHESLPEAVPGDNVGFNVKNVAVKEIKRGFVASDSKNDPCKETQSFEAQVIIMNHPGKISAGYTPVLDCHTAHIACKFTDLNAKMDKRSGKVLEENPKDIKTGDASMCILKPSKPMVVETFKEYAPLGRFAVRDMRQT

SEQ ID NO: 17409 - protein, 401 aa, Ephydatia fluviatilis
LIYKCGGIDKRTIEKYEKEAQDMGKGSFKYAWVMDKLKAERERGITIDLALWKFETTKFYVTVIDAPGHRDFIKNMITGTSQADCALLIVAASTGEFEAGISKNGQTREHALLAYTLGVKQLIVGVNKIDNTEPPYSEARFTEITKEVSDYIKKIGYNPKSVPFLPISGWNGDNMLERSTNLPWYKGFQIERKEGNASGYTLFDALDCIVPPARPTDKPLRLPLQDVQIGGIGTVPVGRVETGILKPGMIVTIAPAGITTEVKSVEMHHEALTEALPGDNVGFNVKNLAVKDLKRGFVAGDSKNDPPKEAKSFNAQVIIINHPGEIHAGYSPVLDCHTAHIACKFAELIEKCDRRSGKKLEDAPKSVKTGDAAIVTLIPSKPMCVESFSDFPPLGRFAVRD

SEQ ID NO: 17410 - protein, 444 aa, Picea abies
EKTHINIVVIGHVDSGKSTTTGHLIYKLGGIDKRVIERFEKEAAEMNKRSFKYAWVLDKHKAERERGITIDIALWKFETNKYYCTVIDAPGHRDFIKNMITGTSQADCAVLIIDSTTGGFEAGISKDGQTREHALLAFTLGVKQMICCCNKMDATTPKYSKARYDEIVKEVSSYLKRVGYNPDKIPFVPISGFEGDNMIERSTNLDWYKGPTLLEALDQVSEPKRPTDKPLRLPLQDVYKIGGIGTVPVGRVETGIIKPGTIVTFGPTGLTTEVKSVEMHHEALQEAYPGDNVGFNVKNVAVKDLKRGYVASDSKNDPAKEAANFTAQVIIMNHPGQIGNGYAPVLDCHTCHIAVKFSEIMTKVDRRSGKELEKEPKFLKNGDAGFVKMIPTKPMVVETFAEYPPLGRFAVRDMRQTVAVGVIKAVEKKDPTGAKVTKAAAKKK

SEQ ID NO: 17411 - protein, 406 aa, Spathidium sp.
VDSGKSTSTGHLIYKCGGIDERTIEKFEKEAKQIGKESFKYAWVLDKLKAERERGITIDIALWKFESQKYSFTIIDAPGHRDFIKNMITGTSQADVAILVISAGHGEFEAGIGKDGQTREHALLAYTMGIKQVIVAINKMDAISYNEERFTDIKKEVIDYLKKLGFQEKNVNVVAYSGFVGDNLIERSDKMPWYKGDTILEALDKVEPPVRPVEKPLRLPLQDVYKITGVGTVPVGRVETGVIKPGTLVTFAPVNITTECKTVEMHHQQLEEAIPGDNVGFNVKNISIKDIRRGNVVGDSKQDPPKEAVSFNAQVIVLNHPNKIQAGYCPVLDCHTSHIACKFEKSLIKIDRRSGKEIESEPKEIKNQEAAIVLMVPQKSMVCETFAEYPPLGRFAVRDMKQTVAV

SEQ ID NO: 17412 - protein, 406 aa, Spathidium sp.
VDSGKSTSTGHLIYKCGGIDERTIEKFEKEAKQIGKESFKYAGLLDILKAERARGITIDIALWKFESQKYSFTIIDAPGHRDFIKNMITGTSQADVAILVISAGQGEFEAGIGKDGQTREHALLAYTMGIKQVVVAINKMDAVQYNEERFTDIKKEVIDYLKKMGSKKKMLMSLPISGFMGDNLIEKSDKMPWYKGDTILEALDRVERPKRPVAKPLRLPLQDVYKITGVGTVPVGRVETGVIKPGTLVTFAPVNITTECKTVEMHHQQLEEAIPGDNVGFNVKNISIKDIRRGNVVGDSKNDPPKEAVSFNAQVIVLNHPNKIQAGYCPVLDCHTSHIACKFEKLLIKIDRRSGKEIESEPKEIKNQEAAIVQMVPQKIMVCETFAGYPPLGRFAVRDMKQTVAV

SEQ ID NO: 17413 - protein, 426 aa, Parasitella parasitica
VVVIGHVDSGKSTTTGHLIYKCGGIDKRTIEKFEKEAAELGKGSFKYAWVLDKLKAERERGITIDIALWKFETPKFMVTVIDAPGHRDFIKNMITGTSQADCAILIIAGGTGEFEAGISKDGQTREHALLAFTLGVRQLIVAINKMDTTKWSENRYTEIVKEVSNFIKKIGFNPKAVPFVPISGWHGDNMLDESKNMPWFKGWNKETKAGAKTGKTLLEAIDAIEPPVRPSDKPLRLPLQDVYKIGGIGTVPVGRVETGVIKAGMVVNFAPANVTTEVKSVEMHHETIPEGLPGDNVGFNVKNVSVKDIRRGNVCSDTKNDPAKESGSFTAQVIILNHPGQISAGYAPVLDCHTAHIACKFDELIEKIDRRSGKKMEDSPKFVKSGDSAIVKMIPSKPMCVEAYTDYPPLGRFAVRDMRQTVAVGV

SEQ ID NO: 17414 - protein, 376 aa, Paralvinella hessleri
QEMGKGSFKYAWVLDKLKAERERGITIDIALWKFETKNYYVTVIDAPGHRDFIKNMITGTSQADCAVLIVAAGVGEFEAGISKNGQTREHALLAFTLGVKQLVVGVNKMDSTEPPYSESRYFEIKKEVSAYIKKIGYNPDTVPFVPISGWHGDNMIEASSNMPWFKNWEVKKAKDKKTVTGTTLLEALDAIDAPSRPTDKPLRLPLQDVYKIGGIGTVPVGRVETGVLKPGMVVTFAPVNITTEVKSVEMHHNALEKAEPGDNVGFNVKNVSVKDIRRGNVCGDSKNDPPKAIEKFKAQVIILNHPGQIQAGYAPVVDCHTAHIACKKAELLKKIDRRSGKELEDNPPHVKSGDAAIVEMVPSKPMCCEAFADYPP

SEQ ID NO: 17415 - protein, 374 aa, Sternaspis scutata
QEMGKGSFKYAWVLDKLKAERERGITIDIALWKFETNKYYITIIDAPGHRDFIKNMITGTSQADCAVLIVAAGVGEFESGISKNGQTREHALLAYTLGVKQMIIGVNKMDNTEPPYSEDRFKEIKKEVSAYIKKIGYNPDTVPFVPISGWVGDNMLENSSNMTWFKTWSKKSKSKEVTGQTLFDALDSVDPPARPTDKPLRLPLQDVYKIGGIGTVPVGRVETGTLKPGMVVTFAPVNLTTEVKSVEMHHQALEAAEPGDNVGFNVKNVSVKDIRRGYVAGDSKNDAPKEAQEFKAQVIILNHPGQINAGYAPVLDCHTAHIACKFRELVEKIDRRSGKSLETSPSSIKSGEAAIVNMVPQKPMCVETFNEYAP

SEQ ID NO: 17416 - protein, 804 aa, Arabidopsis thaliana
MSGVWVFNNGVIRLVENPNQSGGVSTQSHGRRNVLVYLPTGEAVSSYSSLEQILRSLGWERYFSGDSDLIQYHKRSSIDLISLPRDFSKFNSVYMYDIVVKNPNSFHKQTMPRKGLSNFDDYDDGFDDDDDAFDYDYDVDIDEHEEEAAAEPKEEIAKTQGLWRCAICTYDNVETMFVCDICGVLRHPVAGNQSINKNTAVRVVSLFAIVVLQRRYSDSSFSTYVAPFKFDAPSPDDLVSNGLTSSKTGPKGSGDASMRQKEKQDSVEQKPLKKGGDSSETSSRGRHDKLDDKGGAGGIKSGKSLPKAKADMSNETSSSSKYMETSESLTGTMNKMSLIGETENSSDIKIRGPKSQSKHKPEEWMLLDKESDALSQLNLAIVGHVDSGKSTLSGRLLHLLGRISQKQMHKYEKEAKLQGKGSFAYAWALDESAEERERGITMTVAVAYFNSKRHHVVLLDSPGHKDFVPNMIAGATQADAAILVIDASVGAFEAGFDNLKGQTREHARVLRGFGVEQVIVAINKMDIVGYSKERFDLIKQHVGSFLQSCRFKDSSLTWIPLSAMENQNLVAAPSDNRLSSWYQGPCLLDAVDSVKSPDRDVSKPLLMPICDAVRSTSQGQVSACGKLEAGAVRPGSKVMVMPSGDQGTIRSLERDSQACTIARAGDNVALALQGIDANQVMAGDVLCHPDFPVSVATHLELMVLVLEGATPILLGSQLEFHVHHAKEAATVVKLVAMLDPKTGQPTKKSPRCLTAKQSAMLEVSLQNPVCVETFSESRALGRVFLRSSGRTVAMGKVTRIIQDS

SEQ ID NO: 17417 - protein, 413 aa, Simulium sirbanum
HVHSGKSTTTGHLIYKCGGIDKRTIEKFEKEAQEMGKGSFKYAWVLDKLKAERERGITIDIALWKFETAKYYVTIIDAPGHRDFIKNMITGTSQADCAVLIVAAGTGEFEAGISKNGQTREHALLAFTLGVKQLIVGVNKMDSTEPPFSESRFEEIKKEVSSYIKKIGYNPAAVAFVPISGWHGDNMLEVSSKMPWYKGWKVERKEGNVDGKCLIEALDAILPPSRPTDKALRLPLQDVYKIGGIGTVPVGRVETGVIKPGMVVVFAPVNLTTEVKSVEMHHEALQEAGPGDNVGFNVKNVSVKELRRGYVAGDSKSNPPKGAENFTAQVIVLNHPGQISNGYTPVLDCHTAHIACKFSEIKEKVDRRSGKSTEDNPKAIKSGDAAIVILVPSKPLCVESFSEFPPLGRFAVR

SEQ ID NO: 17418 - protein, 447 aa, Malus x domestica
MGKEKFHINIVVIGHVDSGKSTTTGHLIYKLGGIDKRVIERFEKEAAEMNKRSFKYAWVLDKLKAERERGITIDIALWKFETTKYYCTVIDAPGHRDFIKNMITGTSQADCAILIIDSTTGGFEAGISKDGQTREHALLAFTLGVRQMICCCNKMDATTPKYSRARYDEIVKEVSSYLKKVGYNPDKIPFVPISGFEGDNMIERSTNLDWYKGPTLLEALDQINEPKRPSDKPLRLPLQDVYKIGGIGTVPVGRVETGVIKPGMVVTFGPTGLTTEVKSVEMHHEAMQEALPGDNVGFNVKNVAVKDLKRGYVASNSKDDPAKEAANFIAQVIIMNHPGQIGQGYAPVLDCHTSHIAVKFAELVTKIDRRSGKELEKEPKFLKNGDAGFVKMLPTKPMVVETFSEYPPLGRFAVRDMRQTVAVGVIKSVEKKDPTGAKITKAAAKKK

SEQ ID NO: 17419 - protein, 413 aa, Actias selene
HVDSGKSTTTGHLIYKCGGIDKRTIEKFEKEAQEMGKGSFKYAWVLDKLKAERERGITIDIALWKFETSRYYVTIIDAPGHRDFIKNMITGTSQADCAVLIVAAGTGEFEAGISKNGQTREHALLAFTLGVKQLIVGVNKMDSTEPPYSESRFEEIKKEVSSYIKKIGYNPAAVAFVPISGWHGDNMLEPSTKMPWFKGWLVERKEGKAEGKCLIEALDAILPPARPTDKALRLPLQDVYKIGGIGTVPVGRVETGILKPGTIVVFAPANITTEVKSVEMHHEALQEAVPGDNVGFNVKNVSVKELRRGYVAGDSKNNPPKGAADFTAQVIVLNHPGQISNGYTPVLDCHTAHIACKFAEIKEKVDRRTGKSTEDNPKSIKSGDAAIVNLVPSKPLCVESFQEFPPLGRFAVR

SEQ ID NO: 17420 - protein, 413 aa, Saturnia japonica
  unsure (1)..(413): unsure at all Xaa locations
HVDSGKSTTTGHLIYKCGGIDKRTIEKFEKEAQEMGKGSFKYAWVLDKLKAERERGITIDIALWKFETSRYYVTIIDAPGHRDFIKNMITGTSQADCAVLIVAAGTGEFEAGISKNGQTREHALLAFTLGVKQLIVGVNKMDSTEPPYSEPRFEEIKKEVSSYIKKIGYNPAAVAFVPISGWHGDNMLEPSTKMPWFXGWLVERKEGKAEGKCLIEALDAILPPARPTDKALRLPLQDVYKIGGIGTVPVGRVETGILKPGTIVVFAPANITTEVKSVEMHHEALQEAVPGDNVGFNVKNVSVKELRRGYVAGDSKNNPPKGAADFTAQVIVLNHPGQISNGYTPVLDCHTAHIACKFAEIKEKVDRRTGKSTEDNPKSIKSGDAAIVNLVPSKPLCVESFQEFPPLGRFAVR

SEQ ID NO: 17421 - protein, 413 aa, Rhodinia fugax
HVDSGKSTTTGHLIYKCGGIDKRTIEKFEKEAQEMGKGSFKYAWVLDKLKAERERGITIDIALWKFETAKYYVTIIDAPGHRDFIKNMITGTSQADCAVLIVAAGTGEFEAGISKNGQTREHALLAFTLGVKQLIVGVNKMDSTEPPYSEPRFEEIKKEVSSYIKKIGYNPAAVAFVPISGWHGDNMLEPSTKMPWFKGWMVERKEGKAEGKCLIEALDAILPPARPTDKALRLPLQDVYKIGGIGTVPVGRVETGILKPGTIVVFAPANITTEVKSVEMHHEALQEAVPGDNVGFNVKNVSVKELRRGYVAGDSKNNPPKGAADFTAQVIVLNHPGQISNGYTPVLDCHTAHIACKFAEIKEKVDRRTGKSTEDNPKSIKSGDAAIVVLVPSKPLCVESFQEFPPLGRFAVR

SEQ ID NO: 17422 - protein, 413 aa, Heliothis subflexa
HVDSGKSTTTGHLIYKCGGIDKRTIEKFEKEAQEMGKGSFKYAWVLDKLKAERERGITIDIALWKFETAKYYVTIIDGPGHRDFIKNMITGTSQADCAVLIVAAGTGEFEAGISKNGQTREHALLAFTLGVKQLIVGVNKMDSTEPPYSESRFEEIKKEVSSYIKKIGYNPAAVAFVPISGWHGDNMLEASTKMPWFKGWNVERKEGKAEGKCLIEALDAILPPARPTDKALRLPLQDVYKIGGIGTVPVGRVETGILKPGTIVVFAPANITTEVKSVEMHHEALQEAVPGDNVGFNVKNVSVKELRRGYVAGDSKNNPPKGAADFTAQVIVLNHPGQISNGYTPVLDCHTAHIACKFAEIKEKVDRRTGKSTEDNPKSIKSGDAAIVNLVPSKPLCVESFQEFPPLGRFAVR

SEQ ID NO: 17423 - protein, 413 aa, Basilodes chrysopis
HVDSGKSTTTGHLIYKCGGIDKRTIEKFEKEAQEMGKGSFKYAWVLDKLKAERERGITIDIALWKFETAKYYVTIIDAPGHRDFIKNMITGTSQADCAVLIVAAGTGEFEAGISKNGQTREHALLAFTLGVKQLIVGVNKMDSTEPPYSESRFEEIKKEVSSYIKKIGYNPAAVAFVPISGWHGDNMLEPSTKMPWFKGWMVERKEGKAEGKCLIEALDAILPPARPTDKPLRLPLQDVYKIGGIGTVPVGRVETGVLKPGTIVVFAPANITTEVKSVEMHHEALQEAVPGDNVGFNVKNVSVKELRRGYVAGDSKNNPPKGAADFTAQVIVLNHPGQISNGYTPVLDCHTAHIACKFAEIKEKVDRRTGKSTEDNPKSIKSGDAAIVNLVPSKPLCVESFQEFPPLGRFAVR

SEQ ID NO: 17424 - protein, 413 aa, Eutricopis nexilis
HVDSGKSTTTGHLIYKCGGIDKRTIEKFEKEAQEMGKGSFKYAWVLDKLKAERERGITIDIALWKFETAKYYVTIIDAPGHRDFIKNMITGTSQADCAVLIVAAGTGEFEAGISKNGQTREHALLAFTLGVKQLIVGVNKMDSTEPPYSESRFEEIKKEVSSYIKKIGYNPAAVAFVPISGWHGDNMLEASTKMPWFKGWAVERKEGKAEGKCLIEALDAILPPARPTDKALRLPLQDVYKIGGIGTVPVGRVETGILKPGTIVVFAPANITTEVKSVEMHHEALQEAVPGDNVGFNVNNVSVKELRRGYVAGDSKNNPPKGAADFTAQVIVLNHPGQISNGYTPVLDCHTAHIACKFAEIKEKVDRRTGKSTEENPKSIKSGDAAIVNLVPSKPLCVESFQEFPPLGRFAVR

SEQ ID NO: 17425 - protein, 413 aa, Heliothodes diminutivus
HVDSGKSTTTGHLIYKCGGIDKRTIEKFEKEAQEMGKGSFKYAWVLDKLKAERERGITIDIALWKFETAKYYVTIIDAPGHRDFIKNMITGTSQADCAVLIVAAGTGEFEAGISKNGQTREHALLAFTLGVKQLIVGVNKMDSTEPPYSESRFEEIKKEVSSYIKKIGYNPAAVAFVPISGWHGDNMLEPSTKMPWFKGWAVERKEGKAEGKCLIEALDAILPPARPTDRALRLPLQDVYKIGGIGTVPVGRVETGILKPGTIVVFAPANITTEVKSVEMHHEALQEALPGDNVGFNVKNVSVKELRRGYVAGDSKNNPPKGAADFTAQVIVLNHPGQISNGYTPVLDCHTAHIACKFAEIKEKVDRRTGKSTEENPKSIKSGDAAIVNLVPSKPLCVESFQEFPPLGRFAVR

SEQ ID NO: 17426 - protein, 413 aa, Heliolonche pictipennis
HVDSGKSTTTGHLIYKCGGIDKRTIEKFEKEAQEMGKGSFKYAWVLDKLKAERERGITIDIALWKFETAKYYVTIIDAPGHRDFIKNMITGTSQADCAVLIVAAGTGEFEAGISKNGQTREHALLAFTLGVKQLIVGVNKMDSTEPPYSESRFEEIKKEVSSYIKKIGYNPAAVAFVPISGWHGDNMLEASTKMPWFKGWNVERKEGKAEGKCLIEALDAILPPARPTDKALRLPLQDVYKIGGIGTVPVGRVETGILKPGTIVVFAPANITTEVKSVEMHHEALQEAVPGDNVGFNVKNVSVKELRRGYVAGDSKNNPPKGAADFTAQVIVLNHPGSISNGYTPVLDCHTAHIACKFAEIKEKVDRRTGKSTEDNPKSIKSGDAAIVNLVPSKPLCVESFQEFPPLGRFAVR

SEQ ID NO: 17427 - protein, 413 aa, Pyrrhia exprimens
HVDSGKSTTTGHLIYKCGGIDKRTIEKFEKEAQEMGKGSFKYAWVLDKLKAERERGITIDIALWKFETAKYYVTIIDAPGHRDFIKNMITGTSQADCAVLIVAAGTGEFEAGISKNGQTREHALLAFTLGVKQLIVGVNKMDSTEPPYSESRFEEIKKEVSSYIKKIGYNPAAVAFVPISGWHGDNMLEASTKMPWFKGWAVERKEGKAEGKCLIEALDAILPPARPTDKALRLPLQDVYKIGGIGTVPVGRVETGILKPGTIVVFAPANITTEVKSVEMHHEALQEAVPGDNVGFNVKNVSVKELRRGYVAGDSKNNPPKGAADFTAQVIVLNHPGQISNGYTPVLDCHTAHIACKFAEIKEKVDRRTGKSTEDNPKSIKSGDAAIVNLVPSKPLCVESFQEFPPLGRFAVR

SEQ ID NO: 17428 - protein, 413 aa, Schinia arcigera
HVDSGKSTTTGHLIYKWGGIDKRTMEKFEKEAQEMGKGSFKYAWVLDKLKAERERGITIDIALWKFETAKYYVTIIDAPGHRDFIKNMITGTSQADCAVLIVAAGTGEFEAGISKNGQTREHALLAFTLGVKQLIVGVNKMDSTEPPYSESRFEEIKKEVSSYIKKIGYNPAAVAFVPISGWHGDNMLEASTKMPWFKGWNVERKEGKAEGKCLIEALDAILPPARPTDKALRLPLQDVYKIGGIGTVPVGRVETGILKPGTIVVFAPANITTEVKSVEMHHEALQEAVPGDNVGFNVKNVSVKELRRGYVAGDSKNNPPKGAADFTAQVIVLNHPGSISNGYTPVLDCHTAHIACKFAEIKEKVDRRTGKSTEDNPKSIKSGDAAIVNLVPSKPLCVESFQEFPPLGRFAVR

SEQ ID NO: 17429 - protein, 423 aa, Glycine max
  unsure (1)..(423): unsure at all Xaa locations
XVDSGKSTLSGRLLHLLGRISQKEMHKYEKEAKLQGKGSFAYAWALDESXXXXXXXXXMTVAVAYFDTKRYHVVVLDSPGHKDFVPNMISGATQADAAILVIDASLGSFEAGMDGSKGQTREHAQLIRSFGVDRVIVAVNKMDAVVYSKDRFDFIRQQLGVFLHSCGFKDSSLSWIPMSAMENQNLVASPSDALLKNWYGGPYLLDAIDSLQPPTREFSKPLLMPVCDVIKSTTLGQVSASGKLEAGALRSGSKVLVMPSAVVGTVRSLERDSNACTVARAGDNVALMLQGVXDGNHVMAGDVLCHPDFPVAVAKHLELKVLVLDGASPILVGTQLEFHIHHAKEPGRVSRILSVLDPKTGKVTKKSPRCLTAKQSAVIEVILNETVCVVEFSSCKALGRVSLRSMGRTIAVGVVTRIIEEQG

SEQ ID NO: 17430 - protein, 447 aa, Pisum sativum
MGKEKVHINIVVIGHVDSGKSTTTVHVIYKLGGIDKRVIERFEKEADEMNKRSFKYAWLLDKLKAERERGITIDIALLKFETTKYYSTVMDAPGHRDFIKNMITGTSQADCAVLIIDSTTGGFEAGISKDGQTREHALLAFTLGVKQMICCCNKMDATTPKYSKGRYEEIVKEVSSYLKEVGYNPDKIPFVPISGFEGDNMIERSTNLDWYKGPTLLDALDNINEPKRPSDKPLRLPLQDVYKIGGIGTVPVGRVETGVVKPGMLVTFAPTGLTTEVKSVEMHHEALTEALPGDNVRFNVKNVAVKDLKHGLVASNSKDDPAKDAANFTSQVIIMNHPGQIGNGYAPVLDCHTSHIAVKFAELITKIDRRSGKEIEKEPKFLKNGDAGMVKMIPTKPMVVETFAEYPPLGRFAVRDMRQTVAVGVIKSVEKKDPTGAKVTKAAAKKK

SEQ ID NO: 17431 - protein, 413 aa, Hyphantria cunea
HVDSGKSTTTGHLIYKCGGIDKRTIEKFEKEAQEMGKGSFKYAWVLDKLKAERERGITIDIALWKFETSKYYVTIIDAPGHRDFIKNMITGTSQADCPVLIVAAGTGEFEAGISKNGQTREHALLAFTLGVKQLIVGVNKMDSTEPPYSESRFEEIKKEVSSYIKKIGYNPAAVAFVPISGWHGDNMLEPSTKMPWFKGWQVERKEGKADGKCLIEALDAILPPARPTDKALRLPLQDVYKIGGIGTVPVGRVETGILKPGTIVVFAPANITTEVKSVEMHHEALQEAVPGDNVGFNVKNVSVKDLRRGYVAGDSKNNPPKGAADFTAQVIVLNHPGQISNGYTPVLDCHTAHIACKFAEIKEKVDRRTGKSTEDNPKSIKSGDAAIVNLVPSKPLCVESFQEFPPLGRFAVR

SEQ ID NO: 17432 - protein, 275 aa, Spironucleus muris
NGKSTLTGHLIFKCGGIDKRTIEEYEKKAAEIGKGSFKYAWVLDQLKDERERGITINIALWKFETKNYIVTIIDAPGHRDFIKNMITGTAQADVAILVIAAGQGEFEAGISKDGTAREHATLANTLGIRTIICAINKMDSIKYDQKRYTEIMEEMKKLLKSIGYGKKAEEFHYIPVSGWIGDNIMEKSENMPWYTGKCLIEAIDELKPPKRPTDKPLRLPLQDVYKISGIGTVPAGRVESGVLKPGQIVVFAPSDESGEVKSVEMHHESLPQAVP

SEQ ID NO: 17433 - protein, 449 aa, Manihot esculenta
MGKEKVHINIVVIGHVDSGKSTTTGHLIYKLGGIDKRVIERFEKEAAEMNKRSFKYAWVLDKLKAERERGITIDIALWKFETTKYYCTVIDAPGHRDFIKNMITGTSQADCAVLIIDSTTGGFEAGISKDGQTREHALLAFTLGVKQMICCCNKMDATTPKYSKARYDEIVKEVSSYLKKVGYNPDKIPFVPISGFEGDNMIERSTNLDWYKGPTLLEALDQIQEPKRPSDKPLRLPLQDVYKIGGIGTVPVGRVETGILKPGMVVTFGPTGLTTEVKSVEMHHEALQEALPGDNVGFNVKNVAVKDLKRGIVASNSKDDPAKEAANFTSQVIIMNHPGQIGNGYAPVLDCHTSHIAVKFAEILTKIDRRSGKELEKEPKFLKNGDAGFVKMIPTKPMVVETFSAYPPLGRFAVRDMRQTVAVGVIKSVEKKDPSGAKVTKSAAKKGGK

SEQ ID NO: 17434 - protein, 826 aa, Oryza sativa (japonica cultivar-group); identical to SEQ ID NO: 500

SEQ ID NO: 17435 - protein, 331 aa, Hylephila phyleus
KSTTTGHLIYKCGGIDKRTIEKFEKEAQEMGKGSFKYAWVLDKLKAERERGITIDIALWKFETSKYYVTIIDAPGHRDFIKNMITGTSQADCAVLIVAAGTGEFEAGISKNGQTREHALLAFTLGVKQLIVGVNKMDSTEPPYSESRFEEIKKEVSSYIKKIGYNPAAVAFVPISGWHGDNMLEPSTKMPWFKGWNVERKEGKAEGKCLIEALDAILPPARPTDKALRLPLQDVYKIGGIGTVPVGRVETGILKPGTIVVFAPANITTEVKSVEMHHEALQEAVPGDNVGFNVKNVSVKELRRGYVAGDSKNNPPKGAADFTAQVIVLNHP

SEQ ID NO: 17436 - protein, 448 aa, Lycopersicon esculentum
MGKEKIHISIVVIGHVDSGKSTTTGHLIYKLGGIDKRVIERFEKEAAEMNKRSFKYAWVLDKLKAERERGITIDIALWKFETTKYYCTVIDAPGHRDFIKNMITGTSQADCAVLIIDSTTGGFEAGISKDGQTREHALLAFTLGVKQMICCCNKMDATTPKYSKARYDEIVKEVSSYLKKVGYNPDKIPFVPISGFEGDNMIERSTNLDWYKGPTLLEALDQINEPKRPSDKPLRLPLQDVYKIGGIGTVPVGRVETGVIKPGMVVTFGPTGLTTEVKSVEMHHEALQEALPGDNVGFNVKNVAVKDLKRGYVASNSKDDPAKGAASFTAQVIIMNHPGQIGNGYAPVLDCHTSHIAVKFAEILTKIDRRSGKELEKEPKFLKNGDAGMVKMIPTKPMVVETFAEYPPLGRFAVRDMRQTVAVGVVKNVDKKDPTGAKVTKAAQKKGK

SEQ ID NO: 17437 - protein, 366 aa, Macronema zebratum
QEMGKGSFKYAWVLDKLKAERERGITIDIALWKFETSKYYVTIIDAPGHRDFIKNMITGTSQADCAVLIVAAGTGEFEAGISKNGQTREHALLAFTLGVKQLIVGVNKMDSTEPNYSESRFEEIKKEVSSYIKKIGYNPAAVAFVPISGWHGDNMLEPSSKMPWFKGWQVERKEGKAEGKCLIEALDAILPPARPTDKPLRLPLQDVYKIGGIGTVPVGRVETGVLKPGTIVVFAPANLTTEVKSVEMHHEALQEAVPGDNVGFNVKNVSVKELRRGYVAGDSKSNPPKGASDFNAQVIVLNHPGQISNGYTPVLDCHTAHIACKFAEIQQKVDRRTGKSTEDNPKSIKSGDAAIVNLVPSKPMCV

SEQ ID NO: 17438 - protein, 363 aa, Apterobittacus apterus
ERERGITIDIALWKFETAKYYVTIIDAPGHRDFIKNMITGTSQADCAVLIVAAGTGEFEAGISKNGQTREHALLAFTLGVKQLIVGVNKMDSTEPPYSESRFEEIKKEVSSYIKKIGYNPAAVPFVPISGWHGDNMLEVSSKMGWFKGWAVERKEGKADGKCLIEALDAILPPARPTDKALRLPLQDVYKIGGIGTVPVGRVETGVLKPGTVVVFAPANITTEVKSVEMHHEALQEAVPGDNVGFNVKNVSVKELRRGYVAGDTKVNPPKGAADFTAQVIVLNHPGQISNGYTPVLDCHTAHIACKFAEIKEKVDRRTGKSTEDNPKAIKSGDAAIVNLVPSKPMCVESFQEFPPLGRFAVRD

SEQ ID NO: 17439 - protein, 448 aa, Solanum tuberosum
MGKEKIHISIVVIGHVDSGKSTTTGHLIYKLGGIDKRVIERFEKEAAEMNKRSFKYAWVLDKLKAERERGITIDIALWKFETTKYYCTVIDAPGHRDFIKNMITGTSQADCAVLIIDSTTGGFEAGISKDGQTREHALLAFTLGVKQMICCCNKMDATTPKYSKARYDEIVKEVSSYLKKVGYNPDKIPFVPISGFEGDNMIERSTNLDWYKGPTLLDALDQINEPKRPSDKPLRLPLQDVYKIGGIGTVPVGRVETGVIKPGMVVTFGPTGLTTEVKSVEMHHEALQEALPGDNVGFNVKNVAVKDLKRGFVASNSKDDPAKGAASFTAQVIIMNHPGQIGNGYAPVLDCHTSHIAVKFAEILTKIDRRSGKELEKEPKFLKNGDAGMVKMIPTKPMVVETFAEYPPLGRFAVRDMRQTVAVGVVKNVDKKDPTGAKVTKAAQKKGK

SEQ ID NO: 17440 - protein, 447 aa, Solanum tuberosum
MGKKKIHISIVVIGHFNSGNSTTTGHLIYNLGGIDNLFIERFEKEPAEINKRSFNYAWVLDKLKAELERGITIDIALWNFETTNYYCTVIDAPGHRDFIKNIITGTSQADCAVLIIDSTTGGFKPGISKNGQTREHPLLAFTLGVNQIICCCNKMDATTPKYSKARYDEIVKEISSYLKKVGYNPDKIPFVPISGFEGDNMIERSTNLDWYKGPTLLDALDQINEPKRPTDKPLRLPLQDVYKIGGIGTVPVGRVETGVIKPGMVVTFGPTGLTTEVKSVEMHHEALLEALPGDNVGFNVKNVAVKDLKRGFVASNSKDDPAKGAASFTAQVIIMNHPGQIGNGYAPVLDCHTSHIAVKFAEILTKIDRRSGKELEKEPKFLKNGDAGMVKMIPTKPMVVETFSEYPPLGRFAVRDMRQTVAVGVIKSVDKKDPSGAKVTKAAQKKK

SEQ ID NO: 17441 - protein, 426 aa, Umbelopsis ramanniana
VVVIGHVDSGKSTTTGHLIYKCGGIDKRTIEKSEKEAAELGKGSFKYAWVLDKLKAERERGITIDIALWKFETPKYHVTVIDAPGHRDFIKNMITGTSQADCGVLIIAAGTGEFEAGISKDGQTREHALLAFTLGVRQLIVAINKMDTTKWSGDRYDEIVKEVSSFIKKIGFNPKSVPFVPISGWHGDNMLEESTNMPWFKGWTKETKAGSKSGKTLLEAIDAIDPPTRPTDKPLRLPLQDVYKIGGIGTVPVGRVETGIIKAGMVVTFAPTMVSTEVKSVEMHHEQLVEGVPGDNVGFNVKNVSVKDIRRGNVCSDSKNDPAKEAGSFTAQVIVLNHPGQIGAGYAPVLDCHTAHIACKFAELVEKIDRRSGKKLEDNPKFVKSGDSAIVKMVPSKPMCVEAYTDYPPLGRFAVRDMRQTVAVGV

SEQ ID NO: 17442 - protein, 331 aa, Apodemia mormo
KSTTTGHLIYKCGGIDKRTIEKFEKEAQEMGKGSFKYAWVLDKLKAERERGITIDIALWKFETAKYYVTIIDAPGHRDFIKNMITGTSQADCAVLIVAAGTGEFEAGISKNGQTREHALLAFTLGVKQLIVGVNKMDSTEPPYSEPRFEEIKKEVSSYIKKIGYNPAAVAFVPISGWHGDNMLEPSTKMPWFKGWQVERKEGKAEGKCLIEALDAILPPARPTDKPLRLPLQDVYKIGGIGTVPVGRVETGVLKPGTVVVFAPANITTEVKSVEMHHEALQEAVPGDNVGFNVKNVSVKELRRGFVAGDSKNNPPRGAADFTAQVIVLNHP

SEQ ID NO: 17443 - protein, 331 aa, Battus philenor
KSTTTGHLIYKCGGIDKRTIEKFEKEAQEMGKGSFKYAWVLDKLKAERERGITIDIALWKFETSKYYVTIIDAPGHRDFIKNMITGTSQADCAVLIVAAGTGEFEAGISKNGQTREHALLAFTLGVKQLIVGVNKMDSTEPPYSEPRFEEIKKEVSSYIKKIGYNPAAVAFVPISGWHGDNMLEPSTKMPWFKGWNVERKEGKAEGKCLIEALDAILPPARPTDKPLRLPLQDVYKIGGIGTVPVGRVETGVLKPGTIVVFAPANITTEVKSVEMHHEALQEAVPGDNVGFNVKNVSVKELRRGYVAGDSKNNPPKGAADFTAQVIVLNHP

SEQ ID NO: 17444 - protein, 331 aa, Parnassius clodius
KSTTTGHLIYKCGGIDKRTIEKFEKEAQEMGKGSFKYAWVLDKLKAERERGITIDIALWKFETSKYYVTIIDAPGHRDFIKNMITGTSQADCAVLIVAAGTGEFEAGISKNGQTREHALLAFTLGVKQLIVGVNKMDSTEPPYSESRFEEIKKEVSSYIKKIGYNPAAVAFVPISGWHGDNMLEPSTKMPWFKGWQVDRKEGKAEGKCLIEALDAILPPARPTDKPLRLPLQDVYKIGGIGTVPVGRVETGVLKPGTIVVFAPANITTEVKSVEMHHEALQEAVPGDNVGFNVKNVSVKELRRGYVAGDSKNNPPRGAADFTAQVIVLNHP

SEQ ID NO: 17445 - protein, 331 aa, Colias eurytheme
KSTTTGHLIYKCGGIDKRTIEKFEKEAQEMGKGSFKYAWVLDKLKAERERGITIDIALWKFETSKYYVTIIDAPGHRDFIKNMITGTSQADCAVLIVAAGTGEFEAGISKNGQTREHALLAFTLGVKQLIVGVNKMDSTEPPYSESRFEEIKKEVSSYIKKIGYNPAAVAFVPISGWHGDNMLEPSTKMPWFKGWLVERKEGKAEGKCLIEALDAILPPARPTDKPLRLPLQDVYKIGGIGTVPVGRVETGVLKPGTIVVFAPANITTEVKSVEMHHEALQEAVPGDNVGFNVKNVSVKELRRGYVAGDSKNNPPKGAADFTAQVIVLNHP

SEQ ID NO: 17446 - protein, 395 aa, Trichomonas tenax
STTTGHLIYKCGGLDKRKLAAMEKEAEQLGKSSFKYAFVMDSLKAERERGITIDISLWKFEGQKYSFTIIDAPGHRDFIKNMITGTSQADAAILVIDSTLGGFEAGIAEQGQTREHALLAFTLGIKQVIVAVNKMDDKTVNYNKARFDEIQSEMTRILTGIGYKPEMFRFIPISGWAGDNMTEKSTNMPWYNGPYLLEALDSLQPPKRPFDKPLRLPLQDVYKINGIGTVPVGRVESGIMKPGMIVNFAPSTVTAEVKSIEMHHESLPEALPGDNIGFNVKNVSTQDVKRGYVVSDTKRDPAVECNSFTAQMIISNHPGKIHAGYQPVFDCHTAHIACKFDKLIQRIDRRHGKKATENPEYIQKDDAAIVEVVPSKPLVVESFQEYPPLGRFAIR

SEQ ID NO: 17447 - protein, 377 aa, Ischyropsalis luteipes
QEMGKGSFKYAWVLDKLKAERERGITIDITLWKFETPKYYVTVIDAPGHRDFIKNMITGTSQADCAVLIVAAGTGEFEAGISKNGQTREHALLAYTLGVKQMIVGVNKMDTTEPPFNQARFEEIQKEVSIYIKKIGYNPATVPFVPISGWNGDNMLEASTNMPWFKGWTLDRKSSKSDGKTLLQALDAMEPPSRPLDKPLRLPLQDVYKIGGIGTVPVGRVETGVMKPGVVVTFAPVGITTEVKSVEMHHEALTEAVPGDNVGFNVKNVSVKELRRGFVCGDSKDNPPKATEEFTAQVIVLNHPGQISNGYTPVLDCHTAHIACKFREIKEKCDRRSGKKLEDNPKFLKSGDAAIIDLAPSKPMCVEVFTEFPPLGR

SEQ ID NO: 17448 - protein, 401 aa, Acrasis rosea
SGKSTTTGHLIYKCGGIDKRVIEKFEKEAADMGKQSFKYAWVMDKLKAERERGITIDIALRKFETSKTMFTIIDAPGHRDFIKNMITGTSQADAAVLVIDSTTGGFEAGISKDGQTREHAMLAFTLGVKQMIVCTNKMDDKSVQYKEDRYKEIQKEVADYLKKVGYNPKNVPFVPISGWAGDNMLEKSTNMPWYKGPTLLEALDALEPPKRPTEKPLRLPLQDVYKIGGIGTVPVGRVETGVMKPGDTVLFAPVDVSTEVKSIEMHHEQLAEAILGDNVGFNIKNVAVKDIRRGNVCSNIKNDPARGCENFEAQVIILNHPGEIQNGYAPVLDCHTAHIACKFQEILTKIDKRTGQEMEKLPKSLKSGQAGIVNLVPQKPMCVEEYAQYPPLGRFAVRDMR

SEQ ID NO: 17449 - protein, 453 aa, Dictyostelium discoideum
MEFPESEKTHINIVVIGHVDAGKSTTTGHLIYKCGGIDKRVIEKYEKEASEMGKQSFKYAWVMDKLKAERERGITIDIALWKFETSKYYFTIIDAPGHRDFIKNMITGTSQADCAVLVIASPTGEFEAGIAKNGQTREHALLAYTLGVKQMIVAINKMDEKSTNYSQARYDEIVKEVSSFIKKIGYNPEKVAFVPISGWNGDNMLERSDKMEWYKGPTLLEALDAIVEPKRPHDKPLRIPLQDVYKIGGIGTVPVGRVETGIIKPGMVVTFAPAGLSTEVKSVEMHHEQLPEARPGDNVGFNVKNVSVKEIKRGMVAGDSKNDPPQETEKFVAQVIVLNHPGQIHAGYSPVLDCHTAHIACKFTEIVDKVDRRTGAVVAKEGTAAVVLKNGDAAMVELTPSRPMCVESFTEYPPLGRFAVRDMRQTVAVGVIKSTVKKAPGKAGDKKGAAAPS

SEQ ID NO: 17450 - protein, 450 aa, Dictyostelium discoideum
EKTHINIVVIGHVDAGKSTTTGHLIYKCGGIDKRVIEKYEKEASEMGKQSFKYAWVMDKLKAERERGITIDIALWKFETSKYYFTIIDAPGHRDFIKNMITGTSQADCAVLVIASPTGEFEAGIAKNGQTREHALLAYTLGVKQMIVAINKMDEKSTNYSQARYDEIVKEVSSFIKKIGYNPEKVAFVPISGWNGDNMLERSDKMEWYKGPTLLEALDAIVEPKRPHDKPLRIPLQDVYKIGGIGTVPVGRVETGIIKPGMVVTFAPAGLSTEVKSVEMHHEQLPEARPGDNVGFNVKNVSVKEIKRGMVAGDSKNDPPQETEKFVAQVIVLNHPGQIHAGYSPVLDCHTAHIACKFTEIVDKVDRRTGAVVAKEGTAAVVLKNGDAAMVELTPSRPMCVESFTEYPPLGRFAVRDMRQTVAVGVIKSTVKKAPGKAGDKKGAAAPSKKK

SEQ ID NO: 17451 - protein, 456 aa, Dictyostelium discoideum
MEFPESEKTHINIVVIGHVDAGKSTTTGHLIYKCGGIDKRVIEKYEKEASEMGKQSFKYAWVMDKLKAERERGITIDIALWKFETSKYYFTIIDAPGHRDFIKNMITGTSQADCAVLVIASPTGEFEAGIAKNGQTREHALLAYTLGVKQMIVAINKMDEKSTNYSQARYDEIVKEVSSFIKKIGYNPEKVAFVPISGWNGDNMLERSDKMEWYKGPTLLEALDAIVEPKRPHDKPLRIPLQDVYKIGGIGTVPVGRVETGIIKPGMVVTFAPAGLSTEVKSVEMHHEQLPEARPGDNVGFNVKNVSVKEIKRGMVAGDSKNDPPQETEKFVAQVIVLNHPGQIHAGYSPVLDCHTAHIACKFTEIVDKVDRRTGAVVAKEGTAAVVLKNGDAAMVELTPSRPMCVESFTEYPPLGRFAVRDMRQTVAVGVIKSTVKKAPGKAGDKKGAAAPSKKK

SEQ ID NO: 17452 - protein, 400 aa, Dictyostelium discoideum
AGKSTTTGHLIYKCGGIDKRVIEKYEKEASEMGKQSFKYAWVMDKLKAERERGITIDIALWKFETSKYYFTIIDAPGHRDFIKNMITGTSQADCAVLVIASPTGEFEAGIAKNGQTREHALLAYTLGVKQMIVAINKMDEKSTNYSQARYDEIVKEVSSFIKKIGYNPEKVAFVPISGWNGDNMLERSDKMEWYKGPTLLEALDAIVEPKRPHDKPLRIPLQDVYKIGGIGTVPVGRVETGIIKPGMVVTFAPAGLSTEVKSVEMHHEQLPEARPGDNVGFNVKNVSVKEIKRGMVAGDSKNDPPQETEKFVAQVIVLNHPGQIHAGYSPVLDCHTAHIACKFTEIVDKVDRRTGAVVAKEGTAAVVLKNGDAAMVELTPSRPMCVESFTEYPPLGRFAV

SEQ ID NO: 17453 - protein, 447 aa, Hordeum vulgare
MGKEKIHISIVVIGHVDSGKSTTTGHLIYKLGGIDKRVIERFEKEAAEMNKRSFKYAWVLDKLKAERERGITIDIALWKFETTKYSCTVIDAPGHRDFIKNMITGTSQADCAVLIIDSTTGVFQAGISKDGQTREHALLAFTLGVKQMICCCNKMDATTPKYSKSRYDEIVKEVSSYLKKVGYNPDKVPFVPISGFEGDNMIERSSNLDWYKGPTLLEALDQINEPKRPSDKPLHLPLQDVYKIGGIGTVPVGRVETGVIKPGMVVTFGPTGLTTEVKSVEVHHESLLEALPGDNVGFNVKNVAVKDLKRGYVASNSKDDPAKEAANFTAQVIIMNHPGQISNGYAPVLDCHTSHIAVKFAEIQTKIDRRSGKELEAAPKFLKNGDAGFVKMIPTKPMVVETFAQYPPLGRFAVRDMRQTVAVGVIKSVEKKEPTGAKVTKAAIKKK

SEQ ID NO: 17454 - protein, 447 aa, Hordeum vulgare
MGKEKIHISIVVIGHVDSGKSTTTGHLIYKLGGIDKRVIESFEKEAAEMNKRSFKYAWVLDKLKAERERGITIDIALWKFETTKYSCTVIDAPGHRDFIKNMITGTSQADCAVLIIDSTTGGFEAGISKDGQTREHALLAFTLGVKHMICCCNKMDATTPKYSKSRYDEIVKEVSSYLKKVGYNPDKVPFVPISGFEGDNMIERSSNLDWYKGPTLLEALDQINEPKRPSEKPLRLPLQDVYKIGGIGTVPVGRVETGVIKPGMVVTFGPTGLTTEVKSVEMHHESLLEALPGDNVGFNVKNVAVKDLKRGYVASNSKDDPAKEAANFTAQVIIMNHPGQISNGYAPVLDCHTSHIAVKFAEIQTKIDRRSGKELEAAPKFLKNGDAGFVKMIPTKPMVVETFAQYPPLGRFAVRDMRQTVAVGVIKSVEKKEPTGAKVTKAAIKKK

SEQ ID NO: 17455 - protein, 448 aa, Saccharum officinarum
MGKEKSHINIVVIGHVDSGKSTTTGHLIYKLGGIDKRVIERFEKEAAEMNKRSFKYAWVLDKLKAERERGITIDIALWKFETTKYYCTVIDAPGHRDFIKNMITGTSQADCAVLIIDSTTGGFEAGISKDGQTREHALLAFTLGVKQMICCCCCNKMDATTPKYSKARYDEIVKEVSSYLKKVGYNPDKIAFVPISGFEGDNMIERSTNLDWYKGPTLLEALDQITEPKRPSDKPLRLPLQDVYKIGGIGTVPVGRVETGVIKPGMVVTFGPTGLTTEVKSVEMHHEALQEALPGDNVGFNVKNVAVKDLKRGYVASNSKDDPAKEAASFTSQVIMNHPGQIGNGYAPVLDCHTSHIAVKFAELITKIDRRSGKELEKEAKFLKNGDAGMVKMIPTKPMVVETFSEYPPLGRFAVRDMRQTVAVGIIKSVEKKDPTGAKVTKAAAKKK

SEQ ID NO: 17456 - protein, 713 aa, Triticum aestivum
  unsure (1)..(713): unsure at all Xaa locations
XRIQRRDRGTSERGRXSSASSKPNAEDIXLTSRTMPRKVVSGPDYDDDYADYEDYEDDYDDYDETGYADVKPPVKEKESSKKSSNAVPVLWKCSMCTFDNHETMVYCEMCGVFRESFVKSGKDVSIKESVNGISNNSGTSALSNSDSTKMPAKTSTTNFDGDSERKYASTSHDKVNSTQLASVGSSSSTGKKKQPVISDNNVPIERTPQLNADHFQLKEDQGSIRASSSAQNKGSMETLSSDISQLSIERNNVNVAQPLPEEYKPEGWMLADQESGVLSQLNLAIVGHVDSGKSTLSGRLLHLLGKISKRDMHKNEKEAKEKGKGSFAYAWAMDESTEERARGVTMTVAVAYLETKKYRVVLLDSPGHKDFVPNLISGATQADAAILVVDASTGSFESGMDGEGGKSVGQTKEHAQLIRSFGVEQLIVAVNKMDAIGYSKDRLEFIKVRLGSFLRSCNFRDSAVTWIPLSAVENQNLIKSPSDARFTSWYQGSCLLDAIDCLQLPSRDVSKPLILPICDVIKSQSTGQLAAFGKLETGAIRNGSKVLVLPCEEVATVKTIERDSSSCSIARAGDNVAVILQGIDGSRIIPGGVLCHPGFPVPVANYLELKIRVLDIAIPILIGYQVEFHIHHVKEAARVTKIVALLDKTGKPSKTAPRFLKSKQNAVVQVTLDQAVCVEEFSKCRALGRAFLRSSGSTIAVGIVTKIMRQDQH

SEQ ID NO: 17457 - protein, 398 aa, Zea mays
  unsure (1)..(398): unsure at all Xaa locations
XVAVEEKGKGSFAYAWAMDESSDERERGITMTVAVAYFNSEKYRVVLLDSPGHKDFVPNMISGATQADAAILVVDASIGSFEAGMGVNGIGQTKEHSQLVRSFGVENLIPAVHKMDGVEYSKERFQSVKSQLGVFLRSCGYKDSSVTWVPLSAMANENLVTACSDTRLLSWYNGGCLLQAIDSLPPPRRDVSSPLRLPICDVIASHTLGQVAVCGKVESGGIRTGCKVLVMPSGDIATVKTMERDSSTCSLARAGDNVAVGLHGVDPGHIAAGGVLCHPDFPVRVACHLELKILVLEITVPILVGLEFELHIRHAKSSARLVRILSSLDQKTGRALKKAPRLLTARQAALVELRLDREACVEEFSTLKALARVFLRSQGSTVAVGVVTRVLDRALDMG

SEQ ID NO: 17458 - protein, 252 aa, Zea mays
  unsure (1)..(252): unsure at all Xaa locations
XGIAWIPLSAVENQNLIKAPSDARLTSWYQGFCLLDAIDFLQLPSRDVSKPLIIPICDVIKSQSTGQLAAYGKLETGAIQIGSKVLVLPSGQEATVKAIERDSNSCTVARAGDNVAICLQGIDGKQLIPGGVLCHPGFPVPVANHLELKVLVLDITTPILVGSQVEFHIHHVKEAARVTKIVALLDKTGKPSKSAPRFLKSKQNSVIQVTLDGAVCVQEFSKSRALGRAYLRSAGRTIAVGVVNRIIGQDQN

SEQ ID NO: 17459 - protein, 243 aa, Zea mays
  unsure (1)..(243): unsure at all Xaa locations
XXNFDGDSEXKDASTSXDKVNSTQLASIGSSSSTGKKKQPVISDNNVPIERTPQLIADHFQLKEDQGSSSRASSSAQNKGSMETLSSDISQLSIERNNVNVAQPLPEEYKPEGWMLADQESGVLSQLNLAIVGHVDSGKSTLSGRLLHLLGKISKRDMHKNEKEAKEKGKGSFAYAWAMDESTEERARGVTMTVAVAYLETKKYRVVLLDSPGHKDFVPNLISGATQADAAILVVDASTGSFX

SEQ ID NO: 17460 - protein, 204 aa, Zea mays
  unsure (1)..(204): unsure at all Xaa locations
IRQESGRWARXAKNEKESKEKGKGSFALAWTMDESSEERERGVTMTVAVAYLETKKFRVVLLDSPGHKDFVPNMISGATQADAAILVVDASTGSFEAGMDGEGGKSVGQTKEHAQLVRSFGVEQLVVAVNKMDAVDYAKERFDFIKLQLGSFLRSCNFKDSAINWIPPSAVENQNLIQAPSDARLNSWYQGFCLLDAIDFLQLX

SEQ ID NO: 17461 - protein, 270 aa, Zea mays
  unsure (1)..(270): unsure at all Xaa locations
XHASAHASAHACEMCGVFRETFVKSAKDGLLKDTAVAVSSGTSAASKNDSAKAPVKTRAVNSDGDSMRKHASMSYDKANSTQLPSAGSSLGAEKKKKTPVLSEEVPVDRIALLASDGFQSKGNQNSGASSSSQNDNVIQKLSSDVGQLNVNKNNVNVTKSCLPDEYKPEKWMLADLESRALSQLNLAIVGHVDSGKSTLSGRLLHLLGRISKKYMHKNEKESKEKGGRAFAFAWAMDESSEERERGVTMTVAVAYLETKKFRVVLLDSPX

SEQ ID NO: 17462 - protein, 459 aa, Dreissena polymorpha
MGKEKLHINIVVIGHVDSGKSTSTGHMIYKCGGIDKRTIEKFEKEAAEMGKGSFKYAWVLDKLKSERERGITIDIALWKFETTKYYVTIIDAPGHRDFIKNMITGTSQADCAVLIVAAGVGEFEAGISKNGQTREHALLAFTLGVKQLIVGVNKMDNTEPPFSEKRYEEIKNEVGNYIKKIGYNPKAVAFVPISGWHGDNMIEPTEKMPWYKGWAIERKEGNASGKTLFEAFDSIFPPTRPFEKPLRLPLQDVYKIGGIGTVPVGRVETGILKPGMVVTFSPANITTEVKSVEMHHESLPEASPGDNVGFNIKNVSVKEIRRGNVTGDSKNDPPKAAKSFYAQVIILNHPGEIKNGYAPVLDCHTAHIACKFEEIKEKIDRRSGKKLEDFPKVVKSGDACMADLVPFKPMCVEAFSDYAPLGRFAVRDMRQTVAVGVIKEVTKEVDGQGKVTKAATKKK

SEQ ID NO: 17463 - protein, 377 aa, Milnesium tardigradum
  unsure (1)..(377): unsure at all Xaa locations
QEMGKGSFKYAWVLDKLKQERERGITIDIALWKFETPKYYVTIIDAPGHRDFIKNMITGTSQADCAVLVTPAPPGEFEAGISKNGQTREHALLAYTLGVKQMIVAVNKMDSSEPPFSEDRFNEIVKEVSGYVKKIGYNPKTIPFVPISGWHGDNMVEASDKMPWYKGWXVERGDKTVEGKTLLEALDSISPPARPTDKPLRLPLQDVYKIGGIGTVPVGRVETGVIKPGMVVTFAPTGLTTEVKSVEMHHESLPEAIPGDNVGFNIKNVSVKDIRRGFVCGDSKNDPPKESASFNAQVIVLNHPGEIRNGYTPVLDCHTAHIACKFNEIKEKVDRRSGKSIEENPKTIKSGDAAIVNLIPTKPLCVEAFSEYPPLGR

SEQ ID NO: 17464 - protein, 447 aa, Lilium longiflorum
MGKEKVHINIVVIGHVDSGKSTTTGHLIYKLGGIDKRVIERFEKEAAEMNKRSFKYAWVLDKLKAERERGITIDIALWKFETTKYYCTVIDAPGHRDFIKNMITGTSQADCAILIIDSTTGGFEAGISKDGQTREHALLAFTLGVRQMICCCNKMDATTPKYAKARYDEIVKEVSSYLKKVGYNPDKIPFVPISGFEGDNMIERSTNLDWYKGPTLLEALDQISEPKRPSDKPLRLPLQDVYKIGGIGTVPVGRVETGVIKPGMVVTFGPTGLTTEVKSVEMHHEALLEALPGDNVGFNVKNVAVKDLKRGFVASNSKDDPAKEAANFTSQVIIMNHPGQIGNGYAPVLDCHTSHIAVKFAEILTKIDRRSGKELEKEPKFLKNGDAGMVKMIPTKPMVVETFAEYPPLGRFAVRDMRQTVAVGVIKNVEKKDPTGAKVTKSAVKKK

SEQ ID NO: 17465 - protein, 432 aa, Phytophthora infestans
VIGHVDAGKSTTTGHLIYKCGGIDKRTIEKFEKEAAELGKTSFKYAWVLDNLKAERERGITIDIALWKFESPKYFFTVIDAPGHRDFIKNMITGTSQADCAILVVASGVGEFEAGISKEGQTREHALLAFTLGVKQMVVAINKMDDSSVMYGQARYEEIKSEVTTYLKKVGYKPAKIPFVPISGWEGDNMIDRSTNMPWYKGPFLLEALDNLNAPKRPSDKPLRLPLQDVYKIGGIGTVPVGRVETGVIKPGMVATFGPVGLSTEVKSVEMHHESLPEAVPGDNVGFNVKNVSVKELRRGFVASDSKNDPAKATQDFTAQVIVLNHPGQIGNGYSPVLDCHTAHVACKFKEITEKMDRRSGKVLETAPKFVKSGDACMVILEPSKPMTVESFQEYPPLGRFAVRDMRQTVAVGVIKSVNKKEASGKGGAKKK

SEQ ID NO: 17466 - protein, 413 aa, Phycomyces blakesleeanus
GKSTTTGHLIYKCGGIDKRTIEKFEKEAAELGKGSFKYAWVLDKLKAERERGITIDIALWKFETPKYMVTVIDAPGHRDFIKNMITGTSQADCGVLIIAAGTGEFEAGISKDGQTREHALLAFTLGVRQLIVAINKMDTTKWSEARYNEIVKEVSSFIKKIGFNPKSVPFVPISGWHGDNMLEESVNMGWFKGWTKETKAGVKSGKTLLEAIDNIDPPVRPSDKPLRLPLQDVYKIGGIGTVPVGRVETGVIKAGMIVNFAPAGVVTEVKSVEMHHEQLVEGLPGDNVGFNVKNVSVKDIRRGNVCSDSKNDPAKESGSFTAQVIVLNHPGQIGAGYSPVLDCHTAHIACKFAELIEKIDRRSGKKMEDAPKFIKSGDSAIVKMVPSKPMCVEAYTDYPPLGRFAVRDMRQTV

SEQ ID NO: 17467 - protein, 426 aa, Rhizomucor miehei
VVVIGHVDSGKSTTTGHLIYKCGGIDKRTIEKFEKEAAELGKGSFKYAWVLDKLKAERERGITIDIALWKFETPKYHVTVIDAPGHRDFIKNMITGTSQADCGILIIAAGTGEFEAGISKDGQTREHALLAFTLGVRQLIVAINKMDSTKYSEARYNEIVKEVSTFIKKIGYNPKAVPFVPISGWNGDNMLEESPNMPWFKGWTKETKAGNKTGKTLLEAIDNIEPPVRPVDKPLRLPLQDVYKIGGIGTVPVGRVETGTIKAGMVVTFAPANVTTEVKSVEMHHEQLVEGVPGDNVGFNVKNVSVKDIRRGNVCSDSKNDPAKESASFIAQVIVLNHPGQISAGYSPVLDCHTAHIACKFAELLEKIDRRSGKKLEDSPKSVKSGDSAIVKMIPSKPMCVEAYTEYPPLGRFAVRDMRQTVAVGV

SEQ ID NO: 17468 - protein, 402 aa, Rhizomucor pusillus
GKSTTTGHLIYKCGGIDKRTIEKFEKEAAELGKGSFKYAWVLDKLKAERERGITIDIALWKFETPKYHVTVIDAPGHRDFIKNMITGTSQADCGILIIAAGTGEFEAGISKDGQTREHALLAFTLGVRQLIVAINKMDSTKYSEARYNEIVKEVSTFIKKIGYNPKAVPFVPISGWNGDNMLEESPNMPWFKGWTKETKAGNKTGKTLLEAIDNIDPPVRPVDKPLRLPLQDVYKIGGIGTVPVGRVETGTIKAGMVVTFAPANVTTEVKSVEMHHEQLAEGVPGDNVGFNVKNVSVKDIRRGNVCSDSKNDPAKESASFTAQVIVLNHPGQISAGYSPVLDCHTAHIACKFAELLEKIDRRSGKKLEDSPKAVKCGDSAIVKMIPTKPMCVEAYTEYPPLG

SEQ ID NO: 17469 - protein, 406 aa, Anemonia erythraea
GHLIYKCGGIDKRAIEKFEKEAAEMGKGSFKYAWVLDKLKAERERGITIDIALWKFETNKYYVTVIDAPGHRDFIKNMITGTSQADCTVLIVASGTGEFEAGISKNGQTREHALLAFTLGVKQMIVCCNKMDNTESTLREARFQEIEKEVGSYLKKIGYNPKKIHFVPISGWHGDNMLEKSDKMPWWNGFELFNKSQGSKTGTTLFDGLDDINVPSRPTDKALRLPLQDVYKIGGIGTVPVGRVETGILKPGMLVTFAPVNLTTEVKSVEMHHTALTEALPGDNVGFNVKNLSVKDIKRGFVAGDSKNDPPKNIGFFDAQVIVLNHPGEIHNGYSPVLDCHTAHIACKFYEIKNKGDKRSGKVTEEFPKAIKSGDAALVTLQPSKDMCVEKYSSYAPLGRFAVRDM

SEQ ID NO: 17470 - protein, 410 aa, Eugymnanthea japonica
TGHLIYKCGGIDKRTIEKFEKEAQEMGKGSFKYAWVLDKLKAERERGITIDIALWKFTTEKYSVTIIDAPGHRDFIKNMITGTSQADCAVLIVASSTGEFEAGISKNGQTREHALLAYTLGVKQMIVGVNKIDNTEPPYSEARFKEISKEISAYVKKVGYNPKEVAIVPISGWHGDNMIEPSTNMSWYKGWEIERKAGKASGKTLLEALDAVVPPTRPTEKPLRLPLQDVYKIGGIGTVPVGRIETGILKPAMVVTFAPANITTEVKSVEMHHTSLTEALPGDNVGFNVKNVSVKDIKRGMVCSDSKNDPAKETKSFVAQVIVLNHPGEIHSGYQPVLDCHTAHIACKFAVLQQKIDRRSGKVLEENPKMVKSGDAAMIELVPSKPMVVEPYGDYAPLGRFAVRDMSQTV

SEQ ID NO: 17471 - protein, 417 aa, Rhizopus stolonifer
GKSTTTGHLIYKCGGIDKRTIEKFEKEAAELGKGSFKYAWVLDKLKAERERGITIDIALWKFETPKYQITVIDAPGHRDFIKNMITGTSQADCAVLIIAGGTGEFEAGISKDGQTREHALLAFTLGVRQLIVAVNKMDTTKWSEARFNEIVKEVSSFIKKIGYNPKSVPFVPISGWHGDNMLDESTNMPWYKGWNKETKAGAKSGKTLLEAIDNIDPPTRPSDKPLRLPLQDVYKIGGIGTVPVGRVETGVIKAGMVVTFAPAAVTTEVKSVEMHHETLSEGAPGDNVGFNVKNVSVKDIRRGNVCSDSKNDPAKEAGSFTAQVIVLNHPGQIGAGYAPVLDCHTAHIACKFSELIEKIDRRSGKSLEAEPKFVKSGDSAIVKMIPSKPMCVEAYTDYPPLGRFAVRDMRQTVAVGV

SEQ ID NO: 17472 - protein, 417 aa, Rhizopus microsporus var. oligosporus
GKSTTTGHLIYKCGGIDKRTIEKFEKEAAELGKGSFKYAWVLDKLKAERERGITIDIALWKFETPKYNVTVIDAPGHRDFIKNMITGTSQADCGILIIAAGTGEFEAGISKDGQTREHALLAFTLGVRQLIVAINKMDTTKWSEARYNEIVKEVSSFIKKIGYNPKSVPFVPISGWHGDNMLEESNNMPWFKGWTKETKAGNKTGKTLLEAIDNIDPPTRPVDKPLRLPLQDVYKIGGIGTVPVGRVETGVIKAGMVVTFAPANVTTEVKSVEMHHETLTEGLPGDNVGFNVKNVSVKDIRRGNVCSDSKNDPAKEAGSFTAQVIVLNHPGQIGAGYAPVLDCHTAHIACKFSELIEKIDRRSGKSLEAEPKFVKSGDSAIVKMIPSKPMCVEAYTDYPPLGRLAVRDMRQTVAVGV

SEQ ID NO: 17473 - protein, 401 aa, Blakeslea trispora
GKSTTTGHLIYKCGGIDKRTIEKFEKEAAELGKGSFKYAWVLDKLKAERERGITIDIALWKFETPKYHVTVIDAPGHRDFIKNMITGTSQADCAILIIAGGTGEFEAGISKDGQTREHALLAFTLGVRQLIVAINKMDTTKWSEARYTEIVKEVSSFIKKIGFNPKAVPFVPISGWHGDNMLEESTNMPWFKGWKKETKAGEKSGKTLLEAIDAIEPPVRPSDKPLRLPLQDVYKIGGIGTVPVGRVETGVIKAGMVVTFAPAAVTTEVKSVEMHHETLTEGLPGDNVGFNVKNVSVKDIRRGNVCSDSKNDPAKEAGSFTAQVIILNHPGQIGAGYAPVLDCHTAHIACKFSELIEKIDRRSGKKLEEQPKFVKSGDSAIVKMIPSKPMCVEAYTDYPPL

SEQ ID NO: 17474 - protein, 395 aa, Smittium culisetae
KRTIEKFEKEANEMGKGSFKYAWVLDKLKAERERGITIDIALWKFETPRYVVTVIDAPGHRDFIKNMITGTSQADCAILIIAGGVGEFEAGISKDGQTREHALLAFTLGVRQLIVAVNKMDTTNYSEARFTEITKEVCNFIKKVGYNPKSVPMVPISGFHGDNMIEATTNMPWYKGWTKETKAGNAKGMTLLDAIDAVEPPVRPSDKPLRLPLQDVYKIGGIGTVPVGRIETGILKAGMVVTFAPTGVTTEVKSVEMHHEVLSQGNPGDNVGFNVKNVSVKDIRRGNVCGDSKNDPPKEAGNFTAQVIVLNHPGQISNGYCPVLDCHTAHISCKFTQIKEKMDRRSGKTLEAEPKFIKSGDAAMVVLTPSKPMCVETFSEYPPLGRLAVRDMRQT

SEQ ID NO: 17475 - protein, 331 aa, Feltia jaculifera
KSTTTGHLIYKCGGIDKRTIEKFEKEAQEMGKGSFKYAWVLDKLKAERERGITIDIALWKFETAKYYVTIIDAPGHRDFIKNMITGTSQADCAVLIVAAGTGEFEAGISKNGQTREHALLAFTLGVKQLIVGVNKMDSTEPPYSEPRFEEIKKEVSSYIKKIGYNPAAVAFVPISGWHGDNMLEPSTKMPWFKGWNVERKEGKAEGKCLIEALDAILPPARPTDKALRLPLQDVYKIGGIGTVPVGRVETGILKPGTIVVFAPANITTEVKSVEMHHEALQEAVPGDNVGFNVKNVSVKELRRGYVAGDSKNNPPKGAADFTAQVIVLNHP

SEQ ID NO: 17476 - protein, 377 aa, Euperipatoides rowelli
QEMGKGSFKYAWVLDKLKAERERGITIDIALWKFETPKFYITIIDAPGHRDFIKNMITGTSQADCAVLIVAAGTGEFEAGISKNGQTREHALLAYTLGVKQLIVGVNKMDSTEPPFSQARFEEIVKEVSNYIKKIGYNPKTVPFVPISGWHGDNMLEGSANMAWHKGWDVEKGDKKFSGKTLLEALDSIQPPSRPTEKPLRLPLQDVYKIGGIGTVPVGRVETGILKPGMVVTFAPVGLTTEVKSVEMHHEALTEASPGDNVGFNVKNVSVKELRRGFVAGDSKNEAPKEAADFLAQVIVLNHPGQIGNGYTPVLDCHTAHIACKFAEIKEKCDRRTGKTIEENPKFIKSGDAAIVNLVPTKPLCVEAFSDFPPLGR

SEQ ID NO: 17477 - protein, 742 aa, Yarrowia lipolytica
MSDQFNQDFANKANINEQGQGQGQGQQGQGYGQYQAPQQFVPGQSFVPGQSFVPGQSFAPQGGYDQYQGQGGYQGGYQGGYQGGYQGNNRGGYSGRGRGGYRGGYQGGYNNQYGNQGGYQGGYQGGYDNQYGNQGGYQGGYDNQYGYDQPEEPQEKTLTLEEYQKQKQEALNKLKKPKVGGALKIGGDKPKAGGALKIGGDKPASTGGALKIGGDKPKTSGGALKIGGDKPKSGGVLKIGGDKESEKKEAVSKEASPAPKESTPKESTPAPASKESTPSAAEKKEAAENAASADALIAAQNAEIDQETIKEMFGETKDHMSIIFMGHVDVGKSTLGGQILYLTGTVNKRTIEKMEKEAADAGRPGWYLSWVMDINKEERAEGKTVEVGRSYFETEKRRYTLLDAPGHKMYVPSMIGGAAQADAGILVISARKGEYETGFERDGQTREHAMLAKTQGINKLVIAINKMDDSTVNWSKERYDECINKLKLYLKGLGYSDKTEITFMPVSGFTGANVKERVSKEVCPWYDGPSLLELLDSFELERNLTGPFMLPISNKEKNLGTIVEGKIEVGQVKKGDNLVVMPSKVPVEVTTLYKETEQEVGGASVGEQIRLKVKGIEEEEVQIGQVLCSAAQPVAAVTVFEAQIAITELKSILSTGFSCVMHIHTAAEEVTFTALLHKLEKGTNRKSKKPPAFAKKGMKIIARLETQNPVCMDEFSKTPQLGRFTLRDQGQSIAIGRVTKLC

SEQ ID NO: 17478 - protein, 662 aa, Zygosaccharomyces rouxii
MSDPNQNGQQGGQQNAGGNYYQQYFQKLTQQAQAGGGYQPYGGYGGYGGYGGYQPYGGYQQFYQDGQQAQQGAYNGYPYQAQGAPGGFNNYNNQFQPQQQSQGMTLDDFHKQKQTSQSAPPKQKKSLKLVSSSGIKLANATKKPKEDEKKEEEPKKEEKKAEPKEQESKKEEPKREGTPRPAAAKDEKKEDLPKLEKLKIKEEQAAANASGADSLIKEQEEEVDEGVVNDMFGGKDHMSIIFMGHVDAGKSTMGGNILYMTGSVDKRTVEKYEREAKDAGKQGWYLSWVMDTNREERDDGKTIEVGRAYFETEKRRYTILDAPGHKMYVSEMIGGASQADVGILVISARKGEYETGFEKGGQTREHALLAKTQGVNKLIVTINKMDDPTVNWSKERYDQCVKNLSNFLKAIGYNVKEEVVFMPVSGYSGAGLGTRVDPKECPWYDGPALLEYMDNMSHVDRKMNAPFMLPIAAKMRDMGTIVEGKIESGHIRKGHSTLLMPNKIPVEIQNIYNETENEVDMAICGEQVKLKIKGVEEEDIAPGFVLTSPKNPVKNVTRFVAQVAIVELKSILSSGFSCVMHVHTAIEEVRITKLLHKLERGTNRKSKKPPAFAKKGMKIIAVLETERPVCVETYQDYPQLGRFTLRDQGTTIAIGKIVKIIE

SEQ ID NO: 17479 - protein, 701 aa, Debaryomyces hansenii
MSDDQQYNQDKLSQDFQNTSIGSGEQQQQSYQQYQQQPQQNNFNANSAPTFTPSGQQGGYQGGYQGGYQGGYQNYSQGGYQNYNQGYQNYNQGYQGYQNNNRGGYNSYNNRGGYNNYNNYNQQDQQPVQNQGMSLADFQKQQNAQANLNKPKKTLKLASSSGIKLANAKKAPETESKEATPAATQKEATPAATEKEATPAATEKETTPAATEKETTPAPAKKEATPASAKSESKPASKSTSKVATKESTPVTSDKVIQEQVDEVDEEVVKDMFGGKDHVSIIFMGHVDAGKSTMGGNILYLTGSVDKRTVDKYEREAKDAGRQGWYLSWVMDTNKEERSDGKTIEVGKAYFETEKRRYTILDAPGHKMYVSEMIGGASQADVGILVISARKGEYETGFEKGGQTREHALLAKTQGVNKIIVVVNKMDDPTVGWAEDRYKDCITKLGTFLKGIGYAKDDIVFMPVSGYTGAGIKDRVNPKDCPWYSGPSLLEFLDNMKTVQRHINGPFMLPISGKMKDMGTIIEGKIESGHIKKGGNLLLMPNKASIEVVTIFNETEQECDAAYCGEQVRLKIKGVEEEDLAPGYVLTSPLKPIKTITRFEAQIAIVELKSILSNGFSCVMHLHTAIEEVTFIELKHKLEKGTNRKSKKPPAFAKKGMKVIAVLETSESVCAETYADYPQLGRFTLRDQGTTIAIGKITKVL

SEQ ID NO: 17480 - protein, 363 aa, Ctenocephalides canis
ERERGITIDIALWKFETSKYYVTIIDAPGHRDFIKNMITGTSQADCAVLIVAAGVGEFEAGISKNGQTREHALLAFTLGVKQLIVGVNKMDSTEPPYSENRFEEIKKEVSSYIKKIGYNPAAVAFVPISGWHGDNMLEVSTKMNWFKGWNIERKEGKADGKCLIEALDAILPPARPTDKPLRLPLQDVYKIGGIGTVPVGRVETGVLKPGTVVVFAPANLTTEVKSVEMHHEALQEAVPGDNVGFNVKNVSVKELRRGYVAGDSKSSPPRGAADFTAQVIVLNHPGQISNGYTPVLDCHTAHIACKFAEIKEKVDRRTGKSTEDNPKAIKSGDAAIVTLVPSKPMCVESFQEFPQLGRFAVLD

SEQ ID NO: 17481 - protein, 460 aa, Filobasidiella neoformans
MGKDKLHVNVVVIGHVDSGKSTTTGHLIYKCGGIDKRTIEKFEKEAQELGKSSFKYAWVLDKLKAERERGITIDIALWKFETPKYQVTVIDAPGHRDFIKNMITGTSQADCAILIIATGIGEFEAGISKDGQTREHALLAFTLGVRQLIVACNKMDTCKWSEDRFNEIVKETNGFIKKVGYNPKAVPFVPISGWHGDNMLEETTNMPWYKGWTKETKSGVSKGKTLLEAIDASRPPTRPTDKPLRLPLQDVYKIGGIGTVPVGRVETGVIKAGMVVKFAPTNVTTEVKSVEMHHEQIPEGLPGDNVGFNVKNVSIKDIRRGNVCGDSKNDPPMEAASFNAQVIVLNHPGQIGAGYTPVLDCHTAHIACKFSELIEKIDRRTGKVMEAAPKFVKSGDAAIVKLVSQKPLCVETYADYPPLGRFAVRDMRQTVAVGVIKSVEKSDGKSGKVTKAAEKAAKKK

SEQ ID NO: 17482 - protein, 459 aa, Filobasidiella neoformans
MGKDKLHVNVVVIGHVDSGKSTTTGHLIYKCGGIDKRTIEKFEKEAQELGKSSFKYAWVLDKLKAERERGITIDIALWKFETPRYQVTVIDAPGHRDFIKNMITGTSQADCAILIIATGIGEFEAGISKDGQTREHALLAFTLGVRQLIVACNKMDTCKWSEDRFNEIVKETNGFIKKVGYNPKAVPFVPISGWHGDNMLEETTNMPWYKGWTKETKSGVSRGKTLLEAISASRPHTRPTDKPLRLPLQDVYKIGGIGTVPVGRVETGVIKAGMVVKFAPTNVTTEVKSVEMHHEQIPEGLPGDNVGFNVKNVSIKDIRRGNVCGDSKNDPPMEAASFNAQVIVLNHPGQIGAGYTPVLDCHTAHIACKFAELIEKIDRRTGKVMEAAPKFVKSGDAAIVKLVAQKPLCVETYADYPPLGRFAVRDMRQTVAVGVIKSVDKTEKGGKVTKAAEKAAKKK

SEQ ID NO: 17483 - protein, 413 aa, Heliothis terracottoides
HVDSGKSTTTGHLIYKCGGIDKRTIEKFEKEAQEMGKGSFKYAWVLDKLKAERERGITIDIALWKFETAKYYVTIIDAPGHRDFIKNMITGTSQADCAVLIVAAGTGEFEAGISKNGQTREHALLAFTLGVKQLIVGVNKMDSTEPPYSESRFEEIKKEVSSYIKKIGYNPAAVAFVPISGWHGDNMLEASTKMPWFKGWNVERKEGKAEGKCLIEALDAILPPARPTDKALRLPLQDVYKIGGIGTVPVGRVETGILKPGTIVVFAPANITTEVKSVEMHHEALQEAVPGDNVGFNVKNVSVKELRRGYVAGDSKNNPPKGAADFTAQVIVLNHPGQISNGYTPVLDCHTAHIACKFAEIKEKVDRRTGKSTEDNPKSIKSGDAAIVNLVPSKPLCVEFFQEFPPLGRFAVR

SEQ ID NO: 17484 - protein, 413 aa, Plagiomimicus olvello
HVDSGKSTTTGHLIYKCGGIDKRTIEKFEKEAQEMGKGSFKYAWVLDKLKAERERGITIDIALWKFETAKYYVTIIDAPGHRDFIKNMITGTSQADCAVLIVAAGTGEFEAGISKNGQTREHALLAFTLGVKQLIVGVNKMDSTEPPYSESRFEEIKKEVSSYIKKIGYNPAAVAFVPISGWHGDNMLEPSTKMPWFKGWQVERKEGKAEGKCLIEALDAILPPARPTDKALRLPLQDVYKIGGIGTVPVGRVETGVLKPGTIVVFAPANITTEVKSVEMHHEALQEAVPGDNVGFNVKNVSVKELRRGYVAGDSKNNPPKGAADFTAQVIVLNHPGQISNGYTPVLDCHTAHIACKFAEIKEKVDRRTGKSTEDNPKSIKSGDAAIVNLVPSKPLCVESFQEFPPLGRFAVR

SEQ ID NO: 17485 - protein, 428 aa, Pyrococcus horikoshii
MPKEKPHVNIVFIGHVDHGKSTTIGRLLYDTGNIPETIIKKFEEMGEKGKSFKFAWVMDRLKEERERGITIDVAHTKFETPHRYITIIDAPGHRDFVKNMITGASQADAAVLVVAATDGVMPQTKEHAFLARTLGIKHIIVTINKMDMVNYDQKVFEKVKAQVEKLLKTLGYKDFPVIPTSAWNGDNVVKKSDKMPWYNGPTLIEALDQIPEPEKPIDKPLRIPIQDVYSIKGVGTVPVGRVETGKLKVGDVVIFEPASTIFHKPIQGEVKSIEMHHEPLQEALPGDNIGFNVRGVSKNDIKRGDVAGHTDKPPTVVRTKDTFKAQIIVLNHPTAITVGYSPVLHAHTAQIPVRFEQILAKVDPRTGNIVEENPQFIKTGDSAIVVLRPMKPVVLEPVKEIPQLGRFAIRDMGMTIAAGMVISIQKGE

SEQ ID NO: 17486 - protein, 712 aa, Candida maltosa
MSNPQDQLSNDLANASISGDQSKQPQQQQPQQQQPYFNPNQAQAFVPTGGYQQFQPQQQQQYGGYQQNYTQYQAGGYQQNYNNRGGYQQNYNNRGGYQQNYNNRGGYQQQQQQQYQAYNPNQQYGGYQAYNPQQQQQQQTQSQGMSLADFQKQKAEQQASLNKPAVKKTLKLASSSGIKLANATKKVDTAKPAASKEASPAPKDEEASAEPEAKKESTPVPASSSPAPAAADSTPAPVKKESTPTPSVASKSAPVSASASVVTADALAKEQEDEVDEEVVKDMFGGKDHVSIIFMGHVDAGKSTMGGNILYLTGSVDKRTVEKYEREAKDAGRQGWYLSWVMDTNKEERNDGKTIEVGKAYFETDKRRYTILDAPGHKMYVSEMIGGASQADVGILVISARKGEYETGFEKGGQTREHALLAKTQGVNKIIVVVNKMDDPTVNWSKERYQECTTKLGVFLKGIGYNKDDIINMPVSGYTGAGLKDRVNPKDCPWYEGPSLLEYLDNMDTMNRKINGPFMMPVSGKMKDLGTVVEGKIESGHVKKGTNLILMPNKTPVEVLTIYNETEQEADTAFSGEQVRLKIKGVEEEDLQPGYVLTSPKNPVKTVTKFEAQIAIVELKSILSNGFSCVMHLHTAIEEVKFVELKHKLEKGTNRKSKKPPAFAKKGMKIIAILEVSEPVCAETYKDYPQLGRFTLRDQGTTIAIGKITKLL

SEQ ID NO: 17487 - protein, 398 aa, Rhodotorula mucilaginosa
CGGIDKRTIEKFEKEAAELGKGSFKYAWVLDKLKAERERGITIDIALWKFETPKYMITVIDAPGHRDFIKNMITGTSQADCAILIIASGTGEFEAGISKDGQTREHALLAFTLGVRQLIVAINKMDTCKYSQERYEEIIKETSNFIKKVGFNPKALPFVPISGWHGDNMIEATTNMPWYKGWKKETKSGEVTGKTLLDAIDAIEPPTRPTDKPLRLPLQDVYKIGGIGTVPVGRVETGTIKAGMVVVFAPANVTTEVKSVEMHHEQLEAGLPGDNVGFNVKNVSVKDIRRGNVCGDTKNDPPKEAASFKAQVIVMNHPGQIGNGYAPVLDCHTAHIACKFDTLLEKIDRRSGKSVEDLPKFIKSGDAAIVKMIPSKPMCVEPFSDYPPLGRFAVRDMR

SEQ ID NO: 17488 - protein, 464 aa, Trichophyton rubrum
MGKDEKGHINLVVIGHVDSGKSTTTGHLIYKCGGIDQRTIEKFEKEAEELGKKSFKYAWVLDKLKAERERGITIDIALWKFETPKYNVTVIDAPGHRDFIKNMITGTSQADCAILIIAAGTGEFEAGISKDGQTREHRSARLHPWVSKQLIVAINKMDTTNWSETRFKEIIKGSHQLHQERLATDPKGCSIFVPISGFNGDNMIEGFTNCPWYKGWNKETKAGGAKTGKTLLEAIDAIDMPTRPTDKPLRLPLQDVYKISGIGTVPVGRVETGIIKPGMVVTFAPANVTTEVKSVEMHHQQLQQGVPGDNVGFNVKNVSVKEVRRGNVAGDSKNDPPSGCASFNAQVIVLNHPGQIGAGYAPVLDCHTAHIACKFAELLEKIDRRTGKSVEANPKFVKSGDAAIAKMVPSKPMCVEAFTDYPPLGRFAVRDMRQTVAVGVIKAVEKATGGAGKVTKSAAKAGKK

SEQ ID NO: 17489 - protein, 413 aa, Agrotis ipsilon
HVDSGKSTTTGHLIYKCGGIDKRTIEKFEKEAQEMGKGSFKYAWVLDKLKAERERGITIDIALWKFETAKYYVTIIDAPGHRDFIKNMITGTSQADCAVLIVAAGTGEFEAGISKNGQTREHALLAFTLGVKQLIVGVNKMDSTEPPYSESRFEEIKKEVSSYIKKIGYNPAAVAFVPISGWHGDNMLEPSTKMPWFKGWNVERKEGKAEGKCLIEALDAILPPARPTDKALRLPLQDVYKIGGIGTVPVGRVETGILKPGTIVVFAPANITTEVKSVEMHHEALQEAVPGDNVGFNVKNVSVKELRRGYVAGDSKNNPPKGAADFTAQVIVLNHPGQISNGYTPVLDCHTAHIACKFAEIKEKVDRRTGKSTEDNPKSIKSGDAAIVNLVPSKPLCVESFQEFPPLGRFAVR

SEQ ID NO: 17490 - protein, 413 aa, Amphipyra pyramidoides
HVDSGKSTTTGHLIYKCGGIDKRTIEKFEKEAQEMGKGSFKYAWVLDKLKAERERGITIDIALWKFETARYYVTIIDAPGHRDFIKNMITGTSQADCAVLIVAAGTGEFEAGISKNGQTREHALLAFTLGVKQLIVGVNKMDSTEPPYNESRFEEIKKEVSSYIKKIGYNPAAVAFVPISGWHGDNMLEPSTKMPWFKGWQVERKEGKAEGKCLIEALDAILPPARPTDKALRLPLQDVYKIGGIGTVPVGRVETGILKPGTIVVFAPANITTEVKSVEMHHEALQEAVPGDNVGFNVKNVSVKELRRGYVAGDSKNNPPKGAADFTAQVIVLNHPGQISNGYTPVLDCHTAHIACKFAEIKEKVDRRTGKSTEDNPKSIKSGDAAIVNLVPSKPLCVESFQEFPPLGRFAVR

SEQ ID NO: 17491 - protein, 413 aa, Anagrapha falcifera
HVDSGKSTTTGHLIYKCGGIDKRTIEKFEKEAQEMGKGSFKYAWVLDKLKAERERGITIDIALWKFETAKYYVTIIDAPGHRDFIKNMITGTSQADCAVLIVAAGTGEFEAGISKNGQTREHALLAFTLGVKQLIVGVNKMDSTEPPYSESRFEEIKKEVSSYIKKIGYNPAAVAFVPISGWHGDNMLEPSTKMPWFKGWMVERKEGKAEGKCLIEALDAILPPARPTDKPLRLPLQDVYKIGGIGTVPVGRVETGILKPGTIVVFAPANITTEVKSVEMHHEALQEAVPGDNVGFNVKNVSVKELRRGYVAGDSKNNPPKGAADFTAQVIVLNHPGQISNGYTPVLDCHTAHIACKFAEIKEKVDRRTGKSTETNPKSIKSGDAAIVNLVPSKPLCVESFQEFPPLGRFAVR

SEQ ID NO: 17492 - protein, 413 aa, Anathix ralla
HVDSGKSTTTGHLIYKCGGIDKRTIEKFEKEAQEMGKGSFKYAWVLDKLKAERERGITIDIALWKFETARYYVTIIDAPGHRDFIKNMITGTSQADCAVLIVAAGTGEFEAGISKNGQTREHALLAFTLGVKQLIVGVNKMDSTEPPYSEPRFEEIKKEVSSYIKKIGYNPLAVAFVPISGWHGDNMLEPSTKMPWFKGWNVERKEGKAEGKCLIEALDAILPPARPTDKALRLPLQDVYKIGGIGTVPVGRVETGILKPGTIVVFAPANITTEVKSVEMHHEALQEAVPGDNVGFNVKNVSVKELRRGYVAGDSKNNPPKGAADFTAQVIVLNHPGQISNGYTPVLDCHTAHIACKFAEIKEKVDRRTGKSTEDNPKSIKSGDAAIVNLVPSKPLCVESFQEFPPLGRFAVR

SEQ ID NO: 17493 - protein, 413 aa, Anicla infecta
HVDSGKSTTTGHLIYKCGGIDKRTIEKFEKEAQEMGKGSFKYAWVLDKLKAERERGITIDIALWKFETAKYYVTIIDAPGHRDFIKNMITGTSQADCAVLIVAAGTGEFEAGISKNGQTREHALLAFTLGVKQLIVGVNKMDSTEPPYSESRFEEIKKEVSSYIKKIGYNPAAVAFVPISGWHGDNMLEASTKMPWFKGWNVERKEGKAEGKCLIEALDAILPPARPTDKALRLPLQDVYKIGGIGTVPVGRVETGILKPGTIVVFAPANITTEVKSVEMHHEALQEAVPGDNVGFNVKNVSVKELRRGYVAGDSKNNPPKGAADFTAQVIVLNHPGQISNGYTPVLDCHTAHIACKFAEIKEKVDRRTGKSTEDNPKSIKSGDAAIVNLVPSKPLCVESFQEFPPLGRFAVR

SEQ ID NO: 17494 - protein, 413 aa, Baileya levitans
  unsure (1)..(413): unsure at all Xaa locations
HVDSGKSTTTGHLIYKXGGIDKRTIEKFEKEAQEMGKGSFKYAWVLDKLKAERERGITIDIALWKFETAKYYVTIIDAPGHRDFIKNMITGTSQADCAVLIVAAGTGEFEAGISKNGQTREHALLAFTLGVKQLIVGVNKMDSTEPPYSESRFEEIKKEVSSYIKKIGYNPAAVAFVPISGWHGDNMLEASTKMPWFKGWMVERKEGKAEGKXLIEALDAILPPARPTDKALRLPLQDVYKIGGIGTVPVGRVETGVLKPGTVVVFAPANITTEVKSVEMHHEALQEAVPGDNVGFNVKNVSVKELRRGYVAGDSKNNPPKGAADFTAQVIVLNHPGQISNGYTPVLDCHTAHIACKFAEIKEKVDRRTGKSTEDNPKSIKSGDAAIVNLVPSKPLCVESFQEFPPLGRFAVR

SEQ ID NO: 17495 - protein, 413 aa, Catocala ultronia
HVDSGKSTTTGHLIYKCGGIDKRTIEKFEKEAQEMGKGSFKYAWVLDKLKAERERGITIDIALWKFETAKYYVTIIDAPGHRDFIKNMITGTSQADCAVLIVAAGTGEFEAGISKNGQTREHALLAFTLGVKQLIVGVNKMDSTEPPYSESRFEEIKKEVSSYIKKIGYNPAAVAFVPISGWHGDNMLEASTKMPWFKGWMVERKEGKAEGKCLIEALDAILPPARPTDKALRLPLQDVYKIGGIGTVPVGRVETGILKPGTIVVFAPANITTEVKSVEMHHEALQEAVPGDNVGFNVKNVSVKELRRGYVAGDSKNNPPKGAADFTAQVIVLNHPGQISNGYTPVLDCHTAHIACKFAEIKEKVDRRTGKSTEENPKSIKSGDAAIVNLVPSKPLCVESFQEFPPLGRFAVR

SEQ ID NO: 17496 - protein, 413 aa, Charadra deridens
  unsure (1)..(413): unsure at all Xaa locations
HVDSGKSTTTGHLIYKCGGIDKRTIEKFEKEAQEMGKGSFKYAWVLDKLKAERERGITIDIALWKFETAKYYVTIIDAPGHRDFIKNMITGTSQADCAVLIVAAGTGEFEAGISKNGQTREHALLAFTLGVKQLIVGVNKMDSTEPPYSESRFEEIKKEVSSYIKKIGYNPAAVAFVPISGWHGDNMLEASTKMPWFKGWNVERKEGKAEGKCLIEALDAILPPARPTDKALXLPLQDVYKIGGIGTVPVGRVETGILKPGTIVVFAPANITTEVKSVEMHHEALQEAVPGDNVGFNVKNVSVKELRRGYVAGDSKNNPPKGAADFTAQVIVLNHPGQISNGYTPVLDCHTAHIACKFAEIKEKVDRRTGKSTEDNPKSIKSGDAAIVNLVPSKPLCVESFQEFPPLGRFAVR

SEQ ID NO: 17497 - protein, 413 aa, Condica videns
HVDSGKSTTTGHLIYKCGGIDKRTIEKFEKEAQEMGKGSFKYAWVLDKLKAERERGITIDIALWKFETAKYYVTIIDAPGHRDFIKNMITGTSQADCAVLIVAAGTGEFEAGISKNGQTREHALLAFTLGVKQLIVGVNKMDSTEPPYSEPRFEEIKKEVSSYIKKIGYNPAAVAFVPISGWHGDNMLEASTKMPWFKGWNVERKEGKAEGKCLIEALDAILPPARPTDKPLRLPLQDVYKIGGIGTVPVGRVETGILKPGTIVVFAPANITTEVKSVEMHHEALQEAVPGDNVGFNVKNVSVKELRRGYVAGDSKNNPPKGAADFTAQVIVLNHPGQISNGYTPVLDCHTAHIACKFAEIKEKVDRRTGKSTEDNPKSIKSGDAAIVNLVPSKPLCVESFQEFPPLGRFAVR

SEQ ID NO: 17498 - protein, 413 aa, Cucullia convexipennis
HVDSGKSTTTGHLIYKCGGIDKRTIEKFEKEAQEMGKGSFKYAWVLDKLKAERERGITIDIALWKFETARYYVTIIDAPGHRDFIKNMITGTSQADCAVLIVAAGTGEFEAGISKNGQTREHALLAFTLGVKQLIVGVNKMDSTEPPYSESRFEEIKKEVSSYIKKIGYNPAAVAFVPISGWHGDNMLEASTKMPWFKGWNVERKEGKAEGKCLIEALDAILPPARPTDKALRLPLQDVYKIGGIGTVPVGRVETGILKPGTIVVFAPANITTEVKSVEMHHEALQEAVPGDNVGFNVKNVSVKELRRGYVAGDSKNNPPKGAADFTAQVIVLNHPGQISNGYTPVLDCHTAHIACKFAEIKEKVDRRTGKSTEDNPKSIKSGDAAIVNLVPSKPLCVESFQEFPPLGRFAVR

SEQ ID NO: 17499 - protein, 413 aa, Elaphria grata
  unsure (1)..(413): unsure at all Xaa locations
HVDSGKSTTTGHLIYKCGGIDKRTIEKFEKEAQEMGKGSFKYAWVLDKLKAERERGITIDIALWKFETAKYYVTIIDAPGHRDFIKNMITGTSQADCAVLIVAAGTGEFEAGISKNGXTREHALLAFTLGVKQLIVGVNKMDSTEPPYSESRFEEIKKEVSSYIKKIGYNPAAVAFVPISGWHGDNMLEASTKMPWFKGWNVERKEGKAEGKCLIEALDAILPPARPTDKALRLPLQDVYKIGGIGTVPVGRVETGILKPGTIVVFAPANITTEVKSVEMHHEALQEAVPGDNVGFNVKNVSVKELRRGYVAGDSKNNPPKGAADFTAQVIVLNHPGQISNGYTPVLDCHTAHIACKFAEIKEKVDRRTGKSTEDNPKSIKSGDAAIVNLVPSKPLCVESFQEFPPLGRFAVR

SEQ ID NO: 17500 - protein, 413 aa, Eudryas grata
HVDSGKSTTTGHLIYKCGGIDKRTIEKFEKEAQEMGKGSFKYAWVLDKLKAERERGITIDIALWKFETAKYYVTIIDAPGHRDFIKNMITGTSQADCAVLIVAAGTGEFEAGISKNGQTREHALLAFTLGVKQLIVGVNKMDSTEPPYSESRFEEIKKEVSSYIKKIGYNPAAVAFVPISGWHGDNMLEASTKMPWFKGWNVERKEGKAEGKCLIEALDAILPPARPTDKALRLPLQDVYKIGGIGTVPVGRVETGVLKPGTIVVFAPANITTEVKSVEMHHEALQEAVPGDNVGFNVKNVSVKELRRGYVAGDSKNNPPKGAADFTAQVIVLNHPGQISNGYTPVLDCHTAHIACKFAEIKEKVDRRTGKSTEDNPKSIKSGDAAIVNLVPSKPLCVESFQEFPPLGRFAVR

SEQ ID NO: 17501 - protein, 413 aa, Feralia major
HVDSGKSTTTGHLIYKFGGIDKRTIEKFEKEAQEMGKGSFKYAWVLDKLKAERERGITIDIALWKFETAKYYVTIIDAPGHRDFIKNMITGTSQADCAVLIVAAGTGEFEAGISKNGQTREHALLAFTLGVKQLIVGVNKMDSTEPPYSEPRFEEIKKEVSSYIKKIGYNPAAVAFVPISGWHGDNMLEPSTKMPWFKGWMVERKEGKAEGKCLIEALDAILPPARPTDKALRLPLQDVYKIGGIGTVPVGRVETGILKPGTVVVFAPANITTEVKSVEMHHEALQEAVPGDNVGFNVKNVSVKELRRGYVAGDSKNNPPKGAADFTAQVIVLNHPGQISNGYTPVLDCHTAHIACKFAEIKEKVDRRTGKSTEDNPKSIKSGDAAIVNLVPSKPLCVESFQEFPPLGRFAVR

SEQ ID NO: 17502 - protein, 413 aa, Lithophane hemina
HVDSGKSTTTGHLIYKCGGIDKRTIEKFEKEAQEMGKGSFKYAWVLDKLKAERERGITIDIALWKFETAKYYVTIIDAPGHRDFIKNMITGTSQADCAVLIVAAGTGEFEAGISKNGQTREHALLAFTLGVKQLIVGVNKMDSTEPPYSEPRFEEIKKEVSSYIKKIGYNPLAVAFVPISGWHGDNMLEPSTKMPWFKGWNVERKEGKAEGKCLIEALDAILPPARPTDKALRLPLQDVYKIGGIGTVPVGRVETGILKPGTIVVFAPANITTEVKSVEMHHEALQEAVPGDNVGFNVKNVSVKELRRGYVAGDSKNNPPKGAADFTAQVIVLNHPGQISNGYTPVLDCHTAHIACKFAEIKEKVDRRTGKSTEDNPKSIKSGDAAIVNLVPSKPLCVESFQEFPPLGRFAVR

SEQ ID NO: 17503 - protein, 413 aa, Nedra ramosula
  unsure (1)..(413): unsure at all Xaa locations
HVDSGKSTTTGHLIYKCGGIDKRTIEKFEKEAQEMGKGSFKYAWVLDKLKAERERGITIDIALWKFETAKYYVTIIDAPGHRDFIKNMITGTSQADCAVLIVAAGTGEFEAGISKNGQTREHALLAFTLGVKQLIVGVXKMDSTEPPYSESRFEEIKKEVSSYIKKIGYNPAAVAFVPISGWHGDNMLEASTKMPWFKGWNVERKEGKAEGKCLIEALDAILPPARPTDKALRLPLQDVYKIGGIGTVPVGRVETGILKPGTIVVFAPANITTEVKSVEMHHEALQEAVPGDNVGFNVKNVSVKELRRGYVAGDSKNNPPKGAADFTAQVIVLNHPGQISNGYTPVLDCHTAHIACKFAEIKEKVDRRTGKSTEDNPKSIKSGDAAIVNLVPSKPLCVESFQEFPPLGRFAVR

SEQ ID NO: 17504 - protein, 413 aa, Oncocnemis obscurata
HVDSGKSTTTGHLIYKCGGIDKRTIEKFEKEAQEMGKGSFKYAWVLDKLKAERERGITIDIALWKFETAKYYVTIIDAPGHRDFIKNMITGTSQADCAVLIVAAGTGEFEAGISKNGQTREHALLAFTLGVKQLIVGVNKMDSTEPPYSESRFEEIKKEVSSYIKKIGYNPAAVAFVPISGWHGDNMLEPSTKMPWFKGWNVERKEGKAEGKCLIEALDAILPPARPTDKPLRLPLQDVYKIGGIGTVPVGRVETGVLKPGTIVVFAPANITTEVKSVEMHHEALQEAVPGDNVGFNVKNVSVKELRRGYVAGDSKNNPPKGAADFTAQVIVLNHPGQISNGYTPVLDCHTAHIACKFAEIKEKVDRRTGKSTEDNPKSIKSGDAAIVNLVPSKPLCVESFQEFPPLGRFAVR

SEQ ID NO: 17505 - protein, 413 aa, Orthodes crenulata
HVDSGKSTTTGHLIYKCGGIDKRTIEKFEKEAQEMGKGSFKYAWVLDKLKAERERGITIDIALWKFETAKYYVTIIDAPGHRDFIKNMITGTSQADCAVLIVAAGTGEFEAGISKNGQTREHALLAFTLGVKQLIVGVNKMDSTEPPYSEPRFEEIKKEVSSYIKKIGYNPAAVAFVPISGWHGDNMLEPSTKMPWFKGWNVERKEGKAEGKCLIEALDAILPPARPTDKALRLPLQDVYKIGGIGTVPVGRVETGILKPGTIVVFAPANITTEVKSVEMHHEALQEAVPGDNVGFNVKNVSVKELRRGYVAGDSKNNPPKGAADFTAQVIVLNHPGQISNGYTPVLDCHTAHIACKFAEIKEKVDRRTGKSTEDNPKSIKSGDAAIVNLVPSKPLCVESFQEFPPLGRFAVR

SEQ ID NO: 17506 - protein, 413 aa, Paectes pygmaea
HVDSGKSTTTGHLIYKCGGIDKRTIEKFEKEAQEMGKGSFKYAWVLDKLKAERERGITIDIALWKFETAKYYVTIIDAPGHRDFIKNMITGTSQADCAVLIVAAGTGEFEAGISKNGQTREHALLAFTLGVKQLIVGVNKMDSTEPPYSESRFEEIKKEVSSYIKKIGYNPAAVAFVPISGWHGDNMLEASTKMPWFKGWNVERKEGKAEGKCLIEALDAILPPARPTDKALRLPLQDVYKIGGIGTVPVGRVETGVLKPGTVVVFAPAQITTEVKSVEMHHEALQEAVPGDNVGFNVKNVSVKELRRGYVAGDSKNNPPRGAADFTAQVIVLNHPGQISNGYTPVLDCHTAHIACKFAEIKEKVDRRTGKSTEDNPKSIKSGDAAIVNLVPSKPLCVESFQEFPPLGRFAVR

SEQ ID NO: 17507 - protein, 413 aa, Panthea furcilla
HVDSGKSTTTGHLIYKCGGIDKRTIEKFEKEAQEMGKGSFKYAWVLDKLKAERERGITIDIALWKFETAKYYVTIIDAPGHRDFIKNMITGTSQADCAVLIVAAGTGEFEAGISKNGQTREHALLAFRLGVKQLIVGVNKMDSTEPPYSEPRFEEIKKEVSSYIKKIGYNPAAVAFVPISGWHGDNMLEASTKMPWFKGWNVERKEGKAEGKCLIEALDAILPPARPTDKALRLPLQDVYKIGGIGTVPVGRVETGILKPGTIVVFAPANITTEVKSVEMHHEALQEAVPGDNVGFNVKNVSVKELRRGYVAGDSKNNPPKGAADFTAQVIVLNHPGQISNGYTPVLDCHTAHIACKFAEIKEKVDRRTGKSTEDNPKSIKSGDAAIVNLVPSKPLCVESFQEFPPLGRFAVR

SEQ ID NO: 17508 - protein, 413 aa, Psaphida resumens
HVDSGKSTTTGHLIYKCGGIDKRTIEKFQKEAQEMGKGSFKYAWVLDKLKAERERGITIDIALWKFETAKYYVTIIDAPGHRDFIKNMITGTSQADCAVLIVAAGTGEFEAGISKNGQTREHALLAFTLGVKQLIVGVNKMDSTEPPYSESRFEEIKKEVSSYIKKIGYNPAAVAFVPISGWHGDNMLEPSTKMPWFKGWLVERKEGKAEGKCLIEALDAILPPARPTDKALRLPLQDVYKIGGIGTVPVGRVETGILKPGTIVVFAPANITTEVKSVEMHHEALQEAVPGDNVGFNVKNVSVKELRRGYVAGDSKNNPPKGAADFTAQVIVLNHPGQISNGYTPVLDCHTAHIACKFAEIKEKVDRRTGKSTEDNPKSIKSGDAAIVNLVPSKPLCVESFQEFPPLGRFAVR

SEQ ID NO: 17509 - protein, 413 aa, Psychomorpha epimenis
HVDSGKSTTTGHLIYKCGGIDKRTIEKFEKEAQEMGKGSFKYAWVLDKLKAERERGITIDIALWKFETAKYYVTIIDAPGHRDFIKNMITGTSQADCAVLIVAAGTGEFEAGISKNGQTREHALLAFTLGVKQLIVGVNKMDSTEPPYSESRFEEIKKEVSSYIKKIGYNPAAVAFVPISGWHGDNMLEASTKMPWFKGWNVERKEGKAEGKCLIEALDAILPPARPTDKPLRLPLQDVYKIGGIGTVPVGRVETGVLKPGTIVVFAPANITTEVKSVEMHHEALQEAVPGDNVGFNVKNVSVKELRRGYVAGDSKNNPPKGAADFTAQVIVLNHPGQISNGYTPVLDCHTAHIACKFAEIKEKVDRRTGKSTEDNPKSIKSGDAAIVNLVPSKPLCVESFQEFPPLGRFAVR

SEQ ID NO: 17510 - protein, 413 aa, Raphia abrupta
HVDSGKSTTTGHLIYKCGGIDKRTIEKFEKEAQEMGKGSFKYAWVLDKLKAERERGITIDIALWKFETAKYYVTIIDAPGHRDFIKNMITGTSQADCAVLIVAAGTGEFEAGISKNGQTREHALLAFTLGVKQLIVGVNKMDSTEPPYSESRFEEIKKEVSSYIKKIGYNPAAVAFVPISGWHGDNMLEPSTKMPWFKGWLVERKEGKAEGKCLIEALDAILPPARPTDKPLRLPLQDVYKIGGIGTVPVGRVETGILKPGTIVVFAPANITTEVKSVEMHHEALQEAVPGDNVGFNVKNVSVKELRRGYVAGDSKNNPPKGAADFTAQVIVLNHPGQISNGYTPVLDCHTAHIACKFAEIKEKVDRRTGKSTEDNPKSIKSGDAAIVNLVPSKPLCVESFQEFPPLGRFAVR

SEQ ID NO: 17511 - protein, 413 aa, Spragueia leo
HVDSGKSTTTGHLIYKCGGIDKRTIEKFEKEAQEMGKGSFKYAWVLDKLKAERERGITIDIALWKFETAKYYVTIIDAPGHRDFIKNMITGTSQADCAVLIVAAGTGEFEAGISKNGQTREHALLAFTLGVKQLIVGVNKMDSTEPPYSESRFEEIKKEVSSYIKKIGYNPAAVAFVPISGWHGDNMLEASTKMPWFKGWQVERKEGKAEGKCLIEALDAILPPARPTDKPLRLPLQDVYKIGGIGTVPVGRVETGILKPGTIVVFAPANITTEVKSVEMHHEALQEAVPGDNVGFNVKNVSVKELRRGYVAGDSKNNPPKGAADFTAQVIVLNHPGQISNGYTPVLDCHTAHIACKFAEIKEKVDRRTGKSTEDNPKSIKSGDAAIVNLVPSKPLCVESFQEFPPLGRFAVR

SEQ ID NO: 17512 - protein, 413 aa, Stiria rugifrons
  unsure (1)..(413): unsure at all Xaa locations
HVDSGKSTTTGHLIYXCGGIDKRTIEKFEKEAQEMGXGSFXYAWVLDKLKAERXRGIXIDIALWKFETAKYYVTIIDAPGHRDFIKNMITGTSQADCAVLIVAAGTGEFEAGISKNGQTREHALLAFTLGVKQLIVGVNKMDSTEPPYSESRFEEIKKEVSSYIKKIGYNPAAVAFVPISGWHGDNMLEPSTKMPWFKGWMVERKEGKAEGKCLIEALDAILPPARPTDKPLRLPLQDVYKIGGIGTVPVGRVETGVLKPGTIVGFAPANITTEVKSVEMHHEALQEAVPGDNVGFNVKNVSVKELRRGYVAGDSKNNPPKGAADFTAQVIVLNHPGQISNGYTPVLDCHTAHIACKFAEIKEKVDRRTGKSTEDNPKSIKSGDAAIVNLVPSKPLCVESFQEFPPLGRFAVR

SEQ ID NO: 17513 - protein, 413 aa, Tarachidia candefacta
HVDSGKSTTTGHLIYKCGGIDKRTIEKFEKEAQEMGKGSFKYAWVLDKLKAERERGITIDIALWKFETAKYYVTIIDAPGHRDFIKNMITGTSQADCAVLIVAAGTGEFEAGISKNGQTREHALLAFTLGVKQLIVGVNKMDSTEPPYSEPRFEEIKKEVSSYIKKIGYNPAAVAFVPISGWHGDNMLEASTKMPWFKGWQVERKEGKAEGKCLIEALDAILPPARPTDKALRLPLQDVYKIGGIGTVPVGRVETGILKPGTIVVFAPANITTEVKSVEMHHEALQEAVPGDNVGFNVKNVSVKELRRGYVAGDSKNNPPKGAADFTAQVIVLNHPGQISNGYTPVLDCHTAHIACKFAEIKEKVDRRTGKSTEDNPKSIKSGDAAIVNLVPSKPLCVESFQEFPPLGRFAVR

SEQ ID NO: 17514 - protein, 413 aa, Thioptera nigrofimbria
  unsure (1)..(413): unsure at all Xaa locations
HVDSGKSTTTGHLIYKCGGIDKRTIEKFEKEAQEMGKGSFKYAWVLDKLKAERERGITIDIALWKFETAKYYVTIIDAPGHRDFIKNMITGTSQADCAVLIVAAGTGEFEAGISKNGQTREHALLAFTLGVKQLIVGVNKMDSTEPPYSESRFEEIKKEVSSYIKKIGYNPAAVAFVPISGWHGDNMLEASPKMPWFKGWNVERKEGKAEGKSLIEALDAILPPARPTDKALRLPLQDVYKIGGIGTVPVGRVETGILKPGTIVVFAPANITTEVKSVEMHHEALQEAVPGDNVGFNVKNVSVKELRRGYVAGDSKNNPPKGAADFTAQVIVLNHPGQISNGYTPVLDCHTAHIACKFAEIKEKVDRRTGKSTEDNPKSIKSGDAAIVNLVPSKPLCVESFQEFPPXGRFAVR

SEQ ID NO: 17515 - protein, 413 aa, Polygrammate hebraeicum
HVDSGKSTTTGHLIYKCGGIDKRTIEKFEKEAQEMGKGSFKYAWVLDKLKAERERGITIDIALWKFETAKYYVTIIDAPGHRDFIKNMITGTSQADCAVLIVAAGTGEFEAGISKNGQTREHALLAFTLGVKQLIVGVNKMDSTEPPYSESRFEEIKKEVSSYIKKIGYNPAAVAFVPISGWHGDNMLEPSTKMPWFKGWLVERKEGKAEGKCLIEALDAILPPARPTDKPLRLPLQDVYKIGGIGTVPVGRVETGVLKPGTIVVFAPANITTEVKSVEMHHEALQEAVPGDNVGFNVKNVSVKELRRGYVAGDSKNNPPKGAADFTAQVIVLNHPGQISNGYTPVLDCHTAHIACKFAEIKEKVDRRTGKSTEDNPKSIKSGDAAIVNLVPSKPLCVESFQEFPPLGRFAVR

SEQ ID NO: 17516 - protein, 413 aa, Datana perspicua
  unsure (1)..(413): unsure at all Xaa locations
HVDSGKSTTTGHLIYKCGGIDKRTIEKFEKEAQEMGKGSFKYAWVLDKLKAERERGITIDIALWKFETAKYYVTIIDAPGHRDFIKNMITGTSQADCAVLIVAAGTGEFEAGISKNGQTREHALLAFTLGVKQLIVGVNKMDSTEPPYSESRFEEIKKEVSSYIKKIGYNPAAVAFVPISGWHGDNMLEASTKIPWFKGWNVERKEGKAEGKCLIEALDAILPPARPTDKALRLPLQDVYKIGGIGTVPVGRVETGILKPGTIVVFAPANITTEVKSVEIHHEALQEXVPGDNVGFNVKNVSVKELRRGYVAGDSKNNPPKGAADFTAQVIVLNHPGQISNGYTPVLDCHTAHIACKFAEIKEKVDRRTGKSTEDNPKSIKSGDAAIVNLVPSKPLCVESFQEFPPLGRFAVR

SEQ ID NO: 17517 - protein, 413 aa, Furcula cinerea
HVDSGKSTTTGHLIYKCGGIDKRTIEKFEKEAQEMGKGSFKYAWVLDKLKAERERGITIDIALWKFETAKYYVTIIDAPGHRDFIKNMITGTSQADCAVLIVAAGTGEFEAGISKNGQTREHALLAFTLGVKQLIVGVNKMDSTEPPYSESRFEEIKKEVSSYIKKIGYNPAAVAFVPISGWHGDNMLEPSTKMPWFKGWQVERKEGKAEGKCLIEALDAILPPARPTDKALRLPLQDVYKIGGIGTVPVGRVETGILKPGTIVVFAPANITTEVKSVEMHHEALQEAVPGDNVGFNVKNVSVKELRRGYVAGDSKNNPPKGAADFTAQVIVLNHPGQISNGYTPVLDCHTAHIACKFAEIKEKVDRRTGKSTEDNPKSIKSGDAAIVNLVPSKPLCVESFQEFPPLGRFAVR

SEQ ID NO: 17518 - protein, 413 aa, Symmerista albifrons
HVDSGKSTTTGHLIYKCGGIDKRTIEKFEKEAQEMGKGSFKYAWVLDKLKAERERGITIDIALWKFETAKYYVTIIDAPGHRDFIKNMITGTSQADCAVLIVAAGTGEFEAGISKNGQTREHALLAFTLGVKQLIVGVNKMDSTEPPYSEPRFEEIKKEVSSYIKKIGYNPAAVAFVPISGWHGDNMLEPSTKMPWFKGWLVERKEGKAEGKCLIEALDAILPPARPTDKALRLPLQDVYKIGGIGTVPVGRVETGILKPGTVVVFAPANITTEVKSVEMHHEALQEAVPGDNVGFNVKNVSVKELRRGYVAGDSKNNPPKGAADFTAQVIVLNHPGQISNGYTPVLDCHTAHIACKFAEIKEKVDRRTGKSTEDNPKSIKSGDAAIVNLVPSKPLCVESFQEFPPLGRFAVR

SEQ ID NO: 17519 - protein, 413 aa, Estigmene acrea
HVDSGKSTTTGHLIYKCGGIDKRTIEKFEKEAQEMGKGSFKYAWVLDKLKAERERGITIDIALWKFETSKYYVTIIDAPGHRDFIKNMITGTSQADCAVLIVAAGTGEFEAGISKNGQTREHALLAFTLGVKQLIVGVNKMDSTEPPYSESRFEEIKKEVSSYIKKIGYNPAAVAFVPISGWHGDNMLEPSTKMPWFKGWQVERKEGKADGKCLIEALDAILPPARPTDKALRLPLQDVYKIGGIGTVPVGRVETGILKPGTIVVFAPANITTEVKSVEMHHEALQEAVPGDNVGFNVKNVSVKELRRGYVAGDSKNNPPKGAADFTAQVIVLNHPGQISNGYTPVLDCHTAHIACKFAEIKEKVDRRTGKSTEDNPKSIKSGDAAIVNLVPSKPLCVESFQEFPPLGRFAVR

SEQ ID NO: 17520 - protein, 413 aa, Hypoprepia miniata
HVDSGKSTTTGHLIYKCGGIDKRTIEKFEKEAQEMGKGSFKYAWVLDKLKAERERGITIDIALWKFETAKYYVTIIDAPGHRDFIKNMITGTSQADCAVLIVAAGTGEFEAGISKNGQTREHALLAFTLGVKQLIVGVNKMDSTEPPYSEPRFEEIKKEVSSYIKKIGYNPAAVAFVPISGWHGDNMLEPSTKMPWFKGWNVERKEGKAEGKCLIEALDAILPPARPTDKPLRLPLQDVYKIGGIGTVPVGRVETGILKPGTIVVFAPANITTEVKSVEMHHEALQEAVPGDNVGFNVKNVSVKELRRGYVAGDSKNNPPKGAADFTAQVIVLNHPGQISNGYTPVLDCHTAHIACKFAEIKEKVDRRTGKSTEDNPKSIKSGDAAIVNLVPSKPLCVESFQEFPPLGRFAVR

SEQ ID NO: 17521 - protein, 447 aa, Leishmania braziliensis
MGKDKVHMNLVVVGHVDAGKSTATGHLIYKCGGIDKRTIEKFEKEAAEMGKASFKYAWVLDKLKAERERGITIDIALWKFESPKSVFTIIDAPGHRDFIKNMITGTSQADAAILMIDSTQGGFEAGVSKDGQTREHALLAFTLGVKQMVVCCNKMDDKTVQYSQARYEEISKEVGTYLKRVGYNPEKVRFIPISGWQGDNMIDKSESMAWYKGPTLLDALDMLAGAVRPVDKPGAAPADVYKIGGIGTVPVGRVETGIMKPGDVVTFAPANVTTEVKSIEMHHEQLAEAVPGDNVGFNVKNVSVKDIRRGNVWGNSKNDPAEEPADFTAQVIVLNHPGQISNGYAPVLDCHTSHIACRFGTIESKIDRRSGKDVEKNPKAIKSGDAAIVKMVPQKPMCVEVFNDYPPLGRFAVRDMRRTVAVGIIKAVSKKDGSRKVTKAAAKAAKK

SEQ ID NO: 17522 - protein, 449 aa, Leishmania donovani
MGKDKVHMNLVVVGHVDAGKSTATGHLIYKCGGIDKRTIEKFEKEAAEIGKASFKYAWVLDKLKAERERGITIDIALWKFESPKSVFTIIDAPGHRDFIKNMITGTSQADAAILMIDSTHGGFEAGISKDGQTREHALLAFTLGVKQMVVCCNKMDDKTVTYAQSRYDEISKEVGAYLKRVGYNPEKVRFIPISGWQGDNMIERSDNMPWYKGPTLLDALDMLEPPVRPVDKPLRLPLQDVYKIGGIGTVPVGRVETGIMKPGDVVTFAPANVTTEVKSIEMHHEQLAEAQPGDNVGFNVKNVSVKDIRRGNVCGNSKNDPPKEAADFTAQVIVLNHPGQISNGYAPVLDCHTSHIACRFAEIESKIDRRSGKELEKNPKAIKSGDAAIVKMVPQKPMCVEVFNDYAPLGRFAVRDMRQTVAVGIIKGVNKKEGSGGKVTKAAAKAAKK

SEQ ID NO: 17523 - protein, 449 aa, Trypanosoma brucei
MGKEKVHMNLVVVGHVDAGKSTATGHLIYKCGGIDKRTIEKFEKEAADIGKASFKYAWVLDKLKAERERGITIDIALWKFESPKSVFTIIDAPGHRDFIKNMITGTSQADAAILIIASAQGEFEAGISKDGQTREHALLAFTLGVKQMVVCCNKMDDKTVNYGQERYDEIVKEVSAYIKKVGYNVEKVRFVPISGWQGDNMIEKSEKMPWYKGPTLLEALDMLEPPVRPSDKPLRLPLQDVYKIGGIGTVPVGRVETGVMKPGDVVTFAPANVTTEVKSIEMHHEQLAEATPGDNVGFNVKNVSVKDIRRGNVCGNTKNDPPKEAADFTAQVIILNHPGQIGNGYAPVLDCHTSHIACKFAEIESKIDRRSGKELEKAPKSIKSGDAAIVRMVPQKPMCVEVFNDYAPLGRFAVRDMRQTVAVGIIKAVTKKDGSGGKVTKAAVKASKK

SEQ ID NO: 17524 - protein, 398 aa, Trypanosoma brucei
AGKSTATGHLIYKCGGIDKRTIEKFEKEAADIGKASFKYAWVLDKLKAERERGITIDIALWKFESPKSVFTIIDAPGHRDFIKNMITGTSQADAAILIIASAQGEFEAGISKDGQTREHALLAFTLGVKQMVVCCNKMDDKTVNYGQERYDEIVKEVSAYIKKVGYNVEKVRFVPISGWQGDNMIEKSEKMPWYKGPTLLEALDMLEPPVRPSDKPLRLPLQDVYKIGGIGTVPVGRVETGVMKPGDVVTFAPANVTTEVKSIEMHHEQLAEATPGDNVGFNVKNVSVKDIRRGNVCGNTKNDPPKEAADFTAQVIILNHPGQIGNGYAPVLDCHTSHIACKFAEIESKIDRRSGKELEKAPKSIKSGDAAIVRMVPQKPMCVEVFNDYAPLGRFAVR

SEQ ID NO: 17525 - protein, 449 aa, Trypanosoma cruzi
MGKEKVHMNLVVVGHVDAGKSTATGHLIYKCGGIDKRTIEKFEKEAAEIGKSSFKYAWVLDKLKAEREPGITIDIALWKFESPKSVFTIIDAPGHRDFIKNMITGTPQADAAVLVIASSQGEFEAGISKDGQTREHALLAFTLGVKQMVVCCNKMDDKSVNFAQERYDEIVKEVSAYLKKVGYNVEKVRFIPISGWQGDNMIDKSENMPWYKGPTLLEALDMLEPPVRPSDKPLRLPLQDVYKIGGIGTVPVGRVETGTMKPGDVVTFAPANVTTEVKSIEMHHEQLAEATPGDNVGFNVKNVSVKDIRRGNVCGNSKNDPPKEAADFTAQVIILNHPGQIGNGYAPVLDCHTCHIACKFAEIESKIDRRSGKELEKNPKSIKSGDAAMVRMVPQKPMCVEVFNDYAPLGRFAVRDMRQTVAVGIIKAVTKKDGGAGKVTKAAAKAAKK

SEQ ID NO: 17526 - protein, 395 aa, Trypanosoma cruzi
STATGHLIYKCGGIDKRTIEKFEKEAAEIGKSSFKYAWVLDKLKAERERGITIDIALWKFESPKSVFTIIDAPGHRDFIKNMITGTSQADAAVLVIASSQGEFEAGISKDGQTREHALLAFTLGVKQMVVCCNKMDDKSVNFAQERYDEIVKEVSAYLKKVGYNVEKVRFIPISGWQGDNMIDKSENMPWYKGPTLLEALDMLEPPVRPSDKPLRLPLQDVYKIGGIGTVPVGRVETGTMKPGDVVTFAPANVTTEVKSIEMHHEQLAEATPGDNVGFNVKNVSVKDIRRGNVCGNSKNDPPKEAADFTAQVIILNHPGQIGNGYAPVLDCHTCHIACKFAEIESKIDRRSGKELEKNPKSIKSGDAAMVRMVPQKPMCVEVFNDYAPLGRFAVR

SEQ ID NO: 17527 - protein, 449 aa, Trypanosoma brucei brucei
MGKEKVHMNLVVVGHVDAGKSTATGHLIYKCGGIDKRTIEKFEKEAADIGKASFKYAWVLDKLKAERERGITIDIALWKFESPKSVFTIIDAPGHRDFIKNMITGTSQADAAILIIASAQGEFEAGISKDGQTREHALLAFTLGVKQMVVCCNKMDDKTVNYGQERYDEIVKEVSAYIKKVGYNVEKVRFVPISGWQGDNMIEKSEKMPWYKGPTLLEALDMLEPPVRPSDKPLRLPLQTCTKIGGIGTVPVGRVETGVMKPGDVVTFAPANVTTEVKSIEMHHEQLAEATPGDNVGFNVKNVSVKDIRRGNVCGNTKNDPPKEAADFTAQVIILNHPGQIGNGYAPVLDCHTSHIACKFAEIESKIDRRSGKELEKAPKSIKSGDAAIVRMVPQKPMCVEVFNDYAPLGRFAVRDMRQTVAVGIIKAVTKKDGSGGKVTKAAVKASKK

SEQ ID NO: 17528 - protein, 587 aa, Trichomonas vaginalis
MDSVSVPKYQSFSSTKFKLNGKLRFEEVSHFFMSTPLKIEKPKTAGGFTLSLGNGTKIEIKPKVETKPVVLTTSKPAENKPQEEPKPAPKPEPKPEPKPEPKPAPKPEPKPEPKPEPKPEPKPEPKAEPKPEPKKEEAEEEEDIEEEEKFEGEILDETAKKHFNIVFIGHVDAGKSTLCGHVLYQAGCVDQRTIEQYQAESAKEGRGSWYFSWVMDLSKEERSKGKTEEVGVAHFETAQNKYTILDAPGHRSYVPQMIGGAVQADVAVLVISARNGEFEAGFENGGQTSEHLLIARTAGVREIIIVVNKMDDPTVKWSKERFDQIVTKFTPFIEREIGFKKDQYTYIPIAALTGFNLKQRSNECPWYNGPTLFEKLDSLKPPVRNETDSFRLPVIDRYKTKHVIASGKLEKGVIKEGDQVIVMPSRKLGTISSIFVDENKIRRAVPGDNIRVALSGIDMADINSGSVICPVNAPCDVAQKVIAKIRIVPSGPELITAGYEAMCHIHTETVPVSVEKLRTLQIPGRELEKNPRFIKRGCLAEVILKFDHPICVEVAKDFPQLGRFIIRKEGFTTIVGLVDKLPKATGK

SEQ ID NO: 17529 - protein, 422 aa, Trichomonas vaginalis
VDAGKSTTTGHLIYKCGGLDKRKLAAIEKEAEQLGKSSFKYAFVMDSLKAERERGITIDISLWKFEGQKFSFTIIDAPGHRDFIKNMITGTSQADAAILVIDSTLGGFEAGIAEQGQTREHALLAFTLGIKQVIVAVNKMDDKTVNYNKARFDEITAEMTRILTGIGYKPEMFRFVPISGWAGDNMTEKSPNMPWYNGPYLLEALDSLQPPKRPFDKPLRLPLQDVYKINGIGTVPVGRVESGTMKPGMIVNFAPSTVTAEVKSIEMHHESLPEALPGDNIGFNVKNVSTADVKRGYVVGDTKRDPPVECASFTAQMIISNHPGKIHAGYQPVFDCHTAHIACKFDKLIQRIDRRHGKKATENPEYIQKDDAAIVEVVPSKPLVVESFQEYPPLGRFAIRDMKQTVAVGVIRSVNKKPNPIK

SEQ ID NO: 17530 - protein, 396 aa, Giardia intestinalis
STLTGHLIYKCGGIDQRTIDEYEKRATEMGKGSFKYAWVLDQLKDERERGITINIALWKFETKKYIVTIIDAPGHRDFIKNMITGTSQADVAILVVAAGQGEFEAGISKDGQTREHATLANTLGIKTMIICVNKMDDGQVKYSKERYDEIKGEMMKQLKNIGWKKAEEFDYIPTSGWTGDNIMEKSDKMPWYEGPCLIDAIDGLKAPKRPTDKPLRLPIQDVYKISGVGTVPAGRVETGELAPGMKVVFAPTSQVSEVKSVEMHHEELKKAGPGDNVGFNVRGLAVKDLKKGYVVGDVTNDPPVGCKSFTAQVIVMNHPKKIQPGYTPVIDCHTAHIACQFQLFLQKLDKRTLKPEMENPPDAGRGDCIIVKMVPQKPLCCETFNDYAPLGPFAVR

SEQ ID NO: 17531 - protein, 465 aa, Giardia intestinalis
MSSQEVVQVEEEKRKNLNIVFIGHVDAGKSTISGHLVSDLGKLDKRQLEKLEQQAKALNRESWKYAFAMDTSEEEREKGKTVECARESFLTPNGRRITIIDAPGHKGFVHNMISGAAQADTAILVISARKGEFESGFERGGQTSEHALLAYVNGIKQIVCLINKMDDITVEYCKKRYDSIVSQLKLYLENVGYASKNIFFLPISGFTGENLISTKELNPKLSEWYSGPSFLDLLDELKVPKRDTKSPLCACVSGHYKENSAFIVVKVEQGKMSIGDTVLCLPENKAFDILDIEGEQEEGSKLVQAKAGDNVRIKVKDDIWEFLTEGSVICAQPSPGQSPSVSVTNRFQANLLIVSTAENLVITSGYSCVAHINLQQVGCQIRAILADLDLKTGKVKPEYIVSTEPLKVRRPTHVLSKARIICEIITQKPVCVQSTPGHEALGRIILRHESDTVAIGYIVSVKPAK

SEQ ID NO: 17532 - protein, 401 aa, Physarum polycephalum
AGKSTTTGHLIYKCGGIDKRTIEKFEKEAAEMGKGSFKYAWVLDKLKSERERGITIDIALWKFETAKYYITIIDAPGHRDFIKNMITGTSQADAAVLVIASPTGEFEAGIAKTGQTREHALLAYTLGVKQMIVAINKMDEKSVNWSQARYDEIVKETSSFVKKIGYNPEKIAFVPISGWNGDNMLEKSANLPWYKGPTLLEALDQITEPKRPTDKPLRVPLQDVYKIGGIGTVPVGRVETGILKPGMIVTFAPANLSTEVKSVEMHHVALPEAVPGDNVGFNVKNLSVKDIRRGMVAGDSKNSPPARAESFNAQVIILNHPGTIHAGYAPVLDCHTAHIACKFTEILSKVDRRTGQAVEEVPKNIKNGDAAIVKLTPSKPMCVESFTDFPPLGRFAVRDMR

SEQ ID NO: 17533 - protein, 443 aa, Plasmodium berghei
MGKEKTHINLVVIGHVDSGKSTTTGHIIYKLGGIDRRTIEKFEKESAEMGKGSFKYAWVLDKLKAERERGITIDIALWKFETPRYFFTVIDAPGHKHFIKNMITGTSQADVALLVVPAEVGGFEGAFSKEGQTKEHALLAFTLGVKQIVVGVNKMDTVKYSEDRYEEIKKEVKDYLKKVGYQADKVDFIPISGFEGDNLIEKSDKTPWYKGRTLIEALDTMEPPKRPYDRPLRIPLQGVYKIGGIGTVPVGRVETGILKAGMVLNFAPSAVVSECKSVEMHKEVLEEARPGDNIGFNVKNVSVKEIKRGYVASDTKNEPAKGCSKFTAQVIILNHPGEIKNGYTPVLDCHTSHISCKFLNIDSKIDKRSGKVVEESPKAIKSGDSALVTLEPKKPMVVETFTEYPPLGRFAIRDMRQTIAVGIIKSVEKKEPGAVSAKAPAKK

SEQ ID NO: 17534 - protein, 401 aa, Spironucleus vortens
NGKSTLTGHLIFKCGGIDQRTLDEYEKKANELGKGSFKYAWVLDQLKDERERGITINIALWKFETKKFIVTIIDAPGHRDFIKNMITGTSQADVAILVVAAGQGEFEAGISKEGQTREHATLANTLGIKTIILCINKMDDPNVNYSKDRYNEIKTEMTKTLVAIGYKKAPEFNYIPTSGWTGLNIMEKDTEKTGWYDGPCLIEAIDSLKPPKRPTDKCLRLPIQDVYKINGVGTVPAGRVESGCLKPNTLAVFAPTNTTAEVKSVEMHHEELPQAEPGDNVGFNVRGIAAKDIKKGYVVGDSKESDPPGRVKSFEAQVIIMNHPKKIQPGYTPVVDCHTNHMACEFTKFLQKLNSRTLKPEQENPTEAARGECIIAKITPTKEFSAESYELYPALGRFAVR

SEQ ID NO: 17535 - protein, 443 aa, Plasmodium falciparum (isolate K1 / Thailand)
MGKEKTHINLVVIGHVDSGKSTTTGHIIYKLGGIDRRTIEKFEKESAEMGKGSFKYAWVLDKLKAERERGITIDIALWKFETPRYFFTVIDAPGHKDFIKNMITGTSQADVALLVVPADVGGFDGAFSKEGQTKEHVLLAFTLGVKQIVVGVNKMDTVKYSEDRYEEIKKEVKDYLKKVGYQADKVDFIPISGFEGDNLIEKSDKTPWYKGRTLIEALDTMQPPKRPYDKPLRIPLQGVYKIGGIGTVPVGRVETGILKAGMVLNFAPSAVVSECKSVEMHKEVLEEARPGDNIGFNVKNVSVKEIKRGYVASDTKNEPAKGCSKFTAQVIILNHPGEIKNGYTPLLDCHTSHISCKFLNIDSKIDKRSGKVVEENPKAIKSGDSALVSLEPKKPMVVETFTEYPPLGRFAIRDMRQTIAVGIINQLKRKNLGAVTAKAPAKK

SEQ ID NO: 17536 - protein, 364 aa, Triops longicaudatus
LDKLKAERERGITIDIALWKFETAKFYVTIIDAPGHRDFIKNMITGTSQADCAVLIVAAGVGEFEAGISKNGQTREHALLAYTLGVKQLIVGVNKMDSTEPPYSENRFEEIKKEVSSYIKKIGYNPAAVAFVPISGWHGDNMLEASTNLPWYKGWAIERKEGKADGKTLLDALDAILPPSRPTDKPLRLPLQDVYKIGGIGTVPVGRVETGIIKPGMVVTFAPANITTEVKSVEMHHEALEEAVPGDNVGFNVKNVSVKELRRGYVAGDSKSNPPKGAADFYAQVIVLNHPGQISNGYTPVLDCHTAHIACKFAEIKEKCDRRTGKTTEENPKFIKSGDAAMITLVPSKPLCVESFSDFPPLGR

SEQ ID NO: 17537 - protein, 364 aa, Chaetopleura apiculata
LDKLKAERERGITIDIALWKFETTKYYVTVIDAPGHRDFIKNMITGTSQADCAVLIVAAGVGEFEAGISEQGQTREHALLAYTLGVKQLIIGVNKMDSTTPPFSQPRFEEISKEVGTYIKKVGYNPKAVAFVPISGWNGDNMLEVSSNTAWFKGWNIERKEGNASGKTLFEALDSILPPKRPTDKPLRLPLQDVYKIGGIGTVPVGRVETGIIKPGVIVKFSPCNITTEVKSVEMHHESLSEALPGDNVGFNVKNVSVKELKRGYVAGDSKNDPPMSAASFNAQVIILNHPGEIHAGYSPVLDCHTAHIACKFASLLEKVDRRTGKKLEDNPKMVKSGDAAIVQLIPSKPMTVETFTEYPPLGR

SEQ ID NO: 17538 - protein, 437 aa, Paramecium tetraurelia
MPKDKLHVNLVVIGHVDSGKSTTTGHLIYKLGGIDERTIKKFEDEANKLGKGSFKYAWVLDNLKAERERGITIDISLWKFETNKYYYTVIDAPGHRDFIKNMITGTSQADVALLMIASPAGEFEAGISKEGQTREHVLLAYTLGVKQMICATNKMDEKTVNYAQGRYDEIVKEMRDYLKKVGYNPDNVPFIPISGWVGDNMLEKSANFGWYKGPTLLEALDAVTPPKRPTEKPLRLPLQDVYKIGGIGTVPVGRVETGVLKPGMVVQFAPSAITTEVKSVEMHHEALPEAVPGDNVGFNVKNIAVKDLKRGFVCSDSKSDPARECQSFNAQVIIINHPGQIQNGYCPVLDCHTAHIACKFQEILSKNDRRTGKVIEEEPKFVKSGDAAMVKLIPTKPMCVEIFSEYPPLGRFAVRDMKQTVAVGVIKVVEKKELKKK

SEQ ID NO: 17539 - protein, 409 aa, Paramecium tetraurelia
VDSGKSTTTGHLIYKLGGIDERTIKKFEDEANKLGKGSFKYAWVLDNLKAERERGITIDISLWKFETNKYYYTVIDAPGHRDFIKNMITGTSQADVALLMIASPAGEFEAGISKEGQTREHVLLAYTLGVKQMICATNKMDEKTVNYAQGRYDEIVKEMRDYLKKVGYNPDNVPFIPISGWVGDNMLEKSANFGWYKGPTLLEALDAVTPPKRPTEKPLRLPLQDVYKIGGIGTVPVGRVETGVLKPGMVVQFAPSAITTEVKSVEMHHEALPEAVPGDNVGFNVKNIAVKDLKRGFVCSDSKSDPARECQSFNAQVIIIINHPGQIQNGYCPVLDCHTAHIACKFQEILSKNDRRTGKVIEEEPKFVKSGDAAMVKLIPTKPMCVEIFSEYPPLGRFAVRDMKQTVAV

SEQ ID NO: 17540 - protein, 407 aa, Euplotes aediculatus
VDSGKSTTTGHLIYKLGGTDARTIEKFEKESAEMGKGTFKYAWVLDKLKAERERGITIDIALWKFETTNRFYTIIDAPGHRDFIKNMITGTSQADAAILIIASGKGEFEAGISKEGQTREHALLAFTMGVKQMVVALNKMDAAEYDETRYKEIKKEVSEYLDKVGYKTDTMNFVPISGFNGDNLLERSTNMPWYTGPTLTEALDSFKQPKRPILKPLRLPLQDVYKIGGIGTVPVGRVETGVLKSGIVVVFAPKGVSAECKSVEMHHEAVEEAIPGNNVGFNVKGLSVKDIKRGFVAGDSKNDPPMDTENFVAHVIIMNHPGEIKAGYTPVIDVHTAHIACKFEELLTKADRRSGKKTDDPPKFLKAGDAGQIRLVPTKPLCIENFSRYAPLGRFAVRDMKQTVAVG

SEQ ID NO: 17541 - protein, 805 aa, Euplotes aediculatus
MDKKEDFPALGSLEKKKDANQQSNQKNKKKEDKKEDEKKEEVNTETQKPVEEVKKAKLKATVRTFVPKSSVPKEPVKINYYIPHEEPTLAEMDYFPTLGGPAPTAPVVSDAQIRHSEFLERHELFKPYICLIPKELWYVPQEYIDMYGFPIMSLLPELYAYLWNTYNIFFTPDAQWQTNSSTVMSTLGELWTHAEWRDRIIAKEQKEIEEWEREMREWEEENLEDEDGVSIDEMDSYGKGKKNKKNKKKKKDDKGKRPPPPPPKSLSSYKRFEKKKDETVVPKKNIGFKEVSEITFEEEVVEVDETRQPSSLVFIGHVDAGKSTICGNLMFMTGMVDERTTEKFKQEAKEKNRDSWWLAYVMDINDDEKSKGKTVEVGRATMETPTKRYTIFDAPGHKNYVPDMIMGAAMADVAALVISARKGEFEAGFERDGQTREHAQLARSLGVSKLVVVVNKMDEETVQWNEARYNDIVSGVTPFLIEQCGYKREDLIFIPISGLNGQNIEKLTPACTWYQGPTLIEILDNIEPPKRNADGPLRVPVLDKMKDRGVVAFGKVESGVIKIGSKLAVMPNNLKCQVVGIYNCKLELVRYANPGENIQIKVRMIDDENLINKGDVLCPYDNLAPLTDLFEAELSILELLPHRPIITPGYKSMMHLHTISDEIVIQTLAGVYELDGSGKEYLKKNPKYCKSGSKVIVKISTRVPVCLEKYEFIEHMGRFTLRDEGRTIALGKVLRYKPTVVKKVEEIPSNVEGDQAKDEESKTASFEYTGSETTLFQNEKKYDVLVYDPEEDTIVTSSNAAEYTE

SEQ ID NO: 17542 - protein, 406 aa, Euplotes aediculatus
VDSGKSTTTGHLIYKCGGIDARTIEKFEKESAEMGKGSFKYAFVLDNLKAERERGITIDIALWKFETPKRFYTIIDAPGHRDFIKNMITGTSQADAAILIIAAGKGEFEAGISKEGQTREHALLAYTMGVKQMIVAMNKMDAAEYDEERYNEIKKEVSEYLAKVGYKPDTMNFVPISGWNGDNLLENSTNMPWYKGPTLTEALDAFKQPKRPIAKPLRLPLQDVYKIGGIGTVPVGRVETGVLKAGIVVVFAPKGVSTECKSAEMHHEAVEEAIPGNNVGFNVKDSQVKDIKRGFVAETQRTTHQWTLRYFVAHVIIINHPGEIKAGYTPVIDVHTAHIACKFEELLTKADRRSGKKTDDLPKFLKAGDAGQIRLVPTEPLCIENFSSYAPLGRFAVRDMKQTVAV

SEQ ID NO: 17543 - protein, 446 aa, Stylonychia lemnae
MPKEKNHLNLVVIGHVDSGKSTSTGHLIYKCGGIDKRTIEKFEKEAAEMGKGSFKYAWVLDKLKAERERGITIDIALWNFETAKSVFTIIDAPGHRDFIKNMITGTSQADAAILIIASGQGEFEAGISKEGQTREHALLAFTMGVKQMIVAVNKMDDKSVNWDQGRFIEIKKELSDYLKKIWLQPRQDPFIPISGWHGDNMLEKSPNMPWFTGSTLIDALDALDQPKRPKDKPLRLPLQDVYKIGGIGTVPVGRVETGLLKPGMVLTFAPMNITTECKSVEMHHESLTEAEPGDNVGFTVKNLSVKDLRRGYVASDSKNDPAKDTTNFLAQVIVLNHPGQIQKGYAPVLDCHTAHIACKFDEIESKVDRRSGKVLEEEPKFIKSGEAALVRMVPQKPMCVEAFNQYPPLGRFAVRDMKQTVAVGVIKEVVKKEQKGMVTKAAQKKK

SEQ ID NO: 17544 - protein, 409 aa, Stylonychia mytilus
VDSGKSTSTGHLIYKCGGIDKRTIEKFEKEPAEMGKGSFKYAWVLDKLKAERERGITIDIALWKFETAKSVFTIIDAPGHRDFIKNMITGTSQADAAILIIASGQGEFEAGISKEGQTREHALLAFTMGVKQMIVAVNKMDDKSVNWDQGRFLEIKKELSDYLKKIGYNPEKIPFIPISGWHGDNMLEKSPNMPWFTGSTLIDALDALDQPKRPKDKPLRLPLQDVYKIGGIGTVPVGRVETGLLKPGMVLTFAPMNITTECKSVEMHHESLTEAEPGDNVGFNVKNLSVKDLRRGYVASDSKNDPAKDTTNFLAQVIVLNHPGQIQKGYAPVLDCHTAHIACKFDEIESKVDRRSGKVLEEEPKFIKSGEAALVRMVPQKPMCVEAFNQYPPLGRFAVRDMKQTVAVG

SEQ ID NO: 17545 - protein, 411 aa, Blepharisma japonicum
GHVDSGKSTSCGHLIYKCGGIDKRTIEKYEKEANEMGKSSFKYAWVLDKLKAERERGITIDISLFKFQTDKFYFTIIDAPGYRDFIKNMITGTSQADVAILIIAAGKGEFEAGYSKNGQTREHALLAFTLGVKQMVVGVNKMDDKSVEWKQDRYLEIKQGVSEYLKKGGYNPAKVPFIPISGCYGDNMVEKSTNMPWYDGPTLLGALDNVQPPKRHVEKPLRLPVQDVYKISGIGTVPVGRVETGVLRPGTVVVFGPSGISTEVKSVEMHHESLEEALPGDNVGFNVKNLSVKDIKRGYVASDSRSDPAKEEIDFTAQVIILNHPGQIQSVGYTPVLDCHTAHIACKFNEIKQKIDRRSGAVLEDEPKFVKSGDALIVRLIPSKPMCVETFTEYPPLGRFAVRDMKQTVAV

SEQ ID NO: 17546 - protein, 408 aa, Blepharisma japonicum
VDSGKSTSCGHLIYKCGGIDKRTIEKYEKEAKEMGKSSFKYAWVLDKLKAERERGITIDISLFKFQTDKFYFTIIDAPGHRDFIKNMITGTSQADVAILIIAAGKGEFEAGYSKNGQTREHALLAFTLGVKQMVVGVNKMDDKSAEWKQDRYLEIKQEVSEYLKKVGYNPAKVPFIPISGWLGDNMVEKSTNMPWYDGPTLLGALDNVQPPKRHVDKPLRLPVQDVYKISGIGTVPVGRVETGVLRPGTVVVFAPSGISTEVKSVEMHHESLEEALPGDNVGFNIKNIAVNQIKRGYVASDSRSDPARESIDFTAQVIILHHPGQISVGYTPVLDCHTAHIACRFNDLKQKVDRRSGAVLEQEPKFVKSGDAAIVTLIPTKSMCVEPFTEYPPLGRFAVRDMRQTVAV

SEQ ID NO: 17547 - protein, 409 aa, Stentor coeruleus
VDSGKSTSTGHLIYKCGGIDKRTIEKFEKEASEMGKSSFKYAWVLDKLKAERERGITIDISLFKFQTEKFYFTIIDAPGHRDFIKNMITGTSQADVAILIVASGKGEFEAGIGKNGQTREHGLLAFTLGVKQMIVGVNKMDDKSCNWSQARYDEIKNEVSQYLKKVGYNPDKIPFIPISGWLGDNMVERSPNLPWYNGPTLLGALDMIIPPKRHSDKPLRLPIQDVYKISGIGTVPVGRVETGSIKAGMVVVFAPSGVTTEVKSVEMHHETLEVANPGDNVGFNVKNVSVKDIKRGYVASDTKADPAKECENLTAQCIVLNHPGQISAGYTPVLDCHTAHIACRFNIIQKKIDRRTVASLEDELKVVKSGDAAFDVLGSPSKPMCVETFTEYPPLGRFAVRDMRQTVAV

SEQ ID NO: 17548 - protein, 409 aa, Stentor coeruleus
VDSGKSTTIGHLIYKCGGIDKRTIDKFDKDASDMGKSSFKYAWVLDKLKAERERGITIDISLFKFQTDKFYSTIIDAPGHRDFIKNMITGTSQADVAILIVASGKGEFEAGIGKNGQTREHGLLAFTLGVKQMIVGVNKMDDKSCNWSQERYEEIKKEVSQYLKKVGYKPDKIPFIPISGWLGDNMVESSPNLPWYNGPTLLGALDMIIPPKRHSDKPLRLPIQDVYKISGIGTVPVGRVETGSIKAGMVVVFAPSGVTTEVKSVEMHHETLEVANPGDNVGFNVKNLSVKDIKRGYVASDSKADPAKECENFTAQCIVLNHPGQIQAGYTPVLDCHTAHIACKFNIIQKKIDRRTGASLEDELKVVKSGDALFDVLGSPSKPMCVETFTEYPPLGRFAVRDMKQTVAV

SEQ ID NO: 17549 - protein, 426 aa, Phascolomyces articulosus
VVVIGHVDSGKSTTTGHLIYKCGGIDKRTIEKFEKEAAELGKGSFKYAWVLDKLKAERERGITIDIALWKFETPKYHVTVIDAPGHRDFIKNMITGTSQADCGILIIAAGTGEFEAGISKDGQTREHALLAFTLGVRQLIVAINKMDSTKYSEARYNEIVKEVSTFIKKIGYNPKSVPFVPISGWNGDNMLDESTNMPWFKGWTKETKAGSKTGKTLLEAIDNIDPPVRPSDKPLRLPLQDVYKIGGIGTVPVGRVETGVIKAGMVVTFAPANVTTEVKSVEMHHEQLAEGVPGDNVGFNVKNVSVKDIRRGNVCSDSKNDPAKESASFTAQVIVLNHPGQIGAGYSPVLDCHTAHIACKFAELLEKIDRRSGKKLEDAPKFVKSGDSAIVKMIPSKPMCVEAYTEYPPLGRFAVRDMRQTVAVGV

SEQ ID NO: 17550 - protein, 457 aa, Geodia cydonium
MPKEKTHINIVVIGHVDSGKSTTTGHLIYKCGGIDKRAIEKFEKEAQEIGKGSFKYAWVLDKLKAERAGITIDIALWKFETTKYYITVIDAPGHRDFIKNMITGTSQADCAVLIVASGTGEFEAGISKNGQTREHALLAYSLGVKQLIVGVNKMDSTEPPYSQARYDEITKEVGTYIKKVGYNPKAVAFVPISGWHGDNMLEESPNMKWFKGWNVERKEGNASGKTLFNPLDSILPPTRPTDKPLRLPLQDVYKIGGIGTVPVGRVETGILKPGTVVTFSPAGISTEVKSVEMHHEALTEALPGDNVGFNVKNISVKDIKRGMVAGDSKNDPPKEAKTFTAQVIVLNHPGQIHAGYAPVLDCHTAHIACKFTELKEKIDRSGKKLEDNPKFVKSGDAAIVILTPSKPMCVESFSEYPPLGRFAVRDMKQTVAVGVIKSVEKKEKEGKATKSAQKKGK

SEQ ID NO: 17551 - protein, 468 aa, Hydra magnipapillata
MSNKVKPHINIVVIGHVYSAKSTSTGHMIYKCGGIDKRQIATFEKEAQEMGKGAGKYAWVLDKLKAERGRGITIDIALWKFETTKYVVTIIDAPGHRDFIKNMITGTSQADCAVLIVASSTGEFEAGISKNGQTREHALLAFTLGVKQMIVAVNKIDNTEPPYSEARFNEIKKEISAYVKKVGYDPKTVPVLPVSGWHGDNMIEPSPNMSWYKGWEVEYKDTGKHTGKTLLEALDNIPLPARPSSKPLRLPLQDVYKIGGIGTVPVGRVETGILKPGIVVTFSPANLSTEVKSVEMHHESLPEALPGDNVGFNVKNVSIKDIRRGMVASDSKNDPAIEAASFKAQVIILNHPGEIHAGYQPVLDCHTAHIACKFAELLEKIDRRSGKVIETEPKMVKSGDAAIINLIPSKPMCVEYFAQYPPLGRFAVRDMRQTVAVGVIKEVDKTAAVAGKVTKSAQKAGVAAGKKK

SEQ ID NO: 17552 - protein, 468 aa, Hydra vulgaris
MSNKVKPHINIVVIGHVDSGKSTSTGHMIYKCGGIDKRQIEKFEKEAQEMGKGSFKYAWVLDKLKAERERGITIDIALWKFETTKYVVTIIDAPGHRDFIKNMITGTSQADCAVLIVASSTGEFEAGISKNGQTREHALLAFTLGVKQMIVAVNKIDNTEPPYSEARFNEIKKEISAYVKKVGYDPKTVPVLPVSGWHGDNMIEPSPNMSWYKGWEVEYKDTGKHTGKTLLEALDNIPLPARPSSKPLRLPLQDVYKIGGIGTVPVGRVETGILKPGMVVTFCPANLSTEVKSVEMHHESLPEALPGDNVGFNVKNVSIKDIRRGMVASDSKNDPAIEAASFKAQVIILNHPGEIHAGYQPVLDCHTAHIACKFAELLEKIDRRSGKVIETEPKMVKSGDAAIINLIPSKGMCVESFSQYPPLGRFAVRDMRQTVAVGVIKEVDKTVAVAGKVTKSAQKAGVAAGKKK

SEQ ID NO: 17553 - protein, 471 aa, Podocoryne carnea
MAPKEKAKIHINIVVIGHVDSGKSTSTGHLIYKCGGIDKRTIEKFEKEAQEMGKGSFKYAWVLDKLKAERERGITIDIALWKFETTKFYVTIIDAPGHRDFIKNMITGTSQADCAVLIVASSTGEFEAGISKNGQTREHALLAYTLGVKQLIIGVNKIDNTEPPYSEARFNEIKKEVEGYVKKVGYNPKAVAILPISGWHGDSMLEESPNTKWFKGWATERVDEDKKVINSSGKTLFEALDAIVPPSRPSNKPLRLPLQDVYKIGGIGTVPVGRVETGKIMPGMVVTFAPCGISTEVKSVEMHHTAMPEALPGDNVGFNVKNVSIKEIKRGMVASDSKNDPAKEAKTFYAQVIILNHPGEIHAGYQPVLDCHTAHVACKFTELKQKCDRRSGKVLEENPKLVKSGDAAMITLTPSKPMCVEAFSDYAPLGRFAVRDMRQTVAVGVIKSVEKAEAGGKMTKSAQKATGGKKK

SEQ ID NO: 17554 - protein, 413 aa, Austrosimulium mirabile
HVDSGKSTTTGHLIYKCGGIDKRTIEKFEKEAQEMGKGSFKYAWVLDKLKAERERGITIDIALWKFETSKYYVTIIDAPGHRDFIKNMITGTSQADCAVLIVAAGTGEFEAGISKNGQTREHALLAFTLGVKQLIVGVNKMDSTEPPFSESRFEEIKKEVSSYIKKIGYNPVCVPFVPISGWHGDNMLEVSVKMPWYKGWKVERKEGNADGKCLIEALDAILPPSRPTDKALRLPLQDVYKIGGIGTVPVGRVETGVIKPGMVVVFAPVNLTTEVKSVEMHHEALQEAGPGDNVGFNVKNVSVKELRRGYVAGDSKSNPPKGAENFTAQVIVLNHPGQISNGYTPVLDCHTAHIACKFSEIKEKVDRRTGKSTEDNPKAIKSGDAAIVILVPSKPLCVESFSEFPPLGRFAVR

SEQ ID NO: 17555 - protein, 413 aa, Cardiocladius sp.
HVDSGKSTTTGHLIYKCGGIDKRTIEKFEKEAQEMGKGSFKYAWALDKLKAERERGITIDIALWKFETAKYYVTIIDAPGHRDFIKNMITGTSQADCAVLIVAAGTGEFEAGISKNGQTREHALLAFTLGVKQLIVGVNKMDSTEPPYNEARFEEIKKEVSSYIKKIGYNPATVAFVPISGWHGDNMLEASSKMPWFKGWAVERKEGKADGKCLIEALDAILPPSRPTDKALRLPLQDVYKIGGIGTVPVGRVETGVIKPGMVVAFAPVNLTTEVKSVEMHHEALQEAVPGDNVGFNVKNVSVKELRRGYVAGDSKNNPPKGAADFTAQVIVLNHPGQISNGYTPVLDCHTAHIACKFGEIKEKVDRRSGKSVEDNPKSIKSGDAAMVVLVPSKPLCVESFSDFPPLGRFAVR

SEQ ID NO: 17556 - protein, 413 aa, Cnephia sp. S.x.east
HVDSGKSTTTGHLIYKCGGIDKRTIEKFEKEAQEMGKGSFKYAWVLDKLKAERERGITIDIALWKFETAKYYVTIIDAPGHRDFIKNMITGTSQADCAVLIVAAGTGEFEAGISKNGQTREHALLAFTLGVKQLIVGVNKMDSTEPPFSESRFEEIKKEVSSYIKKIGYNPTCVPFVPISGWHGDNMLEVSAKMPWYKGWKVERKEGNADGKCLIEALDAILPPSRPTDKPLRLPLQDVYKIGGIGTVPVGRVETGVIKPGMVVVFAPVNLTTEVKSVEMHHEALQEAGPGDNVGFNVKNVSVKELRRGYVAGDSKASPPKGAENFTAQVIVLNHPGQISNGYTPVLDCHTAHIACKFAEIKEKVDRRTGKSTEDNPKAIKSGDAAIVILVPSKPLCVESFSEFPPLGRFAVR

SEQ ID NO: 17557 - protein, 413 aa, Cnephia sp. S.x.west
HVDSGKSTTTGHLIYKCGGIDKRTIEKFEKEAQEMGKGSFKYAWVLDKLKAERERGITIDIALWKFETAKYYVTIIDAPGHRDFIKNMITGTSQADCAVLIVAAGTGEFEAGISKNGQTREHALLAFTLGVKQLIVGVNKMDSTEPPFSESRFEEIKKEVSSYIKKIGYNPTCVPFVPISGWHGDNMLEVSAKMPWYKGWKVERKEGNADGKCLIEALDAILPPSRPTDKALRLPLQDVYKIGGIGTVPVGRVETGVIKPGMVVVFAPVNLTTEVKSVEMHHEALQEAGPGDNVGFNVKNVSVKELRRGYVAGDSKASPPKGAENFTAQVIVLNHPGQISNGYTPVLDCHTAHIACKFAEIKEKVDRRTGKSTEDNPKAIKSGDAAIVILVPSKPLCVESFSEFPPLGRFAVR

SEQ ID NO: 17558 - protein, 413 aa, Cnephia sp. X
HVDSGKSTTTGHLIYKCGGIDKRTIEKFEKEAQEMGKGSFKYAWVLDKLKAERERGITIDIALWKFETAKYYVTIIDAPGHRDFIKNMITGTSQADCAVLIVAAGTGEFEAGISKNGQTREHALLAFTLGVKQLIVGVNKMDSTEPPFSESRFEEIKKEVSSYIKKIGYNPVCVPFVPISGWHGDNMLEVSAKMPWYKGWKVERKEGNADGKCLIEALDAILPPSRPTDKALRLPLQDVYKIGGIGTVPVGRVETGVIKPGMVVVFAPVNLTTEVKSVEMHHEALQEAGPGDNVGFNVKNVSVKELRRGYVAGDSKSNPPKGAENFTAQVIVLNHPGQISNGYTPVLDCHTAHIACKFSEIKEKVDRRTGKSTEENPKAIKSGDAAIVILVPSKPLCVESFSEFPPLGRFAVR

SEQ ID NO: 17559 - protein, 413 aa, Cnephia sp. Y
HVDSGKSTTTGHLIYKCGGIDKRTIEKFEKEAQEMGKGSFKYAWVLDKLKAERERGITIDIALWKFETSKYYVTIIDAPGHRDFIKNMITGTSQADCAVLIVAAGTGEFEAGISKNGQTREHALLAFTLGVKQLIVGVNKMDSTEPPFSESRFEEIKKEVSSYIKKIGYNPVCVPFVPISGWHGDNMLEVSAKMPWYKGWKVERKEGNADGKCLIEALDAILPPSRPTDKPLRLPLQDVYKIGGIGTVPVGRVETGVIKPGMVVVFAPVNLTTEVKSVEMHHEALQEAGPGDNVGFNVKNVSVKELRRGYVAGDSKASPPKGAENFTAQVIVLNHPGQISNGYTPVLDCHTAHIACKFSEIKEKVDRRTGKSTEDNPKAIKSGDAAIVILVPSKPLCVESFSEFPPLGRFAVR

SEQ ID NO: 17560 - protein, 413 aa, Cnephia aurantiacum
HVDSGKSTTTGHLIYKCGGIDKRTIEKFEKEAQEMGKGSFKYAWVLDKLKAERERGITIDIALWKFETAKYYVTIIDAPGHRDFIKNMITGTSQADCAVLIVAAGTGEFEAGISKNGQTREHALLAFTLGVKQLIVGVNKMDSTEPPFSESRFEEIKKEVSSYIKKIGYNPACVPFVPISGWHGDNMLEVSAKMPWYKGWKVERKEGNADGKCLIEALDAILPPSRPTDKALRLPLQDVYKIGGIGTVPVGRVETGVIKPGMVVVFAPVNLTTEVKSVEMHHEALQEAGPGDNVGFNVKNVSVKELRRGYVAGDTKSNPPKGAENFTAQVIVLNHPGQISNGYTPVLDCHTAHIACKFAEIKEKVDRRTGKSTEDNPKAIKSGDAAIVILVPSKPLCVESFSEFPPLGRFAVR

SEQ ID NO: 17561 - protein, 413 aa, Cnephia ornithophilia
HVDSGKSTTTGHLIYKCGGIDKRTIEKFEKEAQEMGKGSFKYAWVLDKLKAERERGITIDIALWKFETAKYYVTIIDAPGHRDFIKNMITGTSQADCAVLIVAAGTGEFEAGISKNGQTREHALLAFTLGVKQLIVGVNKMDSTEPPFSESRFEEIKKEVSSYIKKIGYNPVCVPFVPISGWHGDNMLEVSAKMPWYKGWKVERKEGNADGKCLIEALDAILPPSRPTDKALRLPLQDVYKIGGIGTVPVGRVETGVIKPGMVVVFAPVNLTTEVKSVEMHHEALQEAGPGDNVGFNVKNVSVKELRRGYVAGDSKSNPPKGAENFTAQVIVLNHPGQISNGYTPVLDCHTAHIACKFSEIKEKVDRRTGKSTEDNPKAIKSGDAAIVILVPSKPLCVESFSEFPPLGRFAVR

SEQ ID NO: 17562 - protein, 413 aa, Cnephia pilfreyi
HVDSGKSTTTGHLIYKCGGIDKRTIEKFEKEAQEMGKGSFKYAWVLDKLKAERERGITIDIALWKFETAKYYVTIIDAPGHRDFIKNMITGTSQADCAVLIVAAGTGEFEAGISKNGQTREHALLAFTLGVKQLIVGVNKMDSTDPPFSESRFEEIKKEVSSYIKKIGYNPACVAFVPISGWHGDNMLEVSAKMPWYKGWKVERKDGNADGTCLIEALDAILPPSRPTDKAMRLPLQDVYKIGGIGTVPVGRVETGVIKPGMVVVFAPVNLTTEVKSVEMHHEALQEAGPGDNVGFNVKNVSVKELRRGYVAGDSKASPPKGADNFTAQVIVLNHPGQISNGYTPVLDCHTAHIACKFSEIKEKVDRRTGKSTEDNPKAIKSGDAAIVILVPSKPLCVESFSEFPPLGRFAVR

SEQ ID NO: 17563 - protein, 413 aa, Cnephia sp. GKW2
HVDSGKSTTTGHLIYKCGGIDKRTIEKFEKEAQEMGKGSFKYAWVLDKLKAERERGITIDIALWKFETAKYYVTIIDAPGHRDFIKNMITGTSQADCAVLIVAAGTGEFEAGISKNGQTREHALLAFTLGVKQLIVGVNKMDSTEPPFSESRFEEIKKEVSSYIKKIGYNPVCVPFVPISGWHGDNMLEVSAKMPWYKGWKVERKEGNADGKCLIEALDAILPPSRPTDKPLRLPLQDVYKIGGIGTVPVGRVETGVIKPGMVVVFAPVNLTTEVKSVEMHHEALQEAGPGDNVGFNVKNVSVKELRRGYVAGDSKASPPKGAENFTAQVIVLNHPGQISNGYTPVLDCHTAHIACKFAEIKEKVDRRTGKSTEDNPKAIKSGDAAIVILVPSKPLCVESFSEFPPLGRFAVR

SEQ ID NO: 17564 - protein, 413 aa, Cnephia strenua
HVDSGKSTTTGHLIYKCGGIDKRTIEKFEKEAQEMGKGSFKYAWVLDKLKAERERGITIDIALWKFETAKYYVTIIDAPGHRDFIKNMITGTSQADCAVLIVAAGTGEFEAGISKNGQTREHALLAFTLGVKQLIVGVNKMDSTEPPFSEARFEEIKKEVSSYIKKIGYNPVCVPFVPISGWHGDNMLEVSAKMPWYKGWKVERKEGNADGKCLIEALDAILPPSRPTDKALRLPLQDVYKIGGIGTVPVGRVETGVIKPGMVVVFAPVNLTTEVKSVEMHHEALQEAGPGDNVGFNVKNVSVKELRRGYVAGDSKSNPPKGAENFTAQVIVLNHPGQISNGYTPVLDCHTAHIACKFSEIKEKVDRRTGKSTEDNPKAIKSGDAAIVILVPSKPLCVESFSEFPPLGRFAVR

SEQ ID NO: 17565 - protein, 413 aa, Cnephia tonnoiri
HVDSGKSTTTGHLIYKCGGIDKRTIEKFEKEAQEMGKGSFKYAWVLDKLKAERERGITIDIALWKFETAKYYVTIIDAPGHRDFIKNMITGTSQADCAVLIVAAGTGEFEAGISKNGQTREHALLAFTLGVKQLIVGVNKMDSTEPPFSESRFEEIKKEVSSYIKKIGYNPVCVPFVPISGWHGDNMLEVSAKMPWYKGWKVERKEGNADGKCLIEALDAILPPSRPTDKALRLPLQDVYKIGGIGTVPVGRVETGVIKPGMVVVFAPVNLTTEVKSVEMHHEALQEAGPGDNVGFNVKNVSVKELRRGYVAGDSKSSPPKGAENFTAQVIVLNHPGQISNGYTPVLDCHTAHIACKFSEIKEKVDRRTGKSTEDNPKAIKSGDAAIVILVPSKPLCVESFSEFPPLGRFAVR

SEQ ID NO: 17566 - protein, 413 aa, Cnephia umbratorum
HVDSGKSTTTGHLIYKCGGIDKRTIEKFEKEAQEMGKGSFKYAWVLDKLKAERERGITIDIALWKFETAKYYVTIIDAPGHRDFIKNMITGTSQADCAVLIVAAGTGEFEAGISKNGQTREHALLAFTLGVKQLIVGVNKMDSTDPPFSESRFEEIKKEVSSYIKKIGYNPVCVPFVPISGWHGDNMLEVSAKMPWYKGWKVERKDGNADGKCLIEALDAILPPSRPTDKALRLPLQDVYKIGGIGTVPVGRVETGVIKPGMVVVFAPVNLTTEVKSVEMHHEALAEAGPGDNVGFNVKNVSVKELRRGYVAGDSKSSPPRGAENFTAQVIVLNHPGQISNGYTPVLDCHTAHIACKFAEIKEKVDRRTGKSTEDNPKAIKSGDAAIVILVPSKPLCVESFSEFPPLGRFAVR

SEQ ID NO: 17567 - protein, 413 aa, Crozetia crozetensis
HVHTGKSTTTGHLIYKCGGIDKRTIEKFEKEAQEMGKGSFKYAWVLDKLKAERERGITIDIALWKFETAKYYVTIIDAPGHRDFIKNMITGTSQADCAVLIVAAGTGEFEAGISKNGQTREHALLAFTLGVKQLIVGVNKMDSTEPTFSEPRFEEIKKEVSSYIKKIGYNPACVPFVPISGWHGDNMLEVSAKMPWYKGWKVERKEGNADGKCLIEALDAILPPSRPTDKALRLPLQDVYKIGGIGTVPVGRVETGVIKPGMVVVFAPVNLTTEVKSVEMHHEALPEAGPGDNVGFNVKNVSVKELRRGYVAGDSKSNPPKGAENFTAQVIVLNHPGQISNGYTPVLDCHTAHIACKFAEIKEKVDRRTGKSTEDNPKAIKSGDAAIVILVPSKPLCVESFSEFPPLGRFAVR

SEQ ID NO: 17568 - protein, 296 aa, Ectemnia sp.
HVDSGKSTTTGHLIYKCGGIDKRSIEKFEKEAQEMGKGSFKYAWVLDKLKAERERGITIDIALWKFETAKYYVTIIDAPGHRDFIKNMITGTSQADCAVLIVAAGTGEFEAGISKNGQTREHALLAFTLGVKQLIVGVNKMDSTDPPFSESRFEEIKKEVSSYIKKIGYNPACVAFVPISGWHGDNMLEVSAKMPWYKGWKVERKDGNASGTCLIEALDAILPPSRPTDKALRLPLQDVYKIGGIGTVPVGRVETGVIKPGGLFLGNLEMFFFSTFHFLLVLLRYGRRVRPRQFDH

SEQ ID NO: 17569 - protein, 413 aa, Gigantodax adleri
HVDSGKSTTTGHLIYKCGGIDKRTIEKFEKEAQEMGKGSFKYAWVLDKLKAERERGITIDIALWKFETAKYYVTIIDAPGHRDFIKNMITGTSQADCAVLIVAAGTGEFEAGISKNGQTREHALLAFTLGVKQLIVGVNKMDSTEPPFSEARFEEIKKEVSSYIKKIGYNPVCVPFVPISGWHGDNMLEVSAKMGWYKGWKVERKEGNADGKCLIEALDAILPPSRPTDKALRLPLQDVYKIGGIGTVHVGRVETGIIKPGMVVVFAPVNLTTEVKSVEMHHEALQEASPGDNVGFNVKNVSVKELRRGYVAGDSKSNPPKGAENFTAQVIVLNHPGQISNGYTPVLDCHTAHIACKFSEIKEKVDRRTGKSTEDNPKAIKSGDAAIVILVPSKPLCVESFSEFPPLGRFAVR

SEQ ID NO: 17570 - protein, 413 aa, Gigantodax marginale
HVDSGKSTTTGHLIYKCGGIDKRTIEKFEKEAQEMGKGSFKYAWVLDKLKAERERGITIDIALWKFETAKYYVTIIDAPGHRDFIKNMITGTSQADCAVLIVAAGTGEFEAGISKNGQTREHALLAFTLGVKQLIVGVNKMDSTEPPFSESRFEEIKKEVSSYIKKIGYNPVCVPFVPISGWHGDNMLEVSAKMGWYKGWKVERKEGNADGKCLIEALDAILPPSRPTDKALRLPLQDVYKIGGIGTVPVGRVETGIIKPGMVVVFAPVNLTTEVKSVEMHHEALQEASPGDNVGFNVKNVSVKELRRGYVAGDSKSNPPKGAENFTAQVIVLNHPGQISNGYTPVLDCHTAHIACKFAEIKEKVDRRTGKSTEDNPKAIKSGDAAIVILVPSKPLCVESFSEFPPLGRFAVR

SEQ ID NO: 17571 - protein, 413 aa, Greniera denaria
HVDSGKSTTTGHLIYKCGGIDKRTIEKFEKEAQEMGKGSFKYAWVLDKLKAERERGITIDIALWKFETAKYYVTIIDAPGHRDFIKNMITGTSQADCAVLIVAAGTGEFEAGISKNGQTREHALLAFTLGVKQLIVGVNKMDSTDPPFSESRFEEIKKEVSSYIKKIGYNPACVPFVPISGWHGDNMLEVSSNMGWFKGWKVERKEGNADGKCLIEALDAILPPSRPTDKALRLPLQDVYKIGGIGTVPVGRVETGIIKPGMVVVFAPVNLTTEVKSVEMHHEALQEAGPGDNVGFNVKNVSVKELRRGYVAGDSKSNPPKGAENFTAQVIVLNHPGQISNGYTPVLDCHTAHIACKFAEIKEKVDRRTGKSTEDNPKAIKSGDAAIVVLVPSKPLCVESFSEFPPLGRFAVR

SEQ ID NO: 17572 - protein, 413 aa, Greniera fabri
HVDSGKSTTTGHLIYKCGGIDKRTIEKFEKEAQEMGKGSFKYAWVLDKLKAERERGITIDIALWKFETAKYYVTIIDAPGHRDFIKNMITGTSQADCAVLIVAAGTGEFEAGISKNGQTREHALLAFTLGVKQLIVGVNKMDSTDPPFSESRFEEIKKEVSSYIKKIGYNPACVAFVPISGWHGDNMLEVSAKMPWFKGWKVERKDGNADGKCLIEALDAILPPSRPTDKALRLPLQDVYKIGGIGTVPVGRVETGVIKPGMVVVFAPVNLTTEVKSVEMHHEALQEAGPGDNVGFNVKNVSVKELRRGYVAGDSKSNPPKGAENFTAQVIVLNHPGQISNGYTPVLDCHTAHIACKFAEIKEKVDRRTGKSTEDNPKAIKSGDAAIVILVPSKPLCVESFSEFPPLGRFAVR

SEQ ID NO: 17573 - protein, 413 aa, Gymnopais fimbriatus
HVDSGKSTTTGHLIYKCGGIDKRTIEKFEKEAQEMGKGSFKYAWVLDKLKAERERGITIDIALWKFETGKYCVTIIDAPGHRDFIKNMITGTSQADCAVLIVAAGTGEFEAGISKNGQTREHALLAFTLGVKQLIVGVNKMDSTDPPFSESRFEEIKKEVSSYIKKIGYNPACVAFVPISGWHGDNMLEISEKMPWFKGWKVERKDGNADGKCLIEALDAILPPSRPTDKALRLPLQDVYKIGGIGTVPVGRVETGVIKPGMVIVFAPVNLTTEVKSVEMHHEALVEAGPGDNVGFNVKNVSVKELRRGYVAGDTKSNPPKGAENFTAQVIVLNHPGQISNGYTPVLDCHTAHIACKFAEIKEKVDRRTGKSTEDNPKAIKSGDAAIVILVPSKPLRVESFSEFPPLGRFAVR

SEQ ID NO: 17574 - protein, 413 aa, Mayacnephia sp. nr. osbornei
HVDSGKSTTTGHLIYKCGGIDKRTIEKFEKEAQEMGKGSFKYAWVLDKLKAERERGITIDIALWKFETSKYYVTIIDAPGHRDFIKNMITGTSQADCAVLIVAAGTGEFEAGISKNGQTREHALLAFTLGVKQLIVGVNKMDSTEPPFSESRFEEIKKEVCCYIKKIGYNPMCVPFVPISGWHGDNMLEISAKMPWYKGWKVERKEGNADGKCLIESLDAILPPSRPTDKALRLPLQDVYKIGGIGTVPVGRVETGVIKPGMVVVFAPVNLTTEVKSVEMHHEALQEAGPGDNVGFNVKNVSVKELRRGYVAGDSKSNPPKGAENFTAQVIVLNHPGQISNGYTPVLDCHTAHIACKFSEIKEKVDRRTGKSTEDNPKAIKSGDAAIVILVPSKPLCVESFSEFPPLGRFAVR

SEQ ID NO: 17575 - protein, 413 aa, Metacnephia sommermanae
HVDSGKSTTTGHLIYKCGGIDKRTIEKFEKEAQEMGKGSFKYAWVLDKLKAERERGITIDIALWKFETAKYYVTIIDAPGHRDFIKNMITGTSQADCAVLIVAAGTGEFEAGISKNGQTREHALLAFTLGVKQLIVGVNKMDSTEPPFSESRFEEIKKEVSSYIKKIGYNPICVPFVPISGWHGDNMLEVSAKMPWYKGWKVERKEGNAEGKCLIEALDAILPPSRPTDKALRLPLQDVYKIGGIGTVPVGRVETGVIKPGMVVVFAPVNLTTEVKSVEMHHEALQKAGPGDNVGFNVKNVAVKDLRRGYVAGDSKSNPPKGADNFTAQVIVLNHPGQISNGYTPVLDCHTAHIACKFSEIKEKVDRRTGKSTEDNPKAIKSGDAAIVILVPSKPLCVESFSEFPPLGRFAVR

SEQ ID NO: 17576 - protein, 413 aa, Paracnephia thornei
HVDSGKSTTTGHLIYKCGGIDKRTIEKFEKEAQEMGKGSFKYAWVLDKLKAERERGITIDIALWKFETAKYYVTIIDAPGHRDFIKNMITGTSQADCAVLIVAAGTGEFEAGISKNGQTREHALLAFTLGVKQLIVGVNKMDSTEPPFSESRFEEIKKEVSSYIKKIGYNPVCVPFVPISGWHGDNMLEVSAKMPWYKGWKVERKEGNADGKCLIEALDAILPPSRPTDKALRLPLQDVYKIGGIGTEPVGRVETGVIKPGMVVVFAPVNLTTEVKSVEMHHEALQEAGPGDNVGFNVKNVSVKELRRGYVAGDSKSNPPKGAEDFTAQVIVLNHPGQISNGYTPVLDCHTAHIACKFPEIKEKVDRRTGKSTEDNPKAIKSGDAAMVILVPSKPLCVEFFSEFPPLGRFAVR

SEQ ID NO: 17577 - protein, 413 aa, Parasimulium crosskeyi
HVDSGKSTTTGHLIYKCGGIDKRTIEKFEKEAQEMAKGSFKYAWVLDKLKAERERGITIDIALWKFETGKYYVTIIDAPGHRDFIKNMITGTSQADCAVLIVAAGTGEFEAGISKNGQTREHALLAFTLGVKQLIVGVNKMDSTEPPFSETRFEEIKKEVSSYIKKIGYNPLCVAFVPISGWHGDNMLEISSKMPWFKGWKVERKDGNADGKCLIEALDAILPPSRPTDKPLRLPLQDVYKIGGIGTVPVGRVETGLLKPGMVVVFAPVNLTTEVKSVEMHHEALVEAVPGDNVGFNVKNVSVKELRRGYVAGDTKNNPPRGAENFTAQVIVLNHPGQISNGYTPVLDCHTAHIACKFSEIKEKVDRRTGKSTEDNPKAIKSGDAAIVILVPSKPLCVESFSEFPPLGRFAVR

SEQ ID NO: 17578 - protein, 413 aa, Paraustrosimulium anthracinum
HVDSGKSTTTGHLIYKCGGIDKRTIEKFEKEAQEMGKGSFKYAWVLDKLKAERERGITTDIALWKFETAKYYVTIIDAPGHRDFIKNMITGTSQADCAVLIVAAGTGEFEAGISKNGQTREHALLAFTLGVKQLIVGVNKMDSTEPPFSESRFEEIKKEVSSYIKKIGYNPVCVPFVPISGWHGDNMLEISAKMPWYKGWKVERKDGNADGKCLIEALDAILPPSRPTDKALRLPLQDVYKIGGIGTVPVGRVETGVINPGMVVVFAPVNLTTEVKSVEMHHEALQEAGPGDNVGFNVKNVSVKELRRGYVAGDSKSNPPKGAENFTAQVIVLNHPGQISNGYTPVLDCHTAHIACKFSEIKEKVDRRTGKSTEDNPKAIKSGDAAIVILVPSKPLCVESFSEFPPLGRFAVR

SEQ ID NO: 17579 - protein, 413 aa, Paracnephia rhodesiense
HVDSGKSTTTGHLIYKCGGIDKRTIEKFEKEAQEMGKGSFKYAWVLDKLKAERERGITIDIALWKFETSKYYVTIIDAPGHRDFIKNMITGTSQADCAVLIVAAGTGEFEAGISKNGQTREHALLAFTLGVKQLIVGVNKMDSTEPPFSEARFEEIKKEVSSYIKKIGYNPVCVPFVPISGWHGDNMLEVSSKMPWYKGWKVERKEGNADGKCLIEALDAILPPTRPTDKPLRLPLQDVYKIGGIGTVPVGRVETGVIKPGMVVVFAPVNLTTEVKSVEMHHEALQEAGPGDNVGFNVKNVSVKELRRGYVAGDSKSSPPKGAENFTAQVIVLNHPGQISNGYTPVLDCHTAHIACKFSEIKEKVDRRTGKSTENDPKAIKSGDAAIVILVPSKPLCVEFFSEFPPLGRFAVR

SEQ ID NO: 17580 - protein, 413 aa, Simulium congareenarum
HVDSGKSTTTGHLIYKCGGIDKRTIEKFEKEAQEMGKGSFKYAWVLDKLKAERERGITIDIALWKFETAKYYVTIIDAPGHRDFIKNMITGTSQADCAVLIVAAGTGEFEAGISKNGQTREHALLAFTLGVKQLIVGVNKMDSTEPPFSESRFEEIKKEVSSYIKKIGYNPVCVPFVPISGWHGDNMLEVSAKMPWYKGWKVERKEGNADGKCLIEALDAILPPSRPTDKALRLPLQDVYKIGGIGTVPVGRVETGVIKPGMVVVFAPVNLTTEVKSVEMHHEALQEAGPGDNVGFNVKNVSVKELRRGYVAGDSKNNPPKGAENFTAQVIVLNHPGQISNGYTPVLDCHTAHIACKFSEIKEKVDRRTGKSTEDNPKAIKSGDAAIVILVPSKPLCVESFSEFPPLGRFAVR

SEQ ID NO: 17581 - protein, 413 aa, Simulium reptans
HVHSGKSTTTGHLIYKCGGIDKRTIEKFEKEAQEMGKGSFKYAWVLDKLKAERERGITIDIALWKFETAKYYVTIIDAPGHRDFIKNMITGTSQADCAVLIVAAGTGEFEAGISKNGQTREHALLAFTLGVKQLIVGVNKMDSTEPPFCESRFEEIKKEVSSYIQKIGYNPAAVSFVPISGWHGDNLLDVSAKMPWYKGWKVERKDGNADGKCLIEALDAILPPSRPTDKALRLPLQDVYKIGGIGTVPVGRVETGVIKPGMVVVFAPVNLTTEVKSVEMHHEALQEAGPGDNVGFNVKNVSVKELRRGYVAGDSKSNPPKGAENFTAQVIVLNHPGQISNGYTPVLDCHTAHIACKFAEIKEKVDRRSGKSTEDNPKAIKSGDAAIVILVPSKPLCVESFSEFPPLGRFAVR

SEQ ID NO: 17582 - protein, 413 aa, Simulium pugetense complex
HVDSGKSTTTGHLIYKCGGIDKRTIEKFEKEAQEVGKGSFKYAWVLDKLKAERERGITIDIALWKFETAKYYVTIIDAPGHRDFIKNMITGTSQADCAVLIVAAGTGEFEAGISKNGQTREHALLAFTLGVKQLIVGVNKMDSTDPPFSESRFEEIKKEVSSYIKKIGYNPAAVAFVPISGWHGDNMLEVSAKMPWYKGWKVERKDGNADGKCLIESLDAILPPSRPTDKALRLPLQDVYKIGGIGTVPVGRVETGVIKPGMVVVFAPVNLTTEVKSVEMHHEALQEAGPGDNVGFNVKNVSVKELRRGYVAGDSKSNPPKGAENFTAQVIVLNHPGQISNGYTPVLDCHTAHIACKFAEIKEKVDRRSGKSTEDNPKAIKSGDAAIVILVPSKPLCVESFSDFPPLGRFAVR

SEQ ID NO: 17583 - protein, 413 aa, Thaumalea gillespieae
HVDSGKSTTTGHLIYKCGGIDKRTIEKFEKEAQEMGKGSFKYAWVLDKLKAERERGITIDIALWKFETGKYYVTIIDAPGHRDFIKNMITGTSQADCAVLIVAAGTGEFEAGISKNGQTREHALLAFTLGVKQLIVGVNKMDSTDPPFAETRFEEIKKEVSSYIKKIGYNPAAVAFVPISGWHGDNMLEVSAKMPWFKGWKVERKDGNAEGKCLIEALDAILPPSRPTGKPLRLPLQDVYKIGGIGTVPVGRVETGILKPGMLVIFAPVNLTTEVKSVEMHHEALQEAVPGDNVGFNVKNVSVKDLRRGFVAGDSKVSPPRGAADFTAQVIVLNHPGQISNGYTPVLDCHTAHIACKFSEIKEKVDRRSGKSTEDNPKSIKSGDAAIVILAPSKPLCVESFSEFPPLGRFAVR

SEQ ID NO: 17584 - protein, 413 aa, Twinnia nova
HVDSGKSTTTGHLIYKCGGIDKRTIEKFEKEAQEMGKGSFKYAWVLDKLKAERERGITIDIALWKFETGKYYVTIIDAPGHRDFIKNMITGTSQADCAVLIVAAGTGEFEAGISKNGQTREHALLAFTLGVKQLIVGVNKMDSTDPPFSESRFEEIKKEVSSYIKKIGYNPACVAFVPISGWHGDNKLEVSVKMPWFKGWKVERKDGNADGKCLIEALDAILPPSRPTDKALRLPLQDVYKIGGIGTVPVGRVETGVIKPGMVIVFAPVNLTTEVKSVEMHHEALQEAGPGDNVGFNVKNVSVKELRRGYVAGDTKSNPPKGAESFTAQVIVLNHPGQISNGYTPVLDCHTAHIACKFSEIKEKVDRRTGKSTEDNPKAIKSGDAAIVILVPSKPLCVESFSEFPPLGRFAVR

SEQ ID NO: 17585 - protein, 413 aa, Urosimulium aculeatum
HVDSGKSTTTGHLIYKCGGIDKRTIEKFEKEAQEMGKGSFKYAWVLDKLKAERERGITIDIALWKFETGKYYVTIIDAPGHRDFIKNMITGTSQADCAVLIVAAGTGEFEAGISKNGQTREHALLAFTLGVKQLIVGVNKMDSTEPPFSESRFEEIKKEVSSYIKKIGYNPACVAFVPISGWHGDNMLEVSAKMPWFKGWKVERKEGNADGKCLIEALDAILPPSRPTDKALRLPLQDVYKIGGIGTVPVGRVETGVIKPGMVIVFAPVNLTTEVKSVEMHHEALQEAGPGDNVGFNVKNVSVKELRRGYVAGDSKSNPPKGAENFTAQVIVLNHPGQISNGYTPVLDCHTAHIACKLSEIKEKVDRRTGKSTEDNPKAIKSGDAAIVILVPSKPLCVESFSEFPPLGRFAVR

SEQ ID NO: 17586 - protein, 374 aa, Escarpia sp.
QEMGKGSFKYAWVLDKLKAERERGITIDIALWKFETNKYYVTIIDAPGHRDFIKNMITGTSQADCAVLIVAAGVGEFEAGISKNGQTREHALLAYTLGVKQMIIGVNKMDNTEPPYSEARFEEIKKEVAQYIKKVGYNPDTVAFVPISGWHGDNMLESSPKMTWFKGWKVKRGGKEFSGNTLMEALDNVLQPQRPTDRPLRLPLQDVYKIGGIGTVPVGRVETGIMKPGMVVTFAPANLTTEVKSVEMHHTALTEALPGDNVGFNIKNVSVKDIRRGFVCGDSKNDPPLETDEFLAQVIILNHPGSIQAGYAPVLDCHTAHIACKFKELKEKIDRRSGKVLEASPQSVKSGDAAMVEMIPQKAMCVERFSEYAP

SEQ ID NO: 17587 - protein, 407 aa, Dugesia japonica
KSTSTGHLIYKCGGIDKRTIEKFEKEAQEMGKGSFKYAWVLDQLKAERERGITIDIALWKFETTKFYVTVIDAPGHRDFIKNMITGTSQADCAVLVVAAGTGEFEAGISKNGQTREHALLAYTLGVKQMIVGVNKMDSTEPPFSEPRFDEIKKEVSGYLKKVGYQPDAVAFVPISGWNGDNMIDESSNMPWYKGWEITRKNAKKEEIKTTGRTLLDALDSLEPPTRPTDKPLRLPLQDVYKIGGIGTVPVGRVETGILKPGMVVTFAPKVFTTEVKSVEMHHEALTEALPGDNVGFNVKNVSVKEIRRGNVCSDSKSDPARQATDFVAQVIIMNHPGEIHAGYSPVLDCHTAHIACKFAELVEKIDRRSGKDLEDFPKQFKSGDAGLVRLVPSKPMCVETFSEYPPL

SEQ ID NO: 17588 - protein, 465 aa, Schistosoma mansoni
MPSDKEHINIVVYGHVDSGKSTTTGHLIFKCGGIDKRAIEKYEKESGEMGKGSFKYAWVLVKLKAERERGITIDIVLWKFDTQTYKVTVIDAPGHRDFTTNMITGTSQADCAVLIVAAGVGEFEAGISKNGQTREHALLAYTLGVKQLIIAINKMDCTEPPFSEDRYKEIVKEVSGYIKKVGYNPATVPFVPISGWHGDNMIEKSSFMPWFKGWEITRTKDGKTVTDTGFTLLEALDKMEPPARMTDKPLRIPLQDVYKIGGMGTVPVGRVETGIIKPGMVVTFGPQGWSAEVKSVEMHHEALTEGLPGSNVGFNVKNVAVSEIHRGNVAGDSKNDPPKEAESFMAQVIVLNHPGEIKNGYSPVLDCHTAHIASKFSEITEKLDRRSGKKSEDNPKCIKNGDAANILLVPNKPLCLETFQQYPPLGRFAVRDMNQTVAVGVVKSVTKKESAAKVTKSAAKVAKKK

SEQ ID NO: 17589 - protein, 377 aa, Colossendeis sp. 'Col'
QEMGKGSFKYAWVLDKLKAERERGITIDIALWKFRTKKYYITIIDAPGHRDFIKNMITGTSQADCAVLVVAAGVGEFEAGISKNGQTREHALLAYTLGVKQLIVAVNKMDSTEPTYNEGRFQEIVKEVSAYIKKIGYNPKTVPFVPISGWHGDNMLEVSKNMPWWKKWEVERKEGNANGETLYDALDAILPPNRPTDKALRLPLQDVYKIGGIGTVPVGRVETGILKPGMVVTFAPVNLSTEVKSVEMHHESLTEAEPGDNVGFNVKNISVKDIRRGYVAGDSKSNPPRATESFTAQVIVLNHPGQIQNGYSPVLDCHTAHIACKFNDIKEKCDRRSGKKLEDSPKFVKSGDVAIVELIPNKPMCVETFTDFPPLGR

SEQ ID NO: 17590 - protein, 377 aa, Stenochrus portoricensis
QEMGKGSFKYAWVLDKLKAERERGITIDITLWKFETQKYYITVIDAPGHRDFIKNMITGTSQADCAVLIVAAGTGEFEAGISKNGQTREHALLAYTLGVKQMIVGVNKMDTTEPPFSEARFEEIKKEVSAYIKKIGYNPATVPFVPISGWNGDNMLEPSTNMAWYKGWAIERKNNKADGKTLLQALDAMEPPSRPTEKPLRLPLQDVYKIGGIGTVPVGRVETGVLKPGMVVTFAPVNITTEVKSVEMHHEALAEAYPGDNVGFNVKNVSVKELRRGYVCGDSKESPPKATEEFTAQVIVLNHPGQIANGYTPVLDCHTAHIACKFREIKEKCDRRSGKKLEDNPKFIKSGDAAIIDLVPSKPMCVETFTEFPPLGR

SEQ ID NO: 17591 - protein, 377 aa, Cylindroiulus punctatus
AELGKGSFKYAWVLDKLKAERERGITIDISLWKFETGKYYITIIDAPGHRDFIKNMITGTSQADCAVLIVAAGTGEFEAGISKNGQTREHALLAYTLGVKQLIVGVNKMDTTEPPYNEGRFDEIKKEVSSYIKKIGYNPATVAFVPISGWNGDNMLEPSPSMTWHKGWAIERKEGNASGKTLLEALDAIVAPARPTDKALRLPLQDVYKIGGIGTVPVGRVETGVLKPGMVVTFAPAALTTEVKSVEMHHEALLEAVPGDNVGFNVKNVSVKELRRGFVAGDSKANPPKAVSEFTAQVIVLNHPGQISNGYTPVLDCHTAHIACKFAEIKEKCDRRTGKTVEENPKAIKSGDAAIVNLVPTKPMCVESFSDFPPLGR

SEQ ID NO: 17592 - protein, 377 aa, Glomeris marginata
AELGKGSFKYAWVLDKLKAERERGITIDISLWKFETAKYYITIIDAPGHRDFIKNMITGTSQADCAVLIVAAGTGEFEAGISKNGQTREHALLAYTLGVKQLIVGVNKMDTTEPPYNEGRFDEIKKEVSSYIKKIGYNPVAVPFVPISGWNGDNMLEPSPSMTWHKGWSIERKEGNASGKTLLEALDAIVAPQRPTDKALRLPLQDVYKIGGIGTVPVGRVETGTLKPGMVVTFAPVNLTTEVKSVEMHHEALTEAVPGDNVGFNVKNVSVKELRRGYVCGDSKANPPKAVSEFTAQVIVLNHPGQIQNGYTPVLDCHTAHIACKFAEIKEKCDRRTGKTTEENPKAIKSGDAAIINLVPTKPLCVESFSDFPPLGR

SEQ ID NO: 17593 - protein, 413 aa, Prosimulium formosum
HVDSGKSTTTGHLIYKCGGIDKRTIEKFEKEAQEMGKGSFKYAWVLDKLKAERERGITIDIALWKFETGKYYVTIIDAPGHRDFIKNMITGTSQADCAVLIVAAGTGEFEAGISKNGQTREHALLAFTLGVKQLIVGVNKMDSTDPPFSESRFEEIKKEVSSYIKKIGYNPARVAFVPISGWHGDNMLEVSAKMPWFKGWKVERKDGNADGKCLIEALDAILPPSRPTDKALRLPLQDVYKIGGIGTVPVGRVETGVIKPGMVIVFAPVNLTTEVKSVEMHHEALQEAGPGDNVGFNVKNASVKELRRGYVAGDSKSNPPKGADNFTAQVIVLNHPGQISNGYTPVLDCHTAHIACKFSEIKEKVDRRTGKSTEDNPKAIKSGDAAIVILVPSKPLCVESFSEFPPLGRFAVR

SEQ ID NO: 17594 - protein, 413 aa, Helodon onychodactylus
HVDSGKSTTTGHLIYKCGGIDKRTIEKFEKEAQEMGKGSFKYAWVLDKLKAERERGITIDIALWKFETGKYYVTIIDAPGHRDFIKNMIPGTSQADCAVLIVAAGTGEFEAGISKNGQTREHALLAFTLGVKQLIVGVNKMDSTDPPFSEPRFEEIKKEVSSYIKKIGYNPACVAFVPISGWHGDNMLEVSAKMPWFKGWKVERKDGNADGKCLIEALDAILPPSRPTDKALRLPLQDVYKIGGIGTVPVGRVETGVIKPGMVIVFAPVNLTTEVKSVEMHHEALQEAGPGDNVGFNVKNVSVKELRRGYVAGDSKSNPPKGAENFTAQVIVLNHPGQISNGYTPVLDCHTAHIACKFAEIKEKVDRRTGKSTEDNPKAIKSGDAAIVILVPSKPLCVESFSEFPPLGRFAVR

SEQ ID NO: 17595 - protein, 413 aa, Cnesia dissimilis
HVDSGKSTTTGHLIYKCGGIDKRTIEKFEKEAQEMGKGSFKYAWVLDKLKAERERGITIDIALWKFETAKYYVTIIDAPGHRDFIKNMITGTSQADCAVLIVAAGTGEFEAGISKNGQTREHALLAFTLGVKQLIVGVNKMDSTEPPFSESRFEEIKKEVSSYIKKIGYNPACVPFVPISGWHGDNMLEVSAKMPWYKGWKVERKEGNADGKCLIESLDAILPPSRPTDKALRLPLQDVYKIGGIGTVPVGRVETGIIKPGMVVVFAPVNLTTEVKSVEMHHEALQEASPGDNVGFNVKNVSVKELRRGYVAGDSKSNPPKGAENFTAQVIVLNHPGQISNGYTPVLDCHTAHIACKFAEIKEKVDRRTGKSTEDNPKAIKSGDAAIVILVPSKPLCVESFSEFPPLGRFAVR

SEQ ID NO: 17596 - protein, 626 aa, Caenorhabditis elegans
MSRHRAIRNLNLEDEMDDDYDDDYDDYEDEENPEKQYTYDRNSLSTNYYTYLTDSGRNSPALPAPHPGIPSSSYHPPVSTPTPTAAPTTSLSSTIVRNMTAPLLHQNQKPPKNLNSRPSTPQTSSNLNTPKRTPQVKNLQAESTTPTVSRPSSEVDLTSFRRNQLQNIAKAPSVARKTPKPRVADKDLINLIVVGHVDAGKSTLMGHLLHDLEVVDSRTIDKFKHEAARNGKASFAYAWVLDETEEERERGVTMDIGRTSFETSHRRIVLLDAPGHKDFISNMITGTSQADAAILVVNATTGEFETGFENGGQTKEHALLLRSLGVTQLIVAVNKLDTVDWSQDRFDEIKNNLSVFLTRQAGFSKPKFVPVSGFTGENLIKRMELDWYDGPCLLELIDSFVAPQPPSDGPLRIGISDVLKVASNQLVVSGKIESGEVEKDDKVYIMSSVTAATVKECANNDGSRHCFAGDYILLTLQGTFEPESIQTGSVVVRAGPDTLIPSKKFEVRLVAFEIAMPIIKVYFCISNINLKTYCFQGAKAELYAHSLCVPCTFTNLLYTINKSNGEILKKGPRFIAKGASAVVEIETEYDIAIETFTSCRALGRVTFRAGGNTIAAGIVEKVITPQ

SEQ ID NO: 17597 - protein, 936 aa, Caenorhabditis elegans
MTLDDDPEGKYTMINLRRFVHTSCRLERGRTAFYNVHQKVTDPAKQDPDYFEKKARELPLDQNYIDALTKLYYEKIGSERDLGLKAADNLILEKTEFGLPRIEKSKTRAKYEDLDVLSNAPESVKKIFSVEMATRKELSQEWKQSLIKSVRQHSLDENSLEMKIAWLTALIRHWSLLVNDIGQETKKKPTWLTHRIWLVINERRKALRILRERNETAFEKTIAALKISYHVPKQPAHVKTRKAWAEAQLKLRVENEKEKRLEELHEKYDKEVEEHKRETQEKRKALNNELDKLAQEMRQIDVIEGKSFETMSRHRAIRNLNLEDEMDDDYDDDYDDYEDEENPEKQYTYDRNSLSTNYYTYLTDSGRNSPALPAPHPGIPSSSYHPPVSTPTPTAAPTTSLSSTIVRNMTAPLLHQNQKPPKNLNSRPSTPQTSSNLNTPKRTPQVKNLQAESTTPTVSRPSSEVDLTSFRRNQLQNIAKAPSVARKTPKPRVADKDLINLIVVGHVDAGKSTLMGHLLHDLEVVDSRTIDKFKHEAARNGKASFAYAWVLDETEEERERGVTMDIGRTSFETSHRRIVLLDAPGHKDFISNMITGTSQADAAILVVNATTGEFETGFENGGQTKEHALLLRSLGVTQLIVAVNKLDTVDWSQDRFDEIKNNLSVFLTRQAGFSKPKFVPVSGFTGENLIKRMELDWYDGPCLLELIDSFVAPQPPSDGPLRIGISDVLKVASNQLVVSGKIESGEVEKDDKVYIMSSVTAATVKECANNDGSRHCFAGDYILLTLQGTFEPESIQTGSVVVRAGPDTLIPSKKFEVRLVAFEIAMPIIKVYFCISNINLKTYCFQGAKAELYAHSLCVPCTFTNLLYTINKSNGEILKKGPRFIAKGASAVVEIETEYDIAIETFTSCRALGRVTFRAGGNTIAAGIVEKVITPQ

SEQ ID NO: 17598 - protein, 465 aa, Anisakis simplex
MGKEKFHINIVVIGHVDSGKSTTTGHLIYKCGGIDKRTIEKFEKEAQEMGKGSFKYAWVLDKLKAERERGITIDIALWKFETAKYYITIIDAPGHRDFIKNMITGTSQADCAVLVVACGTGEFEAGISKNGQTREHALLAQTLGVKQMIVACNKMDTTEPPFSEARFGEVSTEVSNYIKKIGYNPKAVAFVPISSFNGDNMLEPSTNMPWFKGWTVERKEGTASGKTLLGGPRLDYSTITTYRQATQIASSRRIQDWRVSGTVPVGRVETGILKPGMVVTFAPQNVTTEVKSVEMHHEALTEALPGDNVGFNVKNISVKDIRRGSVASDSKNDPAKEARSFTAQVIIMNHPGQLSAGYTPVLDCHTAHIACKFAELKEKVDRRSGKKVEDNPKFLKSGDAGIVELVPTKPMCVETFTEYAPLGRFAVRDMRQTVAVGVIKAVDKTEVGGKVTKAAQKAGVGGKKK

SEQ ID NO: 17599 - protein, 464 aa, Onchocerca volvulus
MGKEKTHINIVVIGHVDSGKSTTTGHLIYKCGGIDKRTIEKFEKEAQEMGKGSFKYAWVLDKLKAERERGIQIDIALWKFETPKYYITIIDAPGHRDFIKNMITGTSQADCAVLVVACGTGEFEAGISKNGQTREHALLAQTLGVKQMIVACNKMDSTDPPFSEARFGEVTTEVSNYIKKIGYNPKSIPFVPISGFNGDNMLEPSANMPWFKGWSVERKEGTMTGKTLLEALDSVVPPQRPTDKPLRLPLQDVYKIGGIGTVPVGRVETGILKPGMIVTFAPQNLTTEVKSVEMHHEALQEALPGDNVGFNVKNISIKDIRRGSVASDSKNDPAKETKMFTAQVIIMNHPGQISAGYTPVLDCHTAHIACKFAELKEKVDRRSGKKVEDNPKSLKSGDAGIIDLIPTKPLCVETFTEYPPLGRFAVRDMRQTVAVGVIKNVDKSEGVGKVQKAAQKAGVGGKKK

SEQ ID NO: 17600 - protein, 413 aa, Acronicta sp. AM-1997
HVDSGKSTTTGHLIYKCGGIDKRTIEKFEKEAQEMGKGSFKYAWVLDKLKAERERGITIDIALWKFETAKYYVTIIDAPGHRDFIKNMITGTSQADCAVLIVAAGTGEFEAGISKNGQTREHALLAFTLGVKQLIVGVNKMDSTEPPYSESRFEEIKKEVSSYIKKIGYNPAAVAFVPISGWHGDNMLEASTKMPWFKGWQVERKEGKAEGKCLIEALDAILPPARPTDKALRLPLQDVYKIGGIGTVPVGRVETGVLKPGTIVVFAPANITTEVKSVEMHHEALQEAVPGDNVGFNVKNVSVKELRRGYVAGDSKNNPPKGAADFTAQVIVLNHPGQISNGYTPVLDCHTAHIACKFAEIKEKVDRRTGKSTEDNPKSIKSGDAAIVNLVPSKPLCVESFQEFPPLGRFAVR

SEQ ID NO: 17601 - protein, 413 aa, Dasychira sp. AM-1997
HVDSGKSTTTGHLIYKCGGIDKRTIEKFEKEAQEMGKGSFKYAWVLDKLKAERERGITIDIALWKFETGKYYVTIIDAPGHRDFIKNMITGTSQADCAVLIVAAGTGEFEAGISKNGQTREHALLAFTLGVKQLIVGVNKMDSTEPPYSESRFEEIKKEVSSYIKKIGYNPAAVAFVPISGWHGDNMLEPSTKMPWFKGWLVERKEGKAEGKCLIEALDAILPPARPTDKPLRLPLQDVYKIGGIGTVPVGRVETGVLKPGTIVVFAPANITTEVKSVEMHHEALQEAVPGDNVGFNVKNVSVKELRRGYVAGDSKNNPPKGAADFTAQVIVLNHPGQISNGYTPVLDCHTAHIACKFAEIKEKVDRRTGKSTEENPKSIKSGDAAIVNLVPSKPLCVESFQEFPPLGRFAVR

SEQ ID NO: 17602 - protein, 413 aa, Meganola sp. AM-1997
HVDSGKSTTTGHLIYKCGGIDKRTIEKFEKEAQEMGKGSFKYAWVLDKLKAERERGITIDIALWKFETGKYYVTIIDAPGHRDFIKNMITGTSQADCAVLIVAAGTGEFEAGISKNGQTREHALLAFTLGVKQLIVGVNKMDSTEPPYSESRFEEIKKEVSSYIKKIGYNPAAVAFVPISGWHGDNMLEPSTKMPWFKGWMVERKEGKAEGKCLIEALDAILPPARPTDKALRLPLQDVYKIGGIGTVPVGRVETGVLKPGTIVVFAPANITTEVKSVEMHHEALQEAVPGDNVGFNVKNVSVKELRRGYVAGDSKNNPPKGAADFTAQVIVLNHPGQISNGYTPVLDCHTAHIACKFAEIKEKVDRRTGKSTEDNPKSIKSGDAAIVNLVPSKPLCVESFQEFPPLGRFAVR

SEQ ID NO: 17603 - protein, 413 aa, Palthis sp. AM-1997
HVDSGKSTTTGHLIYKCGGIDKRTIEKFEKEAQEMGKGSFKYAWVLDKLKAERERGITIDIALWKFETAKYYVTIIDAPGHRDFIKNMITGTSQADCAVLIVAAGTGEFEAGISKNGQTREHALLAFTLGVKQLIVGVNKMDSTEPPYSEPRFEEIKKEVSSYIKKIGYNPAAVAFVPISGWHGDNMLEPSTKMPWFKGWLVERKEGKAEGKCLIEALDAILPPARPTDKALRLPLQDVYKIGGIGTVPVGRVETGILKPGTIVVFAPANITTEVKSVEMHHEALQEAVPGDNVGFNVKNVSVKELRRGYVAGDSKNNPPKGAADFTAQVIVLNHPGQISNGYTPVLDCHTAHIACKFAEIKEKVDRRTGKSTEDNPKSIKSGDAAIVNLVPSKPLCVESFQEFPPLGRFSVR

SEQ ID NO: 17604 - protein, 413 aa, Schizura sp. AM-1997
HVDSGKSTTTGHLIYKCGGIDKRTIEKFQKEAQEMGKGSFKYAWVLDKLKAERERGITIDIALWKFETAKYYVTIIDAPGHRDFIKNMITGTSQADCAVLIVAAGTGEFEAGISKNGQTREHALLAFTLGVKQLIVGVNKMDSTEPPYSESRFEEIKKGVSSYIKKIGYNPAAVAFVPISGWHGDNMLEPSTKMPWFKGWQVERKEGKAEGKCLIEALDAILPPARPTDKALRLPLQDVYKIGGIGTVPVGRVETGVLKPGTVVVFAPANITTEVKSVEMHHEALQEAVPGDNVGFNVKNVSVKELRRGYVAGDSKNNPPKGAADFTAQVIVLNHPGQISNGYTPVLDCHTAHIACKFAEIKEKVDRRTGKSTEDNPKSIKSGDAAIVNLVPSKPLCVESFQEFPPLGRFAVR

SEQ ID NO: 17605 - protein, 411 aa, Ptychodera flava
DSGKSTSTGHLIYKCGGIDKRTIEKFEKEAQEMGKGSFKYAWVLDKLKAERERGITIDIALWKFETEKYYVTVIDAPGHRDFIKNMITGTSQADCAVLIVAAGTGEFEAGISKNGQTREHALLAYTLGVKQLIVCVNKMDNTEPPYSEARFKEIVKEVSTYIKKIGYNPKAVPFVPISGWHGDNMFEVSDKLGWFGGWNIERKEGNASGKTLMQALDSILPPKRPTEKPLRLPLQDMYKIGGIGTVPVGRVETGILKPGVVVTFSPANITTEVKSVEMHHEALTEALPGDNVGFNVKNVSVKEIRRGMVAGDSKNDPPKEAKNFTAQVIVLNHPGEIHAGYSPVLDCHTAHIARKFNELKEKCDRRSGKKLEDNPKSVKSGDAAIVEMIPSKLMCVESFADYPPLGRFAVR

SEQ ID NO: 17606 - protein, 374 aa, Owenia fusiformis
QEMGKGSFKYAWVLDKLKAERERGITIDIALWKFETPKYFVTVIDAPGHRDFIKNMITGTSQADCAVLICASSPGEFEAGISKNGQTREHALLAYTLGVKQLILGVNKIDNTEPPYSKARFEEIQKEVAQYVKKIGYNPDAVPFIPISGWHGDNMTQKSDNTTWFKQWKVTKNKKEFTGVTLVDALDNIDPPKRPTDKPLRLPLQDVYKIGGIGTVPVGRVETGMLKPGMVVTFAPNVVTTECKSVEMHHEALTEAIPGDNVGFNIKNVSVKEIRRGNVCGDSKNNPPKEAKSFVAQVIILNHPGQISNGYAPVLDCHTAHIACKFSEIQKKIDRRSGKELEDSPKFVKSGDAAIVVMIPQKPMCVEPFAEFAP

SEQ ID NO: 17607 - protein, 374 aa, Batillus cornutus
QEMGKGSFKYAWVLDKLKAERERGITIDIALWKFETSKYYITIIDAPGHRDFIKNMITGTSQADCAVLIVASGVGEFEAGISKDGQTREHALLAYTLGVKQLIIGLNKMDSTAPPYSEARYNEIVKEVSGYIKKIGYNPKAVAFVPISGFHGDNMIEPSTNMPWFKGWAIERKEGSANGKTLFEALDSILPPTRPTEKALRLPLQDVYKIGGIGTVPVGRVETGILKPGTLVTFAPSGLTTEVKSVEMHHEALTEALPGDNVGFNVKNVSVKELRRGFVAGDNKNDPPKECASFYAQVIILNHPGEIKNGYSPVLDCHTAHIAVKFSEIKEKCDRRSGKKLEDNPKFVKSGDAAMVTCIPSKPMCVEAFSDYQP

SEQ ID NO: 17608 - protein, 413 aa, Graellsia isabellae
HVDSGKSTTTGHLIYKCGGIDKRTIEKFEKEAQEMGKGSFKYAWVLDKLKAERERGITIDIALWKFETGKYYVTIIDAPGHRDFIKNMITGTSQADCAVLIVAAGTGEFEAGISKNGQTREHALLAFTLGVKQLIVGVNKMDSTEPPYSESRFEEIKKEVSSYIKKIGYNPAAVAFVPISGWHGDNMLEPSTKMPWFKGWMVERKEGKAEGKCLIEALDAILPPARPTDKALRLPLQDVYKIGGIGTVPVGRVETGILKPGTIVVFAPANITTEVKSVEMHHEALQEAVPGDNVGFNVKNVSVKELRRGYVAGDSKNNPPKGAADFTAQVIVLNHPGQISNGYTPVLDCHTAHIACKFAEIKEKVDRRTGKSTEDNPKSIKSGDAAIVNLVPSKPLCVESFQEFPPLGRFAVR

SEQ ID NO: 17609 - protein, 413 aa, Actias luna
  unsure (1)..(413): unsure at all Xaa locations
HVDSGKSTTTGHLIYKCGGIDKRTIEKFEKEAQEMGKGSFKYAWVLDKLKAERERGITIDIALWKFETSKYYVTIIDAPGHRDFIKNMITGTSQADCAVLIVAAGTGEFEAGISKNGQTREHALLAFTLGVKQLIVGVNKMDSTEPPYSESRFEEIKKEVSSYIKKIGYNPAAVAFVPISGWHGDNMLEPSTKMPWFKGWMVERKEGKAEGKCLIEALDAILPPARPTDKALRLPLQDVYKIGGIGTVPVGRVETGILKPGTIVVFAPANITTEVKSVEMHHEALQEAVPGDNVGFNVKNVSVKELRRGYVAGDSKNNPPKGAADFTAQVIVLNHPGQISNGYTPVLDCHTAHIACKFAEIKEKVDRRTGKSTEDNPKSIKSGDAAIVNLVPSKPLCVESFQEFPPXGRFAVR

SEQ ID NO: 17610 - protein, 413 aa, Archaeoattacus edwardsii
  unsure (1)..(413): unsure at all Xaa locations
HVDSGKSTTTGHLIYKCGGIDKRTIEKFEKEAQEMGKGSFKYAWVLDKLKAERERGITIDIALWKFETSRYYVTIIDAPGHRDFIKNMITGTSQADCAVLIVAAGTGEFEAGISKNGQTREHALLAFTLGVKQLIVGVNKMDSTEPPYSEPRFEEIKKEVSSYIKKIGYNPAAVAFVPISGWHGDNMLEPSTKMPWFKGWLVERKEGKAEGKCLIEALDAILPPARPTDKALRLPLQDVYKIGGIGTVPVGRVETGILKPGTIVVFAPANITTEVKSVEMHHEALQEAVPGDNVGFNVKNVSVKELRRGYVAGDSKNNPPKGAADFTAQVIVLNHPGQISNGYTPVLDCHTAHIACKFAEXKEKVDRRTGKSTEDNPKSIKSGDAAIVNLVPSKPLCVESFQEFPPLGRFAVR

SEQ ID NO: 17611 - protein, 413 aa, Attacus atlas
  unsure (1)..(413): unsure at all Xaa locations
HVDSGKSTTTGHLIYKCGGXDKRTIEKFEKEAQEMGKGSFKYAWVLDKLKAERERGITIDIALWKFETSKYYVTIIDAPGHRDFIKNMITGTSQADCAVLIVAAGTGEFEAGISKNGQTREHALLAFTLGVKQLIVGVNKMDSTEPPYSEPRFEEIKKEVSSYIKKIGYNPAAVAFVPISGWHGDNMLEPSTKMPWFKGWLVERKEGKAEGKCLIEALDAILPPARPTDKPLRLPLQDVYKIGGIGTVPVGRVETGILKPGTIVVFAPANITTEVKSVEMHHEALQEAVPGDNVGFNVKNVSVKELRRGYVAGDSKNNPPKGAADFTAQVIVLNHPGQISNGYTPVLDCHTAHIACKFAEIKEKVDRRTGKSTEDNPKSIKSGDAAIVNLVPSKPLCVESFQEFPPLGRFAVR

SEQ ID NO: 17612 - protein, 413 aa, Callosamia angulifera
  unsure (1)..(413): unsure at all Xaa locations
HVDSGKSTTTGHLIYKCGGIDKRTIEKFEKEAQEMGKGSFKYAWVLDKLKAERERGITIDIALWKFETSKYYVTIIDAPGHRDFIKNMXTGTSQADCAVLIVAAGTGEFEAGISKNGQTREHALLAFTLGVKQLIVGVNKMDSTEPPYSESRFEEIKKEVSSYIKKIGYNPAAVAFVPISGWHGDNMLEPSTKMPWFKGWMVERKEGKAEGKCLIEALDAILPPARPTDKALRLPLQDVYKIGGIGTVPVGRVETGILKPGTVVVFAPANITTEVKSVEMHHEALQEAVPGDNVGFNVKNVSVKELRRGYVAGDSKNNPPRGAADFTAQVIVLNHPGQISNGYTPVLDCHTAHIACKFAEIKEKVDRRTGKSTEDNPKSIKSGDAAIVNLVPSKPLCVESFQEFPPLGRFAVR

SEQ ID NO: 17613 - protein, 413 aa, Callosamia promethea
  unsure (1)..(413): unsure at all Xaa locations
HVDSGKSTTTGHLIYKCGGIDKRTIEKFEKEAQEMGKGSFKYAWVLDKLKAERERGITIDIALWKFETSKYYVTIIDAPGHRDFIKNMITGTSQADCAVLIVAAGTGEFEAGISKNGQTREHALLAFTLGVKQLIVGVNKMDSTEPPYSESRFEEIKKEVSSYIKKIGYNPAAVAFVPISGWHGDNMLEPSTKMPWFKGWMVERKEGKAEGKCLIEALDAXLPPARPTDKALRLPLQDVYKIGGIGTVPVGRVETGILKPGTVVVFAPANITTEVKSVEMHHEALQEAVPGDNVGFNVKNVSVKELRRGYVAGDSKNNPPRGAADFTAQVIVLNHPGQISNGYTPVLDCHTAHIACKFAEIKEKVDRRTGKSTEDNPKSIKSGDAAIVNLVPSKPLCVESFQEFPPLGRFAVR

SEQ ID NO: 17614 - protein, 413 aa, Callosamia securifera
HVDSGKSTTTGHLIYKCGGIDKRTIEKFEKEAQEMGKGSFKYAWVLDKLKAERERGITIDIALWKFETSKYYVTIIDAPGHRDFIKNMITGTSQADCAVLIVAAGTGEFEAGISKNGQTREHALLAFTLGVKQLIVGVNKMDSTEPPYSESRFEEIKKEVSSYIKKIGYNPAAVAFVPISGWHGDNMLEPSTKMPWFKGWMVERKEGKAEGKCLIEALDAILPPARPTDKALRLPLQDVYKIGGIGTVPVGRVETGILKPGTVVVFAPANITTEVKSVEMHHEALQEAVPGDNVGFNVKNVSVKELRRGYVAGDSKNNPPRGAADFTAQVIVLNHPGQISNGYTPVLDCHTAHIACKFAEIKEKVDRRTGKSTEDNPKSIKSGDAAIVNLVPSKPLCVESFQEFPPLGRFAVR

SEQ ID NO: 17615 - protein, 413 aa, Coscinocera hercules
  unsure (1)..(413): unsure at all Xaa locations
HVXSGKSTTTGHLIYKCGGIDKRTIEKFEKEAQEMGXGSFKYAWVLDKLKAERERGITIDIALWKFETAKYYVTIIDAPGHRDFIKNMXTGTSQADCAVLIVAAGTGEFEAGISKNGQTREHALLAFTLGVKQLIVGVNKMDSTEPPYSEPRFEEIKKEVSSYIKKIGYNPAAVAFVPISGWHGDNMLEPSTKMPWFKGWLVERKEGKAEGKCLIEALDAILPPARPTDKPLRLPLQDVYKIGGIGTVPVGRVETGILKPGTIVVFAPANITTEVKSVEMHHEALQEAVPGDNVGFNVKNVSVKELRRGYVAGDSKNNPPKGAADFTAQVIVLNHPGQISNGYTPVLDCHTAHIACKFAEIKEKVDRRTGKSTEDNPKSIKSGDAAIVNLVPSKPLCVESFQEFPPLGRFAVR

SEQ ID NO: 17616 - protein, 413 aa, Epiphora mythimnia
HVDSGKSTTTGHLIYKCGGIDKRTIEKFEKEAQEMGKGSFKYAWVLDKLKAERERGITIDIALWKFETSKYYVTIIDAPGHRDFIKNMITGTSQADCAVLIVAAGTGEFEAGISKNGQTREHALLAFTLGVKQLIVGVNKMDSTEPPYSESRFEEIKKEVSSYIKKIGYNPAAVAFVPISGWHGDNMLEPSTKMPWFKGWLVERKEGKAEGKCLIEALDAILPPARPTDKALRLPLQDVYKIGGIGTVPVGRVETGILKPGTIVVFAPANITTEVKSVEMHHEALQEAVPGDNVGFNVKNVSVKELRRGYVAGDSKNNPPKGAADFTAQVIVLNHPGQISNGYTPVLDCHTAHIACKFAEIKEKVDRRTGKSTEDNPKSIKSGDAAIVNLVPSKPLCVESFQEFPPLGRFAVR

SEQ ID NO: 17617 - protein, 413 aa, Eupackardia calleta
  unsure (1)..(413): unsure at all Xaa locations
HVDSGKSTTTGHLIYKXGGIDKRTIEKFEKEXQEMGKGSFKYAWVLDKLKAERERGITIDIALWKFETGKYYVTIIDAPGHRDFIKNMITGTSQADCAVLIVAAGTGEFEAGISKNGQTREHALLAFTLGVKQLIVGVNKMDSTEPPYSEPRFEEIKKEVSSYIKKIGYNPXAVAFVPISGWHGDNMLEPSTKMPWFKGWLVERKEGKAEGKCLIEALDAILPPARPTDKALRLPLQDVYKIGGIGTVPVGRVETGILKPGTIVVFAPANITTEVKSVEMHHEALQEAVPGDNVGFNVKNVSVKELRRGYVAGDSKNNPPKGAADFTAQVIVLNHPGQISNGYTPVLDCHTAHIACKFAEIKEKVDRRTGKSTEDNPKSIKSGDAAIVNLVPSKPLCVESFQEFPPLGRFAVR

SEQ ID NO: 17618 - protein, 413 aa, Hyalophora euryalus
  unsure (1)..(413): unsure at all Xaa locations
HVDSGKSTTTGHLIYKXGGIDKRTIEKFEKEAQEMGKGSFKYAWVLDKLKAERERGITXDIALWKFETSKYYVTIIDAPGHRDFIKNMITGTSQADCAVLIVAAGTGEFEAGISKNGQTREHALLAFTLGVKQLIVGVNKMDSTEPPYSESRFEEIKKEVSSYIKKIGYNPAAVAFVPISGWHGDNMLEPSTKMPWFKGWMVERKEGKAEGKCLIEALDAILPPARPTDKALRLPLQDVYKIGGIGTVPVGRVETGILXPGTVVVFAPANITTEVKSVEMHHEALQEAVPGDNVGFNVKNVSVKELRRGYVAGDSKNNPPRGAADFTAQVIVLNHPGQISNGYTPVLDCHTAHIACKXAEIKEKVDRRTGKSTEDNPKSIKSGDAAIVNLVPSKPLCVESFQEFPPLGRFAVR

SEQ ID NO: 17619 - protein, 413 aa, Loepa sikkima
  unsure (1)..(413): unsure at all Xaa locations
HVDSGKSTTTGHLIYKCGGIDKRTIEKFEKEAQEMGKGSFKYAWVLDKLKAERERGITIDIALWKFETSRYYVTIIDAPGHRDFIKNMITGTSQADCAVLIVAAGTGEFEAGISKNGQTREHALLAFTLGVKQLIVGVNKMDSTEPPYSEPRFEEIKKEVSSYIKKIGYNPAAVAFVPISGWHGDNMLEPSTKMPWFKGWNVERKEGKADGKCLIEALDAILPPARPTDKALRLPLQDVYKIGGIGTVPVGRVETGILKPGTIVVFAPANITTEVKSVEMHHEALQEAVPGDNVGFNVKNVSVKELRRGYVAGDSKNNPPKGAADFTAQVIVLNHPGQISNGYTPVLDCHTAHIACKFAEIKEKVDRRTGKSTEDNPKSIKSGDAAIVNLVPSKPLXVESFQEFPPLGRFAVR

SEQ ID NO: 17620 - protein, 413 aa, Rothschildia forbesi
HVDSGKSTTTGHLIYKCGGIDKRTIEKFEKEAQEMGKGSFKYAWVLDKLKAERERGITIDIALWKFETAKYYVTIIDAPGHRDFIKNMITGTSQADCAVLIVAAGTGEFEAGISKNGQTREHALLAFTLGVKQLIVGVNKMDSTEPPYSEPRFEEIKKEVSSYIKKIGYNPAAVAFVPISGWHGDNMLEPSTKMPWFKGWLVERKEGKAEGKCLIEALDAILPPARPTDKPLRLPLQDVYKIGGIGTVPVGRVETGILKPGTIVVFAPANITTEVKSVEMHHEALQEAVPGDNVGFNVKNVSVKELRRGYVAGDSKNNPPKGAADFTAQVIVLNHPGQISNGYTPVLDCHTAHIACKFAEIKEKVDRRTGKSTEDNPKSIKSGDAAIVNLVPSKPLCVESFQEFPPLGRFAVR

SEQ ID NO: 17621 - protein, 413 aa, Rothschildia orizaba
  unsure (1)..(413): unsure at all Xaa locations
HVDSGKSTTTGHLIYKCGGIDKRTIEKFEKEAXEMGKGSFKYAWVLDKLKAERERGITIDIALWKFETGRYYVTIIDAPGHRDFIKNMITGTSQADCAVLIVAAGTGEFEAGISKNGQTREHALLAFTLGVKQLIVGVNKMDSTEPPYSEPRFEEIKKEVSSYIKKIGYNPAAVAFVPISGWHGDNMLEPSTKMPWFKGWLVERKEGKAEGKCLIEALDAILPPARPTDKALRLPLQDVYKIGGIGTVPVGRVETGILKPGTIVVFAPANITTEVKSVEMHHEALQEAVPGDNVGFNVKNVSVKELRRGYVAGDSKNNPPKGAADFTAQVIVLNHPGQISNGYTPVLDCHTAHIACKFAEIKEKVDRRTGKSTEDNPKSIKSGDAAIVNLVPSKPLCVESFQEFPPLGRFAVR

SEQ ID NO: 17622 - protein, 413 aa, Samia ricini
HVDSGKSTTTGHLIYKCGGIDKRTIEKFEKEAQEMGKGSFKYAWVLDKLKAERERGITIDIALWKFETGKYYVTIIDAPGHRDFIKNMITGTSQADCAVLIVAAGTGEFEAGISKNGQTREHALLAFTLGVKQLIVGVNKMDSTEPPYSESRFEEIKKEVSSYIKKIGYNPAAVAFVPISGWHGDNMLEPSTKMPWFKGWLVERKEGKAEGKCLIEALDAILPPARPTDKALRLPLQDVYKIGGIGTVPVGRVETGILKPGTVVVFAPANITTEVKSVEMHHEALQEAVPGDNVGFNVKNVSVKELRRGYVAGDSKNNPPRGAADFTAQVIVLNHPGQISNGYTPVLDCHTAHIACKFAEIKEKVDRRTGKSTEDNPKSIKSGDAAIVNLVPSKPLCVESFQEFPPLGRFAVR

SEQ ID NO: 17623 - protein, 421 aa, Halobacterium sp. NRC-1
MSDNRHQNLAVIGHVDHGKSTMVGRLLYETGSVPEHVIEQHKEEAEEKGKGGFEFAYVMDNLAEERERGVTIDIAHQEFTTDEYEFTIVDCPGHRDFVKNMITGASQADNAVLVVAADDGVAPQTREHVFLSRTLGIDELIVAVNKMDVVDYDESKYNEVVSGVKDLFGQVGFNPDDAKFIATSAFEGDNVSDHSDNTPWYDGPTLLEALNGLPVPQPPTDADLRLPIQDVYTISGIGTVPVGRIETGVMNTGDNVSFQPSDVGGEVKTIEMHHEEVPNAEPGDNVGFNVRGIGKDDIRRGDVCGPADDPPSVADTFQAQVVVMQHPSVITAGYTPVFHAHTAQVACTIESIDKKMDPASGETQEENPDFIQSGDAAVVTVRPQKPLSLEPSSEIPELGSFAVRDMGQTIAAGKVLDVDEA

SEQ ID NO: 17624 - protein, 374 aa, Lamellibrachia sp.
QEMGKGSFKYAWVLDKLKAERERGITIDIALWKFETNKYYVTIIDAPGHRDFIKNMITGTSQADCAVLIVAAGVGEFEAGISKNGQTREHALLAYTLGVKQMIIGVNKMDNTEPPYSETRFEEIKKEVAQYIKKVGYNPDTVAFVPISGWHGDNMLESSPKMAWFKGWKVKKGSKDVSGNTLMDALDNVEQPKRPTDKPLRLPLQDVYKIGGIGTVPVGRVETGVMKPGMIVTFAPCNLTTEVKSVEMHHQALTEAAPGDNVGFNIKNVSVKDIRRGFVCGDSKNDPPLETDEFLAQVIILNHPGTIQAGYAPVLDCHTAHIACKFKELKEKIDRRSGKVLEATPQSVKSGDAAMVEMIPQKAMCVEKFSEYAP

SEQ ID NO: 17625 - protein, 380 aa, Phascolopsis gouldii
AEMGKGSFKYAWVLDKLKAERERGITIDIALWKFETTKYYITIIDAPGHRDFIKNMITGTSQADCAVLIVAAGVGEFEAGISKNGQTREHALLAYTLGVKQLIIGVNKMDSTEPPYSQARFEEIKKEVTQYVKKIGYNPEEVAFVPISGWHGDNMLEQSQKMSWFKGWEVQKGKGKKETKGGKTLFEALDSIDPPQRPTDKPLRLPLQDVYKIGGIGTVPVGRVETGTLKPGMVVKFAPKNITTEVKSVEMHHTALDEALPGDNVGFNIKNVSVKEIRRGNVCGDSKKSPPMEAKDFKAQVIILNHPGEIRAGYAPVVDCHTAHIACKFNTLLEKIDRRSGKKLEDNPQIVKSGDAAIVNMIPSKPMCVEAFSEFPPLGR

SEQ ID NO: 17626 - protein, 417 aa, Rhizopus oryzae
GKSTTTGHLIYKCGGIDKRTIEKFEKEAAELGKGSFKYAWVLDKLKAERERGITIDIALWKFETPKYQITVIDAPGHRDFIKNMITGTSQADCAILIIAGGTGEFEAGISKDGQTREHALLAFTLGVRQLIVAVNKMDTTKWSEARFNEIVKEVSSFIKKIGYNPKSVPFVPISGWHGDNMLEESTNMPWYKGWNKETKAGAKSGKTLLDAIDNIDPPTRPVDKPLRLPLQDVYKIGGIGTVPVGRVETGVIKAGMVVTFAPAAVTTEVKSVEMHHETLTEGLPGDNVGFNVKNVSVKDIRRGNVCSDSKNDPAKEAGSFTAQVIILNHPGQIGAGYAPVLDCHTAHIACKFAELIEKIDRRSGKSLEATPKFVKSGDSAIVKMIPSKPMCVEAYTDYPPLGRFAVRDMRQTVAVGV

SEQ ID NO: 17627 - protein, 403 aa, Echinosporangium transversale
VVVIGHVDSGKSTTTGHLIYKCGGIDKRTIEKFEKEAAELGKGSFKYAWVLDKLKAERERGITIDIALWKFETPKYYVTVIDAPGHRDFIKNMITGTSQADCAILIIAAGTGEFEAGISKEGQTREHALLAFTLGVKQLIVAINKMDSTKWNKERFEEIVKEVSTFVKKVGYNPKAVAFVPISGWHGDNMLEESVNMPWYKGWVKETKGGEVKGRTLLDAIDAIEPPARPTDKPLRLPLQDVYKIGGIGTVPVGRVETGIIKAGMVVTFAPTNVTTEVKSVEMHHEVLTEGIPGDNVGFNVKNVSVKDIRRGNVCSDSKNDPAKEAASFNAQVIVLNHPGQISNGYAPVLDCHTAHIACKFSEILEKIDRRTGKATEEFPKFIKSGDAAIVKMVPSKPLCVET

SEQ ID NO: 17628 - protein, 425 aa, Radiomyces spectabilis
VVVIGHVDSGKSTTTGHLIYKCGGIDKRTIEKFEKEAAELGKGSFKYAWVLDKLKAERERGITIDIALWKFETPKYHVTVIDAPGHRDFIKNMITGTSQADCGILIIAAGTGEFEAGISKDGQTREHALLAFTLGVRQLIVAINKMDSTKWSEARYNEIVKEVSAFIKKIGFNPKAVPFVPISGWHGDNMLEESTNMPWFKGWTKETKAGSKTGKTLLEAIDNIEPPVRPSDKPLRLPLQDVYKIGGIGTVPVGRVETGVIKAGMVVTFAPANVTTEVKSVEMHHEQLVEGVPGDNVGFNVKNVSVKDIRRGNVCSDSKNDPAKEAGSFTAQVIVLNHPGQIGAGYAPVLDCHTAHIACKFAELLEKIDRRSGKSLEAAPKFVKSGDSAIVKMVPSKPMCVEAYTEYPPLGRFAVRDMRQTVAVG

SEQ ID NO: 17629 - protein, 417 aa, Mucor indicus
GKSTTTGHLIYKCGGIDKRTIEKFEKEAAELGKGSFKYAWVLDKLKAERERGITIDIALWKFETPKYNVTVIDAPGHRDFIKNMITGTSQADCAILIIAGGTGEFEAGISKDGQTREHALLAFTLGVRQLIVAINKMDTTKWSEARYNEIVKEVSSFIKKIGFNPKSVPFVPISGWHGDNMLDESTNMPWFKGWNKETKAGSKTGKTLLEAIDAIDPPTRPVDKPLRLPLQDVYKIGGIGTVPVGRVETGVIKAGMVVTFAPAAVTTEVKSVEMHHETLTEGLPGDNVGFNVKNVSVKDIRRGNVCSDSKNDPAKESASFTAQVIILNHPGQISAGYAPVLDCHTAHIACKFAELIEKIDRRSGKKLEDAPKFVKPGDSAIVKMIPSKPMCVEAYTDYPPLGRFAVRDMRQTVAVGV

SEQ ID NO: 17630 - protein, 417 aa, Benjaminiella poitrasii
GKSTTTGHLINKCGGIDKRTIEKFEKEAAELGKGSFKYAWVLDKLKAERERGITIDIALWKFETPKYHVTVIDAPGHRDFIKNMITGTSQADCAILIIAGGTGEFEAGISKDGQTREHALLAFTLGVRQLIVAINKMDTTKWSEARYNEIVKEVSNFIKKIGFNPKSVPFVPISGWHGDNMLDESTNMPWFKGWTKETKAGSKTGKTLLEAIDAIDPPSRPVDKPLRLPLQDVYKIGGIGTVPVGRVETGVIKAGMVVSFAPAAVTTEVKSVEMHHETLTEGLPGDNVGFNVKNVSVKDIRRGNVCSDSKNDPAKESASFTAQVIILNHPGQISAGYAPVLDCHTAHIACKFSELIEKIDRRSGKKLEDAPKFVKSGDSAIVKMVPSKPMCVEAYTEYPPLGRFAVRDMRQTVAVGV

SEQ ID NO: 17631 - protein, 417 aa, Mycotypha africana
GKSTTTGHLINKCGGIDKRTIEKFEKEAAELGKGSFKYAWVLDKLKAERERGITIDIALWKFETPKYHVTVIDAPGHRDFIKNMITGTSQADCGILIIAAGTGEFEAGISKDGQTREHALLAFTLGVRQLIVAINKMDTTKWSEARYNEIVKEVSSFIKKIGFNPKSVPFVPISGWHGDNMLDESNNMPWFKGWTKETKAGSKTGKTLLEAIDAIDPPTRPVDKPLRLPLQDVYKIGGIGTVPVGRVETGVIKAGMVVTFAPANVTTEVKSVEMHHETLTEGLPGDNVGFNVKNVSVKDIRRGNVCSDSKNDPAKESGSFTAQVIILNHPGQISAGYAPVLDCHTAHIACKFAELVEKIDRRSGKKLEDAPKFVKSGDSAIVKMIPSKPMCVEAYTDYPPLGRFAVRDMRQTVAVGV

SEQ ID NO: 17632 - protein, 416 aa, Mycotypha microspora
GKSTTTGHLIYKCGGIDKRTIEKFEKEAAELGKGSFKYAWVLDKLKAERERGITIDIALWKFETPKYHVTVIDAPGHRDFIKNMITGTSQADCGILIIAAGTGEFEAGISKDGQTREHALLAFTLGVRQLIVAINKMDTTKWSEARYNEIVKEVSSFIKKIGFNPKSVPFVPISGWHGDNMLDESTNMPWFKGWTKETKAGSKTGKTLLEAIDAIDPPTRPSDKPLRLPLQDVYKIGGIGTVPVGRVETGVIKAGMVVTFAPANVTTEVKSVEMHHETLTEGLPGDNVGFNVKNVSVKDIRRGNVCSDSKNDPAKESGSFTAQVIILNHPGQISAGYAPVLDCHTAHIACKFAELVEKIDRRSGKKLEDAPKFVKSGDSAIVKMIPSKPMCVEAYTDYPPLGRFAVRDMRQTVAVG

SEQ ID NO: 17633 - protein, 365 aa, Pilaira anomala
GKSTTTGHLIYKCGGIDKRTIEKFEKEAAELGKGSFKYAWVLDKLKAERERGITIDIALWKFETPKYMVTVIDAPGHRDFIKNMITGTSQADCAILIIAGGTGEFEAGISKDGQTREHALLAFTLGVRQLIVAINKMDTTKWSEARYNEIVKEVSSFIKKIGFNPKTVPFVPISGWHGDNMLEESKNMPWFKGWNKETKAGAKTGKTLLEAIDAIDPPVRPSDKPLRLPLQDVYKIGGIGTVPVGRVETGVIKAGMVVNFAPAAVTTEVKSVEMHHETLSEGLPGDNVGFNVKNVSVKDIRRGNVCSDSKNDPAKEAGSFTAQVIILNHPGQISNGYSPVLDCHTAHIACKFSELIEKIDRRSGK

SEQ ID NO: 17634 - protein, 365 aa, Pirella circinans
GKSTTTGHLIYKCGGIDKRTIEKFEKEAAELGKGSFKYAWVLDKLKAERERGITIDIALWKFETPKYHVTVIDAPGHRDFIKNMITGTSQADCAILIIAGGTGEFEAGISKDGQTREHALLAFTLGVRQLIVAINKMDTTKWSEARYTEIVKEVSSFIKKIGFNPKSVPFVPISGWHGDNMLEESKNMGWFKGWTKETKAGSKTGKTLLEAIDAIEPPVRPSDKPLRLPLQDVYKIGGIGTVPVGRVETGIIKAGMVVNFAPAAVTTEVKSVEMHHETLTEGLPGDNVGFNVKNVSVKDIRRGNVCSDSKNDPAKEAGSFTAQVIILNHPGQISNGYSPVLDCHTAHIACKFSELIEKIDRRSGK

SEQ ID NO: 17635 - protein, 407 aa, Actinomucor elegans
GKSTTTGHLIYKCGGIDKRTIEKFEKEAAELGKGSFKYAWVLDKLKAERERGITIDIALWKFETPKYNVTVIDAPGHRDFIKNMITGTSQADCAILIIAGGTGEFEAGISKDGQTREHALLAFTLGVRQLIVAINKMDTTKWSEARYTEIVKEVSSFIKKIGFNPKSVPFVPISGWHGDNMLEESKNMPWFKGWNKETKAGSSTGKTLLQAIDAIEPPTRPSDKPLRLPLQDVYKIGGIGTVPVGRVETGTIKAGMVVNFAPAAVTTEVKSVEMHHETLTEGLPGDNVGFNVKNVSVKDIRRGNVCSDSKNDPAKESASFTAQVIILNHPGQISAGYAPVLDCHTAHIACKFAELIEKIDRRSGKKMEDAPKFVKSGDSAIVKMIPSKPMCVEAYTDYPPLGRFAVR

SEQ ID NO: 17636 - protein, 366 aa, Backusella circina
GKSTTTVHLIYKCGGIDKRTIEKFEKEAAELGKGSFKYAWVLDKLKAERERGITIDIALWKFETPKYNVTVIDAPGHRDFIKNMITGTSQADCAILIIAGGTGEFEAGISKDGQTREHALLAFTLGVRQLIVAINKMDTTKWSEARYNEIVKEVSSFIKKIGFNPKSVPFVPISGWHGDNMLEESTNMPWFKGWNKETKAGAKTGKTLLEAIDNIEPPSRPVDKPLRLPLQDVYKIGGIGTVPVGRVETGVIKAGMVVTFAPANVTTEVKSVEMHHELLPEGGLPGDNVGFNVKNVSVKDIRRGNVTSDSKNDPAKEAGSFTAQVIILNHPGQIGAGYAPVLDCHTAHIACKFSELIEKIDRRPGK

SEQ ID NO: 17637 - protein, 426 aa, Zychaea mexicana
VVVIGHVDSGKSTTTGHLIYKCGGIDKRTIEKFEKEAAELGKGSFKYAWVLDKLKAERERGITIDIALWKFETPKYHVTVIDAPGHRDFIKNMITGTSQADCGILIIAAGTGEFEAGISKDGQTREHALLAFTLGVRQLIVAINKMDSTKYSEARYNEIVKEVSTFIKKIGFNPKSVPFVPISGWNGDNMLDESPNMPWFKGWNKETKAGAKSGKTLLEAIDSIDPPVRPSDKPLRLPLQDVYKIGGIGTVPVGRVETGVIKAGMVVTFAPANVTTEVKSVEMHHEQLVEGVPGDNVGFNVKNVSVKDIRRGNVCSDSKNDPAKEAASFTAQVIVLNHPGQIGSGYSPVLDCHTAHIACKFSELLEKVDRRSGKKLEDAPKFVKSGDSAIVKMVPSKPMCVEAYTEYPPLGRFAVRDTRQTVAVGV

SEQ ID NO: 17638 - protein, 401 aa, Planoprotostelium aurantium
AGKSTTTGHLIYKCGGIDKRTIEKFEKEAKEIGKASFKYAWVLDKLKAERERGITIDIALWKFETTKYYFTIIDAPGHRDFIKNMITGTSQADCAILVIASPTGEFEAGIDKNGQTREHALLAFTLGVKQLIVLVNKMDEKSTNYSEARFNEIRTEVSSFIKKIGYNPEKVPFVPISGWNGDNMLEKPDNMPWWKGPTLLEALDSITEPKRPSDKPLRVPLQDVYKIGGIGTVPVGRVETGILKPGVSVTFAPAGVTTEVKSVEMHHVQLPEARPGDNVGFNVKNVSVKDIRRGYVAGDAKADPPLGTEFFVAQVIILNHPGEIHNGYAPVLDCHTAHIACKFAEITSKIDRRSGKELEALPKSVKSGDAAMVKLVPQKPMCVETFTEYPPLGRFAVRDMR

SEQ ID NO: 17639 - protein, 388 aa, Planoprotostelium aurantium
CGGIDKRTIEKFEKEAKEIGKASFKYAWVLDKLKAERERGITIDIALWKFETTKYYFTIIDAPGHRDFIKNMITGTSQADCAILVIASPTGEFEAGIDKNGQTREHALLAFTLGVKQLIVLVNKMDEKSTNYSEARFNEIRTEVSSFIKKIGYNPEKVPFVPISGWNGDNMLEKSDNMPWWKGPTLLEALDSITEPKRPSDKPLRVPLQDVYKIGGIGTVPVGRVETGILKPGVSVTFAPAGVTTEVKSVEMHHVQLPEARPGDNVGFNVKNVSVKDIRRGYVAGDAKADPPLGTEFFVAQVIILNHPGEIHNGYAPVLDCHTAHIACKFAGITSKIDRRSGKELEALPKSVKSGDAAMVKLVPQKPMCVETFTEYPPLGRFAVRDMR

SEQ ID NO: 17640 - protein, 377 aa, Mytilus edulis
AEMGKGSFKYAWVLDKLKAERERGITIDIALWKFETTKYYVTIIDAPGHRDFIKNMITGTSQADCAILIVASGTGEFEAGISSNGQTREHALLAFTLGVKQMIVGVNKMDNTEPPYSESRFMEIQKEVSSYLKKIGYNPKCVAFVPISGWHGDNMIETSEKMGWYKGWSIERKEGNASGKTLFEALDSILPPSRPTDKALRLPLQDVYKIGGIGTVPVGRVETGIIKPGMVVTFAPANISTEVKSVEMHHESLPEALPGDNVGFNVKNVSVKEIRRGMVAGDSKNDPPKGAKSFIAQVIILNHPGEIKNGYAPVLDCHTAHIACKFVEIKEKIDRRSGKKLEEFPKFIKSGDAGIVDMTPSKPMCVESFQSYAPLGR

SEQ ID NO: 17641 - protein, 395 aa, Dinenympha exilis
STTTGHLIYKCGGIDERTIKKFEQESEAMGKGSFKYAWVLDKLKAERERGITIDIALWKFETNKYYFTIIDAPGHRDFIKNMITGTSQADAAILVVAANVGEFEAGISKDGQTREHALLAYTLGVEQMIVCVNKMDDKSVNWAESRYNEIKTEMRTYLKKIGYNPDKILMIPISGFNGDNMLDRSTNMPWYKDPILFDALDLLEVPKRPSDKPLRLPIQDVFKIGGIGTVPVGRVETGILTPGQVITIAPCMITTEVKSVEMHHEALTQAVPGDNVGFNVKGIAVKDLKRGFVAGDAKNDPPKEADTFSAQVIVMAHPGQIQNGYTPVLDCHTSHIACKFKEIQSKIDRRTNKVQEENPKFIKTGDSAIVEMQPSKPMVVETFVEYPPLGRFAVR

SEQ ID NO: 17642 - protein, 395 aa, Unidentified Oxymonadida A-14
STTTRHLIYKCGGIDQRTLDRFQKESEAMGKGSFKYAWVLDKLKAERERGITIDIALWKFETGKYYFTIIDAPGHRDFIKNMITGTSQADGAILVVAANVGEFEAGISKEGQTREHALLAYTLGVRQMIVCVNKMDDKSVNWAESRYNEVKTEMGTYLKKIGYNPDKILMIPISGFNGDNMMERSPNMPWYKGPVLFEALDLLEIPKRPSEKPLRLPIQDVFKIGGIGTVPVGRVETGILTPGQVITIAPCMITTEVKSVEMHHEALTQAVPGDNVGFNVKGIAVKDLKRGFVAGDSKNDPPKEADSFTAQVIVMAHPGQIQNGYTPVLDCHTSHIACKFKEIQSKIDRRTNKVLEENPKSIKSGDSAFVEMQPSKPMVVETFVEYPPLGRFAVR

SEQ ID NO: 17643 - protein, 364 aa, Libinia emarginata
LDKLKAERERGITIDIALWKFETNRFYVTIIDAPGHRDFIKNMITGTSQADCAVLIVAAGTGEFEAGISKNGQTREHVLLCFTLGVKQLIVAVNKMDSTEPKYSETRFNEIKKELTAYVKKVGYNPAVVPILPISGFNGDNMLEKSDNMTWWGKTKIERKSGSYEFITLFDALDNIEPPSRPVDKPLRLPLQDVYKIGGIGTVPVGRVETGILKPGMVVNFAPTGPTTEVKSVEMHHEALVEAVPGDNVGFNVKNVSVKELKRGFVASDSKNDPAKEAGDFTAQVIVLNHPGQIQAGYSPVLDCHTAHIACKFAELIQKIDRRTGKEIEANPKQIKSGDSCIVKMIPSKPMCVETFQKYAPLGR

SEQ ID NO: 17644 - protein, 377 aa, Carcinoscorpius rotundicauda
AELGKGSFKYAWVLDKLKAERERGITIDITLWKFETPKYYITVIDAPGHRDFIKNMITGTSQADCAVLIVAAGTGEFEAGISKNGQTREHALLAYTLGVKQMIVGVNKMDTTEPPYSEKRFEEIQKEVSAYIKKIGYNPATVAFVPISGWNGDNMLEPSSNTAWFKGFKIERKGQVSEGKTLLQALDCAEPPSRPTEKPLRLPLQDVYKIGGIGTVPVGRVETGILKPGMVVTFAPAMITTEVKSVEMHHESLTEALPGDNVGFNVKNVSVKELRRGYVAGDSKNDPPQSTADFIAQVIILNHPGQISNGYAPVLDCHTAHIACKFKEIKEKCDRRSGKKLEDNPKFIKSGDAAIVELVPSKPMCVESFTNYPPLGR

SEQ ID NO: 17645 - protein, 364 aa, Periplaneta americana
LDKLKAERERGITIDIALWKFETSKYYVTIIDAPGHRDFIKNMITGTSQADCAVLIVAAGTGEFEAGISKNGQTREHALLAFTLGVKQLIVGVNKMDSTEPPYSETRFEEIKKEVSNYIKKIGYNPAAVAFVPISGWHGDNMLEHSDKMSWFKGWSIERKEGKADGKCLIEALDAILPPSRPTEKPLRLPLQDVYKIGGIGTVPVGRVETGVLKPGMVVTFAPANLTTEVKSVEMHHEALQEAVPGDNVGFNVKNVSVKELRRGYVAGDSKNNPPKGAADFIAQVIVLNHPGQISNGYTPVLDCHTAHIACKFAEIKEKCDRRTGKTTEENPKSIKSGDAAIVNLVPSKPMCVESFQEFPPLGR

SEQ ID NO: 17646 - protein, 461 aa, Locusta migratoria
MGKEKIHINIVVIGHVDSGKSTTTGHLIYKCGGIDKRTIEKFEKEAQEMGKGSFKYAWVLDKLKAERERGITIDIALWKFETSKYYVTIIDAPGHRDFIKNMITGTSQADCAVLIVAAGTGEFEAGISKNGQTREHALLAFTLGVKQLIVGVNKMDSTEPPYSEARFEEIKKEVSNYIKKIGYNPVAVAFVPISGWHGDNMLEHSDKMSWFKGWSIERNEGKAEGKTLIEALDAILPPNRPTEKPLRLPLQDVYKIGGIGTVPVGRVETGILKPGMVVTFAPANLTTEVKSVEMHHEALQEAVPGDNVGFNVKNVSVKELRRGYVAGDSKNNPPKGAADFTAQVIVLNHPGQIAMDIHQCLTVTQLILHASLLKSKRSVTRRTGKTTEENPKSIKSGDAAIVKFGTQQTNVCGIISRSSFIGKNCCQNMRQTGAVGVIKNVSFKEALVVSNQGTGKAQKKK

SEQ ID NO: 17647 - protein, 413 aa, Malacosoma americanum
HVDSGKSTTTGHLIYKCGGIDKRTIEKFEKESQEMGKSSFKYAWVLDKLKAERERGITIDIALWKFETSKYYVTIIDAPGHRDFIKNMITGTSQADCAVLIVAAGTGEFEAGISKNGQTREHALLAFTLGVKQLIVGINKMDSTEPPYSESRFEEIKKEVSSYIKKIGYNPAAVAFVPISGWHGDNMLEPSTKMPWFKGWHVERKEGKAEGKCLIEALDAILPPARPTDKPLRLPLQDVYKIGGIGTVPVGRVETGILKPGTIVVFAPANITTEVKSVEMHHEALQEAVPGDNVGFNVKNVSVKELRRGYVAGDSKNNPPKGAADFTAQVIVLNHPGQISNGYTPVLDCHTAHIACKFAEIKEKVDRRTGKSTEENPKAIKSGDAAIVILVPSKPLCVESFQEFPPLGRFAVR

SEQ ID NO: 17648 - protein, 413 aa, Spodoptera frugiperda
HVDSGKSTTTGHLIYKCGGIDKRTIEKFEKEAQEMGKGSFKYAWVLDKLKAERERGITIDIALWKFETAKYYVTIIDAPGHRDFIKNMITGTSQADCAVLIVAAGTGEFEAGISKNGQTREHALLAFTLGVKQLIVGVNKMDSTEPPYSESRFEEIKKEVSSYIKKIGYNPAAVAFVPISGWHGDNMLEASTKMPWFKGWNVERKEGKAEGKCLIEALDAILPPARPTDKPLRLPLQDVYKIGGIGTVPVGRVETGILKPGTIVVFAPANITTEVKSVEMHHEALQEAVPGDNVGFNVKNVSVKELRRGYVAGDSKNNPPKGAADFTAQVIVLNHPGQISNGYTPVLDCHTAHIACKFAEIKEKVDRRTGKSTEDNPKSIKSGDAAIVNLVPSKPLCVESFQEFPPLGRFAVR

SEQ ID NO: 17649 - protein, 413 aa, Trichoplusia ni
HVDSGKSTTTGHLIYKCGGIDKRTIEKFEKEAQEMGKGSFKYAWVLDKLKAERERGITIDIALWKFETAKYYVTIIDAPGHRDFIKNMITGTSQADCAVLIVAAGTGEFEAGISKNGQTREHALLAFTLGVKQLIVGVNKMDSTEPPYSESRFEEIKKEVSSYIKKIGYNPAAVAFVPISGWHGDNMLEPSTKMPWFKGWLVERKEGKAEGKCLIEALDAILPPARPTDKPLRLPLQDVYKIGGIGTVPVGRVETGILKPGTIVVFAPANITTEVKSVEMHHEALQEAVPGDNVGFNVKNVSVKELRRGYVAGDSKNNPPKGAADFTAQVIVLNHPGQISNGYTPVLDCHTAHIACKFAEIKEKVDRRTGKSTETNPKSIKSGDAAIVNLVPSKPLCVESFQEFPPLGRFAVR

SEQ ID NO: 17650 - protein, 413 aa, Antheraea pernyi
HVDSGKSTTTGHLIYKCGGIDKRTIEKFEKEAQEMGKGSFKYAWVLDKLKAERERGITIDIALWKFETSRYYVTIIDAPGHRDFIKNMITGTSQADCAVLIVAAGTGEFEAGISKNGQTREHALLAFTLGVKQLIVGVNKMDSTEPPYSEPRFEEIKKEVSSYIKKIGYNPAAVAFVPISGWHGDNMLEPSTKMPWFKGWMVERKEGKAEGKCLIEALDAILPPARPTDKALRLPLQDVYKIGGIGTVPVGRVETGILKPGTIVVFAPANITTEVKSVEMHHEALQEAVPGDNVGFNVKNVSVKELRRGYVAGDSKNNPPKGAADFTAQVIVLNHPGQISNGYTPVLDCHTAHIACKFAEIKEKVDRRTGKSTEDNPKSIKSGDAAIVNLVPSKPLCVESFQEFPPLGRFAVR

SEQ ID NO: 17651 - protein, 413 aa, Antheraea polyphemus
HVDSGKSTTTGHLIYKCGGIDKRTIEKFEKEAQEMGKGSFKYAWVLDKLKAERDRGITIDIALWKFETSKYYVTIIDAPGHRDFIKNMITGTSQADCAVLIVAAGTGEFEAGISKNGQTREHALLAFTLGVKQLIVGVNKMDSTEPPYSESRFEEIKKEVSSYIKKIGYNPAAVAFVPISGWHGDNMLEPSTKMPWFKGWMVERKEGKAEGKCLIEALDAILPPARPTDKALRLPLQDVYKIGGIGTVPVGRVETGILKPGTIVVFAPANITTEVKSVEMHHEALQEAVPGDNVGFNVKNVSVKELRRGYVAGDSKNNPPKGAADFTAQVIVLNHPGQISNGYTPVLDCHTAHIACKFAEIKEKVDRRTGKSTEDNPKSIKSGDAAIVNLVPSKPLCVESFQEFPPLGRFAVR

SEQ ID NO: 17652 - protein, 413 aa, Samia cynthia
  unsure (1)..(413): unsure at all Xaa locations
HVDSGKSTTTGHLIYKCGGIDKRTIEKFEKEAQEMGKGSFKYAWVLDKLKAERERGITIDIALWKFETGKYYVTIIDAPGHRDFIKNMITGTSQADCAVLIVAAGTGEFEAGISKNGQTREHALLAFTLGVKQLIVGVNKMDSTEPPYSESRFEEIKKEVSSYIKKIGYNPAAVAFVPISGWHGDNMLEPSTKMPWFKGWLVERKEGKAEGKCLIEALDAILPPARPTDKALRLPLQDVYKIGGIGTVPVGRVETGILKPGTVVVFAPANITTEVKSVEMHHEALQEAVPGDNVGFNVKNVSVKELRRGYVAGDSKNNPPRGAADFTAQVIVLNHPGQISNGYTPVLDCHTAHIACKFAEIKEKVDRRTGKSTEDNPKSIKSGDAAIVXLVPSKPLCVESFQEFPPLGRFAVR

SEQ ID NO: 17653 - protein, 413 aa, Manduca sexta
HVDSGKSTTTGHLIYKCGGIDKRTIEKFEKEAQEMGKGSFKYAWVLDKLKAERERGITIDIALWKFETSKYYVTIIDAPGHRDFIKNMITGTSQADCAVLIVAAGTGEFEAGISKNGQTREHALLAFTLGVKQLIVGVNKMDSTEPPYSESRFEEIKKEVSSYIKKIGYNPAAVAFVPISGWHGDNMLEPSTKMPWFKGWLVERKEGKAEGKCLIEALDAILPPARPTDKPLRLPLQDVYKIGGIGTVPVGRVETGVLKPGTIVVFAPANITTEVKSVEMHHEALQEAVPGDNVGFNVKNVSVKELRRGYVAGDSKNNPPKGAADFTAQVIVLNHPGQISNGYTPVLDCHTAHIACKFAEIKEKVDRRTGKSTEDNPKSIKSGDAAIVNLVPSKPMCVESFQEFPPLGRFAVR

SEQ ID NO: 17654 - protein, 412 aa, Rhynchosciara americana
  unsure (1)..(412): unsure at all Xaa locations
GSFKYAWVLDKLKAERERGITIDIALWKFETAKYYVTIIDAPGHRDFIKNMITGTSQADCAVLIVAAGTGEFEAGISKNGQTREHALLAFTLGVKQLIVGVNKMDSTEPPFSENRYEEIKKEVSSYIKKIGYNPVAVAFVPISGWHGDNMLEPSSNMRWLKGWKVERINGNGEGKCGSXALDAILPPPRPTDQALRLPLPDVYKIGGIGTVPVGRLETGILKPGTVVVFAPANITTEVKSVEMHHEALTEAVPGDNVGFNVKNVSVKELRRGYVAGDSKANPPKGAENFTAQVIVLNHPGQISNGYTPVLDCHTAHIACKFAEIKXKVDRRSGKSTEDNPKAIKSGDAAIVILQPSKPLCVESFQEFPPLGRFAVRDMRQTVAVGVIKSVVFKDATGRKVTKAAEKATKGKK

SEQ ID NO: 17655 - protein, 661 aa, Drosophila melanogaster
MDYNDEYDGYDDIYGHSVEDEHCISPTDAQQWLYDRARGQQSISAFISKNKDIQEEEADEDEDEDAAFAKARRDSESFQMPQLDEIEQAKLSSCVDEVRSVVGDAVSERRIVETSMKFDYDMQKILDEILNEETNKSAKPAVNKMKAPAAPVLPKTVSKTVPTPPPKISLKEPRRGFEIPSPKVPSSPVVSGRNTPVDISAGDDISRSSATVFKVSKEQAVRNARQLYEKERADQKSHIHMIVIGHVDAGKSTLMGHLLYDTGNVSQRVMHKHEQESKKLGKQSFMYAWVLDETGEERARGITMDVGQSRIETKTKIVTLLDAPGHKDFIPNMISGATQADVALLVVDATRGEFESGFELGGQTREHAILVRSLGVNQLGVVINKLDTVGWSQDRFTEIVTKLKSFLKLAGFKDSDVSFTPCSGLTGENLTKKAQEPALTNWYSGRHLLDVIENFKIPERAIDRPLRMSVSDIYKGTGSGFCISGRVETGVLCLNDKVLVGASREQAQVKSLTMNEFPQTCVFAGDQVSVTLPALDINNVTVGCIISDPQTPIPVTTRFQARIIVFNVKVPITMGFPVLLHHQSLIEPAVVCKLTASIHKSTGEVVKKKPRCLGNNSCALVELETSRPICIERYADFKELGRVMLRVAGVTIAAGMVTKIR

SEQ ID NO: 17656 - protein, 670 aa, Drosophila melanogaster
MSRHRIVRTMDYNDEYDGYDDIYGHSVEDEHCISPTDAQQWLYDRARGQQSISAFISKNKDIQEEEADEDEDEDAAFAKARRDSESFQMPQLDEIEQAKLSSCVDEVRSVVGDAVSERRIVETSMKFDYDMQKILDEILNEETNKSAKPAVNKMKAPAAPVLPKTVSKTVPTPPPKISLKEPRRGFEIPSPKVPSSPVVSGRNTPVDISAGDDISRSSATVFKVSKEQAVRNARQLYEKERADQKSHIHMIVIGHVDAGKSTLMGHLLYDTGNVSQRVMHKHEQESKKLGKQSFMYAWVLDETGEERARGITMDVGQSRIETKTKIVTLLDAPGHKDFIPNMISGATQADVALLVVDATRGEFESGFELGGQTREHAILVRSLGVNQLGVVINKLDTVGWSQDRFTEIVTKLKSFLKLAGFKDSDVSFTPCSGLTGENLTKKAQEPALTNWYSGRHLLDVIENFKIPERAIDRPLRMSVSDIYKGTGSGFCISGRVETGVLCLNDKVLVGASREQAQVKSLTMNEFPQTCVFAGDQVSVTLPALDINNVTVGCIINDPQTPIPVTTRFQARIIVFNVKVPITMGFPVLLHHQSLIEPAVVCKLTASIHKSTGEVVKKKPRCLGNNSCALVELETSRPICIERYADFKELGRVMLRVAGVTIAAGMVTKIR

SEQ ID NO: 17657 - protein, 376 aa, Hediste japonica
QEMGKGSFKYAWVLDKLKAERERGITIDIALWKFETAKYYVTIIDAPGHRDFIKNMITGTSQADCAVLIVAAGTGEFEAGISKNGQTREHALLAYTLGVKQLIVGVNKMDSTEPPYSKARFEEIQKEVSTYIKKIGYNPDTVAFVPISGWHGDNMLEASPNMSWFNSWSVKKGKEKKECTGKTLLDALDNIDPPSRPTDKALRLPLQDVYKIGGIGTVPVGRVETGILKPGMIVQFAPGGLATEVKSVEMHHTALEQAVPGDNVGFNVKNISVKDIRRGNVASDSKNDPAKETEDFKAQVIILNHPGEIRAGYAPVIDCHTAHIACKFAELKEKIDRRSGKKMEDNPEKVKSGDAAIVQMVPQKAMCVEAFSDYAP

SEQ ID NO: 17658 - protein, 374 aa, Laetmonice sp.
QEMGKGSFKYAWVLDKLKAERERGITIDIALWKFETNKYYVTIIDAPGHRDFIKNMITGTSQADCAVLIVAAGVGEFEAGISKNGQTREHALLAYTLGVKQLIIGINKMDSTEPPYSETRYQEIVKEVSAYIKKIGYNPDNVPFVPISGWHGDNMLEPSKYMQWFKGWKCKKGGKESNGNTLLEALDVIEAPKRPTDKPLRLPLQDVYKIGGIGTVPVGRVETGILKPGMLVTFAPCNLTTEVKSVEMHHTALVEATPGDNVGFNVKNVSVKDVRRGNVAGDNKNDPPKETHEFRAQVIILNHPGQISAGYAPVVDCHTAHIACKFKELMEKIDRRSGKKLEDNPQFVKSGDAAIVEMVPQKPLCVEAFSQYPP

SEQ ID NO: 17659 - protein, 376 aa, Eunice yamamotoi
AEMGKGSFKYAWVLDKLKAERERGITIDIALWKFETTRYYVTIIDAPGHRDFIKNMITGTSQADCAVLIVAAGTGEFEAGISKNGQTREHALLAYTLGVKQLVVGINKMDNTEPPYSQTRYEEIVKEVGSYIKKIGYNPDTVPFVPISGWHGDNMLEASDNMTWFKNWNVKKGKEKKEVTGKTLLEALDQIDPPKRPTDKPLRLPLQDVYKIGGIGTVPVGRVETGKLKAGMVVKFAPSNITTEVKSVEMHHTSLEEALPGDNVGFNVKNVSVKDIRRGNVCGDSKDDPPNQTANFKAQVIILNHPGQIQNGYAPVIDCHTAHIACRFSELLEKIDRRSGKKLEDNPTNVKSGDAAIVNMVPQKPMCVESFNQYPP

SEQ ID NO: 17660 - protein, 375 aa, Chaetopteridae sp.
SEMGKGSFKYAWVLDKLKAERERGITIDIALWKFETKKYYVTIIDAPGHRDFIKNMITGTSQADCAVLIVAAGTGEFEAGISKNGQTREHALLAYTLGVKQLIVGVNKMDNTEPPYSKTRFEEISKEVSTYIKKIGYDPKTVAFVPISGWHGDNMLEKSEKMSWFGGWKKTTKEGGDANGHTLFDSLDSINPPKRPTDKPLRLPLQDVYKIGGIGTVPVGRVETGQLKAGTVVTFAPANITTEVKSVEMHHQTLLKAEPGDNVGFNVKNVSVKDIRRGNVAGDSKNDPPKEAANFDAQVIILNHPGTIVKGYTPVLDCHTAHIACKFFELKEKIDRRSGKKLEENPDKLKSGDSAIVTMVPSKPMCVEAFSDYQP

SEQ ID NO: 17661 - protein, 373 aa, Capitella sp.1
QEMGKGSFKYAWVLDKLKAERERGITIDIALWKFETDKYFVTIIDAPGHRDFIKNMITGTSQADCAVLIVAAGMGEFEAGISKNGQTREHALLAFTLGVKQLIIGVNKMDNTEPPYSEARFKEISKEVEAYIKKIGYNPKAVAFVPISGWHGDNMLEASDKMPWFKGWNVDRKLAKLRKTLYEALDSILPPERPTDKALRLPLQDVYKIGGIGTVPVGRVETGIIKPGMVVTFAPCMVTTEVKSVEMHHTSLPEALPGDNVGFNVKNVSVKEIRRGYVAGDSKNDPPKETDEFRAQVIVLNHPGQISNGYAPVLDCHTAHIACKFQELIEKIDRRSGKTMEEKPQHVKSGDAAIVEMKPGKPMCVEAFADYAP

SEQ ID NO: 17662 - protein, 375 aa, Maldane cristata
QEMGKGSFKYAWVLDKLKAERERGITIDIALWKFETSKYYVTIIDAPGHRDFIKNMITGTSQADCAVLIVAAGTGEFEAGISKNGQTREHALLAYTLGVKQLIVGVNKMDNTEPPYSGPRFDEIKKEVGGYIKKIGYNPDTVPFVPISGWHGDNMLEKSDKMSWYNGWQVKKVDKKEYKGVTLMDALDNIDPPKRPTDKALRLPLQDVYKIGGIGTVPVGRVETGVLKPGMVVTFAPPMITTEVKSVEMHHQALTEAEPGDNVGFNIKNVSVKDVRRGNVCGDSKNDPPAGTEEFKSQVIILNHPGQIQAGYAPVVDCHTAHIACRFKELLEKIDRRSGKKLEDNPAHVKSGDACIVEMVPGKSMCVEAFVNYAP

SEQ ID NO: 17663 - protein, 376 aa, Ophelina sp.
NEMGKGSFKYAWVLDKLKAERERGITIDIALWKFETGKYYVTIIDAPGHRDFIKNMITGTSQADCAVLIVAAGVGEFEAGISKNGQTREHALLAYTLGVKQMIIGVNKMDSTEPPYSENRFLEIKKEVSQYIKKIGYNPDAVPFVPISGWVGDNMVAPSDKTQWFKGWTTKKSSKGKEESGKTLLDALDNIEQPKRPTDRPLRLPLQDVYKIGGIGTVPVGRVETGIMKPGMIVTFAPAHITTEVKSVEMHHCSLEEALPGDNVGFNIKNVSVKDIRRGNVCSESKNDPAKEAEEFKAQVIILNHPGQIQAGYAPVVDCHTSHIACKFRELLEKIDRRSGKKMEDNPQHVKSGDAAIVEMVPQKPMCVEAFSDYAP

SEQ ID NO: 17664 - protein, 375 aa, Amphitrite sp.
QEMGKGSFKYAWVLDKLKAERERGITIDIALWKFSTEKYDITIIDAPGHRDFIKNMITGTSQADCAVLIVAAGVGEFEAGISKNGQTREHALLAFTLGVKQLIIGVNKMDSTEPPYSEKRFLEIQKEVATYIKKIGYNPDTVPFVPISGWHGDNMIESSDNMSWFSKWETKEKGGKTNSGKTLIDALNNIKPPERPTDKPLRLPLQDVYKIGGIGTVPVGRVETGILKAGMVVTFAPSNLTTEVKSVEMHHATLEKAEPGDNVGFNVKNVSVKDIRRGNVCGDTKNDPPKEAEEFRSQVIILNHPGQICAGYAPVVDCHTAHIACKFLELVKKIDRRSGKELEDSPQHVKSGDAAIVEMISQKPLCVEAFNDYAP

SEQ ID NO: 17665 - protein, 375 aa, Ampharetidae sp.
QEMGKGSFKYAWVLDKLKAERERGITIDIALWKFETENYYVTIIDAPGHRDFIKNMITGTSQADCAVLIVAAGVGEFEAGISKNGQTREHALLAFTLGVKQLIIGVNKIDSTEPPYSETRFEEIKKEVTTYIKKIGYNPDKVPFVPISGWHGDNMIEESSNMSWFKGWEVKAGKDKKITGKTLLNALDNIEKPKRPTDKALRLPLQDVYKIGGIGTVPVGRVETGILKPGMIITFAPSNVTTEVKSVEMHHQSIPEALPGDNVGFNVKNVSVKDIRRGNVCGDSKNDPPKEAGSFKAQVIILNHPGQIQKGYSPVLDCHTAHIACKFAEILEKIDRRSGKKLEDNPQHVKSGDAAIVEMVPSKPLCCEAFSDYPP

SEQ ID NO: 17666 - protein, 375 aa, Allolobophora sp.
QEMGKGSFKYAWVLDKLKAERERGITIDISLWKFETAKYYVTIIDAPGHRDFIKNMITGTSQADCAVLVVAAGVGEFEAGISKNGQTREHALLAFTLGVKQLIVGVNKMDSTEIPYSEARFEEIKKEVSTYIKKIGYNPDCVPFVPISGWHGDNMLEASPKMAWFKGWTVKKADKKEYSGVTIMEALDNIDPPKRPTDKPLRLPLQDVYKIGGIGTVPVGRVETGIIKAGMIVTFAPVNLTTEVKSVEMHHQALEEAVPGDNVGFNVKNVSVKDIRRGNVAGDSKNDPPKETEEFKAQVIILNHPGQINAGYAPVVDCHTSHIACKFRELLEKIDRRSGKKLEDNPANVKSGDAAIVEMVPQKPMCVEAFADYAP

SEQ ID NO: 17667 - protein, 375 aa, Branchiura sp.
QEMGKGSFKYAWVLDKLKAERERGITIDISLWKFETAKYYITIIDAPGHRDFIKNMITGTSQADCAVLVVAAGTGEFEAGISKNGQTREHALLAFTLGVKQLIVGVNKMDSTEPPYSEARFQEIQKEVGAYIKKIGYNPDTVPFVPISGWHGDNMLEPSPKMPWFKGWKVTKSDKKEYTGVTILESLDNIDPPKRPTDKPLRLPLQDVYKIGGIGTVPVGRVETGTLKAGMIVTFAPVNLTTEVKSVEMHHTALEEAVPGDNVGFNVKNVSVKDIRRGNVAGDSKNDPPKETEEFKAQVIILNHPGQINAGYAPVVDCHTSHIACKFRELLEKIDRRSGKKLEDNPANVKSGDAAIVEMVPQKAMCVESFADYPP

SEQ ID NO: 17668 - protein, 375 aa, Myxobdella sinaensis
QEMGKGSFKYAWVLDKLKAERERGITIDISLWKFETAKYYITIIDAPGHRDFIKNMITGTSQADCAVLVVAAGVGEFEAGISKNGQTREHALLAYTLGVKQLIVGVNKMDSTEPPYSEARFEEIKKEVSAYIKKIGYNPETVPFVPISGWNGDNMLEASPKMTWFKSWSVKKADKKEYSGVTILEALDNIDPPKRPTDKPLRLPLQDVYKIGGIGTVPVGRVETGILKAGTIVTFAPANLTTEVKSVEMHHQALEEALPGDNVGFNVKNVSVKDIRRGNVGGDSKNDPPKETEEFKAQVIIMNHPGQISAGYAPVVDCHTCHIACKFRELLEKIDRRSGKKIEDNPANVKAGDAAIVNMVPQKPMCVESFSEYPP

SEQ ID NO: 17669 - protein, 374 aa, Haemadipsa zeylanica japonica
QEMGKGSFKYAWVLDKLKAERERGITIDISLWKFETAKYYVTIIDAPGHRDFIKNMITGTSQADCAVLIVAAGVGEFEAGISKNGQTREHALLAYTLGVKQMIIGVNKMDSTEPPYSEARFEEIKKEVATYIKKVGYNPDTVAFVPISGWNGDNMLETSPKMGWFKGWSVKRGEKTTSGTTMIEALDNIEPPKRPTDKPLRLPLQDVYKIGGIGTVPVGRVETGTLKAGTVVTFAPSNLSTEVKSVEMHHQTLEEAFPGDNVGFNIKNVSVKDIRRGNVCGDSKNDPPRETEEFKAQVIIMNHPGQISAGYAPVVDCHTAHIACKFRELLEKIDRRSGKKIEDNPAHVKAGDAAIVNMVPQKPMCVESFVEYPP

SEQ ID NO: 17670 - protein, 362 aa, Panorpa japonica
RERGITIDIALWKFETAKYYVTIIDAPGHRDFIKNMITGTSQADCAVLIVAAGTGEFEAGISKNGQTREHALLAFTLGVKQLIVGVNKMDSTEPPYSESRFEEIKKEVSSYIKKIGYNPAAVAFVPISGWHGDNMLEVSTKMSWFKGWAVERKEGKADGKCLIEALDAILPPARPTDKPLRLPLQDVYKIGGIGTVPVGRVETGVLKPGTVVVFAPANLTTEVKSVEMHHEALQEAVPGDNVGFNVKNVSVKELRRGYVAGDSKANPPKGAADFTAQVIVLNHPGQISNGYTPVLDCHTAHIACKFAEIKEKVDRRTGKSTEDNPKAIKSGDAAIVNLVPSKPMCVESFQEFPPLGRFAVRD

SEQ ID NO: 17671 - protein, 372 aa, Lysiphlebus fabarum
YAWVLDKLKAERERGITIDIALWKFETSKYYVTIIDAPGHRDFIKNMITGTSQADCAVLIVAAGTGEFEAGISKNGQTREHALLAFTLGVKQFIVGVNKMDSTEPPYSENRFEEIKKEVSSYIKKIGYNPAAVAFVPISGWHGDNMLEVSTKMPWFKGWNVERKEGKADGKCLIEALDAILPPSRPTDKALRLPLQDVYKIGGIGTVPVGRVETGVLKPGMVVTFAPSAVTTEVKSVEMHHEALTEAVPGDNVGFNVKNVSVKDLRRGYVAGDTKANPPKGAADFTAQVIVLNHPGQISNGYTPVLDCHTAHIACKFAEIKEKCDRRTGKTTEESPKAIKSGDAAIVNLVPSKPMCVEAFQEFPPLGRFAVR

SEQ ID NO: 17672 - protein, 408 aa, Asterias amurensis
DSGKSTTTGHLIYKCGGIDKRAIEKFEKEAQEMGKGSFKYAWVLDKLKAERERGITIDIALWKFETVKFYITVIDAPGHRDFIKNMITGTSQADCAVASGTGEFEAGISKNGQTREHALLAFTLGVKQLIVCANKMDTTDPPFSEARFAEITKEVSGFLKKVGYNPKAVCFVPISGFHGDNMIEPSERMPWYKGWSIERKEGNASGKTLFEALDSILPPKRPTDKPLRHPLQDVYKIGGIGTVPVGRVETGILKPGTVATFAPANLTTEVKSVEMHHEALTEALPGDNVGFNVKNVSVKDIRRGMVAGDSKNDPPKAAETFKAQVIILNHPGQIHNGYAPVLDCHTAHIACKFTEIHEKCDRRSGKTLEENPKFVKSGDAAIVTLTPSKPMCVESFAEYPPLGRFAVR

SEQ ID NO: 17673 - protein, 336 aa, Papilio demoleus
HVDSGKSTTTGHLIYKCGGIDKRTIEKFEKEAQEMGKGSFKYAWVLDKLKAERERGITIDIALWKFETSKYYVTIIDAPGHRDFIKNMITGTSQADCAVLIVAAGTGEFEAGISKNGQTREHALLAFTLGVKQLIVGVNKMDSTEPPYSESRFEEIKKEVSSYIKKIGYNPAAVAFVPISGWHGDNMLEPSTKMPWFKGWNVERKEGKAEGKCLIEALDAILPPARPTDKALRLPLQDVYKIGGIGTVPVGRVETGVLKPGTIVVFAPANITTEVKSVEMHHEALQEAVPGDNVGFNVKNVSVKELRRGYVAGDSKNNPPKGAADFTAQVIVLNHP

SEQ ID NO: 17674 - protein, 331 aa, Luehdorfia japonica
KSTTTGHLIYKCGGIDKRTIEKFEKEAQEMGKGSFKYAWVLDKLKAERERGITIDIALWKFETSRYYVTIIDAPGHRDFIKNMITGTSQADCAVLIVAAGTGEFEAGISKNGQTREHALLAFTLGVKQLIVGVNKMDSTEPPYSEPRFEEIKKEVSSYIKKIGYNPAAVAFVPISGWHGDNMLEPSTKMPWFKGWQVERKEGKAEGKCLIEALDAILPPARPTDKALRLPLQDVYKIGGIGTVPVGRVETGVLKPGTIVVFAPANITTEVKSVEMHHEALQEAVPGDNVGFNVKNVSVKELRRGYVAGDSKNNPPKGASDFTAQVIVLNHP

SEQ ID NO: 17675 - protein, 331 aa, Sericinus montela
KSTTTGHLIYKCGGIDKRTIEKFEKEAQEMGKGSFKYAWVLDKLKAERERGITIDIALWKFETSKYYVTIIDAPGHRDFIKNMITGTSQADCAVLIVAAGTGEFEAGISKNGQTREHALLAFTLGVKQLIVGVNKMDSTEPPYSESRFEEIKKEVSSYIKKIGYNPAAVAFVPISGWHGDNMLEPSTKMPWFKGWQVERKEGKAEGKCLIEALDAILPPARPTDKALRLPLQDVYKIGGIGTVPVGRVETGVLKPGTIVVFAPANITTEVKSVEMHHEALQEAVPGDNVGFNVKNVSVKELRRGYVAGDSKNNPPKGAADFTAQVIVLNHP

SEQ ID NO: 17676 - protein, 462 aa, Anthocidaris crassispina
MGKEKQHINIVVVGHVDSGKSTTTGHLIYKCGGIDKRTIEKFEKEAAELGKGSFKYAWVLDKLKAERERGITIDIALWKFETEKYFVTVIDAPGHRDFIKNMITGTSQADCAVLVVAAGTGEFEAGISKDGQTREHALLCYTLGVKQLIVAVNKMDSTVPKYEEKRFNEIVKEVQSYIKKVGYNIKGVPFIPISGWCGDNMLETSENMPWFKGWAIERKEGNASGKTLYNALDAILLPERPTKKPLRLPLQDVYKIGGIGTVPVGRVETGIIKPGVVVTFAPTNLSTEVKSVEMHHEQMAQAEPGDNVGFNVKNVSVKEIKRGYVAGDSKNVPPVGALSFKAQVIIMNHPGQIHAGYCPVLDCHTAHIACKFAELQEKLDRRSGKTLEENPKFIKTGDACIAKLVPSKQMCVETFSEFPPLGRFAVRDMRQTVAVGVVKSVEKSEASGGKTTKSAQKAQKKK

SEQ ID NO: 17677 - protein, 411 aa, Ciona intestinalis
  unsure (1)..(411): unsure at all Xaa locations
DSGKSTTTGHLIYKCGGIDKRAIEKFEKEAAEMGKGSFKYAWVLDKLKAERERGITIDIALWKFETNYYQITIIDAPGHRDFIKNMITGTSQADCAVLIVAAGVGEFEAGISKNGQTREHALLAFTLGVKQIIVAVNKMDSTEPKYSSKRFEEISREVTAYLKKVGYNPKAVAFVPISGWNGDNMLEESANMPWYKGWEREQDXKKLTGKTLFDALDSIAAPKRPTDKPLRLPLQDVYKIGGIGTVPVGRVETGIIKPGVVVTFAPSQLTTEVKSVEMHHEALTEALPGDNVGFNVKNVSVKDIKRGNVAGDSKNDPPKGAENFTAQVIILNHPGQIQQGYAPVLGCXTAHIACKFKELIEKIDRRSGKKLEDHPKFVKSGDAAIIVLHPQKPMCVEAFSQYPPLGRFAVR

SEQ ID NO: 17678 - protein, 336 aa, Eurytides marcellus
HVDSGKSTTTGHLIYKCGGIDKRTIEKFEKEAQEMGKGSFKYAWVLDKLKAERERGITIDIALWKFETSKYYVTIIDAPGHRDFIKNMITGTSQADCAVLIVAAGTGEFEAGISKNGQTREHALLAFTLGVKQLIVGVNKMDSTEPPYSESRFEEIKKEVSSYIKKIGYNPAAVAFVPISGWHGDNMLEASTKMPWFKGWQVDRKEGKAEGKCLIEALDAILPPARPTDKALRLPLQDVYKIGGIGTVPVGRVETGVLKPGTIVVFAPANITTEVKSVEMHHEALQEAVPGDNVGFNVKNVSVKELRRGYVAGDSKNNPPKGAADFTAQVIVLNHP

SEQ ID NO: 17679 - protein, 336 aa, Papilio canadensis
HVDSGKSTTTGHLIYKCGGIDKRTIEKFEKEAQEMGKGSFKYAWVLDKLKAERERGITIDIALWKFETSKYYVTIIDAPGHRDFIKNMITGTSQADCAVLIVAAGTGEFEAGISKNGQTREHALLAFTLGVKQLIVGVNKMDSTEPPYSESRFEEIKKEVSSYIKKIGYNPAAVAFVPISGWHGDNMLEPSTKMPWFKGWNVERKEGKAEGKCLIEALDAILPPARPTDKALRLPLQDVYKIGGIGTVPVGRVETGVLKPGTIVVFAPANITTEVKSVEMHHEALQEAVPGDNVGFNVKNVSVKELRRGYVAGDSKNNPPRGAADFTAQVIVLNHP

SEQ ID NO: 17680 - protein, 336 aa, Papilio palamedes
HVDSGKSTTTGHLIYKCGGIDKRTIEKFEKEAQEMGKGSFKYAWVLDKLKAERERGITIDIALWKFETSKYYVTIIDAPGHRDFIKNMITGTSQADCAVLIVAAGTGEFEAGISKNGQTREHALLAFTLGVKQLIVGVNKMDSTEPPYSESRFEEIKKEVSSYIKKIGYNPAAVAFVPISGWHGDNMLEPSTKMPWFKGWNVERKEGKAEGKCLIEALDAILPPARPTDKALRLPLQDVYKIGGIGTVPVGRVETGVLKPGTIVVFAPANITTEVKSVEMHHEALQEAVPGDNVGFNVKNVSVKELRRGYVAGDSKNNPPRGTADFTAQVIVLNHP

SEQ ID NO: 17681 - protein, 336 aa, Papilio scamander
HVDSGKSTTTGHLIYKCGGIDKRTIEKFEKEAQEMGKGSFKYAWVLDKLKAERERGITIDIALWKFETSKYYVTIIDAPGHRDFIKNMITGTSQADCAVLIVAAGTGEFEAGISKNGQTREHALLAFTLGVKQLIVGVNKMDSTEPPYSEPRFEEIKKEVSSYIKKIGYNPAAVAFVPISGWHGDNMLEPSTKMPWFKGWNVERKEGKAEGKCLIEALDAILPPARPTDKALRLPLQDVYKIGGIGTVPVGRVETGVLKPGTIVVFAPANITTEVKSVEMHHEALQEAVPGDNVGFNVKNVSVKELRRGYVAGDSKNNPPKGAADFTAQVIVLNHP

SEQ ID NO: 17682 - protein, 336 aa, Papilio indra
HVDSGKSTTTGHLIYKCGGIDKRTIEKFEKEAQEMGKGSFKYAWVLDKLKAERERGITIDIALWKFETSKYYVTIIDAPGHRDFIKNMITGTSQADCAVLIVAAGTGEFEAGISKNGQTREHALLAFTLGVKQLIVGVNKMDSTEPPYSESRFEEIKKEVSSYIKKIGYNPAAVAFVPISGWHGDNMLEPSTKMPWFKGWNVERKEGKAEGKCLIEALDAILPPARPTDKALRLPLQDVYKIGGIGTVPVGRVETGVLKPGTIVVFAPANITTEVKSVEMHHEALQEAVPGDNVSFNVKNVSVKELRRGYVAGDSKNNPPKGAADFTAQVIVLNHP

SEQ ID NO: 17683 - protein, 336 aa, Pachliopta neptunus
HVDSGKSTTTGHLIYKCGGIDKRTIEKFEKEAQEMGKGSFKYAWVLDKLKAERERGITIDIALWKFETGKYYVTIIDAPGHRDFIKNMITGTSQADCAVLIVAAGTGEFEAGISKNGQTREHALLAFTLGVKQLIVGVNKMDSTEPPYSEPRFEEIKKEVSSYIKKIGYNPAAVAFVPISGWHGDNMLEPSTKMPWFKGWNVERKEGKAEGKCLIEALDAILPPARPTDKPLRLPLQDVYKIGGIGTVPVGRVETGVFKPGTIVVFAPANITTEVKSVEMHHEALQEAVPGDNVGFNVKNVSVKELRRGYVAGDSKNNPPKGASDFTAQVIVLNHP

SEQ ID NO: 17684 - protein, 336 aa, Papilio cresphontes
HVDSGKSTTTGHLIYKCGGIDKRTIEKFEKEAQEMGKGSFKYAWVLDKLKAERERGITIDIALWKFETSKYYVTIIDAPGHRDFIKNMITGTSQADCAVLIVAAGTGEFEAGISKNGQTREHALLAFTLGVKQLIVGVNKMDSTEPPYSESRFEEIKKEVSSYIKKIGYNPAAVAFVPISGWHGDNMLEPSTKMPWFKGWNVERKEGKAEGKCLIEALDAILPPARPTDKPLRLPLQDVYKIGGIGTVPVGRVETGVLKPGTIVVFAPANITTEVKSVEMHHEALQEAVPGDNVGFNVKNVSVKELRRGYVAGDSKNNPPRGAADFTAQVIVLNHP

SEQ ID NO: 17685 - protein, 336 aa, Papilio garamas
HVDSGKSTTTGHLIYKCGGIDKRTIEKFEKEAQEMGKGSFKYAWVLDKLKAERERGITIDIALWKFETAKYYVTIIDAPGHRDFIKNMITGTSQADCAVLIVAAGTGEFEAGISKNGQTREHALLAFTLGVKQLIVGVNKMDSTEPPYSESRFEEIKKEVSSYIKKIGYNPAAVAFVPISGWHGDNMLEPSTKMPWFKGWNVERKEGKAEGKCLIEALDAILPPARPTDKALRLPLQDVYKIGGIGTVPVGRVETGVLKPGTIVVFAPANITTEVKSVEMHHEALQEAVPGDNVGFNVKNVSVKELRRGYVAGDSKNNPPRGAADFTAQVIVLNHP

SEQ ID NO: 17686 - protein, 336 aa, Papilio pilumnus
HVDSGKSTTTGHLIYKCGGIDKRTIEKFEKEAQEMGKGSFKYAWVLDKLKAERERGITIDIALWKFETGKYYVTIIDAPGHRDFIKNMITGTSQADCAVLIVAAGTGEFEAGISKNGQTREHALLAFTLGVKQLIVGVNKMDSTEPPYSESRFEEIKKEVSSYIKKIGYNPAAVAFVPISGWHGDNMLEPSTKMPWFKGWNVERKEGKAEGKCLIEALDAILPPARPTDKALRLPLQDVYKIGGIGTVPVGRVETGVLKPGTIVVFAPANITTEVKSVEMHHEALQEAVPGDNVGFNVKNVSVKELRRGYVAGDSKNNPPRGAADFTAQVIVLNHP

SEQ ID NO: 17687 - protein, 336 aa, Papilio phorcas
HVDSGKSTTTGHLIYKCGGIDKRTIEKFEKEAQEMGKGSFKYAWVLDKLKAERERGITIDIALWKFETSKYYVTIIDAPGHRDFIKNMITGTSQADCAVLIVAAGTGEFEAGISKNGQTREHALLAFTLGVKQLIVGVNKMDSTEPPYSESRFEEIKKEVSSYIKKIGYNPAAVAFVPISGWHGDNMLEPSTKMPWFKGWNVERKEGKGEGKCLIEALDAILPPARPTDKALRLPLQDVYKIGGIGTVPVGRVETGVLKPGTIVVFAPANITTEVKSVEMHHEALQEAVPGDNVGFNVKNVSVKELRRGYVAGDSKNNPPKGAADFTAQVIVLNHP

SEQ ID NO: 17688 - protein, 409 aa, Halocynthia roretzi
  unsure (1)..(409): unsure at all Xaa locations
DSGKSTTTGRMIYKCGGIDKRTIDKFEKEAQETGKGSFKYAWVLDKLKAERERGITIDIALWKFETTKYYITIIDAPGHRDFIKNMITGTSQADCAVLIIAAGTGEFEAGISKSGQTREHALLAFTLGVKQMICAINKMDNTEPPYSEARFKEIVTEVSSYMKKVGYNPKKIPFVPISGWHGDNMMEKSDKTPWYKGFTKMSDKPVGATLKEAFDLIEXPTRPTDKPLRLPLQDVYKIGGIGTVPVGRVETGIIKPGQIVKFSPVNLTTEVKSVEMHHESLVEGCPGDNVGFNVKNVSVKDIRRGNVCGDAKNCPPQKASSFLARVIILNHPGNISKGYTPVLDCHTAHIACKFAEIKEKIDRRSGKTMEENPKSVKSGDAAMIELIPSKPMCVEKFSEFPPLGRFAVR

SEQ ID NO: 17689 - protein, 411 aa, Branchiostoma floridae
DSGKSTSTGHLIYKCGAIDKRAIEQFEKEAKEMGKGSFKYAWVLDKLKAERERGITIDIALWKFETIKYIVTIIDAPGHRDFIKNMITGTSQADCAVLIVAAGTGEFEAGISNDGQTREHALLAYALGVKQLIVGVNKMDSTEPPYSEARFAEITEEVGVYIKKIGYNPESVAFVPISGWHGDNMIEESTNMPWFKGWTIERKSGRSSGHTLRQALDAIEPPTRPTDKPLRLPLQDVYRIGGIGTVPVGRVETGILKPGMVVTFAPVNITTEVKSVEMHHEYLPEALPGDNVGFNVKNVSRKDIKRGYVAGDSNNDPPKEAASFVAEITVLNHPGEIHAGYAPVLDCHTAHIACKFVELKEKIDRRSGKKLEDNPKSVKCGDAAIVEMLPSKPMCVEAFSSYPPLGRFAVR

SEQ ID NO: 17690 - protein, 406 aa, Branchiostoma floridae
DSGKSTSTGHLIYKCGGIDKRTIEKFEKEAAEMGKGSFKYAWVLDKLKAERERGITIDIALWKFETTKYYVTVIDAPGHRDFIKNMITGTSQADCGCWYGEFEAGISKNGQTREHALLAYTLGVKQLIVGVNKMDSTEPPYSADRFTEITKEVSTYIKKVGYNPKAVAFVPISGWHGDNMLEPSEKMGWYKGWAIERKEGNASGKTLFEALDSILPPKRPTDKPLRLPLQDVYKIGGIGTVPVGRVETGILKPGVVVTFAPVNLTTEVKSVEMHHESLPEALPGDNVGFNVKNVSVKEIKRGMVAGDSKNDPPKEAESFTAQVIVMNHPGEIHNGYAPVLDCHTAHIACKFAELKEKIDRRSGKKLEDNPKMVKSGDAAIVEMTPSKPMCVETFSEYPPLGRFAVR

SEQ ID NO: 17691 - protein, 331 aa, Pieris napi
KSTTTGHLIYKCGGIDKRTIEKFEKEAQEMGKGSFKYAWVLDKLKAERERGITIDIALWKFETGKYYVTIIDAPGHRDFIKNMITGTSQADCAVLIVAAGTGEFEAGISKNGQTREHALLAFTLGVKQLIVGVNKMDSTEPPYNESRFEEIKKEVSSYIKKIGYNPAAVAFVPISGWHGDNMLEPSTKMPWFKGWNVERKEGKAEGKCLIEALDAILPPARPTDKALRLPLQDVYKIGGIGTVPVGRVETGVLKPGTIVVFAPANITTEVKSVEMHHEALQEAVPGDNVGFNVKNVSVKELRRGYVAGDSKSNPPKGAADFTAQVIVLNHP

SEQ ID NO: 17692 - protein, 653 aa, Danio rerio
MSRHRNVRGYNYDEDFEDDDMYGQSVEDDYCISPATAAQFIYSRQDSRQARHVETVEEAEYEEEEEEMPTSPTMTSTLDSLQQGRLYSCLDQMRTVLGDSIPDSTLTQAALKYDCDPHRALDFILSENTNTQAPSARTNPQLEPNTTAAPQKAKVREAPESRVESEVVPKVARMTVSGKKQTMGFDVRSAEENGGVAPSLRRGPSPEATAVPTTETPSKQSTVTEDSAAPTPTRPSGKSKQQLNIRAELEKRQGGKPLLNLVVIGHVDAGKGTLMGHLLYLLGNVNKRTMHKYEQEAKKAGKASFAYAWVLDETGEERDRGVTMDVGMTKFETDSKVVTLMDAPGHKDFIPNMITGAAQADVAVLVVDASRGEFEAGFEAGGQTREHALLVRSLGVTQLAVAVNKMDQVNWQQERFQEIISKLGHFLKQAGFKDSDVFYVPTSGLSGENLTTKSKVADLTAWYTGPCLVEQIDAFKPPQRSVEKPFRLCVSDVFKDQGSGFCVTGKIEAGYIQTGDKVLAMPPNETCTVKGISLHDEALDWAAAGDHVSLTVTGMDIIKINVGCVFCDPKEPIRACTRFRARILLFNIELPITQGFPVLLHYQTVSEPATIRKLVSVLHKSSGEVLKKKPKCLSKGQNAVVEIQTETCGYGAL

SEQ ID NO: 17693 - protein, 462 aa, Cyprinus carpio
MGKEKTHINIVVIGHVDSGKSTTTGHLIYKCGGIDKRTIEKFEKEAAEMGKGSFKYAWVLDKLKAERERGITIDIALWKFETSKYYVTIIDAPGHRDFIKNMITGTSQADCAVLIVAGGVGEFEAGISKNGQTREHALLAFTLGVKQLIVGVNKMDSTEPPYSQARFEEITKEVSAYIKKIGYNPASVAFVPISGWHGDNMLEPSTNMGWFKGWKIERKEGNANGVTLLDALDAILPPSRPTDKPLRLPLQDVYKIGGIGTVPVGRVETGVLKPGMVVTFAPANLTTEVKSVEMHHESLAEATPGDNVGFNVKNVSVKDIRRGNVAGDSKNDPPMEAGSFNAQVIILNHPGQISQGYAPVLDCHTAHIACKFAELKEKIDRRSGKKLEDNPKALKSGDAAIVEMIPGKPMCVESFSTYPPLGRFAVRDMRQTVAVGVIKSVEKKVGGSGKVTKSAQKAAKTK

SEQ ID NO: 17694 - protein, 447 aa, Elaeis oleifera
MGKEKVHINIVVIGHVDSGKSTTTGHLIYKLGGIDKRVIERFEKEAAEMNKRSFKYAWVLDKLKAERERGITIDIALWKFETTKYYCTVIDAPGHRDFIKNMITGTSQADCAVLIIDSTTGGFEAGIFKDGQTREHALLAFTLGVKQMICCCNKMDATTSKYSKARYDEIVKEVSSYLKKVGYNPDKIPFVPISGFEGDNMIERSTNLDWYKGQTLLEALDLIQEPKRPSDKPLRLSLQDGYKIGGIGTVQVGRVETGVIKPGMVVTFGPTGLTTEVKSVEMHHEALQEALPGDNVGFNVKNVAVKDLKRGYVASNSKDDPAKEAANFIAQVIIMNHPGQIGNGYAPVLDCHTSHIAVKFAELVTKIDRRSGKELEKEPKFLKNGDAGFVKMLPTKPMVVETFSEYPPLGRFAVRDMRQTVAVGVIKSVEKKDPTGAKITKAAAKKK

SEQ ID NO: 17695 - protein, 461 aa, Oryzias latipes
MGKEKIHINIVVIGHVDSGKSTSTGHLIYKCGGIDKRTIEKFEKEAAEMGKGSFKYAWVLDKLKAERERGITIDIALWKFETSKYYVTIIDAPGHRDFIKNMITGTSQADCAVLIVAAGVGEFEAGISKNGQTREHALLAFTLGVKQLIVGVNKMDSTEPPYSQARFEEIQKEVSTYIKKIGYNPAAVAFVPISGWHGDNMLEASDKMSWFKGWKIERKDGNASGTTLLEALDAILPPSRPTDKPLRLPLQDVYKIGGIGTVPVGRVETGVLKPGMVVTFAPPNLTTEVKSVEMHHESLPEAVPGDNVGFNIKNVSVKEIRRGYVAGDSKNDPPKAAASFNAQVIILNHPGQINQGYAPVLDCHTAHIACKFNELIEKIDRRSGKKLEDNPKFVKSGDAAIVKLIPQKPMVVEPFSNYPPLGRFAVRDMRQTVAVGVIKAVDTKEISGKTTKAAEKAQKKK

SEQ ID NO: 17696 - protein, 456 aa, Oryzias latipes
MAKEKVHVNVVVIGHVDSGKSTTTGHLVYKCGGIDPRKLEKFEKAAAQLGKSSFKFAWVLDKLKAERERGITIDISLLKFNTQKYTMTIIDAPGHRDFIKNMITGTSQADVALLMVSAAKGEYEAGVSRSGQTREHALLAYTLGVKQIIVCVNKMDLTEPPYSQKRYEEVMRGVSGFLRKIGYDTNAVPFVPVSGWTGENMISVTQKMPWYQGWKIRRREGPSTGKTLLEVLDSIQPPVRTINKPLRLPLQDVYKIGGVGTVPVGKIETGVLKPGMTLVFSPAKLTAEVKSIEMHHQGLQTALPGHNVGFNIKNVSVKNLRRGDVAGNAQQDPPSDVRSFEAQVIILNHPGKIKAGYSPVLDCHTTHVTCRFTELKEKLDRRTGKKLEEQPQTLVSGDAATVKLVPVKPMCVESFFTYPPLGRFAARDLKQTVAVGVIKSVEKDQGSKAQKLQVCK

SEQ ID NO: 17697 - protein, 461 aa, Seriola quinqueradiata
MGKEKIHINIVVIGHVDSGKSTSTGHLIYKCGGIDKRTIEKFEKEAAEMGKGSFKYAWVLDKLKAERERGITIDIALWRFETSKYYVTIIDAPGHRDFIKNMITGTSQADCAVLIVAAGVGEFEAGISKNGQTREHALLAFTLGVKQLIVGVNKMDSTEPPYSQARFEEITKEVSTYIKKIGYNPATVAFVPISGWHGDNMLETSEKMGWFKGWKIERKEGNASGTTLLEALDAILPPSRPTEKPLRLPLQDVYKIGGIGTVPVGRVETGVLKPGMVVTFAPPNLTTEVKSVEMHHESLPEAVPGDNVGFNVKNVSVKEIRRGYVAGDSKNDPPKAADSFNAQVIILNHPGQINEGYAPVLDCHTAHIACKFKELIEKIDRRSGKKLEDHPKFVKSGDAAIVKLIPQKPMVVEPFSNYAPLGRFAVREMKQTVAVGVIKAVDVKEISGKTTKAAEKAQKKK

SEQ ID NO: 17698 - protein, 461 aa, Sparus aurata
MGKEKIHINIVVIGHVDSGKSTSTGHLIYKCGGIDKRTIEKFEKEAAEMGKGSFKYAWVLDKLKAERERGITIDIALWKFETSRYYVTIIDAPGHRDFIKNMITGTSQADCAVLIVAAGVGEFEAGISKNGQTREHALLAFTLGVKQLIVGVNKMDSTEPPYSQARFEEITKEVSTYIKKIGYNPASVAFVPISGWHGDNMLETSEKMSWFKGWKVERKEGNANGTTLLEALDAIVPPSRPTDKPLRLPLQDVYKIGGIGTVPVGRVETGVLKPGMVVTFAPPQLTTEVKSVEMHHESLPEAVPGDNVGFNIKNVSVKEIRRGYVAGDSKNDPPKGADNFNAQVIILNHPGQINARYAPVLDCHTAHIACKFTELIEKIDRRSGKKLEDAPKFVKSGDAAIVKLHPQKPMVVEPFSSYPPLGRFAVRDMRQTVAVGVIKAVELKEVSGKTTKAAEKAQKKK

SEQ ID NO: 17699 - protein, 462 aa, Monosiga brevicollis
MTDGKQHVSIVICGHVDAGKSTTTGRLIFELGGIPEREMQKLKDEAERLGKGSFAFAFYMDRQKEERERGVTIACTTKEFFTATKHYTVIDAPGHRDFIKNMITGASQADVALLMVPCDGNFTAAIAKGNHKAGEVQGQTRQHAVLINLLGVKQLIVGCNKMDCDVAGYGEARFKEVRDEMVHMLIKVGWKKSFVEESVPVLPISGWKGDNLITKTTNMSWWNGVDVKVDSETIHIDCLQDALEKMVRVPQRATDKPMRTPISGVFKIKGVGDVLTGRVEQGTVKPGDEVVFLPTHTSSTACTGKVFTVEMHHKSVEAAMTGDNVGLNIKGLNKDNMPRVGDVMILKSDDSIGRVKSFTVQVQIMNHPGELKVGYCPIAFVRTSRSACRMTAINWKIGKETGGKKAEDPVALKSNEVAEVVMAPQQPFVVDTFKTCEGLGRVAIMEGNSVVMLGKVTKVERA

SEQ ID NO: 17700 - protein, 413 aa, Antherina suraka
  unsure (1)..(413): unsure at all Xaa locations
HVDSGKXTTTGHLIYKCGGIDKRTIEKFEKEAQEMGKGSFKYAWVLDKLKAERERGITIDIALWKFETSRYYVTIIDAPGHRDFIKNMITGTXQADCAVLIVAAGTGEFEAGISKNGQTREHALLAFTLGVKQLIVGVBKMDSTEPPYSEXRFEEIKKEVSSYIKKIGYNPAAVAFVPISGWHGDNMLEQSTKXPWFKGWLVERKXGKAEGKXLIEALDAILPPAXPTDKALRLPLQDVYKIGGIGTVPVGRVETGILKPGTIVVFAPANITTEVKSVEMHHEALQEAVPGDNVGFNVKNVSVKELRRGYVAGDSKNNPPKGAADFTAQVIVLNHPGQISNGYTPVLDCXTAHIACKFAEIKEKVDRRTGKSTEDNPKSIKSGDAAIVNLVPSKPLCVESFQXFPPLGRFAVR

SEQ ID NO: 17701 - protein, 413 aa, Lapara coniferarum
HVDSGKSTTTGHLIYKCGGIDKRTIEKFEKEAQEMGKGSFKYAWVLDKLKAERERGITIDIALWKFETAKYYVTIIDAPGHRDFIKNMITGTSQADCAVLIVAAGTGEFEAGISKNGQTREHALLAFTLGVKQLIVGVNKMDSTEPPYSESRFEEIKKEVSSYIKKIGYNPAAVAFVPISGWHGDNMLEASTKMPWFKGWLVERKEGKAEGKCLIEALDAILPPARPTDKALRLPLQDVYKIGGIGTVPVGRVETGILKPGTIVVFAPANITTEVKSVEMHHEALQEAVPGDNVGFNVKNVSVKELRRGYVAGDSKNNPPKGAADFTAQVIVLNHPGQISNGYTPVLDCHTAHIACKFAEIKEKVDRRTGKSTEDNPKSIKSGDAAIVNLVPSKPMCVESFQEFPPLGRFAVR

SEQ ID NO: 17702 - protein, 413 aa, Paonias myops
  unsure (1)..(413): unsure at all Xaa locations
HVDSGKSTTTGHLIYKCGGIDKRTIEKFEKEAQEMGKGSFKYAWVLDKLKAERERGITIDIALWKFETSKYYVTIIDAPGHRDFIKNMITGTSQADCAVLIVAAGTGEFEAGISKNGQTREHALLAFTLGVKQLIVGVNKMDSTEPPYSESRFEEIKKEVSSYIKKIGYNPAAVAFVPISGWHGDNMLEASTKMPWFKGWAVERKEGKADGKCLIEALDAILPPARPTDKALRLPLQDVYKIGGIGTVPVGRVETGVLKPGTVVVFAPANITTEVKSVEMHHEALQEAVPGDNVGFNVKNVSVKELRRGYVAGDSKNNPPRGAADFTAQVIVLNHPGQISNGYTPVLDCHTAHIACKFAEIKXKVDRRTGKSTEDNPKSIKSGDAAIVNLVPSKPMCVESFQEFPPLGRFAVR

SEQ ID NO: 17703 - protein, 339 aa, Grillotia erinaceus
HLIFKCGGIDKRTIEKFEKEAQDMGKGSFKYAWVLDKLKAERERGITIDIALWKFITSKFEVTIIDAPGHRDFIKNMITGTSQADCAVLIVAAGVGEFEAGISKEGQTREHALLAFTLGVKQLIIAVNKMDDIKYNETRFNEIKDEMTSYIKKVGYNPENVAVVPISGWHGDNMIEPSSNMPWYKGWSRGGKSKGMTLLEAIDDIAVPKRPTDKPLRLPLQDVYKIGGVGTVPVGRVETGVLKPGMVVTFAPAGLSTEVKSVEMHHEVLSEALPGDNVGFNIKNVSVKDIRRGNVAGDSKNCPPGETDTFNAQVIIMNHPGSIRNGYTPVLDCHTAHIA

SEQ ID NO: 17704 - protein, 449 aa, Avicennia marina
MGKEKSHINLVVIGHVDSGKSTTTGHLIYKLGGIDKRVIERFEKEAAEMNKRSFKYAWVLDKLKAERERGITIDIALWKFETTKYYCTVIDAPGHRDFIKNMITGTSQADCAVLIIDSTTGGFEAGISKDGQTREHALLSFTLGVKQMICCCNKMDATTPKYSKARYDEIVKEVSSYIKKVGYNPEKIPFVPISGFEGDNMIERSTNLDWYKGPTLLEALDMVQEPKRPSDKPLRLPLQDVYKIGGIGTVPVGRVETGMLKPGMLVTFGPSGLTTEVKSVEMHHEALQEALPGDNVGFNVKNVSVKDLKRGYVASNSKDDPAKGAASFTSQVIIMNHPGQIGNGYAPVLDCHTSHIAVKFAELVTKIDRRSGKELEKEPKFLKNGDAGFVKMIPTKPMVVETFSEYPPLGRFAVRDMRQTVAVGVIKSVEKKEPSGAKVTKAAVKKGAK

SEQ ID NO: 17705 - protein, 331 aa, Lambdina fiscellaria
KSTTTGHLIYKCGGIDKRTIEKFEKEAQEMGKGSFKYAWVLDKLKAERERGITIDIALWKFETAKFYVTIIDAPGHRDFIKNMITGTSQADCAVLIVAAGTGEFEAGISKNGQTREHALLAFTLGVKQLIVGVNKMDSTEPPYSEPRFEEIKKEVSSYIKKIGYNPAAVAFVPISGWHGDNMLEPSTKMPWFKGWLVERKEGKAEGKCLIEALDAILPPARPTDKALRLPLQDVYKIGGIGTVPVGRVETGVLKPGTIVVFAPANITTEVKSVEMHHEALQEAVPGDNVGFNVKNVSVKELRRGYVAGDSKNNPPKGAADFTAQVIVLNHP

SEQ ID NO: 17706 - protein, 364 aa, Limnadia lenticularis
LDKLKAERERGITIDIALWKFETAKYYVTIIDAPGHRDFIKNMITGTSQADCAVLIVAAGVGEFEAGISKNGQTREHALLAYTLGVKQLIVGVNKMDSTEPPYSEARFEEIKKEVSSYIKKIGYNPVAVPFVPISGWHGDNMLEASTNLPWYKGWAIERKEGKADGKTLIDALDAILPPSRPTEKPLRLPLQDVYKIGGIGTVPVGRVETGVIKPGTVVTFAPCNLTTEVKSVEMHHEALEEAVPGDNVGFNVKNVSVKELRRGYVAGDSKNNPPKGAADFYAQVIVLNHPGQISNGYTPVLDCHTAHIACKFAEIKEKCDRRTGKTTEENPKFIKSGDAAMITLVPSKPLCVESFSDFPPLGR

SEQ ID NO: 17707 - protein, 377 aa, Speleonectes tulumensis
QEMGKGSFKYAWVLDKLKAERERGITIDIALWKFETSKYYVTIIDAPGHRDFIKNMITGTSQADCAVLIVAAGTGEFEAGISKNGQTREHALLAYTLGVKQLIVGVNKMDTTEPPYSEARYNEIKKEVGNYIKKIGYNPASVAFVPISGWVGDNMLEQSTNMSWYKGWTVERKEGKAEGKTLLESLDSILPPSRPTDKPLRLPLQDVYKIGGIGTVPVGRVETGSLKPGVLVTFAPCNITTEVKSVEMHHESLPEANPGDNVGFNVKNVSVKELRRGYVAGDSKNKPPKGTADFTAQVIVLNHPGQIQNGYCPVLDCHTAHIACKFSEIQEKCDRRTGKKLEDNPKFVKSGDAAIVLLVPSKPMCVEAFTDFPPLGR

SEQ ID NO: 17708 - protein, 331 aa, Atrophaneura alcinous
KSTTTGHLIYKCGGIDKRTIEKFEKEAQEMGKGSFKYAWVLDKLKAERERGITIDIALWKFETSKYYVTIIDAPGHRDFIKNMITGTSQADCAVLIVAAGTGEFEAGISKNGQTREHALLAFTLGVKQLIVGVNKMDSTEPPYSESRFEEIKKEVSSYIKKIGYNPAAVAFVPISGWHGDNMLEPSTKMPWFKGWNVDRKEGKAEGKCLIEALDAILPPARPTDKALRLPLQDVYKIGGIGTVPVGRVETGVLKPGTIVVFAPANITTEVKSVEMHHEALQEAVPGDNVGFNVKNVSVKELRRGYVAGDSKNNPPKGASDFTAQVIVLNHP

SEQ ID NO: 17709 - protein, 340 aa, Atrophaneura alcinous
FEKEAQEMGKGSFKYAWVLDKLKAERERGITIDIALWKFETSKYYVTIIDAPGHRDFIKNMITGTSQADCAVLIVAAGTGEFEAGISKNGQTREHALLAFTLGVKQLIVGVNKMDSTEPPYSESRFEEIKKEVSSYIKKIGYNPAAVAFVPISGWHGDNMLEPSTKMPWFKGWNVDRKEGKAEGKCLIEALDAILPPARPTDKALRLPLQDVYKIGGIGTVPVGRVETGVLKPGTIVVFAPANITTEVKSVEMHHEALQEAVPGDNVGFNVKNVSVKELRRGYVAGDSKNNPPKGASDFTAQVIVLNHPGQISNGYTPVLDCHTAHIACKFAEIKEKVDR

SEQ ID NO: 17710 - protein, 385 aa, Bombus balteatus
KFEKEAQEMGKGSFKYAWVLDKLKAERERGITIDIALWKFETAKYYVTIIDAPGHRDFIKNMITGTSQADCAVLIVAAGIGEFEAGISKNGQTREHALLAFTLGVKQLIVGVNKMDMTDPPYSEARFEEIKKEVSSYIKKIGYNTASVAFVPISGWHGDNMLEPSPNTPWYKGWKVERKDGNADGKTLIEALDAILPPSRPTDKALRLPLQDVYKIGGIGTVPVGRVETGILKPGMLVTFAPAALTTEVKSVEMHHEALTEALPGDNVGFNVKNISVKELRRGYVAGDSKNQPPRGAADFTAQVIVLNHPGQISNGYTPVLDCHTAHIACKFAEIKEKCDRRTGKTTEENPKSIKSGDAAIVMLQATKPMCVEAFQEFPPLGRFA

SEQ ID NO: 17711 - protein, 385 aa, Bombus hortorum
KFEKEAQEMGKGSFKYAWVLDKLKAERERGITIDIALWKFETAKYYVTIIDAPGHRDFIKNMITGTSQADCAVLIVAAGIGEFEAGISKNGQTREHALLAFTLGVKQLIVGVNKMDMTDPPYSEARFEEIKKEVSSYIKKIGYNTASVAFVPISGWHGDNMLEPSPNTSWYKGWKVERKDGNADGKTLIEALDAILPPSRPTDKALRLPLQDVYKIGGIGTVPVGRVETGILKPGMLVTFAPAALTTEVKSVEMHHEALTEALPGDNVGFNVKNISVKELRRGYVAGDSKNQPPRGAADFTAQVIVLNHPGQISNGYTPVLDCHTAHIACKFAEIKEKCDRRTGKTTEENPKSIKSGDAAIVMLQPTKPMCVEAFQEFPPLGRFA

SEQ ID NO: 17712 - protein, 385 aa, Bombus hyperboreus
KFEKEAQEMGKGSFKYAWVLDKLKAERERGITIDIALWKFETAKYYVTIIDAPGHRDFIKNMITGTSQADCAVLRVAAGIGEFEAGISKNGQTREHALLAFTLGVKQLIVGVNKMDMTDPPYSEARFEEIKKEVSSYIKKIGYNTASVAFVPISGWHGDNMLEPSPNTPWYKGWKVERKDGNADGKTLIEALDAILPPSRPTDKALRLPLQDVYKIGGIGTVPVGRVETGILKPGMLVTFAPAALTTEVKSVEMHHEALTEALPGDNVGFNVKNISVKELRRGYVAGDSKNQPPRGAADFTAQVIVLNHPGQISNGYTPVLDCHTAHIACKFAEIKEKCDRRTGKTTEENPKSIKSGDAAIVMLQPTKPMCVEAFQEFAPLGRFA

SEQ ID NO: 17713 - protein, 385 aa, Bombus wurflenii
KFEKEAQEMGKGSFKYAWVLDKLKAERERGITIDIALWKFETAKYYVTIIDAPGHRDFIKNMITGTSQADCAVLIVAAGIGEFEAGISKNGQTREHALLAFTLGVKQLIVGVNKMDMTDPPYSEARFEEIKKEVSSYIKKIGYNTASVAFVPISGWHGDNMLEPSPNTPWYKGWKVERKDGNADGKTLIEALDAILPPSRPTDKALRLPLQDVNKIGGIGTVPVGRVETGILKPGMLVTFAPAALTTEVKSVEMHHEALTEALPGDNVGFNVKNISVKELRRGYVAGDSKNQPPRGAADFTAQVIVLNHPGQISNGYTPVLDCHTAHIACKFAEIKEKCDRRTGKTTEENPKSIKSGDAAIVMLQPTKPMCVEAFQEFPPLGRFA

SEQ ID NO: 17714 - protein, 408 aa, Kentrophoros sp.
VDSGKSTSTGHLIYKCGGIDKRTIEKFDKEAAEMGKGSFKYAWVLDKLKAERERGITIDIALWKFESPKCVFTIIDAPGHRDFIKNMITGTSQADVAILIIAAGTGEFEAGISKEGQTREHALLAFTMGVKQMLVCVNKMDDKSVNYKEARFLEIKKEVSDYLKKIGYNPDKIPFIPISGWVGDNMIEKSDNMPWYKGQCLLDVLDTLEPPRRPKDKALRLPLQDVYKIGGIGTVPVGRVETGLIKPGMTVTSAPMNITTEVKSVEMHHESLAEAEPRDNVGFNVKNVSVKDVRCGNVAGDTKNDPPMEAAGFTAQVIILIHPGQISAGYAPVLDCHTAHIACKCAELKEKIDRRSGKKLNDGPKFLKSGDAAIVDMVPGKPLCVESFSDYPPLGRFAVHDMRQTVAV

SEQ ID NO: 17715 - protein, 408 aa, Paranophrys carnivora
VDSGKSTTTGHLIYKCGGIDKRVIEKFEKESAEMGKGSFKYAWVLDKLKAERERGITIDISLWNFETAKRSYTIIDAPGHRDFIKNMITGTSQADAAILIIAAGQGEFEAGISKECQTREHALLAYTMGVKQMVVAVNKMDSKTVDWDEERYEEIKKELSDYLAKIGLKPRQVPFIPISGFNGDNMLERSTNAPWYKGPILCAALDALDPPKRPIDKPLRLPLQDVYKIGGIGTVPVGRVETGLLKPGMSIQFAPMGIITECKSVEMHHESLPEAEPGDNVGSNVKNISVKDLRRGFVASDSKSDPAKDTTNFLAQVIIINHPGQIQAGYTPVLDCHTAHIACKFEEIESKVDRRSGKVLEEEPKFIKSGDAALVRLIPTKALCVEVFSEYPPLGRYAVRDMKQTVAV

SEQ ID NO: 17716 - protein, 411 aa, Telotrochidium henneguyii
GHVDSGKSTSTGHLIYKCGGIDKRTLEKFEKEAAEMGKASFKYAWVMDKLKSEGERGITIDISLWQFETAKYHFTIIDAPGHRDFIKNMITGTSQADCAILMIASPKGEFEAGISKEGQTREHALLSFTLGVKQMIICMNKMDEKSVKLSEDRYLEIKKEVEGFLKKVGYKPAKIPFIPISGWNGDNMLERSPNTPWYKGPILIEALDKIVPPKGPTEKPLRLPLQDVYKIGGIGTVPVGRVETGIIKAGMSVSFAPGDAKTEVKSVEMHHTSIPEAIPGDNVGFNVKGLSAKDIKRGYVCGDAKNDPPKEVENFLAQVIIMNHPGQIENGYCPVLDCHTAHIACKFTEIQAKIDRRTGKAIEESPKSVKNGDSALIILTPTKPMCVESFAEYPPLGRFAVRDMKQTVAVG

SEQ ID NO: 17717 - protein, 408 aa, Naxella sp.
VDSGKSTTTGHLIYKCGGIDKRTIEKFEKESAEQGKGSFKYAWVLDKLKAERERGITIDISLWKFETQKFWFTIIDAPGHRDFIKNMITGTSQADVAILMIASPQGEFEAGISKDGQTREHALLSFTLGVKQMIVCVNKMDDKTVNYDEERYQEIKKEVGLDLKKIGLKPNQIPFIPISGWNGDNMLEDSQILPWTRGQSLLKALDPYVPPKRPTEKPHRLPLQDVYKISGIGTVPVGRVETGIIKPGITVQFAPSGISTEVKSVEMHHQQLVEAVPGDNVGSNVKNISVKDIRRGFVCSDSKNDPAKETTNFLAQVIIIINHPGQIQPGYCPVLDCHTAHIACKFDEILSKNDRRSGKVLEEEPKFIKSGDAALVRVPQKPMCVEIFNEYPPLGRFAVRDMKQTVAV

SEQ ID NO: 17718 - protein, 365 aa, Rhizopus azygosporus
GKSTTTGHLIYKCGGIDKRTIEKFEKEAAELGKGSFKYAWVLDKLKAERERGITIDIALWKFETPKYNVTVIDAPGHRDFIKNMITGTSQADCGILIIAAGTGEFEAGISKDGQTREHALLAFTLGVRQLIVAINKMDTTKWSEARYNEIVKEVSSFIKKIGYNPKSVPFVPISGWHGDNMLEESTNMPWFKGWTKETKAGNKTGKTLLEAIDNIDPPTRPVDKPLRLPLQDVYKIGGIGTVPVGRVETGVIKAGMVVTFAPANVTTEVKSVEMHHETLTEGLPGDNVGFNVKNVSVKDIRRGNVCSDSKNDPAKESGSFTAQVIILNHPGQIGAGYAPVLDCHTAHIACKFAELIEKIDRRSGK

SEQ ID NO: 17719 - protein, 417 aa, Rhizopus microsporus var. microsporus
GKSTTTGHLIYKCGGIDKRTIEKFEKEAAELGKGSFKYAWVLDKLKAERERGITIDIALWKFETPKYNVTVIDAPGHRDFIKNMITGTSQADCGILIIAAGTGEFEAGISKDGQTREHALLAFTLGVRQLIVAINKMDTTKWSEARYNEIVKEVSSFIKKIGYNPKSVPFVPISGWHGDNMLEESNNMPWFKGWTKETKAGNKTGKTLLEAIDNIDPPTRPVDKPLRLPLQDVYKIGGIGTVPVGRVETGVIKAGMVVTFAPANVTTEVKSVEMHHETLTEGLPGDNVGFNVKNVSVKDIRRGNVCSDSKNDPAKESGSFTAQVIILNHPGQIGAGYAPVLDCHTAHIACKFAELIEKIDRRSGKKLEDAPKFVKSGDSAIVKMVPSKPMCVEAYTDYPPLGRFAVRDMRQTVAVGV

SEQ ID NO: 17720 - protein, 377 aa, Eurytemora affinis
QEMGKGSFKYAWVLDKLKAERERGITIDIALWKFETPKYYVTIIDAPGHRDFIKNMITGTSQADCGVLIIASGTGEFEAGISKNGQTREHALLAYTLGVKQLIVGVNKMDSTEPPYSQARFEEIQKEVSGFIKKVGYNPAAVPFVPISGWHGDNMLATSPNMSWYKGWNIERKEGKASGTTLLEAFDAIIPPTRPTDKPLRLPLQDVYKIGGIGTVPVGRVETGIIKPGMVVTFAPGQLSTEVKSVEMHHESLPEATPGDNVGFNVKNVSVKDIKRGNVASDSKNRPATGVQDFTAQVIVLNHPGQISNGYSPVLDCHTAHIACKFAEIKEKVDRRTGKSTEDNPKFIKSGDAAIVRLVPSKPMCVEAFSDFPPLGR

SEQ ID NO: 17721 - protein, 377 aa, Heteromysis formosa
  unsure (1)..(377): unsure at all Xaa locations
SEMGKGSFKYAWVXDKLKAERERGITIDIALWKFETNKFYVTIIDAPGHRDFIKNMITGTSQADCAVLIVAAGTGEFEAGISKNGQTREHVLLCFTLGVKQLXVAVNKMDXTEPKYSEARFKEISKEVSTYVKKVGYNPNIVPIIPISGFNGDNMLEKSSNMDWWKKQKIERKSGNYEFETLFDALDNIEPPSRPLDKPLRLPLQDVYKIGGIGTVPVGRVETGVIKPGMVVTFAPSGLTTEVKSVEMHHEALTEASPGDNVGFNVKNVSVKDLKRGFVASDSKSDPAKEAADFNAQVIVLNHPGQIQAGYSPVLDCHTAHIACKFSELLTKIDRRTGKEIEANPKFIKSGDSCVVKMVPSKPMCVESFQKYPPLGR

SEQ ID NO: 17722 - protein, 377 aa, Proteroiulus fuscus
AELGKGSFKYAWVLDKLKAERERGITIDISLWKFETQKFYITIIDAPGHRDFIKNMITGTSQADCAVLIVAAGTGEFEAGISKNGQTREHALLAYTLGVKQLIVGVNKMDTTEPPYNEGRFEEIRKEVSSYIKKIGYNPATVAFVPISGWNGDNMLEPSASMTWHKGWAIERKEGNANGKTLLEALDAIVAPARPTDKALRLPLQDVYKIGGIGTVPVGRVETGVLKPGMVVTFAPAALTTEVKSVEMHHEALVEAVPGDNVGFNVKNVSVKELRRGFVAGDSKANPPKAVSEFTAQVIVLNHPGQISNGYTPVLDCHTAHIACKFAEIKEKCDRRTGKTVEENPKAIKSGDAAIVNLVPTKPMCVESFSDFPPLGR

SEQ ID NO: 17723 - protein, 377 aa, Tanystylum orbiculare
QEMGKGSFKYAWVLDKLKAERERGITIDIALWKFETQKYHVTIIDAPGHRDFIKNMITGTSQADCAVLIVAAGVGEFEAGISKNGQTREHALLAYTLGVKQLVVAVNKMDSTEPPYSEARFQEIVKEVQAYIKKIGYNPKTVAFVPISGWHGDNMLEKSDKMSWWKTWEIERKEGNASGSTLLDALDAIVPPHRPTEKPLRLPLQDVYKIGGIGTVPVGRVETGVLKPGVLVTFAPVNLTTEVKSVEMHHEQLTQAVPGDNVGFNVKNVSVKDIRRGYVAGDSKNNPPKATESFCAQVIVLNHPGQIQNGYSPVLDCHTAHIACRFNEIKEKCDRRSGKKLEDAPKFVKSGDVAIVDLIPSKPMCVETFAEFPPLGR

SEQ ID NO: 17724 - protein, 358 aa, Lasioglossum cognatum
ERERGITIDIALWKFETAKYYVTIIDAPGHRDFIKNMITGTSQADCAVLIVAAGTGEFEAGISKNGQTREHALLAFTLGVKQLIVGVNKMDSTEPPYSEARFEEIKKEVSSYIKKIGYNPAAVAFVPISGWHGDNMLEVSSKMPWFKGWNVERKEGKAEGKCLIEALDAILPPSRPTDKALRLPLQDVYKIGGIGTVPVGRVETGLLKPGMVVTFAPAGITTEVKSVEMHHESLTEAVPGDNVGFNVKNVSVKELRRGYVAGDSKNNPPKGAADFTAQVIVLNHPGQISNGYTPVLDCHTAHIACKFHTIIEKCDRRTGKTTEMEPKAIKSGDAAIVTLVPTKPMCVEAFQEFPPLGR

SEQ ID NO: 17725 - protein, 360 aa, Lasioglossum conspicuum
ERERGITIDIALWKFETAKYYVTIIDAPGHRDFIKNMITGTSQADCAVLIVAAGTGEFEAGISKNGQTREHALLAFTLGVKQLIVGVNKMDSTEPPYSEARFEEIKKEVSSYIKKIGYNPAAVAFVPISGWHGDNMLEVSSKMPWFKGWNVERKEGKGEGKCLIEALDAILPPSRPTDKALRLPLQDVYKIGGIGTVPVGRVETGLLKPGMVVTFAPAGITTEVKSVEMHHEALLEAVPGDNVGFNVKNVSVKELRRGYVAGDSKNNPPKGAADFTAQVIVLNHPGQISNGYTPVLDCHTAHIACKFHKIIEKCDRRTGKTTEVEPKAIKSGDAAIVSLVPTKPMCVEAFQEFPPLGRFA

SEQ ID NO: 17726 - protein, 358 aa, Lasioglossum convexum
ERERGITIDIALWKFETSKYYVTIIDAPGHRDFIKNMITGTSQADCAVLIVAAGTGEFEAGISKNGQTREHALLAFTLGVKQLIVGVNKMDSTEPPYSEARFEEIKKEVSSYIKKIGYSPAAVAFVPISGWHGDNMLEVSSKMPWFKGWNVERKEGKVEGKCLIEALDAILPPSRPTDKALRLPLQDVYKIGGIGTVPVGRVETGLLKPGMVVTFAPAGITTEVKSVEMHHETLTEAVPGDNVGFNVKNVSVKELRRGYVAGDSKNNPPKGAADFTAQVIVLNHPGQISNGYTPVLDCHTAHIACKFHQIIEKCDRRTGKTTEMEPKAIKSGDAAIVTLVPTKPMCVEAFQEFPPLGR

SEQ ID NO: 17727 - protein, 358 aa, Lasioglossum erythrurum
ERERGITIDIALWKFETSKYYVTIIDAPGHRDFIKNMITGTSQADCAVLIVAAGTGEFEAGIPKNGQTREHALLAFTLGVKQLIVGVNKMDSTEPPYSEARFEEIKKEVSSYIKKIGYNPAAVAFVPISGWHGDNMLEVSSKMPWFKGWNVERKEGKAEGKCLIEALDAILPPSRPTDKALRLPLQDVYKIGGIGTVPVGRVETGLLKPGMVVTFAPAGITTEVKSVEMHHEALTEAVPGDNVGFNVKNVSVKELRRGYVAGDSKNNPPKGAADFTAQVIVLNHPGQISNGYTPVLDCHTAHIACKFHKIIEKCDRRTGKTTEMEPKAIKSGDAAIVTLVPTKPMCVEAFQEFPPLGR

SEQ ID NO: 17728 - protein, 358 aa, Lasioglossum florale
ERERGITIDIALWKFETSKYYVTIIDAPGHRDFIKNMITGTSQADCAVLIVAAGTGEFEAGISKNGQTREHALLAFTLGVKQLIVGVNKMDSTEPPYSENRFEEIKKEVSSYIKKIGYNPAAVAFVPISGWHGDNMLEVSSKMPWFKGWNVERKEGKAEGKCLIEALDAILPPSRPTDKALRLPLQDVYKIGGIGTVPVGRVETGLLKPGMVVTFAPAGITTEVKSVEMHHEALTEAVPGDNVGFNVKNVSVKELRRGYVAGDSKNNPPKGAADFTAQVIVLNHPGQISNGYTPVLDCHTAHIACKFHKIIEKCDRRTGKTTEMEPKAIKSGDAAIVTLVPTKPMCVEAFQEFPPLGR

SEQ ID NO: 17729 - protein, 358 aa, Lasioglossum lanarium
ERERGITIDIALWKFETSKYYVTIIDAPGHRDFIKNMITGTSQADCAVLIVAAGTGEFEAGISKNGQTREHALLAFTLGVKQLIVGVNKMDSTEPPYSEPRFEEIKKEVSSYIKKIGYNPAAVAFVPISGWHGDNMLEVSSKMPWFKGWNVERKEGKAEGKCLIEALDAILPPSRPTDKALRLPLQDVYKIGGIGTVPVGRVETGLLKPGMVVTFAPAGITTEVKSVEMHHEALTEAVPGDNVGFNVKNVSVKELRRGYVAGDSKNNPPKGAADFTAQVIVLNHPGQISNGYTPVLDCHTAHIACKFHKIIEKCDRRTGKTTEMEPKAIKSGDAAIVTLIPTKPMCVEAFQEFPPLGR

SEQ ID NO: 17730 - protein, 358 aa, Lasioglossum mediopolitum
ERERGITIDIALWKFETSKYYVTIIDAPGHRDFIKNMITGTSQADCAVLIVAAGTGEFEAGISKNGQTREHALLAFTLGVKQLIVGVNKMDSTEPPYSEPRFEEIKKEVSSYIKKIGYNPAAVAFVPISGWHGDNMLEVSSKMPWFKGWNVDRKEGKAEGKCLIEALDAILPPSRPTDKALRLPLQDVYKIGGIGTVPVGRVETGLLKPGMVVTFAPAGITTEVKSVEMHHEALTEAVPGDNVGFNVKNVSVKELRRGYVAGDSKNNPPKGAADFTAQVIVLNHPGQISNGYTPVLDCHTAHIACKFQKIIEKCDRRTGKTTEMEPKAIKSGDAAIVTLVPTKPMCVEAFQEFPPLGR

SEQ ID NO: 17731 - protein, 358 aa, Lasioglossum mirandum
ERERGITIDIALWKFETAKYYVTIIDAPGHRDFIKNMITGTSQADCAVLIVAAGTGEFEAGISKNGQTREHALLAFTLGVKQLIVGVNKMDSTEPPYSEPRFEEIKKEVSSYIKKIGYNPAAVAFVPISGWHGDNMLEVSSKMPWFKGWYVERKEGKAEGKCLIEALDAILPPSRPTDKALRLPLQDVYKIGGIGTVPVGRVETGLLKPGMVVTFAPAGITTEVKSVEMHHEALTEAVPGDNVGFNVKNVSVKELRRGYVAGDSKNNPPKGAADFTAQVIVLNHPGQISNGYTPVLDCHTAHIACKFHKIIEKCDRRTGKTTEMEPKAIKSGDAAIVTLVPTKPMCVEAFQEFPPLGR

SEQ ID NO: 17732 - protein, 358 aa, Lasioglossum parasphecodum
ERERGITIDIALWKFETAKYYVTIIDAPGHRDFIKNMITGTSQADCAVLIVAAGTGEFEAGISKNGQTREHALLAFTLGVKQLIVGVNKMDSTEPPYSEARFEEIKKEVSSYIKKIGYNPAAVAFVPISGWHGDNMLEVSSKMPWFKGWNVERKEGKAEGKCLIEALDAILPPSRPTDKALRLPLQDVYKIGGIGTVPVGRVETGLLKPGMVVTFAPAGITTEVKSVEMHHETMTEAVPGDNVGFNVKNVSVKELRRGYVAGDSKNNPPKGAADFTAQVIVLNHPGQISNGYTPVLDCHTAHIACKFHKIIEKCDRRTGKTTELEPKAIKSGDAAIVTLIPTKPMCVEAFQEFPPLGR

SEQ ID NO: 17733 - protein, 358 aa, Lasioglossum sp. NDA(1)-A
ERERGITIDIALWKFETAKYYVTIIDAPGHRDFIKNMITGTSQADCAVLIVAAGTGEFEAGISKNGQTREHALLAFTLGVKQLIVGVNKMDSTEPPYSEARFEEIKKEVSSYIKKIGYNPAAVAFVPISGWHGDNMLEVSSKMPWFKGWAVERKEGKAEGKCLIEALDAILPPSRPTDKALRLPLQDVYKIGGIGTVPVGRVETGLLKPGMVVTFAPAGITTEVKSVEMHHEALTEAVPGDNVGFNVKNVSVKELRRGYVAGDSKNNPPKGAADFTAQVIVLNHPGQISNGYTPVLDCHTAHIACKFQKIIEKCDRRTGKTTEMEPKAIKSGDAAIVTLVPSKPMCVEAFQEFPPLGR

SEQ ID NO: 17734 - protein, 360 aa, Lasioglossum cressonii
ERERGITIDIALWKFETAKYYVTIIDAPGHRDFIKNMITGTSQADCAVLIVAAGTGEFEAGISKNGQTREHALLAFTLGVKQLIVGVNKMDSTEPPYSEARFEEIKKEVSSYIKKIGYNPAAVAFVPISGWHGDNMLEASSKMPWFKGWAVERKEGKAEGKCLIEALDAILPPSRPTDKALRLPLQDVYKIGGIGTVPVGRVETGLLKPGMVVTFAPAGLTTEVKSVEMHHEALTEAVPGDNVGFNVKNVSVKELRRGYVAGDSKNNPPKGAADFTAQVIVLNHPGQISNGYTPVLDCHTAHIACKFHKIIEKCDRRTGKTTEMEPKAIKSGDAAIVTLVPSKPMCVEAFQEFPPLGRFA

SEQ ID NO: 17735 - protein, 358 aa, Lasioglossum gundlachii
ERERGITIDIALWKFETSKYYVTIIDAPGHRDFIKNMITGTSQADCAVLIVAAGTGEFEAGISKNGQTREHALLAFTLGVKQLIVGVNKMDSTEPPYSEARFEEIKKEVSSYIKKIGYNPAAVAFVPISGWHGDNMLEASSKMPWFKGWAVERKEGKAEGKCLIEALDAILPPSRPTDKALRLPLQDVYKIGGIGTVPVGRVETGLLKPGMVVTFAPAGLTTEVKSVEMHHEALTEAVPGDNVGFNVKNVSVKELRRGYVAGDSKNNPPKGAADFTAQVIVLNHPGQISNGYTPVLDCHTAHIACKFHKIIEKCDRRTGKTTEMDPKAIKSGDAAIVTLVPSKPMCVEAFQEFPPLGR

SEQ ID NO: 17736 - protein, 360 aa, Lasioglossum hyalinum
ERERGITIDIALWKFETSKYYVTIIDAPGHRDFIKNMITGTSQADCAVLIVAAGTGEFEAGISKNGQTREHALLAFTLGVKQLIVGVNKMDSTEPPYSEARFEEIKKEVSSYIKKIGYNPAAVAFVPISGWHGDNMLEASSKMPWFKGWAVERKEGKAEGKCLIEALDAILPPSRPTDKALRLPLQDVYKIGGIGTVPVGRVETGLLKPGMVVTFAPAGLTTEVKSVEMHHEALTEAVPGDNVGFNVKNVSVKELRRGYVAGDSKNNPPKGAADFTAQVIVLNHPGQISNGYTPVLDCHTAHIACKFHKIIEKCDRRTGKTTEMEPKAIKSGDAAIVTLVPSKPMCVEAFQEFPPLGRLP

SEQ ID NO: 17737 - protein, 358 aa, Lasioglossum imitatum
ERERGITIDIALWKFETSKYYVTIIDAPGHRDFIKNMITGTSQADCAVLIVAAGTGEFEAGISKNGQTREHALLAFTLGVKQLIVGVNKMDSTEPPYSEARFEEIKKEVSSYIKKIGYNPAAVAFVPISGWHGDNMLEASSKMPWFKGWAVERKEGKAEGKCLIEALDAILPPSRPTDKALRLPLQDVYKIGGIGTVPVGRVETGLLKPGMVVTFAPAGLTTEVKSVEMHHEALTEAVPGDNVGFNVKNVSVKELRRGYVAGDSKNNPPKGAADFTAQVIVLNHPGQISNGYTPVLDCHTAHIACKFHKIIEKCDRRTGKTTEMEPKAIKSGDAAIVTLVPSKPMCVEAFQEFPPLGR

SEQ ID NO: 17738 - protein, 358 aa, Lasioglossum parvum
ERERGITIDIALWKFETSKYYVTIIDAPGHRDFIKNMITGTSQADCAVLIVAAGTGEFEAGISKNGQTREHALLAFTLGVKQLIVGVNKMDSTEPPYSEARFEEIKKEVSSYIKKIGYNPAAVAFVPISGWHGDNMLEASSKMPWFKGWAVERKEGKAEGKCLIEALDAILPPSRPTDKALRLPLQDVYKIGGIGTVPVGRVETGLLKPGMVVTFAPAGLTTEVKSVEMHHEALTEAVPGDNVGFNVKNVSVKELRRGYVAGDSKNNPPKGAADFTAQVIVLNHPGQISNGYTPVLDCHTAHIACKFHKIIEKCDRRTGKTTEMDPKAIKSGDAAIVTLDLSKPMCVEAFQEFPPLGR

SEQ ID NO: 17739 - protein, 360 aa, Lasioglossum umbripenne
ERERGITIDIALWKFETSKYYVTIIDAPGHRDFIKNMITGTSQADCAVLIVAAGTGEFEAGISKNGQTREHALLAFTLGVKQLIVGVNKMDSTEPPYSEARFEEIKKEVSSYIKKIGYNPAAVAFVPISGWHGDNMLEASSKMPWFKGWAVERKEGKAEGKCLIEALDAILPPSRPTDKALRLPLQDVYKIGGIGTVPVGRVETGLLKPGMVVTFAPAGLTTEVKSVEMHHEALTEAVPGDNVGFNVKNVSVKELRRGYVAGDSKNNPPKGAADFTAQVIVLNHPGQISNGYTPVLDCHTAHIACKFHKIIEKCDRRTGKTTETDPKAIKSGDAAIVTLVPSKPMCVEAFQEFPPLGRLP

SEQ ID NO: 17740 - protein, 360 aa, Lasioglossum vierecki
ERERGITIDIALWKFETSKYYVTIIDAPGHRDFIKNMITGTSQADCAVLIVAAGTGEFEAGISKNGQTREHALLAFTLGVKQLIVGVNKMDSTEPPYSEARFEEIKKEVSSYIKKIGYNPAAVAFVPISGWHGDNMLEASSKMPWFKGWAVERKEGKAEGKCLIEALDAILPPSRPTDKALRLPLQDVYKIGGIGTVPVGRVETGLLKPGMVVTFAPAGLTTEVKSVEMHHEALTEAVPGDNVGFNVKNVSVKELRRGYVAGDSKNNPPKGAADFTAQVIVLNHPGQISNGYTPVLDCHTAHIACKFHKIIEKCDRRTGKTTEMDPKAIKSGDAAIVTLVPSKPVCVEAFQEFPPLGRFA

SEQ ID NO: 17741 - protein, 375 aa, Lasioglossum zephyrum
MGKGSFKYAWVLDKLKAERERGITIDIALWKFETSKYYVTIIDAPGHRDFIKNMITGTSQADCAVLIVAAGTGEFEAGISKNGQTREHALLAFTLGVKQLIVGVNKMDSTEPPYSEARFEEIKKEVSSYIKKIGYNPAAVAFVPISGWHGDNMLEASSKMPWFKGWAVERKEGKAEGKCLIEALDAILPPSRPTDKALRLPLQDVYKIGGIGTVPVGRVETGLLKPGMVVTFAPAGLTTEVKSVEMHHEALTEAVPGDNVGFNVKNVSVKELRRGYVAGDSKNNPPKGAADFTAQVIVLNHPGQISNGYTPVLDCHTAHIACKFHKIIEKCDRRTGKTTEMEPKAIKSGDAAIVTLVPSKPMCVEAFQEFPPLGR

SEQ ID NO: 17742 - protein, 358 aa, Lasioglossum albipes
ERERGITIDIALWKFETAKYYVTIIDAPGHRDFIKNMITGTSQADCAVLIVAAGTGEFEAGISKNGQTREHALLAFTLGVKQLIVGVNKMDSTEPPYSEARFEEIKKEVSSYIKKIGYNPAAVAFVPISGWHGDNMLEASSKMPWFKGWAVERKEGKAEGKCLIEALDAILPPSRPTDKALRLPLQDVYKIGGIGTVPVGRVETGLLKPGMVVTFAPAGLTTEVKSVEMHHEALTEAVPGDNVGFNVKNVSVKELRRGYVAGDSKNNPPKGAADFTAQVIVLNHPGQISNGYTPVLDCHTAHIACKFHKIIEKCDRRTGKTTEMEPKAIKSGDAAIVTLVPSKPMCVEAFQEFPPLGR

SEQ ID NO: 17743 - protein, 360 aa, Lasioglossum apristum
ERERGITIDIALWKFETSKYYVTIIDAPGHRDFIKNMITGTSQADCAVLIVAAGTGEFEAGISKNGQTREHALLAFTLGVKQLIVGVNKMDSTEPPYSEARFEEIKKEVSSYIKKIGYNPAAVAFVPISGWHGDNMLEASSKMPWFKGWAVERKEGKGEGKCLIEALDAILPPSRPTDKALRLPLQDVYKIGGIGTVPVGRVETGLLKPGMVVTFAPAGLTTEVKSVEMHHEALTEAVPGDNVGFNVKNVSVKELRRGYVAGDSKNNPPKGAADFTAQVIVLNHPGQISNGYTPVLDCHTAHIACKFHKIIEKCDRRTGKTTEMEPKAIKSGDAAIVTLVPSKPMCVEAFQEFPPLGRFA

SEQ ID NO: 17744 - protein, 358 aa, Lasioglossum cinctipes
ERERGITIDIALWKFETSKYYVTIIDAPGHRDFIKNMITGTSQADCAVLIVAAGTGEFEAGISKNGQTREHALLAFTLGVKQLIVGVNKMDSTEPPYSEARFEEIKKEVSSYIKKIGYNPAAVAFVPISGWHGDNMLEASSKMPWFKGWAVERKEGKAEGKCLIEALDAILPPSRPTDKALRLPLQDVYKIGGIGTVPVGRVETGLLKPGMVVTFAPAGLTTEVKSVEMHHEALTEAVPGDNVGFNVKNVSVKELRRGYVAGDSKNNPPKGAADFTAQVIVLNHPGQITNGYTPVLDCHTAHIACKFHKIIEKCDRRTGKTTEMDPKTIKSGDAAIVTLVPSKPMCVEAFQEFPPLGR

SEQ ID NO: 17745 - protein, 358 aa, Lasioglossum comagenense
ERERGITIDIALWKFETSKYYVTIIDAPGHRDFIKNMITGTSQADCAVLIVAAGTGEFEAGISKIGQTREHALLAFTLGVKQLIVGVNKMDSTEPPYSEARFEEIKKEVSSYIKKIGYNPAAVAFVPISGWHGDNMLEASSKMPWFKGWAVERKEGKAEGKCLIEALDAILPPSRPTDKALRLPLQDVYKIGGIGTVPVGRVETGLLKPGMVVTFAPAGLTTEVKSVEMHHEALTEAVPGDNVGFNVKNVSVKELRRGYVAGDSKNNPPKGAADFTAQVIVLNHPGQISNGYTPVLDCHTAHIACKFHKIIEKCDRRTGKTTEMEPKAIKSGDAAIVTLVPSKPMCVEAFQEFPPLGR

SEQ ID NO: 17746 - protein, 360 aa, Lasioglossum gattaca
ERERGITIDIALWKFETAKYYVTIIDAPGHRDFIKNMITGTSQADCAVLIVAAGTGEFEAGISKNGQTREHALLAFTLGVKQLIVGVNKMDSTEPPYSEARFEEIKKEVSSYIKKIGYNPAAVAFVPISGWHGDNMLEASSKMPWFKGWAVERKEGKGEGKCLIEALDAILPPSRPTDKALRLPLQDVYKIGGIGTVPVGRVETGLLKPGMVVTFAPAGLTTEVKSVEMHHEALTEAVPGDNVGFNVKNVSVKELRRGYVAGDSKNNPPKGAADFTAQVIVLNHPGQISNGYTPVLDCHTAHIACKFHKIIEKCDRRTGKTTEMEPKAIKSGDAAIVTLVPSKPMCVEAFQEFPPLGRLP

SEQ ID NO: 17747 - protein, 360 aa, Lasioglossum laticeps
  unsure (1)..(360): unsure at all Xaa locations
ERERGITIDIALWKFETSKYYVTIIDAPGHRDFIKNMITGTSQADCAVLIVAAGTGEFEAGISXNGQTREHALLAFTLGVKQLIVGVNKMDSTEPPYSESRFEEIKKEVSSYIKKIGYNPAAVAFVPISGWHGDNMLEASSKMPWFKGWAVERKEGKAEGKCLIEALDAILPPSRPTDKALRLPLQDVYKIGGIGTVPVGRVETGLLKPGMVVTFAPAGLTTEVKSVEMHHEALTEAVPGDNVGFNVKNVSVKELRRGYVAGDSKNNPPKGAADFTAQVIVLNHPGQISNGYTPVLDCHTAHIACKFHKIIEKCDRRTGKTTEMEPKAIKSGDAAIVTLVPSKPMCVEAFQEFPPLGRFA

SEQ ID NO: 17748 - protein, 360 aa, Lasioglossum lineare
ERERGITIDIALWKFETSKYYVTIIDAPGHRDFIKNMITGTSQADCAVLIVAAGTGEFEAGISKNGQTREHALLAFTLGVKQLIVGVNKMDSTEPPYSEARFEEIKKEVSSYIKKIGYNPAAVAFVPISGWHGDNMLEASSKMPWFKGWAVERKEGKAEGKCLIEALDAILPPSRPTDKALRLPLQDVYKIGGIGTVPVGRVETGLLKPGMVVTFAPAGLTTEVKSVEMHHEALTEAVPGDNVGFNVKNVSVKELRRGYVAGDSKNNPPKGAADFTAQVIVLNHPGQISNGYTPVLDCHTAHIACKFHKIIEKCDRRTGKTTEMEPKAIKSGDAAIVTLVPSKPMCVEAFQEFPPLGRFA

SEQ ID NO: 17749 - protein, 358 aa, Lasioglossum malachurum
ERERGITIDIALWKFETSKYYVTIIDAPGHRDFIKNMITGTSQADCAVLIVAAGTGEFEAGISKNGQTREHALLAFTLGVKQLIVGVNKMDSTEPPYSESRFEEIKKEVSSYIKKIGYNPAAVAFVPISGWHGDNMLEASSKMPWFKGWAVERKEGKAEGKCLIEALDAILPPSRPTDKALRLPLQDVYKIGGIGTVPVGRVETGLLKPGMVVTFAPAGLTTEVKSVEMHHEALTEAVPGDNVGFNVKNVSVKELRRGYVAGDSKNNPPKGAADFTAQVIVLNHPGQISNGYTPVLDCHTAHIACKFHKIIEKCDRRTGKTTEMEPKAIKSGDAAIVTLVPSKPMCVEAFQEFPPLGR

SEQ ID NO: 17750 - protein, 358 aa, Lasioglossum morio
ERERGITIDIALWKFETSKYYVTIIDAPGHRDFIKNMITGTSQADCAVLIVAAGTGEFEAGISKNGQTREHALLAFTLGVKQLIVGVNKMDSTEPPYSEARFEEIKKEVSSYIKKIGYNPAAVAFVPISGWHGDNMLESSSKMPWFKGWAVERKEGKAEGKCLIEALDAILPPSRPTDKALRLPLQDVYKIGGIGTVPVGRVETGLLKPGMVVTFAPAGLTTEVKSVEMHHEALTEAVPGDNVGFNVKNVSVKELRRGYVAGDSKNNPPKGAADFTAQVIVLNHPGQISNGYTPVLDCHTAHIACKFHKIIEKCDRRTGKTTEMEPKAIKSGDAAIVTLVPSKPMCVEAFQEFPPLGR

SEQ ID NO: 17751 - protein, 360 aa, Lasioglossum politum
ERERGITIDIALWKFETSKYYVTIIDAPGHRDFIKNMITGTSQADCAVLIVAAGTGEFEAGISKNGQTREHALLAFTLGVKQLIVGVNKMDSTEPPYSEARFEEIKKEVSSYIKKIGYNPAAVAFVPISGWHGDNMLEVSSKMPWFKGWAVERKEGKAEGKCLIEALDAILPPSRPTDKALRLPLQDVYKIGGIGTVPVGRVETGLLKPGMVVTFAPAGLTTEVKSVEMHHEALTEAVPGDNVGFNVKNVSVKELRRGYVAGDSKNNPPKGAADFTAQVIVLNHPGQISNGYTPVLDCHTAHIACKFHKIIEKCDRRTGKTTEMEPKAIKSGDAAIVTVVPSKPMCVEAFQEFPPLGRFA

SEQ ID NO: 17752 - protein, 358 aa, Lasioglossum puncticolle
ERERGITIDIALWKFETSKYYVTIIDAPGHRDFIKNMITGTSQADCAVLIVAAGTGEFEAGISKNGQTREHALLAFTLGVKQLIVGVNKMDSTEPAYSETRFEEIKKEVSSYIKKIGYNPAAVAFVPISGWHGDNMLEASSKMPWFKGWAVERKEGKAEGKCLIEALDAILPPSRPTDKALRLPLQDVYKIGGIGTVPVGRVETGLLKPGMVVTFAPAGLTTEVKSVEMHHEALTEAVPGDNVGFNVKNVSVKELRRGYVAGDSKNNPPKGAADFTAQVIVLNHPGQISNGYTPVLDCHTAHIACKFQKIIEKCDRRTGKTTEVDPKAIKSGDAAIVTLVPSKPMCVEAFQEFPPLGR

SEQ ID NO: 17753 - protein, 361 aa, Lasioglossum quebecense
ERERGITIDIALWKFETSKYYVTIIDAPGHRDFIKNMITGTSQADCAVLIVAAGTGEFEAGISKNGQTREHALLAFTLGVKQLIVGVNKMDSTEPPYSEARFEEIKKEVSSYIKKIGYNPAAVAFVPISGWHGDNMLEASSKMPWFKGWAVERKEGKAEGKCLIEALDAILPPSRPTDKALRLPLQDVYKIGGIGTVPVGRVETGLLKPGMVVTFAPAGLTTEVKSVEMHHEALTEAVPGDNVGFNVKNVSVKELRRGYVAGDSKNNPPKGAADFTAQVIVLNHPGQISNGYTPVLDCHTAHIACKFHKIIEKCDRRTGKTTEMEPKAIKSGDAAIVTLVPSKPMCVEAFQEFPPLGRFAV

SEQ ID NO: 17754 - protein, 358 aa, Lasioglossum villosulum
  unsure (1)..(358): unsure at all Xaa locations
ERERGITIDIALWKFETSKYYVTIIDAPGHRDFIKNMITGTSQADCAVLIVAAGTGXFEAGISKNGQTREHALLAFTLGVKQLIVGVNKMDSTEPPYSEARFEEIKKEVSSYIKKIGYNPAAVAFVPISGWHGDNMLEASSKMPWFKGWAVERKEGKAEGKCLIEALDAILPPSRPTDKALRLPLQDVYKIGGIGTVPVGRVETGLLKPGMVVTFAPAGLTTEVKSVEMHHEALTEAVPGDNVGFNVKNVSVKELRRGYVAGDSKNNPPKGAADFTAQVIVLNHPGQISNGYTPVLDCHTAHIACKFHKIIEKCDRRTGKTTEMEPKAIKSGDAAIVTLVPSKPMCVEAFQEFPPLGR

SEQ ID NO: 17755 - protein, 375 aa, Lasioglossum lustrans
MGKGSFKYAWVLDKLKAERERGITIDIALWKFETSKYYVTIIDAPGHRDFIKNMITGTSQADCAVLIVAAGTGEFEAGISKNGQTREHALLAFTLGVKQLIVGVNKMDSTEPPYSEARFEEIKKEVSSYIKKIGYNPAAVAFVPISGWHGDNMLEASSKMPWFKGWAVERKEGKAEGKCLIEALDAILPPSRPTDKALRLPLQDVYKIGGIGTVPVGRVETGPLKPGMVVTFAPAGLTTEVKSVEMHHEALTEAVPGDNVGFNVKNVSVKELRRGYVAGDSKNNPPKGAADFTAQVIVLNHPGQISNGYTPVLDCHTAHIACKFHKIIEKCDRRTGKTTEMDPKAIKSGDAAIVTLVPSKPMCVEAFQEFPPLGR

SEQ ID NO: 17756 - protein, 358 aa, Lasioglossum lustrans
ERERGITIDIALWKFETSKYYVTIIDAPGHRDFIKNMITGTSQADCAVLIVAAGTGEFEAGISKNGQTREHALLAFTLGVKQLIVGVNKMDSTEPPYSEARFEEIKKEVSSYIKKIGYNPAAVAFVPISGWHGDNMLEASSKMPWFKGWAVERKEGKAEGKCLIEALDAILPPSRPTDKALRLPLQDVYKIGGIGTVPVGRVETGPLKPGMVVTFAPAGLTTEVKSVEMHHEALTEAVPGDNVGFNVKNVSVKELRRGYVAGDSKNNPPKGAADFTAQVIVLNHPGQISNGYTPVLDCHTAHIACKFHKIIEKCDRRTGKTTEMDPKAIKSGDAAIVTLVPSKPMCVEAFQEFPPLGR

SEQ ID NO: 17757 - protein, 358 aa, Lasioglossum coriaceum
ERERGITIDIALWKFETSKYYVTIIDAPGHRDFIKNMITGTSQADCAVLIVAAGTGEFEAGISKNGQTREHALLAFTLGVKQLIVGVNKMDSTEPPYSEARFEEIKKEVSSYIKKIGYNPAAVAFVPISGWHGDNMLEASSKMPWFKGWAVERKEGKAEGKCLIEALDAILPPSRPTDKALRLPLQDVYKIGGIGTVPVGRVETGLLKPGMVVTFAPAGITTEVKSVEMHHEALTEAVPGDNVGFNVKNVSVKELRRGYVAGDSKNNPPKSAADFTAQVIVLNHPGQITNGYTPVLDCHTAHIACKFHKIIEKCDRRTGKTTEMDPKTIKSGDAAIVTLVPSKPMCVEAFQEFPPLGR

SEQ ID NO: 17758 - protein, 358 aa, Lasioglossum desertum
ERERGITIDIALWKFETSKYYVTIIDAPGHRDFIKNMITGTSQADCAVLIVAAGTGEFEAGISKNGQTREHALLAFTLGVKQLIVGVNKMDSTEPPYSEARFEEIKKEVSSYIKKIGYNPAAVAFVPISGWHGDNMLEASSKMPWFKGWAVERKEGKAEGKCLIEALDAILPPSRPTDKALRLPLQDVYKIGGIGTVPVGRVETGLLKPGMVVTFAPAGITTEVKSVEMHHEALTEAVPGDNVGFNVKNVSVKELRRGYVAGDSKNNPPKSAADFTAQVIVLNHPGQISNGYTPVLDCHTAHIACKFHKIIEKCDRRTGKTTEMDPKAIKSGDAAIVTLVPSKPMCVEAFQEFPPLGR

SEQ ID NO: 17759 - protein, 358 aa, Lasioglossum fuscipenne
ERERGITIDIALWKFETSKYYVTIIDAPGHRDFIKNMITGTSQADCAVLIVAAGTGEFEAGISKNGQTREHALLAFTLGVKQLIVGVNKMDSTEPPYSEARFEEIKKEVSSYIKKIGYNPAAVAFVPISGWHGDNMLEASSKMPWFKGWAVERKEGKAEGKCLIEALDAILPPSRPTDKALRLPLQDVYKIGGIGTVPVGRVETGLLKPGMVVTFAPAGITTEVKSVEMHHEALTEAVPGDNVGFNVKNVSVKELRRGYVAGDSKNNPPKGAADFTAQVIVLNHPGQISNGYTPVLDCHTAHIACKFHKIIEKCDRRTGKTTEMDPKAIKSGDAAIVTLVPSKPMCVEAFQEFPPLGR

SEQ ID NO: 17760 - protein, 360 aa, Lasioglossum laevigatum
ERERGITIDIALWKFETSKYYVTIIDAPGHRDFIKNMITGTSQADCAVLIVAAGTGEFEAGISKNGQTREHALLAFTLGVKQLIVGVNKMDSTEPPYSEARFEEIKKEVSSYIKKIGYNPAAVAFVPISGWHGDNMLEASSKMPWFKGWAVERKEGKAEGKCLIEALDAILPPSRPTDKALRLPLQDVYKIGGIGTVPVGRVETGLLKPGMVVTFAPAGITTEVKSVEMHHEALTEAVPGDNVGFNVKNVSVKELRRGYVAGDSKNNPPKGAADFTAQVIVLNHPGQISNGYTPVLDCHTAHIACKFYKIIEKCDRRTGKTTELEPKAIKSGDAAIVTLVPSKPMCVEAFQEFPPLGRFA

SEQ ID NO: 17761 - protein, 360 aa, Lasioglossum leucozonium
ERERGITIDIALWKFETSKYYVTIIDAPGHRDFIKNMITGTSQADCAVLIVAAGTGEFEAGISKNGQTREHALLAFTLGVKQLIVGVNKMDSTEPPYSEARFEEIKKEVSSYIKKIGYNPAAVAFVPISGWHGDNMLEVSSKMPWFKGWAVERKEGKAEGKCLIEALDAILPPSRPTDKALRLPLQDVYKIGGIGTVPVGRVETGVLKPGMVVTFAPAGITTEVKSVEMHHEALTEAVPGDNVGFNVKNVAVKELRRGYVAGDSKNNPPKGAADFTAQVIVLNHPGQISNGYTPVLDCHTAHIACKFHKIIEKCDRRTGKTTEMEPKAIKSGDAAIVTLVPSKPMCVEAFQEFPPLGRFA

SEQ ID NO: 17762 - protein, 358 aa, Lasioglossum majus
ERERGITIDIALWKFETSKYYVTIIDAPGHRDFIKNMITGTSQADCAVLIVAAGTGEFEAGISKNGQTREHALLAFTLGVKQLIVGVNKMDSTEPPYSEARFEEIKKEVSSYIKKIGYNPAAVAFVPISGWHGDNMLEVSSKMPWFKGWAVERKEGKAEGKCLIEALDAILPPSRPTDKALRLPLQDVYKIGGIGTVPVGRVETGVLKPGMVVTFAPAGITTEVKSVEMHHEALTEAVPGDNVGFNVKNVAVKELRRGYVAGDSKNNPPKGAADFTAQVIVLNHPGQISNGYTPVLDCHTAHIACKFHKIIEKCDRRTGKTTEMEPKAIKSGDAAIVTLVPSKPMCVEAFQEFPPLGR

SEQ ID NO: 17763 - protein, 359 aa, Lasioglossum pavonotum
ERERGITIDIALWKFETSKYYVTIIDAPGHRDFIKNMITGTSQADCAVLIVAAGTGEFEAGISKNGQTREHALLAFTLGVKQLIVGVNKMDSTEPPYSEARFEEIKKEVSSYIKKIGYNPAAVAFVPISGWHGDNMLEASSKMPWFKGWAVERKEGKAEGKCLIEALDAILPPSRPTDKALRLPLQDVYKIGGIGTVPVGRVETGLLKPGMVVTFAPAGITTEVKSVEMHHEALTEAVPGDNVGFNVKNVSVKELRRGYVAGDSKNNPPKGAADFTAQVIVLNHPGQISNGYTPVLDCHTAHIACKFHKIIEKCDRRTGKTTEMDPKAIKSGDAAIVTLVPSKPMCVEAFQEFPPLGRF

SEQ ID NO: 17764 - protein, 358 aa, Lasioglossum sexnotatum
ERERGITIDIALWKFETAKYYVTIIDAPGHRDFIKNMITGTSQADCAVLIVAAGTGEFEAGISKNGQTREHALLAFTLGVKQLIVGVNKMDSTEPPYSEARFEEIKKEVSSYIKKIGYNPAAVAFVPISGWHGDNMLEASSKMPWFKGWAVERKEGKAEGKCLIEALDAILPPSRPTDKALRLPLQDVYKIGGIGTVPVGRVETGLLKPGMVVTFAPAGITTEVKSVEMHHEALTEAVPGDNVGFNVKNVSVKELRRGYVAGDSKNNPPKGAADFTAQVIVLNHPGQISNGYTPVLDCHTAHIACKFHKIIEKCDRRTGKTTEMDPKAIKSGDAAIVTLVPSKPMCVEAFQEFPPLGR

SEQ ID NO: 17765 - protein, 361 aa, Lasioglossum sisymbrii
ERERGITIDIALWKFETSKYYVTIIDAPGHRDFIKNMITGTSQADCAVLIVAAGTGEFEAGISKNGQTREHALLAFTLGVKQLIVGVNKMDSTEPPYSEARFEEIKKEVSSYIKKIGYNPAAVAFVPISGWHGDNMLEASSKMPWFKGWAVERKEGKAEGKCLIEALDAILPPSRPTDKALRLPLQDVYKIGGIGTVPVGRVETGLLKPGMVVTFAPAGITTEVKSVEMHHEALTEAVPGDNVGFNVKNVSVKELRRGYVAGDSKNNPPKGAADFTAQVIVLNHPGQISNGYTPVLDCHTAHIACKFHKIIEKCDRRTGKTTEMDPKAIKSGDAAIVTLVPSKPMCVEAFQEFPPLGRFAV

SEQ ID NO: 17766 - protein, 360 aa, Lasioglossum titusi
ERERGITIDIALWKFETSKYYVTIIDAPGHRDFIKNMITGTSQADCAVLIVAAGTGEFEAGISKNGQTREHALLAFTLGVKQLIVGVNKMDSTEPPYSEARFEEIKKEVSSYIKKIGYNPAAVAFVPISGWHGDNMLEASSKMPWFKGWAVERKEGKAEGKCLIEALDAILPPSRPTDKALRLPLQDVYKIGGIGTVPVGRVETGLLKPGMVVTFAPAGITTEVKSVEMHHEALTEAVPGDNVGFNVKNVSVKELRRGYVAGDSKNNPPKGAADFTAQVIVLNHPGQISNGYTPVLDCHTAHIACKFHKIIEKCDRRTGKTTEMDPKAIKSGDAAIVTLVPSKPMCVEAFQEFPPLGRFA

SEQ ID NO: 17767 - protein, 358 aa, Lasioglossum hybodinum
ERERGITIDIALWKFETSKYYVTIIDAPGHRDFIKNMITGTSQADCAVLIVAAGTGEFEAGISKNGQTREHALLAFTLGVKQLIVGVNKMDSTEPPYSEARFEEIKKEVSSYIKKIGYNPAAVAFVPISGWHGDNMLEASSKMPWFKGWAVERKEGKAEGKCLIEALDAILPPSRPTDKALRLPLQDVYKIGGIGTVPVGRVETGLLKPGMLVTFAPAGITTEVKSVEMHHEALTEAVPGDNVGFNVKNVSVKELRRGYVAGDSKNNPPRGAADFTAQVIVLNHPGQISNGYTPVLDCHTAHIACKFHKIIEKCDRRTGKTTEMEPKAIKSGDAAIVTLVPSKPMCVEAFQEFPPLGR

SEQ ID NO: 17768 - protein, 359 aa, Lasioglossum oenotherae
ERERGITIDIALWKFETSKYYVTIIDAPGHRDFIKNMITGTSQADCAVLIVAAGTGEFEAGISKNGQTREHALLAFTLGVKQLIVGVNKMDSTEPPYSEARFEEIKKEVSSYIKKIGYNPAAVAFVPISGWHGDNMLEASSKMPWFKGWAVERKEGKAEGKCLIEALDAILPPSRPTDKALRLPLQDVYKIGGIGTVPVGRVETGLLKPGMVVTFAPAGLTTEVKSVEMHHEALTEAVPGDNVGFNVKNVSVKELRRGYVAGDSKNNPPKGAADFTAQVIVLNHPGQISNGYTPVLDCHTAHIACKFHKIIEKCDRRTGKTTEMEPKAIKSGDAAIVTLVPSKPMCVEAFQEFPPLGRF

SEQ ID NO: 17769 - protein, 360 aa, Lasioglossum alphenum
ERERGITIDIALWKFETSKYYVTIIDAPGHRDFIKNMITGTSQADCAVLIVAAGTGEFEAGISKNGQTREHALLAFTLGVKQLIVGVNKMDSTEPPYSEARFEEIKKEVSSYIKKIGYNPAAVAFVPISGWHGDNMLEASSKMPWFKGWAVERKEGKGEGKCLIEALDAILPPSRPTDKALRLPLQDVYKIGGIGTVPVGRVETGLLKPGMVVTFAPAGLTTEVKSVEMHHEALTEAVPGDNVGFNVKNVSVKELRRGYVAGDSKNNPPKGAADFTAQVIVLNHPGQISNGYTPVLDCHTAHIACKFHKIIEKCDRRTGKTTEMEPKAIKSGDAAIVILVPSKPMCVEAFQEFPPLGRFA

SEQ ID NO: 17770 - protein, 378 aa, Enchytraeus sp. 'Enc'
QELGKGSFKYAWVLDKLKAERERGITIDIALWKFETPKYYVTIIDAPGHRDFIKNMITGTSQADCAVLIVAAGVGEFEAGISKNGQTREHALLAFTLGVKQLIVGVNKMDSTEPPFSEARYKEIQKEVSQYIKKIGYNPDAVPFVPISGWHGDNMLEPSAKMGWFKGWSATKADKKVYTGTTILEALDNVDVPKRPSDRPLRLPLQDVYKIGGIGTVPVGRVETGVIKPGMVVTFAPANVTTEVKSVEMHHTALDEAGPGDNVGFNVKNVSVKDIRRGNVAGDSKNDPPKETEEFKAQVIILNHPGQINAGYAPVVDCHTAHIACKFRDLLEKIDRRSGKKLEDNPPNVKSGDAAIVEMVPQKAMCVESFSEYAPLGR

SEQ ID NO: 17771 - protein, 416 aa, Cokeromyces recurvatus
GKSTTTGHLIYKCGGIDKRTIEKFEKEAAELGKGSFKYAWVLDKLKAERERGITIDIALWKFETPKYHVTVIDAPGHRDFIKNMITGTSQADCAILIIAGGTGEFEAGISKDGQTREHALLAFTLGVRQLIVAINKMDTTKWSEARYNEIVKEVSNFIKKIGFNPKSVPFVPISGWHGDNMLDESTNMPWFKGWTKETKAGSKTGKTLLEAIDAIDPPTRPVDKPLRLPLQDVYKIGGIGTVPVGRVETGVIKAGMVVTFAPSAVTTEVKSVEMHHETLAEGLPGDNVGFNVKNVSVKDIRRGNVCSDSKNDPAKESASFTAQVIILNHPGQISAGYAPVLDCHTAHIACKFAELIEKIDRRSGKKLEDAPKFVKSGDSAIVKMVPSKPMCVEAYTEYPPLGRFAVRDMRQTVAVG

SEQ ID NO: 17772 - protein, 417 aa, Saksenaea vasiformis
GKSTTTGHLIYKCGGIDKRTIEKFEKEAAELGKGSFKYAWVLDKLKAERERGITIDIALWKFETPKYHVTVIDAPGHRDFIKNMITGTSQADCGILIIAAGTGEFEAGISKDGQTREHALLAFTLGVRQLIVAINKMDSTKWSEARYNEIVKEVSAFIKKIGFNPKAVPFVPISGWHGDNMLEESTNMPWFKGWTKETKAGSKTGKTLLEAIDNIEPPVRPSDKPLRLPLQDVYKIGGIGTVPVGRVETGVIKAGMVVTFAPANVTTEVKSVEMHHEQLAEGVPGDNVGFNVKNVSVKDIRRGNVCSDSKNDPAKESASFTAQVIVLNHPGQIGAGYAPVLDCHTAHIACKFAELLEKIDRRSGKSLESSPKYVKSGDSAIVKMVPSKPMCVESYTEYPPLGRFAVRDMRQTVAVGV

SEQ ID NO: 17773 - protein, 417 aa, Rhizopus microsporus var. rhizopodiformis
GKSTTTGHLIYKCGGIDKRTIEKFEKEAAELGKGSFKYAWVLDKLKAERERGITIDIALWKFETPKYNVTVIDAPGHRDFIKNMITGTSQADCGILIIAAGTGEFEAGISKDGQTREHALLAFTLGVRQLIVAINKMDTTKWSEARYNEIVKEVSSFIKKIGYNPKSVPFVPISGWHGDNMLEESTNMPWFKGWTKETKAGNKTGKTLLEAIDNIDPPTRPVDKPLRLPLQDVYKIGGIGTVPVGRVETGVIKAGMVVTFAPANVTTEVKSVEMHHETLAEGLPGDNVGFNVKNVSVKDIRRGNVCSDSKNDPAKESGSFTAQVIILNHPGQIGAGYAPVLDCHTAHIACKFAELIEKIDRRSGKKLEDAPKFVKSGDSAIVKMVPSKPMCVEAYTDYPPLGRFAVRDMRQTVAVGV

SEQ ID NO: 17774 - protein, 426 aa, Absidia coerulea
VVVIGHVDSGKSTTTGHLIYKCGGIDKRTIEKFEKEAAELGKGSFKYAWVLDKLKAERERGITIDIALWKFETPKYHVTVIDAPGHRDFIKNMITGTSQADCGILIIAAGTGEFEAGISKDGQTREHALLAFTLGVRQLIVAINKMDSTKWSEQRFNEIIKEVSGFIKKIGFNPKSVPFVPISGWHGATMLKESTNMPWSKGWTKEPKAGAKSGKTLLDAIDAIDPPQRPSDKPLRLPLQDVYKIGGIGTVPVGRVETGVIKAGMVVTFAPANVTTEVKSVEMHHEQLVEGLPGDNVGFNVKNVSVKDIRRGNVCSDSKNDPAKEAGSFTAQVIVLNHPGQIGAGYAPVLDCHTAHIACKFAELLEKIDRRSGKKLEDAPKFVKSGDSAIVKMIPSKPMCVEAYTDYPPLGRFAVRDMRQTVAVGV

SEQ ID NO: 17775 - protein, 403 aa, Mucor amphibiorum
GKSTTTGHLIYKCGGIDKRTIEKFEKEAAELGKGSFKYAWVLDKLKAERERGITIDIALWKFETPKYNVTVIDAPGHRDFIKNMITGTSQADCAILIIAGGTGEFEAGISKDGQTREHALLAFTLGVRQLIVAINKMDTTKWSEARYNEIVKEVSSFIKKIGFNPKSVPFVPISGWHGDNMLDESTNMPWFKGWTKETKAGSKTGKTLLEAIDAIEPPTRPVDKPLRLPLQDVYKIGGIGTVPVGRVETGVIKAGMVVTFAPAAVTTEVKSVEMHHETLTEGLPGDNVGFNVKNVSVKDIRRGNVCSDSKNDPAKESASFTAQVIILNHPGQISAGYAPVLDCHTAHIACKFAELIEKIDRRSGKKLEDAPKFVKSGDSAIVKMIPSKPMCVEAYTDYPPLGR

SEQ ID NO: 17776 - protein, 402 aa, Mucor ramosissimus
GKSTTTGHLIYKCGGIDKRTIEKFEKEAAELGKGSFKYAWVLDKLKAERERGITIDIALWKFETPKYNVTVIDAPGHRDFIKNMITGTSQADCAILIIAGGTGEFEAGISKDGQTREHALLAFTLGVRQLIVAINKMDTTKWSQDRYNEIVKEVSGFIKKIGFNPKSVPFVPISGWHGDNMLDESTNMPWFKGWTKETKAGSKTGKTLLEAIDSIEPPVRPSDKPLRLPLQDVYKIGGIGTVPVGRVETGTIKAGMVVNFAPAAVTTEVKSVEMHHETLSEGLPGDNVGFNVKNVSVKDIRRGNVCSDSKNDPAKESASFTAQVIILNHPGQISAGYAPVLDCHTAHIACKFSELIEKIDRRSGKKMEDAPKFVKSGDSAIVKMVPSKPMCVEAYTDYPPLG

SEQ ID NO: 17777 - protein, 365 aa, Rhizomucor variabilis
GKSTTTGHLIYKCGGIDKRTIEKFEKEAAELGKGSFKYAWVLDKLKAERERGITIDIALWKFETPKYNVTVIDAPGHRDFIKNMITGTSQADCAILIIAGGTGEFEAGISKDGQTREHALLAFTLGVRQLIVAINKMDTTKWSEARYTEIVKEVSSFIKKIGFNPKSVPFVPISGWHGDNMLDESKNMPWFKGWNKETKAGSKTGKTLLEAIDAIEPPTRPSDKPLRLPLQDVYKIGGIGTVPVGRVETGTIKAGMVVNFAPAAVTTEVKSVEMHHETLAEGLPGDNVGFNVKNVSVKDIRRGNVCSDSKNDPAKESASFLAQVIILNHPGQISAGYAPVLDCHTAHIACKFSELVEKIDRRSGK

SEQ ID NO: 17778 - protein, 426 aa, Apophysomyces elegans
VVVIGHVDSGKPTTTGHLIYKCGGIDKRTIEKFEKEAAELGKGSFKYAWVLDKLKAERERGITIDIALWKFETPKYHVTVIDAPGHRDFIKNMITGTSQADCGILIIAAGTGEFEAGISKDGQTREHALLAFTLGVRQLIVAINKMDSTKWSEARYNEIVKEVSAFIKKIGFNPKAVPFVPISGWHGDNMLEESNNMPWFKGWTKETKAGAKTGKTLLEAIDNIEPPVRPSDKPLRLPLQDVYKIGGIGTVPVGRVETGVIKAGMVVTFAPANVTTEVKSVEMHHEQLAEGVPGDNVGFNVKNVSVKDIRRGNVCSDSKNDPAKESASFTAQVIVLNHPGQIGAGYAPVLDCHTAHIACKFAELLEKIDRRSGKSLEASPKFVKSGDSAIVKMVPSKPMCVESYTEYPPLGRFAVRDMRQTVAVGV

SEQ ID NO: 17779 - protein, 462 aa, Gallus gallus
MGKEKTHINIVVIGHVDSGKSTTTGHLIYKCGGIDKRTIEKFEKEAAEMGKGSFKYAWVLDKLKAERERGITIDISLWKFETSKYYVTIIDAPGHRDFIKNMITGTSQADCAVLIVAAGVGEFEAGISKNGQTREHALLAYTLGVKQLIVGVNKMDSTEPPYSQKRYEEIVKEVSTYIKKIGYNPDTVAFVPISGWNGDNMLEPSSNMPWFKGWKVTRKDGNASGTTLLEALDCILPPTRPTDKPLRLPLQDVYKIGGIGTVPVGRVETGVLKPGMVVTFAPVNVTTEVKSVEMHHEALSEALPGDNVGFNVKNVSVKDVRRGNVAGDSKNDPPMEAAGFTAQVIILNHPGQISAGYAPVLDCHTAHIACKFAELKEKIDRRSGKKLEDGPKFLKSGDAAIVDMIPGKPMCVESFSDYPPLGRFAVRDMRQTVAVGVIKAVDKKAGGAGKVTKSAQKAQKAK

SEQ ID NO: 17780 - protein, 447 aa, Suaeda japonica
MGKEKIHISLVVIGHVDSGKSTTTGHLIYKLGGIDKRVIERFEKEAAEMNKRSFKYAWVLDKLKAERERGITIDIALWKFETNKYYCTVIDAPGHRDFIKNMITGTSQADCAILIIDSTTGGFEAGISKDGQTREHALLSFTLGVRQMICCCNKMDATTPKYSKARYDEIVKEVSSYLKKVGYNPEKVPFVPISGFEGDNMIERSTNLDWYKGPTLLEALDMINEPKRPSDKPLRLPIQDVYKIGGIGTVPVGRIETGVLKPNMVVTFGPTGLTTEVKSVEMHHESLPEALPGDNVGFNVKNVSIKDLKRGYVASDSKNDPAKGASSFTAQVIIMNHPGQIGNGYAPVLDCHTSHIAVKFAELLTKIDRRSGKELEKEPKFLKNGDAGMVKMIPTKPMVVETFAEYSPLGRFAVRDMRQTVAVGVIKSVDKKEPTSAKVTKAAMKKK

SEQ ID NO: 17781 - protein, 365 aa, Mucor hiemalis f. hiemalis
GKSTTTGHLIYKCGGIDKRTIEKFEKEAAELGKGSFKYAWVLDKLKAERERGITIDIALWKFETPKFNVTVIDAPGHRDFIKNMITGTSQADCAILIIAGGTGEFEAGISKDGQTREHALLAFTLGVRQLIVAINKMDTTKWSESRYTEIVKEVSSFIKKIGFNPKSVPFVPISGWHGDNMLEESKNMGWFKGWNKETKAGSKTGKTLLEAIDAIEPPTRPSDKPLRLPLQDVYKIGGIGTVPVGRVETGVIKAGMVVNFAPAAVTTEVKSVEMHHETLTEGLPGDNVGFNVKNVSVKDIRRGNVCSDSKNDPAKESGSFLAQVIILNHPGQISAGYAPVLDCHTAHIACKFAELVEKIDRRSGK

SEQ ID NO: 17782 - protein, 359 aa, Boreus brumalis
ERERGITIDIALWKFETARYYVTIIDAPGHRDFIKNMITGTSQADCAVLIVAAGTGEFEAGISKNGQTREHALLAFTLGVKQLIVGVNKMDSTEPPYSESRFEEIKKEVSSYIKKIGYNPMTVPFVPISGWHGDNMLEPSAKMSWFKGWAVERKEGKADGKCLIEALDAIVPPSRPTDKALRLPLQDVYKIGGIGTVPVGRVETGIIKPGTVVVFAPANIVTEVKSVEMHHEALQEAVPGDNVGFNVKNVSVKELKRGYVAGDTKVNPPKGAADFTAQVIVLNHPGQISNGYTPVLDCHTAHIACKFAEIKEKVDRRTGKSTEDNPKAIKSGDAAIVNLVPSKPMCVESFSEFPPLGRF

SEQ ID NO: 17783 - protein, 377 aa, Semibalanus balanoides
QQMGKGSFKYAWVLDKLKAERERGITIDIALWKFETAKYYVTIIDAPGHRDFIKNMITGTSQADCAVLIVASGVGEFEAGISKNGQTREHALLAYTLGVKQMIIGVNKMDTTEPPYSEARFKEIVSEVSAYIKKVGYDPKTVAFVPISGWHGDNMLEASEKMPWYKGWETTRKSGSGSGKTLLEALDNIEPPSRPSDKPLRLPLQDVYKIGGIGTVPVGRVETGTIKPGMIVCFAPSGLTTEVKSVEMHHESLPEAFPGDNVGFNVKNVSVKELRRGYVASDSKNKPATGCEDFTAQVIILNHPGQVSAGYTPVLDCHTAHIACRFADLQQKVDRRTGKVTEEAPKSLKSGDAAIIKLIPSKPMVVETFTDFPPLGR

SEQ ID NO: 17784 - protein, 413 aa, Abagrotis alternata
HVDSGKSTTTGHLIYKCGGIDKRTIEKFEKEAQEMGKGSFKYAWVLDKLKAERERGITIDIALWKFETARYYVTIIDAPGHRDFIKNMITGTSQADCAVLIVAAGTGEFEAGISKNGQTREHALLAFTLGVKQLIVGVNKMDSTEPPYSEPRFEEIKKEVSSYIKKIGYNPAAVAFVPISGWHGDNMLEPSSKMPWFKGWYVERKEGKAEGKCLIEALDAILPPARPTDKALRLPLQDVYKIGGIGTVPVGRVETGILKPGTIVVFAPANITTEVKSVEMHHEALQEAVPGDNVGFNVKNVSVKELRRGYVAGDSKNNPPKGAADFTAQVIVLNHPGQISNGYTPVLDCHTAHIACKFAEIKEKVDRRTGKSTEDNPKSIKSGDAAIVNLVPSKPLCVESFQEFPPLGRFAVR

SEQ ID NO: 17785 - protein, 413 aa, Caenurgina crassiuscula
HVDSGKSTTTGHLIYKCGGIDKRTIEKFEKEAQEMGKGSFKYAWVLDKLKAERERGITIDIALWKFETAKYYVTIIDAPGHRDFIKNMITGTSQADCAVLIVAAGTGEFEAGISKNGQTREHALLAFTLGVKQLIVGVNKMDSTEPPYSEPRFEEIKKEVSSYIKKIGYNPAAVAFVPISGWHGDNMLEASTKMPWFKGWMVERKEGKAEGKCLIEALDAILPPARPTDKPLRLPLQDVYKIGGIGTVPVGRVETGILKPGTIVVFAPANITTEVKSVEMHHEALQEAVPGDNVGFNVKNVSVKELRRGYVAGDSKNNPPKGAADFTAQVIVLNHPGQISNGYTPVLDCHTAHIACKFAEIKEKVDRRTGKSTEENPKSIKSGDAAIVNLVPSKPLCVESFQEFPPLGRFAVR

SEQ ID NO: 17786 - protein, 413 aa, Chrysanympha formosa
HVDSGKSTTTGHLIYKCGGIDKRTIEKFEKEAQEMGKGSFKYAWVLDKLKAERERGITIDIALWKFETGKYYVTIIDAPGHRDFIKNMITGTSQADCAVLIVAAGTGEFEAGISKNGQTREHALLAFTLGVKQLIVGVNKMDSTEPPYNEGRFEEIKKEVSSYIKKIGYNPAAVAFVPISGWHGDNMLEPSTKMPWFKGWMVERKEGKAEGKCLIEALDAILPPARPTDKALRLPLQDVYKIGGIGTVPVGRVETGILKPGTIVVFAPANITTEVKSVEMHHEALQEAVPGDNVGFNVKNVSVKELRRGYVAGDSKNNPPKGAADFTAQVIVLNHPGQISNGYTPVLDCHTAHIACKFAEIKEKVDRRTGKSTETNPKSIKSGDAAIVNLVPSKPLCVESFQEFPPLGRFAVR

SEQ ID NO: 17787 - protein, 413 aa, Cisseps fulvicollis
HVDSGKSTTTGHLIYKCGGIDKRTIEKFEKEAQEMGKGSFKYAWVLDKLKAERERGITIDIALWKFETSKYYVTIIDAPGHRDFIKNMITGTSQADCAVLIVAAGTGEFEAGISKNGQTREHALLAFTLGVKQLIVGVNKMDSTEPPYSESRFEEIKKEVSSYIKKIGYNPAAVAFVPISGWHGDNMLEASTKMPWFKGWNVERKEGKAEGKCLIEALDAILPPARPTDKALRLPLQDVYKIGGIGTVPVGRVETGILKPGTIVVFAPANITTEVKSVEMHHEALQEAVPGDNVGFNVKNVSVKELRRGYVAGDSKNNPPKGAADFTAQVIVLNHPGQISNGYTPVLDCHTAHIACKFAEIKEKVDRRTGKSTEDNPKSIKSGDAAIVNLVPSKPLCVESFQEFPPLGRFAVR

SEQ ID NO: 17788 - protein, 413 aa, Gluphisia septentrionis
HVDSGKSTTTGHLIYKCGGIDKRTIEKFEKEAQEMGKGSFKYAWVLDKLKAERERGITIDIALWKFETAKYYVTIIDAPGHRDFIKNMITGTSQADCAVLIVAAGTGEFEAGISKNGQTREHALLAFTLGVKQLIVGVNKMDSTEPPYSESRFEEIKKEVSSYIKKIGYNPAAVAFVPISGWHGDNMLEASTKMPWFKGWLVERKEGKAEGKCLIEALDAILPPARPTDKALRLPLQDVYKIGGIGTVPVGRVETGVLKPGTIVVFAPANITTEVKSVEMHHEALQEAVPGDNVGFNVKNVSVKELRRGYVAGDSKNNPPKGASDFTAQVIVLNHPGQISNGYTPVLDCHTAHIACKFAEIKEKVDRRTGKSTEDNPKSIKSGDAAIVNLVPSKPLCVESFQEFPPLGRFAVR

SEQ ID NO: 17789 - protein, 413 aa, Homophoberia sp.
  unsure (1)..(413): unsure at all Xaa locations
HVDSGKSTTTGHLIYKCGGIDKRTIEKFEKEAQEMGKGSFKYAWVLDKLKAERERGITIDIALWKFETAKYYVTIIDAPGHRDFIKNMITGTSQADCAVLIVAAGTGEFEAGISKNGQTREHALLAFTLGVKQLIVGVNKMDSTEPPYSESRFEEIKKEVSSYIKKIGYNPAAVAFVPISGWHGDNMLEXSTKMPWFKGWNVERKEGKAEGKCLIEALDAILPPARPTDKALRLPLQDVYKIGGIGTVPVGRVETGVLKPGTIIVFAPANITTEVKSVEMHHEALQEAVPGDNVGFNVKNVSVKELRRGYVAGDSKNNPPKGAADFTAQVIVLNHPGQISNGYTPVLDCHTAHIACKFAEIKEKVDRRTGKSTEDNPKSIKSGDAAIVNLVPSKPLCVESFQEFPPLGRFAVR

SEQ ID NO: 17790 - protein, 413 aa, Hypena scabra
HVDSGKSTTTGHLIYKCGGIDKRTIEKFEKEAQEMGKGSFKYAWVLDKLKAERERGITIDIALWKFETAKYYVTIIDAPGHRDFIKNMITGTSQADCAVLIVAAGTGEFEAGISKNGQTREHALLAFTLGVKQLIVGVNKMDSTEPPYSEPRFEEIKKEVSSYIKKIGYNPAAVAFVPISGWHGDNMLEASTKMPWFKGWLVERKEGKAEGKCLIEALDAILPPARPTDKPLRLPLQDVYKIGGIGTVPVGRVETGVLKPGTIVVFAPANITTEVKSVEMHHEALQEAVPGDNVGFNVKNVSVKELRRGYVAGDSKNNPPKGAADFTAQVIVLNHPGQISNGYTPVLDCHTAHIACKFAEIKEKVDRRTGKSTEDNPKSIKSGDAAIVNLVPSKPLCVESFQEFPPLGRFAVR

SEQ ID NO: 17791 - protein, 413 aa, Idia aemula
HVDSGKSTTTGHLIYKCGGIDKRTIEKFEKEAQEMGKGSFKYAWVLDKLKAERERGITIDIALWKFETAKYYVTIIDAPGHRDFIKNMITGTSQADCAVLIVAAGTGEFEAGISKNGQTREHALLAFTLGVKQLIVGVNKMDSTEPPYSEPRFEEIKKEVSSYIKKIGYNPAAVAFVPISGWHGDNMLEASTKMPWFKGWNVERKEGKAEGKCLIEALDAILPPARPTDKALRLPLQDVYKIGGIGTVPVGRVETGILKPGTIVVFAPANITTEVKSVEMHHEALQEAVPGDNVGFNVKNVSVKELRRGYVAGDSKNNPPKGAADFTAQVIVLNHPGQISNGYTPVLDCHTAHIACKFAEIKEKVDRRTGKSTEDNPKSIKSGDAAIVNLVPSKPLCVESFQEFPPLGRFAVR

SEQ ID NO: 17792 - protein, 413 aa, Lophoptera sp.
HVDSGKSTTTGHLIYKCGGIDKRTIEKFEKEAQEMGKGSFKYAWVLDKLKAERERGITIDIALWKFETAKYYVTIIDAPGHRDFIKNMITGTSQADCAVLIVAAGTGEFEAGISKNGQTREHALLAFTLGVKQLIVGVNKMDSTEPPYSESRFEEIKKEVSSYIKKIGYNPAAVAFVPISGWHGDNMLEASTKMPWFKGWLVERKEGKAEGKCLIEALDAILPPARPTDKPLRLPLQDVYKIGGIGTVPVGRVETGILKPGTIVVFAPAQITTEVKSVEMHHEALQEAVPGDNVGFNVKNVSVKELRRGYVAGDSKNNPPKGAADFTAQVIVLNHPGQISNGYTPVLDCHTAHIACKFAEIKEKVDRRTGKSTEDNPKSIKSGDAAIVNLVPSKPLCVESFQEFPPLGRFAVR

SEQ ID NO: 17793 - protein, 413 aa, Nerice bidentata
HVDSGKSTTTGHLIYKCGGIDKRTIEKFEKEAQEMGKGSFKYAWVLDKLKAERERGITIDIALWKFETAKYYVTIIDAPGHRDFIKNMITGTSQADCAVLIVAAGTGEFEAGISKNGQTREHALLAFTLGVKQLIVGVNKMDSTEPPYSESRFEEIKKEVSSYIKKIGYNPAAVAFVPISGWHGDNMLEASTKMPWFKGWQVERKEGKADGKCLIEALDAILPPARPTDKALRLPLQDVYKIGGIGTVPVGRVETGILKPGTIVVFAPANITTEVKSVEMHHEALQEAVPGDNVGFNVKNVSVKELRRGYVAGDSKNNPPKGAADFTAQVIVLNHPGQISNGYTPVLDCHTAHIACKFAEIKEKVDRRTGKSTEDNPKSIKSGDAAIVNLVPSKPLCVESFQEFPPLGRFAVR

SEQ ID NO: 17794 - protein, 413 aa, Orgyia leucostigma
HVDSGKSTTTGHLIYKCGGIDKRTIEKFEKEAQEMGKGSFKYAWVLDKLKAERERGITIDIALWKFETSKYYVTIIDAPGHRDFIKNMITGTSQADCAVLIVAAGTGEFEAGISKNGQTREHALLAFTLGVKQLIVGVNKMDSTEPPYSEPRFEEIKKEVSSYIKKIGYNPAAVAFVPISGWHGDNMLEPSTKMPWFKGWLVERKEGKAEGKCLIEALDAILPPARPTDKPLRLPLQDVYKIGGIGTVPVGRVETGILKPGTIVVFAPANITTEVKSVEMHHEALQEAVPGDNVGFNVKNVSVKELRRGYVAGDSKNNPPKGAADFTAQVIVLNHPGQISNGYTPVLDCHTAHIACKFAEIKEKVDRRTGKSTEENPKSIKSGDAAIVNLVPSKPLCVESFQEFPPLGRFAVR

SEQ ID NO: 17795 - protein, 413 aa, Papaipema sp.
HVDSGKSTTTGHLIYKCGGIDKRTIEKFEKEAQEMGKGSFKYAWVLDKLKAERERGITIDIALWKFETAKYYVTIIDAPGHRDFIKNMITGTSQADCAVLIVAAGTGEFEAGISKNGQTREHALLAFTLGVKQLIVGVNKMDSTEPPYSESRFEEIKKEVSSYIKKIGYNPLAVAFVPISGWHGDNMLEPSTKMPWFKGWNVERKEGKAEGKCLIEALDAILPPARPTDKALRLPLQDVYKIGGIGTVPVGRVETGILKPGTIVVFAPANITTEVKSVEMHHEALQEAVPGDNVGFNVKNVSVKELRRGYVAGDSKNNPPKGAADFTAQVIVLNHPGQISNGYTPVLDCHTAHIACKFAEIKEKVDRRTGKSTEDNPKSIKSGDAAIVNLVPSKPLCVESFQEFPPLGRFAVR

SEQ ID NO: 17796 - protein, 413 aa, Triocnemis saporis
HVDSGKSTTTGHLIYKCGGIDKRTIEKFEKEAQEMGKGSFKYAWVLDKLKAERERGITIDIALWKFETAKYYVTIIDAPGHRDFIKNMITGTSQADCAVLIVAAGTGEFEAGISKNGQTREHALLAFTLGVKQLIVGVNKMDSTEPPYSESRFEEIKKEVSSYIKKIGYNPAAVAFVPISGWHGDNMLEPSTKMPWFKGWAVERKEGKAEGKCLIEALDAILPPARPTDKALRLPLQDVYKIGGIGTVPVGRVETGILKPGTIVVFAPANITTEVKSVEMHHEALQEAVPGDNVGFNVKNVSVKELRRGYVAGDSKNNPPKGAADFTAQVIVLNHPGQISNGYTPVLDCHTAHIACKFAEIKEKVDRRTGKSTEDNPKSIKSGDAAIVNLVPSKPLCVESFQEFPPLGRFAVR

SEQ ID NO: 17797 - protein, 413 aa, Hypsoropha sp.
HVDSGKSTTTGHLIYKCGGIDKRTIEKFEKEAQEMGKGSFKYAWVLDKLKAERERGITIDIALWKFETSKYYVTIIDAPGHRDFIKNMITGTSQADCAVLIVAAGTGEFEAGISKNGQTREHALLAFTLGVKQLIVGVNKMDSTEPPYSEPRFEEIKKEVSSYIKKIGYNPAAVAFVPISGWHGDNMLEASTKMPWFKGWLVERKEGKAEGKCLIEALDAILPPARPTDKPLRLPLQDVYKIGGIGTVPVGRVETGILKPGTIVVFAPANITTEVKSVEMHHEALQEAVPGDNVGFNVKNVSVKELRRGYVAGDSKNNPPKGAADFTAQVIVLNHPGQISNGYTPVLDCHTAHIACKFAEIKEKVDRRTGKSTEDNPKSIKSGDAAIVNLVPSKPLCVESFQEFPPLGRFAVR

SEQ ID NO: 17798 - protein, 331 aa, Troides helena
KSTTTGHLIYKCGGIDKRTIEKFEKEAQEMGKGSFKYAWVLDKLKAERERGITIDIALWKFETSKYYVTIIDAPGHRDFIKNMITGTSQADCAVLIVAAGTGEFEAGISKNGQTREHALLAFTLGVKQLIVGVNKMDSTEPPYSEPRFEEIKKEVSSYIKKIGYNPAAVAFVPISGWHGDNMLEPSTKMPWFKGWNVERKEGKAEGKCLIEALDAILPPARPTDKPLRLPLQDVYKIGGIGTVPVGRVETGVLKPGTIVVFAPANITTEVKSVEMHHEALQEAVPGDNVGFNVKNVSVKELRRGYVAGDSKNNPPRGASDFTAQVIVLNHP

SEQ ID NO: 17799 - protein, 496 aa, Homo sapiens
SFHTPQKGPPIEDAIASSDVLETASKSANPPHTIQASEEQSSTPAPVKKSGKLRQQIDVKAELEKRQGGKQLLNLVVIGHVDAGKSTLMGHMLYLLGNINKRTMHKYEQESKKAGKASFAYAWVLDETGEERERGVTMDVGMTKFETTTKVITLMDAPGHKDFIPNMITGAAQADVAVLVVDASRGEFEAGFETGGQTREHGLLVRSLGVTQLAVAVNKMDQVNWQQERFQEITGKLGHFLKQAGFKESDVGFIPTSGLSGENLITRSQSSELTKWYKGLCLLEQIDSFKPPQRSIDKPFRLCVSDVFKDQGSGFCITGKIEAGYIQTGDRLLAMPPNETCTVKGITLHDEPVDWAAAGDHVSLTLVGMDIIKINVGCIFCGPKVPIKACTRFRARILIFNIEIPITKGFPVLLHYQTVSEPAVIKRLISVLNKSTGEVTKKKPKFLTKGQNALVELQTQRPIALELYKDFKELGRFMLRYGGSTIAAGVVTEIKE

SEQ ID NO: 17800 - protein, 684 aa, Homo sapiens
MARHRNVRGYNYDEDFEDDDLYGQSVEDDYCISPSTAAQFIYSRRDKPSVEPVEEYDYEDLKESSNSVSNHQLSGFDQARLYSCLDHMREVLGDAVPDEILIEAVLKNKFDVQKALSGVLEQDRVQSLKDKNEATVSTGKIAKGKPVDSQTSRSESEIVPKVAKMTVSGKKQTMGFEVPGVSSEENGHSFHTPQKGPPIEDAIASSDVLETASKSANPPHTIQASEEQSSTPAPVKKSGKLRQQIDVKAELEKRQGGKQLLNLVVIGHVDAGKSTLMGHMLYLLGNINKRTMHKYEQESKKAGKASFAYAWVLDETGEERERGVTMDVGMTKFETTTKVITLMDAPGHKDFIPNMITGAAQADVAVLVVDASRGEFEAGFETGGQTREHGLLVRSLGVTQLAVAVNKMDQVNWQQERFQEITGKLGHFLKQAGFKESDVGFIPTSGLSGENLITRSQSSELTKWYKGLCLLEQIDSFKPPQRSIDKPFRLCVSDVFKDQGSGFCITGKIEAGYIQTGDRLLAMPPNETCTVKGITLHDEPVDWAAAGDHVSLTLVGMDIIKINVGCIFCGPKVPIKACTRFRARILIFNIEIPITKGFPVLLHYQTVSEPAVIKRLISVLNKSTGEVTKKKPKFLTKGQNALVELQTQRPIALELYKDFKELGRFMLRYGGSTIAAGVVTEIKE

SEQ ID NO: 17801 - protein, 400 aa, Malva pusilla
HENKRSFKYAWVLDKLKAERERGITIDIALWKFETTKYYCTVIDAPGHRDFIKNMITGTSQADCAVLIIDSTLVGFEAGISKDGQPREHALFAFTLGVKQMICLSHKMDACSPKYSKGRYDEIVREVSSYLKKLGYNPDKIPFVPISGFEGDNMIERSTNLDWYKGPTLLEALDQINEPKRPSDKPLRLPLQDVYKIGGIGTVPVGRVETGVLKPGMVVTFGPTGLTTEVKSVEMHHESLPEALPGDNVGFNVKNVAVKDIKRGFVASNSKDDPAKEAANFTSQVIIMNHPGQIGNGYAPVLDCHTSHIAVKFAEILPRIDQGSGKRNSEEPKFLKNGDAGMVKMIPTKPMVVETFSAHSPVCRFAVRDMRQTVAVGVIKSVEKKDPTGAKITKAAAKKK

SEQ ID NO: 17802 - protein, 364 aa, Dolophilodes distinctus
  unsure (1)..(364): unsure at all Xaa locations
MGXGSFRYAWVLDKLKAERERGITIDIALWKFETAKYYVTIIDAPGHRDFIKNMITGTSQADCAVLIVAAGTGEFEAGISKNGQTREHALLAFTLGVKQLIVGVNKMDSTEPAFSEARFEEIKKEVSSYIKKIGYNPTAVAFVPISGWHGDNMLEVSAKMPWFKGWTVERKEGKAEGKCLIEALDAIAPPSRPTDKALRLPLQDVYKIGGIGTVPVGRVETGILKPGTIVVFAPANLTTEVKSVEMHHEALQEAVPGDNVGFNVKNVSVKELRRGYVAGDTKVNPPKGTADFTAQVIVLNHPGQISNGYTPVLDCHTAHIACKFAEIQQKVDRRTGKSTEEFPKAIKSGDAAIVNLVPTKPMCV

SEQ ID NO: 17803 - protein, 350 aa, Mesostoma lingua
HLIFKCGGIDKRTIEKFEKEAADMGKGSFKYAWVLDKLKAERERGITIDIALWKFETSNYYVTVIDAPGHRDFIKNMITGTSQADCAILIVAAGVGEFEAGISKDGQTREHALLAYTLGVKQMIVGVNKIDSTNPPYSEDRYNEIKKEVSTYIKKVGYNPDNVAFVPISGWHGDNMLEASPNMGWFKGWEIERKKAGSADTVSVKGVTLLDALDAIEPPSRPTDKPLRLPLQDVSKIGGIGTVPVGRVETGIIKPGMVVTFAPQGLTTEVKSVEMHHESLPEAVPGDNVGFNVKNVSVKEIRRGNVCGDSKNDPPRGAEDFVAQVIVMNHPGQICPGYSPVLDCHTAHIA

SEQ ID NO: 17804 - protein, 196 aa, Methanopyrus kandleri AV19
MRRYVEPGKFVLPGDKITVAEAFYPGPGTYEDGGVVRAAITGRVEVDLEEREVRVEPYVDTPPKLKRGASVIGRVQSVKEQVVLVKICFVDDRTDREPPTSGVGGIHISKVRDAYVEDLADEFQPGDIVRARVVSTKMPVQLSTVGKEYGVVLAYCTRCRSELEKVKGRTLRCPVCGHTETRKVAAGYLREAESDA

SEQ ID NO: 17805 - protein, 292 aa, Saccharomyces cerevisiae; identical to SEQ ID NO: 497

SEQ ID NO: 17806 - protein, 195 aa, Plasmodium falciparum
MNFEDDDDIVIPGEFLGLQAEYINGNNTYLLKDEIRSSILGQKIINKNNDKKTIISVYNLKPPSLYLPKIGDIVICKVQRVSFHMIYCYILSSHNIFTKNALKGFILKSDIHINEGELGDNFICFKQGDIIKAKVLSIGQYSSYKLSTVGSELGVIAAFNQKGEILRPVAWNLVLNINDMTFERRKASNDFSLLL

SEQ ID NO: 17807 - protein, 250 aa, Schistosoma japonicum
MLGNRIVVPGDLICCSNATNKSGTSTYCRSGNIFSSAFGYIKEESHADGSKTVSVEPLKTAGIVPYAGAIVLAKVCSITGRFVRCDIVAVGDVYLSGPFKGLIRREDIRATQRDQAEPGCCFRPGDIVRARVINLLGPGAYTDTGSFMSSTSSQTLSTLLTTQAISCSVAATNDANISGYNSICLLSTAEPDLGVVLGFGRSPDNGFLELFGSTSGCPLVPVGWTEMLCPHTLTRYPRKVAECQMNLLPS

SEQ ID NO: 17808 - protein, 208 aa, Caenorhabditis elegans
MLAETLVAPGDKVLDAIGEYRMGKGLYEANRRIFASVAGFVNVYGFRDKSDNLVQVIEVRRSEDQLDNELLPFHGAIVTAKVMAVGLRFAKCDIISIGDKVYKKRFSALLPKKKLRPLEPELSEPFKNFVRPNDYILAKVCEDAEIKDKFVLSIAEDELGVVLCRGRFGEPMQKVDWNTVVSTRTGKTEPRKMAKVPQKCTLPTQSVA

SEQ ID NO: 17809 - protein, 195 aa, Plasmodium yoelii yoelii
MMDNIVLPGEVVGNLNNYISGNNTYILNNEIRSTILGKKNISINNENKEIINIDVIKDYTPLPQVGDLVICKVYRVTFNMIYCNILLTNNKPLKNSLKGYINKSDIHIYEGDLGDNFDCFKQGDIIKAKVLSIGQHSSYKLSTVGSDLGVIIALSEKGDILQPAAWNLMVNLSDMSFEQRKVSNEFSFPCNAYTS

SEQ ID NO: 17810 - protein, 291 aa, Mus musculus
MASVALSEAEKVYIVHGVQEDLRVDGRGCEDYRCVEVETDVVSNTSGSARVKLGHTDILVGVKAEMGTPKLEKPNEGYLEFFVDCSANATPEFEGRGGDDLGTEIANTLYRIFNNKSSVDLRSLCISPREHCWVLYVDVLLLECGGNLFDAISIAVKAALFNTRIPRVRVLEDEEGAKDIELSDDPYDCIRLSVENVPCIVTLCKIGCRHVVDATLQEEACSLASLLVSVTSKGVVTCMRKVGKGSLDPESIFEMMESSKRVGKVLHVSLQSLLHKEESLGPKRPRVGFLG

SEQ ID NO: 17811 - protein, 291 aa, Mus musculus
MASVALSEAEKVYIVHGVQEDLRVDGRGCEVYRCVEVETDVVSNTSGSARVKLGHTDILVGVKAEMGTPKLEKPNEGYLEFFVDCSANATPEFEGRGGDDLGTEMLTPSTGIFNNKSSVDLRSLCISPREHCWVLYVDVLLLECGGNLFDAISIAVKAALFNTRIPRVRVLEDEEGAKDIELSDDPYDCIRLSVENVPCIVTLCKIGCRHVVDATLQEEACSLASLLVSVTSKGVVTCMRKVGKGSLDPESIFEMMESSKRVGKVLHVSLQSLLHKEESLGPKRPRVGFLG

SEQ ID NO: 17812 - protein, 320 aa, Rattus norvegicus
MASVSLSEAEKVYIVHGVQVSVAAEDLRVDGRGCEDYRCVEVETDVVSNTSGSARVKLGHTDILVGVKAEMGTPKLERPSEGYLEFFVDCSANATPEFEGRGGDDLGTEIANTLYRIFNNKSSVDLRSLCISPREHCWVLYVDVLLLECGGNLFDAISIAVKAALFNTRIPRVRVLEDEEGSKDIELSDDPYDCIRLSVENVPCIVTLCKIGCRHVVDATLQEEACSLASLLVSVTSKGVVTCMRKVGKGSLDPESIFEMMEQLANNPVQGLALAPEYLYLGDCCQSSKRVGKVLHMSLQSLLHKEESLGPKRPKVGFLG

SEQ ID NO: 17813 - protein, 275 aa, Sulfolobus tokodaii
MSITPSNQNITSLLKKESILNALERGIRLDGRKNSDYRPISVTLNYAKKAEGSALVKLGDTMVLAGVKLEEEEPFPDTPNQGNLVVNVELLPLAYETFEPGPPDENAIELARVVDRSLRDSKAVDLSKLVIIPGKKVWTAWVDVYVLDYGGNVLDACTLAAVAALYNTKLPKVEIEGDNVKIIKEEKTDVTPIAYPVVTVTVAKIGKYLVVDPSLDEESIADVKISFSYVQDGRIVGMQKSNFGSLSLQEVDVAESLARSASQKLFEELKKQINM

SEQ ID NO: 17814 - protein, 274 aa, Pyrobaculum aerophilum str. IM2
MASISPYGKRFISYLRREQIRRLLATKYRVDGRGPEQTRNVEINVGVVKTADGSAEVKLGKTHVVAGVKVGLGQPFPDAPDEGVLVVNAEVLPHASPYTEVGPPDEFAIELARVVDRGIRHCGYVDFKKLAVEGGKAYVLWIDLYVINDDGNLIDVANLASVAALKNTQLPVVVKDEAGVVKLDRNNKAPLPVDISKAPIAVSVGKIGNVLFLDPTFEEELSLDGRITFTFSEDKIVAAQKTLGYFTQSEIEAALNLALRGRDRLLEALKSALK

SEQ ID NO: 17815 - protein, 312 aa, Anopheles gambiae str. PEST
FEISYKTSTMANVLLSEAEKTYILHGIQKNMRNDGRTNRDYRPMEFESEIVVHAAGSARLRLANTDILVGVKAEIDTPNPDRPNEGKVDFFIDCSANATPEFEGRGGEQLATEISNTLSKAYESQKGFDLAGLCIMAGHQCWKLYVDVLILECGGNLFDAVSLAVKGALFNTRIPRVSTAMHDGGSMDLILTDDPYDCERLDVTTAPILVTVCKIGDQCVVDPSAEEEECSVASVAVGVSCRPDGNTTTKQSITTVRTSGEGSIRLETLKKCFDTATTVGASLNKALMKALHEDETRNSKGLGKREIYGFLK

SEQ ID NO: 17816 - protein, 277 aa, Pyrococcus furiosus DSM 3638
MSNDEIVAGIMRDYILNLLKEKKRIDDRGFEDYRPIEVEVGVIEKAEGSALVKLGNTQVLVGIKATLGEPFPDTPNMGVMTTNVELVPLASPTFEPGPPDERAIELARVIDRGIRESRALNLEKMVIAPGKIVRVVFIDVHVLDHDGNLMDAIGIGAIAALLNARVPKVLYNEETGEVEILEEKEPLPVEKIPISVTFAKIGNYLVVDPTLEEEQIMDGRLTITTDETGHISAVQKSEGGAFKLEEVMYAVETAFKKAEEIRKIILNALEKANNSEE

SEQ ID NO: 17817 - protein, 266 aa, Methanosarcina acetivorans C2A
MKKMSEIIATLKKDYIYNLMIKGKRQDGRGFKDFRDLKLETNVIVKAEGSAKVTLGNTQVLVGVKLQTGTPFPDSQDEGVIITNLELNPIASPEFEPGPPREEAIEMARVVDRGIRESGAIDIKKLCITVGESVWIVFIDVHVLNDDGNIIDASCLAAIAALMTTMVPNEQQGLGEDVPLAMKEMPVGITIAKIGSKLMVDPSLDEEAVCETKLTIVSSSDGSVAGMQKMGISPLTEAELFEAIDLALEKAAELRGLYLEGLAKSE

SEQ ID NO: 17818 - protein, 266 aa, Methanosarcina mazei Goe1
MKKMSEIIATLKKDYIYNLMIKDKRQDGRGFKDFRELKLETNVISKAEGSAKVTLGNTQVLVGVKLQTGTPFPDSQDEGVIITNLELNPIASPEFEPGPPREDAIEMARVVDRGIRESGAIDIKKLCITVGESVWIVFIDVHILNNDGNIIDASCLAAIAALMTTMVPNEQQGLGENVPLAMKEMPVGITLAKIGSKLMVDPSLDEEAVCETKLTIVSSSDGSVAGMQKMGPVPLTEAELFEAIDMAIEKAAEIRGLYLEGLAKSE

SEQ ID NO: 17819 - protein, 263 aa, Methanosarcina barkeri
MKTMSEVIATLKKDYIYNLMIKGKRQDGRGFKDFRDIKLETNVIPKAEGSAKVTLGDTQVLVGVKLQPGTPFPDSQDEGVIITNLELNPIASPEFEPGPPREEAIEMARVVDRGIRESGAIDIKKLCISVGESVWIAYIDVHVLNDDGNIIDASSLAAIAALMTTIVPNEQHGIGADVPLAMKEMPVGVTLAKIGSKLMVDPSLDEGAVCETKLTVVSSSDGSVAGMQKMGTVPFTEAEVLEAIDMACEKAAEIRKLYLEALV
